United States Patent Application Publication US 2005/0255487 A1 - sequence listing, part 10

SEQ ID NO: 250488 - RNA, 19 nt, Homo sapiens
  misc_RNA (1)...(19): siRNA sense strand
gaagacucgcauccgaaug

SEQ ID NO: 250489 - RNA, 19 nt, Homo sapiens
  misc_RNA (1)...(19): siRNA sense strand
gucccugggugucaucaug

SEQ ID NO: 250490 - RNA, 19 nt, Homo sapiens
  misc_RNA (1)...(19): siRNA sense strand
cagagaaguaugacaaguc

SEQ ID NO: 250491 - RNA, 19 nt, Homo sapiens
  misc_RNA (1)...(19): siRNA sense strand
gcauccgaaugggccagua

SEQ ID NO: 250492 - RNA, 19 nt, Homo sapiens
  misc_RNA (1)...(19): siRNA sense strand
gccauccaguaucugcauu

SEQ ID NO: 250493 - RNA, 19 nt, Homo sapiens
  misc_RNA (1)...(19): siRNA sense strand
ugaauuucccaacccagaa

SEQ ID NO: 250494 - RNA, 19 nt, Homo sapiens
  misc_RNA (1)...(19): siRNA sense strand
aaugggccaguaugaauuu

SEQ ID NO: 250495 - RNA, 19 nt, Homo sapiens
  misc_RNA (1)...(19): siRNA sense strand
ggaggaagugccugcugau

SEQ ID NO: 250496 - RNA, 19 nt, Homo sapiens
  misc_RNA (1)...(19): siRNA sense strand
ugaagacucgcauccgaau

SEQ ID NO: 250497 - RNA, 19 nt, Homo sapiens
  misc_RNA (1)...(19): siRNA sense strand
uuugaccacuccuuguuau

SEQ ID NO: 250498 - RNA, 19 nt, Homo sapiens
  misc_RNA (1)...(19): siRNA sense strand
cauccaguaucugcauuca

SEQ ID NO: 250499 - RNA, 19 nt, Homo sapiens
  misc_RNA (1)...(19): siRNA sense strand
ggaugucaagccugagaau

SEQ ID NO: 250500 - RNA, 19 nt, Homo sapiens
  misc_RNA (1)...(19): siRNA sense strand
caacccagaauggucagaa

SEQ ID NO: 250501 - RNA, 19 nt, Homo sapiens
  misc_RNA (1)...(19): siRNA sense strand
guacuauguggcuccagaa

SEQ ID NO: 250502 - RNA, 19 nt, Homo sapiens
  misc_RNA (1)...(19): siRNA sense strand
guaucugcauucaaucaac

SEQ ID NO: 250503 - RNA, 19 nt, Homo sapiens
  misc_RNA (1)...(19): siRNA sense strand
gagaaauucgcccucaaaa

SEQ ID NO: 250504 - RNA, 19 nt, Homo sapiens
  misc_RNA (1)...(19): siRNA sense strand
acagagcccacccagagaa

SEQ ID NO: 250505 - RNA, 19 nt, Homo sapiens
  misc_RNA (1)...(19): siRNA sense strand
agaagaacgccaucaucga

SEQ ID NO: 250506 - RNA, 19 nt, Homo sapiens
  misc_RNA (1)...(19): siRNA sense strand
ccgaaaucaugaagagcau

SEQ ID NO: 250507 - RNA, 19 nt, Homo sapiens
  misc_RNA (1)...(19): siRNA sense strand
uccugaaacucacugacuu

SEQ ID NO: 250508 - RNA, 19 nt, Homo sapiens
  misc_RNA (1)...(19): siRNA sense strand
ggaagugccugcugauugu

SEQ ID NO: 250509 - RNA, 19 nt, Homo sapiens
  misc_RNA (1)...(19): siRNA sense strand
caacaaaggucccucaaac

SEQ ID NO: 250510 - RNA, 19 nt, Homo sapiens
  misc_RNA (1)...(19): siRNA sense strand
gaccaggcauucacagaaa

SEQ ID NO: 250511 - RNA, 19 nt, Homo sapiens
  misc_RNA (1)...(19): siRNA sense strand
gaaccacccuuggaucaug

SEQ ID NO: 250512 - RNA, 19 nt, Homo sapiens
  misc_RNA (1)...(19): siRNA sense strand
gaaugaccaucaccgaguu

SEQ ID NO: 250513 - RNA, 19 nt, Homo sapiens
  misc_RNA (1)...(19): siRNA sense strand
gaagaacgccaucaucgau

SEQ ID NO: 250514 - RNA, 19 nt, Homo sapiens
  misc_RNA (1)...(19): siRNA sense strand
ggagaaauucgcccucaaa

SEQ ID NO: 250515 - RNA, 19 nt, Homo sapiens
  misc_RNA (1)...(19): siRNA sense strand
gaaauucgcccucaaaaug

SEQ ID NO: 250516 - RNA, 19 nt, Homo sapiens
  misc_RNA (1)...(19): siRNA sense strand
gaaagagaagcauccgaaa

SEQ ID NO: 250517 - RNA, 19 nt, Homo sapiens
  misc_RNA (1)...(19): siRNA sense strand
gaagugaagaugcucauuc

SEQ ID NO: 250518 - RNA, 19 nt, Homo sapiens
  misc_RNA (1)...(19): siRNA sense strand
gaaugggccaguaugaauu

SEQ ID NO: 250519 - RNA, 19 nt, Homo sapiens
  misc_RNA (1)...(19): siRNA sense strand
ggacgguggagaacucuuu

SEQ ID NO: 250520 - RNA, 19 nt, Homo sapiens
  misc_RNA (1)...(19): siRNA sense strand
ugacaaguccugugacaug

SEQ ID NO: 250521 - RNA, 19 nt, Homo sapiens
  misc_RNA (1)...(19): siRNA sense strand
caagaggacccaggagaaa

SEQ ID NO: 250522 - RNA, 19 nt, Homo sapiens
  misc_RNA (1)...(19): siRNA sense strand
acgagcagaucaagauaaa

SEQ ID NO: 250523 - RNA, 19 nt, Homo sapiens
  misc_RNA (1)...(19): siRNA sense strand
ccacaaugcgcguugacua

SEQ ID NO: 250524 - RNA, 19 nt, Homo sapiens
  misc_RNA (1)...(19): siRNA sense strand
gggcaucaacggcaaaguu

SEQ ID NO: 250525 - RNA, 19 nt, Homo sapiens
  misc_RNA (1)...(19): siRNA sense strand
ccagaauggucagaaguau

SEQ ID NO: 250526 - RNA, 19 nt, Homo sapiens
  misc_RNA (1)...(19): siRNA sense strand
uccaguaucugcauucaau

SEQ ID NO: 250527 - RNA, 19 nt, Homo sapiens
  misc_RNA (1)...(19): siRNA sense strand
cuauguggcuccagaagug

SEQ ID NO: 250528 - RNA, 19 nt, Homo sapiens
  misc_RNA (1)...(19): siRNA sense strand
gcccaacgccauccugaaa

SEQ ID NO: 250529 - RNA, 19 nt, Homo sapiens
  misc_RNA (1)...(19): siRNA sense strand
cgaaugggccaguaugaau

SEQ ID NO: 250530 - RNA, 19 nt, Homo sapiens
  misc_RNA (1)...(19): siRNA sense strand
guuauacaccguacuaugu

SEQ ID NO: 250531 - RNA, 19 nt, Homo sapiens
  misc_RNA (1)...(19): siRNA sense strand
gaccacuccuuguuauaca

SEQ ID NO: 250532 - RNA, 19 nt, Homo sapiens
  misc_RNA (1)...(19): siRNA sense strand
ugauugucauggaauguuu

SEQ ID NO: 250533 - RNA, 19 nt, Homo sapiens
  misc_RNA (1)...(19): siRNA sense strand
gagcccacccagagaauga

SEQ ID NO: 250534 - RNA, 19 nt, Homo sapiens
  misc_RNA (1)...(19): siRNA sense strand
gccugcagaucaagaagaa

SEQ ID NO: 250535 - RNA, 19 nt, Homo sapiens
  misc_RNA (1)...(19): siRNA sense strand
gacaaguccugugacaugu

SEQ ID NO: 250536 - RNA, 19 nt, Homo sapiens
  misc_RNA (1)...(19): siRNA sense strand
ggcaucaacggcaaaguuu

SEQ ID NO: 250537 - RNA, 19 nt, Homo sapiens
  misc_RNA (1)...(19): siRNA sense strand
cauccgaaaucaugaagag

SEQ ID NO: 250538 - RNA, 19 nt, Homo sapiens
  misc_RNA (1)...(19): siRNA sense strand
ccaccagccacaacucuuu

SEQ ID NO: 250539 - RNA, 19 nt, Homo sapiens
  misc_RNA (1)...(19): siRNA sense strand
agaagcauccgaaaucaug

SEQ ID NO: 250540 - RNA, 19 nt, Homo sapiens
  misc_RNA (1)...(19): siRNA sense strand
caagaagaacgccaucauc

SEQ ID NO: 250541 - RNA, 19 nt, Homo sapiens
  misc_RNA (1)...(19): siRNA sense strand
aagagaagcauccgaaauc

SEQ ID NO: 250542 - RNA, 19 nt, Homo sapiens
  misc_RNA (1)...(19): siRNA sense strand
gaucaugcaaucaacaaag

SEQ ID NO: 250543 - RNA, 19 nt, Homo sapiens
  misc_RNA (1)...(19): siRNA sense strand
ucaccgaguuuaugaacca

SEQ ID NO: 250544 - RNA, 19 nt, Homo sapiens
  misc_RNA (1)...(19): siRNA sense strand
agaauggucagaaguauca

SEQ ID NO: 250545 - RNA, 19 nt, Homo sapiens
  misc_RNA (1)...(19): siRNA sense strand
agagaagcauccgaaauca

SEQ ID NO: 250546 - RNA, 19 nt, Homo sapiens
  misc_RNA (1)...(19): siRNA sense strand
gaccaucaccgaguuuaug

SEQ ID NO: 250547 - RNA, 19 nt, Homo sapiens
  misc_RNA (1)...(19): siRNA sense strand
ccagagaaguaugacaagu

SEQ ID NO: 250548 - RNA, 19 nt, Homo sapiens
  misc_RNA (1)...(19): siRNA sense strand
ccaacccucugcugcugaa

SEQ ID NO: 250549 - RNA, 19 nt, Homo sapiens
  misc_RNA (1)...(19): siRNA sense strand
guacggaucguggaugugu

SEQ ID NO: 250550 - RNA, 19 nt, Homo sapiens
  misc_RNA (1)...(19): siRNA sense strand
uaugacaaguccugugaca

SEQ ID NO: 250551 - RNA, 19 nt, Homo sapiens
  misc_RNA (1)...(19): siRNA sense strand
gaagcauccgaaaucauga

SEQ ID NO: 250552 - RNA, 19 nt, Homo sapiens
  misc_RNA (1)...(19): siRNA sense strand
aaagagaagcauccgaaau

SEQ ID NO: 250553 - RNA, 19 nt, Homo sapiens
  misc_RNA (1)...(19): siRNA sense strand
gugaggccauccaguaucu

SEQ ID NO: 250554 - RNA, 19 nt, Homo sapiens
  misc_RNA (1)...(19): siRNA sense strand
gaauuucccaacccagaau

SEQ ID NO: 250555 - RNA, 19 nt, Homo sapiens
  misc_RNA (1)...(19): siRNA sense strand
gacgguggagaacucuuua

SEQ ID NO: 250556 - RNA, 19 nt, Homo sapiens
  misc_RNA (1)...(19): siRNA sense strand
ucaacaaaggucccucaaa

SEQ ID NO: 250557 - RNA, 19 nt, Homo sapiens
  misc_RNA (1)...(19): siRNA sense strand
gaggaagugccugcugauu

SEQ ID NO: 250558 - RNA, 19 nt, Homo sapiens
  misc_RNA (1)...(19): siRNA sense strand
uaucugcauucaaucaaca

SEQ ID NO: 250559 - RNA, 19 nt, Homo sapiens
  misc_RNA (1)...(19): siRNA sense strand
acaagaggacccaggagaa

SEQ ID NO: 250560 - RNA, 19 nt, Homo sapiens
  misc_RNA (1)...(19): siRNA sense strand
ggcauucacagaaagagaa

SEQ ID NO: 250561 - RNA, 19 nt, Homo sapiens
  misc_RNA (1)...(19): siRNA sense strand
agaggacccaggagaaauu

SEQ ID NO: 250562 - RNA, 19 nt, Homo sapiens
  misc_RNA (1)...(19): siRNA sense strand
cagaggaagugaagaugcu

SEQ ID NO: 250563 - RNA, 19 nt, Homo sapiens
  misc_RNA (1)...(19): siRNA sense strand
uaucagaggaagugaagau

SEQ ID NO: 250564 - RNA, 19 nt, Homo sapiens
  misc_RNA (1)...(19): siRNA sense strand
gaaaccaccagccacaacu

SEQ ID NO: 250565 - RNA, 19 nt, Homo sapiens
  misc_RNA (1)...(19): siRNA sense strand
ccaacgccauccugaaacu

SEQ ID NO: 250566 - RNA, 19 nt, Homo sapiens
  misc_RNA (1)...(19): siRNA sense strand
gagaccaggcauucacaga

SEQ ID NO: 250567 - RNA, 19 nt, Homo sapiens
  misc_RNA (1)...(19): siRNA sense strand
ccagugccuuggccacaau

SEQ ID NO: 250568 - RNA, 19 nt, Homo sapiens
  misc_RNA (1)...(19): siRNA sense strand
ggaagugaagaugcucauu

SEQ ID NO: 250569 - RNA, 19 nt, Homo sapiens
  misc_RNA (1)...(19): siRNA sense strand
ucggugaggccauccagua

SEQ ID NO: 250570 - RNA, 19 nt, Homo sapiens
  misc_RNA (1)...(19): siRNA sense strand
cuacgagcagaucaagaua

SEQ ID NO: 250571 - RNA, 19 nt, Homo sapiens
  misc_RNA (1)...(19): siRNA sense strand
cccagaauggucagaagua

SEQ ID NO: 250572 - RNA, 19 nt, Homo sapiens
  misc_RNA (1)...(19): siRNA sense strand
guccagagaaguaugacaa

SEQ ID NO: 250573 - RNA, 19 nt, Homo sapiens
  misc_RNA (1)...(19): siRNA sense strand
ggaaaccaccagccacaac

SEQ ID NO: 250574 - RNA, 19 nt, Homo sapiens
  misc_RNA (1)...(19): siRNA sense strand
caaugcgcguugacuacga

SEQ ID NO: 250575 - RNA, 19 nt, Homo sapiens
  misc_RNA (1)...(19): siRNA sense strand
agaccaggcauucacagaa

SEQ ID NO: 250576 - RNA, 19 nt, Homo sapiens
  misc_RNA (1)...(19): siRNA sense strand
ggaucaugcaaucaacaaa

SEQ ID NO: 250577 - RNA, 19 nt, Homo sapiens
  misc_RNA (1)...(19): siRNA sense strand
ccacggccuugccaucucu

SEQ ID NO: 250578 - RNA, 19 nt, Homo sapiens
  misc_RNA (1)...(19): siRNA sense strand
ccugaaacucacugacuuu

SEQ ID NO: 250579 - RNA, 19 nt, Homo sapiens
  misc_RNA (1)...(19): siRNA sense strand
gagaagcauccgaaaucau

SEQ ID NO: 250580 - RNA, 19 nt, Homo sapiens
  misc_RNA (1)...(19): siRNA sense strand
aggaagugccugcugauug

SEQ ID NO: 250581 - RNA, 19 nt, Homo sapiens
  misc_RNA (1)...(19): siRNA sense strand
ucaagaagaacgccaucau

SEQ ID NO: 250582 - RNA, 19 nt, Homo sapiens
  misc_RNA (1)...(19): siRNA sense strand
agaaguaucagaggaagug

SEQ ID NO: 250583 - RNA, 19 nt, Homo sapiens
  misc_RNA (1)...(19): siRNA sense strand
gaagacucgcauccgaaug

SEQ ID NO: 250584 - RNA, 19 nt, Homo sapiens
  misc_RNA (1)...(19): siRNA sense strand
gucccugggugucaucaug

SEQ ID NO: 250585 - RNA, 19 nt, Homo sapiens
  misc_RNA (1)...(19): siRNA sense strand
cagagaaguaugacaaguc

SEQ ID NO: 250586 - RNA, 19 nt, Homo sapiens
  misc_RNA (1)...(19): siRNA sense strand
gcauccgaaugggccagua

SEQ ID NO: 250587 - RNA, 19 nt, Homo sapiens
  misc_RNA (1)...(19): siRNA sense strand
gccauccaguaucugcauu

SEQ ID NO: 250588 - RNA, 19 nt, Homo sapiens
  misc_RNA (1)...(19): siRNA sense strand
ugaauuucccaacccagaa

SEQ ID NO: 250589 - RNA, 19 nt, Homo sapiens
  misc_RNA (1)...(19): siRNA sense strand
aaugggccaguaugaauuu

SEQ ID NO: 250590 - RNA, 19 nt, Homo sapiens
  misc_RNA (1)...(19): siRNA sense strand
ugaagacucgcauccgaau

SEQ ID NO: 250591 - RNA, 19 nt, Homo sapiens
  misc_RNA (1)...(19): siRNA sense strand
ggaggaagugccugcugau

SEQ ID NO: 250592 - RNA, 19 nt, Homo sapiens
  misc_RNA (1)...(19): siRNA sense strand
uuugaccacuccuuguuau

SEQ ID NO: 250593 - RNA, 19 nt, Homo sapiens
  misc_RNA (1)...(19): siRNA sense strand
cauccaguaucugcauuca

SEQ ID NO: 250594 - RNA, 19 nt, Homo sapiens
  misc_RNA (1)...(19): siRNA sense strand
ggaugucaagccugagaau

SEQ ID NO: 250595 - RNA, 19 nt, Homo sapiens
  misc_RNA (1)...(19): siRNA sense strand
ugaagaggcggaagaaagc

SEQ ID NO: 250596 - RNA, 19 nt, Homo sapiens
  misc_RNA (1)...(19): siRNA sense strand
cugaagaggcggaagaaag

SEQ ID NO: 250597 - RNA, 19 nt, Homo sapiens
  misc_RNA (1)...(19): siRNA sense strand
caacccagaauggucagaa

SEQ ID NO: 250598 - RNA, 19 nt, Homo sapiens
  misc_RNA (1)...(19): siRNA sense strand
guacuauguggcuccagaa

SEQ ID NO: 250599 - RNA, 19 nt, Homo sapiens
  misc_RNA (1)...(19): siRNA sense strand
guaucugcauucaaucaac

SEQ ID NO: 250600 - RNA, 19 nt, Homo sapiens
  misc_RNA (1)...(19): siRNA sense strand
uacgagcagaucaagauaa

SEQ ID NO: 250601 - RNA, 19 nt, Homo sapiens
  misc_RNA (1)...(19): siRNA sense strand
acagagcccacccagagaa

SEQ ID NO: 250602 - RNA, 19 nt, Homo sapiens
  misc_RNA (1)...(19): siRNA sense strand
agaagaacgccaucaucga

SEQ ID NO: 250603 - RNA, 19 nt, Homo sapiens
  misc_RNA (1)...(19): siRNA sense strand
gagaaauucgcccucaaaa

SEQ ID NO: 250604 - RNA, 19 nt, Homo sapiens
  misc_RNA (1)...(19): siRNA sense strand
ccgaaaucaugaagagcau

SEQ ID NO: 250605 - RNA, 19 nt, Homo sapiens
  misc_RNA (1)...(19): siRNA sense strand
uccugaaacucacugacuu

SEQ ID NO: 250606 - RNA, 19 nt, Homo sapiens
  misc_RNA (1)...(19): siRNA sense strand
gaaaugagcccuucaagau

SEQ ID NO: 250607 - RNA, 19 nt, Homo sapiens
  misc_RNA (1)...(19): siRNA sense strand
ggaagaaguucaacaugga

SEQ ID NO: 250608 - RNA, 19 nt, Homo sapiens
  misc_RNA (1)...(19): siRNA sense strand
ggauggagcuggagaacau

SEQ ID NO: 250609 - RNA, 19 nt, Homo sapiens
  misc_RNA (1)...(19): siRNA sense strand
ggauuucagucaagaagaa

SEQ ID NO: 250610 - RNA, 19 nt, Homo sapiens
  misc_RNA (1)...(19): siRNA sense strand
gaacugcuuugaacuuuac

SEQ ID NO: 250611 - RNA, 19 nt, Homo sapiens
  misc_RNA (1)...(19): siRNA sense strand
cgaacugcuuugaacuuua

SEQ ID NO: 250612 - RNA, 19 nt, Homo sapiens
  misc_RNA (1)...(19): siRNA sense strand
caacaccagucuccacaau

SEQ ID NO: 250613 - RNA, 19 nt, Homo sapiens
  misc_RNA (1)...(19): siRNA sense strand
gaacacacccgaggagauc

SEQ ID NO: 250614 - RNA, 19 nt, Homo sapiens
  misc_RNA (1)...(19): siRNA sense strand
caacugccucuacuacuuu

SEQ ID NO: 250615 - RNA, 19 nt, Homo sapiens
  misc_RNA (1)...(19): siRNA sense strand
uggcagugcuccaugcuuu

SEQ ID NO: 250616 - RNA, 19 nt, Homo sapiens
  misc_RNA (1)...(19): siRNA sense strand
gcaaugggcaggaagaagu

SEQ ID NO: 250617 - RNA, 19 nt, Homo sapiens
  misc_RNA (1)...(19): siRNA sense strand
aaaccgaacugcuuugaac

SEQ ID NO: 250618 - RNA, 19 nt, Homo sapiens
  misc_RNA (1)...(19): siRNA sense strand
aaugagcccuucaagauuc

SEQ ID NO: 250619 - RNA, 19 nt, Homo sapiens
  misc_RNA (1)...(19): siRNA sense strand
gcaggaagaaguucaacau

SEQ ID NO: 250620 - RNA, 19 nt, Homo sapiens
  misc_RNA (1)...(19): siRNA sense strand
ccgaacugcuuugaacuuu

SEQ ID NO: 250621 - RNA, 19 nt, Homo sapiens
  misc_RNA (1)...(19): siRNA sense strand
acaacugccucuacuacuu

SEQ ID NO: 250622 - RNA, 19 nt, Homo sapiens
  misc_RNA (1)...(19): siRNA sense strand
cgaaaugagcccuucaaga

SEQ ID NO: 250623 - RNA, 19 nt, Homo sapiens
  misc_RNA (1)...(19): siRNA sense strand
ggaaaccgaacugcuuuga

SEQ ID NO: 250624 - RNA, 19 nt, Homo sapiens
  misc_RNA (1)...(19): siRNA sense strand
gaaaccgaacugcuuugaa

SEQ ID NO: 250625 - RNA, 19 nt, Homo sapiens
  misc_RNA (1)...(19): siRNA sense strand
ccacagacacgugcuaugu

SEQ ID NO: 250626 - RNA, 19 nt, Homo sapiens
  misc_RNA (1)...(19): siRNA sense strand
gagaaggacgaguggauca

SEQ ID NO: 250627 - RNA, 19 nt, Homo sapiens
  misc_RNA (1)...(19): siRNA sense strand
aaaugagcccuucaagauu

SEQ ID NO: 250628 - RNA, 19 nt, Homo sapiens
  misc_RNA (1)...(19): siRNA sense strand
gcugguuuauccucacaga

SEQ ID NO: 250629 - RNA, 19 nt, Homo sapiens
  misc_RNA (1)...(19): siRNA sense strand
gcucaucaaagccugcaaa

SEQ ID NO: 250630 - RNA, 19 nt, Homo sapiens
  misc_RNA (1)...(19): siRNA sense strand
ggagaggcccagaaaauug

SEQ ID NO: 250631 - RNA, 19 nt, Homo sapiens
  misc_RNA (1)...(19): siRNA sense strand
ggagagggaagaacugaac

SEQ ID NO: 250632 - RNA, 19 nt, Homo sapiens
  misc_RNA (1)...(19): siRNA sense strand
gccgagugguggagggaaa

SEQ ID NO: 250633 - RNA, 19 nt, Homo sapiens
  misc_RNA (1)...(19): siRNA sense strand
gguuuauccucacagacaa

SEQ ID NO: 250634 - RNA, 19 nt, Homo sapiens
  misc_RNA (1)...(19): siRNA sense strand
ccacgcaggaggagaagga

SEQ ID NO: 250635 - RNA, 19 nt, Homo sapiens
  misc_RNA (1)...(19): siRNA sense strand
acagacaacugccucuacu

SEQ ID NO: 250636 - RNA, 19 nt, Homo sapiens
  misc_RNA (1)...(19): siRNA sense strand
gccaaugagggcaguaaga

SEQ ID NO: 250637 - RNA, 19 nt, Homo sapiens
  misc_RNA (1)...(19): siRNA sense strand
guccuucgccgucaucaug

SEQ ID NO: 250638 - RNA, 19 nt, Homo sapiens
  misc_RNA (1)...(19): siRNA sense strand
uacgacagcauccgaaaug

SEQ ID NO: 250639 - RNA, 19 nt, Homo sapiens
  misc_RNA (1)...(19): siRNA sense strand
guacgacagcauccgaaau

SEQ ID NO: 250640 - RNA, 19 nt, Homo sapiens
  misc_RNA (1)...(19): siRNA sense strand
uuguggaucugcaugaguu

SEQ ID NO: 250641 - RNA, 19 nt, Homo sapiens
  misc_RNA (1)...(19): siRNA sense strand
gaaggacgaguggaucaag

SEQ ID NO: 250642 - RNA, 19 nt, Homo sapiens
  misc_RNA (1)...(19): siRNA sense strand
ccggaaaccgaacugcuuu

SEQ ID NO: 250643 - RNA, 19 nt, Homo sapiens
  misc_RNA (1)...(19): siRNA sense strand
caaugggcaggaagaaguu

SEQ ID NO: 250644 - RNA, 19 nt, Homo sapiens
  misc_RNA (1)...(19): siRNA sense strand
caucaaagccugcaaaacu

SEQ ID NO: 250645 - RNA, 19 nt, Homo sapiens
  misc_RNA (1)...(19): siRNA sense strand
gaaccuggcagugcuccau

SEQ ID NO: 250646 - RNA, 19 nt, Homo sapiens
  misc_RNA (1)...(19): siRNA sense strand
aagcggauuucagucaaga

SEQ ID NO: 250647 - RNA, 19 nt, Homo sapiens
  misc_RNA (1)...(19): siRNA sense strand
aaauugaccggaugaugga

SEQ ID NO: 250648 - RNA, 19 nt, Homo sapiens
  misc_RNA (1)...(19): siRNA sense strand
gaaaauugaccggaugaug

SEQ ID NO: 250649 - RNA, 19 nt, Homo sapiens
  misc_RNA (1)...(19): siRNA sense strand
caguuucuauggagcuuuc

SEQ ID NO: 250650 - RNA, 19 nt, Homo sapiens
  misc_RNA (1)...(19): siRNA sense strand
gcccucaggcaguuucuau

SEQ ID NO: 250651 - RNA, 19 nt, Homo sapiens
  misc_RNA (1)...(19): siRNA sense strand
gcgcugguuuauccucaca

SEQ ID NO: 250652 - RNA, 19 nt, Homo sapiens
  misc_RNA (1)...(19): siRNA sense strand
gcaacggaaccggaagaug

SEQ ID NO: 250653 - RNA, 19 nt, Homo sapiens
  misc_RNA (1)...(19): siRNA sense strand
agacaacugccucuacuac

SEQ ID NO: 250654 - RNA, 19 nt, Homo sapiens
  misc_RNA (1)...(19): siRNA sense strand
ucacagacaacugccucua

SEQ ID NO: 250655 - RNA, 19 nt, Homo sapiens
  misc_RNA (1)...(19): siRNA sense strand
acaccagucuccacaaucc

SEQ ID NO: 250656 - RNA, 19 nt, Homo sapiens
  misc_RNA (1)...(19): siRNA sense strand
caggaagaaguucaacaug

SEQ ID NO: 250657 - RNA, 19 nt, Homo sapiens
  misc_RNA (1)...(19): siRNA sense strand
gagaggcccagaaaauuga

SEQ ID NO: 250658 - RNA, 19 nt, Homo sapiens
  misc_RNA (1)...(19): siRNA sense strand
cgugcuaugugcuguccuu

SEQ ID NO: 250659 - RNA, 19 nt, Homo sapiens
  misc_RNA (1)...(19): siRNA sense strand
cagacaacugccucuacua

SEQ ID NO: 250660 - RNA, 19 nt, Homo sapiens
  misc_RNA (1)...(19): siRNA sense strand
gaaaugagcccuucaagau

SEQ ID NO: 250661 - RNA, 19 nt, Homo sapiens
  misc_RNA (1)...(19): siRNA sense strand
ggaagaaguucaacaugga

SEQ ID NO: 250662 - RNA, 19 nt, Homo sapiens
  misc_RNA (1)...(19): siRNA sense strand
ggauggagcuggagaacau

SEQ ID NO: 250663 - RNA, 19 nt, Homo sapiens
  misc_RNA (1)...(19): siRNA sense strand
ggauuucagucaagaagaa

SEQ ID NO: 250664 - RNA, 19 nt, Homo sapiens
  misc_RNA (1)...(19): siRNA sense strand
gaacugcuuugaacuuuac

SEQ ID NO: 250665 - RNA, 19 nt, Homo sapiens
  misc_RNA (1)...(19): siRNA sense strand
cgaacugcuuugaacuuua

SEQ ID NO: 250666 - RNA, 19 nt, Homo sapiens
  misc_RNA (1)...(19): siRNA sense strand
caacaccagucuccacaau

SEQ ID NO: 250667 - RNA, 19 nt, Homo sapiens
  misc_RNA (1)...(19): siRNA sense strand
gaacacacccgaggagauc

SEQ ID NO: 250668 - RNA, 19 nt, Homo sapiens
  misc_RNA (1)...(19): siRNA sense strand
caacugccucuacuacuuu

SEQ ID NO: 250669 - RNA, 19 nt, Homo sapiens
  misc_RNA (1)...(19): siRNA sense strand
uggcagugcuccaugcuuu

SEQ ID NO: 250670 - RNA, 19 nt, Homo sapiens
  misc_RNA (1)...(19): siRNA sense strand
gcaaugggcaggaagaagu

SEQ ID NO: 250671 - RNA, 19 nt, Homo sapiens
  misc_RNA (1)...(19): siRNA sense strand
aaaccgaacugcuuugaac

SEQ ID NO: 250672 - RNA, 19 nt, Homo sapiens
  misc_RNA (1)...(19): siRNA sense strand
aaugagcccuucaagauuc

SEQ ID NO: 250673 - RNA, 19 nt, Homo sapiens
  misc_RNA (1)...(19): siRNA sense strand
gcaggaagaaguucaacau

SEQ ID NO: 250674 - RNA, 19 nt, Homo sapiens
  misc_RNA (1)...(19): siRNA sense strand
ccgaacugcuuugaacuuu

SEQ ID NO: 250675 - RNA, 19 nt, Homo sapiens
  misc_RNA (1)...(19): siRNA sense strand
acaacugccucuacuacuu

SEQ ID NO: 250676 - RNA, 19 nt, Homo sapiens
  misc_RNA (1)...(19): siRNA sense strand
cgaaaugagcccuucaaga

SEQ ID NO: 250677 - RNA, 19 nt, Homo sapiens
  misc_RNA (1)...(19): siRNA sense strand
ggaaaccgaacugcuuuga

SEQ ID NO: 250678 - RNA, 19 nt, Homo sapiens
  misc_RNA (1)...(19): siRNA sense strand
gaaaccgaacugcuuugaa

SEQ ID NO: 250679 - RNA, 19 nt, Homo sapiens
  misc_RNA (1)...(19): siRNA sense strand
ccacagacacgugcuaugu

SEQ ID NO: 250680 - RNA, 19 nt, Homo sapiens
  misc_RNA (1)...(19): siRNA sense strand
gagaaggacgaguggauca

SEQ ID NO: 250681 - RNA, 19 nt, Homo sapiens
  misc_RNA (1)...(19): siRNA sense strand
aaaugagcccuucaagauu

SEQ ID NO: 250682 - RNA, 19 nt, Homo sapiens
  misc_RNA (1)...(19): siRNA sense strand
gcugguuuauccucacaga

SEQ ID NO: 250683 - RNA, 19 nt, Homo sapiens
  misc_RNA (1)...(19): siRNA sense strand
gcucaucaaagccugcaaa

SEQ ID NO: 250684 - RNA, 19 nt, Homo sapiens
  misc_RNA (1)...(19): siRNA sense strand
ggagaggcccagaaaauug

SEQ ID NO: 250685 - RNA, 19 nt, Homo sapiens
  misc_RNA (1)...(19): siRNA sense strand
ggagagggaagaacugaac

SEQ ID NO: 250686 - RNA, 19 nt, Homo sapiens
  misc_RNA (1)...(19): siRNA sense strand
gccgagugguggagggaaa

SEQ ID NO: 250687 - RNA, 19 nt, Homo sapiens
  misc_RNA (1)...(19): siRNA sense strand
gguuuauccucacagacaa

SEQ ID NO: 250688 - RNA, 19 nt, Homo sapiens
  misc_RNA (1)...(19): siRNA sense strand
ccacgcaggaggagaagga

SEQ ID NO: 250689 - RNA, 19 nt, Homo sapiens
  misc_RNA (1)...(19): siRNA sense strand
acagacaacugccucuacu

SEQ ID NO: 250690 - RNA, 19 nt, Homo sapiens
  misc_RNA (1)...(19): siRNA sense strand
gccaaugagggcaguaaga

SEQ ID NO: 250691 - RNA, 19 nt, Homo sapiens
  misc_RNA (1)...(19): siRNA sense strand
guccuucgccgucaucaug

SEQ ID NO: 250692 - RNA, 19 nt, Homo sapiens
  misc_RNA (1)...(19): siRNA sense strand
uacgacagcauccgaaaug

SEQ ID NO: 250693 - RNA, 19 nt, Homo sapiens
  misc_RNA (1)...(19): siRNA sense strand
guacgacagcauccgaaau

SEQ ID NO: 250694 - RNA, 19 nt, Homo sapiens
  misc_RNA (1)...(19): siRNA sense strand
uuguggaucugcaugaguu

SEQ ID NO: 250695 - RNA, 19 nt, Homo sapiens
  misc_RNA (1)...(19): siRNA sense strand
gaaggacgaguggaucaag

SEQ ID NO: 250696 - RNA, 19 nt, Homo sapiens
  misc_RNA (1)...(19): siRNA sense strand
ccggaaaccgaacugcuuu

SEQ ID NO: 250697 - RNA, 19 nt, Homo sapiens
  misc_RNA (1)...(19): siRNA sense strand
caaugggcaggaagaaguu

SEQ ID NO: 250698 - RNA, 19 nt, Homo sapiens
  misc_RNA (1)...(19): siRNA sense strand
caucaaagccugcaaaacu

SEQ ID NO: 250699 - RNA, 19 nt, Homo sapiens
  misc_RNA (1)...(19): siRNA sense strand
gaaccuggcagugcuccau

SEQ ID NO: 250700 - RNA, 19 nt, Homo sapiens
  misc_RNA (1)...(19): siRNA sense strand
aagcggauuucagucaaga

SEQ ID NO: 250701 - RNA, 19 nt, Homo sapiens
  misc_RNA (1)...(19): siRNA sense strand
aaauugaccggaugaugga

SEQ ID NO: 250702 - RNA, 19 nt, Homo sapiens
  misc_RNA (1)...(19): siRNA sense strand
gaaaauugaccggaugaug

SEQ ID NO: 250703 - RNA, 19 nt, Homo sapiens
  misc_RNA (1)...(19): siRNA sense strand
caguuucuauggagcuuuc

SEQ ID NO: 250704 - RNA, 19 nt, Homo sapiens
  misc_RNA (1)...(19): siRNA sense strand
gcccucaggcaguuucuau

SEQ ID NO: 250705 - RNA, 19 nt, Homo sapiens
  misc_RNA (1)...(19): siRNA sense strand
gcgcugguuuauccucaca

SEQ ID NO: 250706 - RNA, 19 nt, Homo sapiens
  misc_RNA (1)...(19): siRNA sense strand
gcaacggaaccggaagaug

SEQ ID NO: 250707 - RNA, 19 nt, Homo sapiens
  misc_RNA (1)...(19): siRNA sense strand
agacaacugccucuacuac

SEQ ID NO: 250708 - RNA, 19 nt, Homo sapiens
  misc_RNA (1)...(19): siRNA sense strand
ucacagacaacugccucua

SEQ ID NO: 250709 - RNA, 19 nt, Homo sapiens
  misc_RNA (1)...(19): siRNA sense strand
acaccagucuccacaaucc

SEQ ID NO: 250710 - RNA, 19 nt, Homo sapiens
  misc_RNA (1)...(19): siRNA sense strand
caggaagaaguucaacaug

SEQ ID NO: 250711 - RNA, 19 nt, Homo sapiens
  misc_RNA (1)...(19): siRNA sense strand
gagaggcccagaaaauuga

SEQ ID NO: 250712 - RNA, 19 nt, Homo sapiens
  misc_RNA (1)...(19): siRNA sense strand
cgugcuaugugcuguccuu

SEQ ID NO: 250713 - RNA, 19 nt, Homo sapiens
  misc_RNA (1)...(19): siRNA sense strand
cagacaacugccucuacua

SEQ ID NO: 250714 - RNA, 19 nt, Homo sapiens
  misc_RNA (1)...(19): siRNA sense strand
cgagaaggcuggcuauuga

SEQ ID NO: 250715 - RNA, 19 nt, Homo sapiens
  misc_RNA (1)...(19): siRNA sense strand
gaacacuugugaagacauu

SEQ ID NO: 250716 - RNA, 19 nt, Homo sapiens
  misc_RNA (1)...(19): siRNA sense strand
ggagagagaugaguuuaau

SEQ ID NO: 250717 - RNA, 19 nt, Homo sapiens
  misc_RNA (1)...(19): siRNA sense strand
gaagaacacuugugaagac

SEQ ID NO: 250718 - RNA, 19 nt, Homo sapiens
  misc_RNA (1)...(19): siRNA sense strand
caacugccuuuacuacuuu

SEQ ID NO: 250719 - RNA, 19 nt, Homo sapiens
  misc_RNA (1)...(19): siRNA sense strand
ggaaucaucccuuuagaga

SEQ ID NO: 250720 - RNA, 19 nt, Homo sapiens
  misc_RNA (1)...(19): siRNA sense strand
gacaauaaagaccaaguua

SEQ ID NO: 250721 - RNA, 19 nt, Homo sapiens
  misc_RNA (1)...(19): siRNA sense strand
gguaaagacuuggaagaga

SEQ ID NO: 250722 - RNA, 19 nt, Homo sapiens
  misc_RNA (1)...(19): siRNA sense strand
gaagagacgcugguucauu

SEQ ID NO: 250723 - RNA, 19 nt, Homo sapiens
  misc_RNA (1)...(19): siRNA sense strand
agaacgaccuccugaagaa

SEQ ID NO: 250724 - RNA, 19 nt, Homo sapiens
  misc_RNA (1)...(19): siRNA sense strand
gugaagacauugcccaguu

SEQ ID NO: 250725 - RNA, 19 nt, Homo sapiens
  misc_RNA (1)...(19): siRNA sense strand
gcgaagggcucaacaagac

SEQ ID NO: 250726 - RNA, 19 nt, Homo sapiens
  misc_RNA (1)...(19): siRNA sense strand
gagaugaguuuaauaucca

SEQ ID NO: 250727 - RNA, 19 nt, Homo sapiens
  misc_RNA (1)...(19): siRNA sense strand
gcagaaguagcuaaugaaa

SEQ ID NO: 250728 - RNA, 19 nt, Homo sapiens
  misc_RNA (1)...(19): siRNA sense strand
aaucaucccuuuagagaau

SEQ ID NO: 250729 - RNA, 19 nt, Homo sapiens
  misc_RNA (1)...(19): siRNA sense strand
ugaguucacugaucuuaau

SEQ ID NO: 250730 - RNA, 19 nt, Homo sapiens
  misc_RNA (1)...(19): siRNA sense strand
gagaaggaggaguggauua

SEQ ID NO: 250731 - RNA, 19 nt, Homo sapiens
  misc_RNA (1)...(19): siRNA sense strand
gucaagaacuggagaacau

SEQ ID NO: 250732 - RNA, 19 nt, Homo sapiens
  misc_RNA (1)...(19): siRNA sense strand
aagagacgcugguucauuc

SEQ ID NO: 250733 - RNA, 19 nt, Homo sapiens
  misc_RNA (1)...(19): siRNA sense strand
agacauugcccaguucuua

SEQ ID NO: 250734 - RNA, 19 nt, Homo sapiens
  misc_RNA (1)...(19): siRNA sense strand
gcagaggaacaaacaggua

SEQ ID NO: 250735 - RNA, 19 nt, Homo sapiens
  misc_RNA (1)...(19): siRNA sense strand
gcccaguucuuauauaaag

SEQ ID NO: 250736 - RNA, 19 nt, Homo sapiens
  misc_RNA (1)...(19): siRNA sense strand
gaagaucgaccggaugaug

SEQ ID NO: 250737 - RNA, 19 nt, Homo sapiens
  misc_RNA (1)...(19): siRNA sense strand
gggauccaguucuuaauag

SEQ ID NO: 250738 - RNA, 19 nt, Homo sapiens
  misc_RNA (1)...(19): siRNA sense strand
acaacugccuuuacuacuu

SEQ ID NO: 250739 - RNA, 19 nt, Homo sapiens
  misc_RNA (1)...(19): siRNA sense strand
gagaacgaccuccugaaga

SEQ ID NO: 250740 - RNA, 19 nt, Homo sapiens
  misc_RNA (1)...(19): siRNA sense strand
ggauccaguucuuaauaga

SEQ ID NO: 250741 - RNA, 19 nt, Homo sapiens
  misc_RNA (1)...(19): siRNA sense strand
gagagagaugaguuuaaua

SEQ ID NO: 250742 - RNA, 19 nt, Homo sapiens
  misc_RNA (1)...(19): siRNA sense strand
ccagguucuucaugcauuu

SEQ ID NO: 250743 - RNA, 19 nt, Homo sapiens
  misc_RNA (1)...(19): siRNA sense strand
ugaccucacucacacuuuc

SEQ ID NO: 250744 - RNA, 19 nt, Homo sapiens
  misc_RNA (1)...(19): siRNA sense strand
gaacaccagucugcacaac

SEQ ID NO: 250745 - RNA, 19 nt, Homo sapiens
  misc_RNA (1)...(19): siRNA sense strand
cagaagaucgaccggauga

SEQ ID NO: 250746 - RNA, 19 nt, Homo sapiens
  misc_RNA (1)...(19): siRNA sense strand
gggaaugaccucacucaca

SEQ ID NO: 250747 - RNA, 19 nt, Homo sapiens
  misc_RNA (1)...(19): siRNA sense strand
gggagagagaugaguuuaa

SEQ ID NO: 250748 - RNA, 19 nt, Homo sapiens
  misc_RNA (1)...(19): siRNA sense strand
gcugguucauucugacuga

SEQ ID NO: 250749 - RNA, 19 nt, Homo sapiens
  misc_RNA (1)...(19): siRNA sense strand
gcugaaggaugagauagca

SEQ ID NO: 250750 - RNA, 19 nt, Homo sapiens
  misc_RNA (1)...(19): siRNA sense strand
ugaagacauugcccaguuc

SEQ ID NO: 250751 - RNA, 19 nt, Homo sapiens
  misc_RNA (1)...(19): siRNA sense strand
acagcuacguucccaguga

SEQ ID NO: 250752 - RNA, 19 nt, Homo sapiens
  misc_RNA (1)...(19): siRNA sense strand
uugcccaguucuuauauaa

SEQ ID NO: 250753 - RNA, 19 nt, Homo sapiens
  misc_RNA (1)...(19): siRNA sense strand
aaacugcuuugagcuuuau

SEQ ID NO: 250754 - RNA, 19 nt, Homo sapiens
  misc_RNA (1)...(19): siRNA sense strand
ucaaagauaagcccacugu

SEQ ID NO: 250755 - RNA, 19 nt, Homo sapiens
  misc_RNA (1)...(19): siRNA sense strand
gugcaauaauggcguguuc

SEQ ID NO: 250756 - RNA, 19 nt, Homo sapiens
  misc_RNA (1)...(19): siRNA sense strand
gaaucaucccuuuagagaa

SEQ ID NO: 250757 - RNA, 19 nt, Homo sapiens
  misc_RNA (1)...(19): siRNA sense strand
agacgcugguucauucuga

SEQ ID NO: 250758 - RNA, 19 nt, Homo sapiens
  misc_RNA (1)...(19): siRNA sense strand
gcacaaccccaaugucaaa

SEQ ID NO: 250759 - RNA, 19 nt, Homo sapiens
  misc_RNA (1)...(19): siRNA sense strand
ggaggacgacagcuacguu

SEQ ID NO: 250760 - RNA, 19 nt, Homo sapiens
  misc_RNA (1)...(19): siRNA sense strand
ugacugacaacugccuuua

SEQ ID NO: 250761 - RNA, 19 nt, Homo sapiens
  misc_RNA (1)...(19): siRNA sense strand
gcccagcgauauugucagu

SEQ ID NO: 250762 - RNA, 19 nt, Homo sapiens
  misc_RNA (1)...(19): siRNA sense strand
ggaugagauagcagaagua

SEQ ID NO: 250763 - RNA, 19 nt, Homo sapiens
  misc_RNA (1)...(19): siRNA sense strand
gaguggauuaagugcauua

SEQ ID NO: 250764 - RNA, 19 nt, Homo sapiens
  misc_RNA (1)...(19): siRNA sense strand
agaaggaggaguggauuaa

SEQ ID NO: 250765 - RNA, 19 nt, Homo sapiens
  misc_RNA (1)...(19): siRNA sense strand
ggagaaggaggaguggauu

SEQ ID NO: 250766 - RNA, 19 nt, Homo sapiens
  misc_RNA (1)...(19): siRNA sense strand
cgacaauaaagaccaaguu

SEQ ID NO: 250767 - RNA, 19 nt, Homo sapiens
  misc_RNA (1)...(19): siRNA sense strand
agacagccaucggcgacua

SEQ ID NO: 250768 - RNA, 19 nt, Homo sapiens
  misc_RNA (1)...(19): siRNA sense strand
ugagauagcagaaguagcu

SEQ ID NO: 250769 - RNA, 19 nt, Homo sapiens
  misc_RNA (1)...(19): siRNA sense strand
gaaggaugagauagcagaa

SEQ ID NO: 250770 - RNA, 19 nt, Homo sapiens
  misc_RNA (1)...(19): siRNA sense strand
ugaagaacacuugugaaga

SEQ ID NO: 250771 - RNA, 19 nt, Homo sapiens
  misc_RNA (1)...(19): siRNA sense strand
ggaguggauuaagugcauu

SEQ ID NO: 250772 - RNA, 19 nt, Homo sapiens
  misc_RNA (1)...(19): siRNA sense strand
guggaaucaucccuuuaga

SEQ ID NO: 250773 - RNA, 19 nt, Homo sapiens
  misc_RNA (1)...(19): siRNA sense strand
gaggcugaaggaugagaua

SEQ ID NO: 250774 - RNA, 19 nt, Homo sapiens
  misc_RNA (1)...(19): siRNA sense strand
gagaaggcuggcuauugaa

SEQ ID NO: 250775 - RNA, 19 nt, Homo sapiens
  misc_RNA (1)...(19): siRNA sense strand
cagaagacgacgggaauga

SEQ ID NO: 250776 - RNA, 19 nt, Homo sapiens
  misc_RNA (1)...(19): siRNA sense strand
caugaguucacugaucuua

SEQ ID NO: 250777 - RNA, 19 nt, Homo sapiens
  misc_RNA (1)...(19): siRNA sense strand
agagaugaguuuaauaucc

SEQ ID NO: 250778 - RNA, 19 nt, Homo sapiens
  misc_RNA (1)...(19): siRNA sense strand
gaaguagcuaaugaaauug

SEQ ID NO: 250779 - RNA, 19 nt, Homo sapiens
  misc_RNA (1)...(19): siRNA sense strand
aaggaggaguggauuaagu

SEQ ID NO: 250780 - RNA, 19 nt, Homo sapiens
  misc_RNA (1)...(19): siRNA sense strand
gcaauaauggcguguucca

SEQ ID NO: 250781 - RNA, 19 nt, Homo sapiens
  misc_RNA (1)...(19): siRNA sense strand
gagagaugaguuuaauauc

SEQ ID NO: 250782 - RNA, 19 nt, Homo sapiens
  misc_RNA (1)...(19): siRNA sense strand
gacauugcccaguucuuau

SEQ ID NO: 250783 - RNA, 19 nt, Homo sapiens
  misc_RNA (1)...(19): siRNA sense strand
cgacgggaaugaccucacu

SEQ ID NO: 250784 - RNA, 19 nt, Homo sapiens
  misc_RNA (1)...(19): siRNA sense strand
uugaguauaccacggauaa

SEQ ID NO: 250785 - RNA, 19 nt, Homo sapiens
  misc_RNA (1)...(19): siRNA sense strand
ugacaacugccuuuacuac

SEQ ID NO: 250786 - RNA, 19 nt, Homo sapiens
  misc_RNA (1)...(19): siRNA sense strand
ccgagaaggcuggcuauug

SEQ ID NO: 250787 - RNA, 19 nt, Homo sapiens
  misc_RNA (1)...(19): siRNA sense strand
acauugcccaguucuuaua

SEQ ID NO: 250788 - RNA, 19 nt, Homo sapiens
  misc_RNA (1)...(19): siRNA sense strand
gaugagauagcagaaguag

SEQ ID NO: 250789 - RNA, 19 nt, Homo sapiens
  misc_RNA (1)...(19): siRNA sense strand
ucacucacacuuucuucaa

SEQ ID NO: 250790 - RNA, 19 nt, Homo sapiens
  misc_RNA (1)...(19): siRNA sense strand
gcagaggagcgucaagaac

SEQ ID NO: 250791 - RNA, 19 nt, Homo sapiens
  misc_RNA (1)...(19): siRNA sense strand
cagaaguagcuaaugaaau

SEQ ID NO: 250792 - RNA, 19 nt, Homo sapiens
  misc_RNA (1)...(19): siRNA sense strand
gaaggaggaguggauuaag

SEQ ID NO: 250793 - RNA, 19 nt, Homo sapiens
  misc_RNA (1)...(19): siRNA sense strand
uaaagaccaaguuaucaag

SEQ ID NO: 250794 - RNA, 19 nt, Homo sapiens
  misc_RNA (1)...(19): siRNA sense strand
uggaagagacgcugguuca

SEQ ID NO: 250795 - RNA, 19 nt, Homo sapiens
  misc_RNA (1)...(19): siRNA sense strand
cugcaugaguucacugauc

SEQ ID NO: 250796 - RNA, 19 nt, Homo sapiens
  misc_RNA (1)...(19): siRNA sense strand
ugaguuuaauauccagguu

SEQ ID NO: 250797 - RNA, 19 nt, Homo sapiens
  misc_RNA (1)...(19): siRNA sense strand
ggcgaagggcucaacaaga

SEQ ID NO: 250798 - RNA, 19 nt, Homo sapiens
  misc_RNA (1)...(19): siRNA sense strand
aggaugagauagcagaagu

SEQ ID NO: 250799 - RNA, 19 nt, Homo sapiens
  misc_RNA (1)...(19): siRNA sense strand
cagaggagcgucaagaacu

SEQ ID NO: 250800 - RNA, 19 nt, Homo sapiens
  misc_RNA (1)...(19): siRNA sense strand
guggcaggguaaagacuug

SEQ ID NO: 250801 - RNA, 19 nt, Homo sapiens
  misc_RNA (1)...(19): siRNA sense strand
agaaggcuggcuauugaaa

SEQ ID NO: 250802 - RNA, 19 nt, Homo sapiens
  misc_RNA (1)...(19): siRNA sense strand
cagcagaggagcgucaaga

SEQ ID NO: 250803 - RNA, 19 nt, Homo sapiens
  misc_RNA (1)...(19): siRNA sense strand
ccggagaggcccagaagau

SEQ ID NO: 250804 - RNA, 19 nt, Homo sapiens
  misc_RNA (1)...(19): siRNA sense strand
aaaaggggauccaguucuu

SEQ ID NO: 250805 - RNA, 19 nt, Homo sapiens
  misc_RNA (1)...(19): siRNA sense strand
agaggagcgucaagaacug

SEQ ID NO: 250806 - RNA, 19 nt, Homo sapiens
  misc_RNA (1)...(19): siRNA sense strand
gagcuccuccggaaucucu

SEQ ID NO: 250807 - RNA, 19 nt, Homo sapiens
  misc_RNA (1)...(19): siRNA sense strand
gagaggcccagaagaucga

SEQ ID NO: 250808 - RNA, 19 nt, Homo sapiens
  misc_RNA (1)...(19): siRNA sense strand
gccaugaaccgaggcauca

SEQ ID NO: 250809 - RNA, 19 nt, Homo sapiens
  misc_RNA (1)...(19): siRNA sense strand
cccguggaaucaucccuuu

SEQ ID NO: 250810 - RNA, 19 nt, Homo sapiens
  misc_RNA (1)...(19): siRNA sense strand
gauccacagaggaaaggaa

SEQ ID NO: 250811 - RNA, 19 nt, Homo sapiens
  misc_RNA (1)...(19): siRNA sense strand
gcaggguaaagacuuggaa

SEQ ID NO: 250812 - RNA, 19 nt, Homo sapiens
  misc_RNA (1)...(19): siRNA sense strand
gaagacauugcccaguucu

SEQ ID NO: 250813 - RNA, 19 nt, Homo sapiens
  misc_RNA (1)...(19): siRNA sense strand
acucacacuuucuucaauc

SEQ ID NO: 250814 - RNA, 19 nt, Homo sapiens
  misc_RNA (1)...(19): siRNA sense strand
cgagaaggcuggcuauuga

SEQ ID NO: 250815 - RNA, 19 nt, Homo sapiens
  misc_RNA (1)...(19): siRNA sense strand
gaacacuugugaagacauu

SEQ ID NO: 250816 - RNA, 19 nt, Homo sapiens
  misc_RNA (1)...(19): siRNA sense strand
ggagagagaugaguuuaau

SEQ ID NO: 250817 - RNA, 19 nt, Homo sapiens
  misc_RNA (1)...(19): siRNA sense strand
gaagaacacuugugaagac

SEQ ID NO: 250818 - RNA, 19 nt, Homo sapiens
  misc_RNA (1)...(19): siRNA sense strand
caacugccuuuacuacuuu

SEQ ID NO: 250819 - RNA, 19 nt, Homo sapiens
  misc_RNA (1)...(19): siRNA sense strand
ggaaucaucccuuuagaga

SEQ ID NO: 250820 - RNA, 19 nt, Homo sapiens
  misc_RNA (1)...(19): siRNA sense strand
gacaauaaagaccaaguua

SEQ ID NO: 250821 - RNA, 19 nt, Homo sapiens
  misc_RNA (1)...(19): siRNA sense strand
gguaaagacuuggaagaga

SEQ ID NO: 250822 - RNA, 19 nt, Homo sapiens
  misc_RNA (1)...(19): siRNA sense strand
gaagagacgcugguucauu

SEQ ID NO: 250823 - RNA, 19 nt, Homo sapiens
  misc_RNA (1)...(19): siRNA sense strand
agaacgaccuccugaagaa

SEQ ID NO: 250824 - RNA, 19 nt, Homo sapiens
  misc_RNA (1)...(19): siRNA sense strand
gugaagacauugcccaguu

SEQ ID NO: 250825 - RNA, 19 nt, Homo sapiens
  misc_RNA (1)...(19): siRNA sense strand
gcgaagggcucaacaagac

SEQ ID NO: 250826 - RNA, 19 nt, Homo sapiens
  misc_RNA (1)...(19): siRNA sense strand
gagaugaguuuaauaucca

SEQ ID NO: 250827 - RNA, 19 nt, Homo sapiens
  misc_RNA (1)...(19): siRNA sense strand
gcagaaguagcuaaugaaa

SEQ ID NO: 250828 - RNA, 19 nt, Homo sapiens
  misc_RNA (1)...(19): siRNA sense strand
aaucaucccuuuagagaau

SEQ ID NO: 250829 - RNA, 19 nt, Homo sapiens
  misc_RNA (1)...(19): siRNA sense strand
ugaguucacugaucuuaau

SEQ ID NO: 250830 - RNA, 19 nt, Homo sapiens
  misc_RNA (1)...(19): siRNA sense strand
gagaaggaggaguggauua

SEQ ID NO: 250831 - RNA, 19 nt, Homo sapiens
  misc_RNA (1)...(19): siRNA sense strand
gucaagaacuggagaacau

SEQ ID NO: 250832 - RNA, 19 nt, Homo sapiens
  misc_RNA (1)...(19): siRNA sense strand
aagagacgcugguucauuc

SEQ ID NO: 250833 - RNA, 19 nt, Homo sapiens
  misc_RNA (1)...(19): siRNA sense strand
agacauugcccaguucuua

SEQ ID NO: 250834 - RNA, 19 nt, Homo sapiens
  misc_RNA (1)...(19): siRNA sense strand
gcagaggaacaaacaggua

SEQ ID NO: 250835 - RNA, 19 nt, Homo sapiens
  misc_RNA (1)...(19): siRNA sense strand
gcccaguucuuauauaaag

SEQ ID NO: 250836 - RNA, 19 nt, Homo sapiens
  misc_RNA (1)...(19): siRNA sense strand
gaagaucgaccggaugaug

SEQ ID NO: 250837 - RNA, 19 nt, Homo sapiens
  misc_RNA (1)...(19): siRNA sense strand
gggauccaguucuuaauag

SEQ ID NO: 250838 - RNA, 19 nt, Homo sapiens
  misc_RNA (1)...(19): siRNA sense strand
acaacugccuuuacuacuu

SEQ ID NO: 250839 - RNA, 19 nt, Homo sapiens
  misc_RNA (1)...(19): siRNA sense strand
gagaacgaccuccugaaga

SEQ ID NO: 250840 - RNA, 19 nt, Homo sapiens
  misc_RNA (1)...(19): siRNA sense strand
ggauccaguucuuaauaga

SEQ ID NO: 250841 - RNA, 19 nt, Homo sapiens
  misc_RNA (1)...(19): siRNA sense strand
gagagagaugaguuuaaua

SEQ ID NO: 250842 - RNA, 19 nt, Homo sapiens
  misc_RNA (1)...(19): siRNA sense strand
ccagguucuucaugcauuu

SEQ ID NO: 250843 - RNA, 19 nt, Homo sapiens
  misc_RNA (1)...(19): siRNA sense strand
ugaccucacucacacuuuc

SEQ ID NO: 250844 - RNA, 19 nt, Homo sapiens
  misc_RNA (1)...(19): siRNA sense strand
gaacaccagucugcacaac

SEQ ID NO: 250845 - RNA, 19 nt, Homo sapiens
  misc_RNA (1)...(19): siRNA sense strand
cagaagaucgaccggauga

SEQ ID NO: 250846 - RNA, 19 nt, Homo sapiens
  misc_RNA (1)...(19): siRNA sense strand
gggaaugaccucacucaca

SEQ ID NO: 250847 - RNA, 19 nt, Homo sapiens
  misc_RNA (1)...(19): siRNA sense strand
gggagagagaugaguuuaa

SEQ ID NO: 250848 - RNA, 19 nt, Homo sapiens
  misc_RNA (1)...(19): siRNA sense strand
gcugguucauucugacuga

SEQ ID NO: 250849 - RNA, 19 nt, Homo sapiens
  misc_RNA (1)...(19): siRNA sense strand
gcugaaggaugagauagca

SEQ ID NO: 250850 - RNA, 19 nt, Homo sapiens
  misc_RNA (1)...(19): siRNA sense strand
ugaagacauugcccaguuc

SEQ ID NO: 250851 - RNA, 19 nt, Homo sapiens
  misc_RNA (1)...(19): siRNA sense strand
acagcuacguucccaguga

SEQ ID NO: 250852 - RNA, 19 nt, Homo sapiens
  misc_RNA (1)...(19): siRNA sense strand
uugcccaguucuuauauaa

SEQ ID NO: 250853 - RNA, 19 nt, Homo sapiens
  misc_RNA (1)...(19): siRNA sense strand
aaacugcuuugagcuuuau

SEQ ID NO: 250854 - RNA, 19 nt, Homo sapiens
  misc_RNA (1)...(19): siRNA sense strand
ucaaagauaagcccacugu

SEQ ID NO: 250855 - RNA, 19 nt, Homo sapiens
  misc_RNA (1)...(19): siRNA sense strand
gugcaauaauggcguguuc

SEQ ID NO: 250856 - RNA, 19 nt, Homo sapiens
  misc_RNA (1)...(19): siRNA sense strand
gaaucaucccuuuagagaa

SEQ ID NO: 250857 - RNA, 19 nt, Homo sapiens
  misc_RNA (1)...(19): siRNA sense strand
agacgcugguucauucuga

SEQ ID NO: 250858 - RNA, 19 nt, Homo sapiens
  misc_RNA (1)...(19): siRNA sense strand
gcacaaccccaaugucaaa

SEQ ID NO: 250859 - RNA, 19 nt, Homo sapiens
  misc_RNA (1)...(19): siRNA sense strand
ggaggacgacagcuacguu

SEQ ID NO: 250860 - RNA, 19 nt, Homo sapiens
  misc_RNA (1)...(19): siRNA sense strand
ugacugacaacugccuuua

SEQ ID NO: 250861 - RNA, 19 nt, Homo sapiens
  misc_RNA (1)...(19): siRNA sense strand
gcccagcgauauugucagu

SEQ ID NO: 250862 - RNA, 19 nt, Homo sapiens
  misc_RNA (1)...(19): siRNA sense strand
ggaugagauagcagaagua

SEQ ID NO: 250863 - RNA, 19 nt, Homo sapiens
  misc_RNA (1)...(19): siRNA sense strand
gaguggauuaagugcauua

SEQ ID NO: 250864 - RNA, 19 nt, Homo sapiens
  misc_RNA (1)...(19): siRNA sense strand
agaaggaggaguggauuaa

SEQ ID NO: 250865 - RNA, 19 nt, Homo sapiens
  misc_RNA (1)...(19): siRNA sense strand
ggagaaggaggaguggauu

SEQ ID NO: 250866 - RNA, 19 nt, Homo sapiens
  misc_RNA (1)...(19): siRNA sense strand
cgacaauaaagaccaaguu

SEQ ID NO: 250867 - RNA, 19 nt, Homo sapiens
  misc_RNA (1)...(19): siRNA sense strand
agacagccaucggcgacua

SEQ ID NO: 250868 - RNA, 19 nt, Homo sapiens
  misc_RNA (1)...(19): siRNA sense strand
ugagauagcagaaguagcu

SEQ ID NO: 250869 - RNA, 19 nt, Homo sapiens
  misc_RNA (1)...(19): siRNA sense strand
gaaggaugagauagcagaa

SEQ ID NO: 250870 - RNA, 19 nt, Homo sapiens
  misc_RNA (1)...(19): siRNA sense strand
ugaagaacacuugugaaga

SEQ ID NO: 250871 - RNA, 19 nt, Homo sapiens
  misc_RNA (1)...(19): siRNA sense strand
ggaguggauuaagugcauu

SEQ ID NO: 250872 - RNA, 19 nt, Homo sapiens
  misc_RNA (1)...(19): siRNA sense strand
guggaaucaucccuuuaga

SEQ ID NO: 250873 - RNA, 19 nt, Homo sapiens
  misc_RNA (1)...(19): siRNA sense strand
gaggcugaaggaugagaua

SEQ ID NO: 250874 - RNA, 19 nt, Homo sapiens
  misc_RNA (1)...(19): siRNA sense strand
gagaaggcuggcuauugaa

SEQ ID NO: 250875 - RNA, 19 nt, Homo sapiens
  misc_RNA (1)...(19): siRNA sense strand
cagaagacgacgggaauga

SEQ ID NO: 250876 - RNA, 19 nt, Homo sapiens
  misc_RNA (1)...(19): siRNA sense strand
caugaguucacugaucuua

SEQ ID NO: 250877 - RNA, 19 nt, Homo sapiens
  misc_RNA (1)...(19): siRNA sense strand
agagaugaguuuaauaucc

SEQ ID NO: 250878 - RNA, 19 nt, Homo sapiens
  misc_RNA (1)...(19): siRNA sense strand
gaaguagcuaaugaaauug

SEQ ID NO: 250879 - RNA, 19 nt, Homo sapiens
  misc_RNA (1)...(19): siRNA sense strand
aaggaggaguggauuaagu

SEQ ID NO: 250880 - RNA, 19 nt, Homo sapiens
  misc_RNA (1)...(19): siRNA sense strand
gcaauaauggcguguucca

SEQ ID NO: 250881 - RNA, 19 nt, Homo sapiens
  misc_RNA (1)...(19): siRNA sense strand
gagagaugaguuuaauauc

SEQ ID NO: 250882 - RNA, 19 nt, Homo sapiens
  misc_RNA (1)...(19): siRNA sense strand
gacauugcccaguucuuau

SEQ ID NO: 250883 - RNA, 19 nt, Homo sapiens
  misc_RNA (1)...(19): siRNA sense strand
cgacgggaaugaccucacu

SEQ ID NO: 250884 - RNA, 19 nt, Homo sapiens
  misc_RNA (1)...(19): siRNA sense strand
uugaguauaccacggauaa

SEQ ID NO: 250885 - RNA, 19 nt, Homo sapiens
  misc_RNA (1)...(19): siRNA sense strand
ugacaacugccuuuacuac

SEQ ID NO: 250886 - RNA, 19 nt, Homo sapiens
  misc_RNA (1)...(19): siRNA sense strand
ccgagaaggcuggcuauug

SEQ ID NO: 250887 - RNA, 19 nt, Homo sapiens
  misc_RNA (1)...(19): siRNA sense strand
acauugcccaguucuuaua

SEQ ID NO: 250888 - RNA, 19 nt, Homo sapiens
  misc_RNA (1)...(19): siRNA sense strand
gaugagauagcagaaguag

SEQ ID NO: 250889 - RNA, 19 nt, Homo sapiens
  misc_RNA (1)...(19): siRNA sense strand
ucacucacacuuucuucaa

SEQ ID NO: 250890 - RNA, 19 nt, Homo sapiens
  misc_RNA (1)...(19): siRNA sense strand
gcagaggagcgucaagaac

SEQ ID NO: 250891 - RNA, 19 nt, Homo sapiens
  misc_RNA (1)...(19): siRNA sense strand
cagaaguagcuaaugaaau

SEQ ID NO: 250892 - RNA, 19 nt, Homo sapiens
  misc_RNA (1)...(19): siRNA sense strand
gaaggaggaguggauuaag

SEQ ID NO: 250893 - RNA, 19 nt, Homo sapiens
  misc_RNA (1)...(19): siRNA sense strand
uaaagaccaaguuaucaag

SEQ ID NO: 250894 - RNA, 19 nt, Homo sapiens
  misc_RNA (1)...(19): siRNA sense strand
uggaagagacgcugguuca

SEQ ID NO: 250895 - RNA, 19 nt, Homo sapiens
  misc_RNA (1)...(19): siRNA sense strand
cugcaugaguucacugauc

SEQ ID NO: 250896 - RNA, 19 nt, Homo sapiens
  misc_RNA (1)...(19): siRNA sense strand
ugaguuuaauauccagguu

SEQ ID NO: 250897 - RNA, 19 nt, Homo sapiens
  misc_RNA (1)...(19): siRNA sense strand
ggcgaagggcucaacaaga

SEQ ID NO: 250898 - RNA, 19 nt, Homo sapiens
  misc_RNA (1)...(19): siRNA sense strand
aggaugagauagcagaagu

SEQ ID NO: 250899 - RNA, 19 nt, Homo sapiens
  misc_RNA (1)...(19): siRNA sense strand
cagaggagcgucaagaacu

SEQ ID NO: 250900 - RNA, 19 nt, Homo sapiens
  misc_RNA (1)...(19): siRNA sense strand
guggcaggguaaagacuug

SEQ ID NO: 250901 - RNA, 19 nt, Homo sapiens
  misc_RNA (1)...(19): siRNA sense strand
agaaggcuggcuauugaaa

SEQ ID NO: 250902 - RNA, 19 nt, Homo sapiens
  misc_RNA (1)...(19): siRNA sense strand
cagcagaggagcgucaaga

SEQ ID NO: 250903 - RNA, 19 nt, Homo sapiens
  misc_RNA (1)...(19): siRNA sense strand
ccggagaggcccagaagau

SEQ ID NO: 250904 - RNA, 19 nt, Homo sapiens
  misc_RNA (1)...(19): siRNA sense strand
aaaaggggauccaguucuu

SEQ ID NO: 250905 - RNA, 19 nt, Homo sapiens
  misc_RNA (1)...(19): siRNA sense strand
agaggagcgucaagaacug

SEQ ID NO: 250906 - RNA, 19 nt, Homo sapiens
  misc_RNA (1)...(19): siRNA sense strand
gagcuccuccggaaucucu

SEQ ID NO: 250907 - RNA, 19 nt, Homo sapiens
  misc_RNA (1)...(19): siRNA sense strand
gagaggcccagaagaucga

SEQ ID NO: 250908 - RNA, 19 nt, Homo sapiens
  misc_RNA (1)...(19): siRNA sense strand
gccaugaaccgaggcauca

SEQ ID NO: 250909 - RNA, 19 nt, Homo sapiens
  misc_RNA (1)...(19): siRNA sense strand
cccguggaaucaucccuuu

SEQ ID NO: 250910 - RNA, 19 nt, Homo sapiens
  misc_RNA (1)...(19): siRNA sense strand
gauccacagaggaaaggaa

SEQ ID NO: 250911 - RNA, 19 nt, Homo sapiens
  misc_RNA (1)...(19): siRNA sense strand
gcaggguaaagacuuggaa

SEQ ID NO: 250912 - RNA, 19 nt, Homo sapiens
  misc_RNA (1)...(19): siRNA sense strand
gaagacauugcccaguucu

SEQ ID NO: 250913 - RNA, 19 nt, Homo sapiens
  misc_RNA (1)...(19): siRNA sense strand
acucacacuuucuucaauc

SEQ ID NO: 250914 - RNA, 19 nt, Homo sapiens
  misc_RNA (1)...(19): siRNA sense strand
ggacaaagcaacaauaauu

SEQ ID NO: 250915 - RNA, 19 nt, Homo sapiens
  misc_RNA (1)...(19): siRNA sense strand
caaaguagcgaaaucagua

SEQ ID NO: 250916 - RNA, 19 nt, Homo sapiens
  misc_RNA (1)...(19): siRNA sense strand
cgacacagauuccaccaaa

SEQ ID NO: 250917 - RNA, 19 nt, Homo sapiens
  misc_RNA (1)...(19): siRNA sense strand
gcaagucuguggauucuag

SEQ ID NO: 250918 - RNA, 19 nt, Homo sapiens
  misc_RNA (1)...(19): siRNA sense strand
gaggaagaauuuauuaugg

SEQ ID NO: 250919 - RNA, 19 nt, Homo sapiens
  misc_RNA (1)...(19): siRNA sense strand
caacaucagaucaauauga

SEQ ID NO: 250920 - RNA, 19 nt, Homo sapiens
  misc_RNA (1)...(19): siRNA sense strand
ccagcaagauggaaaguug

SEQ ID NO: 250921 - RNA, 19 nt, Homo sapiens
  misc_RNA (1)...(19): siRNA sense strand
ggaggaagaauuuauuaug

SEQ ID NO: 250922 - RNA, 19 nt, Homo sapiens
  misc_RNA (1)...(19): siRNA sense strand
gaacaagcacaagccauuu

SEQ ID NO: 250923 - RNA, 19 nt, Homo sapiens
  misc_RNA (1)...(19): siRNA sense strand
guagcgaaaucaguacuaa

SEQ ID NO: 250924 - RNA, 19 nt, Homo sapiens
  misc_RNA (1)...(19): siRNA sense strand
ucagauaccugugcagaau

SEQ ID NO: 250925 - RNA, 19 nt, Homo sapiens
  misc_RNA (1)...(19): siRNA sense strand
gagcaagucuguggauucu

SEQ ID NO: 250926 - RNA, 19 nt, Homo sapiens
  misc_RNA (1)...(19): siRNA sense strand
guacuaagagcaagucugu

SEQ ID NO: 250927 - RNA, 19 nt, Homo sapiens
  misc_RNA (1)...(19): siRNA sense strand
gugcagaauuucgaauaaa

SEQ ID NO: 250928 - RNA, 19 nt, Homo sapiens
  misc_RNA (1)...(19): siRNA sense strand
ccauuagaccugauaaauu

SEQ ID NO: 250929 - RNA, 19 nt, Homo sapiens
  misc_RNA (1)...(19): siRNA sense strand
uaugggaguuuccaaguau

SEQ ID NO: 250930 - RNA, 19 nt, Homo sapiens
  misc_RNA (1)...(19): siRNA sense strand
agauaccugugcagaauuu

SEQ ID NO: 250931 - RNA, 19 nt, Homo sapiens
  misc_RNA (1)...(19): siRNA sense strand
caagccauuugcaagguuu

SEQ ID NO: 250932 - RNA, 19 nt, Homo sapiens
  misc_RNA (1)...(19): siRNA sense strand
gacaaagcaacaauaauuc

SEQ ID NO: 250933 - RNA, 19 nt, Homo sapiens
  misc_RNA (1)...(19): siRNA sense strand
caggacaaagcaacaauaa

SEQ ID NO: 250934 - RNA, 19 nt, Homo sapiens
  misc_RNA (1)...(19): siRNA sense strand
aguagcaguucccaaagua

SEQ ID NO: 250935 - RNA, 19 nt, Homo sapiens
  misc_RNA (1)...(19): siRNA sense strand
uuaugggaguuuccaagua

SEQ ID NO: 250936 - RNA, 19 nt, Homo sapiens
  misc_RNA (1)...(19): siRNA sense strand
gcaacaauaauucagauac

SEQ ID NO: 250937 - RNA, 19 nt, Homo sapiens
  misc_RNA (1)...(19): siRNA sense strand
ugugcagaauuucgaauaa

SEQ ID NO: 250938 - RNA, 19 nt, Homo sapiens
  misc_RNA (1)...(19): siRNA sense strand
gccauuagaccugauaaau

SEQ ID NO: 250939 - RNA, 19 nt, Homo sapiens
  misc_RNA (1)...(19): siRNA sense strand
ccggaggaagaauuuauua

SEQ ID NO: 250940 - RNA, 19 nt, Homo sapiens
  misc_RNA (1)...(19): siRNA sense strand
cgacacaguaguagcaguu

SEQ ID NO: 250941 - RNA, 19 nt, Homo sapiens
  misc_RNA (1)...(19): siRNA sense strand
caacaauaauucagauacc

SEQ ID NO: 250942 - RNA, 19 nt, Homo sapiens
  misc_RNA (1)...(19): siRNA sense strand
ucaggacaaagcaacaaua

SEQ ID NO: 250943 - RNA, 19 nt, Homo sapiens
  misc_RNA (1)...(19): siRNA sense strand
gcauaaaaguaucaacauc

SEQ ID NO: 250944 - RNA, 19 nt, Homo sapiens
  misc_RNA (1)...(19): siRNA sense strand
guaucaacaucagaucaau

SEQ ID NO: 250945 - RNA, 19 nt, Homo sapiens
  misc_RNA (1)...(19): siRNA sense strand
aguaguagcaguucccaaa

SEQ ID NO: 250946 - RNA, 19 nt, Homo sapiens
  misc_RNA (1)...(19): siRNA sense strand
guauuaacaucugagaaac

SEQ ID NO: 250947 - RNA, 19 nt, Homo sapiens
  misc_RNA (1)...(19): siRNA sense strand
aaacgacacaguaguagca

SEQ ID NO: 250948 - RNA, 19 nt, Homo sapiens
  misc_RNA (1)...(19): siRNA sense strand
uaguagcaguucccaaagu

SEQ ID NO: 250949 - RNA, 19 nt, Homo sapiens
  misc_RNA (1)...(19): siRNA sense strand
acaagccauuugcaagguu

SEQ ID NO: 250950 - RNA, 19 nt, Homo sapiens
  misc_RNA (1)...(19): siRNA sense strand
ccaaaguagcgaaaucagu

SEQ ID NO: 250951 - RNA, 19 nt, Homo sapiens
  misc_RNA (1)...(19): siRNA sense strand
gaaacucuccgagggaaaa

SEQ ID NO: 250952 - RNA, 19 nt, Homo sapiens
  misc_RNA (1)...(19): siRNA sense strand
uggccagccucgacacaga

SEQ ID NO: 250953 - RNA, 19 nt, Homo sapiens
  misc_RNA (1)...(19): siRNA sense strand
gcuuuugacucuguauuaa

SEQ ID NO: 250954 - RNA, 19 nt, Homo sapiens
  misc_RNA (1)...(19): siRNA sense strand
uaagagcaagucuguggau

SEQ ID NO: 250955 - RNA, 19 nt, Homo sapiens
  misc_RNA (1)...(19): siRNA sense strand
caaagcaacaauaauucag

SEQ ID NO: 250956 - RNA, 19 nt, Homo sapiens
  misc_RNA (1)...(19): siRNA sense strand
aagagcaagucuguggauu

SEQ ID NO: 250957 - RNA, 19 nt, Homo sapiens
  misc_RNA (1)...(19): siRNA sense strand
agcgaaaucaguacuaaga

SEQ ID NO: 250958 - RNA, 19 nt, Homo sapiens
  misc_RNA (1)...(19): siRNA sense strand
cggaggaagaauuuauuau

SEQ ID NO: 250959 - RNA, 19 nt, Homo sapiens
  misc_RNA (1)...(19): siRNA sense strand
gcucaggacaaagcaacaa

SEQ ID NO: 250960 - RNA, 19 nt, Homo sapiens
  misc_RNA (1)...(19): siRNA sense strand
cacaagccauuugcaaggu

SEQ ID NO: 250961 - RNA, 19 nt, Homo sapiens
  misc_RNA (1)...(19): siRNA sense strand
ggccauuagaccugauaaa

SEQ ID NO: 250962 - RNA, 19 nt, Homo sapiens
  misc_RNA (1)...(19): siRNA sense strand
ggacaaagcaacaauaauu

SEQ ID NO: 250963 - RNA, 19 nt, Homo sapiens
  misc_RNA (1)...(19): siRNA sense strand
caaaguagcgaaaucagua

SEQ ID NO: 250964 - RNA, 19 nt, Homo sapiens
  misc_RNA (1)...(19): siRNA sense strand
cgacacagauuccaccaaa

SEQ ID NO: 250965 - RNA, 19 nt, Homo sapiens
  misc_RNA (1)...(19): siRNA sense strand
gcaagucuguggauucuag

SEQ ID NO: 250966 - RNA, 19 nt, Homo sapiens
  misc_RNA (1)...(19): siRNA sense strand
gaggaagaauuuauuaugg

SEQ ID NO: 250967 - RNA, 19 nt, Homo sapiens
  misc_RNA (1)...(19): siRNA sense strand
caacaucagaucaauauga

SEQ ID NO: 250968 - RNA, 19 nt, Homo sapiens
  misc_RNA (1)...(19): siRNA sense strand
ccagcaagauggaaaguug

SEQ ID NO: 250969 - RNA, 19 nt, Homo sapiens
  misc_RNA (1)...(19): siRNA sense strand
ggaggaagaauuuauuaug

SEQ ID NO: 250970 - RNA, 19 nt, Homo sapiens
  misc_RNA (1)...(19): siRNA sense strand
gaacaagcacaagccauuu

SEQ ID NO: 250971 - RNA, 19 nt, Homo sapiens
  misc_RNA (1)...(19): siRNA sense strand
guagcgaaaucaguacuaa

SEQ ID NO: 250972 - RNA, 19 nt, Homo sapiens
  misc_RNA (1)...(19): siRNA sense strand
ucagauaccugugcagaau

SEQ ID NO: 250973 - RNA, 19 nt, Homo sapiens
  misc_RNA (1)...(19): siRNA sense strand
gagcaagucuguggauucu

SEQ ID NO: 250974 - RNA, 19 nt, Homo sapiens
  misc_RNA (1)...(19): siRNA sense strand
guacuaagagcaagucugu

SEQ ID NO: 250975 - RNA, 19 nt, Homo sapiens
  misc_RNA (1)...(19): siRNA sense strand
gugcagaauuucgaauaaa

SEQ ID NO: 250976 - RNA, 19 nt, Homo sapiens
  misc_RNA (1)...(19): siRNA sense strand
ccauuagaccugauaaauu

SEQ ID NO: 250977 - RNA, 19 nt, Homo sapiens
  misc_RNA (1)...(19): siRNA sense strand
uaugggaguuuccaaguau

SEQ ID NO: 250978 - RNA, 19 nt, Homo sapiens
  misc_RNA (1)...(19): siRNA sense strand
agauaccugugcagaauuu

SEQ ID NO: 250979 - RNA, 19 nt, Homo sapiens
  misc_RNA (1)...(19): siRNA sense strand
caagccauuugcaagguuu

SEQ ID NO: 250980 - RNA, 19 nt, Homo sapiens
  misc_RNA (1)...(19): siRNA sense strand
gacaaagcaacaauaauuc

SEQ ID NO: 250981 - RNA, 19 nt, Homo sapiens
  misc_RNA (1)...(19): siRNA sense strand
caggacaaagcaacaauaa

SEQ ID NO: 250982 - RNA, 19 nt, Homo sapiens
  misc_RNA (1)...(19): siRNA sense strand
aguagcaguucccaaagua

SEQ ID NO: 250983 - RNA, 19 nt, Homo sapiens
  misc_RNA (1)...(19): siRNA sense strand
uuaugggaguuuccaagua

SEQ ID NO: 250984 - RNA, 19 nt, Homo sapiens
  misc_RNA (1)...(19): siRNA sense strand
gcaacaauaauucagauac

SEQ ID NO: 250985 - RNA, 19 nt, Homo sapiens
  misc_RNA (1)...(19): siRNA sense strand
ugugcagaauuucgaauaa

SEQ ID NO: 250986 - RNA, 19 nt, Homo sapiens
  misc_RNA (1)...(19): siRNA sense strand
gccauuagaccugauaaau

SEQ ID NO: 250987 - RNA, 19 nt, Homo sapiens
  misc_RNA (1)...(19): siRNA sense strand
ccggaggaagaauuuauua

SEQ ID NO: 250988 - RNA, 19 nt, Homo sapiens
  misc_RNA (1)...(19): siRNA sense strand
cgacacaguaguagcaguu

SEQ ID NO: 250989 - RNA, 19 nt, Homo sapiens
  misc_RNA (1)...(19): siRNA sense strand
caacaauaauucagauacc

SEQ ID NO: 250990 - RNA, 19 nt, Homo sapiens
  misc_RNA (1)...(19): siRNA sense strand
ucaggacaaagcaacaaua

SEQ ID NO: 250991 - RNA, 19 nt, Homo sapiens
  misc_RNA (1)...(19): siRNA sense strand
gcauaaaaguaucaacauc

SEQ ID NO: 250992 - RNA, 19 nt, Homo sapiens
  misc_RNA (1)...(19): siRNA sense strand
guaucaacaucagaucaau

SEQ ID NO: 250993 - RNA, 19 nt, Homo sapiens
  misc_RNA (1)...(19): siRNA sense strand
aguaguagcaguucccaaa

SEQ ID NO: 250994 - RNA, 19 nt, Homo sapiens
  misc_RNA (1)...(19): siRNA sense strand
guauuaacaucugagaaac

SEQ ID NO: 250995 - RNA, 19 nt, Homo sapiens
  misc_RNA (1)...(19): siRNA sense strand
aaacgacacaguaguagca

SEQ ID NO: 250996 - RNA, 19 nt, Homo sapiens
  misc_RNA (1)...(19): siRNA sense strand
uaguagcaguucccaaagu

SEQ ID NO: 250997 - RNA, 19 nt, Homo sapiens
  misc_RNA (1)...(19): siRNA sense strand
acaagccauuugcaagguu

SEQ ID NO: 250998 - RNA, 19 nt, Homo sapiens
  misc_RNA (1)...(19): siRNA sense strand
ccaaaguagcgaaaucagu

SEQ ID NO: 250999 - RNA, 19 nt, Homo sapiens
  misc_RNA (1)...(19): siRNA sense strand
gaaacucuccgagggaaaa

SEQ ID NO: 251000 - RNA, 19 nt, Homo sapiens
  misc_RNA (1)...(19): siRNA sense strand
uggccagccucgacacaga

SEQ ID NO: 251001 - RNA, 19 nt, Homo sapiens
  misc_RNA (1)...(19): siRNA sense strand
gcuuuugacucuguauuaa

SEQ ID NO: 251002 - RNA, 19 nt, Homo sapiens
  misc_RNA (1)...(19): siRNA sense strand
uaagagcaagucuguggau

SEQ ID NO: 251003 - RNA, 19 nt, Homo sapiens
  misc_RNA (1)...(19): siRNA sense strand
caaagcaacaauaauucag

SEQ ID NO: 251004 - RNA, 19 nt, Homo sapiens
  misc_RNA (1)...(19): siRNA sense strand
aagagcaagucuguggauu

SEQ ID NO: 251005 - RNA, 19 nt, Homo sapiens
  misc_RNA (1)...(19): siRNA sense strand
agcgaaaucaguacuaaga

SEQ ID NO: 251006 - RNA, 19 nt, Homo sapiens
  misc_RNA (1)...(19): siRNA sense strand
cggaggaagaauuuauuau

SEQ ID NO: 251007 - RNA, 19 nt, Homo sapiens
  misc_RNA (1)...(19): siRNA sense strand
gcucaggacaaagcaacaa

SEQ ID NO: 251008 - RNA, 19 nt, Homo sapiens
  misc_RNA (1)...(19): siRNA sense strand
cacaagccauuugcaaggu

SEQ ID NO: 251009 - RNA, 19 nt, Homo sapiens
  misc_RNA (1)...(19): siRNA sense strand
ggccauuagaccugauaaa

SEQ ID NO: 251010 - RNA, 19 nt, Homo sapiens
  misc_RNA (1)...(19): siRNA sense strand
gaauagcauugcacgauua

SEQ ID NO: 251011 - RNA, 19 nt, Homo sapiens
  misc_RNA (1)...(19): siRNA sense strand
gaacugaaggccauucuua

SEQ ID NO: 251012 - RNA, 19 nt, Homo sapiens
  misc_RNA (1)...(19): siRNA sense strand
cuaaagacguuccugaaua

SEQ ID NO: 251013 - RNA, 19 nt, Homo sapiens
  misc_RNA (1)...(19): siRNA sense strand
gaacauguauugcauugau

SEQ ID NO: 251014 - RNA, 19 nt, Homo sapiens
  misc_RNA (1)...(19): siRNA sense strand
gauaagcagugaaacauug

SEQ ID NO: 251015 - RNA, 19 nt, Homo sapiens
  misc_RNA (1)...(19): siRNA sense strand
ccaagaaccuguuaguauu

SEQ ID NO: 251016 - RNA, 19 nt, Homo sapiens
  misc_RNA (1)...(19): siRNA sense strand
guagaaaggugguugaaau

SEQ ID NO: 251017 - RNA, 19 nt, Homo sapiens
  misc_RNA (1)...(19): siRNA sense strand
gaaaggugguugaaauguu

SEQ ID NO: 251018 - RNA, 19 nt, Homo sapiens
  misc_RNA (1)...(19): siRNA sense strand
gaagaaggucuguaaauga

SEQ ID NO: 251019 - RNA, 19 nt, Homo sapiens
  misc_RNA (1)...(19): siRNA sense strand
gagauaugauggauucuuu

SEQ ID NO: 251020 - RNA, 19 nt, Homo sapiens
  misc_RNA (1)...(19): siRNA sense strand
agacauaccugcucaucua

SEQ ID NO: 251021 - RNA, 19 nt, Homo sapiens
  misc_RNA (1)...(19): siRNA sense strand
gcacugaaaugcagaguag

SEQ ID NO: 251022 - RNA, 19 nt, Homo sapiens
  misc_RNA (1)...(19): siRNA sense strand
aagggaagcucaauuagua

SEQ ID NO: 251023 - RNA, 19 nt, Homo sapiens
  misc_RNA (1)...(19): siRNA sense strand
gaagccaccuugacuguga

SEQ ID NO: 251024 - RNA, 19 nt, Homo sapiens
  misc_RNA (1)...(19): siRNA sense strand
gaagaucgaccacuuauca

SEQ ID NO: 251025 - RNA, 19 nt, Homo sapiens
  misc_RNA (1)...(19): siRNA sense strand
ccacacaacugucguacaa

SEQ ID NO: 251026 - RNA, 19 nt, Homo sapiens
  misc_RNA (1)...(19): siRNA sense strand
uaaagacguuccugaauau

SEQ ID NO: 251027 - RNA, 19 nt, Homo sapiens
  misc_RNA (1)...(19): siRNA sense strand
caaaugugguucaguuauu

SEQ ID NO: 251028 - RNA, 19 nt, Homo sapiens
  misc_RNA (1)...(19): siRNA sense strand
ggaauagcauugcacgauu

SEQ ID NO: 251029 - RNA, 19 nt, Homo sapiens
  misc_RNA (1)...(19): siRNA sense strand
gaggagauaugauggauuc

SEQ ID NO: 251030 - RNA, 19 nt, Homo sapiens
  misc_RNA (1)...(19): siRNA sense strand
ugauugcacuuuccgauua

SEQ ID NO: 251031 - RNA, 19 nt, Homo sapiens
  misc_RNA (1)...(19): siRNA sense strand
gcucuuugcugaugagaaa

SEQ ID NO: 251032 - RNA, 19 nt, Homo sapiens
  misc_RNA (1)...(19): siRNA sense strand
caaggugaaugcacaauau

SEQ ID NO: 251033 - RNA, 19 nt, Homo sapiens
  misc_RNA (1)...(19): siRNA sense strand
gauggugccuauagucuuu

SEQ ID NO: 251034 - RNA, 19 nt, Homo sapiens
  misc_RNA (1)...(19): siRNA sense strand
gaagagguuugcagagaug

SEQ ID NO: 251035 - RNA, 19 nt, Homo sapiens
  misc_RNA (1)...(19): siRNA sense strand
cgaagaaggucuguaaaug

SEQ ID NO: 251036 - RNA, 19 nt, Homo sapiens
  misc_RNA (1)...(19): siRNA sense strand
gaaaugggcuaauaaugcu

SEQ ID NO: 251037 - RNA, 19 nt, Homo sapiens
  misc_RNA (1)...(19): siRNA sense strand
ggagugaucauguuuaaga

SEQ ID NO: 251038 - RNA, 19 nt, Homo sapiens
  misc_RNA (1)...(19): siRNA sense strand
ggaccaccauuuaaagcua

SEQ ID NO: 251039 - RNA, 19 nt, Homo sapiens
  misc_RNA (1)...(19): siRNA sense strand
gcacuuggguagcagaguu

SEQ ID NO: 251040 - RNA, 19 nt, Homo sapiens
  misc_RNA (1)...(19): siRNA sense strand
caagaaccuguuaguauua

SEQ ID NO: 251041 - RNA, 19 nt, Homo sapiens
  misc_RNA (1)...(19): siRNA sense strand
gaucgaccacuuaucaaua

SEQ ID NO: 251042 - RNA, 19 nt, Homo sapiens
  misc_RNA (1)...(19): siRNA sense strand
guggaaaccugaugaacuu

SEQ ID NO: 251043 - RNA, 19 nt, Homo sapiens
  misc_RNA (1)...(19): siRNA sense strand
gcagggaacuggccaggau

SEQ ID NO: 251044 - RNA, 19 nt, Homo sapiens
  misc_RNA (1)...(19): siRNA sense strand
aaaggugguugaaauguuu

SEQ ID NO: 251045 - RNA, 19 nt, Homo sapiens
  misc_RNA (1)...(19): siRNA sense strand
ccaugcaauucgcuuauua

SEQ ID NO: 251046 - RNA, 19 nt, Homo sapiens
  misc_RNA (1)...(19): siRNA sense strand
acucuucguucgauuauua

SEQ ID NO: 251047 - RNA, 19 nt, Homo sapiens
  misc_RNA (1)...(19): siRNA sense strand
gauaacagcaaacuaguug

SEQ ID NO: 251048 - RNA, 19 nt, Homo sapiens
  misc_RNA (1)...(19): siRNA sense strand
gaaguuucguguugaagga

SEQ ID NO: 251049 - RNA, 19 nt, Homo sapiens
  misc_RNA (1)...(19): siRNA sense strand
gcaacauucugaagagguu

SEQ ID NO: 251050 - RNA, 19 nt, Homo sapiens
  misc_RNA (1)...(19): siRNA sense strand
cacagugccuugaacauuu

SEQ ID NO: 251051 - RNA, 19 nt, Homo sapiens
  misc_RNA (1)...(19): siRNA sense strand
ggaauucgauccaucaaaa

SEQ ID NO: 251052 - RNA, 19 nt, Homo sapiens
  misc_RNA (1)...(19): siRNA sense strand
gaaaugugugccuucaaua

SEQ ID NO: 251053 - RNA, 19 nt, Homo sapiens
  misc_RNA (1)...(19): siRNA sense strand
caacucauccuauuggaaa

SEQ ID NO: 251054 - RNA, 19 nt, Homo sapiens
  misc_RNA (1)...(19): siRNA sense strand
ugagaaaccucuucaggau

SEQ ID NO: 251055 - RNA, 19 nt, Homo sapiens
  misc_RNA (1)...(19): siRNA sense strand
guucauagcaugcaaauca

SEQ ID NO: 251056 - RNA, 19 nt, Homo sapiens
  misc_RNA (1)...(19): siRNA sense strand
ugacauggcuucagguaca

SEQ ID NO: 251057 - RNA, 19 nt, Homo sapiens
  misc_RNA (1)...(19): siRNA sense strand
uaauaaugcuggcaaagug

SEQ ID NO: 251058 - RNA, 19 nt, Homo sapiens
  misc_RNA (1)...(19): siRNA sense strand
aaggaaaucugauguggaa

SEQ ID NO: 251059 - RNA, 19 nt, Homo sapiens
  misc_RNA (1)...(19): siRNA sense strand
agaaaccucuucaggauau

SEQ ID NO: 251060 - RNA, 19 nt, Homo sapiens
  misc_RNA (1)...(19): siRNA sense strand
ggagaagucugugaaugau

SEQ ID NO: 251061 - RNA, 19 nt, Homo sapiens
  misc_RNA (1)...(19): siRNA sense strand
gaaauagugcaguuugcua

SEQ ID NO: 251062 - RNA, 19 nt, Homo sapiens
  misc_RNA (1)...(19): siRNA sense strand
gcaaauuguccacuuaaug

SEQ ID NO: 251063 - RNA, 19 nt, Homo sapiens
  misc_RNA (1)...(19): siRNA sense strand
aaacaucugccuacgauaa

SEQ ID NO: 251064 - RNA, 19 nt, Homo sapiens
  misc_RNA (1)...(19): siRNA sense strand
ggagaaaugugugccuuca

SEQ ID NO: 251065 - RNA, 19 nt, Homo sapiens
  misc_RNA (1)...(19): siRNA sense strand
caacacagcuaaaauggaa

SEQ ID NO: 251066 - RNA, 19 nt, Homo sapiens
  misc_RNA (1)...(19): siRNA sense strand
gaaauucuaguugaggaua

SEQ ID NO: 251067 - RNA, 19 nt, Homo sapiens
  misc_RNA (1)...(19): siRNA sense strand
gcucgaagaaggucuguaa

SEQ ID NO: 251068 - RNA, 19 nt, Homo sapiens
  misc_RNA (1)...(19): siRNA sense strand
ucucagaaguucguguuua

SEQ ID NO: 251069 - RNA, 19 nt, Homo sapiens
  misc_RNA (1)...(19): siRNA sense strand
ggaccgcucucuucuugau

SEQ ID NO: 251070 - RNA, 19 nt, Homo sapiens
  misc_RNA (1)...(19): siRNA sense strand
gaugauccauguccaguag

SEQ ID NO: 251071 - RNA, 19 nt, Homo sapiens
  misc_RNA (1)...(19): siRNA sense strand
caaccugcauuagggauaa

SEQ ID NO: 251072 - RNA, 19 nt, Homo sapiens
  misc_RNA (1)...(19): siRNA sense strand
uaagacugaugcacugaaa

SEQ ID NO: 251073 - RNA, 19 nt, Homo sapiens
  misc_RNA (1)...(19): siRNA sense strand
gaagacagcccugcaaugg

SEQ ID NO: 251074 - RNA, 19 nt, Homo sapiens
  misc_RNA (1)...(19): siRNA sense strand
uuacucaacucauccuauu

SEQ ID NO: 251075 - RNA, 19 nt, Homo sapiens
  misc_RNA (1)...(19): siRNA sense strand
agaagucugugaaugauga

SEQ ID NO: 251076 - RNA, 19 nt, Homo sapiens
  misc_RNA (1)...(19): siRNA sense strand
guagaaagagccaugaaga

SEQ ID NO: 251077 - RNA, 19 nt, Homo sapiens
  misc_RNA (1)...(19): siRNA sense strand
gagaaaccucuucaggaua

SEQ ID NO: 251078 - RNA, 19 nt, Homo sapiens
  misc_RNA (1)...(19): siRNA sense strand
caacagccauuuccaaagc

SEQ ID NO: 251079 - RNA, 19 nt, Homo sapiens
  misc_RNA (1)...(19): siRNA sense strand
cagaaguucguguuuauaa

SEQ ID NO: 251080 - RNA, 19 nt, Homo sapiens
  misc_RNA (1)...(19): siRNA sense strand
aaacagaccagaaccaaug

SEQ ID NO: 251081 - RNA, 19 nt, Homo sapiens
  misc_RNA (1)...(19): siRNA sense strand
uucccaaacucuaauguua

SEQ ID NO: 251082 - RNA, 19 nt, Homo sapiens
  misc_RNA (1)...(19): siRNA sense strand
gaccaccauuuaaagcuaa

SEQ ID NO: 251083 - RNA, 19 nt, Homo sapiens
  misc_RNA (1)...(19): siRNA sense strand
gaaacgcugcagcugauaa

SEQ ID NO: 251084 - RNA, 19 nt, Homo sapiens
  misc_RNA (1)...(19): siRNA sense strand
gaccaucccggcacguuua

SEQ ID NO: 251085 - RNA, 19 nt, Homo sapiens
  misc_RNA (1)...(19): siRNA sense strand
acaacugccuacauucuuu

SEQ ID NO: 251086 - RNA, 19 nt, Homo sapiens
  misc_RNA (1)...(19): siRNA sense strand
uaaaugccaucaacaaacu

SEQ ID NO: 251087 - RNA, 19 nt, Homo sapiens
  misc_RNA (1)...(19): siRNA sense strand
ggacuucgguuggaguugu

SEQ ID NO: 251088 - RNA, 19 nt, Homo sapiens
  misc_RNA (1)...(19): siRNA sense strand
agaaaugugugccuucaau

SEQ ID NO: 251089 - RNA, 19 nt, Homo sapiens
  misc_RNA (1)...(19): siRNA sense strand
gaccacuuaucaauagaaa

SEQ ID NO: 251090 - RNA, 19 nt, Homo sapiens
  misc_RNA (1)...(19): siRNA sense strand
cagcaucuguucacaaagu

SEQ ID NO: 251091 - RNA, 19 nt, Homo sapiens
  misc_RNA (1)...(19): siRNA sense strand
ccuacauucuuucuguuua

SEQ ID NO: 251092 - RNA, 19 nt, Homo sapiens
  misc_RNA (1)...(19): siRNA sense strand
gaugggagaugacccugau

SEQ ID NO: 251093 - RNA, 19 nt, Homo sapiens
  misc_RNA (1)...(19): siRNA sense strand
caaccaaacgcuucagcua

SEQ ID NO: 251094 - RNA, 19 nt, Homo sapiens
  misc_RNA (1)...(19): siRNA sense strand
guuuaucacuucaguuaga

SEQ ID NO: 251095 - RNA, 19 nt, Homo sapiens
  misc_RNA (1)...(19): siRNA sense strand
guuagcaaaucuuacaguu

SEQ ID NO: 251096 - RNA, 19 nt, Homo sapiens
  misc_RNA (1)...(19): siRNA sense strand
ccggagugaucauguuuaa

SEQ ID NO: 251097 - RNA, 19 nt, Homo sapiens
  misc_RNA (1)...(19): siRNA sense strand
ggaauuugcacguucucua

SEQ ID NO: 251098 - RNA, 19 nt, Homo sapiens
  misc_RNA (1)...(19): siRNA sense strand
gguagcagaguuaguguuu

SEQ ID NO: 251099 - RNA, 19 nt, Homo sapiens
  misc_RNA (1)...(19): siRNA sense strand
gauguuccauggcgucuuc

SEQ ID NO: 251100 - RNA, 19 nt, Homo sapiens
  misc_RNA (1)...(19): siRNA sense strand
gaguuaguguuugcaaauu

SEQ ID NO: 251101 - RNA, 19 nt, Homo sapiens
  misc_RNA (1)...(19): siRNA sense strand
aaucugauguggaaaggaa

SEQ ID NO: 251102 - RNA, 19 nt, Homo sapiens
  misc_RNA (1)...(19): siRNA sense strand
ccaugaagaucgaccacuu

SEQ ID NO: 251103 - RNA, 19 nt, Homo sapiens
  misc_RNA (1)...(19): siRNA sense strand
ugcaagagcucaucagaag

SEQ ID NO: 251104 - RNA, 19 nt, Homo sapiens
  misc_RNA (1)...(19): siRNA sense strand
caaacaaugccaacaaaca

SEQ ID NO: 251105 - RNA, 19 nt, Homo sapiens
  misc_RNA (1)...(19): siRNA sense strand
ucaggugcuuauccucuua

SEQ ID NO: 251106 - RNA, 19 nt, Homo sapiens
  misc_RNA (1)...(19): siRNA sense strand
gauggauucuuuaauaucg

SEQ ID NO: 251107 - RNA, 19 nt, Homo sapiens
  misc_RNA (1)...(19): siRNA sense strand
caaauuguccacuuaaugg

SEQ ID NO: 251108 - RNA, 19 nt, Homo sapiens
  misc_RNA (1)...(19): siRNA sense strand
ggaaacagaccagaaccaa

SEQ ID NO: 251109 - RNA, 19 nt, Homo sapiens
  misc_RNA (1)...(19): siRNA sense strand
ucuggaauguuucaauuga

SEQ ID NO: 251110 - RNA, 19 nt, Homo sapiens
  misc_RNA (1)...(19): siRNA sense strand
ccaacaagguccaggaaca

SEQ ID NO: 251111 - RNA, 19 nt, Homo sapiens
  misc_RNA (1)...(19): siRNA sense strand
uccaggaacacuauaauua

SEQ ID NO: 251112 - RNA, 19 nt, Homo sapiens
  misc_RNA (1)...(19): siRNA sense strand
ccaggaacacuauaauuau

SEQ ID NO: 251113 - RNA, 19 nt, Homo sapiens
  misc_RNA (1)...(19): siRNA sense strand
ccacuguccugccucucua

SEQ ID NO: 251114 - RNA, 19 nt, Homo sapiens
  misc_RNA (1)...(19): siRNA sense strand
gugaccaucuucuccauca

SEQ ID NO: 251115 - RNA, 19 nt, Homo sapiens
  misc_RNA (1)...(19): siRNA sense strand
gcucucggccucugucuuc

SEQ ID NO: 251116 - RNA, 19 nt, Homo sapiens
  misc_RNA (1)...(19): siRNA sense strand
ccaaggagacgcuggaaac

SEQ ID NO: 251117 - RNA, 19 nt, Homo sapiens
  misc_RNA (1)...(19): siRNA sense strand
gcauccuccuucuggacua

SEQ ID NO: 251118 - RNA, 19 nt, Homo sapiens
  misc_RNA (1)...(19): siRNA sense strand
uugccaaggucaagcugua

SEQ ID NO: 251119 - RNA, 19 nt, Homo sapiens
  misc_RNA (1)...(19): siRNA sense strand
ugacgccugugcagugguu

SEQ ID NO: 251120 - RNA, 19 nt, Homo sapiens
  misc_RNA (1)...(19): siRNA sense strand
cauccucuguugcgccauu

SEQ ID NO: 251121 - RNA, 19 nt, Homo sapiens
  misc_RNA (1)...(19): siRNA sense strand
caagguccaggaacacuau

SEQ ID NO: 251122 - RNA, 19 nt, Homo sapiens
  misc_RNA (1)...(19): siRNA sense strand
caagagcugccgcaugcuu

SEQ ID NO: 251123 - RNA, 19 nt, Homo sapiens
  misc_RNA (1)...(19): siRNA sense strand
ucaagacggucaccaucgu

SEQ ID NO: 251124 - RNA, 19 nt, Homo sapiens
  misc_RNA (1)...(19): siRNA sense strand
gggcaacacgguggucuga

SEQ ID NO: 251125 - RNA, 19 nt, Homo sapiens
  misc_RNA (1)...(19): siRNA sense strand
gcaaguuccacucggcaau

SEQ ID NO: 251126 - RNA, 19 nt, Homo sapiens
  misc_RNA (1)...(19): siRNA sense strand
guccaggaacacuauaauu

SEQ ID NO: 251127 - RNA, 19 nt, Homo sapiens
  misc_RNA (1)...(19): siRNA sense strand
gaccaucuucuccaucauc

SEQ ID NO: 251128 - RNA, 19 nt, Homo sapiens
  misc_RNA (1)...(19): siRNA sense strand
gacggucaccaucgugcua

SEQ ID NO: 251129 - RNA, 19 nt, Homo sapiens
  misc_RNA (1)...(19): siRNA sense strand
gguccaggaacacuauaau

SEQ ID NO: 251130 - RNA, 19 nt, Homo sapiens
  misc_RNA (1)...(19): siRNA sense strand
gcucaagccacgcugacau

SEQ ID NO: 251131 - RNA, 19 nt, Homo sapiens
  misc_RNA (1)...(19): siRNA sense strand
caaguuccacucggcaaug

SEQ ID NO: 251132 - RNA, 19 nt, Homo sapiens
  misc_RNA (1)...(19): siRNA sense strand
gugcuaggcgucuuuaucg

SEQ ID NO: 251133 - RNA, 19 nt, Homo sapiens
  misc_RNA (1)...(19): siRNA sense strand
gaagcacagucccuaauuu

SEQ ID NO: 251134 - RNA, 19 nt, Homo sapiens
  misc_RNA (1)...(19): siRNA sense strand
gcaagaagaagaagaguaa

SEQ ID NO: 251135 - RNA, 19 nt, Homo sapiens
  misc_RNA (1)...(19): siRNA sense strand
gacaaacacuguauucguu

SEQ ID NO: 251136 - RNA, 19 nt, Homo sapiens
  misc_RNA (1)...(19): siRNA sense strand
gagaagaaaccaauagaaa

SEQ ID NO: 251137 - RNA, 19 nt, Homo sapiens
  misc_RNA (1)...(19): siRNA sense strand
gagcaaacuugaacucuca

SEQ ID NO: 251138 - RNA, 19 nt, Homo sapiens
  misc_RNA (1)...(19): siRNA sense strand
ucucgugucugcuuuguua

SEQ ID NO: 251139 - RNA, 19 nt, Homo sapiens
  misc_RNA (1)...(19): siRNA sense strand
gaagaaaccaauagaaaca

SEQ ID NO: 251140 - RNA, 19 nt, Homo sapiens
  misc_RNA (1)...(19): siRNA sense strand
ugacagagcuuugauaguc

SEQ ID NO: 251141 - RNA, 19 nt, Homo sapiens
  misc_RNA (1)...(19): siRNA sense strand
gaagaagacauggauauga

SEQ ID NO: 251142 - RNA, 19 nt, Homo sapiens
  misc_RNA (1)...(19): siRNA sense strand
gaagaagaguaaagauaag

SEQ ID NO: 251143 - RNA, 19 nt, Homo sapiens
  misc_RNA (1)...(19): siRNA sense strand
gaaagagaacgaucaacaa

SEQ ID NO: 251144 - RNA, 19 nt, Homo sapiens
  misc_RNA (1)...(19): siRNA sense strand
ggauaccucuaguaaagaa

SEQ ID NO: 251145 - RNA, 19 nt, Homo sapiens
  misc_RNA (1)...(19): siRNA sense strand
aaagggaacuggugauuca

SEQ ID NO: 251146 - RNA, 19 nt, Homo sapiens
  misc_RNA (1)...(19): siRNA sense strand
ccuaauuucugcugcuaua

SEQ ID NO: 251147 - RNA, 19 nt, Homo sapiens
  misc_RNA (1)...(19): siRNA sense strand
gaaagaaguagggaugaaa

SEQ ID NO: 251148 - RNA, 19 nt, Homo sapiens
  misc_RNA (1)...(19): siRNA sense strand
aaaggaauguucuguggaa

SEQ ID NO: 251149 - RNA, 19 nt, Homo sapiens
  misc_RNA (1)...(19): siRNA sense strand
gaagagaagaaaccaauag

SEQ ID NO: 251150 - RNA, 19 nt, Homo sapiens
  misc_RNA (1)...(19): siRNA sense strand
cuaagagaauccaaaguga

SEQ ID NO: 251151 - RNA, 19 nt, Homo sapiens
  misc_RNA (1)...(19): siRNA sense strand
caacaagcaagaagaagaa

SEQ ID NO: 251152 - RNA, 19 nt, Homo sapiens
  misc_RNA (1)...(19): siRNA sense strand
ggauuaugaugaagaggaa

SEQ ID NO: 251153 - RNA, 19 nt, Homo sapiens
  misc_RNA (1)...(19): siRNA sense strand
gaaguagggaugaaagaga

SEQ ID NO: 251154 - RNA, 19 nt, Homo sapiens
  misc_RNA (1)...(19): siRNA sense strand
gagagacgacgacgaagaa

SEQ ID NO: 251155 - RNA, 19 nt, Homo sapiens
  misc_RNA (1)...(19): siRNA sense strand
gaaacagguuccccuaaaa

SEQ ID NO: 251156 - RNA, 19 nt, Homo sapiens
  misc_RNA (1)...(19): siRNA sense strand
gaucaacaagcaagaagaa

SEQ ID NO: 251157 - RNA, 19 nt, Homo sapiens
  misc_RNA (1)...(19): siRNA sense strand
gaucccaaguugaaucaug

SEQ ID NO: 251158 - RNA, 19 nt, Homo sapiens
  misc_RNA (1)...(19): siRNA sense strand
gaaaucggauaccucuagu

SEQ ID NO: 251159 - RNA, 19 nt, Homo sapiens
  misc_RNA (1)...(19): siRNA sense strand
gauccagacucagcaguug

SEQ ID NO: 251160 - RNA, 19 nt, Homo sapiens
  misc_RNA (1)...(19): siRNA sense strand
agacggcggucacauucua

SEQ ID NO: 251161 - RNA, 19 nt, Homo sapiens
  misc_RNA (1)...(19): siRNA sense strand
gcuaaagcuuugucucugu

SEQ ID NO: 251162 - RNA, 19 nt, Homo sapiens
  misc_RNA (1)...(19): siRNA sense strand
caaacacuguauucguuga

SEQ ID NO: 251163 - RNA, 19 nt, Homo sapiens
  misc_RNA (1)...(19): siRNA sense strand
ucggauaccucuaguaaag

SEQ ID NO: 251164 - RNA, 19 nt, Homo sapiens
  misc_RNA (1)...(19): siRNA sense strand
ggucaaggagcacaucaaa

SEQ ID NO: 251165 - RNA, 19 nt, Homo sapiens
  misc_RNA (1)...(19): siRNA sense strand
gcacagcaucugacaaaca

SEQ ID NO: 251166 - RNA, 19 nt, Homo sapiens
  misc_RNA (1)...(19): siRNA sense strand
agagagugauaaagaugua

SEQ ID NO: 251167 - RNA, 19 nt, Homo sapiens
  misc_RNA (1)...(19): siRNA sense strand
gaagaguaaagauaaggaa

SEQ ID NO: 251168 - RNA, 19 nt, Homo sapiens
  misc_RNA (1)...(19): siRNA sense strand
ggagaagaagaaagauaaa

SEQ ID NO: 251169 - RNA, 19 nt, Homo sapiens
  misc_RNA (1)...(19): siRNA sense strand
uaauccaggugacuaaugu

SEQ ID NO: 251170 - RNA, 19 nt, Homo sapiens
  misc_RNA (1)...(19): siRNA sense strand
gaagaagaagaguaaagau

SEQ ID NO: 251171 - RNA, 19 nt, Homo sapiens
  misc_RNA (1)...(19): siRNA sense strand
agagaacgaucaacaagca

SEQ ID NO: 251172 - RNA, 19 nt, Homo sapiens
  misc_RNA (1)...(19): siRNA sense strand
aagaaggcauucaagauca

SEQ ID NO: 251173 - RNA, 19 nt, Homo sapiens
  misc_RNA (1)...(19): siRNA sense strand
gguaugacagugagaaaga

SEQ ID NO: 251174 - RNA, 19 nt, Homo sapiens
  misc_RNA (1)...(19): siRNA sense strand
ugaaagagaacgaucaaca

SEQ ID NO: 251175 - RNA, 19 nt, Homo sapiens
  misc_RNA (1)...(19): siRNA sense strand
gcacagucccuaauuucug

SEQ ID NO: 251176 - RNA, 19 nt, Homo sapiens
  misc_RNA (1)...(19): siRNA sense strand
agacacaggcggucaagaa

SEQ ID NO: 251177 - RNA, 19 nt, Homo sapiens
  misc_RNA (1)...(19): siRNA sense strand
aaucggauaccucuaguaa

SEQ ID NO: 251178 - RNA, 19 nt, Homo sapiens
  misc_RNA (1)...(19): siRNA sense strand
gaaagaagacaaagaaaag

SEQ ID NO: 251179 - RNA, 19 nt, Homo sapiens
  misc_RNA (1)...(19): siRNA sense strand
cuaaagcuuugucucuguu

SEQ ID NO: 251180 - RNA, 19 nt, Homo sapiens
  misc_RNA (1)...(19): siRNA sense strand
gaacgaucaacaagcaaga

SEQ ID NO: 251181 - RNA, 19 nt, Homo sapiens
  misc_RNA (1)...(19): siRNA sense strand
agaaagaaguagggaugaa

SEQ ID NO: 251182 - RNA, 19 nt, Homo sapiens
  misc_RNA (1)...(19): siRNA sense strand
gaagaagaaagauaaagac

SEQ ID NO: 251183 - RNA, 19 nt, Homo sapiens
  misc_RNA (1)...(19): siRNA sense strand
cuauagaaccagauaagaa

SEQ ID NO: 251184 - RNA, 19 nt, Homo sapiens
  misc_RNA (1)...(19): siRNA sense strand
caaguugaaucauguagcu

SEQ ID NO: 251185 - RNA, 19 nt, Homo sapiens
  misc_RNA (1)...(19): siRNA sense strand
aaagaaggcauucaagauc

SEQ ID NO: 251186 - RNA, 19 nt, Homo sapiens
  misc_RNA (1)...(19): siRNA sense strand
uaagagaauccaaagugaa

SEQ ID NO: 251187 - RNA, 19 nt, Homo sapiens
  misc_RNA (1)...(19): siRNA sense strand
gaaaaggaccgggaaagaa

SEQ ID NO: 251188 - RNA, 19 nt, Homo sapiens
  misc_RNA (1)...(19): siRNA sense strand
gagcagaugcggacucucu

SEQ ID NO: 251189 - RNA, 19 nt, Homo sapiens
  misc_RNA (1)...(19): siRNA sense strand
gaugaaagagaacgaucaa

SEQ ID NO: 251190 - RNA, 19 nt, Homo sapiens
  misc_RNA (1)...(19): siRNA sense strand
gagaagcacagucccuaau

SEQ ID NO: 251191 - RNA, 19 nt, Homo sapiens
  misc_RNA (1)...(19): siRNA sense strand
agagagagacgacgacgaa

SEQ ID NO: 251192 - RNA, 19 nt, Homo sapiens
  misc_RNA (1)...(19): siRNA sense strand
gaaagagguagaaggucaa

SEQ ID NO: 251193 - RNA, 19 nt, Homo sapiens
  misc_RNA (1)...(19): siRNA sense strand
ggacuccugccuacuccua

SEQ ID NO: 251194 - RNA, 19 nt, Homo sapiens
  misc_RNA (1)...(19): siRNA sense strand
aagaagacauggauaugag

SEQ ID NO: 251195 - RNA, 19 nt, Homo sapiens
  misc_RNA (1)...(19): siRNA sense strand
gccagacguucuagaagug

SEQ ID NO: 251196 - RNA, 19 nt, Homo sapiens
  misc_RNA (1)...(19): siRNA sense strand
aagcaggaguggcacaaga

SEQ ID NO: 251197 - RNA, 19 nt, Homo sapiens
  misc_RNA (1)...(19): siRNA sense strand
aaguagggaugaaagagaa

SEQ ID NO: 251198 - RNA, 19 nt, Homo sapiens
  misc_RNA (1)...(19): siRNA sense strand
aggagaagaagaaagauaa

SEQ ID NO: 251199 - RNA, 19 nt, Homo sapiens
  misc_RNA (1)...(19): siRNA sense strand
ugaaaucggauaccucuag

SEQ ID NO: 251200 - RNA, 19 nt, Homo sapiens
  misc_RNA (1)...(19): siRNA sense strand
ucaacaagcaagaagaaga

SEQ ID NO: 251201 - RNA, 19 nt, Homo sapiens
  misc_RNA (1)...(19): siRNA sense strand
ggcacaagaucuccuaaaa

SEQ ID NO: 251202 - RNA, 19 nt, Homo sapiens
  misc_RNA (1)...(19): siRNA sense strand
uggcacagcaucugacaaa

SEQ ID NO: 251203 - RNA, 19 nt, Homo sapiens
  misc_RNA (1)...(19): siRNA sense strand
uaacccacuuacccagauu

SEQ ID NO: 251204 - RNA, 19 nt, Homo sapiens
  misc_RNA (1)...(19): siRNA sense strand
ggaugaaagagaacgauca

SEQ ID NO: 251205 - RNA, 19 nt, Homo sapiens
  misc_RNA (1)...(19): siRNA sense strand
agaagaagaagaguaaaga

SEQ ID NO: 251206 - RNA, 19 nt, Homo sapiens
  misc_RNA (1)...(19): siRNA sense strand
gagguaauccaggugacua

SEQ ID NO: 251207 - RNA, 19 nt, Homo sapiens
  misc_RNA (1)...(19): siRNA sense strand
gaaaagaguacgagaagca

SEQ ID NO: 251208 - RNA, 19 nt, Homo sapiens
  misc_RNA (1)...(19): siRNA sense strand
uacacgggauuaugaugaa

SEQ ID NO: 251209 - RNA, 19 nt, Homo sapiens
  misc_RNA (1)...(19): siRNA sense strand
agaaccagauaagaaagaa

SEQ ID NO: 251210 - RNA, 19 nt, Homo sapiens
  misc_RNA (1)...(19): siRNA sense strand
gcuauagaaccagauaaga

SEQ ID NO: 251211 - RNA, 19 nt, Homo sapiens
  misc_RNA (1)...(19): siRNA sense strand
gaaaagggaacuggugauu

SEQ ID NO: 251212 - RNA, 19 nt, Homo sapiens
  misc_RNA (1)...(19): siRNA sense strand
agaaacagguuccccuaaa

SEQ ID NO: 251213 - RNA, 19 nt, Homo sapiens
  misc_RNA (1)...(19): siRNA sense strand
ggucacauucuaagucuag

SEQ ID NO: 251214 - RNA, 19 nt, Homo sapiens
  misc_RNA (1)...(19): siRNA sense strand
gcggucacauucuaagucu

SEQ ID NO: 251215 - RNA, 19 nt, Homo sapiens
  misc_RNA (1)...(19): siRNA sense strand
agaaggcauucaagaucaa

SEQ ID NO: 251216 - RNA, 19 nt, Homo sapiens
  misc_RNA (1)...(19): siRNA sense strand
ccaagucugaaaucggaua

SEQ ID NO: 251217 - RNA, 19 nt, Homo sapiens
  misc_RNA (1)...(19): siRNA sense strand
guaauccaggugacuaaug

SEQ ID NO: 251218 - RNA, 19 nt, Homo sapiens
  misc_RNA (1)...(19): siRNA sense strand
agaagagaagaaaccaaua

SEQ ID NO: 251219 - RNA, 19 nt, Homo sapiens
  misc_RNA (1)...(19): siRNA sense strand
gagaagaagaaagauaaag

SEQ ID NO: 251220 - RNA, 19 nt, Homo sapiens
  misc_RNA (1)...(19): siRNA sense strand
cgagaagcacagucccuaa

SEQ ID NO: 251221 - RNA, 19 nt, Homo sapiens
  misc_RNA (1)...(19): siRNA sense strand
agaagcacagucccuaauu

SEQ ID NO: 251222 - RNA, 19 nt, Homo sapiens
  misc_RNA (1)...(19): siRNA sense strand
gagaauccaaagugaaugg

SEQ ID NO: 251223 - RNA, 19 nt, Homo sapiens
  misc_RNA (1)...(19): siRNA sense strand
agagaagaaaccaauagaa

SEQ ID NO: 251224 - RNA, 19 nt, Homo sapiens
  misc_RNA (1)...(19): siRNA sense strand
aagaagagaagaaaccaau

SEQ ID NO: 251225 - RNA, 19 nt, Homo sapiens
  misc_RNA (1)...(19): siRNA sense strand
uuacacgggauuaugauga

SEQ ID NO: 251226 - RNA, 19 nt, Homo sapiens
  misc_RNA (1)...(19): siRNA sense strand
aaagagaacgaucaacaag

SEQ ID NO: 251227 - RNA, 19 nt, Homo sapiens
  misc_RNA (1)...(19): siRNA sense strand
aaggagaagaagaaagaua

SEQ ID NO: 251228 - RNA, 19 nt, Homo sapiens
  misc_RNA (1)...(19): siRNA sense strand
cacaggcggucaagaagca

SEQ ID NO: 251229 - RNA, 19 nt, Homo sapiens
  misc_RNA (1)...(19): siRNA sense strand
ugacagugagaaagagaaa

SEQ ID NO: 251230 - RNA, 19 nt, Homo sapiens
  misc_RNA (1)...(19): siRNA sense strand
ugaagaagacauggauaug

SEQ ID NO: 251231 - RNA, 19 nt, Homo sapiens
  misc_RNA (1)...(19): siRNA sense strand
aagagaauccaaagugaau

SEQ ID NO: 251232 - RNA, 19 nt, Homo sapiens
  misc_RNA (1)...(19): siRNA sense strand
acuaagagaauccaaagug

SEQ ID NO: 251233 - RNA, 19 nt, Homo sapiens
  misc_RNA (1)...(19): siRNA sense strand
ccaaggagcacccauauga

SEQ ID NO: 251234 - RNA, 19 nt, Homo sapiens
  misc_RNA (1)...(19): siRNA sense strand
gaaccgccaucccaauuuc

SEQ ID NO: 251235 - RNA, 19 nt, Homo sapiens
  misc_RNA (1)...(19): siRNA sense strand
gaagacacuuuccggcaau

SEQ ID NO: 251236 - RNA, 19 nt, Homo sapiens
  misc_RNA (1)...(19): siRNA sense strand
gauacaaccaucaaugaga

SEQ ID NO: 251237 - RNA, 19 nt, Homo sapiens
  misc_RNA (1)...(19): siRNA sense strand
uaggggagcuuaacaagaa

SEQ ID NO: 251238 - RNA, 19 nt, Homo sapiens
  misc_RNA (1)...(19): siRNA sense strand
auacaaccaucaaugagau

SEQ ID NO: 251239 - RNA, 19 nt, Homo sapiens
  misc_RNA (1)...(19): siRNA sense strand
gagaaggauacaaccauca

SEQ ID NO: 251240 - RNA, 19 nt, Homo sapiens
  misc_RNA (1)...(19): siRNA sense strand
gaaggauacaaccaucaau

SEQ ID NO: 251241 - RNA, 19 nt, Homo sapiens
  misc_RNA (1)...(19): siRNA sense strand
caagaaccgccaucccaau

SEQ ID NO: 251242 - RNA, 19 nt, Homo sapiens
  misc_RNA (1)...(19): siRNA sense strand
ggauacaaccaucaaugag

SEQ ID NO: 251243 - RNA, 19 nt, Homo sapiens
  misc_RNA (1)...(19): siRNA sense strand
aagaaccgccaucccaauu

SEQ ID NO: 251244 - RNA, 19 nt, Homo sapiens
  misc_RNA (1)...(19): siRNA sense strand
aggacacggugacugguuu

SEQ ID NO: 251245 - RNA, 19 nt, Homo sapiens
  misc_RNA (1)...(19): siRNA sense strand
gaggacacggugacugguu

SEQ ID NO: 251246 - RNA, 19 nt, Homo sapiens
  misc_RNA (1)...(19): siRNA sense strand
gcaucauccucaucaacca

SEQ ID NO: 251247 - RNA, 19 nt, Homo sapiens
  misc_RNA (1)...(19): siRNA sense strand
aggauacaaccaucaauga

SEQ ID NO: 251248 - RNA, 19 nt, Homo sapiens
  misc_RNA (1)...(19): siRNA sense strand
ugagaucgaagacacuuuc

SEQ ID NO: 251249 - RNA, 19 nt, Homo sapiens
  misc_RNA (1)...(19): siRNA sense strand
agaaccgccaucccaauuu

SEQ ID NO: 251250 - RNA, 19 nt, Homo sapiens
  misc_RNA (1)...(19): siRNA sense strand
aaccaucaaugagaucgaa

SEQ ID NO: 251251 - RNA, 19 nt, Homo sapiens
  misc_RNA (1)...(19): siRNA sense strand
agaaggauacaaccaucaa

SEQ ID NO: 251252 - RNA, 19 nt, Homo sapiens
  misc_RNA (1)...(19): siRNA sense strand
aaggauacaaccaucaaug

SEQ ID NO: 251253 - RNA, 19 nt, Homo sapiens
  misc_RNA (1)...(19): siRNA sense strand
ucuaaaccgggaugacauu

SEQ ID NO: 251254 - RNA, 19 nt, Homo sapiens
  misc_RNA (1)...(19): siRNA sense strand
gacacuuuccggcaauuuc

SEQ ID NO: 251255 - RNA, 19 nt, Homo sapiens
  misc_RNA (1)...(19): siRNA sense strand
gcacagaucuuaacauuca

SEQ ID NO: 251256 - RNA, 19 nt, Homo sapiens
  misc_RNA (1)...(19): siRNA sense strand
gguaagagcuuuaaucaga

SEQ ID NO: 251257 - RNA, 19 nt, Homo sapiens
  misc_RNA (1)...(19): siRNA sense strand
aaucagagcucacaucuuu

SEQ ID NO: 251258 - RNA, 19 nt, Homo sapiens
  misc_RNA (1)...(19): siRNA sense strand
gcucaaaucugcaaacuca

SEQ ID NO: 251259 - RNA, 19 nt, Homo sapiens
  misc_RNA (1)...(19): siRNA sense strand
gguaagugcuuuaguuuga

SEQ ID NO: 251260 - RNA, 19 nt, Homo sapiens
  misc_RNA (1)...(19): siRNA sense strand
gggaaaggcuucagucaga

SEQ ID NO: 251261 - RNA, 19 nt, Homo sapiens
  misc_RNA (1)...(19): siRNA sense strand
ugaaugagacacagaauua

SEQ ID NO: 251262 - RNA, 19 nt, Homo sapiens
  misc_RNA (1)...(19): siRNA sense strand
gagagaaaccuuauaaaug

SEQ ID NO: 251263 - RNA, 19 nt, Homo sapiens
  misc_RNA (1)...(19): siRNA sense strand
gauggcaacucuucacaaa

SEQ ID NO: 251264 - RNA, 19 nt, Homo sapiens
  misc_RNA (1)...(19): siRNA sense strand
ggagagaggccuuacauau

SEQ ID NO: 251265 - RNA, 19 nt, Homo sapiens
  misc_RNA (1)...(19): siRNA sense strand
gagauaaaguucauagcaa

SEQ ID NO: 251266 - RNA, 19 nt, Homo sapiens
  misc_RNA (1)...(19): siRNA sense strand
aaugauagcuccagucuug

SEQ ID NO: 251267 - RNA, 19 nt, Homo sapiens
  misc_RNA (1)...(19): siRNA sense strand
ggagagaaaccauuuaaau

SEQ ID NO: 251268 - RNA, 19 nt, Homo sapiens
  misc_RNA (1)...(19): siRNA sense strand
ggagagaaaccauauaaau

SEQ ID NO: 251269 - RNA, 19 nt, Homo sapiens
  misc_RNA (1)...(19): siRNA sense strand
ggagagaaaccauauaaau

SEQ ID NO: 251270 - RNA, 19 nt, Homo sapiens
  misc_RNA (1)...(19): siRNA sense strand
ggagagaaaccuuauaaau

SEQ ID NO: 251271 - RNA, 19 nt, Homo sapiens
  misc_RNA (1)...(19): siRNA sense strand
gagagaaacccuacaaaug

SEQ ID NO: 251272 - RNA, 19 nt, Homo sapiens
  misc_RNA (1)...(19): siRNA sense strand
gagaaggacaccaguuaua

SEQ ID NO: 251273 - RNA, 19 nt, Homo sapiens
  misc_RNA (1)...(19): siRNA sense strand
uagcacagaucuuaacauu

SEQ ID NO: 251274 - RNA, 19 nt, Homo sapiens
  misc_RNA (1)...(19): siRNA sense strand
ccaccaugaugauaauaua

SEQ ID NO: 251275 - RNA, 19 nt, Homo sapiens
  misc_RNA (1)...(19): siRNA sense strand
gagagaaaccauauaaaug

SEQ ID NO: 251276 - RNA, 19 nt, Homo sapiens
  misc_RNA (1)...(19): siRNA sense strand
gagagaaaccauauaaaug

SEQ ID NO: 251277 - RNA, 19 nt, Homo sapiens
  misc_RNA (1)...(19): siRNA sense strand
gagagaaacccuauagaug

SEQ ID NO: 251278 - RNA, 19 nt, Homo sapiens
  misc_RNA (1)...(19): siRNA sense strand
cuacaaaugugaagagugu

SEQ ID NO: 251279 - RNA, 19 nt, Homo sapiens
  misc_RNA (1)...(19): siRNA sense strand
gagaaacccuacaaaugug

SEQ ID NO: 251280 - RNA, 19 nt, Homo sapiens
  misc_RNA (1)...(19): siRNA sense strand
gagaaacccuauagaugug

SEQ ID NO: 251281 - RNA, 19 nt, Homo sapiens
  misc_RNA (1)...(19): siRNA sense strand
gguaaagguuucagucaga

SEQ ID NO: 251282 - RNA, 19 nt, Homo sapiens
  misc_RNA (1)...(19): siRNA sense strand
gcuuuaaucuucauaguca

SEQ ID NO: 251283 - RNA, 19 nt, Homo sapiens
  misc_RNA (1)...(19): siRNA sense strand
uaacauucauugcagaguu

SEQ ID NO: 251284 - RNA, 19 nt, Homo sapiens
  misc_RNA (1)...(19): siRNA sense strand
ggagagaaacccuauagau

SEQ ID NO: 251285 - RNA, 19 nt, Homo sapiens
  misc_RNA (1)...(19): siRNA sense strand
gagagaggccuuacauaug

SEQ ID NO: 251286 - RNA, 19 nt, Homo sapiens
  misc_RNA (1)...(19): siRNA sense strand
gagaaaccauauaaaugug

SEQ ID NO: 251287 - RNA, 19 nt, Homo sapiens
  misc_RNA (1)...(19): siRNA sense strand
ggagagaaacccuacaaau

SEQ ID NO: 251288 - RNA, 19 nt, Homo sapiens
  misc_RNA (1)...(19): siRNA sense strand
gagaaaccauauaaaugug

SEQ ID NO: 251289 - RNA, 19 nt, Homo sapiens
  misc_RNA (1)...(19): siRNA sense strand
ccaaagagguaagcauuca

SEQ ID NO: 251290 - RNA, 19 nt, Homo sapiens
  misc_RNA (1)...(19): siRNA sense strand
uguaagggcuucagucaga

SEQ ID NO: 251291 - RNA, 19 nt, Homo sapiens
  misc_RNA (1)...(19): siRNA sense strand
agagaggccuuacauaugu

SEQ ID NO: 251292 - RNA, 19 nt, Homo sapiens
  misc_RNA (1)...(19): siRNA sense strand
gagaugugaugcuggagaa

SEQ ID NO: 251293 - RNA, 19 nt, Homo sapiens
  misc_RNA (1)...(19): siRNA sense strand
caaauuagccagaagucaa

SEQ ID NO: 251294 - RNA, 19 nt, Homo sapiens
  misc_RNA (1)...(19): siRNA sense strand
gggaaagaauucaguugga

SEQ ID NO: 251295 - RNA, 19 nt, Homo sapiens
  misc_RNA (1)...(19): siRNA sense strand
guucauagcaauagugauu

SEQ ID NO: 251296 - RNA, 19 nt, Homo sapiens
  misc_RNA (1)...(19): siRNA sense strand
ggucacaucucaucuacca

SEQ ID NO: 251297 - RNA, 19 nt, Homo sapiens
  misc_RNA (1)...(19): siRNA sense strand
auacaaaugugaugagugu

SEQ ID NO: 251298 - RNA, 19 nt, Homo sapiens
  misc_RNA (1)...(19): siRNA sense strand
ucaaguccaucagauaauu

SEQ ID NO: 251299 - RNA, 19 nt, Homo sapiens
  misc_RNA (1)...(19): siRNA sense strand
auacaaaugugaagugugu

SEQ ID NO: 251300 - RNA, 19 nt, Homo sapiens
  misc_RNA (1)...(19): siRNA sense strand
guaaagauacccuaaaggu

SEQ ID NO: 251301 - RNA, 19 nt, Homo sapiens
  misc_RNA (1)...(19): siRNA sense strand
gggagaaacccuauacaug

SEQ ID NO: 251302 - RNA, 19 nt, Homo sapiens
  misc_RNA (1)...(19): siRNA sense strand
gaagaaaagcuuuggauga

SEQ ID NO: 251303 - RNA, 19 nt, Homo sapiens
  misc_RNA (1)...(19): siRNA sense strand
agagaaacccuacaaaugu

SEQ ID NO: 251304 - RNA, 19 nt, Homo sapiens
  misc_RNA (1)...(19): siRNA sense strand
caagacuccacgauaaaua

SEQ ID NO: 251305 - RNA, 19 nt, Homo sapiens
  misc_RNA (1)...(19): siRNA sense strand
cuucaaaccagauaugaua

SEQ ID NO: 251306 - RNA, 19 nt, Homo sapiens
  misc_RNA (1)...(19): siRNA sense strand
gcaaaucaagagacacauu

SEQ ID NO: 251307 - RNA, 19 nt, Homo sapiens
  misc_RNA (1)...(19): siRNA sense strand
gaucauuccaguaucauug

SEQ ID NO: 251308 - RNA, 19 nt, Homo sapiens
  misc_RNA (1)...(19): siRNA sense strand
guaagcagacucagaugaa

SEQ ID NO: 251309 - RNA, 19 nt, Homo sapiens
  misc_RNA (1)...(19): siRNA sense strand
ucacaaagcaggauuaagg

SEQ ID NO: 251310 - RNA, 19 nt, Homo sapiens
  misc_RNA (1)...(19): siRNA sense strand
gagaaaccuuauaaaugug

SEQ ID NO: 251311 - RNA, 19 nt, Homo sapiens
  misc_RNA (1)...(19): siRNA sense strand
acacagaauuaucagagaa

SEQ ID NO: 251312 - RNA, 19 nt, Homo sapiens
  misc_RNA (1)...(19): siRNA sense strand
aauuggagcuugaaucuuc

SEQ ID NO: 251313 - RNA, 19 nt, Homo sapiens
  misc_RNA (1)...(19): siRNA sense strand
caucucaucuaccaucaga

SEQ ID NO: 251314 - RNA, 19 nt, Homo sapiens
  misc_RNA (1)...(19): siRNA sense strand
agucagaggucacaucuca

SEQ ID NO: 251315 - RNA, 19 nt, Homo sapiens
  misc_RNA (1)...(19): siRNA sense strand
gagcuuucaugcuggcaaa

SEQ ID NO: 251316 - RNA, 19 nt, Homo sapiens
  misc_RNA (1)...(19): siRNA sense strand
uaugugaugucuguuguaa

SEQ ID NO: 251317 - RNA, 19 nt, Homo sapiens
  misc_RNA (1)...(19): siRNA sense strand
ggauugugguaaacgcuuu

SEQ ID NO: 251318 - RNA, 19 nt, Homo sapiens
  misc_RNA (1)...(19): siRNA sense strand
caaaucaagagacacauug

SEQ ID NO: 251319 - RNA, 19 nt, Homo sapiens
  misc_RNA (1)...(19): siRNA sense strand
gaggucaaaucuucaaguc

SEQ ID NO: 251320 - RNA, 19 nt, Homo sapiens
  misc_RNA (1)...(19): siRNA sense strand
uaagcagacucagaugaaa

SEQ ID NO: 251321 - RNA, 19 nt, Homo sapiens
  misc_RNA (1)...(19): siRNA sense strand
gacacagaauuaucagaga

SEQ ID NO: 251322 - RNA, 19 nt, Homo sapiens
  misc_RNA (1)...(19): siRNA sense strand
gaucuuaacauucauugca

SEQ ID NO: 251323 - RNA, 19 nt, Homo sapiens
  misc_RNA (1)...(19): siRNA sense strand
agagaaacccuauagaugu

SEQ ID NO: 251324 - RNA, 19 nt, Homo sapiens
  misc_RNA (1)...(19): siRNA sense strand
guuccgaauucuuggagua

SEQ ID NO: 251325 - RNA, 19 nt, Homo sapiens
  misc_RNA (1)...(19): siRNA sense strand
ugaggaaugugggaaagaa

SEQ ID NO: 251326 - RNA, 19 nt, Homo sapiens
  misc_RNA (1)...(19): siRNA sense strand
gagcuuuaaucuucauagu

SEQ ID NO: 251327 - RNA, 19 nt, Homo sapiens
  misc_RNA (1)...(19): siRNA sense strand
cacgauaaauauugaagga

SEQ ID NO: 251328 - RNA, 19 nt, Homo sapiens
  misc_RNA (1)...(19): siRNA sense strand
aguuugagcuuuaaucuuc

SEQ ID NO: 251329 - RNA, 19 nt, Homo sapiens
  misc_RNA (1)...(19): siRNA sense strand
gggcuucacucagagauca

SEQ ID NO: 251330 - RNA, 19 nt, Homo sapiens
  misc_RNA (1)...(19): siRNA sense strand
gcacaaaagagauaaaguu

SEQ ID NO: 251331 - RNA, 19 nt, Homo sapiens
  misc_RNA (1)...(19): siRNA sense strand
acaacugucuagugaauca

SEQ ID NO: 251332 - RNA, 19 nt, Homo sapiens
  misc_RNA (1)...(19): siRNA sense strand
ggagagaaacccuauacgu

SEQ ID NO: 251333 - RNA, 19 nt, Homo sapiens
  misc_RNA (1)...(19): siRNA sense strand
ugugguaagugcuuuaguu

SEQ ID NO: 251334 - RNA, 19 nt, Homo sapiens
  misc_RNA (1)...(19): siRNA sense strand
gaaguuguaagcagacuca

SEQ ID NO: 251335 - RNA, 19 nt, Homo sapiens
  misc_RNA (1)...(19): siRNA sense strand
ccucuuacccagcguagua

SEQ ID NO: 251336 - RNA, 19 nt, Homo sapiens
  misc_RNA (1)...(19): siRNA sense strand
ucagucaggccucacauuu

SEQ ID NO: 251337 - RNA, 19 nt, Homo sapiens
  misc_RNA (1)...(19): siRNA sense strand
ccauauaaaugugacacuu

SEQ ID NO: 251338 - RNA, 19 nt, Homo sapiens
  misc_RNA (1)...(19): siRNA sense strand
gaaggaaagagcucucagu

SEQ ID NO: 251339 - RNA, 19 nt, Homo sapiens
  misc_RNA (1)...(19): siRNA sense strand
gaggucacaucucaucuac

SEQ ID NO: 251340 - RNA, 19 nt, Homo sapiens
  misc_RNA (1)...(19): siRNA sense strand
aguuguagcucaaaucuuc

SEQ ID NO: 251341 - RNA, 19 nt, Homo sapiens
  misc_RNA (1)...(19): siRNA sense strand
aguuauagcucagguauuc

SEQ ID NO: 251342 - RNA, 19 nt, Homo sapiens
  misc_RNA (1)...(19): siRNA sense strand
gguaaugaaugugaagaag

SEQ ID NO: 251343 - RNA, 19 nt, Homo sapiens
  misc_RNA (1)...(19): siRNA sense strand
aaucaagaauuuccaacug

SEQ ID NO: 251344 - RNA, 19 nt, Homo sapiens
  misc_RNA (1)...(19): siRNA sense strand
cagguacacuugggaaaga

SEQ ID NO: 251345 - RNA, 19 nt, Homo sapiens
  misc_RNA (1)...(19): siRNA sense strand
agccagaggucaaaucuuc

SEQ ID NO: 251346 - RNA, 19 nt, Homo sapiens
  misc_RNA (1)...(19): siRNA sense strand
ccggagagaaaccauauaa

SEQ ID NO: 251347 - RNA, 19 nt, Homo sapiens
  misc_RNA (1)...(19): siRNA sense strand
agucagaguucauacuuuc

SEQ ID NO: 251348 - RNA, 19 nt, Homo sapiens
  misc_RNA (1)...(19): siRNA sense strand
cuucaaacccaaagaggua

SEQ ID NO: 251349 - RNA, 19 nt, Homo sapiens
  misc_RNA (1)...(19): siRNA sense strand
ccauauaaaugugaagagu

SEQ ID NO: 251350 - RNA, 19 nt, Homo sapiens
  misc_RNA (1)...(19): siRNA sense strand
cuauagaugugacaguugu

SEQ ID NO: 251351 - RNA, 19 nt, Homo sapiens
  misc_RNA (1)...(19): siRNA sense strand
gaaugagacacagaauuau

SEQ ID NO: 251352 - RNA, 19 nt, Homo sapiens
  misc_RNA (1)...(19): siRNA sense strand
ucagagcucacaucuuuau

SEQ ID NO: 251353 - RNA, 19 nt, Homo sapiens
  misc_RNA (1)...(19): siRNA sense strand
ucaggcccaugaaagaauu

SEQ ID NO: 251354 - RNA, 19 nt, Homo sapiens
  misc_RNA (1)...(19): siRNA sense strand
agucguagcacagaucuua

SEQ ID NO: 251355 - RNA, 19 nt, Homo sapiens
  misc_RNA (1)...(19): siRNA sense strand
ggaaagugcuacacauuua

SEQ ID NO: 251356 - RNA, 19 nt, Homo sapiens
  misc_RNA (1)...(19): siRNA sense strand
gaagaaggccuaugagaug

SEQ ID NO: 251357 - RNA, 19 nt, Homo sapiens
  misc_RNA (1)...(19): siRNA sense strand
gagacaagguccugggaua

SEQ ID NO: 251358 - RNA, 19 nt, Homo sapiens
  misc_RNA (1)...(19): siRNA sense strand
gcaaugggcuggacaucau

SEQ ID NO: 251359 - RNA, 19 nt, Homo sapiens
  misc_RNA (1)...(19): siRNA sense strand
gaaagugcuacacauuuaa

SEQ ID NO: 251360 - RNA, 19 nt, Homo sapiens
  misc_RNA (1)...(19): siRNA sense strand
ggccauagaugccaugcuu

SEQ ID NO: 251361 - RNA, 19 nt, Homo sapiens
  misc_RNA (1)...(19): siRNA sense strand
gggaaagugcuacacauuu

SEQ ID NO: 251362 - RNA, 19 nt, Homo sapiens
  misc_RNA (1)...(19): siRNA sense strand
ugacauggcgcaacucuau

SEQ ID NO: 251363 - RNA, 19 nt, Homo sapiens
  misc_RNA (1)...(19): siRNA sense strand
acaagguccugggauauuu

SEQ ID NO: 251364 - RNA, 19 nt, Homo sapiens
  misc_RNA (1)...(19): siRNA sense strand
gauccuagacuaccucugu

SEQ ID NO: 251365 - RNA, 19 nt, Homo sapiens
  misc_RNA (1)...(19): siRNA sense strand
gaacuucaccacgaucuuc

SEQ ID NO: 251366 - RNA, 19 nt, Homo sapiens
  misc_RNA (1)...(19): siRNA sense strand
gaaggccuaugagauguca

SEQ ID NO: 251367 - RNA, 19 nt, Homo sapiens
  misc_RNA (1)...(19): siRNA sense strand
uaccagaccuuuguuucuu

SEQ ID NO: 251368 - RNA, 19 nt, Homo sapiens
  misc_RNA (1)...(19): siRNA sense strand
gacaagguccugggauauu

SEQ ID NO: 251369 - RNA, 19 nt, Homo sapiens
  misc_RNA (1)...(19): siRNA sense strand
gcagcaggaggaauaucua

SEQ ID NO: 251370 - RNA, 19 nt, Homo sapiens
  misc_RNA (1)...(19): siRNA sense strand
cagaagaaggccuaugaga

SEQ ID NO: 251371 - RNA, 19 nt, Homo sapiens
  misc_RNA (1)...(19): siRNA sense strand
agaagaaggccuaugagau

SEQ ID NO: 251372 - RNA, 19 nt, Homo sapiens
  misc_RNA (1)...(19): siRNA sense strand
ccugcuaccuugucacaca

SEQ ID NO: 251373 - RNA, 19 nt, Homo sapiens
  misc_RNA (1)...(19): siRNA sense strand
gaugggaaagugcuacaca

SEQ ID NO: 251374 - RNA, 19 nt, Homo sapiens
  misc_RNA (1)...(19): siRNA sense strand
aagaaggccuaugagaugu

SEQ ID NO: 251375 - RNA, 19 nt, Homo sapiens
  misc_RNA (1)...(19): siRNA sense strand
cccuggacaucuucuuuga

SEQ ID NO: 251376 - RNA, 19 nt, Homo sapiens
  misc_RNA (1)...(19): siRNA sense strand
cugagagggugcgcuacua

SEQ ID NO: 251377 - RNA, 19 nt, Homo sapiens
  misc_RNA (1)...(19): siRNA sense strand
cgauugcaguucagcaucu

SEQ ID NO: 251378 - RNA, 19 nt, Homo sapiens
  misc_RNA (1)...(19): siRNA sense strand
gcuaccagaccuuuguuuc

SEQ ID NO: 251379 - RNA, 19 nt, Homo sapiens
  misc_RNA (1)...(19): siRNA sense strand
gcagaagaaggccuaugag

SEQ ID NO: 251380 - RNA, 19 nt, Homo sapiens
  misc_RNA (1)...(19): siRNA sense strand
ugggaaagugcuacacauu

SEQ ID NO: 251381 - RNA, 19 nt, Homo sapiens
  misc_RNA (1)...(19): siRNA sense strand
gcugucacccugugcaaca

SEQ ID NO: 251382 - RNA, 19 nt, Homo sapiens
  misc_RNA (1)...(19): siRNA sense strand
gcccuggacaucuucuuug

SEQ ID NO: 251383 - RNA, 19 nt, Homo sapiens
  misc_RNA (1)...(19): siRNA sense strand
ggcccuggacaucuucuuu

SEQ ID NO: 251384 - RNA, 19 nt, Homo sapiens
  misc_RNA (1)...(19): siRNA sense strand
ggacgugcagcaggaggaa

SEQ ID NO: 251385 - RNA, 19 nt, Homo sapiens
  misc_RNA (1)...(19): siRNA sense strand
ccaccgcaccugcuaccuu

SEQ ID NO: 251386 - RNA, 19 nt, Homo sapiens
  misc_RNA (1)...(19): siRNA sense strand
agagcugcuuggugacauu

SEQ ID NO: 251387 - RNA, 19 nt, Homo sapiens
  misc_RNA (1)...(19): siRNA sense strand
ggcacucccuggaugacau

SEQ ID NO: 251388 - RNA, 19 nt, Homo sapiens
  misc_RNA (1)...(19): siRNA sense strand
gagagggugcgcuacuaca

SEQ ID NO: 251389 - RNA, 19 nt, Homo sapiens
  misc_RNA (1)...(19): siRNA sense strand
agacaagguccugggauau

SEQ ID NO: 251390 - RNA, 19 nt, Homo sapiens
  misc_RNA (1)...(19): siRNA sense strand
gaggaauaucuaccugugu

SEQ ID NO: 251391 - RNA, 19 nt, Homo sapiens
  misc_RNA (1)...(19): siRNA sense strand
ggcaaugggcuggacauca

SEQ ID NO: 251392 - RNA, 19 nt, Homo sapiens
  misc_RNA (1)...(19): siRNA sense strand
ugugagguguuccgagaca

SEQ ID NO: 251393 - RNA, 19 nt, Homo sapiens
  misc_RNA (1)...(19): siRNA sense strand
agcagaagaaggccuauga

SEQ ID NO: 251394 - RNA, 19 nt, Homo sapiens
  misc_RNA (1)...(19): siRNA sense strand
aggccuacaucgcggagaa

SEQ ID NO: 251395 - RNA, 19 nt, Homo sapiens
  misc_RNA (1)...(19): siRNA sense strand
ggaaagugcuacacauuua

SEQ ID NO: 251396 - RNA, 19 nt, Homo sapiens
  misc_RNA (1)...(19): siRNA sense strand
gaagaaggccuaugagaug

SEQ ID NO: 251397 - RNA, 19 nt, Homo sapiens
  misc_RNA (1)...(19): siRNA sense strand
gagacaagguccugggaua

SEQ ID NO: 251398 - RNA, 19 nt, Homo sapiens
  misc_RNA (1)...(19): siRNA sense strand
gcaaugggcuggacaucau

SEQ ID NO: 251399 - RNA, 19 nt, Homo sapiens
  misc_RNA (1)...(19): siRNA sense strand
gaaagugcuacacauuuaa

SEQ ID NO: 251400 - RNA, 19 nt, Homo sapiens
  misc_RNA (1)...(19): siRNA sense strand
ggccauagaugccaugcuu

SEQ ID NO: 251401 - RNA, 19 nt, Homo sapiens
  misc_RNA (1)...(19): siRNA sense strand
gggaaagugcuacacauuu

SEQ ID NO: 251402 - RNA, 19 nt, Homo sapiens
  misc_RNA (1)...(19): siRNA sense strand
ugacauggcgcaacucuau

SEQ ID NO: 251403 - RNA, 19 nt, Homo sapiens
  misc_RNA (1)...(19): siRNA sense strand
acaagguccugggauauuu

SEQ ID NO: 251404 - RNA, 19 nt, Homo sapiens
  misc_RNA (1)...(19): siRNA sense strand
gauccuagacuaccucugu

SEQ ID NO: 251405 - RNA, 19 nt, Homo sapiens
  misc_RNA (1)...(19): siRNA sense strand
gaacuucaccacgaucuuc

SEQ ID NO: 251406 - RNA, 19 nt, Homo sapiens
  misc_RNA (1)...(19): siRNA sense strand
gaaggccuaugagauguca

SEQ ID NO: 251407 - RNA, 19 nt, Homo sapiens
  misc_RNA (1)...(19): siRNA sense strand
uaccagaccuuuguuucuu

SEQ ID NO: 251408 - RNA, 19 nt, Homo sapiens
  misc_RNA (1)...(19): siRNA sense strand
gacaagguccugggauauu

SEQ ID NO: 251409 - RNA, 19 nt, Homo sapiens
  misc_RNA (1)...(19): siRNA sense strand
gcagcaggaggaauaucua

SEQ ID NO: 251410 - RNA, 19 nt, Homo sapiens
  misc_RNA (1)...(19): siRNA sense strand
cagaagaaggccuaugaga

SEQ ID NO: 251411 - RNA, 19 nt, Homo sapiens
  misc_RNA (1)...(19): siRNA sense strand
agaagaaggccuaugagau

SEQ ID NO: 251412 - RNA, 19 nt, Homo sapiens
  misc_RNA (1)...(19): siRNA sense strand
ccugcuaccuugucacaca

SEQ ID NO: 251413 - RNA, 19 nt, Homo sapiens
  misc_RNA (1)...(19): siRNA sense strand
gaugggaaagugcuacaca

SEQ ID NO: 251414 - RNA, 19 nt, Homo sapiens
  misc_RNA (1)...(19): siRNA sense strand
aagaaggccuaugagaugu

SEQ ID NO: 251415 - RNA, 19 nt, Homo sapiens
  misc_RNA (1)...(19): siRNA sense strand
cccuggacaucuucuuuga

SEQ ID NO: 251416 - RNA, 19 nt, Homo sapiens
  misc_RNA (1)...(19): siRNA sense strand
cugagagggugcgcuacua

SEQ ID NO: 251417 - RNA, 19 nt, Homo sapiens
  misc_RNA (1)...(19): siRNA sense strand
cgauugcaguucagcaucu

SEQ ID NO: 251418 - RNA, 19 nt, Homo sapiens
  misc_RNA (1)...(19): siRNA sense strand
gcuaccagaccuuuguuuc

SEQ ID NO: 251419 - RNA, 19 nt, Homo sapiens
  misc_RNA (1)...(19): siRNA sense strand
gcagaagaaggccuaugag

SEQ ID NO: 251420 - RNA, 19 nt, Homo sapiens
  misc_RNA (1)...(19): siRNA sense strand
ugggaaagugcuacacauu

SEQ ID NO: 251421 - RNA, 19 nt, Homo sapiens
  misc_RNA (1)...(19): siRNA sense strand
gcugucacccugugcaaca

SEQ ID NO: 251422 - RNA, 19 nt, Homo sapiens
  misc_RNA (1)...(19): siRNA sense strand
gcccuggacaucuucuuug

SEQ ID NO: 251423 - RNA, 19 nt, Homo sapiens
  misc_RNA (1)...(19): siRNA sense strand
ggcccuggacaucuucuuu

SEQ ID NO: 251424 - RNA, 19 nt, Homo sapiens
  misc_RNA (1)...(19): siRNA sense strand
ggacgugcagcaggaggaa

SEQ ID NO: 251425 - RNA, 19 nt, Homo sapiens
  misc_RNA (1)...(19): siRNA sense strand
ccaccgcaccugcuaccuu

SEQ ID NO: 251426 - RNA, 19 nt, Homo sapiens
  misc_RNA (1)...(19): siRNA sense strand
agagcugcuuggugacauu

SEQ ID NO: 251427 - RNA, 19 nt, Homo sapiens
  misc_RNA (1)...(19): siRNA sense strand
ggcacucccuggaugacau

SEQ ID NO: 251428 - RNA, 19 nt, Homo sapiens
  misc_RNA (1)...(19): siRNA sense strand
gagagggugcgcuacuaca

SEQ ID NO: 251429 - RNA, 19 nt, Homo sapiens
  misc_RNA (1)...(19): siRNA sense strand
agacaagguccugggauau

SEQ ID NO: 251430 - RNA, 19 nt, Homo sapiens
  misc_RNA (1)...(19): siRNA sense strand
gaggaauaucuaccugugu

SEQ ID NO: 251431 - RNA, 19 nt, Homo sapiens
  misc_RNA (1)...(19): siRNA sense strand
ggcaaugggcuggacauca

SEQ ID NO: 251432 - RNA, 19 nt, Homo sapiens
  misc_RNA (1)...(19): siRNA sense strand
ugugagguguuccgagaca

SEQ ID NO: 251433 - RNA, 19 nt, Homo sapiens
  misc_RNA (1)...(19): siRNA sense strand
agcagaagaaggccuauga

SEQ ID NO: 251434 - RNA, 19 nt, Homo sapiens
  misc_RNA (1)...(19): siRNA sense strand
aggccuacaucgcggagaa

SEQ ID NO: 251435 - RNA, 19 nt, Homo sapiens
  misc_RNA (1)...(19): siRNA sense strand
ggaaagugcuacacauuua

SEQ ID NO: 251436 - RNA, 19 nt, Homo sapiens
  misc_RNA (1)...(19): siRNA sense strand
gaagaaggccuaugagaug

SEQ ID NO: 251437 - RNA, 19 nt, Homo sapiens
  misc_RNA (1)...(19): siRNA sense strand
gagacaagguccugggaua

SEQ ID NO: 251438 - RNA, 19 nt, Homo sapiens
  misc_RNA (1)...(19): siRNA sense strand
gcaaugggcuggacaucau

SEQ ID NO: 251439 - RNA, 19 nt, Homo sapiens
  misc_RNA (1)...(19): siRNA sense strand
gaaagugcuacacauuuaa

SEQ ID NO: 251440 - RNA, 19 nt, Homo sapiens
  misc_RNA (1)...(19): siRNA sense strand
ggccauagaugccaugcuu

SEQ ID NO: 251441 - RNA, 19 nt, Homo sapiens
  misc_RNA (1)...(19): siRNA sense strand
gggaaagugcuacacauuu

SEQ ID NO: 251442 - RNA, 19 nt, Homo sapiens
  misc_RNA (1)...(19): siRNA sense strand
ugacauggcgcaacucuau

SEQ ID NO: 251443 - RNA, 19 nt, Homo sapiens
  misc_RNA (1)...(19): siRNA sense strand
acaagguccugggauauuu

SEQ ID NO: 251444 - RNA, 19 nt, Homo sapiens
  misc_RNA (1)...(19): siRNA sense strand
gauccuagacuaccucugu

SEQ ID NO: 251445 - RNA, 19 nt, Homo sapiens
  misc_RNA (1)...(19): siRNA sense strand
gaacuucaccacgaucuuc

SEQ ID NO: 251446 - RNA, 19 nt, Homo sapiens
  misc_RNA (1)...(19): siRNA sense strand
gaaggccuaugagauguca

SEQ ID NO: 251447 - RNA, 19 nt, Homo sapiens
  misc_RNA (1)...(19): siRNA sense strand
uaccagaccuuuguuucuu

SEQ ID NO: 251448 - RNA, 19 nt, Homo sapiens
  misc_RNA (1)...(19): siRNA sense strand
gacaagguccugggauauu

SEQ ID NO: 251449 - RNA, 19 nt, Homo sapiens
  misc_RNA (1)...(19): siRNA sense strand
gcagcaggaggaauaucua

SEQ ID NO: 251450 - RNA, 19 nt, Homo sapiens
  misc_RNA (1)...(19): siRNA sense strand
cagaagaaggccuaugaga

SEQ ID NO: 251451 - RNA, 19 nt, Homo sapiens
  misc_RNA (1)...(19): siRNA sense strand
agaagaaggccuaugagau

SEQ ID NO: 251452 - RNA, 19 nt, Homo sapiens
  misc_RNA (1)...(19): siRNA sense strand
ccugcuaccuugucacaca

SEQ ID NO: 251453 - RNA, 19 nt, Homo sapiens
  misc_RNA (1)...(19): siRNA sense strand
gcccugacauccuggacau

SEQ ID NO: 251454 - RNA, 19 nt, Homo sapiens
  misc_RNA (1)...(19): siRNA sense strand
gaugggaaagugcuacaca

SEQ ID NO: 251455 - RNA, 19 nt, Homo sapiens
  misc_RNA (1)...(19): siRNA sense strand
aagaaggccuaugagaugu

SEQ ID NO: 251456 - RNA, 19 nt, Homo sapiens
  misc_RNA (1)...(19): siRNA sense strand
cccuggacaucuucuuuga

SEQ ID NO: 251457 - RNA, 19 nt, Homo sapiens
  misc_RNA (1)...(19): siRNA sense strand
cugagagggugcgcuacua

SEQ ID NO: 251458 - RNA, 19 nt, Homo sapiens
  misc_RNA (1)...(19): siRNA sense strand
cgauugcaguucagcaucu

SEQ ID NO: 251459 - RNA, 19 nt, Homo sapiens
  misc_RNA (1)...(19): siRNA sense strand
gcuaccagaccuuuguuuc

SEQ ID NO: 251460 - RNA, 19 nt, Homo sapiens
  misc_RNA (1)...(19): siRNA sense strand
gcagaagaaggccuaugag

SEQ ID NO: 251461 - RNA, 19 nt, Homo sapiens
  misc_RNA (1)...(19): siRNA sense strand
gcugucacccugugcaaca

SEQ ID NO: 251462 - RNA, 19 nt, Homo sapiens
  misc_RNA (1)...(19): siRNA sense strand
gcccuggacaucuucuuug

SEQ ID NO: 251463 - RNA, 19 nt, Homo sapiens
  misc_RNA (1)...(19): siRNA sense strand
ggcccuggacaucuucuuu

SEQ ID NO: 251464 - RNA, 19 nt, Homo sapiens
  misc_RNA (1)...(19): siRNA sense strand
ugggaaagugcuacacauu

SEQ ID NO: 251465 - RNA, 19 nt, Homo sapiens
  misc_RNA (1)...(19): siRNA sense strand
ggacgugcagcaggaggaa

SEQ ID NO: 251466 - RNA, 19 nt, Homo sapiens
  misc_RNA (1)...(19): siRNA sense strand
ccaccgcaccugcuaccuu

SEQ ID NO: 251467 - RNA, 19 nt, Homo sapiens
  misc_RNA (1)...(19): siRNA sense strand
agagcugcuuggugacauu

SEQ ID NO: 251468 - RNA, 19 nt, Homo sapiens
  misc_RNA (1)...(19): siRNA sense strand
ggcacucccuggaugacau

SEQ ID NO: 251469 - RNA, 19 nt, Homo sapiens
  misc_RNA (1)...(19): siRNA sense strand
gagagggugcgcuacuaca

SEQ ID NO: 251470 - RNA, 19 nt, Homo sapiens
  misc_RNA (1)...(19): siRNA sense strand
agacaagguccugggauau

SEQ ID NO: 251471 - RNA, 19 nt, Homo sapiens
  misc_RNA (1)...(19): siRNA sense strand
gaggaauaucuaccugugu

SEQ ID NO: 251472 - RNA, 19 nt, Homo sapiens
  misc_RNA (1)...(19): siRNA sense strand
ggcaaugggcuggacauca

SEQ ID NO: 251473 - RNA, 19 nt, Homo sapiens
  misc_RNA (1)...(19): siRNA sense strand
ugugagguguuccgagaca

SEQ ID NO: 251474 - RNA, 19 nt, Homo sapiens
  misc_RNA (1)...(19): siRNA sense strand
agcagaagaaggccuauga

SEQ ID NO: 251475 - RNA, 19 nt, Homo sapiens
  misc_RNA (1)...(19): siRNA sense strand
aggccuacaucgcggagaa

SEQ ID NO: 251476 - RNA, 19 nt, Homo sapiens
  misc_RNA (1)...(19): siRNA sense strand
caucauggcuuugaaguuu

SEQ ID NO: 251477 - RNA, 19 nt, Homo sapiens
  misc_RNA (1)...(19): siRNA sense strand
ccaaaucgaugcugcugua

SEQ ID NO: 251478 - RNA, 19 nt, Homo sapiens
  misc_RNA (1)...(19): siRNA sense strand
aggcguaucuugacaaaua

SEQ ID NO: 251479 - RNA, 19 nt, Homo sapiens
  misc_RNA (1)...(19): siRNA sense strand
gcacugauguacccaacuu

SEQ ID NO: 251480 - RNA, 19 nt, Homo sapiens
  misc_RNA (1)...(19): siRNA sense strand
ggaugcagcuuacgaagug

SEQ ID NO: 251481 - RNA, 19 nt, Homo sapiens
  misc_RNA (1)...(19): siRNA sense strand
caaugaacgugaucaagaa

SEQ ID NO: 251482 - RNA, 19 nt, Homo sapiens
  misc_RNA (1)...(19): siRNA sense strand
cgaugcugcuguagaauua

SEQ ID NO: 251483 - RNA, 19 nt, Homo sapiens
  misc_RNA (1)...(19): siRNA sense strand
gaaggaagaugugguuagu

SEQ ID NO: 251484 - RNA, 19 nt, Homo sapiens
  misc_RNA (1)...(19): siRNA sense strand
ugaaagggauccaggcauu

SEQ ID NO: 251485 - RNA, 19 nt, Homo sapiens
  misc_RNA (1)...(19): siRNA sense strand
guacaagaaucccuaugga

SEQ ID NO: 251486 - RNA, 19 nt, Homo sapiens
  misc_RNA (1)...(19): siRNA sense strand
caaagaauacugaagaaga

SEQ ID NO: 251487 - RNA, 19 nt, Homo sapiens
  misc_RNA (1)...(19): siRNA sense strand
ggacaaagcaguggagaug

SEQ ID NO: 251488 - RNA, 19 nt, Homo sapiens
  misc_RNA (1)...(19): siRNA sense strand
gggaggagauacacauuuc

SEQ ID NO: 251489 - RNA, 19 nt, Homo sapiens
  misc_RNA (1)...(19): siRNA sense strand
gaaagggauccaggcauua

SEQ ID NO: 251490 - RNA, 19 nt, Homo sapiens
  misc_RNA (1)...(19): siRNA sense strand
uaaagaaggacaccagauu

SEQ ID NO: 251491 - RNA, 19 nt, Homo sapiens
  misc_RNA (1)...(19): siRNA sense strand
ggaauucggcccagcacua

SEQ ID NO: 251492 - RNA, 19 nt, Homo sapiens
  misc_RNA (1)...(19): siRNA sense strand
gcacaggcguaucuugaca

SEQ ID NO: 251493 - RNA, 19 nt, Homo sapiens
  misc_RNA (1)...(19): siRNA sense strand
agaagcggauauuaugaua

SEQ ID NO: 251494 - RNA, 19 nt, Homo sapiens
  misc_RNA (1)...(19): siRNA sense strand
auacggaccucggaaagua

SEQ ID NO: 251495 - RNA, 19 nt, Homo sapiens
  misc_RNA (1)...(19): siRNA sense strand
gggcacugcuuacuucuuc

SEQ ID NO: 251496 - RNA, 19 nt, Homo sapiens
  misc_RNA (1)...(19): siRNA sense strand
ccaagucaccgggaaguua

SEQ ID NO: 251497 - RNA, 19 nt, Homo sapiens
  misc_RNA (1)...(19): siRNA sense strand
uuccugauguggccaauua

SEQ ID NO: 251498 - RNA, 19 nt, Homo sapiens
  misc_RNA (1)...(19): siRNA sense strand
cagaauaaacucaggagaa

SEQ ID NO: 251499 - RNA, 19 nt, Homo sapiens
  misc_RNA (1)...(19): siRNA sense strand
ugauguacccaacuuauaa

SEQ ID NO: 251500 - RNA, 19 nt, Homo sapiens
  misc_RNA (1)...(19): siRNA sense strand
ggagaagcggauauuauga

SEQ ID NO: 251501 - RNA, 19 nt, Homo sapiens
  misc_RNA (1)...(19): siRNA sense strand
aaucgaugcugcuguagaa

SEQ ID NO: 251502 - RNA, 19 nt, Homo sapiens
  misc_RNA (1)...(19): siRNA sense strand
ggaccuggaggaacaacua

SEQ ID NO: 251503 - RNA, 19 nt, Homo sapiens
  misc_RNA (1)...(19): siRNA sense strand
caaggcacgugcagcaaau

SEQ ID NO: 251504 - RNA, 19 nt, Homo sapiens
  misc_RNA (1)...(19): siRNA sense strand
gacucuagcccaugcauuu

SEQ ID NO: 251505 - RNA, 19 nt, Homo sapiens
  misc_RNA (1)...(19): siRNA sense strand
agaauaaacucaggagaag

SEQ ID NO: 251506 - RNA, 19 nt, Homo sapiens
  misc_RNA (1)...(19): siRNA sense strand
gagaagcggauauuaugau

SEQ ID NO: 251507 - RNA, 19 nt, Homo sapiens
  misc_RNA (1)...(19): siRNA sense strand
acaagaggauuccaaaugc

SEQ ID NO: 251508 - RNA, 19 nt, Homo sapiens
  misc_RNA (1)...(19): siRNA sense strand
acaaugaacgugaucaaga

SEQ ID NO: 251509 - RNA, 19 nt, Homo sapiens
  misc_RNA (1)...(19): siRNA sense strand
uggcuacauuuacuucuuu

SEQ ID NO: 251510 - RNA, 19 nt, Homo sapiens
  misc_RNA (1)...(19): siRNA sense strand
gagaugaauacuacagcua

SEQ ID NO: 251511 - RNA, 19 nt, Homo sapiens
  misc_RNA (1)...(19): siRNA sense strand
gagauacacauuucgacaa

SEQ ID NO: 251512 - RNA, 19 nt, Homo sapiens
  misc_RNA (1)...(19): siRNA sense strand
auacacaccuuccaugagu

SEQ ID NO: 251513 - RNA, 19 nt, Homo sapiens
  misc_RNA (1)...(19): siRNA sense strand
ccaauguggaugcagcuua

SEQ ID NO: 251514 - RNA, 19 nt, Homo sapiens
  misc_RNA (1)...(19): siRNA sense strand
aggaagaugugguuagugu

SEQ ID NO: 251515 - RNA, 19 nt, Homo sapiens
  misc_RNA (1)...(19): siRNA sense strand
caagaggauuccaaaugca

SEQ ID NO: 251516 - RNA, 19 nt, Homo sapiens
  misc_RNA (1)...(19): siRNA sense strand
caggagaagcggauauuau

SEQ ID NO: 251517 - RNA, 19 nt, Homo sapiens
  misc_RNA (1)...(19): siRNA sense strand
acacagagaaggaagaugu

SEQ ID NO: 251518 - RNA, 19 nt, Homo sapiens
  misc_RNA (1)...(19): siRNA sense strand
ccugagaaguggacuaugg

SEQ ID NO: 251519 - RNA, 19 nt, Homo sapiens
  misc_RNA (1)...(19): siRNA sense strand
gauaacaagaggauuccaa

SEQ ID NO: 251520 - RNA, 19 nt, Homo sapiens
  misc_RNA (1)...(19): siRNA sense strand
aaagaaggacaccagauug

SEQ ID NO: 251521 - RNA, 19 nt, Homo sapiens
  misc_RNA (1)...(19): siRNA sense strand
cguugcugcucaugaauuu

SEQ ID NO: 251522 - RNA, 19 nt, Homo sapiens
  misc_RNA (1)...(19): siRNA sense strand
gcacgugcagcaaauagau

SEQ ID NO: 251523 - RNA, 19 nt, Homo sapiens
  misc_RNA (1)...(19): siRNA sense strand
ggagacggcagguucacuu

SEQ ID NO: 251524 - RNA, 19 nt, Homo sapiens
  misc_RNA (1)...(19): siRNA sense strand
gacuccagcucauccuuug

SEQ ID NO: 251525 - RNA, 19 nt, Homo sapiens
  misc_RNA (1)...(19): siRNA sense strand
caucuggccuugcugucuu

SEQ ID NO: 251526 - RNA, 19 nt, Homo sapiens
  misc_RNA (1)...(19): siRNA sense strand
gcuguggaguuccugaugu

SEQ ID NO: 251527 - RNA, 19 nt, Homo sapiens
  misc_RNA (1)...(19): siRNA sense strand
gagaaggaagaugugguua

SEQ ID NO: 251528 - RNA, 19 nt, Homo sapiens
  misc_RNA (1)...(19): siRNA sense strand
ccaaagaugaugugaaagg

SEQ ID NO: 251529 - RNA, 19 nt, Homo sapiens
  misc_RNA (1)...(19): siRNA sense strand
ccagauuggugagaugguu

SEQ ID NO: 251530 - RNA, 19 nt, Homo sapiens
  misc_RNA (1)...(19): siRNA sense strand
agauacacauuucgacaau

SEQ ID NO: 251531 - RNA, 19 nt, Homo sapiens
  misc_RNA (1)...(19): siRNA sense strand
caauguggaugcagcuuac

SEQ ID NO: 251532 - RNA, 19 nt, Homo sapiens
  misc_RNA (1)...(19): siRNA sense strand
gaauucggcccagcacuau

SEQ ID NO: 251533 - RNA, 19 nt, Homo sapiens
  misc_RNA (1)...(19): siRNA sense strand
gaagcaauuccaugauaag

SEQ ID NO: 251534 - RNA, 19 nt, Homo sapiens
  misc_RNA (1)...(19): siRNA sense strand
uaccguugcugcucaugaa

SEQ ID NO: 251535 - RNA, 19 nt, Homo sapiens
  misc_RNA (1)...(19): siRNA sense strand
aggaguaaauggccaaauc

SEQ ID NO: 251536 - RNA, 19 nt, Homo sapiens
  misc_RNA (1)...(19): siRNA sense strand
gaagaauuuucaggaguaa

SEQ ID NO: 251537 - RNA, 19 nt, Homo sapiens
  misc_RNA (1)...(19): siRNA sense strand
cagcuacgacgaaaggaaa

SEQ ID NO: 251538 - RNA, 19 nt, Homo sapiens
  misc_RNA (1)...(19): siRNA sense strand
ggccaauuaucgccucuuc

SEQ ID NO: 251539 - RNA, 19 nt, Homo sapiens
  misc_RNA (1)...(19): siRNA sense strand
ggaaaaggaaaauggaaaa

SEQ ID NO: 251540 - RNA, 19 nt, Homo sapiens
  misc_RNA (1)...(19): siRNA sense strand
uccaugauaaggaagauua

SEQ ID NO: 251541 - RNA, 19 nt, Homo sapiens
  misc_RNA (1)...(19): siRNA sense strand
aaauacacaccuuccauga

SEQ ID NO: 251542 - RNA, 19 nt, Homo sapiens
  misc_RNA (1)...(19): siRNA sense strand
ccccaaagaugaugugaaa

SEQ ID NO: 251543 - RNA, 19 nt, Homo sapiens
  misc_RNA (1)...(19): siRNA sense strand
uccaaagaauacugaagaa

SEQ ID NO: 251544 - RNA, 19 nt, Homo sapiens
  misc_RNA (1)...(19): siRNA sense strand
acaggcguaucuugacaaa

SEQ ID NO: 251545 - RNA, 19 nt, Homo sapiens
  misc_RNA (1)...(19): siRNA sense strand
ugugggagaugaauacuac

SEQ ID NO: 251546 - RNA, 19 nt, Homo sapiens
  misc_RNA (1)...(19): siRNA sense strand
ccaaggcacgugcagcaaa

SEQ ID NO: 251547 - RNA, 19 nt, Homo sapiens
  misc_RNA (1)...(19): siRNA sense strand
gagcuacaagcguucuuug

SEQ ID NO: 251548 - RNA, 19 nt, Homo sapiens
  misc_RNA (1)...(19): siRNA sense strand
agaagaauuuucaggagua

SEQ ID NO: 251549 - RNA, 19 nt, Homo sapiens
  misc_RNA (1)...(19): siRNA sense strand
gaaaggaaaaggaaaaugg

SEQ ID NO: 251550 - RNA, 19 nt, Homo sapiens
  misc_RNA (1)...(19): siRNA sense strand
aacaagaggauuccaaaug

SEQ ID NO: 251551 - RNA, 19 nt, Homo sapiens
  misc_RNA (1)...(19): siRNA sense strand
ggagcuacaagcguucuuu

SEQ ID NO: 251552 - RNA, 19 nt, Homo sapiens
  misc_RNA (1)...(19): siRNA sense strand
ucaggagaagcggauauua

SEQ ID NO: 251553 - RNA, 19 nt, Homo sapiens
  misc_RNA (1)...(19): siRNA sense strand
ucuaguuccuggauugguu

SEQ ID NO: 251554 - RNA, 19 nt, Homo sapiens
  misc_RNA (1)...(19): siRNA sense strand
uaacaagaggauuccaaau

SEQ ID NO: 251555 - RNA, 19 nt, Homo sapiens
  misc_RNA (1)...(19): siRNA sense strand
gaggagauacacauuucga

SEQ ID NO: 251556 - RNA, 19 nt, Homo sapiens
  misc_RNA (1)...(19): siRNA sense strand
acaaguaugacacagagaa

SEQ ID NO: 251557 - RNA, 19 nt, Homo sapiens
  misc_RNA (1)...(19): siRNA sense strand
gaagauuaaggagcuacaa

SEQ ID NO: 251558 - RNA, 19 nt, Homo sapiens
  misc_RNA (1)...(19): siRNA sense strand
gacuauuuaugacuuugga

SEQ ID NO: 251559 - RNA, 19 nt, Homo sapiens
  misc_RNA (1)...(19): siRNA sense strand
gaaggccugggaggagaua

SEQ ID NO: 251560 - RNA, 19 nt, Homo sapiens
  misc_RNA (1)...(19): siRNA sense strand
guuccuggauugguugcua

SEQ ID NO: 251561 - RNA, 19 nt, Homo sapiens
  misc_RNA (1)...(19): siRNA sense strand
aggagaagcggauauuaug

SEQ ID NO: 251562 - RNA, 19 nt, Homo sapiens
  misc_RNA (1)...(19): siRNA sense strand
uuaguguggugaaaucuag

SEQ ID NO: 251563 - RNA, 19 nt, Homo sapiens
  misc_RNA (1)...(19): siRNA sense strand
gcacugcuuacuucuucaa

SEQ ID NO: 251564 - RNA, 19 nt, Homo sapiens
  misc_RNA (1)...(19): siRNA sense strand
ugauaaggaagauuaagga

SEQ ID NO: 251565 - RNA, 19 nt, Homo sapiens
  misc_RNA (1)...(19): siRNA sense strand
ggcguaucuugacaaauau

SEQ ID NO: 251566 - RNA, 19 nt, Homo sapiens
  misc_RNA (1)...(19): siRNA sense strand
cugauguacccaacuuaua

SEQ ID NO: 251567 - RNA, 19 nt, Homo sapiens
  misc_RNA (1)...(19): siRNA sense strand
ccacaaugaacgugaucaa

SEQ ID NO: 251568 - RNA, 19 nt, Homo sapiens
  misc_RNA (1)...(19): siRNA sense strand
gaggggcacugcuuacuuc

SEQ ID NO: 251569 - RNA, 19 nt, Homo sapiens
  misc_RNA (1)...(19): siRNA sense strand
ucgcacaggcguaucuuga

SEQ ID NO: 251570 - RNA, 19 nt, Homo sapiens
  misc_RNA (1)...(19): siRNA sense strand
agagaaggaagaugugguu

SEQ ID NO: 251571 - RNA, 19 nt, Homo sapiens
  misc_RNA (1)...(19): siRNA sense strand
caagucaccgggaaguuag

SEQ ID NO: 251572 - RNA, 19 nt, Homo sapiens
  misc_RNA (1)...(19): siRNA sense strand
auucggcccagcacuauua

SEQ ID NO: 251573 - RNA, 19 nt, Homo sapiens
  misc_RNA (1)...(19): siRNA sense strand
ugacuccagcucauccuuu

SEQ ID NO: 251574 - RNA, 19 nt, Homo sapiens
  misc_RNA (1)...(19): siRNA sense strand
gauacacauuucgacaauc

SEQ ID NO: 251575 - RNA, 19 nt, Homo sapiens
  misc_RNA (1)...(19): siRNA sense strand
ggacucuagcccaugcauu

SEQ ID NO: 251576 - RNA, 19 nt, Homo sapiens
  misc_RNA (1)...(19): siRNA sense strand
gcaggaagcuggaaaggaa

SEQ ID NO: 251577 - RNA, 19 nt, Homo sapiens
  misc_RNA (1)...(19): siRNA sense strand
gaaagaaccuggagcaaag

SEQ ID NO: 251578 - RNA, 19 nt, Homo sapiens
  misc_RNA (1)...(19): siRNA sense strand
aaagauggauccaaaguaa

SEQ ID NO: 251579 - RNA, 19 nt, Homo sapiens
  misc_RNA (1)...(19): siRNA sense strand
gggcaaagauggauccaaa

SEQ ID NO: 251580 - RNA, 19 nt, Homo sapiens
  misc_RNA (1)...(19): siRNA sense strand
gaaccuggagcaaagauua

SEQ ID NO: 251581 - RNA, 19 nt, Homo sapiens
  misc_RNA (1)...(19): siRNA sense strand
gauccaaaguaacuaaaca

SEQ ID NO: 251582 - RNA, 19 nt, Homo sapiens
  misc_RNA (1)...(19): siRNA sense strand
caaagauggauccaaagua

SEQ ID NO: 251583 - RNA, 19 nt, Homo sapiens
  misc_RNA (1)...(19): siRNA sense strand
aaacaucugcuaagaaaga

SEQ ID NO: 251584 - RNA, 19 nt, Homo sapiens
  misc_RNA (1)...(19): siRNA sense strand
gcaaagauggauccaaagu

SEQ ID NO: 251585 - RNA, 19 nt, Homo sapiens
  misc_RNA (1)...(19): siRNA sense strand
gaauacagagggcaaagau

SEQ ID NO: 251586 - RNA, 19 nt, Homo sapiens
  misc_RNA (1)...(19): siRNA sense strand
gaaaccugcuccaccaaaa

SEQ ID NO: 251587 - RNA, 19 nt, Homo sapiens
  misc_RNA (1)...(19): siRNA sense strand
agaaagaaccuggagcaaa

SEQ ID NO: 251588 - RNA, 19 nt, Homo sapiens
  misc_RNA (1)...(19): siRNA sense strand
cgaaaccugcuccaccaaa

SEQ ID NO: 251589 - RNA, 19 nt, Homo sapiens
  misc_RNA (1)...(19): siRNA sense strand
agauaacgagggagaauga

SEQ ID NO: 251590 - RNA, 19 nt, Homo sapiens
  misc_RNA (1)...(19): siRNA sense strand
uaaacaggagcccacaaga

SEQ ID NO: 251591 - RNA, 19 nt, Homo sapiens
  misc_RNA (1)...(19): siRNA sense strand
guagauaacgagggagaau

SEQ ID NO: 251592 - RNA, 19 nt, Homo sapiens
  misc_RNA (1)...(19): siRNA sense strand
gugcuaaagggaagaagga

SEQ ID NO: 251593 - RNA, 19 nt, Homo sapiens
  misc_RNA (1)...(19): siRNA sense strand
ggaagaaggaggaaaagca

SEQ ID NO: 251594 - RNA, 19 nt, Homo sapiens
  misc_RNA (1)...(19): siRNA sense strand
cuaaacaggagcccacaag

SEQ ID NO: 251595 - RNA, 19 nt, Homo sapiens
  misc_RNA (1)...(19): siRNA sense strand
aaacaggagcccacaagac

SEQ ID NO: 251596 - RNA, 19 nt, Homo sapiens
  misc_RNA (1)...(19): siRNA sense strand
gcaggaagcuggaaaggaa

SEQ ID NO: 251597 - RNA, 19 nt, Homo sapiens
  misc_RNA (1)...(19): siRNA sense strand
gaaagaaccuggagcaaag

SEQ ID NO: 251598 - RNA, 19 nt, Homo sapiens
  misc_RNA (1)...(19): siRNA sense strand
aaagauggauccaaaguaa

SEQ ID NO: 251599 - RNA, 19 nt, Homo sapiens
  misc_RNA (1)...(19): siRNA sense strand
gggcaaagauggauccaaa

SEQ ID NO: 251600 - RNA, 19 nt, Homo sapiens
  misc_RNA (1)...(19): siRNA sense strand
gaaccuggagcaaagauua

SEQ ID NO: 251601 - RNA, 19 nt, Homo sapiens
  misc_RNA (1)...(19): siRNA sense strand
gauccaaaguaacuaaaca

SEQ ID NO: 251602 - RNA, 19 nt, Homo sapiens
  misc_RNA (1)...(19): siRNA sense strand
caaagauggauccaaagua

SEQ ID NO: 251603 - RNA, 19 nt, Homo sapiens
  misc_RNA (1)...(19): siRNA sense strand
aaacaucugcuaagaaaga

SEQ ID NO: 251604 - RNA, 19 nt, Homo sapiens
  misc_RNA (1)...(19): siRNA sense strand
gcaaagauggauccaaagu

SEQ ID NO: 251605 - RNA, 19 nt, Homo sapiens
  misc_RNA (1)...(19): siRNA sense strand
gaauacagagggcaaagau

SEQ ID NO: 251606 - RNA, 19 nt, Homo sapiens
  misc_RNA (1)...(19): siRNA sense strand
gaaaccugcuccaccaaaa

SEQ ID NO: 251607 - RNA, 19 nt, Homo sapiens
  misc_RNA (1)...(19): siRNA sense strand
agaaagaaccuggagcaaa

SEQ ID NO: 251608 - RNA, 19 nt, Homo sapiens
  misc_RNA (1)...(19): siRNA sense strand
cgaaaccugcuccaccaaa

SEQ ID NO: 251609 - RNA, 19 nt, Homo sapiens
  misc_RNA (1)...(19): siRNA sense strand
uaaacaggagcccacaaga

SEQ ID NO: 251610 - RNA, 19 nt, Homo sapiens
  misc_RNA (1)...(19): siRNA sense strand
gugcuaaagggaagaagga

SEQ ID NO: 251611 - RNA, 19 nt, Homo sapiens
  misc_RNA (1)...(19): siRNA sense strand
ggaagaaggaggaaaagca

SEQ ID NO: 251612 - RNA, 19 nt, Homo sapiens
  misc_RNA (1)...(19): siRNA sense strand
cuaaacaggagcccacaag

SEQ ID NO: 251613 - RNA, 19 nt, Homo sapiens
  misc_RNA (1)...(19): siRNA sense strand
aaacaggagcccacaagac

SEQ ID NO: 251614 - RNA, 19 nt, Homo sapiens
  misc_RNA (1)...(19): siRNA sense strand
gcagaaggcucucaaagua

SEQ ID NO: 251615 - RNA, 19 nt, Homo sapiens
  misc_RNA (1)...(19): siRNA sense strand
ggaaagccaucaucacuua

SEQ ID NO: 251616 - RNA, 19 nt, Homo sapiens
  misc_RNA (1)...(19): siRNA sense strand
gaggaaagcugaaaccauu

SEQ ID NO: 251617 - RNA, 19 nt, Homo sapiens
  misc_RNA (1)...(19): siRNA sense strand
gcagagaaaucuuaucaga

SEQ ID NO: 251618 - RNA, 19 nt, Homo sapiens
  misc_RNA (1)...(19): siRNA sense strand
ggaauuccauuguuugaaa

SEQ ID NO: 251619 - RNA, 19 nt, Homo sapiens
  misc_RNA (1)...(19): siRNA sense strand
ucaaauggcuucuucuaaa

SEQ ID NO: 251620 - RNA, 19 nt, Homo sapiens
  misc_RNA (1)...(19): siRNA sense strand
ggacugggcucucaucuca

SEQ ID NO: 251621 - RNA, 19 nt, Homo sapiens
  misc_RNA (1)...(19): siRNA sense strand
gcacaggaauuccauuguu

SEQ ID NO: 251622 - RNA, 19 nt, Homo sapiens
  misc_RNA (1)...(19): siRNA sense strand
uaaugaaccugaaguacua

SEQ ID NO: 251623 - RNA, 19 nt, Homo sapiens
  misc_RNA (1)...(19): siRNA sense strand
ggaagcagcccuuuagaaa

SEQ ID NO: 251624 - RNA, 19 nt, Homo sapiens
  misc_RNA (1)...(19): siRNA sense strand
acaacaaacugaagacuaa

SEQ ID NO: 251625 - RNA, 19 nt, Homo sapiens
  misc_RNA (1)...(19): siRNA sense strand
gaugaaaccucaaggaaag

SEQ ID NO: 251626 - RNA, 19 nt, Homo sapiens
  misc_RNA (1)...(19): siRNA sense strand
ggacagcuuugugauguaa

SEQ ID NO: 251627 - RNA, 19 nt, Homo sapiens
  misc_RNA (1)...(19): siRNA sense strand
gcacagagaaacauaagaa

SEQ ID NO: 251628 - RNA, 19 nt, Homo sapiens
  misc_RNA (1)...(19): siRNA sense strand
gaccaguccuugucuauga

SEQ ID NO: 251629 - RNA, 19 nt, Homo sapiens
  misc_RNA (1)...(19): siRNA sense strand
gaacaucugcuguguacaa

SEQ ID NO: 251630 - RNA, 19 nt, Homo sapiens
  misc_RNA (1)...(19): siRNA sense strand
gcaauuauguacuggaaag

SEQ ID NO: 251631 - RNA, 19 nt, Homo sapiens
  misc_RNA (1)...(19): siRNA sense strand
ggcaauggcaccaguaaua

SEQ ID NO: 251632 - RNA, 19 nt, Homo sapiens
  misc_RNA (1)...(19): siRNA sense strand
ggacaaagaccgagacaag

SEQ ID NO: 251633 - RNA, 19 nt, Homo sapiens
  misc_RNA (1)...(19): siRNA sense strand
ucaaguggcucuuccaugu

SEQ ID NO: 251634 - RNA, 19 nt, Homo sapiens
  misc_RNA (1)...(19): siRNA sense strand
ggaagaaggcagacacuga

SEQ ID NO: 251635 - RNA, 19 nt, Homo sapiens
  misc_RNA (1)...(19): siRNA sense strand
cgucagauauguucuaugu

SEQ ID NO: 251636 - RNA, 19 nt, Homo sapiens
  misc_RNA (1)...(19): siRNA sense strand
gaacuccuccauccucuaa

SEQ ID NO: 251637 - RNA, 19 nt, Homo sapiens
  misc_RNA (1)...(19): siRNA sense strand
gcaaagauaagccuccaaa

SEQ ID NO: 251638 - RNA, 19 nt, Homo sapiens
  misc_RNA (1)...(19): siRNA sense strand
gaaggaacaucugcugugu

SEQ ID NO: 251639 - RNA, 19 nt, Homo sapiens
  misc_RNA (1)...(19): siRNA sense strand
gaugaaagcagccaaagug

SEQ ID NO: 251640 - RNA, 19 nt, Homo sapiens
  misc_RNA (1)...(19): siRNA sense strand
ggaguucaguggauucuuc

SEQ ID NO: 251641 - RNA, 19 nt, Homo sapiens
  misc_RNA (1)...(19): siRNA sense strand
ucacagaacccuaucuuug

SEQ ID NO: 251642 - RNA, 19 nt, Homo sapiens
  misc_RNA (1)...(19): siRNA sense strand
gacaccaaguggccuauaa

SEQ ID NO: 251643 - RNA, 19 nt, Homo sapiens
  misc_RNA (1)...(19): siRNA sense strand
gaugaguucucuccuggaa

SEQ ID NO: 251644 - RNA, 19 nt, Homo sapiens
  misc_RNA (1)...(19): siRNA sense strand
ucagaagguucaucaaguu

SEQ ID NO: 251645 - RNA, 19 nt, Homo sapiens
  misc_RNA (1)...(19): siRNA sense strand
gaaagucuccaucucauag

SEQ ID NO: 251646 - RNA, 19 nt, Homo sapiens
  misc_RNA (1)...(19): siRNA sense strand
ucugaugucuuucaaacua

SEQ ID NO: 251647 - RNA, 19 nt, Homo sapiens
  misc_RNA (1)...(19): siRNA sense strand
ugacauccuuucagacauu

SEQ ID NO: 251648 - RNA, 19 nt, Homo sapiens
  misc_RNA (1)...(19): siRNA sense strand
caugugagcuguaaacucu

SEQ ID NO: 251649 - RNA, 19 nt, Homo sapiens
  misc_RNA (1)...(19): siRNA sense strand
ggaaagucuccaucucaua

SEQ ID NO: 251650 - RNA, 19 nt, Homo sapiens
  misc_RNA (1)...(19): siRNA sense strand
ccaaaguuguucaaagaug

SEQ ID NO: 251651 - RNA, 19 nt, Homo sapiens
  misc_RNA (1)...(19): siRNA sense strand
aagcuugccucuccaauga

SEQ ID NO: 251652 - RNA, 19 nt, Homo sapiens
  misc_RNA (1)...(19): siRNA sense strand
uaaccaagccgacacaguu

SEQ ID NO: 251653 - RNA, 19 nt, Homo sapiens
  misc_RNA (1)...(19): siRNA sense strand
caaaguuguucaaagaugu

SEQ ID NO: 251654 - RNA, 19 nt, Homo sapiens
  misc_RNA (1)...(19): siRNA sense strand
uguaugaacugaucacuca

SEQ ID NO: 251655 - RNA, 19 nt, Homo sapiens
  misc_RNA (1)...(19): siRNA sense strand
gaaaagcaguaaaucagaa

SEQ ID NO: 251656 - RNA, 19 nt, Homo sapiens
  misc_RNA (1)...(19): siRNA sense strand
cgacacaguugauuucagu

SEQ ID NO: 251657 - RNA, 19 nt, Homo sapiens
  misc_RNA (1)...(19): siRNA sense strand
cacaggaauuccauuguuu

SEQ ID NO: 251658 - RNA, 19 nt, Homo sapiens
  misc_RNA (1)...(19): siRNA sense strand
ccaaaucacccaucucuuc

SEQ ID NO: 251659 - RNA, 19 nt, Homo sapiens
  misc_RNA (1)...(19): siRNA sense strand
ucucauaguucuucuaaca

SEQ ID NO: 251660 - RNA, 19 nt, Homo sapiens
  misc_RNA (1)...(19): siRNA sense strand
gagaagaggguugugauga

SEQ ID NO: 251661 - RNA, 19 nt, Homo sapiens
  misc_RNA (1)...(19): siRNA sense strand
caaguuaaguagcaguaug

SEQ ID NO: 251662 - RNA, 19 nt, Homo sapiens
  misc_RNA (1)...(19): siRNA sense strand
caggauuucucaacccuuu

SEQ ID NO: 251663 - RNA, 19 nt, Homo sapiens
  misc_RNA (1)...(19): siRNA sense strand
gaaacucaaccaacuuaug

SEQ ID NO: 251664 - RNA, 19 nt, Homo sapiens
  misc_RNA (1)...(19): siRNA sense strand
cccaguaucuagagcauuu

SEQ ID NO: 251665 - RNA, 19 nt, Homo sapiens
  misc_RNA (1)...(19): siRNA sense strand
gaagaggguugugaugagu

SEQ ID NO: 251666 - RNA, 19 nt, Homo sapiens
  misc_RNA (1)...(19): siRNA sense strand
gaauaauguuucucgaucu

SEQ ID NO: 251667 - RNA, 19 nt, Homo sapiens
  misc_RNA (1)...(19): siRNA sense strand
gcaugggaguucuaaagga

SEQ ID NO: 251668 - RNA, 19 nt, Homo sapiens
  misc_RNA (1)...(19): siRNA sense strand
aauagacccuggagugaaa

SEQ ID NO: 251669 - RNA, 19 nt, Homo sapiens
  misc_RNA (1)...(19): siRNA sense strand
guuugacucugaugucuuu

SEQ ID NO: 251670 - RNA, 19 nt, Homo sapiens
  misc_RNA (1)...(19): siRNA sense strand
ccucuuauccuaaaucuga

SEQ ID NO: 251671 - RNA, 19 nt, Homo sapiens
  misc_RNA (1)...(19): siRNA sense strand
gcacugcuauuuccucaac

SEQ ID NO: 251672 - RNA, 19 nt, Homo sapiens
  misc_RNA (1)...(19): siRNA sense strand
gaaacaagaagccguccuu

SEQ ID NO: 251673 - RNA, 19 nt, Homo sapiens
  misc_RNA (1)...(19): siRNA sense strand
cacauccaguugacaauaa

SEQ ID NO: 251674 - RNA, 19 nt, Homo sapiens
  misc_RNA (1)...(19): siRNA sense strand
caugggaguucuaaaggaa

SEQ ID NO: 251675 - RNA, 19 nt, Homo sapiens
  misc_RNA (1)...(19): siRNA sense strand
ugccaaaguuguucaaaga

SEQ ID NO: 251676 - RNA, 19 nt, Homo sapiens
  misc_RNA (1)...(19): siRNA sense strand
ucagcaaggugucucagaa

SEQ ID NO: 251677 - RNA, 19 nt, Homo sapiens
  misc_RNA (1)...(19): siRNA sense strand
gacaaguaacacaaucuua

SEQ ID NO: 251678 - RNA, 19 nt, Homo sapiens
  misc_RNA (1)...(19): siRNA sense strand
uaagaagaccucagaguca

SEQ ID NO: 251679 - RNA, 19 nt, Homo sapiens
  misc_RNA (1)...(19): siRNA sense strand
ucucauaugucuggaacua

SEQ ID NO: 251680 - RNA, 19 nt, Homo sapiens
  misc_RNA (1)...(19): siRNA sense strand
caauggauguugacucaca

SEQ ID NO: 251681 - RNA, 19 nt, Homo sapiens
  misc_RNA (1)...(19): siRNA sense strand
guacagcagcuaagggaaa

SEQ ID NO: 251682 - RNA, 19 nt, Homo sapiens
  misc_RNA (1)...(19): siRNA sense strand
caaaggaugguccgacuau

SEQ ID NO: 251683 - RNA, 19 nt, Homo sapiens
  misc_RNA (1)...(19): siRNA sense strand
gaguuccucuuauccuaaa

SEQ ID NO: 251684 - RNA, 19 nt, Homo sapiens
  misc_RNA (1)...(19): siRNA sense strand
gagcauuuguucagaaacu

SEQ ID NO: 251685 - RNA, 19 nt, Homo sapiens
  misc_RNA (1)...(19): siRNA sense strand
gacugcaucucccaucauu

SEQ ID NO: 251686 - RNA, 19 nt, Homo sapiens
  misc_RNA (1)...(19): siRNA sense strand
gacaacaaacugaagacua

SEQ ID NO: 251687 - RNA, 19 nt, Homo sapiens
  misc_RNA (1)...(19): siRNA sense strand
caggacagcuuugugaugu

SEQ ID NO: 251688 - RNA, 19 nt, Homo sapiens
  misc_RNA (1)...(19): siRNA sense strand
ugaaguguguccucucuca

SEQ ID NO: 251689 - RNA, 19 nt, Homo sapiens
  misc_RNA (1)...(19): siRNA sense strand
gcaucaagccagagaguug

SEQ ID NO: 251690 - RNA, 19 nt, Homo sapiens
  misc_RNA (1)...(19): siRNA sense strand
ccauagcagagaaaucuua

SEQ ID NO: 251691 - RNA, 19 nt, Homo sapiens
  misc_RNA (1)...(19): siRNA sense strand
caguacagguggaucuaaa

SEQ ID NO: 251692 - RNA, 19 nt, Homo sapiens
  misc_RNA (1)...(19): siRNA sense strand
ucauaguucuucuaacaga

SEQ ID NO: 251693 - RNA, 19 nt, Homo sapiens
  misc_RNA (1)...(19): siRNA sense strand
gggaaagucuccaucucau

SEQ ID NO: 251694 - RNA, 19 nt, Homo sapiens
  misc_RNA (1)...(19): siRNA sense strand
cacagaacccuaucuuuga

SEQ ID NO: 251695 - RNA, 19 nt, Homo sapiens
  misc_RNA (1)...(19): siRNA sense strand
caaagcaccagacugaaga

SEQ ID NO: 251696 - RNA, 19 nt, Homo sapiens
  misc_RNA (1)...(19): siRNA sense strand
uaauguuucucgaucuuug

SEQ ID NO: 251697 - RNA, 19 nt, Homo sapiens
  misc_RNA (1)...(19): siRNA sense strand
caaauggcuucuucuaaaa

SEQ ID NO: 251698 - RNA, 19 nt, Homo sapiens
  misc_RNA (1)...(19): siRNA sense strand
ugucauagauaaacugaag

SEQ ID NO: 251699 - RNA, 19 nt, Homo sapiens
  misc_RNA (1)...(19): siRNA sense strand
ucaucaaguuccaaguuaa

SEQ ID NO: 251700 - RNA, 19 nt, Homo sapiens
  misc_RNA (1)...(19): siRNA sense strand
ggaaagaaaagacucaaaa

SEQ ID NO: 251701 - RNA, 19 nt, Homo sapiens
  misc_RNA (1)...(19): siRNA sense strand
gcuggucccuuggauaaga

SEQ ID NO: 251702 - RNA, 19 nt, Homo sapiens
  misc_RNA (1)...(19): siRNA sense strand
caaagaccgagacaagaaa

SEQ ID NO: 251703 - RNA, 19 nt, Homo sapiens
  misc_RNA (1)...(19): siRNA sense strand
uaaaucagaagguucauca

SEQ ID NO: 251704 - RNA, 19 nt, Homo sapiens
  misc_RNA (1)...(19): siRNA sense strand
gaaaauccauacacugauc

SEQ ID NO: 251705 - RNA, 19 nt, Homo sapiens
  misc_RNA (1)...(19): siRNA sense strand
agagacaguugaagacaug

SEQ ID NO: 251706 - RNA, 19 nt, Homo sapiens
  misc_RNA (1)...(19): siRNA sense strand
uauaacacccucauuggaa

SEQ ID NO: 251707 - RNA, 19 nt, Homo sapiens
  misc_RNA (1)...(19): siRNA sense strand
gugaaaccauuaagcuugu

SEQ ID NO: 251708 - RNA, 19 nt, Homo sapiens
  misc_RNA (1)...(19): siRNA sense strand
uagagcauuuguucagaaa

SEQ ID NO: 251709 - RNA, 19 nt, Homo sapiens
  misc_RNA (1)...(19): siRNA sense strand
cuucugaccuacuggauga

SEQ ID NO: 251710 - RNA, 19 nt, Homo sapiens
  misc_RNA (1)...(19): siRNA sense strand
gaaaaucucccagcagaaa

SEQ ID NO: 251711 - RNA, 19 nt, Homo sapiens
  misc_RNA (1)...(19): siRNA sense strand
acaaagaccgagacaagaa

SEQ ID NO: 251712 - RNA, 19 nt, Homo sapiens
  misc_RNA (1)...(19): siRNA sense strand
uaacaucuuuaccagcaau

SEQ ID NO: 251713 - RNA, 19 nt, Homo sapiens
  misc_RNA (1)...(19): siRNA sense strand
ggaccgagaccgggacaaa

SEQ ID NO: 251714 - RNA, 19 nt, Homo sapiens
  misc_RNA (1)...(19): siRNA sense strand
cugcaaagcuggauaaaua

SEQ ID NO: 251715 - RNA, 19 nt, Homo sapiens
  misc_RNA (1)...(19): siRNA sense strand
gguacaagcucgagguaua

SEQ ID NO: 251716 - RNA, 19 nt, Homo sapiens
  misc_RNA (1)...(19): siRNA sense strand
gguauaauguugagagaaa

SEQ ID NO: 251717 - RNA, 19 nt, Homo sapiens
  misc_RNA (1)...(19): siRNA sense strand
cagaaaagcugccuuauau

SEQ ID NO: 251718 - RNA, 19 nt, Homo sapiens
  misc_RNA (1)...(19): siRNA sense strand
agaguuagcuccaaucgaa

SEQ ID NO: 251719 - RNA, 19 nt, Homo sapiens
  misc_RNA (1)...(19): siRNA sense strand
gaagguggcaguucucauu

SEQ ID NO: 251720 - RNA, 19 nt, Homo sapiens
  misc_RNA (1)...(19): siRNA sense strand
ggcaauaauucaagugauu

SEQ ID NO: 251721 - RNA, 19 nt, Homo sapiens
  misc_RNA (1)...(19): siRNA sense strand
ucgauggacugaacaauuu

SEQ ID NO: 251722 - RNA, 19 nt, Homo sapiens
  misc_RNA (1)...(19): siRNA sense strand
ucaaagaggccaugaaaga

SEQ ID NO: 251723 - RNA, 19 nt, Homo sapiens
  misc_RNA (1)...(19): siRNA sense strand
gcucaacgguacagauuau

SEQ ID NO: 251724 - RNA, 19 nt, Homo sapiens
  misc_RNA (1)...(19): siRNA sense strand
gccaacacauaucucuuua

SEQ ID NO: 251725 - RNA, 19 nt, Homo sapiens
  misc_RNA (1)...(19): siRNA sense strand
ccaaggauuuagauauuga

SEQ ID NO: 251726 - RNA, 19 nt, Homo sapiens
  misc_RNA (1)...(19): siRNA sense strand
caacguaucucccggaaaa

SEQ ID NO: 251727 - RNA, 19 nt, Homo sapiens
  misc_RNA (1)...(19): siRNA sense strand
ucacuaugcuggauauaau

SEQ ID NO: 251728 - RNA, 19 nt, Homo sapiens
  misc_RNA (1)...(19): siRNA sense strand
ccaugaacaucuuccaauu

SEQ ID NO: 251729 - RNA, 19 nt, Homo sapiens
  misc_RNA (1)...(19): siRNA sense strand
guacaucgauggacugaac

SEQ ID NO: 251730 - RNA, 19 nt, Homo sapiens
  misc_RNA (1)...(19): siRNA sense strand
guggaacaauuuagaaaga

SEQ ID NO: 251731 - RNA, 19 nt, Homo sapiens
  misc_RNA (1)...(19): siRNA sense strand
uuacggauguggagaaaug

SEQ ID NO: 251732 - RNA, 19 nt, Homo sapiens
  misc_RNA (1)...(19): siRNA sense strand
caacucuucuccaaggauu

SEQ ID NO: 251733 - RNA, 19 nt, Homo sapiens
  misc_RNA (1)...(19): siRNA sense strand
gugauuaucuuguucaaac

SEQ ID NO: 251734 - RNA, 19 nt, Homo sapiens
  misc_RNA (1)...(19): siRNA sense strand
gaaaaugaccggaacuauu

SEQ ID NO: 251735 - RNA, 19 nt, Homo sapiens
  misc_RNA (1)...(19): siRNA sense strand
gagaagaugaugaccuuug

SEQ ID NO: 251736 - RNA, 19 nt, Homo sapiens
  misc_RNA (1)...(19): siRNA sense strand
ggaacaauuuagaaagauc

SEQ ID NO: 251737 - RNA, 19 nt, Homo sapiens
  misc_RNA (1)...(19): siRNA sense strand
aaaaugaccggaacuauua

SEQ ID NO: 251738 - RNA, 19 nt, Homo sapiens
  misc_RNA (1)...(19): siRNA sense strand
aacaauaggucauaugauc

SEQ ID NO: 251739 - RNA, 19 nt, Homo sapiens
  misc_RNA (1)...(19): siRNA sense strand
ugaucaggcuguacacaaa

SEQ ID NO: 251740 - RNA, 19 nt, Homo sapiens
  misc_RNA (1)...(19): siRNA sense strand
gauggaagguggcaguucu

SEQ ID NO: 251741 - RNA, 19 nt, Homo sapiens
  misc_RNA (1)...(19): siRNA sense strand
guacaagcucgagguauaa

SEQ ID NO: 251742 - RNA, 19 nt, Homo sapiens
  misc_RNA (1)...(19): siRNA sense strand
gagguauaauguugagaga

SEQ ID NO: 251743 - RNA, 19 nt, Homo sapiens
  misc_RNA (1)...(19): siRNA sense strand
acaagucaauuccucauca

SEQ ID NO: 251744 - RNA, 19 nt, Homo sapiens
  misc_RNA (1)...(19): siRNA sense strand
gaugaugaccuuuggaaca

SEQ ID NO: 251745 - RNA, 19 nt, Homo sapiens
  misc_RNA (1)...(19): siRNA sense strand
gcugacaguggaacaauuu

SEQ ID NO: 251746 - RNA, 19 nt, Homo sapiens
  misc_RNA (1)...(19): siRNA sense strand
uggcaguucucauuccuuu

SEQ ID NO: 251747 - RNA, 19 nt, Homo sapiens
  misc_RNA (1)...(19): siRNA sense strand
cuccaaggauuuagauauu

SEQ ID NO: 251748 - RNA, 19 nt, Homo sapiens
  misc_RNA (1)...(19): siRNA sense strand
caugaacaucuuccaauuu

SEQ ID NO: 251749 - RNA, 19 nt, Homo sapiens
  misc_RNA (1)...(19): siRNA sense strand
ccaaggagcgucaguacau

SEQ ID NO: 251750 - RNA, 19 nt, Homo sapiens
  misc_RNA (1)...(19): siRNA sense strand
ugaacagacuggcacacaa

SEQ ID NO: 251751 - RNA, 19 nt, Homo sapiens
  misc_RNA (1)...(19): siRNA sense strand
gaagucaguuuugaugaaa

SEQ ID NO: 251752 - RNA, 19 nt, Homo sapiens
  misc_RNA (1)...(19): siRNA sense strand
cgaaggcaauaauucaagu

SEQ ID NO: 251753 - RNA, 19 nt, Homo sapiens
  misc_RNA (1)...(19): siRNA sense strand
gaacagacuggcacacaac

SEQ ID NO: 251754 - RNA, 19 nt, Homo sapiens
  misc_RNA (1)...(19): siRNA sense strand
aaagcuggauaaauacaug

SEQ ID NO: 251755 - RNA, 19 nt, Homo sapiens
  misc_RNA (1)...(19): siRNA sense strand
aggagaagaugaugaccuu

SEQ ID NO: 251756 - RNA, 19 nt, Homo sapiens
  misc_RNA (1)...(19): siRNA sense strand
gcaaagcuggauaaauaca

SEQ ID NO: 251757 - RNA, 19 nt, Homo sapiens
  misc_RNA (1)...(19): siRNA sense strand
cagaccagagggagacuua

SEQ ID NO: 251758 - RNA, 19 nt, Homo sapiens
  misc_RNA (1)...(19): siRNA sense strand
gacaguggaacaauuuaga

SEQ ID NO: 251759 - RNA, 19 nt, Homo sapiens
  misc_RNA (1)...(19): siRNA sense strand
cgguauaaauuacuaaggu

SEQ ID NO: 251760 - RNA, 19 nt, Homo sapiens
  misc_RNA (1)...(19): siRNA sense strand
aaauacugguugauagguu

SEQ ID NO: 251761 - RNA, 19 nt, Homo sapiens
  misc_RNA (1)...(19): siRNA sense strand
gauggacugaacaauuuaa

SEQ ID NO: 251762 - RNA, 19 nt, Homo sapiens
  misc_RNA (1)...(19): siRNA sense strand
ccagaaaagcugccuuaua

SEQ ID NO: 251763 - RNA, 19 nt, Homo sapiens
  misc_RNA (1)...(19): siRNA sense strand
uagcuccaaucgaagacua

SEQ ID NO: 251764 - RNA, 19 nt, Homo sapiens
  misc_RNA (1)...(19): siRNA sense strand
ccggaacuauuacggaugu

SEQ ID NO: 251765 - RNA, 19 nt, Homo sapiens
  misc_RNA (1)...(19): siRNA sense strand
cgccaacacauaucucuuu

SEQ ID NO: 251766 - RNA, 19 nt, Homo sapiens
  misc_RNA (1)...(19): siRNA sense strand
ggacgguauaaauuacuaa

SEQ ID NO: 251767 - RNA, 19 nt, Homo sapiens
  misc_RNA (1)...(19): siRNA sense strand
caagcucgagguauaaugu

SEQ ID NO: 251768 - RNA, 19 nt, Homo sapiens
  misc_RNA (1)...(19): siRNA sense strand
gaucaaugguuuuccuaau

SEQ ID NO: 251769 - RNA, 19 nt, Homo sapiens
  misc_RNA (1)...(19): siRNA sense strand
gagagaaaaugugaaaaca

SEQ ID NO: 251770 - RNA, 19 nt, Homo sapiens
  misc_RNA (1)...(19): siRNA sense strand
ucucauuccuuuccguaau

SEQ ID NO: 251771 - RNA, 19 nt, Homo sapiens
  misc_RNA (1)...(19): siRNA sense strand
agaagaugaugaccuuugg

SEQ ID NO: 251772 - RNA, 19 nt, Homo sapiens
  misc_RNA (1)...(19): siRNA sense strand
gaucaggcuguacacaaau

SEQ ID NO: 251773 - RNA, 19 nt, Homo sapiens
  misc_RNA (1)...(19): siRNA sense strand
uccaaucgaagacuauuaa

SEQ ID NO: 251774 - RNA, 19 nt, Homo sapiens
  misc_RNA (1)...(19): siRNA sense strand
aaaccucaugccagaguua

SEQ ID NO: 251775 - RNA, 19 nt, Homo sapiens
  misc_RNA (1)...(19): siRNA sense strand
caaggagcgucaguacauc

SEQ ID NO: 251776 - RNA, 19 nt, Homo sapiens
  misc_RNA (1)...(19): siRNA sense strand
cgaagucaguuuugaugaa

SEQ ID NO: 251777 - RNA, 19 nt, Homo sapiens
  misc_RNA (1)...(19): siRNA sense strand
gauuaucccgaaggcaaua

SEQ ID NO: 251778 - RNA, 19 nt, Homo sapiens
  misc_RNA (1)...(19): siRNA sense strand
guaaaccucaugccagagu

SEQ ID NO: 251779 - RNA, 19 nt, Homo sapiens
  misc_RNA (1)...(19): siRNA sense strand
cgauggacugaacaauuua

SEQ ID NO: 251780 - RNA, 19 nt, Homo sapiens
  misc_RNA (1)...(19): siRNA sense strand
ggcugacaguggaacaauu

SEQ ID NO: 251781 - RNA, 19 nt, Homo sapiens
  misc_RNA (1)...(19): siRNA sense strand
ucuuacaucugauuccaau

SEQ ID NO: 251782 - RNA, 19 nt, Homo sapiens
  misc_RNA (1)...(19): siRNA sense strand
gaaauucaucaacucuucu

SEQ ID NO: 251783 - RNA, 19 nt, Homo sapiens
  misc_RNA (1)...(19): siRNA sense strand
gaaaagcugccuuauaugc

SEQ ID NO: 251784 - RNA, 19 nt, Homo sapiens
  misc_RNA (1)...(19): siRNA sense strand
gaaggcaauaauucaagug

SEQ ID NO: 251785 - RNA, 19 nt, Homo sapiens
  misc_RNA (1)...(19): siRNA sense strand
gaagaugaugaccuuugga

SEQ ID NO: 251786 - RNA, 19 nt, Homo sapiens
  misc_RNA (1)...(19): siRNA sense strand
caauguaagcgaagucagu

SEQ ID NO: 251787 - RNA, 19 nt, Homo sapiens
  misc_RNA (1)...(19): siRNA sense strand
gcucgagguauaauguuga

SEQ ID NO: 251788 - RNA, 19 nt, Homo sapiens
  misc_RNA (1)...(19): siRNA sense strand
ugucuguacuucaucuaug

SEQ ID NO: 251789 - RNA, 19 nt, Homo sapiens
  misc_RNA (1)...(19): siRNA sense strand
aaagaggccaugaaagaca

SEQ ID NO: 251790 - RNA, 19 nt, Homo sapiens
  misc_RNA (1)...(19): siRNA sense strand
ucaaugugggcuucaaaga

SEQ ID NO: 251791 - RNA, 19 nt, Homo sapiens
  misc_RNA (1)...(19): siRNA sense strand
gccaugaacaucuuccaau

SEQ ID NO: 251792 - RNA, 19 nt, Homo sapiens
  misc_RNA (1)...(19): siRNA sense strand
uccaaggauuuagauauug

SEQ ID NO: 251793 - RNA, 19 nt, Homo sapiens
  misc_RNA (1)...(19): siRNA sense strand
uaaaccucaugccagaguu

SEQ ID NO: 251794 - RNA, 19 nt, Homo sapiens
  misc_RNA (1)...(19): siRNA sense strand
ucaauuccucaucaccaua

SEQ ID NO: 251795 - RNA, 19 nt, Homo sapiens
  misc_RNA (1)...(19): siRNA sense strand
gaaaacaauaggucauaug

SEQ ID NO: 251796 - RNA, 19 nt, Homo sapiens
  misc_RNA (1)...(19): siRNA sense strand
cauaugaucaggcuguaca

SEQ ID NO: 251797 - RNA, 19 nt, Homo sapiens
  misc_RNA (1)...(19): siRNA sense strand
uuaggacgguauaaauuac

SEQ ID NO: 251798 - RNA, 19 nt, Homo sapiens
  misc_RNA (1)...(19): siRNA sense strand
aggcaucgccaacacauau

SEQ ID NO: 251799 - RNA, 19 nt, Homo sapiens
  misc_RNA (1)...(19): siRNA sense strand
caguggaacaauuuagaaa

SEQ ID NO: 251800 - RNA, 19 nt, Homo sapiens
  misc_RNA (1)...(19): siRNA sense strand
uauuacggauguggagaaa

SEQ ID NO: 251801 - RNA, 19 nt, Homo sapiens
  misc_RNA (1)...(19): siRNA sense strand
uaaucgccaugaacaucuu

SEQ ID NO: 251802 - RNA, 19 nt, Homo sapiens
  misc_RNA (1)...(19): siRNA sense strand
gugcgaugcuuuucaaugu

SEQ ID NO: 251803 - RNA, 19 nt, Homo sapiens
  misc_RNA (1)...(19): siRNA sense strand
ccagagggagacuuaggaa

SEQ ID NO: 251804 - RNA, 19 nt, Homo sapiens
  misc_RNA (1)...(19): siRNA sense strand
caaugugggcuucaaagag

SEQ ID NO: 251805 - RNA, 19 nt, Homo sapiens
  misc_RNA (1)...(19): siRNA sense strand
ugauuccaaugcuccagaa

SEQ ID NO: 251806 - RNA, 19 nt, Homo sapiens
  misc_RNA (1)...(19): siRNA sense strand
gucaauuccucaucaccau

SEQ ID NO: 251807 - RNA, 19 nt, Homo sapiens
  misc_RNA (1)...(19): siRNA sense strand
ggaaaauacaagucaauuc

SEQ ID NO: 251808 - RNA, 19 nt, Homo sapiens
  misc_RNA (1)...(19): siRNA sense strand
gagggagacuuaggaaaau

SEQ ID NO: 251809 - RNA, 19 nt, Homo sapiens
  misc_RNA (1)...(19): siRNA sense strand
ggaugaugcggguuuccaa

SEQ ID NO: 251810 - RNA, 19 nt, Homo sapiens
  misc_RNA (1)...(19): siRNA sense strand
caaagaggccaugaaagac

SEQ ID NO: 251811 - RNA, 19 nt, Homo sapiens
  misc_RNA (1)...(19): siRNA sense strand
aggacgguauaaauuacua

SEQ ID NO: 251812 - RNA, 19 nt, Homo sapiens
  misc_RNA (1)...(19): siRNA sense strand
uagaggugaaguccaguuu

SEQ ID NO: 251813 - RNA, 19 nt, Homo sapiens
  misc_RNA (1)...(19): siRNA sense strand
guggaucaucuaccugaaa

SEQ ID NO: 251814 - RNA, 19 nt, Homo sapiens
  misc_RNA (1)...(19): siRNA sense strand
gcucaaagcucaucaaaug

SEQ ID NO: 251815 - RNA, 19 nt, Homo sapiens
  misc_RNA (1)...(19): siRNA sense strand
gaagugggcucaguacaaa

SEQ ID NO: 251816 - RNA, 19 nt, Homo sapiens
  misc_RNA (1)...(19): siRNA sense strand
caaaugugcuucagagauu

SEQ ID NO: 251817 - RNA, 19 nt, Homo sapiens
  misc_RNA (1)...(19): siRNA sense strand
ggauacuccuucucucuua

SEQ ID NO: 251818 - RNA, 19 nt, Homo sapiens
  misc_RNA (1)...(19): siRNA sense strand
gcaacuacauccacaugaa

SEQ ID NO: 251819 - RNA, 19 nt, Homo sapiens
  misc_RNA (1)...(19): siRNA sense strand
acacugagcuccuuucaug

SEQ ID NO: 251820 - RNA, 19 nt, Homo sapiens
  misc_RNA (1)...(19): siRNA sense strand
ggaaccuucuggcauauuu

SEQ ID NO: 251821 - RNA, 19 nt, Homo sapiens
  misc_RNA (1)...(19): siRNA sense strand
caacaaaugggaauaagaa

SEQ ID NO: 251822 - RNA, 19 nt, Homo sapiens
  misc_RNA (1)...(19): siRNA sense strand
gaacuuguuugcuucuuuc

SEQ ID NO: 251823 - RNA, 19 nt, Homo sapiens
  misc_RNA (1)...(19): siRNA sense strand
ccaagaggccugacaauga

SEQ ID NO: 251824 - RNA, 19 nt, Homo sapiens
  misc_RNA (1)...(19): siRNA sense strand
ggacaacaaaugggaauaa

SEQ ID NO: 251825 - RNA, 19 nt, Homo sapiens
  misc_RNA (1)...(19): siRNA sense strand
ucaagcuucucauuucuaa

SEQ ID NO: 251826 - RNA, 19 nt, Homo sapiens
  misc_RNA (1)...(19): siRNA sense strand
aggcugagcugcggaaaua

SEQ ID NO: 251827 - RNA, 19 nt, Homo sapiens
  misc_RNA (1)...(19): siRNA sense strand
ggacuuggcagacgauaga

SEQ ID NO: 251828 - RNA, 19 nt, Homo sapiens
  misc_RNA (1)...(19): siRNA sense strand
ggaagugggcucaguacaa

SEQ ID NO: 251829 - RNA, 19 nt, Homo sapiens
  misc_RNA (1)...(19): siRNA sense strand
cacaugaacuuguuugcuu

SEQ ID NO: 251830 - RNA, 19 nt, Homo sapiens
  misc_RNA (1)...(19): siRNA sense strand
ggccuucccugugcuauuu

SEQ ID NO: 251831 - RNA, 19 nt, Homo sapiens
  misc_RNA (1)...(19): siRNA sense strand
caagaggccugacaaugag

SEQ ID NO: 251832 - RNA, 19 nt, Homo sapiens
  misc_RNA (1)...(19): siRNA sense strand
ggaagagagugagaucuag

SEQ ID NO: 251833 - RNA, 19 nt, Homo sapiens
  misc_RNA (1)...(19): siRNA sense strand
uggaggagauucuggaaga

SEQ ID NO: 251834 - RNA, 19 nt, Homo sapiens
  misc_RNA (1)...(19): siRNA sense strand
acccugcccuucauacuua

SEQ ID NO: 251835 - RNA, 19 nt, Homo sapiens
  misc_RNA (1)...(19): siRNA sense strand
gguccucauuccuuuauug

SEQ ID NO: 251836 - RNA, 19 nt, Homo sapiens
  misc_RNA (1)...(19): siRNA sense strand
ugaacuuguuugcuucuuu

SEQ ID NO: 251837 - RNA, 19 nt, Homo sapiens
  misc_RNA (1)...(19): siRNA sense strand
caaacaggcaugucugaga

SEQ ID NO: 251838 - RNA, 19 nt, Homo sapiens
  misc_RNA (1)...(19): siRNA sense strand
uccagguucucuugcauua

SEQ ID NO: 251839 - RNA, 19 nt, Homo sapiens
  misc_RNA (1)...(19): siRNA sense strand
gagaacgccacggauauuu

SEQ ID NO: 251840 - RNA, 19 nt, Homo sapiens
  misc_RNA (1)...(19): siRNA sense strand
ggaagggccuacagacacu

SEQ ID NO: 251841 - RNA, 19 nt, Homo sapiens
  misc_RNA (1)...(19): siRNA sense strand
caaccuugcagcugaugua

SEQ ID NO: 251842 - RNA, 19 nt, Homo sapiens
  misc_RNA (1)...(19): siRNA sense strand
gauacuccuucucucuuau

SEQ ID NO: 251843 - RNA, 19 nt, Homo sapiens
  misc_RNA (1)...(19): siRNA sense strand
aaaugugcuucagagauua

SEQ ID NO: 251844 - RNA, 19 nt, Homo sapiens
  misc_RNA (1)...(19): siRNA sense strand
cugcagcccucacuuaaca

SEQ ID NO: 251845 - RNA, 19 nt, Homo sapiens
  misc_RNA (1)...(19): siRNA sense strand
gaacgccacggauauuugg

SEQ ID NO: 251846 - RNA, 19 nt, Homo sapiens
  misc_RNA (1)...(19): siRNA sense strand
gacaacaaaugggaauaag

SEQ ID NO: 251847 - RNA, 19 nt, Homo sapiens
  misc_RNA (1)...(19): siRNA sense strand
acagggugcuggacaacaa

SEQ ID NO: 251848 - RNA, 19 nt, Homo sapiens
  misc_RNA (1)...(19): siRNA sense strand
ucaaagcucaucaaaugug

SEQ ID NO: 251849 - RNA, 19 nt, Homo sapiens
  misc_RNA (1)...(19): siRNA sense strand
ggacuuccgguuccuagga

SEQ ID NO: 251850 - RNA, 19 nt, Homo sapiens
  misc_RNA (1)...(19): siRNA sense strand
auagagaacgccacggaua

SEQ ID NO: 251851 - RNA, 19 nt, Homo sapiens
  misc_RNA (1)...(19): siRNA sense strand
uggaagagagugagaucua

SEQ ID NO: 251852 - RNA, 19 nt, Homo sapiens
  misc_RNA (1)...(19): siRNA sense strand
aagaaaaucugguggauca

SEQ ID NO: 251853 - RNA, 19 nt, Homo sapiens
  misc_RNA (1)...(19): siRNA sense strand
acuuauggcugcugguuga

SEQ ID NO: 251854 - RNA, 19 nt, Homo sapiens
  misc_RNA (1)...(19): siRNA sense strand
aagcugcagcccucacuua

SEQ ID NO: 251855 - RNA, 19 nt, Homo sapiens
  misc_RNA (1)...(19): siRNA sense strand
ucaaaugugcuucagagau

SEQ ID NO: 251856 - RNA, 19 nt, Homo sapiens
  misc_RNA (1)...(19): siRNA sense strand
gcaaaacuuauacgacuuu

SEQ ID NO: 251857 - RNA, 19 nt, Homo sapiens
  misc_RNA (1)...(19): siRNA sense strand
uagagaacgccacggauau

SEQ ID NO: 251858 - RNA, 19 nt, Homo sapiens
  misc_RNA (1)...(19): siRNA sense strand
ccaacaccauggaggagau

SEQ ID NO: 251859 - RNA, 19 nt, Homo sapiens
  misc_RNA (1)...(19): siRNA sense strand
gaaaaugucccaagaagcu

SEQ ID NO: 251860 - RNA, 19 nt, Homo sapiens
  misc_RNA (1)...(19): siRNA sense strand
ccucuucucuuucaucacu

SEQ ID NO: 251861 - RNA, 19 nt, Homo sapiens
  misc_RNA (1)...(19): siRNA sense strand
guguaacagucaauuucuu

SEQ ID NO: 251862 - RNA, 19 nt, Homo sapiens
  misc_RNA (1)...(19): siRNA sense strand
cccaugaugcucuguguaa

SEQ ID NO: 251863 - RNA, 19 nt, Homo sapiens
  misc_RNA (1)...(19): siRNA sense strand
ugauguacaccgugggaua

SEQ ID NO: 251864 - RNA, 19 nt, Homo sapiens
  misc_RNA (1)...(19): siRNA sense strand
guaacgggacauuugauca

SEQ ID NO: 251865 - RNA, 19 nt, Homo sapiens
  misc_RNA (1)...(19): siRNA sense strand
gacccaugaugcucugugu

SEQ ID NO: 251866 - RNA, 19 nt, Homo sapiens
  misc_RNA (1)...(19): siRNA sense strand
cagguucucuugcauuacu

SEQ ID NO: 251867 - RNA, 19 nt, Homo sapiens
  misc_RNA (1)...(19): siRNA sense strand
uguccuaccugucagagau

SEQ ID NO: 251868 - RNA, 19 nt, Homo sapiens
  misc_RNA (1)...(19): siRNA sense strand
gggauacuccuucucucuu

SEQ ID NO: 251869 - RNA, 19 nt, Homo sapiens
  misc_RNA (1)...(19): siRNA sense strand
aaucaacacugguccucau

SEQ ID NO: 251870 - RNA, 19 nt, Homo sapiens
  misc_RNA (1)...(19): siRNA sense strand
gugcacaccuggagaacac

SEQ ID NO: 251871 - RNA, 19 nt, Homo sapiens
  misc_RNA (1)...(19): siRNA sense strand
ugagaacccuggcuguacu

SEQ ID NO: 251872 - RNA, 19 nt, Homo sapiens
  misc_RNA (1)...(19): siRNA sense strand
cacaggaagugcucucucu

SEQ ID NO: 251873 - RNA, 19 nt, Homo sapiens
  misc_RNA (1)...(19): siRNA sense strand
guggauguccuaccuguca

SEQ ID NO: 251874 - RNA, 19 nt, Homo sapiens
  misc_RNA (1)...(19): siRNA sense strand
gaggagauucuggaagaga

SEQ ID NO: 251875 - RNA, 19 nt, Homo sapiens
  misc_RNA (1)...(19): siRNA sense strand
gaggaaacgacucggaagu

SEQ ID NO: 251876 - RNA, 19 nt, Homo sapiens
  misc_RNA (1)...(19): siRNA sense strand
caacacugguccucauucc

SEQ ID NO: 251877 - RNA, 19 nt, Homo sapiens
  misc_RNA (1)...(19): siRNA sense strand
ucucauuucuaagcucaaa

SEQ ID NO: 251878 - RNA, 19 nt, Homo sapiens
  misc_RNA (1)...(19): siRNA sense strand
ucucuugcauuacuuugug

SEQ ID NO: 251879 - RNA, 19 nt, Homo sapiens
  misc_RNA (1)...(19): siRNA sense strand
gcucucacccuccucuugu

SEQ ID NO: 251880 - RNA, 19 nt, Homo sapiens
  misc_RNA (1)...(19): siRNA sense strand
caaguugaaggauuugcaa

SEQ ID NO: 251881 - RNA, 19 nt, Homo sapiens
  misc_RNA (1)...(19): siRNA sense strand
gugcuucagagauuauaaa

SEQ ID NO: 251882 - RNA, 19 nt, Homo sapiens
  misc_RNA (1)...(19): siRNA sense strand
gcccagauaccugcuguug

SEQ ID NO: 251883 - RNA, 19 nt, Homo sapiens
  misc_RNA (1)...(19): siRNA sense strand
ugugggugccaauuacuua

SEQ ID NO: 251884 - RNA, 19 nt, Homo sapiens
  misc_RNA (1)...(19): siRNA sense strand
gcgcaacuacauccacaug

SEQ ID NO: 251885 - RNA, 19 nt, Homo sapiens
  misc_RNA (1)...(19): siRNA sense strand
uggcuguacuggugaagga

SEQ ID NO: 251886 - RNA, 19 nt, Homo sapiens
  misc_RNA (1)...(19): siRNA sense strand
ugaaggauuugcaaaacuu

SEQ ID NO: 251887 - RNA, 19 nt, Homo sapiens
  misc_RNA (1)...(19): siRNA sense strand
acacugguccucauuccuu

SEQ ID NO: 251888 - RNA, 19 nt, Homo sapiens
  misc_RNA (1)...(19): siRNA sense strand
gcucaucaaaugugcuuca

SEQ ID NO: 251889 - RNA, 19 nt, Homo sapiens
  misc_RNA (1)...(19): siRNA sense strand
gagagacuuacucaaggaa

SEQ ID NO: 251890 - RNA, 19 nt, Homo sapiens
  misc_RNA (1)...(19): siRNA sense strand
ggaggagauucuggaagag

SEQ ID NO: 251891 - RNA, 19 nt, Homo sapiens
  misc_RNA (1)...(19): siRNA sense strand
cguuaugccuugcugucaa

SEQ ID NO: 251892 - RNA, 19 nt, Homo sapiens
  misc_RNA (1)...(19): siRNA sense strand
gaaggauuugcaaaacuua

SEQ ID NO: 251893 - RNA, 19 nt, Homo sapiens
  misc_RNA (1)...(19): siRNA sense strand
ccucauucuucuccuggaa

SEQ ID NO: 251894 - RNA, 19 nt, Homo sapiens
  misc_RNA (1)...(19): siRNA sense strand
cuuguuugcuucuuucauc

SEQ ID NO: 251895 - RNA, 19 nt, Homo sapiens
  misc_RNA (1)...(19): siRNA sense strand
agagaacgccacggauauu

SEQ ID NO: 251896 - RNA, 19 nt, Homo sapiens
  misc_RNA (1)...(19): siRNA sense strand
ggacauuugaucaguacgu

SEQ ID NO: 251897 - RNA, 19 nt, Homo sapiens
  misc_RNA (1)...(19): siRNA sense strand
aacagucaauuucuucauc

SEQ ID NO: 251898 - RNA, 19 nt, Homo sapiens
  misc_RNA (1)...(19): siRNA sense strand
gcaggaugacuccgaaugc

SEQ ID NO: 251899 - RNA, 19 nt, Homo sapiens
  misc_RNA (1)...(19): siRNA sense strand
uguguuggccucauucuuc

SEQ ID NO: 251900 - RNA, 19 nt, Homo sapiens
  misc_RNA (1)...(19): siRNA sense strand
cacugguccucauuccuuu

SEQ ID NO: 251901 - RNA, 19 nt, Homo sapiens
  misc_RNA (1)...(19): siRNA sense strand
guaacagucaauuucuuca

SEQ ID NO: 251902 - RNA, 19 nt, Homo sapiens
  misc_RNA (1)...(19): siRNA sense strand
ccugagaacccuggcugua

SEQ ID NO: 251903 - RNA, 19 nt, Homo sapiens
  misc_RNA (1)...(19): siRNA sense strand
acaacaaaugggaauaaga

SEQ ID NO: 251904 - RNA, 19 nt, Homo sapiens
  misc_RNA (1)...(19): siRNA sense strand
gcaguaugguuuugccaau

SEQ ID NO: 251905 - RNA, 19 nt, Homo sapiens
  misc_RNA (1)...(19): siRNA sense strand
ucucaagcuucucauuucu

SEQ ID NO: 251906 - RNA, 19 nt, Homo sapiens
  misc_RNA (1)...(19): siRNA sense strand
acagucaauuucuucaucu

SEQ ID NO: 251907 - RNA, 19 nt, Homo sapiens
  misc_RNA (1)...(19): siRNA sense strand
caggaagggccuacagaca

SEQ ID NO: 251908 - RNA, 19 nt, Homo sapiens
  misc_RNA (1)...(19): siRNA sense strand
ucauucuucuccuggaaau

SEQ ID NO: 251909 - RNA, 19 nt, Homo sapiens
  misc_RNA (1)...(19): siRNA sense strand
gggugccaauuacuuaugg

SEQ ID NO: 251910 - RNA, 19 nt, Homo sapiens
  misc_RNA (1)...(19): siRNA sense strand
caacuacauccacaugaac

SEQ ID NO: 251911 - RNA, 19 nt, Homo sapiens
  misc_RNA (1)...(19): siRNA sense strand
acgggacauuugaucagua

SEQ ID NO: 251912 - RNA, 19 nt, Homo sapiens
  misc_RNA (1)...(19): siRNA sense strand
agauggcgcugagaagcuu

SEQ ID NO: 251913 - RNA, 19 nt, Homo sapiens
  misc_RNA (1)...(19): siRNA sense strand
gaagcugcagcccucacuu

SEQ ID NO: 251914 - RNA, 19 nt, Homo sapiens
  misc_RNA (1)...(19): siRNA sense strand
ggcaggcgcuucucaauuu

SEQ ID NO: 251915 - RNA, 19 nt, Homo sapiens
  misc_RNA (1)...(19): siRNA sense strand
ggacaagguucuggaaaga

SEQ ID NO: 251916 - RNA, 19 nt, Homo sapiens
  misc_RNA (1)...(19): siRNA sense strand
ggauuacuguucugguuau

SEQ ID NO: 251917 - RNA, 19 nt, Homo sapiens
  misc_RNA (1)...(19): siRNA sense strand
ggaaauauugguggaagaa

SEQ ID NO: 251918 - RNA, 19 nt, Homo sapiens
  misc_RNA (1)...(19): siRNA sense strand
gggauuacuguucugguua

SEQ ID NO: 251919 - RNA, 19 nt, Homo sapiens
  misc_RNA (1)...(19): siRNA sense strand
gcaggcgcuucucaauuug

SEQ ID NO: 251920 - RNA, 19 nt, Homo sapiens
  misc_RNA (1)...(19): siRNA sense strand
cagccaaguugaagaggaa

SEQ ID NO: 251921 - RNA, 19 nt, Homo sapiens
  misc_RNA (1)...(19): siRNA sense strand
acaagguucuggaaagaga

SEQ ID NO: 251922 - RNA, 19 nt, Homo sapiens
  misc_RNA (1)...(19): siRNA sense strand
guggaagaauugcaagaug

SEQ ID NO: 251923 - RNA, 19 nt, Homo sapiens
  misc_RNA (1)...(19): siRNA sense strand
cugguuaucuucaucauca

SEQ ID NO: 251924 - RNA, 19 nt, Homo sapiens
  misc_RNA (1)...(19): siRNA sense strand
gaguuaacguggacaaggu

SEQ ID NO: 251925 - RNA, 19 nt, Homo sapiens
  misc_RNA (1)...(19): siRNA sense strand
uggaagaauugcaagaugu

SEQ ID NO: 251926 - RNA, 19 nt, Homo sapiens
  misc_RNA (1)...(19): siRNA sense strand
gaaacgagcgcagccaagu

SEQ ID NO: 251927 - RNA, 19 nt, Homo sapiens
  misc_RNA (1)...(19): siRNA sense strand
uagaugaggugguggacau

SEQ ID NO: 251928 - RNA, 19 nt, Homo sapiens
  misc_RNA (1)...(19): siRNA sense strand
ggaagaauugcaagaugug

SEQ ID NO: 251929 - RNA, 19 nt, Homo sapiens
  misc_RNA (1)...(19): siRNA sense strand
gaagcucucugaguuagac

SEQ ID NO: 251930 - RNA, 19 nt, Homo sapiens
  misc_RNA (1)...(19): siRNA sense strand
guggacauaaugcgaguua

SEQ ID NO: 251931 - RNA, 19 nt, Homo sapiens
  misc_RNA (1)...(19): siRNA sense strand
ccaaguugaagaggaaaua

SEQ ID NO: 251932 - RNA, 19 nt, Homo sapiens
  misc_RNA (1)...(19): siRNA sense strand
ggacauaaugcgaguuaac

SEQ ID NO: 251933 - RNA, 19 nt, Homo sapiens
  misc_RNA (1)...(19): siRNA sense strand
uuacuguucugguuaucuu

SEQ ID NO: 251934 - RNA, 19 nt, Homo sapiens
  misc_RNA (1)...(19): siRNA sense strand
cgggauuacuguucugguu

SEQ ID NO: 251935 - RNA, 19 nt, Homo sapiens
  misc_RNA (1)...(19): siRNA sense strand
gaugaggugguggacauaa

SEQ ID NO: 251936 - RNA, 19 nt, Homo sapiens
  misc_RNA (1)...(19): siRNA sense strand
gcaggcaggcgcuucucaa

SEQ ID NO: 251937 - RNA, 19 nt, Homo sapiens
  misc_RNA (1)...(19): siRNA sense strand
gaaauauugguggaagaau

SEQ ID NO: 251938 - RNA, 19 nt, Homo sapiens
  misc_RNA (1)...(19): siRNA sense strand
uggacaagguucuggaaag

SEQ ID NO: 251939 - RNA, 19 nt, Homo sapiens
  misc_RNA (1)...(19): siRNA sense strand
aauauugguggaagaauug

SEQ ID NO: 251940 - RNA, 19 nt, Homo sapiens
  misc_RNA (1)...(19): siRNA sense strand
gcagacacaaaaucaagua

SEQ ID NO: 251941 - RNA, 19 nt, Homo sapiens
  misc_RNA (1)...(19): siRNA sense strand
gacacaaaaucaaguagau

SEQ ID NO: 251942 - RNA, 19 nt, Homo sapiens
  misc_RNA (1)...(19): siRNA sense strand
aaacgagcgcagccaaguu

SEQ ID NO: 251943 - RNA, 19 nt, Homo sapiens
  misc_RNA (1)...(19): siRNA sense strand
agacuucagcagacacaaa

SEQ ID NO: 251944 - RNA, 19 nt, Homo sapiens
  misc_RNA (1)...(19): siRNA sense strand
uggcaguaaucgaagacuu

SEQ ID NO: 251945 - RNA, 19 nt, Homo sapiens
  misc_RNA (1)...(19): siRNA sense strand
caaguugaagaggaaauau

SEQ ID NO: 251946 - RNA, 19 nt, Homo sapiens
  misc_RNA (1)...(19): siRNA sense strand
gagcgcagccaaguugaag

SEQ ID NO: 251947 - RNA, 19 nt, Homo sapiens
  misc_RNA (1)...(19): siRNA sense strand
aguugaagaggaaauauug

SEQ ID NO: 251948 - RNA, 19 nt, Homo sapiens
  misc_RNA (1)...(19): siRNA sense strand
gguggaagaauugcaagau

SEQ ID NO: 251949 - RNA, 19 nt, Homo sapiens
  misc_RNA (1)...(19): siRNA sense strand
ugaggugguggacauaaug

SEQ ID NO: 251950 - RNA, 19 nt, Homo sapiens
  misc_RNA (1)...(19): siRNA sense strand
gaaagaagcuauaaguaca

SEQ ID NO: 251951 - RNA, 19 nt, Homo sapiens
  misc_RNA (1)...(19): siRNA sense strand
caaccaaaguggacaaguu

SEQ ID NO: 251952 - RNA, 19 nt, Homo sapiens
  misc_RNA (1)...(19): siRNA sense strand
gaagcuauaaguacaagua

SEQ ID NO: 251953 - RNA, 19 nt, Homo sapiens
  misc_RNA (1)...(19): siRNA sense strand
guaaagaacaggaagcaaa

SEQ ID NO: 251954 - RNA, 19 nt, Homo sapiens
  misc_RNA (1)...(19): siRNA sense strand
uuagaaagcuggaugauac

SEQ ID NO: 251955 - RNA, 19 nt, Homo sapiens
  misc_RNA (1)...(19): siRNA sense strand
caagauggaccaagauuug

SEQ ID NO: 251956 - RNA, 19 nt, Homo sapiens
  misc_RNA (1)...(19): siRNA sense strand
gaagaucgacagcaaccua

SEQ ID NO: 251957 - RNA, 19 nt, Homo sapiens
  misc_RNA (1)...(19): siRNA sense strand
ggaccaagauuugaagauc

SEQ ID NO: 251958 - RNA, 19 nt, Homo sapiens
  misc_RNA (1)...(19): siRNA sense strand
cagagaagaugguggacaa

SEQ ID NO: 251959 - RNA, 19 nt, Homo sapiens
  misc_RNA (1)...(19): siRNA sense strand
gcuggucaauuacuucaaa

SEQ ID NO: 251960 - RNA, 19 nt, Homo sapiens
  misc_RNA (1)...(19): siRNA sense strand
gaccaagauuugaagauca

SEQ ID NO: 251961 - RNA, 19 nt, Homo sapiens
  misc_RNA (1)...(19): siRNA sense strand
guacugaugcuuacccaaa

SEQ ID NO: 251962 - RNA, 19 nt, Homo sapiens
  misc_RNA (1)...(19): siRNA sense strand
gaagaugguggacaagaug

SEQ ID NO: 251963 - RNA, 19 nt, Homo sapiens
  misc_RNA (1)...(19): siRNA sense strand
ugaaagaagcuauaaguac

SEQ ID NO: 251964 - RNA, 19 nt, Homo sapiens
  misc_RNA (1)...(19): siRNA sense strand
caacaacagauugaaagaa

SEQ ID NO: 251965 - RNA, 19 nt, Homo sapiens
  misc_RNA (1)...(19): siRNA sense strand
gaaauugaggagcaagaug

SEQ ID NO: 251966 - RNA, 19 nt, Homo sapiens
  misc_RNA (1)...(19): siRNA sense strand
cuucaaauccaaaccagua

SEQ ID NO: 251967 - RNA, 19 nt, Homo sapiens
  misc_RNA (1)...(19): siRNA sense strand
aaccaaaguggacaaguua

SEQ ID NO: 251968 - RNA, 19 nt, Homo sapiens
  misc_RNA (1)...(19): siRNA sense strand
agaaacacaucaauagcau

SEQ ID NO: 251969 - RNA, 19 nt, Homo sapiens
  misc_RNA (1)...(19): siRNA sense strand
ggaugcagacagaaauuga

SEQ ID NO: 251970 - RNA, 19 nt, Homo sapiens
  misc_RNA (1)...(19): siRNA sense strand
gccagaaacacaucaauag

SEQ ID NO: 251971 - RNA, 19 nt, Homo sapiens
  misc_RNA (1)...(19): siRNA sense strand
gaaagcuggaugauacaga

SEQ ID NO: 251972 - RNA, 19 nt, Homo sapiens
  misc_RNA (1)...(19): siRNA sense strand
uggacaagauggaccaaga

SEQ ID NO: 251973 - RNA, 19 nt, Homo sapiens
  misc_RNA (1)...(19): siRNA sense strand
gacaagauggaccaagauu

SEQ ID NO: 251974 - RNA, 19 nt, Homo sapiens
  misc_RNA (1)...(19): siRNA sense strand
gaaacacaucaauagcauu

SEQ ID NO: 251975 - RNA, 19 nt, Homo sapiens
  misc_RNA (1)...(19): siRNA sense strand
gagccuaucaccagaagau

SEQ ID NO: 251976 - RNA, 19 nt, Homo sapiens
  misc_RNA (1)...(19): siRNA sense strand
ccaugaguacugaugcuua

SEQ ID NO: 251977 - RNA, 19 nt, Homo sapiens
  misc_RNA (1)...(19): siRNA sense strand
gcuauaaguacaaguaaag

SEQ ID NO: 251978 - RNA, 19 nt, Homo sapiens
  misc_RNA (1)...(19): siRNA sense strand
acacaucaauagcauuaag

SEQ ID NO: 251979 - RNA, 19 nt, Homo sapiens
  misc_RNA (1)...(19): siRNA sense strand
agaagaugguggacaagau

SEQ ID NO: 251980 - RNA, 19 nt, Homo sapiens
  misc_RNA (1)...(19): siRNA sense strand
gagaagaugguggacaaga

SEQ ID NO: 251981 - RNA, 19 nt, Homo sapiens
  misc_RNA (1)...(19): siRNA sense strand
ggacaagauggaccaagau

SEQ ID NO: 251982 - RNA, 19 nt, Homo sapiens
  misc_RNA (1)...(19): siRNA sense strand
ggacaggcagcaguacuug

SEQ ID NO: 251983 - RNA, 19 nt, Homo sapiens
  misc_RNA (1)...(19): siRNA sense strand
aacaacagauugaaagaag

SEQ ID NO: 251984 - RNA, 19 nt, Homo sapiens
  misc_RNA (1)...(19): siRNA sense strand
aaauugaggagcaagauga

SEQ ID NO: 251985 - RNA, 19 nt, Homo sapiens
  misc_RNA (1)...(19): siRNA sense strand
cagauugaaagaagcuaua

SEQ ID NO: 251986 - RNA, 19 nt, Homo sapiens
  misc_RNA (1)...(19): siRNA sense strand
gccagccacccaaaccuua

SEQ ID NO: 251987 - RNA, 19 nt, Homo sapiens
  misc_RNA (1)...(19): siRNA sense strand
uaaagaacaggaagcaaag

SEQ ID NO: 251988 - RNA, 19 nt, Homo sapiens
  misc_RNA (1)...(19): siRNA sense strand
ccaaaguggacaaguuaga

SEQ ID NO: 251989 - RNA, 19 nt, Homo sapiens
  misc_RNA (1)...(19): siRNA sense strand
guucugccaugaguacuga

SEQ ID NO: 251990 - RNA, 19 nt, Homo sapiens
  misc_RNA (1)...(19): siRNA sense strand
cagaaacacaucaauagca

SEQ ID NO: 251991 - RNA, 19 nt, Homo sapiens
  misc_RNA (1)...(19): siRNA sense strand
gacagaaauugaggagcaa

SEQ ID NO: 251992 - RNA, 19 nt, Homo sapiens
  misc_RNA (1)...(19): siRNA sense strand
guacgaguccgagaagguu

SEQ ID NO: 251993 - RNA, 19 nt, Homo sapiens
  misc_RNA (1)...(19): siRNA sense strand
aagaacaggaagcaaagua

SEQ ID NO: 251994 - RNA, 19 nt, Homo sapiens
  misc_RNA (1)...(19): siRNA sense strand
gcauuaagagcguguuugg

SEQ ID NO: 251995 - RNA, 19 nt, Homo sapiens
  misc_RNA (1)...(19): siRNA sense strand
gggacugggucgucugaag

SEQ ID NO: 251996 - RNA, 19 nt, Homo sapiens
  misc_RNA (1)...(19): siRNA sense strand
gcccaacaacagauugaaa

SEQ ID NO: 251997 - RNA, 19 nt, Homo sapiens
  misc_RNA (1)...(19): siRNA sense strand
caaaguggacaaguuagau

SEQ ID NO: 251998 - RNA, 19 nt, Homo sapiens
  misc_RNA (1)...(19): siRNA sense strand
ccaacaacagauugaaaga

SEQ ID NO: 251999 - RNA, 19 nt, Homo sapiens
  misc_RNA (1)...(19): siRNA sense strand
acaagauggaccaagauuu

SEQ ID NO: 252000 - RNA, 19 nt, Homo sapiens
  misc_RNA (1)...(19): siRNA sense strand
caugaguacugaugcuuac

SEQ ID NO: 252001 - RNA, 19 nt, Homo sapiens
  misc_RNA (1)...(19): siRNA sense strand
accagaagaucgacagcaa

SEQ ID NO: 252002 - RNA, 19 nt, Homo sapiens
  misc_RNA (1)...(19): siRNA sense strand
gaucgacagcaaccuagau

SEQ ID NO: 252003 - RNA, 19 nt, Homo sapiens
  misc_RNA (1)...(19): siRNA sense strand
cuuagaaagcuggaugaua

SEQ ID NO: 252004 - RNA, 19 nt, Homo sapiens
  misc_RNA (1)...(19): siRNA sense strand
agccagaaacacaucaaua

SEQ ID NO: 252005 - RNA, 19 nt, Homo sapiens
  misc_RNA (1)...(19): siRNA sense strand
gucaauuacuucaaaucca

SEQ ID NO: 252006 - RNA, 19 nt, Homo sapiens
  misc_RNA (1)...(19): siRNA sense strand
gaucagccagaaacacauc

SEQ ID NO: 252007 - RNA, 19 nt, Homo sapiens
  misc_RNA (1)...(19): siRNA sense strand
cgacagcaaccuagaugag

SEQ ID NO: 252008 - RNA, 19 nt, Homo sapiens
  misc_RNA (1)...(19): siRNA sense strand
gggaugcagacagaaauug

SEQ ID NO: 252009 - RNA, 19 nt, Homo sapiens
  misc_RNA (1)...(19): siRNA sense strand
caacagauugaaagaagcu

SEQ ID NO: 252010 - RNA, 19 nt, Homo sapiens
  misc_RNA (1)...(19): siRNA sense strand
gaagaucagccagaaacac

SEQ ID NO: 252011 - RNA, 19 nt, Homo sapiens
  misc_RNA (1)...(19): siRNA sense strand
aaaguggacaaguuagaug

SEQ ID NO: 252012 - RNA, 19 nt, Homo sapiens
  misc_RNA (1)...(19): siRNA sense strand
aaagaacccacaccuucga

SEQ ID NO: 252013 - RNA, 19 nt, Homo sapiens
  misc_RNA (1)...(19): siRNA sense strand
gaaagaaaaguucgacaac

SEQ ID NO: 252014 - RNA, 19 nt, Homo sapiens
  misc_RNA (1)...(19): siRNA sense strand
ggauugaccuugaauuuaa

SEQ ID NO: 252015 - RNA, 19 nt, Homo sapiens
  misc_RNA (1)...(19): siRNA sense strand
caagagagaugaugccaaa

SEQ ID NO: 252016 - RNA, 19 nt, Homo sapiens
  misc_RNA (1)...(19): siRNA sense strand
gcagaagaaguuacaaaua

SEQ ID NO: 252017 - RNA, 19 nt, Homo sapiens
  misc_RNA (1)...(19): siRNA sense strand
cagaagaaguuacaaauag

SEQ ID NO: 252018 - RNA, 19 nt, Homo sapiens
  misc_RNA (1)...(19): siRNA sense strand
gagagaugaugccaaauau

SEQ ID NO: 252019 - RNA, 19 nt, Homo sapiens
  misc_RNA (1)...(19): siRNA sense strand
uuaccgaccugaauguuua

SEQ ID NO: 252020 - RNA, 19 nt, Homo sapiens
  misc_RNA (1)...(19): siRNA sense strand
gaucaauccucgaagaaug

SEQ ID NO: 252021 - RNA, 19 nt, Homo sapiens
  misc_RNA (1)...(19): siRNA sense strand
gagaugaugccaaauauau

SEQ ID NO: 252022 - RNA, 19 nt, Homo sapiens
  misc_RNA (1)...(19): siRNA sense strand
gaauuuaaccauccucaaa

SEQ ID NO: 252023 - RNA, 19 nt, Homo sapiens
  misc_RNA (1)...(19): siRNA sense strand
gaaaauggcugguuugucu

SEQ ID NO: 252024 - RNA, 19 nt, Homo sapiens
  misc_RNA (1)...(19): siRNA sense strand
caugaaacauuacaggaaa

SEQ ID NO: 252025 - RNA, 19 nt, Homo sapiens
  misc_RNA (1)...(19): siRNA sense strand
caucuauucugccugauuu

SEQ ID NO: 252026 - RNA, 19 nt, Homo sapiens
  misc_RNA (1)...(19): siRNA sense strand
gguuuggccucuaucguua

SEQ ID NO: 252027 - RNA, 19 nt, Homo sapiens
  misc_RNA (1)...(19): siRNA sense strand
gcggauacuuugcuuauuc

SEQ ID NO: 252028 - RNA, 19 nt, Homo sapiens
  misc_RNA (1)...(19): siRNA sense strand
aggcauccaugaaacauua

SEQ ID NO: 252029 - RNA, 19 nt, Homo sapiens
  misc_RNA (1)...(19): siRNA sense strand
caacugcuuuccuggauug

SEQ ID NO: 252030 - RNA, 19 nt, Homo sapiens
  misc_RNA (1)...(19): siRNA sense strand
gaagaaaggcagaagaagu

SEQ ID NO: 252031 - RNA, 19 nt, Homo sapiens
  misc_RNA (1)...(19): siRNA sense strand
ccgagagcaugaagaauaa

SEQ ID NO: 252032 - RNA, 19 nt, Homo sapiens
  misc_RNA (1)...(19): siRNA sense strand
gaaccugccugcccuuucu

SEQ ID NO: 252033 - RNA, 19 nt, Homo sapiens
  misc_RNA (1)...(19): siRNA sense strand
ccaaacccguauuuauuga

SEQ ID NO: 252034 - RNA, 19 nt, Homo sapiens
  misc_RNA (1)...(19): siRNA sense strand
ggaaagauuuuguccagaa

SEQ ID NO: 252035 - RNA, 19 nt, Homo sapiens
  misc_RNA (1)...(19): siRNA sense strand
cagcugaggguguauuaua

SEQ ID NO: 252036 - RNA, 19 nt, Homo sapiens
  misc_RNA (1)...(19): siRNA sense strand
agagagaugaugccaaaua

SEQ ID NO: 252037 - RNA, 19 nt, Homo sapiens
  misc_RNA (1)...(19): siRNA sense strand
ugacaacuacauucaagua

SEQ ID NO: 252038 - RNA, 19 nt, Homo sapiens
  misc_RNA (1)...(19): siRNA sense strand
ugaaugagccguauacaag

SEQ ID NO: 252039 - RNA, 19 nt, Homo sapiens
  misc_RNA (1)...(19): siRNA sense strand
gcaacugcuuuccuggauu

SEQ ID NO: 252040 - RNA, 19 nt, Homo sapiens
  misc_RNA (1)...(19): siRNA sense strand
gccaaacccguauuuauug

SEQ ID NO: 252041 - RNA, 19 nt, Homo sapiens
  misc_RNA (1)...(19): siRNA sense strand
gaccacagcaucaaagaau

SEQ ID NO: 252042 - RNA, 19 nt, Homo sapiens
  misc_RNA (1)...(19): siRNA sense strand
ccgcacagcuccgagguuu

SEQ ID NO: 252043 - RNA, 19 nt, Homo sapiens
  misc_RNA (1)...(19): siRNA sense strand
gugcugaacuggcugaagu

SEQ ID NO: 252044 - RNA, 19 nt, Homo sapiens
  misc_RNA (1)...(19): siRNA sense strand
caucaggcguggacucuuc

SEQ ID NO: 252045 - RNA, 19 nt, Homo sapiens
  misc_RNA (1)...(19): siRNA sense strand
cauaaacgaagcucucaaa

SEQ ID NO: 252046 - RNA, 19 nt, Homo sapiens
  misc_RNA (1)...(19): siRNA sense strand
gauuauccaugggugauga

SEQ ID NO: 252047 - RNA, 19 nt, Homo sapiens
  misc_RNA (1)...(19): siRNA sense strand
cguggacucuucuauguug

SEQ ID NO: 252048 - RNA, 19 nt, Homo sapiens
  misc_RNA (1)...(19): siRNA sense strand
cccgagagcaugaagaaua

SEQ ID NO: 252049 - RNA, 19 nt, Homo sapiens
  misc_RNA (1)...(19): siRNA sense strand
gcccaaggcauccaugaaa

SEQ ID NO: 252050 - RNA, 19 nt, Homo sapiens
  misc_RNA (1)...(19): siRNA sense strand
gggacuggcugaaccaaag

SEQ ID NO: 252051 - RNA, 19 nt, Homo sapiens
  misc_RNA (1)...(19): siRNA sense strand
gacauuucccugugacuuu

SEQ ID NO: 252052 - RNA, 19 nt, Homo sapiens
  misc_RNA (1)...(19): siRNA sense strand
acucuucuauguugacuuu

SEQ ID NO: 252053 - RNA, 19 nt, Homo sapiens
  misc_RNA (1)...(19): siRNA sense strand
gaugaugccaaauauaugu

SEQ ID NO: 252054 - RNA, 19 nt, Homo sapiens
  misc_RNA (1)...(19): siRNA sense strand
ggcguggacucuucuaugu

SEQ ID NO: 252055 - RNA, 19 nt, Homo sapiens
  misc_RNA (1)...(19): siRNA sense strand
uggcaucucuacaauacuu

SEQ ID NO: 252056 - RNA, 19 nt, Homo sapiens
  misc_RNA (1)...(19): siRNA sense strand
aagaaaggcagaagaaguu

SEQ ID NO: 252057 - RNA, 19 nt, Homo sapiens
  misc_RNA (1)...(19): siRNA sense strand
gaagaauaaccuuucaucu

SEQ ID NO: 252058 - RNA, 19 nt, Homo sapiens
  misc_RNA (1)...(19): siRNA sense strand
gcaugaagaauaaccuuuc

SEQ ID NO: 252059 - RNA, 19 nt, Homo sapiens
  misc_RNA (1)...(19): siRNA sense strand
gaagaauucaccgugugua

SEQ ID NO: 252060 - RNA, 19 nt, Homo sapiens
  misc_RNA (1)...(19): siRNA sense strand
ucucaaagcccacauacug

SEQ ID NO: 252061 - RNA, 19 nt, Homo sapiens
  misc_RNA (1)...(19): siRNA sense strand
gcaggcugauuggauagaa

SEQ ID NO: 252062 - RNA, 19 nt, Homo sapiens
  misc_RNA (1)...(19): siRNA sense strand
ugccaaacccguauuuauu

SEQ ID NO: 252063 - RNA, 19 nt, Homo sapiens
  misc_RNA (1)...(19): siRNA sense strand
uggcauguguacaaugaaa

SEQ ID NO: 252064 - RNA, 19 nt, Homo sapiens
  misc_RNA (1)...(19): siRNA sense strand
acaccauccugcaguacua

SEQ ID NO: 252065 - RNA, 19 nt, Homo sapiens
  misc_RNA (1)...(19): siRNA sense strand
uggauugaccuugaauuua

SEQ ID NO: 252066 - RNA, 19 nt, Homo sapiens
  misc_RNA (1)...(19): siRNA sense strand
gcggucaggucaaguacug

SEQ ID NO: 252067 - RNA, 19 nt, Homo sapiens
  misc_RNA (1)...(19): siRNA sense strand
ccauguacauaauauccaa

SEQ ID NO: 252068 - RNA, 19 nt, Homo sapiens
  misc_RNA (1)...(19): siRNA sense strand
ccaggguaccuuugacuuu

SEQ ID NO: 252069 - RNA, 19 nt, Homo sapiens
  misc_RNA (1)...(19): siRNA sense strand
gcuaauccaggguaccuuu

SEQ ID NO: 252070 - RNA, 19 nt, Homo sapiens
  misc_RNA (1)...(19): siRNA sense strand
aaacccguauuuauugaug

SEQ ID NO: 252071 - RNA, 19 nt, Homo sapiens
  misc_RNA (1)...(19): siRNA sense strand
ggaaaauuauugacagcaa

SEQ ID NO: 252072 - RNA, 19 nt, Homo sapiens
  misc_RNA (1)...(19): siRNA sense strand
gcagaauuacauaaacgaa

SEQ ID NO: 252073 - RNA, 19 nt, Homo sapiens
  misc_RNA (1)...(19): siRNA sense strand
cuugcaggcugauuggaua

SEQ ID NO: 252074 - RNA, 19 nt, Homo sapiens
  misc_RNA (1)...(19): siRNA sense strand
gccaucacgucaagcuuug

SEQ ID NO: 252075 - RNA, 19 nt, Homo sapiens
  misc_RNA (1)...(19): siRNA sense strand
gaggucagguguccauugc

SEQ ID NO: 252076 - RNA, 19 nt, Homo sapiens
  misc_RNA (1)...(19): siRNA sense strand
ggccaucacgucaagcuuu

SEQ ID NO: 252077 - RNA, 19 nt, Homo sapiens
  misc_RNA (1)...(19): siRNA sense strand
gccgaccacuucagggauu

SEQ ID NO: 252078 - RNA, 19 nt, Homo sapiens
  misc_RNA (1)...(19): siRNA sense strand
gaauucaccguguguacug

SEQ ID NO: 252079 - RNA, 19 nt, Homo sapiens
  misc_RNA (1)...(19): siRNA sense strand
ccaugaaacauuacaggaa

SEQ ID NO: 252080 - RNA, 19 nt, Homo sapiens
  misc_RNA (1)...(19): siRNA sense strand
gcacagcuccgagguuugg

SEQ ID NO: 252081 - RNA, 19 nt, Homo sapiens
  misc_RNA (1)...(19): siRNA sense strand
ggacauuucccugugacuu

SEQ ID NO: 252082 - RNA, 19 nt, Homo sapiens
  misc_RNA (1)...(19): siRNA sense strand
guucaucauggaaaccuua

SEQ ID NO: 252083 - RNA, 19 nt, Homo sapiens
  misc_RNA (1)...(19): siRNA sense strand
ggacccaccuugaguuuuc

SEQ ID NO: 252084 - RNA, 19 nt, Homo sapiens
  misc_RNA (1)...(19): siRNA sense strand
uggaugguaucaaucuuug

SEQ ID NO: 252085 - RNA, 19 nt, Homo sapiens
  misc_RNA (1)...(19): siRNA sense strand
ggaggucagguguccauug

SEQ ID NO: 252086 - RNA, 19 nt, Homo sapiens
  misc_RNA (1)...(19): siRNA sense strand
cacaugaaguuccgccaau

SEQ ID NO: 252087 - RNA, 19 nt, Homo sapiens
  misc_RNA (1)...(19): siRNA sense strand
ggcagaagaaguuacaaau

SEQ ID NO: 252088 - RNA, 19 nt, Homo sapiens
  misc_RNA (1)...(19): siRNA sense strand
uuauuucucucucccuuau

SEQ ID NO: 252089 - RNA, 19 nt, Homo sapiens
  misc_RNA (1)...(19): siRNA sense strand
uuucggcucuggagauuau

SEQ ID NO: 252090 - RNA, 19 nt, Homo sapiens
  misc_RNA (1)...(19): siRNA sense strand
cuuggcauguguacaauga

SEQ ID NO: 252091 - RNA, 19 nt, Homo sapiens
  misc_RNA (1)...(19): siRNA sense strand
ucacgucaagcuuuggaua

SEQ ID NO: 252092 - RNA, 19 nt, Homo sapiens
  misc_RNA (1)...(19): siRNA sense strand
auaccacucugucucaguu

SEQ ID NO: 252093 - RNA, 19 nt, Homo sapiens
  misc_RNA (1)...(19): siRNA sense strand
ggcaacugcuuuccuggau

SEQ ID NO: 252094 - RNA, 19 nt, Homo sapiens
  misc_RNA (1)...(19): siRNA sense strand
gggauguccaccacaguaa

SEQ ID NO: 252095 - RNA, 19 nt, Homo sapiens
  misc_RNA (1)...(19): siRNA sense strand
ucaaaggaacugcugacuu

SEQ ID NO: 252096 - RNA, 19 nt, Homo sapiens
  misc_RNA (1)...(19): siRNA sense strand
caagaaaugaccgacauca

SEQ ID NO: 252097 - RNA, 19 nt, Homo sapiens
  misc_RNA (1)...(19): siRNA sense strand
caccauccuuguagacuca

SEQ ID NO: 252098 - RNA, 19 nt, Homo sapiens
  misc_RNA (1)...(19): siRNA sense strand
gcucggccaucacgucaag

SEQ ID NO: 252099 - RNA, 19 nt, Homo sapiens
  misc_RNA (1)...(19): siRNA sense strand
ggauguccaccacaguaaa

SEQ ID NO: 252100 - RNA, 19 nt, Homo sapiens
  misc_RNA (1)...(19): siRNA sense strand
ucuggcaucucuacaauac

SEQ ID NO: 252101 - RNA, 19 nt, Homo sapiens
  misc_RNA (1)...(19): siRNA sense strand
ccacagcaucaaagaaugu

SEQ ID NO: 252102 - RNA, 19 nt, Homo sapiens
  misc_RNA (1)...(19): siRNA sense strand
ucgaagaaaggcagaagaa

SEQ ID NO: 252103 - RNA, 19 nt, Homo sapiens
  misc_RNA (1)...(19): siRNA sense strand
ggaaauccuacuguguuga

SEQ ID NO: 252104 - RNA, 19 nt, Homo sapiens
  misc_RNA (1)...(19): siRNA sense strand
agagaugaugccaaauaua

SEQ ID NO: 252105 - RNA, 19 nt, Homo sapiens
  misc_RNA (1)...(19): siRNA sense strand
gagcaugaagaauaaccuu

SEQ ID NO: 252106 - RNA, 19 nt, Homo sapiens
  misc_RNA (1)...(19): siRNA sense strand
ccagucagguggcgguagu

SEQ ID NO: 252107 - RNA, 19 nt, Homo sapiens
  misc_RNA (1)...(19): siRNA sense strand
guuuaggcaugcucagaau

SEQ ID NO: 252108 - RNA, 19 nt, Homo sapiens
  misc_RNA (1)...(19): siRNA sense strand
caugaaguuccgccaauug

SEQ ID NO: 252109 - RNA, 19 nt, Homo sapiens
  misc_RNA (1)...(19): siRNA sense strand
accaaaagcugauagagaa

SEQ ID NO: 252110 - RNA, 19 nt, Homo sapiens
  misc_RNA (1)...(19): siRNA sense strand
agaaaggcagaagaaguua

SEQ ID NO: 252111 - RNA, 19 nt, Homo sapiens
  misc_RNA (1)...(19): siRNA sense strand
ccuagaagugcaagaaaug

SEQ ID NO: 252112 - RNA, 19 nt, Homo sapiens
  misc_RNA (1)...(19): siRNA sense strand
ccguauacaaggaauauga

SEQ ID NO: 252113 - RNA, 19 nt, Homo sapiens
  misc_RNA (1)...(19): siRNA sense strand
uucaagagcucggccauca

SEQ ID NO: 252114 - RNA, 19 nt, Homo sapiens
  misc_RNA (1)...(19): siRNA sense strand
ggauugaccuugaauuuaa

SEQ ID NO: 252115 - RNA, 19 nt, Homo sapiens
  misc_RNA (1)...(19): siRNA sense strand
caagagagaugaugccaaa

SEQ ID NO: 252116 - RNA, 19 nt, Homo sapiens
  misc_RNA (1)...(19): siRNA sense strand
gagagaugaugccaaauau

SEQ ID NO: 252117 - RNA, 19 nt, Homo sapiens
  misc_RNA (1)...(19): siRNA sense strand
gaucaauccucgaagaaug

SEQ ID NO: 252118 - RNA, 19 nt, Homo sapiens
  misc_RNA (1)...(19): siRNA sense strand
gagaugaugccaaauauau

SEQ ID NO: 252119 - RNA, 19 nt, Homo sapiens
  misc_RNA (1)...(19): siRNA sense strand
gaauuuaaccauccucaaa

SEQ ID NO: 252120 - RNA, 19 nt, Homo sapiens
  misc_RNA (1)...(19): siRNA sense strand
gaaaauggcugguuugucu

SEQ ID NO: 252121 - RNA, 19 nt, Homo sapiens
  misc_RNA (1)...(19): siRNA sense strand
caucuauucugccugauuu

SEQ ID NO: 252122 - RNA, 19 nt, Homo sapiens
  misc_RNA (1)...(19): siRNA sense strand
caacugcuuuccuggauug

SEQ ID NO: 252123 - RNA, 19 nt, Homo sapiens
  misc_RNA (1)...(19): siRNA sense strand
ccgagagcaugaagaauaa

SEQ ID NO: 252124 - RNA, 19 nt, Homo sapiens
  misc_RNA (1)...(19): siRNA sense strand
ccaaacccguauuuauuga

SEQ ID NO: 252125 - RNA, 19 nt, Homo sapiens
  misc_RNA (1)...(19): siRNA sense strand
agagagaugaugccaaaua

SEQ ID NO: 252126 - RNA, 19 nt, Homo sapiens
  misc_RNA (1)...(19): siRNA sense strand
ugacaacuacauucaagua

SEQ ID NO: 252127 - RNA, 19 nt, Homo sapiens
  misc_RNA (1)...(19): siRNA sense strand
gcaacugcuuuccuggauu

SEQ ID NO: 252128 - RNA, 19 nt, Homo sapiens
  misc_RNA (1)...(19): siRNA sense strand
gccaaacccguauuuauug

SEQ ID NO: 252129 - RNA, 19 nt, Homo sapiens
  misc_RNA (1)...(19): siRNA sense strand
gaccacagcaucaaagaau

SEQ ID NO: 252130 - RNA, 19 nt, Homo sapiens
  misc_RNA (1)...(19): siRNA sense strand
caucaggcguggacucuuc

SEQ ID NO: 252131 - RNA, 19 nt, Homo sapiens
  misc_RNA (1)...(19): siRNA sense strand
cguggacucuucuauguug

SEQ ID NO: 252132 - RNA, 19 nt, Homo sapiens
  misc_RNA (1)...(19): siRNA sense strand
cccgagagcaugaagaaua

SEQ ID NO: 252133 - RNA, 19 nt, Homo sapiens
  misc_RNA (1)...(19): siRNA sense strand
gacauuucccugugacuuu

SEQ ID NO: 252134 - RNA, 19 nt, Homo sapiens
  misc_RNA (1)...(19): siRNA sense strand
acucuucuauguugacuuu

SEQ ID NO: 252135 - RNA, 19 nt, Homo sapiens
  misc_RNA (1)...(19): siRNA sense strand
gaugaugccaaauauaugu

SEQ ID NO: 252136 - RNA, 19 nt, Homo sapiens
  misc_RNA (1)...(19): siRNA sense strand
ggcguggacucuucuaugu

SEQ ID NO: 252137 - RNA, 19 nt, Homo sapiens
  misc_RNA (1)...(19): siRNA sense strand
uggcaucucuacaauacuu

SEQ ID NO: 252138 - RNA, 19 nt, Homo sapiens
  misc_RNA (1)...(19): siRNA sense strand
gaagaauaaccuuucaucu

SEQ ID NO: 252139 - RNA, 19 nt, Homo sapiens
  misc_RNA (1)...(19): siRNA sense strand
gcaugaagaauaaccuuuc

SEQ ID NO: 252140 - RNA, 19 nt, Homo sapiens
  misc_RNA (1)...(19): siRNA sense strand
ugccaaacccguauuuauu

SEQ ID NO: 252141 - RNA, 19 nt, Homo sapiens
  misc_RNA (1)...(19): siRNA sense strand
gcggucaggucaaguacug

SEQ ID NO: 252142 - RNA, 19 nt, Homo sapiens
  misc_RNA (1)...(19): siRNA sense strand
uggauugaccuugaauuua

SEQ ID NO: 252143 - RNA, 19 nt, Homo sapiens
  misc_RNA (1)...(19): siRNA sense strand
aaacccguauuuauugaug

SEQ ID NO: 252144 - RNA, 19 nt, Homo sapiens
  misc_RNA (1)...(19): siRNA sense strand
gaggucagguguccauugc

SEQ ID NO: 252145 - RNA, 19 nt, Homo sapiens
  misc_RNA (1)...(19): siRNA sense strand
ggacccaccuugaguuuuc

SEQ ID NO: 252146 - RNA, 19 nt, Homo sapiens
  misc_RNA (1)...(19): siRNA sense strand
ggacauuucccugugacuu

SEQ ID NO: 252147 - RNA, 19 nt, Homo sapiens
  misc_RNA (1)...(19): siRNA sense strand
gccgaccacuucagggauu

SEQ ID NO: 252148 - RNA, 19 nt, Homo sapiens
  misc_RNA (1)...(19): siRNA sense strand
guucaucauggaaaccuua

SEQ ID NO: 252149 - RNA, 19 nt, Homo sapiens
  misc_RNA (1)...(19): siRNA sense strand
ggaggucagguguccauug

SEQ ID NO: 252150 - RNA, 19 nt, Homo sapiens
  misc_RNA (1)...(19): siRNA sense strand
cacaugaaguuccgccaau

SEQ ID NO: 252151 - RNA, 19 nt, Homo sapiens
  misc_RNA (1)...(19): siRNA sense strand
ggcaacugcuuuccuggau

SEQ ID NO: 252152 - RNA, 19 nt, Homo sapiens
  misc_RNA (1)...(19): siRNA sense strand
ucaaaggaacugcugacuu

SEQ ID NO: 252153 - RNA, 19 nt, Homo sapiens
  misc_RNA (1)...(19): siRNA sense strand
ucuggcaucucuacaauac

SEQ ID NO: 252154 - RNA, 19 nt, Homo sapiens
  misc_RNA (1)...(19): siRNA sense strand
ccacagcaucaaagaaugu

SEQ ID NO: 252155 - RNA, 19 nt, Homo sapiens
  misc_RNA (1)...(19): siRNA sense strand
agagaugaugccaaauaua

SEQ ID NO: 252156 - RNA, 19 nt, Homo sapiens
  misc_RNA (1)...(19): siRNA sense strand
gagcaugaagaauaaccuu

SEQ ID NO: 252157 - RNA, 19 nt, Homo sapiens
  misc_RNA (1)...(19): siRNA sense strand
caugaaguuccgccaauug

SEQ ID NO: 252158 - RNA, 19 nt, Homo sapiens
  misc_RNA (1)...(19): siRNA sense strand
acaugaaguuccgccaauu

SEQ ID NO: 252159 - RNA, 19 nt, Homo sapiens
  misc_RNA (1)...(19): siRNA sense strand
accaaaagcugauagagaa

SEQ ID NO: 252160 - RNA, 19 nt, Homo sapiens
  misc_RNA (1)...(19): siRNA sense strand
cuggauugaccuugaauuu

SEQ ID NO: 252161 - RNA, 19 nt, Homo sapiens
  misc_RNA (1)...(19): siRNA sense strand
gcaagggugcguccaucug

SEQ ID NO: 252162 - RNA, 19 nt, Homo sapiens
  misc_RNA (1)...(19): siRNA sense strand
ucucuggacuuuguacuag

SEQ ID NO: 252163 - RNA, 19 nt, Homo sapiens
  misc_RNA (1)...(19): siRNA sense strand
caaagucuucagccuuguu

SEQ ID NO: 252164 - RNA, 19 nt, Homo sapiens
  misc_RNA (1)...(19): siRNA sense strand
caaagucuggcaucucuac

SEQ ID NO: 252165 - RNA, 19 nt, Homo sapiens
  misc_RNA (1)...(19): siRNA sense strand
cuucuauguugacuuucua

SEQ ID NO: 252166 - RNA, 19 nt, Homo sapiens
  misc_RNA (1)...(19): siRNA sense strand
caggucaaguacuggauca

SEQ ID NO: 252167 - RNA, 19 nt, Homo sapiens
  misc_RNA (1)...(19): siRNA sense strand
gaccgaccacagcaucaaa

SEQ ID NO: 252168 - RNA, 19 nt, Homo sapiens
  misc_RNA (1)...(19): siRNA sense strand
ccgaccacuucagggauua

SEQ ID NO: 252169 - RNA, 19 nt, Homo sapiens
  misc_RNA (1)...(19): siRNA sense strand
gauugaccuugaauuuaac

SEQ ID NO: 252170 - RNA, 19 nt, Homo sapiens
  misc_RNA (1)...(19): siRNA sense strand
acauuucccugugacuuug

SEQ ID NO: 252171 - RNA, 19 nt, Homo sapiens
  misc_RNA (1)...(19): siRNA sense strand
aaauggcuucccuccuuua

SEQ ID NO: 252172 - RNA, 19 nt, Homo sapiens
  misc_RNA (1)...(19): siRNA sense strand
cacagagguuacagcauca

SEQ ID NO: 252173 - RNA, 19 nt, Homo sapiens
  misc_RNA (1)...(19): siRNA sense strand
ggucccucauggaugguuu

SEQ ID NO: 252174 - RNA, 19 nt, Homo sapiens
  misc_RNA (1)...(19): siRNA sense strand
cgaccacagcaucaaagaa

SEQ ID NO: 252175 - RNA, 19 nt, Homo sapiens
  misc_RNA (1)...(19): siRNA sense strand
ucgaguggcacagagguua

SEQ ID NO: 252176 - RNA, 19 nt, Homo sapiens
  misc_RNA (1)...(19): siRNA sense strand
ggaccaccaagagagauga

SEQ ID NO: 252177 - RNA, 19 nt, Homo sapiens
  misc_RNA (1)...(19): siRNA sense strand
agucuggcaucucuacaau

SEQ ID NO: 252178 - RNA, 19 nt, Homo sapiens
  misc_RNA (1)...(19): siRNA sense strand
uuuccuggauugaccuuga

SEQ ID NO: 252179 - RNA, 19 nt, Homo sapiens
  misc_RNA (1)...(19): siRNA sense strand
aagauguuguugccaaagu

SEQ ID NO: 252180 - RNA, 19 nt, Homo sapiens
  misc_RNA (1)...(19): siRNA sense strand
ucucuacaauacuucuuuc

SEQ ID NO: 252181 - RNA, 19 nt, Homo sapiens
  misc_RNA (1)...(19): siRNA sense strand
uaagccaggacaagauguu

SEQ ID NO: 252182 - RNA, 19 nt, Homo sapiens
  misc_RNA (1)...(19): siRNA sense strand
aaaauggcuucccuccuuu

SEQ ID NO: 252183 - RNA, 19 nt, Homo sapiens
  misc_RNA (1)...(19): siRNA sense strand
ccauugcccuaagcucuca

SEQ ID NO: 252184 - RNA, 19 nt, Homo sapiens
  misc_RNA (1)...(19): siRNA sense strand
cacuaccgcuucuccaucu

SEQ ID NO: 252185 - RNA, 19 nt, Homo sapiens
  misc_RNA (1)...(19): siRNA sense strand
uugccaaacccguauuuau

SEQ ID NO: 252186 - RNA, 19 nt, Homo sapiens
  misc_RNA (1)...(19): siRNA sense strand
ggacucuucuauguugacu

SEQ ID NO: 252187 - RNA, 19 nt, Homo sapiens
  misc_RNA (1)...(19): siRNA sense strand
aaccugaggcaacugcuuu

SEQ ID NO: 252188 - RNA, 19 nt, Homo sapiens
  misc_RNA (1)...(19): siRNA sense strand
gacuaucccgagagcauga

SEQ ID NO: 252189 - RNA, 19 nt, Homo sapiens
  misc_RNA (1)...(19): siRNA sense strand
ggagaagucccaucaauuu

SEQ ID NO: 252190 - RNA, 19 nt, Homo sapiens
  misc_RNA (1)...(19): siRNA sense strand
ggaaaccacuacuacaaug

SEQ ID NO: 252191 - RNA, 19 nt, Homo sapiens
  misc_RNA (1)...(19): siRNA sense strand
gaagagcggccacaagaaa

SEQ ID NO: 252192 - RNA, 19 nt, Homo sapiens
  misc_RNA (1)...(19): siRNA sense strand
ucucugggcucuauuauga

SEQ ID NO: 252193 - RNA, 19 nt, Homo sapiens
  misc_RNA (1)...(19): siRNA sense strand
gagaacaaccccaauauua

SEQ ID NO: 252194 - RNA, 19 nt, Homo sapiens
  misc_RNA (1)...(19): siRNA sense strand
ggacaaaggacgccucuuc

SEQ ID NO: 252195 - RNA, 19 nt, Homo sapiens
  misc_RNA (1)...(19): siRNA sense strand
gaugaagacuuuguugaau

SEQ ID NO: 252196 - RNA, 19 nt, Homo sapiens
  misc_RNA (1)...(19): siRNA sense strand
ccagaaaugucuacuacug

SEQ ID NO: 252197 - RNA, 19 nt, Homo sapiens
  misc_RNA (1)...(19): siRNA sense strand
cgacagugcuccaggacuu

SEQ ID NO: 252198 - RNA, 19 nt, Homo sapiens
  misc_RNA (1)...(19): siRNA sense strand
acaaggacagggaguauua

SEQ ID NO: 252199 - RNA, 19 nt, Homo sapiens
  misc_RNA (1)...(19): siRNA sense strand
gaacauggcggcugagaac

SEQ ID NO: 252200 - RNA, 19 nt, Homo sapiens
  misc_RNA (1)...(19): siRNA sense strand
gaacaaccccaauauuaaa

SEQ ID NO: 252201 - RNA, 19 nt, Homo sapiens
  misc_RNA (1)...(19): siRNA sense strand
ugaagacuuuguugaaugu

SEQ ID NO: 252202 - RNA, 19 nt, Homo sapiens
  misc_RNA (1)...(19): siRNA sense strand
guggugggcuuauccucua

SEQ ID NO: 252203 - RNA, 19 nt, Homo sapiens
  misc_RNA (1)...(19): siRNA sense strand
gcucuauuaugaugguuug

SEQ ID NO: 252204 - RNA, 19 nt, Homo sapiens
  misc_RNA (1)...(19): siRNA sense strand
gcacgcucaugaaggagaa

SEQ ID NO: 252205 - RNA, 19 nt, Homo sapiens
  misc_RNA (1)...(19): siRNA sense strand
caccagaaaugucuacuac

SEQ ID NO: 252206 - RNA, 19 nt, Homo sapiens
  misc_RNA (1)...(19): siRNA sense strand
caaaggacgccucuuccaa

SEQ ID NO: 252207 - RNA, 19 nt, Homo sapiens
  misc_RNA (1)...(19): siRNA sense strand
ggagagaaccccuguaaau

SEQ ID NO: 252208 - RNA, 19 nt, Homo sapiens
  misc_RNA (1)...(19): siRNA sense strand
gcauucagccaacaucaga

SEQ ID NO: 252209 - RNA, 19 nt, Homo sapiens
  misc_RNA (1)...(19): siRNA sense strand
gcaucuugauccuccugua

SEQ ID NO: 252210 - RNA, 19 nt, Homo sapiens
  misc_RNA (1)...(19): siRNA sense strand
ccaacucucugggcucuau

SEQ ID NO: 252211 - RNA, 19 nt, Homo sapiens
  misc_RNA (1)...(19): siRNA sense strand
ggaacuacaucagcaacuc

SEQ ID NO: 252212 - RNA, 19 nt, Homo sapiens
  misc_RNA (1)...(19): siRNA sense strand
caacacagacgaccuccau

SEQ ID NO: 252213 - RNA, 19 nt, Homo sapiens
  misc_RNA (1)...(19): siRNA sense strand
gcaguuaaccaucuucaac

SEQ ID NO: 252214 - RNA, 19 nt, Homo sapiens
  misc_RNA (1)...(19): siRNA sense strand
ugaugaagacuuuguugaa

SEQ ID NO: 252215 - RNA, 19 nt, Homo sapiens
  misc_RNA (1)...(19): siRNA sense strand
uaugaugguuugaaaguac

SEQ ID NO: 252216 - RNA, 19 nt, Homo sapiens
  misc_RNA (1)...(19): siRNA sense strand
caaauagccauugguggaa

SEQ ID NO: 252217 - RNA, 19 nt, Homo sapiens
  misc_RNA (1)...(19): siRNA sense strand
ucgaagagcggccacaaga

SEQ ID NO: 252218 - RNA, 19 nt, Homo sapiens
  misc_RNA (1)...(19): siRNA sense strand
gaugaugaagacuuuguug

SEQ ID NO: 252219 - RNA, 19 nt, Homo sapiens
  misc_RNA (1)...(19): siRNA sense strand
gcaacggcacgcucaugaa

SEQ ID NO: 252220 - RNA, 19 nt, Homo sapiens
  misc_RNA (1)...(19): siRNA sense strand
aaauuggaguugucuucaa

SEQ ID NO: 252221 - RNA, 19 nt, Homo sapiens
  misc_RNA (1)...(19): siRNA sense strand
cuacuacaauggcgacuac

SEQ ID NO: 252222 - RNA, 19 nt, Homo sapiens
  misc_RNA (1)...(19): siRNA sense strand
gaaaugucuacuacuguca

SEQ ID NO: 252223 - RNA, 19 nt, Homo sapiens
  misc_RNA (1)...(19): siRNA sense strand
aaauagccauugguggaaa

SEQ ID NO: 252224 - RNA, 19 nt, Homo sapiens
  misc_RNA (1)...(19): siRNA sense strand
gaggagagaaccccuguaa

SEQ ID NO: 252225 - RNA, 19 nt, Homo sapiens
  misc_RNA (1)...(19): siRNA sense strand
ccacaacccguaagaaucg

SEQ ID NO: 252226 - RNA, 19 nt, Homo sapiens
  misc_RNA (1)...(19): siRNA sense strand
gaaaauuggaguugucuuc

SEQ ID NO: 252227 - RNA, 19 nt, Homo sapiens
  misc_RNA (1)...(19): siRNA sense strand
gaaaaguggugggcuuauc

SEQ ID NO: 252228 - RNA, 19 nt, Homo sapiens
  misc_RNA (1)...(19): siRNA sense strand
caacggcacgcucaugaag

SEQ ID NO: 252229 - RNA, 19 nt, Homo sapiens
  misc_RNA (1)...(19): siRNA sense strand
augaagacuuuguugaaug

SEQ ID NO: 252230 - RNA, 19 nt, Homo sapiens
  misc_RNA (1)...(19): siRNA sense strand
cgacuaccacaacccguaa

SEQ ID NO: 252231 - RNA, 19 nt, Homo sapiens
  misc_RNA (1)...(19): siRNA sense strand
gaaaccacuacuacaaugg

SEQ ID NO: 252232 - RNA, 19 nt, Homo sapiens
  misc_RNA (1)...(19): siRNA sense strand
caacacucaggcgcaaaua

SEQ ID NO: 252233 - RNA, 19 nt, Homo sapiens
  misc_RNA (1)...(19): siRNA sense strand
ugacaucuccaucaaagag

SEQ ID NO: 252234 - RNA, 19 nt, Homo sapiens
  misc_RNA (1)...(19): siRNA sense strand
uaaaugacggcaaauacca

SEQ ID NO: 252235 - RNA, 19 nt, Homo sapiens
  misc_RNA (1)...(19): siRNA sense strand
aaacaaggacagggaguau

SEQ ID NO: 252236 - RNA, 19 nt, Homo sapiens
  misc_RNA (1)...(19): siRNA sense strand
cuacuacugucauggaaac

SEQ ID NO: 252237 - RNA, 19 nt, Homo sapiens
  misc_RNA (1)...(19): siRNA sense strand
ccaccagaaaugucuacua

SEQ ID NO: 252238 - RNA, 19 nt, Homo sapiens
  misc_RNA (1)...(19): siRNA sense strand
uggagaagucccaucaauu

SEQ ID NO: 252239 - RNA, 19 nt, Homo sapiens
  misc_RNA (1)...(19): siRNA sense strand
uaaccaucuucaacacuca

SEQ ID NO: 252240 - RNA, 19 nt, Homo sapiens
  misc_RNA (1)...(19): siRNA sense strand
cgaagagcggccacaagaa

SEQ ID NO: 252241 - RNA, 19 nt, Homo sapiens
  misc_RNA (1)...(19): siRNA sense strand
cuucaacauuggcacaguu

SEQ ID NO: 252242 - RNA, 19 nt, Homo sapiens
  misc_RNA (1)...(19): siRNA sense strand
uuggagaagucccaucaau

SEQ ID NO: 252243 - RNA, 19 nt, Homo sapiens
  misc_RNA (1)...(19): siRNA sense strand
uaccacaacccguaagaau

SEQ ID NO: 252244 - RNA, 19 nt, Homo sapiens
  misc_RNA (1)...(19): siRNA sense strand
aagacuuuguugaauguga

SEQ ID NO: 252245 - RNA, 19 nt, Homo sapiens
  misc_RNA (1)...(19): siRNA sense strand
cagcaccacugugaaggau

SEQ ID NO: 252246 - RNA, 19 nt, Homo sapiens
  misc_RNA (1)...(19): siRNA sense strand
ucugggcucuauuaugaug

SEQ ID NO: 252247 - RNA, 19 nt, Homo sapiens
  misc_RNA (1)...(19): siRNA sense strand
gcaacuccgcccagagcaa

SEQ ID NO: 252248 - RNA, 19 nt, Homo sapiens
  misc_RNA (1)...(19): siRNA sense strand
gagaagucccaucaauuuu

SEQ ID NO: 252249 - RNA, 19 nt, Homo sapiens
  misc_RNA (1)...(19): siRNA sense strand
agaacaaccccaauauuaa

SEQ ID NO: 252250 - RNA, 19 nt, Homo sapiens
  misc_RNA (1)...(19): siRNA sense strand
cagaaaugucuacuacugu

SEQ ID NO: 252251 - RNA, 19 nt, Homo sapiens
  misc_RNA (1)...(19): siRNA sense strand
ccuccagcuucacauagaa

SEQ ID NO: 252252 - RNA, 19 nt, Homo sapiens
  misc_RNA (1)...(19): siRNA sense strand
gagagaaccccuguaaaug

SEQ ID NO: 252253 - RNA, 19 nt, Homo sapiens
  misc_RNA (1)...(19): siRNA sense strand
gaagucccaucaauuuugg

SEQ ID NO: 252254 - RNA, 19 nt, Homo sapiens
  misc_RNA (1)...(19): siRNA sense strand
acagggaguauuacgugua

SEQ ID NO: 252255 - RNA, 19 nt, Homo sapiens
  misc_RNA (1)...(19): siRNA sense strand
gcugagaacaaccccaaua

SEQ ID NO: 252256 - RNA, 19 nt, Homo sapiens
  misc_RNA (1)...(19): siRNA sense strand
guaaaugacggcaaauacc

SEQ ID NO: 252257 - RNA, 19 nt, Homo sapiens
  misc_RNA (1)...(19): siRNA sense strand
acggcacgcucaugaagga

SEQ ID NO: 252258 - RNA, 19 nt, Homo sapiens
  misc_RNA (1)...(19): siRNA sense strand
ggacgagacgcggaacuac

SEQ ID NO: 252259 - RNA, 19 nt, Homo sapiens
  misc_RNA (1)...(19): siRNA sense strand
gaaugugagccgaguacag

SEQ ID NO: 252260 - RNA, 19 nt, Homo sapiens
  misc_RNA (1)...(19): siRNA sense strand
ggcgcuacguacaucuuug

SEQ ID NO: 252261 - RNA, 19 nt, Homo sapiens
  misc_RNA (1)...(19): siRNA sense strand
uggaaaccacuacuacaau

SEQ ID NO: 252262 - RNA, 19 nt, Homo sapiens
  misc_RNA (1)...(19): siRNA sense strand
gcacaguugacaucuccau

SEQ ID NO: 252263 - RNA, 19 nt, Homo sapiens
  misc_RNA (1)...(19): siRNA sense strand
agagaaccccuguaaauga

SEQ ID NO: 252264 - RNA, 19 nt, Homo sapiens
  misc_RNA (1)...(19): siRNA sense strand
gguuggagaagucccauca

SEQ ID NO: 252265 - RNA, 19 nt, Homo sapiens
  misc_RNA (1)...(19): siRNA sense strand
guuugaaaguacugaacau

SEQ ID NO: 252266 - RNA, 19 nt, Homo sapiens
  misc_RNA (1)...(19): siRNA sense strand
cccuguaaaugacggcaaa

SEQ ID NO: 252267 - RNA, 19 nt, Homo sapiens
  misc_RNA (1)...(19): siRNA sense strand
gacgagacgcggaacuaca

SEQ ID NO: 252268 - RNA, 19 nt, Homo sapiens
  misc_RNA (1)...(19): siRNA sense strand
gauggucgucggcauugug

SEQ ID NO: 252269 - RNA, 19 nt, Homo sapiens
  misc_RNA (1)...(19): siRNA sense strand
gggauggucgucggcauug

SEQ ID NO: 252270 - RNA, 19 nt, Homo sapiens
  misc_RNA (1)...(19): siRNA sense strand
acaguugacaucuccauca

SEQ ID NO: 252271 - RNA, 19 nt, Homo sapiens
  misc_RNA (1)...(19): siRNA sense strand
gugacuuccuccagcuuca

SEQ ID NO: 252272 - RNA, 19 nt, Homo sapiens
  misc_RNA (1)...(19): siRNA sense strand
ggagaagucccaucaauuu

SEQ ID NO: 252273 - RNA, 19 nt, Homo sapiens
  misc_RNA (1)...(19): siRNA sense strand
ggaaaccacuacuacaaug

SEQ ID NO: 252274 - RNA, 19 nt, Homo sapiens
  misc_RNA (1)...(19): siRNA sense strand
gaagagcggccacaagaaa

SEQ ID NO: 252275 - RNA, 19 nt, Homo sapiens
  misc_RNA (1)...(19): siRNA sense strand
ucucugggcucuauuauga

SEQ ID NO: 252276 - RNA, 19 nt, Homo sapiens
  misc_RNA (1)...(19): siRNA sense strand
gagaacaaccccaauauua

SEQ ID NO: 252277 - RNA, 19 nt, Homo sapiens
  misc_RNA (1)...(19): siRNA sense strand
ggacaaaggacgccucuuc

SEQ ID NO: 252278 - RNA, 19 nt, Homo sapiens
  misc_RNA (1)...(19): siRNA sense strand
gaugaagacuuuguugaau

SEQ ID NO: 252279 - RNA, 19 nt, Homo sapiens
  misc_RNA (1)...(19): siRNA sense strand
ccagaaaugucuacuacug

SEQ ID NO: 252280 - RNA, 19 nt, Homo sapiens
  misc_RNA (1)...(19): siRNA sense strand
cgacagugcuccaggacuu

SEQ ID NO: 252281 - RNA, 19 nt, Homo sapiens
  misc_RNA (1)...(19): siRNA sense strand
acaaggacagggaguauua

SEQ ID NO: 252282 - RNA, 19 nt, Homo sapiens
  misc_RNA (1)...(19): siRNA sense strand
gaacauggcggcugagaac

SEQ ID NO: 252283 - RNA, 19 nt, Homo sapiens
  misc_RNA (1)...(19): siRNA sense strand
gaacaaccccaauauuaaa

SEQ ID NO: 252284 - RNA, 19 nt, Homo sapiens
  misc_RNA (1)...(19): siRNA sense strand
ugaagacuuuguugaaugu

SEQ ID NO: 252285 - RNA, 19 nt, Homo sapiens
  misc_RNA (1)...(19): siRNA sense strand
guggugggcuuauccucua

SEQ ID NO: 252286 - RNA, 19 nt, Homo sapiens
  misc_RNA (1)...(19): siRNA sense strand
gcucuauuaugaugguuug

SEQ ID NO: 252287 - RNA, 19 nt, Homo sapiens
  misc_RNA (1)...(19): siRNA sense strand
gcacgcucaugaaggagaa

SEQ ID NO: 252288 - RNA, 19 nt, Homo sapiens
  misc_RNA (1)...(19): siRNA sense strand
caccagaaaugucuacuac

SEQ ID NO: 252289 - RNA, 19 nt, Homo sapiens
  misc_RNA (1)...(19): siRNA sense strand
caaaggacgccucuuccaa

SEQ ID NO: 252290 - RNA, 19 nt, Homo sapiens
  misc_RNA (1)...(19): siRNA sense strand
ggagagaaccccuguaaau

SEQ ID NO: 252291 - RNA, 19 nt, Homo sapiens
  misc_RNA (1)...(19): siRNA sense strand
gcauucagccaacaucaga

SEQ ID NO: 252292 - RNA, 19 nt, Homo sapiens
  misc_RNA (1)...(19): siRNA sense strand
gcaucuugauccuccugua

SEQ ID NO: 252293 - RNA, 19 nt, Homo sapiens
  misc_RNA (1)...(19): siRNA sense strand
ccaacucucugggcucuau

SEQ ID NO: 252294 - RNA, 19 nt, Homo sapiens
  misc_RNA (1)...(19): siRNA sense strand
ggaacuacaucagcaacuc

SEQ ID NO: 252295 - RNA, 19 nt, Homo sapiens
  misc_RNA (1)...(19): siRNA sense strand
caacacagacgaccuccau

SEQ ID NO: 252296 - RNA, 19 nt, Homo sapiens
  misc_RNA (1)...(19): siRNA sense strand
gcaguuaaccaucuucaac

SEQ ID NO: 252297 - RNA, 19 nt, Homo sapiens
  misc_RNA (1)...(19): siRNA sense strand
ugaugaagacuuuguugaa

SEQ ID NO: 252298 - RNA, 19 nt, Homo sapiens
  misc_RNA (1)...(19): siRNA sense strand
uaugaugguuugaaaguac

SEQ ID NO: 252299 - RNA, 19 nt, Homo sapiens
  misc_RNA (1)...(19): siRNA sense strand
caaauagccauugguggaa

SEQ ID NO: 252300 - RNA, 19 nt, Homo sapiens
  misc_RNA (1)...(19): siRNA sense strand
ucgaagagcggccacaaga

SEQ ID NO: 252301 - RNA, 19 nt, Homo sapiens
  misc_RNA (1)...(19): siRNA sense strand
gaugaugaagacuuuguug

SEQ ID NO: 252302 - RNA, 19 nt, Homo sapiens
  misc_RNA (1)...(19): siRNA sense strand
gcaacggcacgcucaugaa

SEQ ID NO: 252303 - RNA, 19 nt, Homo sapiens
  misc_RNA (1)...(19): siRNA sense strand
aaauuggaguugucuucaa

SEQ ID NO: 252304 - RNA, 19 nt, Homo sapiens
  misc_RNA (1)...(19): siRNA sense strand
cuacuacaauggcgacuac

SEQ ID NO: 252305 - RNA, 19 nt, Homo sapiens
  misc_RNA (1)...(19): siRNA sense strand
gaaaugucuacuacuguca

SEQ ID NO: 252306 - RNA, 19 nt, Homo sapiens
  misc_RNA (1)...(19): siRNA sense strand
aaauagccauugguggaaa

SEQ ID NO: 252307 - RNA, 19 nt, Homo sapiens
  misc_RNA (1)...(19): siRNA sense strand
gaggagagaaccccuguaa

SEQ ID NO: 252308 - RNA, 19 nt, Homo sapiens
  misc_RNA (1)...(19): siRNA sense strand
ccacaacccguaagaaucg

SEQ ID NO: 252309 - RNA, 19 nt, Homo sapiens
  misc_RNA (1)...(19): siRNA sense strand
gaaaauuggaguugucuuc

SEQ ID NO: 252310 - RNA, 19 nt, Homo sapiens
  misc_RNA (1)...(19): siRNA sense strand
gaaaaguggugggcuuauc

SEQ ID NO: 252311 - RNA, 19 nt, Homo sapiens
  misc_RNA (1)...(19): siRNA sense strand
caacggcacgcucaugaag

SEQ ID NO: 252312 - RNA, 19 nt, Homo sapiens
  misc_RNA (1)...(19): siRNA sense strand
augaagacuuuguugaaug

SEQ ID NO: 252313 - RNA, 19 nt, Homo sapiens
  misc_RNA (1)...(19): siRNA sense strand
cgacuaccacaacccguaa

SEQ ID NO: 252314 - RNA, 19 nt, Homo sapiens
  misc_RNA (1)...(19): siRNA sense strand
gaaaccacuacuacaaugg

SEQ ID NO: 252315 - RNA, 19 nt, Homo sapiens
  misc_RNA (1)...(19): siRNA sense strand
caacacucaggcgcaaaua

SEQ ID NO: 252316 - RNA, 19 nt, Homo sapiens
  misc_RNA (1)...(19): siRNA sense strand
ugacaucuccaucaaagag

SEQ ID NO: 252317 - RNA, 19 nt, Homo sapiens
  misc_RNA (1)...(19): siRNA sense strand
uaaaugacggcaaauacca

SEQ ID NO: 252318 - RNA, 19 nt, Homo sapiens
  misc_RNA (1)...(19): siRNA sense strand
aaacaaggacagggaguau

SEQ ID NO: 252319 - RNA, 19 nt, Homo sapiens
  misc_RNA (1)...(19): siRNA sense strand
cuacuacugucauggaaac

SEQ ID NO: 252320 - RNA, 19 nt, Homo sapiens
  misc_RNA (1)...(19): siRNA sense strand
ccaccagaaaugucuacua

SEQ ID NO: 252321 - RNA, 19 nt, Homo sapiens
  misc_RNA (1)...(19): siRNA sense strand
uggagaagucccaucaauu

SEQ ID NO: 252322 - RNA, 19 nt, Homo sapiens
  misc_RNA (1)...(19): siRNA sense strand
uaaccaucuucaacacuca

SEQ ID NO: 252323 - RNA, 19 nt, Homo sapiens
  misc_RNA (1)...(19): siRNA sense strand
cgaagagcggccacaagaa

SEQ ID NO: 252324 - RNA, 19 nt, Homo sapiens
  misc_RNA (1)...(19): siRNA sense strand
cuucaacauuggcacaguu

SEQ ID NO: 252325 - RNA, 19 nt, Homo sapiens
  misc_RNA (1)...(19): siRNA sense strand
uuggagaagucccaucaau

SEQ ID NO: 252326 - RNA, 19 nt, Homo sapiens
  misc_RNA (1)...(19): siRNA sense strand
uaccacaacccguaagaau

SEQ ID NO: 252327 - RNA, 19 nt, Homo sapiens
  misc_RNA (1)...(19): siRNA sense strand
aagacuuuguugaauguga

SEQ ID NO: 252328 - RNA, 19 nt, Homo sapiens
  misc_RNA (1)...(19): siRNA sense strand
cagcaccacugugaaggau

SEQ ID NO: 252329 - RNA, 19 nt, Homo sapiens
  misc_RNA (1)...(19): siRNA sense strand
ucugggcucuauuaugaug

SEQ ID NO: 252330 - RNA, 19 nt, Homo sapiens
  misc_RNA (1)...(19): siRNA sense strand
gcaacuccgcccagagcaa

SEQ ID NO: 252331 - RNA, 19 nt, Homo sapiens
  misc_RNA (1)...(19): siRNA sense strand
gagaagucccaucaauuuu

SEQ ID NO: 252332 - RNA, 19 nt, Homo sapiens
  misc_RNA (1)...(19): siRNA sense strand
agaacaaccccaauauuaa

SEQ ID NO: 252333 - RNA, 19 nt, Homo sapiens
  misc_RNA (1)...(19): siRNA sense strand
cagaaaugucuacuacugu

SEQ ID NO: 252334 - RNA, 19 nt, Homo sapiens
  misc_RNA (1)...(19): siRNA sense strand
ccuccagcuucacauagaa

SEQ ID NO: 252335 - RNA, 19 nt, Homo sapiens
  misc_RNA (1)...(19): siRNA sense strand
gagagaaccccuguaaaug

SEQ ID NO: 252336 - RNA, 19 nt, Homo sapiens
  misc_RNA (1)...(19): siRNA sense strand
gaagucccaucaauuuugg

SEQ ID NO: 252337 - RNA, 19 nt, Homo sapiens
  misc_RNA (1)...(19): siRNA sense strand
acagggaguauuacgugua

SEQ ID NO: 252338 - RNA, 19 nt, Homo sapiens
  misc_RNA (1)...(19): siRNA sense strand
gcugagaacaaccccaaua

SEQ ID NO: 252339 - RNA, 19 nt, Homo sapiens
  misc_RNA (1)...(19): siRNA sense strand
guaaaugacggcaaauacc

SEQ ID NO: 252340 - RNA, 19 nt, Homo sapiens
  misc_RNA (1)...(19): siRNA sense strand
acggcacgcucaugaagga

SEQ ID NO: 252341 - RNA, 19 nt, Homo sapiens
  misc_RNA (1)...(19): siRNA sense strand
ggacgagacgcggaacuac

SEQ ID NO: 252342 - RNA, 19 nt, Homo sapiens
  misc_RNA (1)...(19): siRNA sense strand
gaaugugagccgaguacag

SEQ ID NO: 252343 - RNA, 19 nt, Homo sapiens
  misc_RNA (1)...(19): siRNA sense strand
ggcgcuacguacaucuuug

SEQ ID NO: 252344 - RNA, 19 nt, Homo sapiens
  misc_RNA (1)...(19): siRNA sense strand
uggaaaccacuacuacaau

SEQ ID NO: 252345 - RNA, 19 nt, Homo sapiens
  misc_RNA (1)...(19): siRNA sense strand
gcacaguugacaucuccau

SEQ ID NO: 252346 - RNA, 19 nt, Homo sapiens
  misc_RNA (1)...(19): siRNA sense strand
agagaaccccuguaaauga

SEQ ID NO: 252347 - RNA, 19 nt, Homo sapiens
  misc_RNA (1)...(19): siRNA sense strand
gguuggagaagucccauca

SEQ ID NO: 252348 - RNA, 19 nt, Homo sapiens
  misc_RNA (1)...(19): siRNA sense strand
guuugaaaguacugaacau

SEQ ID NO: 252349 - RNA, 19 nt, Homo sapiens
  misc_RNA (1)...(19): siRNA sense strand
cccuguaaaugacggcaaa

SEQ ID NO: 252350 - RNA, 19 nt, Homo sapiens
  misc_RNA (1)...(19): siRNA sense strand
gacgagacgcggaacuaca

SEQ ID NO: 252351 - RNA, 19 nt, Homo sapiens
  misc_RNA (1)...(19): siRNA sense strand
gauggucgucggcauugug

SEQ ID NO: 252352 - RNA, 19 nt, Homo sapiens
  misc_RNA (1)...(19): siRNA sense strand
gggauggucgucggcauug

SEQ ID NO: 252353 - RNA, 19 nt, Homo sapiens
  misc_RNA (1)...(19): siRNA sense strand
acaguugacaucuccauca

SEQ ID NO: 252354 - RNA, 19 nt, Homo sapiens
  misc_RNA (1)...(19): siRNA sense strand
gugacuuccuccagcuuca

SEQ ID NO: 252355 - RNA, 19 nt, Homo sapiens
  misc_RNA (1)...(19): siRNA sense strand
gaaaggagauccaggucuu

SEQ ID NO: 252356 - RNA, 19 nt, Homo sapiens
  misc_RNA (1)...(19): siRNA sense strand
ggacaaggcuaugcucuuc

SEQ ID NO: 252357 - RNA, 19 nt, Homo sapiens
  misc_RNA (1)...(19): siRNA sense strand
gaaaggagaaccuggagaa

SEQ ID NO: 252358 - RNA, 19 nt, Homo sapiens
  misc_RNA (1)...(19): siRNA sense strand
uaugauggcuccacuggua

SEQ ID NO: 252359 - RNA, 19 nt, Homo sapiens
  misc_RNA (1)...(19): siRNA sense strand
gagaaggugccuauguaua

SEQ ID NO: 252360 - RNA, 19 nt, Homo sapiens
  misc_RNA (1)...(19): siRNA sense strand
gcugggagcuguucuacug

SEQ ID NO: 252361 - RNA, 19 nt, Homo sapiens
  misc_RNA (1)...(19): siRNA sense strand
gacaaugacuccaccuuca

SEQ ID NO: 252362 - RNA, 19 nt, Homo sapiens
  misc_RNA (1)...(19): siRNA sense strand
caacaugcccauucgcuuu

SEQ ID NO: 252363 - RNA, 19 nt, Homo sapiens
  misc_RNA (1)...(19): siRNA sense strand
uggagaaggugccuaugua

SEQ ID NO: 252364 - RNA, 19 nt, Homo sapiens
  misc_RNA (1)...(19): siRNA sense strand
ggagauccaggucuuauug

SEQ ID NO: 252365 - RNA, 19 nt, Homo sapiens
  misc_RNA (1)...(19): siRNA sense strand
gcuaugcucuucaccuaug

SEQ ID NO: 252366 - RNA, 19 nt, Homo sapiens
  misc_RNA (1)...(19): siRNA sense strand
uuaccaagaucuucuacaa

SEQ ID NO: 252367 - RNA, 19 nt, Homo sapiens
  misc_RNA (1)...(19): siRNA sense strand
ggaaggagagcguaaugga

SEQ ID NO: 252368 - RNA, 19 nt, Homo sapiens
  misc_RNA (1)...(19): siRNA sense strand
uaaauuccacugcaacauu

SEQ ID NO: 252369 - RNA, 19 nt, Homo sapiens
  misc_RNA (1)...(19): siRNA sense strand
gagcuguucuacugcuauu

SEQ ID NO: 252370 - RNA, 19 nt, Homo sapiens
  misc_RNA (1)...(19): siRNA sense strand
cccauucgcuuuaccaaga

SEQ ID NO: 252371 - RNA, 19 nt, Homo sapiens
  misc_RNA (1)...(19): siRNA sense strand
ccacaucacagucuauaug

SEQ ID NO: 252372 - RNA, 19 nt, Homo sapiens
  misc_RNA (1)...(19): siRNA sense strand
ucacaggcuuucuucucua

SEQ ID NO: 252373 - RNA, 19 nt, Homo sapiens
  misc_RNA (1)...(19): siRNA sense strand
ggagaaggugccuauguau

SEQ ID NO: 252374 - RNA, 19 nt, Homo sapiens
  misc_RNA (1)...(19): siRNA sense strand
ggauuggagacuuacguua

SEQ ID NO: 252375 - RNA, 19 nt, Homo sapiens
  misc_RNA (1)...(19): siRNA sense strand
ccaagaucuucuacaauca

SEQ ID NO: 252376 - RNA, 19 nt, Homo sapiens
  misc_RNA (1)...(19): siRNA sense strand
ugagaagggugagaaagga

SEQ ID NO: 252377 - RNA, 19 nt, Homo sapiens
  misc_RNA (1)...(19): siRNA sense strand
guauaccgcucagcauuca

SEQ ID NO: 252378 - RNA, 19 nt, Homo sapiens
  misc_RNA (1)...(19): siRNA sense strand
caacauuccugggcuguac

SEQ ID NO: 252379 - RNA, 19 nt, Homo sapiens
  misc_RNA (1)...(19): siRNA sense strand
accaagaucuucuacaauc

SEQ ID NO: 252380 - RNA, 19 nt, Homo sapiens
  misc_RNA (1)...(19): siRNA sense strand
gcucugugcuccugcaucu

SEQ ID NO: 252381 - RNA, 19 nt, Homo sapiens
  misc_RNA (1)...(19): siRNA sense strand
aaauuccacugcaacauuc

SEQ ID NO: 252382 - RNA, 19 nt, Homo sapiens
  misc_RNA (1)...(19): siRNA sense strand
ucaagaaggacaaggcuau

SEQ ID NO: 252383 - RNA, 19 nt, Homo sapiens
  misc_RNA (1)...(19): siRNA sense strand
gugugggauuggagacuua

SEQ ID NO: 252384 - RNA, 19 nt, Homo sapiens
  misc_RNA (1)...(19): siRNA sense strand
uggcuccacugguaaauuc

SEQ ID NO: 252385 - RNA, 19 nt, Homo sapiens
  misc_RNA (1)...(19): siRNA sense strand
aggcuaugcucuucaccua

SEQ ID NO: 252386 - RNA, 19 nt, Homo sapiens
  misc_RNA (1)...(19): siRNA sense strand
uaugaucaguaccaggaaa

SEQ ID NO: 252387 - RNA, 19 nt, Homo sapiens
  misc_RNA (1)...(19): siRNA sense strand
aauggacucuaugcugaua

SEQ ID NO: 252388 - RNA, 19 nt, Homo sapiens
  misc_RNA (1)...(19): siRNA sense strand
gcuuucuucucuaccauga

SEQ ID NO: 252389 - RNA, 19 nt, Homo sapiens
  misc_RNA (1)...(19): siRNA sense strand
gacucuaugcugauaauga

SEQ ID NO: 252390 - RNA, 19 nt, Homo sapiens
  misc_RNA (1)...(19): siRNA sense strand
uaagggagacaucggugaa

SEQ ID NO: 252391 - RNA, 19 nt, Homo sapiens
  misc_RNA (1)...(19): siRNA sense strand
gggagcuguucuacugcua

SEQ ID NO: 252392 - RNA, 19 nt, Homo sapiens
  misc_RNA (1)...(19): siRNA sense strand
gaucuucuacaaucagcaa

SEQ ID NO: 252393 - RNA, 19 nt, Homo sapiens
  misc_RNA (1)...(19): siRNA sense strand
gggaauccaaggcaggaaa

SEQ ID NO: 252394 - RNA, 19 nt, Homo sapiens
  misc_RNA (1)...(19): siRNA sense strand
cagucuauaugaaggaugu

SEQ ID NO: 252395 - RNA, 19 nt, Homo sapiens
  misc_RNA (1)...(19): siRNA sense strand
caucacagucuauaugaag

SEQ ID NO: 252396 - RNA, 19 nt, Homo sapiens
  misc_RNA (1)...(19): siRNA sense strand
agaaggugccuauguauac

SEQ ID NO: 252397 - RNA, 19 nt, Homo sapiens
  misc_RNA (1)...(19): siRNA sense strand
gauuggagacuuacguuac

SEQ ID NO: 252398 - RNA, 19 nt, Homo sapiens
  misc_RNA (1)...(19): siRNA sense strand
cacaucacagucuauauga

SEQ ID NO: 252399 - RNA, 19 nt, Homo sapiens
  misc_RNA (1)...(19): siRNA sense strand
uuccugggcuguacuacuu

SEQ ID NO: 252400 - RNA, 19 nt, Homo sapiens
  misc_RNA (1)...(19): siRNA sense strand
aaaggagauccaggucuua

SEQ ID NO: 252401 - RNA, 19 nt, Homo sapiens
  misc_RNA (1)...(19): siRNA sense strand
gagcguaauggacucuaug

SEQ ID NO: 252402 - RNA, 19 nt, Homo sapiens
  misc_RNA (1)...(19): siRNA sense strand
gcaacauuccugggcugua

SEQ ID NO: 252403 - RNA, 19 nt, Homo sapiens
  misc_RNA (1)...(19): siRNA sense strand
cuacuuugccuaccacauc

SEQ ID NO: 252404 - RNA, 19 nt, Homo sapiens
  misc_RNA (1)...(19): siRNA sense strand
aacaugcccauucgcuuua

SEQ ID NO: 252405 - RNA, 19 nt, Homo sapiens
  misc_RNA (1)...(19): siRNA sense strand
caggaaaccacgacucaag

SEQ ID NO: 252406 - RNA, 19 nt, Homo sapiens
  misc_RNA (1)...(19): siRNA sense strand
gguaaauuccacugcaaca

SEQ ID NO: 252407 - RNA, 19 nt, Homo sapiens
  misc_RNA (1)...(19): siRNA sense strand
gaaggugccuauguauacc

SEQ ID NO: 252408 - RNA, 19 nt, Homo sapiens
  misc_RNA (1)...(19): siRNA sense strand
ccuaccacaucacagucua

SEQ ID NO: 252409 - RNA, 19 nt, Homo sapiens
  misc_RNA (1)...(19): siRNA sense strand
gcuguucuacugcuauuag

SEQ ID NO: 252410 - RNA, 19 nt, Homo sapiens
  misc_RNA (1)...(19): siRNA sense strand
gggauuggagacuuacguu

SEQ ID NO: 252411 - RNA, 19 nt, Homo sapiens
  misc_RNA (1)...(19): siRNA sense strand
acaucacagucuauaugaa

SEQ ID NO: 252412 - RNA, 19 nt, Homo sapiens
  misc_RNA (1)...(19): siRNA sense strand
gaucaguaccaggaaaaua

SEQ ID NO: 252413 - RNA, 19 nt, Homo sapiens
  misc_RNA (1)...(19): siRNA sense strand
caagaaggacaaggcuaug

SEQ ID NO: 252414 - RNA, 19 nt, Homo sapiens
  misc_RNA (1)...(19): siRNA sense strand
uaccacaucacagucuaua

SEQ ID NO: 252415 - RNA, 19 nt, Homo sapiens
  misc_RNA (1)...(19): siRNA sense strand
uggacucuaugcugauaau

SEQ ID NO: 252416 - RNA, 19 nt, Homo sapiens
  misc_RNA (1)...(19): siRNA sense strand
ggagcuguucuacugcuau

SEQ ID NO: 252417 - RNA, 19 nt, Homo sapiens
  misc_RNA (1)...(19): siRNA sense strand
gugagaagggugagaaagg

SEQ ID NO: 252418 - RNA, 19 nt, Homo sapiens
  misc_RNA (1)...(19): siRNA sense strand
gaagggugagaaaggagau

SEQ ID NO: 252419 - RNA, 19 nt, Homo sapiens
  misc_RNA (1)...(19): siRNA sense strand
gcucuucaccuaugaucag

SEQ ID NO: 252420 - RNA, 19 nt, Homo sapiens
  misc_RNA (1)...(19): siRNA sense strand
ggaauccaaggcaggaaag

SEQ ID NO: 252421 - RNA, 19 nt, Homo sapiens
  misc_RNA (1)...(19): siRNA sense strand
guaaauuccacugcaacau

SEQ ID NO: 252422 - RNA, 19 nt, Homo sapiens
  misc_RNA (1)...(19): siRNA sense strand
caaugacuccaccuucaca

SEQ ID NO: 252423 - RNA, 19 nt, Homo sapiens
  misc_RNA (1)...(19): siRNA sense strand
ggucagggcuucuuacuua

SEQ ID NO: 252424 - RNA, 19 nt, Homo sapiens
  misc_RNA (1)...(19): siRNA sense strand
gaggagaccuuggaacuua

SEQ ID NO: 252425 - RNA, 19 nt, Homo sapiens
  misc_RNA (1)...(19): siRNA sense strand
gcaagaauguccaugauga

SEQ ID NO: 252426 - RNA, 19 nt, Homo sapiens
  misc_RNA (1)...(19): siRNA sense strand
gcagaaacgucgagaaaga

SEQ ID NO: 252427 - RNA, 19 nt, Homo sapiens
  misc_RNA (1)...(19): siRNA sense strand
gagaguaaguugcuuguug

SEQ ID NO: 252428 - RNA, 19 nt, Homo sapiens
  misc_RNA (1)...(19): siRNA sense strand
gaauagagccuucuuugau

SEQ ID NO: 252429 - RNA, 19 nt, Homo sapiens
  misc_RNA (1)...(19): siRNA sense strand
gaaggaugcugccgagaug

SEQ ID NO: 252430 - RNA, 19 nt, Homo sapiens
  misc_RNA (1)...(19): siRNA sense strand
uaucgggacucaaagcuua

SEQ ID NO: 252431 - RNA, 19 nt, Homo sapiens
  misc_RNA (1)...(19): siRNA sense strand
gagcagaaacgucgagaaa

SEQ ID NO: 252432 - RNA, 19 nt, Homo sapiens
  misc_RNA (1)...(19): siRNA sense strand
ggaaaaggcugcuucguau

SEQ ID NO: 252433 - RNA, 19 nt, Homo sapiens
  misc_RNA (1)...(19): siRNA sense strand
gaagaucauuggaaacuac

SEQ ID NO: 252434 - RNA, 19 nt, Homo sapiens
  misc_RNA (1)...(19): siRNA sense strand
ggagauagagcaugugaug

SEQ ID NO: 252435 - RNA, 19 nt, Homo sapiens
  misc_RNA (1)...(19): siRNA sense strand
ugaaagcacugcaaauaag

SEQ ID NO: 252436 - RNA, 19 nt, Homo sapiens
  misc_RNA (1)...(19): siRNA sense strand
ucaaggccauggagaguaa

SEQ ID NO: 252437 - RNA, 19 nt, Homo sapiens
  misc_RNA (1)...(19): siRNA sense strand
ccagggagcugaaacucaa

SEQ ID NO: 252438 - RNA, 19 nt, Homo sapiens
  misc_RNA (1)...(19): siRNA sense strand
gagcagaaacgacaggaaa

SEQ ID NO: 252439 - RNA, 19 nt, Homo sapiens
  misc_RNA (1)...(19): siRNA sense strand
ggaagaucauuggaaacua

SEQ ID NO: 252440 - RNA, 19 nt, Homo sapiens
  misc_RNA (1)...(19): siRNA sense strand
agaggaagaucauuggaaa

SEQ ID NO: 252441 - RNA, 19 nt, Homo sapiens
  misc_RNA (1)...(19): siRNA sense strand
gcacucacauuccauaucg

SEQ ID NO: 252442 - RNA, 19 nt, Homo sapiens
  misc_RNA (1)...(19): siRNA sense strand
gaaacuacauccuauaacc

SEQ ID NO: 252443 - RNA, 19 nt, Homo sapiens
  misc_RNA (1)...(19): siRNA sense strand
aaagagaaauccagcaaca

SEQ ID NO: 252444 - RNA, 19 nt, Homo sapiens
  misc_RNA (1)...(19): siRNA sense strand
ugaaggagauagagcaugu

SEQ ID NO: 252445 - RNA, 19 nt, Homo sapiens
  misc_RNA (1)...(19): siRNA sense strand
gaaacucaagcaucuuauu

SEQ ID NO: 252446 - RNA, 19 nt, Homo sapiens
  misc_RNA (1)...(19): siRNA sense strand
gaaagcacugcaaauaaga

SEQ ID NO: 252447 - RNA, 19 nt, Homo sapiens
  misc_RNA (1)...(19): siRNA sense strand
ggauauaagagaccauuga

SEQ ID NO: 252448 - RNA, 19 nt, Homo sapiens
  misc_RNA (1)...(19): siRNA sense strand
gaucccagaaucaacaaua

SEQ ID NO: 252449 - RNA, 19 nt, Homo sapiens
  misc_RNA (1)...(19): siRNA sense strand
ggaaauugcagagcagaaa

SEQ ID NO: 252450 - RNA, 19 nt, Homo sapiens
  misc_RNA (1)...(19): siRNA sense strand
gaacaaaccaagggucaau

SEQ ID NO: 252451 - RNA, 19 nt, Homo sapiens
  misc_RNA (1)...(19): siRNA sense strand
cccaagaccuucaccuuug

SEQ ID NO: 252452 - RNA, 19 nt, Homo sapiens
  misc_RNA (1)...(19): siRNA sense strand
gcagaaacgacaggaaauu

SEQ ID NO: 252453 - RNA, 19 nt, Homo sapiens
  misc_RNA (1)...(19): siRNA sense strand
ccaagaccuucaccuuuga

SEQ ID NO: 252454 - RNA, 19 nt, Homo sapiens
  misc_RNA (1)...(19): siRNA sense strand
ccaaagggacggcccauga

SEQ ID NO: 252455 - RNA, 19 nt, Homo sapiens
  misc_RNA (1)...(19): siRNA sense strand
gaacuuaaagagacauaca

SEQ ID NO: 252456 - RNA, 19 nt, Homo sapiens
  misc_RNA (1)...(19): siRNA sense strand
gcaggaugaagaugagaua

SEQ ID NO: 252457 - RNA, 19 nt, Homo sapiens
  misc_RNA (1)...(19): siRNA sense strand
ggacaaacugggacaggaa

SEQ ID NO: 252458 - RNA, 19 nt, Homo sapiens
  misc_RNA (1)...(19): siRNA sense strand
ggaaugccaagcaguuuga

SEQ ID NO: 252459 - RNA, 19 nt, Homo sapiens
  misc_RNA (1)...(19): siRNA sense strand
aauagagccuucuuugaug

SEQ ID NO: 252460 - RNA, 19 nt, Homo sapiens
  misc_RNA (1)...(19): siRNA sense strand
ugucaucucugcucuagug

SEQ ID NO: 252461 - RNA, 19 nt, Homo sapiens
  misc_RNA (1)...(19): siRNA sense strand
uaacucauuugaccauauc

SEQ ID NO: 252462 - RNA, 19 nt, Homo sapiens
  misc_RNA (1)...(19): siRNA sense strand
gauagagcaugugaugaau

SEQ ID NO: 252463 - RNA, 19 nt, Homo sapiens
  misc_RNA (1)...(19): siRNA sense strand
uagagcaugugaugaaugu

SEQ ID NO: 252464 - RNA, 19 nt, Homo sapiens
  misc_RNA (1)...(19): siRNA sense strand
gcacugcaaauaagaaauc

SEQ ID NO: 252465 - RNA, 19 nt, Homo sapiens
  misc_RNA (1)...(19): siRNA sense strand
gcccaagaccuucaccuuu

SEQ ID NO: 252466 - RNA, 19 nt, Homo sapiens
  misc_RNA (1)...(19): siRNA sense strand
ccaagagugugaaggagau

SEQ ID NO: 252467 - RNA, 19 nt, Homo sapiens
  misc_RNA (1)...(19): siRNA sense strand
uagagcagacucagaauga

SEQ ID NO: 252468 - RNA, 19 nt, Homo sapiens
  misc_RNA (1)...(19): siRNA sense strand
gauggaaagucgagaugag

SEQ ID NO: 252469 - RNA, 19 nt, Homo sapiens
  misc_RNA (1)...(19): siRNA sense strand
uuaccaggcuccuccaaga

SEQ ID NO: 252470 - RNA, 19 nt, Homo sapiens
  misc_RNA (1)...(19): siRNA sense strand
ucucagccgugggauauaa

SEQ ID NO: 252471 - RNA, 19 nt, Homo sapiens
  misc_RNA (1)...(19): siRNA sense strand
gaaaugcccaagaccuuca

SEQ ID NO: 252472 - RNA, 19 nt, Homo sapiens
  misc_RNA (1)...(19): siRNA sense strand
ggaugaagaugagauacag

SEQ ID NO: 252473 - RNA, 19 nt, Homo sapiens
  misc_RNA (1)...(19): siRNA sense strand
agucauuccuaacucauuu

SEQ ID NO: 252474 - RNA, 19 nt, Homo sapiens
  misc_RNA (1)...(19): siRNA sense strand
aggaggagauccgagauuu

SEQ ID NO: 252475 - RNA, 19 nt, Homo sapiens
  misc_RNA (1)...(19): siRNA sense strand
ugaauagagccuucuuuga

SEQ ID NO: 252476 - RNA, 19 nt, Homo sapiens
  misc_RNA (1)...(19): siRNA sense strand
uccaugaccuccaagaaga

SEQ ID NO: 252477 - RNA, 19 nt, Homo sapiens
  misc_RNA (1)...(19): siRNA sense strand
ugagauccaugaccuccaa

SEQ ID NO: 252478 - RNA, 19 nt, Homo sapiens
  misc_RNA (1)...(19): siRNA sense strand
gagaugaggagaccuugga

SEQ ID NO: 252479 - RNA, 19 nt, Homo sapiens
  misc_RNA (1)...(19): siRNA sense strand
agaugaggcugcugaagga

SEQ ID NO: 252480 - RNA, 19 nt, Homo sapiens
  misc_RNA (1)...(19): siRNA sense strand
gggcaggugucugugaaga

SEQ ID NO: 252481 - RNA, 19 nt, Homo sapiens
  misc_RNA (1)...(19): siRNA sense strand
caaagggacggcccaugaa

SEQ ID NO: 252482 - RNA, 19 nt, Homo sapiens
  misc_RNA (1)...(19): siRNA sense strand
agauagagcaugugaugaa

SEQ ID NO: 252483 - RNA, 19 nt, Homo sapiens
  misc_RNA (1)...(19): siRNA sense strand
aagaagaacacaucaagga

SEQ ID NO: 252484 - RNA, 19 nt, Homo sapiens
  misc_RNA (1)...(19): siRNA sense strand
ccacauccguguaggaaaa

SEQ ID NO: 252485 - RNA, 19 nt, Homo sapiens
  misc_RNA (1)...(19): siRNA sense strand
aaaagaagcuaccaagauc

SEQ ID NO: 252486 - RNA, 19 nt, Homo sapiens
  misc_RNA (1)...(19): siRNA sense strand
gcaggugucugugaagaac

SEQ ID NO: 252487 - RNA, 19 nt, Homo sapiens
  misc_RNA (1)...(19): siRNA sense strand
ccaagaagaacacaucaag

SEQ ID NO: 252488 - RNA, 19 nt, Homo sapiens
  misc_RNA (1)...(19): siRNA sense strand
gaaacgacaggaaauugca

SEQ ID NO: 252489 - RNA, 19 nt, Homo sapiens
  misc_RNA (1)...(19): siRNA sense strand
gcucaaggcccagcuggaa

SEQ ID NO: 252490 - RNA, 19 nt, Homo sapiens
  misc_RNA (1)...(19): siRNA sense strand
cugcaagguuucaauggaa

SEQ ID NO: 252491 - RNA, 19 nt, Homo sapiens
  misc_RNA (1)...(19): siRNA sense strand
uggaaacuacauccuauaa

SEQ ID NO: 252492 - RNA, 19 nt, Homo sapiens
  misc_RNA (1)...(19): siRNA sense strand
gaagaggaagaucauugga

SEQ ID NO: 252493 - RNA, 19 nt, Homo sapiens
  misc_RNA (1)...(19): siRNA sense strand
agagaaauccagcaacaga

SEQ ID NO: 252494 - RNA, 19 nt, Homo sapiens
  misc_RNA (1)...(19): siRNA sense strand
cuaacucauuugaccauau

SEQ ID NO: 252495 - RNA, 19 nt, Homo sapiens
  misc_RNA (1)...(19): siRNA sense strand
uugaaagcacugcaaauaa

SEQ ID NO: 252496 - RNA, 19 nt, Homo sapiens
  misc_RNA (1)...(19): siRNA sense strand
gagaaccagcagaugauga

SEQ ID NO: 252497 - RNA, 19 nt, Homo sapiens
  misc_RNA (1)...(19): siRNA sense strand
cugaaacucaagcaucuua

SEQ ID NO: 252498 - RNA, 19 nt, Homo sapiens
  misc_RNA (1)...(19): siRNA sense strand
ggaggagauccgagauuug

SEQ ID NO: 252499 - RNA, 19 nt, Homo sapiens
  misc_RNA (1)...(19): siRNA sense strand
ugaggcugcugaaggagaa

SEQ ID NO: 252500 - RNA, 19 nt, Homo sapiens
  misc_RNA (1)...(19): siRNA sense strand
auagagccuucuuugauga

SEQ ID NO: 252501 - RNA, 19 nt, Homo sapiens
  misc_RNA (1)...(19): siRNA sense strand
caccuuugaugccgucuau

SEQ ID NO: 252502 - RNA, 19 nt, Homo sapiens
  misc_RNA (1)...(19): siRNA sense strand
gauccaugaccuccaagaa

SEQ ID NO: 252503 - RNA, 19 nt, Homo sapiens
  misc_RNA (1)...(19): siRNA sense strand
aaacgucgagaaagagaaa

SEQ ID NO: 252504 - RNA, 19 nt, Homo sapiens
  misc_RNA (1)...(19): siRNA sense strand
cagaaacgacaggaaauug

SEQ ID NO: 252505 - RNA, 19 nt, Homo sapiens
  misc_RNA (1)...(19): siRNA sense strand
agaagagggugaggaggaa

SEQ ID NO: 252506 - RNA, 19 nt, Homo sapiens
  misc_RNA (1)...(19): siRNA sense strand
ggaggaagaggcgagagaa

SEQ ID NO: 252507 - RNA, 19 nt, Homo sapiens
  misc_RNA (1)...(19): siRNA sense strand
ggggagagauuaaaagaag

SEQ ID NO: 252508 - RNA, 19 nt, Homo sapiens
  misc_RNA (1)...(19): siRNA sense strand
ggaccaccagagacuauga

SEQ ID NO: 252509 - RNA, 19 nt, Homo sapiens
  misc_RNA (1)...(19): siRNA sense strand
caaggagcgccaagagcua

SEQ ID NO: 252510 - RNA, 19 nt, Homo sapiens
  misc_RNA (1)...(19): siRNA sense strand
agcaagagguggacaucaa

SEQ ID NO: 252511 - RNA, 19 nt, Homo sapiens
  misc_RNA (1)...(19): siRNA sense strand
gcugaaggagaaagagaaa

SEQ ID NO: 252512 - RNA, 19 nt, Homo sapiens
  misc_RNA (1)...(19): siRNA sense strand
aagaucaaccucucccuuu

SEQ ID NO: 252513 - RNA, 19 nt, Homo sapiens
  misc_RNA (1)...(19): siRNA sense strand
gcacaaggggagagauuaa

SEQ ID NO: 252514 - RNA, 19 nt, Homo sapiens
  misc_RNA (1)...(19): siRNA sense strand
ggagaccuuggaacuuaaa

SEQ ID NO: 252515 - RNA, 19 nt, Homo sapiens
  misc_RNA (1)...(19): siRNA sense strand
gccugccucuuacaacgua

SEQ ID NO: 252516 - RNA, 19 nt, Homo sapiens
  misc_RNA (1)...(19): siRNA sense strand
caaaagcacucacauucca

SEQ ID NO: 252517 - RNA, 19 nt, Homo sapiens
  misc_RNA (1)...(19): siRNA sense strand
gaccacuuguugacucugu

SEQ ID NO: 252518 - RNA, 19 nt, Homo sapiens
  misc_RNA (1)...(19): siRNA sense strand
gaaacgucgagaaagagaa

SEQ ID NO: 252519 - RNA, 19 nt, Homo sapiens
  misc_RNA (1)...(19): siRNA sense strand
ugguggauguggauguuaa

SEQ ID NO: 252520 - RNA, 19 nt, Homo sapiens
  misc_RNA (1)...(19): siRNA sense strand
cuaugaggguccagccauu

SEQ ID NO: 252521 - RNA, 19 nt, Homo sapiens
  misc_RNA (1)...(19): siRNA sense strand
aaagagacauacagcucau

SEQ ID NO: 252522 - RNA, 19 nt, Homo sapiens
  misc_RNA (1)...(19): siRNA sense strand
gagaaauccagcaacagau

SEQ ID NO: 252523 - RNA, 19 nt, Homo sapiens
  misc_RNA (1)...(19): siRNA sense strand
caaagaagauucaguaaca

SEQ ID NO: 252524 - RNA, 19 nt, Homo sapiens
  misc_RNA (1)...(19): siRNA sense strand
gcagaagaccaguuaauua

SEQ ID NO: 252525 - RNA, 19 nt, Homo sapiens
  misc_RNA (1)...(19): siRNA sense strand
gaagaccaguuaauuaaga

SEQ ID NO: 252526 - RNA, 19 nt, Homo sapiens
  misc_RNA (1)...(19): siRNA sense strand
cagacaaacugaucaauuu

SEQ ID NO: 252527 - RNA, 19 nt, Homo sapiens
  misc_RNA (1)...(19): siRNA sense strand
gcaaacaguggaaauaaua

SEQ ID NO: 252528 - RNA, 19 nt, Homo sapiens
  misc_RNA (1)...(19): siRNA sense strand
ucucagagcuggucaguuu

SEQ ID NO: 252529 - RNA, 19 nt, Homo sapiens
  misc_RNA (1)...(19): siRNA sense strand
caaauugcaugaaauguga

SEQ ID NO: 252530 - RNA, 19 nt, Homo sapiens
  misc_RNA (1)...(19): siRNA sense strand
ucagaaugcuacucaaaua

SEQ ID NO: 252531 - RNA, 19 nt, Homo sapiens
  misc_RNA (1)...(19): siRNA sense strand
gggaacauuuagaaaguua

SEQ ID NO: 252532 - RNA, 19 nt, Homo sapiens
  misc_RNA (1)...(19): siRNA sense strand
aaacagcacuggugaccua

SEQ ID NO: 252533 - RNA, 19 nt, Homo sapiens
  misc_RNA (1)...(19): siRNA sense strand
gcuguucacuggauaauga

SEQ ID NO: 252534 - RNA, 19 nt, Homo sapiens
  misc_RNA (1)...(19): siRNA sense strand
gcuguagccugaaauguaa

SEQ ID NO: 252535 - RNA, 19 nt, Homo sapiens
  misc_RNA (1)...(19): siRNA sense strand
gaugaaugauagccaagua

SEQ ID NO: 252536 - RNA, 19 nt, Homo sapiens
  misc_RNA (1)...(19): siRNA sense strand
ccugaaauguaaacuguua

SEQ ID NO: 252537 - RNA, 19 nt, Homo sapiens
  misc_RNA (1)...(19): siRNA sense strand
gaagccagguuuacauuca

SEQ ID NO: 252538 - RNA, 19 nt, Homo sapiens
  misc_RNA (1)...(19): siRNA sense strand
gaagcuagaguguguguaa

SEQ ID NO: 252539 - RNA, 19 nt, Homo sapiens
  misc_RNA (1)...(19): siRNA sense strand
cagaagaccaguuaauuaa

SEQ ID NO: 252540 - RNA, 19 nt, Homo sapiens
  misc_RNA (1)...(19): siRNA sense strand
gaaggaauaaugacuguga

SEQ ID NO: 252541 - RNA, 19 nt, Homo sapiens
  misc_RNA (1)...(19): siRNA sense strand
gaagggaguggacuacuuu

SEQ ID NO: 252542 - RNA, 19 nt, Homo sapiens
  misc_RNA (1)...(19): siRNA sense strand
cagauugccuugugccuaa

SEQ ID NO: 252543 - RNA, 19 nt, Homo sapiens
  misc_RNA (1)...(19): siRNA sense strand
gccauuaucagaccauuua

SEQ ID NO: 252544 - RNA, 19 nt, Homo sapiens
  misc_RNA (1)...(19): siRNA sense strand
aagcaaccuucuaaucuua

SEQ ID NO: 252545 - RNA, 19 nt, Homo sapiens
  misc_RNA (1)...(19): siRNA sense strand
caagcaaccuucuaaucuu

SEQ ID NO: 252546 - RNA, 19 nt, Homo sapiens
  misc_RNA (1)...(19): siRNA sense strand
agaugcaggucuagauuua

SEQ ID NO: 252547 - RNA, 19 nt, Homo sapiens
  misc_RNA (1)...(19): siRNA sense strand
aaaggaagcuagagugugu

SEQ ID NO: 252548 - RNA, 19 nt, Homo sapiens
  misc_RNA (1)...(19): siRNA sense strand
gaacuugcauuagugaaag

SEQ ID NO: 252549 - RNA, 19 nt, Homo sapiens
  misc_RNA (1)...(19): siRNA sense strand
uagcaagccugccaucuau

SEQ ID NO: 252550 - RNA, 19 nt, Homo sapiens
  misc_RNA (1)...(19): siRNA sense strand
ugugauuucuccacuguua

SEQ ID NO: 252551 - RNA, 19 nt, Homo sapiens
  misc_RNA (1)...(19): siRNA sense strand
ugucugcgauuacaaguuu

SEQ ID NO: 252552 - RNA, 19 nt, Homo sapiens
  misc_RNA (1)...(19): siRNA sense strand
ccagauagcccagauaaug

SEQ ID NO: 252553 - RNA, 19 nt, Homo sapiens
  misc_RNA (1)...(19): siRNA sense strand
gaaguuagggcugaugaaa

SEQ ID NO: 252554 - RNA, 19 nt, Homo sapiens
  misc_RNA (1)...(19): siRNA sense strand
gaaaugugaagccagguuu

SEQ ID NO: 252555 - RNA, 19 nt, Homo sapiens
  misc_RNA (1)...(19): siRNA sense strand
gaucuagggaguccaaauu

SEQ ID NO: 252556 - RNA, 19 nt, Homo sapiens
  misc_RNA (1)...(19): siRNA sense strand
ucucuaaugucgauacaaa

SEQ ID NO: 252557 - RNA, 19 nt, Homo sapiens
  misc_RNA (1)...(19): siRNA sense strand
gaaagugaagaaugugauu

SEQ ID NO: 252558 - RNA, 19 nt, Homo sapiens
  misc_RNA (1)...(19): siRNA sense strand
ggagagcaccacugaagaa

SEQ ID NO: 252559 - RNA, 19 nt, Homo sapiens
  misc_RNA (1)...(19): siRNA sense strand
auaaaugaguccacugaaa

SEQ ID NO: 252560 - RNA, 19 nt, Homo sapiens
  misc_RNA (1)...(19): siRNA sense strand
ggacagaaaggaagcuaga

SEQ ID NO: 252561 - RNA, 19 nt, Homo sapiens
  misc_RNA (1)...(19): siRNA sense strand
gcagcaaauuaucuaucua

SEQ ID NO: 252562 - RNA, 19 nt, Homo sapiens
  misc_RNA (1)...(19): siRNA sense strand
gcaaccuucuaaucuuaaa

SEQ ID NO: 252563 - RNA, 19 nt, Homo sapiens
  misc_RNA (1)...(19): siRNA sense strand
ggaacuugcauuagugaaa

SEQ ID NO: 252564 - RNA, 19 nt, Homo sapiens
  misc_RNA (1)...(19): siRNA sense strand
gcugagaucuccacuagac

SEQ ID NO: 252565 - RNA, 19 nt, Homo sapiens
  misc_RNA (1)...(19): siRNA sense strand
guagcaagccugccaucua

SEQ ID NO: 252566 - RNA, 19 nt, Homo sapiens
  misc_RNA (1)...(19): siRNA sense strand
gcuggucaguuuggaauuu

SEQ ID NO: 252567 - RNA, 19 nt, Homo sapiens
  misc_RNA (1)...(19): siRNA sense strand
caaaaugacuuuccugcaa

SEQ ID NO: 252568 - RNA, 19 nt, Homo sapiens
  misc_RNA (1)...(19): siRNA sense strand
gaggaaagcaagucagaau

SEQ ID NO: 252569 - RNA, 19 nt, Homo sapiens
  misc_RNA (1)...(19): siRNA sense strand
ugagguggcuccaguaugg

SEQ ID NO: 252570 - RNA, 19 nt, Homo sapiens
  misc_RNA (1)...(19): siRNA sense strand
agaacuauauaccagauga

SEQ ID NO: 252571 - RNA, 19 nt, Homo sapiens
  misc_RNA (1)...(19): siRNA sense strand
aaaggaacuugcauuagug

SEQ ID NO: 252572 - RNA, 19 nt, Homo sapiens
  misc_RNA (1)...(19): siRNA sense strand
gcagaugcaggucuagauu

SEQ ID NO: 252573 - RNA, 19 nt, Homo sapiens
  misc_RNA (1)...(19): siRNA sense strand
cuaauuggaaguugacuaa

SEQ ID NO: 252574 - RNA, 19 nt, Homo sapiens
  misc_RNA (1)...(19): siRNA sense strand
aaacucagcaaccaaugua

SEQ ID NO: 252575 - RNA, 19 nt, Homo sapiens
  misc_RNA (1)...(19): siRNA sense strand
gaauucagagaaacaaaug

SEQ ID NO: 252576 - RNA, 19 nt, Homo sapiens
  misc_RNA (1)...(19): siRNA sense strand
gagcaccacugaagaaucc

SEQ ID NO: 252577 - RNA, 19 nt, Homo sapiens
  misc_RNA (1)...(19): siRNA sense strand
guggaaaccuggcuugucu

SEQ ID NO: 252578 - RNA, 19 nt, Homo sapiens
  misc_RNA (1)...(19): siRNA sense strand
gaggagagcaccacugaag

SEQ ID NO: 252579 - RNA, 19 nt, Homo sapiens
  misc_RNA (1)...(19): siRNA sense strand
uguuauacauggacagaaa

SEQ ID NO: 252580 - RNA, 19 nt, Homo sapiens
  misc_RNA (1)...(19): siRNA sense strand
ggagagaagaaauguggaa

SEQ ID NO: 252581 - RNA, 19 nt, Homo sapiens
  misc_RNA (1)...(19): siRNA sense strand
gacccaagcaaccuucuaa

SEQ ID NO: 252582 - RNA, 19 nt, Homo sapiens
  misc_RNA (1)...(19): siRNA sense strand
guauaaaugaguccacuga

SEQ ID NO: 252583 - RNA, 19 nt, Homo sapiens
  misc_RNA (1)...(19): siRNA sense strand
gcuccaaauugcaugaaau

SEQ ID NO: 252584 - RNA, 19 nt, Homo sapiens
  misc_RNA (1)...(19): siRNA sense strand
ggaguggacuacuuuuaaa

SEQ ID NO: 252585 - RNA, 19 nt, Homo sapiens
  misc_RNA (1)...(19): siRNA sense strand
gcacuacagaauuccuuaa

SEQ ID NO: 252586 - RNA, 19 nt, Homo sapiens
  misc_RNA (1)...(19): siRNA sense strand
ugaagguuaugaacaugaa

SEQ ID NO: 252587 - RNA, 19 nt, Homo sapiens
  misc_RNA (1)...(19): siRNA sense strand
ugacggaaguauagguaga

SEQ ID NO: 252588 - RNA, 19 nt, Homo sapiens
  misc_RNA (1)...(19): siRNA sense strand
gaugacggaaguauaggua

SEQ ID NO: 252589 - RNA, 19 nt, Homo sapiens
  misc_RNA (1)...(19): siRNA sense strand
uguccuacuucaucugaua

SEQ ID NO: 252590 - RNA, 19 nt, Homo sapiens
  misc_RNA (1)...(19): siRNA sense strand
cagauagcccagauaauga

SEQ ID NO: 252591 - RNA, 19 nt, Homo sapiens
  misc_RNA (1)...(19): siRNA sense strand
ccaagcaaccuucuaaucu

SEQ ID NO: 252592 - RNA, 19 nt, Homo sapiens
  misc_RNA (1)...(19): siRNA sense strand
guagucaaguuccaucagu

SEQ ID NO: 252593 - RNA, 19 nt, Homo sapiens
  misc_RNA (1)...(19): siRNA sense strand
acacaccagcagcaaauua

SEQ ID NO: 252594 - RNA, 19 nt, Homo sapiens
  misc_RNA (1)...(19): siRNA sense strand
aaaaucagcucuccuagga

SEQ ID NO: 252595 - RNA, 19 nt, Homo sapiens
  misc_RNA (1)...(19): siRNA sense strand
cagcacuggugaccuaaug

SEQ ID NO: 252596 - RNA, 19 nt, Homo sapiens
  misc_RNA (1)...(19): siRNA sense strand
gcaagccugccaucuauca

SEQ ID NO: 252597 - RNA, 19 nt, Homo sapiens
  misc_RNA (1)...(19): siRNA sense strand
gcaagagaacuauauacca

SEQ ID NO: 252598 - RNA, 19 nt, Homo sapiens
  misc_RNA (1)...(19): siRNA sense strand
ccaaauugcaugaaaugug

SEQ ID NO: 252599 - RNA, 19 nt, Homo sapiens
  misc_RNA (1)...(19): siRNA sense strand
gcacuggugaccuaaugaa

SEQ ID NO: 252600 - RNA, 19 nt, Homo sapiens
  misc_RNA (1)...(19): siRNA sense strand
uagugaaagugaagaaugu

SEQ ID NO: 252601 - RNA, 19 nt, Homo sapiens
  misc_RNA (1)...(19): siRNA sense strand
cucaggacaugacuaauug

SEQ ID NO: 252602 - RNA, 19 nt, Homo sapiens
  misc_RNA (1)...(19): siRNA sense strand
ggucuggaaggaauaauga

SEQ ID NO: 252603 - RNA, 19 nt, Homo sapiens
  misc_RNA (1)...(19): siRNA sense strand
uaaugggucuggaaggaau

SEQ ID NO: 252604 - RNA, 19 nt, Homo sapiens
  misc_RNA (1)...(19): siRNA sense strand
gaagugggagagaagaaau

SEQ ID NO: 252605 - RNA, 19 nt, Homo sapiens
  misc_RNA (1)...(19): siRNA sense strand
gagaagaaauguggaaacc

SEQ ID NO: 252606 - RNA, 19 nt, Homo sapiens
  misc_RNA (1)...(19): siRNA sense strand
gaucaaugcagugcuguug

SEQ ID NO: 252607 - RNA, 19 nt, Homo sapiens
  misc_RNA (1)...(19): siRNA sense strand
ugaaaaugcuguugcagaa

SEQ ID NO: 252608 - RNA, 19 nt, Homo sapiens
  misc_RNA (1)...(19): siRNA sense strand
agaagggaguggacuacuu

SEQ ID NO: 252609 - RNA, 19 nt, Homo sapiens
  misc_RNA (1)...(19): siRNA sense strand
ggaaagcaagucagaaugc

SEQ ID NO: 252610 - RNA, 19 nt, Homo sapiens
  misc_RNA (1)...(19): siRNA sense strand
ugaaugauagccaaguaaa

SEQ ID NO: 252611 - RNA, 19 nt, Homo sapiens
  misc_RNA (1)...(19): siRNA sense strand
ugacuuuccugcaaacagu

SEQ ID NO: 252612 - RNA, 19 nt, Homo sapiens
  misc_RNA (1)...(19): siRNA sense strand
gaggaaaugaggccacaga

SEQ ID NO: 252613 - RNA, 19 nt, Homo sapiens
  misc_RNA (1)...(19): siRNA sense strand
gauaugaauucagagaaac

SEQ ID NO: 252614 - RNA, 19 nt, Homo sapiens
  misc_RNA (1)...(19): siRNA sense strand
aaucugccauucagugcua

SEQ ID NO: 252615 - RNA, 19 nt, Homo sapiens
  misc_RNA (1)...(19): siRNA sense strand
cuggugaccuaaugaagaa

SEQ ID NO: 252616 - RNA, 19 nt, Homo sapiens
  misc_RNA (1)...(19): siRNA sense strand
aaaaggaacuugcauuagu

SEQ ID NO: 252617 - RNA, 19 nt, Homo sapiens
  misc_RNA (1)...(19): siRNA sense strand
ucucaggacaugacuaauu

SEQ ID NO: 252618 - RNA, 19 nt, Homo sapiens
  misc_RNA (1)...(19): siRNA sense strand
cagaggagagcaccacuga

SEQ ID NO: 252619 - RNA, 19 nt, Homo sapiens
  misc_RNA (1)...(19): siRNA sense strand
ccuaaugggucuggaagga

SEQ ID NO: 252620 - RNA, 19 nt, Homo sapiens
  misc_RNA (1)...(19): siRNA sense strand
guaaacuguuauacaugga

SEQ ID NO: 252621 - RNA, 19 nt, Homo sapiens
  misc_RNA (1)...(19): siRNA sense strand
ggaaaugaggccacagaag

SEQ ID NO: 252622 - RNA, 19 nt, Homo sapiens
  misc_RNA (1)...(19): siRNA sense strand
caagucagaaugcuacuca

SEQ ID NO: 252623 - RNA, 19 nt, Homo sapiens
  misc_RNA (1)...(19): siRNA sense strand
caaagaagauucaguaaca

SEQ ID NO: 252624 - RNA, 19 nt, Homo sapiens
  misc_RNA (1)...(19): siRNA sense strand
gcagaagaccaguuaauua

SEQ ID NO: 252625 - RNA, 19 nt, Homo sapiens
  misc_RNA (1)...(19): siRNA sense strand
gaagaccaguuaauuaaga

SEQ ID NO: 252626 - RNA, 19 nt, Homo sapiens
  misc_RNA (1)...(19): siRNA sense strand
cagacaaacugaucaauuu

SEQ ID NO: 252627 - RNA, 19 nt, Homo sapiens
  misc_RNA (1)...(19): siRNA sense strand
gcaaacaguggaaauaaua

SEQ ID NO: 252628 - RNA, 19 nt, Homo sapiens
  misc_RNA (1)...(19): siRNA sense strand
ucucagagcuggucaguuu

SEQ ID NO: 252629 - RNA, 19 nt, Homo sapiens
  misc_RNA (1)...(19): siRNA sense strand
caaauugcaugaaauguga

SEQ ID NO: 252630 - RNA, 19 nt, Homo sapiens
  misc_RNA (1)...(19): siRNA sense strand
aaacgaagaugaaacaguu

SEQ ID NO: 252631 - RNA, 19 nt, Homo sapiens
  misc_RNA (1)...(19): siRNA sense strand
ucagaaugcuacucaaaua

SEQ ID NO: 252632 - RNA, 19 nt, Homo sapiens
  misc_RNA (1)...(19): siRNA sense strand
gauacaaaguggaauaaga

SEQ ID NO: 252633 - RNA, 19 nt, Homo sapiens
  misc_RNA (1)...(19): siRNA sense strand
gaaugaaucugcaguuucu

SEQ ID NO: 252634 - RNA, 19 nt, Homo sapiens
  misc_RNA (1)...(19): siRNA sense strand
gggaacauuuagaaaguua

SEQ ID NO: 252635 - RNA, 19 nt, Homo sapiens
  misc_RNA (1)...(19): siRNA sense strand
aaacagcacuggugaccua

SEQ ID NO: 252636 - RNA, 19 nt, Homo sapiens
  misc_RNA (1)...(19): siRNA sense strand
gguguuagaugaauuugaa

SEQ ID NO: 252637 - RNA, 19 nt, Homo sapiens
  misc_RNA (1)...(19): siRNA sense strand
gcuguagccugaaauguaa

SEQ ID NO: 252638 - RNA, 19 nt, Homo sapiens
  misc_RNA (1)...(19): siRNA sense strand
gcuguucacuggauaauga

SEQ ID NO: 252639 - RNA, 19 nt, Homo sapiens
  misc_RNA (1)...(19): siRNA sense strand
gaugaaugauagccaagua

SEQ ID NO: 252640 - RNA, 19 nt, Homo sapiens
  misc_RNA (1)...(19): siRNA sense strand
ccugaaauguaaacuguua

SEQ ID NO: 252641 - RNA, 19 nt, Homo sapiens
  misc_RNA (1)...(19): siRNA sense strand
gaagccagguuuacauuca

SEQ ID NO: 252642 - RNA, 19 nt, Homo sapiens
  misc_RNA (1)...(19): siRNA sense strand
gaagcuagaguguguguaa

SEQ ID NO: 252643 - RNA, 19 nt, Homo sapiens
  misc_RNA (1)...(19): siRNA sense strand
cagaagaccaguuaauuaa

SEQ ID NO: 252644 - RNA, 19 nt, Homo sapiens
  misc_RNA (1)...(19): siRNA sense strand
gaaggaauaaugacuguga

SEQ ID NO: 252645 - RNA, 19 nt, Homo sapiens
  misc_RNA (1)...(19): siRNA sense strand
gaagggaguggacuacuuu

SEQ ID NO: 252646 - RNA, 19 nt, Homo sapiens
  misc_RNA (1)...(19): siRNA sense strand
cagauugccuugugccuaa

SEQ ID NO: 252647 - RNA, 19 nt, Homo sapiens
  misc_RNA (1)...(19): siRNA sense strand
gccauuaucagaccauuua

SEQ ID NO: 252648 - RNA, 19 nt, Homo sapiens
  misc_RNA (1)...(19): siRNA sense strand
aagcaaccuucuaaucuua

SEQ ID NO: 252649 - RNA, 19 nt, Homo sapiens
  misc_RNA (1)...(19): siRNA sense strand
caagcaaccuucuaaucuu

SEQ ID NO: 252650 - RNA, 19 nt, Homo sapiens
  misc_RNA (1)...(19): siRNA sense strand
gaggaucacugugcuaaug

SEQ ID NO: 252651 - RNA, 19 nt, Homo sapiens
  misc_RNA (1)...(19): siRNA sense strand
agaugcaggucuagauuua

SEQ ID NO: 252652 - RNA, 19 nt, Homo sapiens
  misc_RNA (1)...(19): siRNA sense strand
aaaggaagcuagagugugu

SEQ ID NO: 252653 - RNA, 19 nt, Homo sapiens
  misc_RNA (1)...(19): siRNA sense strand
gaacuugcauuagugaaag

SEQ ID NO: 252654 - RNA, 19 nt, Homo sapiens
  misc_RNA (1)...(19): siRNA sense strand
uagcaagccugccaucuau

SEQ ID NO: 252655 - RNA, 19 nt, Homo sapiens
  misc_RNA (1)...(19): siRNA sense strand
ugugauuucuccacuguua

SEQ ID NO: 252656 - RNA, 19 nt, Homo sapiens
  misc_RNA (1)...(19): siRNA sense strand
ugucugcgauuacaaguuu

SEQ ID NO: 252657 - RNA, 19 nt, Homo sapiens
  misc_RNA (1)...(19): siRNA sense strand
ccagauagcccagauaaug

SEQ ID NO: 252658 - RNA, 19 nt, Homo sapiens
  misc_RNA (1)...(19): siRNA sense strand
gaaguuagggcugaugaaa

SEQ ID NO: 252659 - RNA, 19 nt, Homo sapiens
  misc_RNA (1)...(19): siRNA sense strand
gaaaugugaagccagguuu

SEQ ID NO: 252660 - RNA, 19 nt, Homo sapiens
  misc_RNA (1)...(19): siRNA sense strand
gaucuagggaguccaaauu

SEQ ID NO: 252661 - RNA, 19 nt, Homo sapiens
  misc_RNA (1)...(19): siRNA sense strand
ucucuaaugucgauacaaa

SEQ ID NO: 252662 - RNA, 19 nt, Homo sapiens
  misc_RNA (1)...(19): siRNA sense strand
gaaagugaagaaugugauu

SEQ ID NO: 252663 - RNA, 19 nt, Homo sapiens
  misc_RNA (1)...(19): siRNA sense strand
ggagagcaccacugaagaa

SEQ ID NO: 252664 - RNA, 19 nt, Homo sapiens
  misc_RNA (1)...(19): siRNA sense strand
aaucugcaguuucuaauga

SEQ ID NO: 252665 - RNA, 19 nt, Homo sapiens
  misc_RNA (1)...(19): siRNA sense strand
ggacagaaaggaagcuaga

SEQ ID NO: 252666 - RNA, 19 nt, Homo sapiens
  misc_RNA (1)...(19): siRNA sense strand
gcagcaaauuaucuaucua

SEQ ID NO: 252667 - RNA, 19 nt, Homo sapiens
  misc_RNA (1)...(19): siRNA sense strand
auaaaugaguccacugaaa

SEQ ID NO: 252668 - RNA, 19 nt, Homo sapiens
  misc_RNA (1)...(19): siRNA sense strand
gugaaugaaucugcaguuu

SEQ ID NO: 252669 - RNA, 19 nt, Homo sapiens
  misc_RNA (1)...(19): siRNA sense strand
gcaaccuucuaaucuuaaa

SEQ ID NO: 252670 - RNA, 19 nt, Homo sapiens
  misc_RNA (1)...(19): siRNA sense strand
ggacaagguguuagaugaa

SEQ ID NO: 252671 - RNA, 19 nt, Homo sapiens
  misc_RNA (1)...(19): siRNA sense strand
ggaacuugcauuagugaaa

SEQ ID NO: 252672 - RNA, 19 nt, Homo sapiens
  misc_RNA (1)...(19): siRNA sense strand
gcugagaucuccacuagac

SEQ ID NO: 252673 - RNA, 19 nt, Homo sapiens
  misc_RNA (1)...(19): siRNA sense strand
guagcaagccugccaucua

SEQ ID NO: 252674 - RNA, 19 nt, Homo sapiens
  misc_RNA (1)...(19): siRNA sense strand
gcuggucaguuuggaauuu

SEQ ID NO: 252675 - RNA, 19 nt, Homo sapiens
  misc_RNA (1)...(19): siRNA sense strand
caaaaugacuuuccugcaa

SEQ ID NO: 252676 - RNA, 19 nt, Homo sapiens
  misc_RNA (1)...(19): siRNA sense strand
gaggaaagcaagucagaau

SEQ ID NO: 252677 - RNA, 19 nt, Homo sapiens
  misc_RNA (1)...(19): siRNA sense strand
ugagguggcuccaguaugg

SEQ ID NO: 252678 - RNA, 19 nt, Homo sapiens
  misc_RNA (1)...(19): siRNA sense strand
agaacuauauaccagauga

SEQ ID NO: 252679 - RNA, 19 nt, Homo sapiens
  misc_RNA (1)...(19): siRNA sense strand
aaaggaacuugcauuagug

SEQ ID NO: 252680 - RNA, 19 nt, Homo sapiens
  misc_RNA (1)...(19): siRNA sense strand
gcagaugcaggucuagauu

SEQ ID NO: 252681 - RNA, 19 nt, Homo sapiens
  misc_RNA (1)...(19): siRNA sense strand
cuaauuggaaguugacuaa

SEQ ID NO: 252682 - RNA, 19 nt, Homo sapiens
  misc_RNA (1)...(19): siRNA sense strand
aaacucagcaaccaaugua

SEQ ID NO: 252683 - RNA, 19 nt, Homo sapiens
  misc_RNA (1)...(19): siRNA sense strand
guggaaaccuggcuugucu

SEQ ID NO: 252684 - RNA, 19 nt, Homo sapiens
  misc_RNA (1)...(19): siRNA sense strand
gagcaccacugaagaaucc

SEQ ID NO: 252685 - RNA, 19 nt, Homo sapiens
  misc_RNA (1)...(19): siRNA sense strand
gaauucagagaaacaaaug

SEQ ID NO: 252686 - RNA, 19 nt, Homo sapiens
  misc_RNA (1)...(19): siRNA sense strand
gacaagguguuagaugaau

SEQ ID NO: 252687 - RNA, 19 nt, Homo sapiens
  misc_RNA (1)...(19): siRNA sense strand
uguuauacauggacagaaa

SEQ ID NO: 252688 - RNA, 19 nt, Homo sapiens
  misc_RNA (1)...(19): siRNA sense strand
caagguguuagaugaauuu

SEQ ID NO: 252689 - RNA, 19 nt, Homo sapiens
  misc_RNA (1)...(19): siRNA sense strand
gacccaagcaaccuucuaa

SEQ ID NO: 252690 - RNA, 19 nt, Homo sapiens
  misc_RNA (1)...(19): siRNA sense strand
gaggagagcaccacugaag

SEQ ID NO: 252691 - RNA, 19 nt, Homo sapiens
  misc_RNA (1)...(19): siRNA sense strand
ggagagaagaaauguggaa

SEQ ID NO: 252692 - RNA, 19 nt, Homo sapiens
  misc_RNA (1)...(19): siRNA sense strand
guauaaaugaguccacuga

SEQ ID NO: 252693 - RNA, 19 nt, Homo sapiens
  misc_RNA (1)...(19): siRNA sense strand
gcuccaaauugcaugaaau

SEQ ID NO: 252694 - RNA, 19 nt, Homo sapiens
  misc_RNA (1)...(19): siRNA sense strand
ggaguggacuacuuuuaaa

SEQ ID NO: 252695 - RNA, 19 nt, Homo sapiens
  misc_RNA (1)...(19): siRNA sense strand
gcacuacagaauuccuuaa

SEQ ID NO: 252696 - RNA, 19 nt, Homo sapiens
  misc_RNA (1)...(19): siRNA sense strand
ugaagguuaugaacaugaa

SEQ ID NO: 252697 - RNA, 19 nt, Homo sapiens
  misc_RNA (1)...(19): siRNA sense strand
ugacggaaguauagguaga

SEQ ID NO: 252698 - RNA, 19 nt, Homo sapiens
  misc_RNA (1)...(19): siRNA sense strand
gaugacggaaguauaggua

SEQ ID NO: 252699 - RNA, 19 nt, Homo sapiens
  misc_RNA (1)...(19): siRNA sense strand
gaagaggaucacugugcua

SEQ ID NO: 252700 - RNA, 19 nt, Homo sapiens
  misc_RNA (1)...(19): siRNA sense strand
cagauagcccagauaauga

SEQ ID NO: 252701 - RNA, 19 nt, Homo sapiens
  misc_RNA (1)...(19): siRNA sense strand
ccaagcaaccuucuaaucu

SEQ ID NO: 252702 - RNA, 19 nt, Homo sapiens
  misc_RNA (1)...(19): siRNA sense strand
guagucaaguuccaucagu

SEQ ID NO: 252703 - RNA, 19 nt, Homo sapiens
  misc_RNA (1)...(19): siRNA sense strand
acacaccagcagcaaauua

SEQ ID NO: 252704 - RNA, 19 nt, Homo sapiens
  misc_RNA (1)...(19): siRNA sense strand
aaaaucagcucuccuagga

SEQ ID NO: 252705 - RNA, 19 nt, Homo sapiens
  misc_RNA (1)...(19): siRNA sense strand
uguccuacuucaucugaua

SEQ ID NO: 252706 - RNA, 19 nt, Homo sapiens
  misc_RNA (1)...(19): siRNA sense strand
cagcacuggugaccuaaug

SEQ ID NO: 252707 - RNA, 19 nt, Homo sapiens
  misc_RNA (1)...(19): siRNA sense strand
gcaagccugccaucuauca

SEQ ID NO: 252708 - RNA, 19 nt, Homo sapiens
  misc_RNA (1)...(19): siRNA sense strand
ggacuguaaucuaaaucca

SEQ ID NO: 252709 - RNA, 19 nt, Homo sapiens
  misc_RNA (1)...(19): siRNA sense strand
ccaaauugcaugaaaugug

SEQ ID NO: 252710 - RNA, 19 nt, Homo sapiens
  misc_RNA (1)...(19): siRNA sense strand
gcacuggugaccuaaugaa

SEQ ID NO: 252711 - RNA, 19 nt, Homo sapiens
  misc_RNA (1)...(19): siRNA sense strand
gaacaaaacgaagaugaaa

SEQ ID NO: 252712 - RNA, 19 nt, Homo sapiens
  misc_RNA (1)...(19): siRNA sense strand
uagugaaagugaagaaugu

SEQ ID NO: 252713 - RNA, 19 nt, Homo sapiens
  misc_RNA (1)...(19): siRNA sense strand
cucaggacaugacuaauug

SEQ ID NO: 252714 - RNA, 19 nt, Homo sapiens
  misc_RNA (1)...(19): siRNA sense strand
ggucuggaaggaauaauga

SEQ ID NO: 252715 - RNA, 19 nt, Homo sapiens
  misc_RNA (1)...(19): siRNA sense strand
uaaugggucuggaaggaau

SEQ ID NO: 252716 - RNA, 19 nt, Homo sapiens
  misc_RNA (1)...(19): siRNA sense strand
gcaagagaacuauauacca

SEQ ID NO: 252717 - RNA, 19 nt, Homo sapiens
  misc_RNA (1)...(19): siRNA sense strand
gaucaaugcagugcuguug

SEQ ID NO: 252718 - RNA, 19 nt, Homo sapiens
  misc_RNA (1)...(19): siRNA sense strand
ucucaccggcugucauuua

SEQ ID NO: 252719 - RNA, 19 nt, Homo sapiens
  misc_RNA (1)...(19): siRNA sense strand
agaagggaguggacuacuu

SEQ ID NO: 252720 - RNA, 19 nt, Homo sapiens
  misc_RNA (1)...(19): siRNA sense strand
ggaaagcaagucagaaugc

SEQ ID NO: 252721 - RNA, 19 nt, Homo sapiens
  misc_RNA (1)...(19): siRNA sense strand
gagaagaaauguggaaacc

SEQ ID NO: 252722 - RNA, 19 nt, Homo sapiens
  misc_RNA (1)...(19): siRNA sense strand
gaagugggagagaagaaau

SEQ ID NO: 252723 - RNA, 19 nt, Homo sapiens
  misc_RNA (1)...(19): siRNA sense strand
caaagaagauucaguaaca

SEQ ID NO: 252724 - RNA, 19 nt, Homo sapiens
  misc_RNA (1)...(19): siRNA sense strand
gcagaagaccaguuaauua

SEQ ID NO: 252725 - RNA, 19 nt, Homo sapiens
  misc_RNA (1)...(19): siRNA sense strand
gaagaccaguuaauuaaga

SEQ ID NO: 252726 - RNA, 19 nt, Homo sapiens
  misc_RNA (1)...(19): siRNA sense strand
cagacaaacugaucaauuu

SEQ ID NO: 252727 - RNA, 19 nt, Homo sapiens
  misc_RNA (1)...(19): siRNA sense strand
gcaaacaguggaaauaaua

SEQ ID NO: 252728 - RNA, 19 nt, Homo sapiens
  misc_RNA (1)...(19): siRNA sense strand
ucucagagcuggucaguuu

SEQ ID NO: 252729 - RNA, 19 nt, Homo sapiens
  misc_RNA (1)...(19): siRNA sense strand
caaauugcaugaaauguga

SEQ ID NO: 252730 - RNA, 19 nt, Homo sapiens
  misc_RNA (1)...(19): siRNA sense strand
aaacgaagaugaaacaguu

SEQ ID NO: 252731 - RNA, 19 nt, Homo sapiens
  misc_RNA (1)...(19): siRNA sense strand
ucagaaugcuacucaaaua

SEQ ID NO: 252732 - RNA, 19 nt, Homo sapiens
  misc_RNA (1)...(19): siRNA sense strand
gauacaaaguggaauaaga

SEQ ID NO: 252733 - RNA, 19 nt, Homo sapiens
  misc_RNA (1)...(19): siRNA sense strand
gaaugaaucugcaguuucu

SEQ ID NO: 252734 - RNA, 19 nt, Homo sapiens
  misc_RNA (1)...(19): siRNA sense strand
gggaacauuuagaaaguua

SEQ ID NO: 252735 - RNA, 19 nt, Homo sapiens
  misc_RNA (1)...(19): siRNA sense strand
aaacagcacuggugaccua

SEQ ID NO: 252736 - RNA, 19 nt, Homo sapiens
  misc_RNA (1)...(19): siRNA sense strand
gguguuagaugaauuugaa

SEQ ID NO: 252737 - RNA, 19 nt, Homo sapiens
  misc_RNA (1)...(19): siRNA sense strand
gcuguagccugaaauguaa

SEQ ID NO: 252738 - RNA, 19 nt, Homo sapiens
  misc_RNA (1)...(19): siRNA sense strand
gcuguucacuggauaauga

SEQ ID NO: 252739 - RNA, 19 nt, Homo sapiens
  misc_RNA (1)...(19): siRNA sense strand
gaugaaugauagccaagua

SEQ ID NO: 252740 - RNA, 19 nt, Homo sapiens
  misc_RNA (1)...(19): siRNA sense strand
ccugaaauguaaacuguua

SEQ ID NO: 252741 - RNA, 19 nt, Homo sapiens
  misc_RNA (1)...(19): siRNA sense strand
gaagccagguuuacauuca

SEQ ID NO: 252742 - RNA, 19 nt, Homo sapiens
  misc_RNA (1)...(19): siRNA sense strand
gaagcuagaguguguguaa

SEQ ID NO: 252743 - RNA, 19 nt, Homo sapiens
  misc_RNA (1)...(19): siRNA sense strand
cagaagaccaguuaauuaa

SEQ ID NO: 252744 - RNA, 19 nt, Homo sapiens
  misc_RNA (1)...(19): siRNA sense strand
gaaggaauaaugacuguga

SEQ ID NO: 252745 - RNA, 19 nt, Homo sapiens
  misc_RNA (1)...(19): siRNA sense strand
gaagggaguggacuacuuu

SEQ ID NO: 252746 - RNA, 19 nt, Homo sapiens
  misc_RNA (1)...(19): siRNA sense strand
cagauugccuugugccuaa

SEQ ID NO: 252747 - RNA, 19 nt, Homo sapiens
  misc_RNA (1)...(19): siRNA sense strand
gccauuaucagaccauuua

SEQ ID NO: 252748 - RNA, 19 nt, Homo sapiens
  misc_RNA (1)...(19): siRNA sense strand
aagcaaccuucuaaucuua

SEQ ID NO: 252749 - RNA, 19 nt, Homo sapiens
  misc_RNA (1)...(19): siRNA sense strand
caagcaaccuucuaaucuu

SEQ ID NO: 252750 - RNA, 19 nt, Homo sapiens
  misc_RNA (1)...(19): siRNA sense strand
gaggaucacugugcuaaug

SEQ ID NO: 252751 - RNA, 19 nt, Homo sapiens
  misc_RNA (1)...(19): siRNA sense strand
agaugcaggucuagauuua

SEQ ID NO: 252752 - RNA, 19 nt, Homo sapiens
  misc_RNA (1)...(19): siRNA sense strand
aaaggaagcuagagugugu

SEQ ID NO: 252753 - RNA, 19 nt, Homo sapiens
  misc_RNA (1)...(19): siRNA sense strand
gaacuugcauuagugaaag

SEQ ID NO: 252754 - RNA, 19 nt, Homo sapiens
  misc_RNA (1)...(19): siRNA sense strand
uagcaagccugccaucuau

SEQ ID NO: 252755 - RNA, 19 nt, Homo sapiens
  misc_RNA (1)...(19): siRNA sense strand
ugugauuucuccacuguua

SEQ ID NO: 252756 - RNA, 19 nt, Homo sapiens
  misc_RNA (1)...(19): siRNA sense strand
ugucugcgauuacaaguuu

SEQ ID NO: 252757 - RNA, 19 nt, Homo sapiens
  misc_RNA (1)...(19): siRNA sense strand
ccagauagcccagauaaug

SEQ ID NO: 252758 - RNA, 19 nt, Homo sapiens
  misc_RNA (1)...(19): siRNA sense strand
gaaguuagggcugaugaaa

SEQ ID NO: 252759 - RNA, 19 nt, Homo sapiens
  misc_RNA (1)...(19): siRNA sense strand
gaaaugugaagccagguuu

SEQ ID NO: 252760 - RNA, 19 nt, Homo sapiens
  misc_RNA (1)...(19): siRNA sense strand
gaucuagggaguccaaauu

SEQ ID NO: 252761 - RNA, 19 nt, Homo sapiens
  misc_RNA (1)...(19): siRNA sense strand
ucucuaaugucgauacaaa

SEQ ID NO: 252762 - RNA, 19 nt, Homo sapiens
  misc_RNA (1)...(19): siRNA sense strand
gaaagugaagaaugugauu

SEQ ID NO: 252763 - RNA, 19 nt, Homo sapiens
  misc_RNA (1)...(19): siRNA sense strand
ggagagcaccacugaagaa

SEQ ID NO: 252764 - RNA, 19 nt, Homo sapiens
  misc_RNA (1)...(19): siRNA sense strand
aaucugcaguuucuaauga

SEQ ID NO: 252765 - RNA, 19 nt, Homo sapiens
  misc_RNA (1)...(19): siRNA sense strand
ggacagaaaggaagcuaga

SEQ ID NO: 252766 - RNA, 19 nt, Homo sapiens
  misc_RNA (1)...(19): siRNA sense strand
gcagcaaauuaucuaucua

SEQ ID NO: 252767 - RNA, 19 nt, Homo sapiens
  misc_RNA (1)...(19): siRNA sense strand
auaaaugaguccacugaaa

SEQ ID NO: 252768 - RNA, 19 nt, Homo sapiens
  misc_RNA (1)...(19): siRNA sense strand
gugaaugaaucugcaguuu

SEQ ID NO: 252769 - RNA, 19 nt, Homo sapiens
  misc_RNA (1)...(19): siRNA sense strand
gcaaccuucuaaucuuaaa

SEQ ID NO: 252770 - RNA, 19 nt, Homo sapiens
  misc_RNA (1)...(19): siRNA sense strand
ggacaagguguuagaugaa

SEQ ID NO: 252771 - RNA, 19 nt, Homo sapiens
  misc_RNA (1)...(19): siRNA sense strand
ggaacuugcauuagugaaa

SEQ ID NO: 252772 - RNA, 19 nt, Homo sapiens
  misc_RNA (1)...(19): siRNA sense strand
gcugagaucuccacuagac

SEQ ID NO: 252773 - RNA, 19 nt, Homo sapiens
  misc_RNA (1)...(19): siRNA sense strand
guagcaagccugccaucua

SEQ ID NO: 252774 - RNA, 19 nt, Homo sapiens
  misc_RNA (1)...(19): siRNA sense strand
gcuggucaguuuggaauuu

SEQ ID NO: 252775 - RNA, 19 nt, Homo sapiens
  misc_RNA (1)...(19): siRNA sense strand
caaaaugacuuuccugcaa

SEQ ID NO: 252776 - RNA, 19 nt, Homo sapiens
  misc_RNA (1)...(19): siRNA sense strand
gaggaaagcaagucagaau

SEQ ID NO: 252777 - RNA, 19 nt, Homo sapiens
  misc_RNA (1)...(19): siRNA sense strand
ugagguggcuccaguaugg

SEQ ID NO: 252778 - RNA, 19 nt, Homo sapiens
  misc_RNA (1)...(19): siRNA sense strand
agaacuauauaccagauga

SEQ ID NO: 252779 - RNA, 19 nt, Homo sapiens
  misc_RNA (1)...(19): siRNA sense strand
aaaggaacuugcauuagug

SEQ ID NO: 252780 - RNA, 19 nt, Homo sapiens
  misc_RNA (1)...(19): siRNA sense strand
gcagaugcaggucuagauu

SEQ ID NO: 252781 - RNA, 19 nt, Homo sapiens
  misc_RNA (1)...(19): siRNA sense strand
cuaauuggaaguugacuaa

SEQ ID NO: 252782 - RNA, 19 nt, Homo sapiens
  misc_RNA (1)...(19): siRNA sense strand
aaacucagcaaccaaugua

SEQ ID NO: 252783 - RNA, 19 nt, Homo sapiens
  misc_RNA (1)...(19): siRNA sense strand
guggaaaccuggcuugucu

SEQ ID NO: 252784 - RNA, 19 nt, Homo sapiens
  misc_RNA (1)...(19): siRNA sense strand
gagcaccacugaagaaucc

SEQ ID NO: 252785 - RNA, 19 nt, Homo sapiens
  misc_RNA (1)...(19): siRNA sense strand
gaauucagagaaacaaaug

SEQ ID NO: 252786 - RNA, 19 nt, Homo sapiens
  misc_RNA (1)...(19): siRNA sense strand
gacaagguguuagaugaau

SEQ ID NO: 252787 - RNA, 19 nt, Homo sapiens
  misc_RNA (1)...(19): siRNA sense strand
uguuauacauggacagaaa

SEQ ID NO: 252788 - RNA, 19 nt, Homo sapiens
  misc_RNA (1)...(19): siRNA sense strand
caagguguuagaugaauuu

SEQ ID NO: 252789 - RNA, 19 nt, Homo sapiens
  misc_RNA (1)...(19): siRNA sense strand
gacccaagcaaccuucuaa

SEQ ID NO: 252790 - RNA, 19 nt, Homo sapiens
  misc_RNA (1)...(19): siRNA sense strand
gaggagagcaccacugaag

SEQ ID NO: 252791 - RNA, 19 nt, Homo sapiens
  misc_RNA (1)...(19): siRNA sense strand
ggagagaagaaauguggaa

SEQ ID NO: 252792 - RNA, 19 nt, Homo sapiens
  misc_RNA (1)...(19): siRNA sense strand
guauaaaugaguccacuga

SEQ ID NO: 252793 - RNA, 19 nt, Homo sapiens
  misc_RNA (1)...(19): siRNA sense strand
gcuccaaauugcaugaaau

SEQ ID NO: 252794 - RNA, 19 nt, Homo sapiens
  misc_RNA (1)...(19): siRNA sense strand
ggaguggacuacuuuuaaa

SEQ ID NO: 252795 - RNA, 19 nt, Homo sapiens
  misc_RNA (1)...(19): siRNA sense strand
gcacuacagaauuccuuaa

SEQ ID NO: 252796 - RNA, 19 nt, Homo sapiens
  misc_RNA (1)...(19): siRNA sense strand
ugaagguuaugaacaugaa

SEQ ID NO: 252797 - RNA, 19 nt, Homo sapiens
  misc_RNA (1)...(19): siRNA sense strand
ugacggaaguauagguaga

SEQ ID NO: 252798 - RNA, 19 nt, Homo sapiens
  misc_RNA (1)...(19): siRNA sense strand
gaugacggaaguauaggua

SEQ ID NO: 252799 - RNA, 19 nt, Homo sapiens
  misc_RNA (1)...(19): siRNA sense strand
gaagaggaucacugugcua

SEQ ID NO: 252800 - RNA, 19 nt, Homo sapiens
  misc_RNA (1)...(19): siRNA sense strand
cagauagcccagauaauga

SEQ ID NO: 252801 - RNA, 19 nt, Homo sapiens
  misc_RNA (1)...(19): siRNA sense strand
ccaagcaaccuucuaaucu

SEQ ID NO: 252802 - RNA, 19 nt, Homo sapiens
  misc_RNA (1)...(19): siRNA sense strand
guagucaaguuccaucagu

SEQ ID NO: 252803 - RNA, 19 nt, Homo sapiens
  misc_RNA (1)...(19): siRNA sense strand
acacaccagcagcaaauua

SEQ ID NO: 252804 - RNA, 19 nt, Homo sapiens
  misc_RNA (1)...(19): siRNA sense strand
aaaaucagcucuccuagga

SEQ ID NO: 252805 - RNA, 19 nt, Homo sapiens
  misc_RNA (1)...(19): siRNA sense strand
uguccuacuucaucugaua

SEQ ID NO: 252806 - RNA, 19 nt, Homo sapiens
  misc_RNA (1)...(19): siRNA sense strand
cagcacuggugaccuaaug

SEQ ID NO: 252807 - RNA, 19 nt, Homo sapiens
  misc_RNA (1)...(19): siRNA sense strand
gcaagccugccaucuauca

SEQ ID NO: 252808 - RNA, 19 nt, Homo sapiens
  misc_RNA (1)...(19): siRNA sense strand
ggacuguaaucuaaaucca

SEQ ID NO: 252809 - RNA, 19 nt, Homo sapiens
  misc_RNA (1)...(19): siRNA sense strand
ccaaauugcaugaaaugug

SEQ ID NO: 252810 - RNA, 19 nt, Homo sapiens
  misc_RNA (1)...(19): siRNA sense strand
gcacuggugaccuaaugaa

SEQ ID NO: 252811 - RNA, 19 nt, Homo sapiens
  misc_RNA (1)...(19): siRNA sense strand
gaacaaaacgaagaugaaa

SEQ ID NO: 252812 - RNA, 19 nt, Homo sapiens
  misc_RNA (1)...(19): siRNA sense strand
uagugaaagugaagaaugu

SEQ ID NO: 252813 - RNA, 19 nt, Homo sapiens
  misc_RNA (1)...(19): siRNA sense strand
cucaggacaugacuaauug

SEQ ID NO: 252814 - RNA, 19 nt, Homo sapiens
  misc_RNA (1)...(19): siRNA sense strand
ggucuggaaggaauaauga

SEQ ID NO: 252815 - RNA, 19 nt, Homo sapiens
  misc_RNA (1)...(19): siRNA sense strand
uaaugggucuggaaggaau

SEQ ID NO: 252816 - RNA, 19 nt, Homo sapiens
  misc_RNA (1)...(19): siRNA sense strand
gcaagagaacuauauacca

SEQ ID NO: 252817 - RNA, 19 nt, Homo sapiens
  misc_RNA (1)...(19): siRNA sense strand
gaucaaugcagugcuguug

SEQ ID NO: 252818 - RNA, 19 nt, Homo sapiens
  misc_RNA (1)...(19): siRNA sense strand
ucucaccggcugucauuua

SEQ ID NO: 252819 - RNA, 19 nt, Homo sapiens
  misc_RNA (1)...(19): siRNA sense strand
agaagggaguggacuacuu

SEQ ID NO: 252820 - RNA, 19 nt, Homo sapiens
  misc_RNA (1)...(19): siRNA sense strand
ggaaagcaagucagaaugc

SEQ ID NO: 252821 - RNA, 19 nt, Homo sapiens
  misc_RNA (1)...(19): siRNA sense strand
gagaagaaauguggaaacc

SEQ ID NO: 252822 - RNA, 19 nt, Homo sapiens
  misc_RNA (1)...(19): siRNA sense strand
gaagugggagagaagaaau

SEQ ID NO: 252823 - RNA, 19 nt, Homo sapiens
  misc_RNA (1)...(19): siRNA sense strand
gaacuuagaccaacuuuaa

SEQ ID NO: 252824 - RNA, 19 nt, Homo sapiens
  misc_RNA (1)...(19): siRNA sense strand
ggaauugcguaaagggaua

SEQ ID NO: 252825 - RNA, 19 nt, Homo sapiens
  misc_RNA (1)...(19): siRNA sense strand
caacaagccagauauagau

SEQ ID NO: 252826 - RNA, 19 nt, Homo sapiens
  misc_RNA (1)...(19): siRNA sense strand
ggaacugggccuugacaaa

SEQ ID NO: 252827 - RNA, 19 nt, Homo sapiens
  misc_RNA (1)...(19): siRNA sense strand
ggacaaagcaggaccucau

SEQ ID NO: 252828 - RNA, 19 nt, Homo sapiens
  misc_RNA (1)...(19): siRNA sense strand
gaacugggccuugacaaag

SEQ ID NO: 252829 - RNA, 19 nt, Homo sapiens
  misc_RNA (1)...(19): siRNA sense strand
gcaugcagacgguuaaaug

SEQ ID NO: 252830 - RNA, 19 nt, Homo sapiens
  misc_RNA (1)...(19): siRNA sense strand
gacaaagcaggaccucaua

SEQ ID NO: 252831 - RNA, 19 nt, Homo sapiens
  misc_RNA (1)...(19): siRNA sense strand
ucaacaagccagauauaga

SEQ ID NO: 252832 - RNA, 19 nt, Homo sapiens
  misc_RNA (1)...(19): siRNA sense strand
ggaacuuagaccaacuuua

SEQ ID NO: 252833 - RNA, 19 nt, Homo sapiens
  misc_RNA (1)...(19): siRNA sense strand
agacagaugaggaguuuga

SEQ ID NO: 252834 - RNA, 19 nt, Homo sapiens
  misc_RNA (1)...(19): siRNA sense strand
ugcagacgguuaaaugauu

SEQ ID NO: 252835 - RNA, 19 nt, Homo sapiens
  misc_RNA (1)...(19): siRNA sense strand
ccagucaguucgcugcuau

SEQ ID NO: 252836 - RNA, 19 nt, Homo sapiens
  misc_RNA (1)...(19): siRNA sense strand
gguaacauacuucaacaag

SEQ ID NO: 252837 - RNA, 19 nt, Homo sapiens
  misc_RNA (1)...(19): siRNA sense strand
agcaggaccucauaaggaa

SEQ ID NO: 252838 - RNA, 19 nt, Homo sapiens
  misc_RNA (1)...(19): siRNA sense strand
cggaggaacugggccuuga

SEQ ID NO: 252839 - RNA, 19 nt, Homo sapiens
  misc_RNA (1)...(19): siRNA sense strand
gaugcucgcuggguaacau

SEQ ID NO: 252840 - RNA, 19 nt, Homo sapiens
  misc_RNA (1)...(19): siRNA sense strand
caaagcaggaccucauaag

SEQ ID NO: 252841 - RNA, 19 nt, Homo sapiens
  misc_RNA (1)...(19): siRNA sense strand
aagcaggaccucauaagga

SEQ ID NO: 252842 - RNA, 19 nt, Homo sapiens
  misc_RNA (1)...(19): siRNA sense strand
gaccucauaaggaaaucua

SEQ ID NO: 252843 - RNA, 19 nt, Homo sapiens
  misc_RNA (1)...(19): siRNA sense strand
uagucuaguucgaauccua

SEQ ID NO: 252844 - RNA, 19 nt, Homo sapiens
  misc_RNA (1)...(19): siRNA sense strand
acaaagcaggaccucauaa

SEQ ID NO: 252845 - RNA, 19 nt, Homo sapiens
  misc_RNA (1)...(19): siRNA sense strand
cuucaacaagccagauaua

SEQ ID NO: 252846 - RNA, 19 nt, Homo sapiens
  misc_RNA (1)...(19): siRNA sense strand
gaccaacuuuaaaugaacu

SEQ ID NO: 252847 - RNA, 19 nt, Homo sapiens
  misc_RNA (1)...(19): siRNA sense strand
uauagaugccugggaauug

SEQ ID NO: 252848 - RNA, 19 nt, Homo sapiens
  misc_RNA (1)...(19): siRNA sense strand
gaauugcguaaagggauaa

SEQ ID NO: 252849 - RNA, 19 nt, Homo sapiens
  misc_RNA (1)...(19): siRNA sense strand
uaugucauccaggaacuua

SEQ ID NO: 252850 - RNA, 19 nt, Homo sapiens
  misc_RNA (1)...(19): siRNA sense strand
caugcagacgguuaaauga

SEQ ID NO: 252851 - RNA, 19 nt, Homo sapiens
  misc_RNA (1)...(19): siRNA sense strand
cgccguggcuauccaguca

SEQ ID NO: 252852 - RNA, 19 nt, Homo sapiens
  misc_RNA (1)...(19): siRNA sense strand
gcaggaccucauaaggaaa

SEQ ID NO: 252853 - RNA, 19 nt, Homo sapiens
  misc_RNA (1)...(19): siRNA sense strand
agaccaacuuuaaaugaac

SEQ ID NO: 252854 - RNA, 19 nt, Homo sapiens
  misc_RNA (1)...(19): siRNA sense strand
gggccuugacaaaguguaa

SEQ ID NO: 252855 - RNA, 19 nt, Homo sapiens
  misc_RNA (1)...(19): siRNA sense strand
cgaauccuagagguuguua

SEQ ID NO: 252856 - RNA, 19 nt, Homo sapiens
  misc_RNA (1)...(19): siRNA sense strand
uggguaacauacuucaaca

SEQ ID NO: 252857 - RNA, 19 nt, Homo sapiens
  misc_RNA (1)...(19): siRNA sense strand
gaaaucuaccccuauguca

SEQ ID NO: 252858 - RNA, 19 nt, Homo sapiens
  misc_RNA (1)...(19): siRNA sense strand
gcguaaagggauaaacaca

SEQ ID NO: 252859 - RNA, 19 nt, Homo sapiens
  misc_RNA (1)...(19): siRNA sense strand
gaggaacugggccuugaca

SEQ ID NO: 252860 - RNA, 19 nt, Homo sapiens
  misc_RNA (1)...(19): siRNA sense strand
ccaggaacuuagaccaacu

SEQ ID NO: 252861 - RNA, 19 nt, Homo sapiens
  misc_RNA (1)...(19): siRNA sense strand
uguuaccuaugauaugguu

SEQ ID NO: 252862 - RNA, 19 nt, Homo sapiens
  misc_RNA (1)...(19): siRNA sense strand
cgacauauaucuuuagcaa

SEQ ID NO: 252863 - RNA, 19 nt, Homo sapiens
  misc_RNA (1)...(19): siRNA sense strand
ggacaaaucacguauaagu

SEQ ID NO: 252864 - RNA, 19 nt, Homo sapiens
  misc_RNA (1)...(19): siRNA sense strand
guacuacaauggcuugaaa

SEQ ID NO: 252865 - RNA, 19 nt, Homo sapiens
  misc_RNA (1)...(19): siRNA sense strand
gcgaaaagcuccaacaaaa

SEQ ID NO: 252866 - RNA, 19 nt, Homo sapiens
  misc_RNA (1)...(19): siRNA sense strand
guggacaaaucacguauaa

SEQ ID NO: 252867 - RNA, 19 nt, Homo sapiens
  misc_RNA (1)...(19): siRNA sense strand
gggacgacauauaucuuua

SEQ ID NO: 252868 - RNA, 19 nt, Homo sapiens
  misc_RNA (1)...(19): siRNA sense strand
uacaauggcuugaaaguuc

SEQ ID NO: 252869 - RNA, 19 nt, Homo sapiens
  misc_RNA (1)...(19): siRNA sense strand
gcuugaaaguucugaauau

SEQ ID NO: 252870 - RNA, 19 nt, Homo sapiens
  misc_RNA (1)...(19): siRNA sense strand
cauaauaauuggcgggaaa

SEQ ID NO: 252871 - RNA, 19 nt, Homo sapiens
  misc_RNA (1)...(19): siRNA sense strand
gaaauaccauguaguucgu

SEQ ID NO: 252872 - RNA, 19 nt, Homo sapiens
  misc_RNA (1)...(19): siRNA sense strand
caagcaaccauaauaauug

SEQ ID NO: 252873 - RNA, 19 nt, Homo sapiens
  misc_RNA (1)...(19): siRNA sense strand
guggacagcuggccaguga

SEQ ID NO: 252874 - RNA, 19 nt, Homo sapiens
  misc_RNA (1)...(19): siRNA sense strand
caaaggugguggacaaauc

SEQ ID NO: 252875 - RNA, 19 nt, Homo sapiens
  misc_RNA (1)...(19): siRNA sense strand
uagcaaaggugguggacaa

SEQ ID NO: 252876 - RNA, 19 nt, Homo sapiens
  misc_RNA (1)...(19): siRNA sense strand
ccaagcaaccauaauaauu

SEQ ID NO: 252877 - RNA, 19 nt, Homo sapiens
  misc_RNA (1)...(19): siRNA sense strand
ugacaucgccauugaagaa

SEQ ID NO: 252878 - RNA, 19 nt, Homo sapiens
  misc_RNA (1)...(19): siRNA sense strand
ggacgagagucgaaacuac

SEQ ID NO: 252879 - RNA, 19 nt, Homo sapiens
  misc_RNA (1)...(19): siRNA sense strand
gaaacuacaucaguaacuc

SEQ ID NO: 252880 - RNA, 19 nt, Homo sapiens
  misc_RNA (1)...(19): siRNA sense strand
ccacgacccuggcuacuag

SEQ ID NO: 252881 - RNA, 19 nt, Homo sapiens
  misc_RNA (1)...(19): siRNA sense strand
ccacugccaugcaaucaga

SEQ ID NO: 252882 - RNA, 19 nt, Homo sapiens
  misc_RNA (1)...(19): siRNA sense strand
ucuaugccauguacaagua

SEQ ID NO: 252883 - RNA, 19 nt, Homo sapiens
  misc_RNA (1)...(19): siRNA sense strand
agucgaaacuacaucagua

SEQ ID NO: 252884 - RNA, 19 nt, Homo sapiens
  misc_RNA (1)...(19): siRNA sense strand
auaaguggccuccuaauga

SEQ ID NO: 252885 - RNA, 19 nt, Homo sapiens
  misc_RNA (1)...(19): siRNA sense strand
uagccaagcaaccauaaua

SEQ ID NO: 252886 - RNA, 19 nt, Homo sapiens
  misc_RNA (1)...(19): siRNA sense strand
gagacugguuggugaagug

SEQ ID NO: 252887 - RNA, 19 nt, Homo sapiens
  misc_RNA (1)...(19): siRNA sense strand
ccuaaugaccgacccagua

SEQ ID NO: 252888 - RNA, 19 nt, Homo sapiens
  misc_RNA (1)...(19): siRNA sense strand
guacagaaaccgggaugaa

SEQ ID NO: 252889 - RNA, 19 nt, Homo sapiens
  misc_RNA (1)...(19): siRNA sense strand
ggcgucagcucacaaucuu

SEQ ID NO: 252890 - RNA, 19 nt, Homo sapiens
  misc_RNA (1)...(19): siRNA sense strand
gcgaugaugaggacauuga

SEQ ID NO: 252891 - RNA, 19 nt, Homo sapiens
  misc_RNA (1)...(19): siRNA sense strand
cagcucacaaucuucaaua

SEQ ID NO: 252892 - RNA, 19 nt, Homo sapiens
  misc_RNA (1)...(19): siRNA sense strand
ugaagaauccaaugcaauc

SEQ ID NO: 252893 - RNA, 19 nt, Homo sapiens
  misc_RNA (1)...(19): siRNA sense strand
caauagccaagcaaccaua

SEQ ID NO: 252894 - RNA, 19 nt, Homo sapiens
  misc_RNA (1)...(19): siRNA sense strand
gcagacagacuggccauag

SEQ ID NO: 252895 - RNA, 19 nt, Homo sapiens
  misc_RNA (1)...(19): siRNA sense strand
caucaauuauggagacuac

SEQ ID NO: 252896 - RNA, 19 nt, Homo sapiens
  misc_RNA (1)...(19): siRNA sense strand
gaagaauccaaugcaauca

SEQ ID NO: 252897 - RNA, 19 nt, Homo sapiens
  misc_RNA (1)...(19): siRNA sense strand
uauggucguugggauagua

SEQ ID NO: 252898 - RNA, 19 nt, Homo sapiens
  misc_RNA (1)...(19): siRNA sense strand
ggacagcuggccagugauc

SEQ ID NO: 252899 - RNA, 19 nt, Homo sapiens
  misc_RNA (1)...(19): siRNA sense strand
ggacgacauauaucuuuag

SEQ ID NO: 252900 - RNA, 19 nt, Homo sapiens
  misc_RNA (1)...(19): siRNA sense strand
uaaguggccuccuaaugac

SEQ ID NO: 252901 - RNA, 19 nt, Homo sapiens
  misc_RNA (1)...(19): siRNA sense strand
aggcuugggugacuaccua

SEQ ID NO: 252902 - RNA, 19 nt, Homo sapiens
  misc_RNA (1)...(19): siRNA sense strand
gccgagcucagguggguua

SEQ ID NO: 252903 - RNA, 19 nt, Homo sapiens
  misc_RNA (1)...(19): siRNA sense strand
cagcgaugaugaggacauu

SEQ ID NO: 252904 - RNA, 19 nt, Homo sapiens
  misc_RNA (1)...(19): siRNA sense strand
cuaccuagaacugcauaua

SEQ ID NO: 252905 - RNA, 19 nt, Homo sapiens
  misc_RNA (1)...(19): siRNA sense strand
gagagucgaaacuacauca

SEQ ID NO: 252906 - RNA, 19 nt, Homo sapiens
  misc_RNA (1)...(19): siRNA sense strand
gacaaaucacguauaagug

SEQ ID NO: 252907 - RNA, 19 nt, Homo sapiens
  misc_RNA (1)...(19): siRNA sense strand
uauaaguggccuccuaaug

SEQ ID NO: 252908 - RNA, 19 nt, Homo sapiens
  misc_RNA (1)...(19): siRNA sense strand
gcaaaggugguggacaaau

SEQ ID NO: 252909 - RNA, 19 nt, Homo sapiens
  misc_RNA (1)...(19): siRNA sense strand
ugggaaauaccauguaguu

SEQ ID NO: 252910 - RNA, 19 nt, Homo sapiens
  misc_RNA (1)...(19): siRNA sense strand
uuagcacuguucagaaaga

SEQ ID NO: 252911 - RNA, 19 nt, Homo sapiens
  misc_RNA (1)...(19): siRNA sense strand
gccaagcaaccauaauaau

SEQ ID NO: 252912 - RNA, 19 nt, Homo sapiens
  misc_RNA (1)...(19): siRNA sense strand
caacagccacugccaugca

SEQ ID NO: 252913 - RNA, 19 nt, Homo sapiens
  misc_RNA (1)...(19): siRNA sense strand
gggcuguuguaaaggagaa

SEQ ID NO: 252914 - RNA, 19 nt, Homo sapiens
  misc_RNA (1)...(19): siRNA sense strand
caauggggcuguuguaaag

SEQ ID NO: 252915 - RNA, 19 nt, Homo sapiens
  misc_RNA (1)...(19): siRNA sense strand
ggguauggucguugggaua

SEQ ID NO: 252916 - RNA, 19 nt, Homo sapiens
  misc_RNA (1)...(19): siRNA sense strand
ggcuugaaaguucugaaua

SEQ ID NO: 252917 - RNA, 19 nt, Homo sapiens
  misc_RNA (1)...(19): siRNA sense strand
cuugaaaguucugaauaug

SEQ ID NO: 252918 - RNA, 19 nt, Homo sapiens
  misc_RNA (1)...(19): siRNA sense strand
aagcaaccauaauaauugg

SEQ ID NO: 252919 - RNA, 19 nt, Homo sapiens
  misc_RNA (1)...(19): siRNA sense strand
gguggacaaaucacguaua

SEQ ID NO: 252920 - RNA, 19 nt, Homo sapiens
  misc_RNA (1)...(19): siRNA sense strand
aauaccauguaguucguuu

SEQ ID NO: 252921 - RNA, 19 nt, Homo sapiens
  misc_RNA (1)...(19): siRNA sense strand
cguauaaguggccuccuaa

SEQ ID NO: 252922 - RNA, 19 nt, Homo sapiens
  misc_RNA (1)...(19): siRNA sense strand
acguauaaguggccuccua

SEQ ID NO: 252923 - RNA, 19 nt, Homo sapiens
  misc_RNA (1)...(19): siRNA sense strand
cuacaauggcuugaaaguu

SEQ ID NO: 252924 - RNA, 19 nt, Homo sapiens
  misc_RNA (1)...(19): siRNA sense strand
cuuccucuaugacaacuga

SEQ ID NO: 252925 - RNA, 19 nt, Homo sapiens
  misc_RNA (1)...(19): siRNA sense strand
uaacucagcacaguccaau

SEQ ID NO: 252926 - RNA, 19 nt, Homo sapiens
  misc_RNA (1)...(19): siRNA sense strand
gacgagagucgaaacuaca

SEQ ID NO: 252927 - RNA, 19 nt, Homo sapiens
  misc_RNA (1)...(19): siRNA sense strand
gccaugcaaucagagaugu

SEQ ID NO: 252928 - RNA, 19 nt, Homo sapiens
  misc_RNA (1)...(19): siRNA sense strand
cagagugucccagcgauga

SEQ ID NO: 252929 - RNA, 19 nt, Homo sapiens
  misc_RNA (1)...(19): siRNA sense strand
gcacagccagaagaggaaa

SEQ ID NO: 252930 - RNA, 19 nt, Homo sapiens
  misc_RNA (1)...(19): siRNA sense strand
gugccuuccucuaugacaa

SEQ ID NO: 252931 - RNA, 19 nt, Homo sapiens
  misc_RNA (1)...(19): siRNA sense strand
gucgaaacuacaucaguaa

SEQ ID NO: 252932 - RNA, 19 nt, Homo sapiens
  misc_RNA (1)...(19): siRNA sense strand
ugaaggcucauaccaugug

SEQ ID NO: 252933 - RNA, 19 nt, Homo sapiens
  misc_RNA (1)...(19): siRNA sense strand
cauuaaugaugggaaauac

SEQ ID NO: 252934 - RNA, 19 nt, Homo sapiens
  misc_RNA (1)...(19): siRNA sense strand
gccauagugggaaauguga

SEQ ID NO: 252935 - RNA, 19 nt, Homo sapiens
  misc_RNA (1)...(19): siRNA sense strand
uagcacuguucagaaagaa

SEQ ID NO: 252936 - RNA, 19 nt, Homo sapiens
  misc_RNA (1)...(19): siRNA sense strand
cagacagacuggccauagg

SEQ ID NO: 252937 - RNA, 19 nt, Homo sapiens
  misc_RNA (1)...(19): siRNA sense strand
aaaggugguggacaaauca

SEQ ID NO: 252938 - RNA, 19 nt, Homo sapiens
  misc_RNA (1)...(19): siRNA sense strand
gacgacauauaucuuuagc

SEQ ID NO: 252939 - RNA, 19 nt, Homo sapiens
  misc_RNA (1)...(19): siRNA sense strand
ugggacgacauauaucuuu

SEQ ID NO: 252940 - RNA, 19 nt, Homo sapiens
  misc_RNA (1)...(19): siRNA sense strand
accuagaacugcauauaca

SEQ ID NO: 252941 - RNA, 19 nt, Homo sapiens
  misc_RNA (1)...(19): siRNA sense strand
gggcgucagcucacaaucu

SEQ ID NO: 252942 - RNA, 19 nt, Homo sapiens
  misc_RNA (1)...(19): siRNA sense strand
uauccaggcucagcagaag

SEQ ID NO: 252943 - RNA, 19 nt, Homo sapiens
  misc_RNA (1)...(19): siRNA sense strand
gcgaguggacaguucuuca

SEQ ID NO: 252944 - RNA, 19 nt, Homo sapiens
  misc_RNA (1)...(19): siRNA sense strand
cgucagcucacaaucuuca

SEQ ID NO: 252945 - RNA, 19 nt, Homo sapiens
  misc_RNA (1)...(19): siRNA sense strand
aaacuacaucaguaacuca

SEQ ID NO: 252946 - RNA, 19 nt, Homo sapiens
  misc_RNA (1)...(19): siRNA sense strand
gacagacuggccauagguu

SEQ ID NO: 252947 - RNA, 19 nt, Homo sapiens
  misc_RNA (1)...(19): siRNA sense strand
cauagugggaaaugugaga

SEQ ID NO: 252948 - RNA, 19 nt, Homo sapiens
  misc_RNA (1)...(19): siRNA sense strand
acaauggcuugaaaguucu

SEQ ID NO: 252949 - RNA, 19 nt, Homo sapiens
  misc_RNA (1)...(19): siRNA sense strand
agccaagcaaccauaauaa

SEQ ID NO: 252950 - RNA, 19 nt, Homo sapiens
  misc_RNA (1)...(19): siRNA sense strand
aaucuucaauagccaagca

SEQ ID NO: 252951 - RNA, 19 nt, Homo sapiens
  misc_RNA (1)...(19): siRNA sense strand
gggaaauaccauguaguuc

SEQ ID NO: 252952 - RNA, 19 nt, Homo sapiens
  misc_RNA (1)...(19): siRNA sense strand
guauccaggcucagcagaa

SEQ ID NO: 252953 - RNA, 19 nt, Homo sapiens
  misc_RNA (1)...(19): siRNA sense strand
gaauauggcagccgaaaac

SEQ ID NO: 252954 - RNA, 19 nt, Homo sapiens
  misc_RNA (1)...(19): siRNA sense strand
cacgaggagugguggcaau

SEQ ID NO: 252955 - RNA, 19 nt, Homo sapiens
  misc_RNA (1)...(19): siRNA sense strand
cgacauauaucuuuagcaa

SEQ ID NO: 252956 - RNA, 19 nt, Homo sapiens
  misc_RNA (1)...(19): siRNA sense strand
ggacaaaucacguauaagu

SEQ ID NO: 252957 - RNA, 19 nt, Homo sapiens
  misc_RNA (1)...(19): siRNA sense strand
guacuacaauggcuugaaa

SEQ ID NO: 252958 - RNA, 19 nt, Homo sapiens
  misc_RNA (1)...(19): siRNA sense strand
gcgaaaagcuccaacaaaa

SEQ ID NO: 252959 - RNA, 19 nt, Homo sapiens
  misc_RNA (1)...(19): siRNA sense strand
guggacaaaucacguauaa

SEQ ID NO: 252960 - RNA, 19 nt, Homo sapiens
  misc_RNA (1)...(19): siRNA sense strand
gggacgacauauaucuuua

SEQ ID NO: 252961 - RNA, 19 nt, Homo sapiens
  misc_RNA (1)...(19): siRNA sense strand
uacaauggcuugaaaguuc

SEQ ID NO: 252962 - RNA, 19 nt, Homo sapiens
  misc_RNA (1)...(19): siRNA sense strand
gcuugaaaguucugaauau

SEQ ID NO: 252963 - RNA, 19 nt, Homo sapiens
  misc_RNA (1)...(19): siRNA sense strand
cauaauaauuggcgggaaa

SEQ ID NO: 252964 - RNA, 19 nt, Homo sapiens
  misc_RNA (1)...(19): siRNA sense strand
gaaauaccauguaguucgu

SEQ ID NO: 252965 - RNA, 19 nt, Homo sapiens
  misc_RNA (1)...(19): siRNA sense strand
caagcaaccauaauaauug

SEQ ID NO: 252966 - RNA, 19 nt, Homo sapiens
  misc_RNA (1)...(19): siRNA sense strand
guggacagcuggccaguga

SEQ ID NO: 252967 - RNA, 19 nt, Homo sapiens
  misc_RNA (1)...(19): siRNA sense strand
caaaggugguggacaaauc

SEQ ID NO: 252968 - RNA, 19 nt, Homo sapiens
  misc_RNA (1)...(19): siRNA sense strand
uagcaaaggugguggacaa

SEQ ID NO: 252969 - RNA, 19 nt, Homo sapiens
  misc_RNA (1)...(19): siRNA sense strand
ccaagcaaccauaauaauu

SEQ ID NO: 252970 - RNA, 19 nt, Homo sapiens
  misc_RNA (1)...(19): siRNA sense strand
ugacaucgccauugaagaa

SEQ ID NO: 252971 - RNA, 19 nt, Homo sapiens
  misc_RNA (1)...(19): siRNA sense strand
ggacgagagucgaaacuac

SEQ ID NO: 252972 - RNA, 19 nt, Homo sapiens
  misc_RNA (1)...(19): siRNA sense strand
gaaacuacaucaguaacuc

SEQ ID NO: 252973 - RNA, 19 nt, Homo sapiens
  misc_RNA (1)...(19): siRNA sense strand
ccacgacccuggcuacuag

SEQ ID NO: 252974 - RNA, 19 nt, Homo sapiens
  misc_RNA (1)...(19): siRNA sense strand
ccacugccaugcaaucaga

SEQ ID NO: 252975 - RNA, 19 nt, Homo sapiens
  misc_RNA (1)...(19): siRNA sense strand
ucuaugccauguacaagua

SEQ ID NO: 252976 - RNA, 19 nt, Homo sapiens
  misc_RNA (1)...(19): siRNA sense strand
agucgaaacuacaucagua

SEQ ID NO: 252977 - RNA, 19 nt, Homo sapiens
  misc_RNA (1)...(19): siRNA sense strand
auaaguggccuccuaauga

SEQ ID NO: 252978 - RNA, 19 nt, Homo sapiens
  misc_RNA (1)...(19): siRNA sense strand
uagccaagcaaccauaaua

SEQ ID NO: 252979 - RNA, 19 nt, Homo sapiens
  misc_RNA (1)...(19): siRNA sense strand
gagacugguuggugaagug

SEQ ID NO: 252980 - RNA, 19 nt, Homo sapiens
  misc_RNA (1)...(19): siRNA sense strand
ccuaaugaccgacccagua

SEQ ID NO: 252981 - RNA, 19 nt, Homo sapiens
  misc_RNA (1)...(19): siRNA sense strand
guacagaaaccgggaugaa

SEQ ID NO: 252982 - RNA, 19 nt, Homo sapiens
  misc_RNA (1)...(19): siRNA sense strand
ggcgucagcucacaaucuu

SEQ ID NO: 252983 - RNA, 19 nt, Homo sapiens
  misc_RNA (1)...(19): siRNA sense strand
gcgaugaugaggacauuga

SEQ ID NO: 252984 - RNA, 19 nt, Homo sapiens
  misc_RNA (1)...(19): siRNA sense strand
cagcucacaaucuucaaua

SEQ ID NO: 252985 - RNA, 19 nt, Homo sapiens
  misc_RNA (1)...(19): siRNA sense strand
ugaagaauccaaugcaauc

SEQ ID NO: 252986 - RNA, 19 nt, Homo sapiens
  misc_RNA (1)...(19): siRNA sense strand
caauagccaagcaaccaua

SEQ ID NO: 252987 - RNA, 19 nt, Homo sapiens
  misc_RNA (1)...(19): siRNA sense strand
gcagacagacuggccauag

SEQ ID NO: 252988 - RNA, 19 nt, Homo sapiens
  misc_RNA (1)...(19): siRNA sense strand
caucaauuauggagacuac

SEQ ID NO: 252989 - RNA, 19 nt, Homo sapiens
  misc_RNA (1)...(19): siRNA sense strand
gaagaauccaaugcaauca

SEQ ID NO: 252990 - RNA, 19 nt, Homo sapiens
  misc_RNA (1)...(19): siRNA sense strand
uauggucguugggauagua

SEQ ID NO: 252991 - RNA, 19 nt, Homo sapiens
  misc_RNA (1)...(19): siRNA sense strand
ggacagcuggccagugauc

SEQ ID NO: 252992 - RNA, 19 nt, Homo sapiens
  misc_RNA (1)...(19): siRNA sense strand
ggacgacauauaucuuuag

SEQ ID NO: 252993 - RNA, 19 nt, Homo sapiens
  misc_RNA (1)...(19): siRNA sense strand
uaaguggccuccuaaugac

SEQ ID NO: 252994 - RNA, 19 nt, Homo sapiens
  misc_RNA (1)...(19): siRNA sense strand
aggcuugggugacuaccua

SEQ ID NO: 252995 - RNA, 19 nt, Homo sapiens
  misc_RNA (1)...(19): siRNA sense strand
gccgagcucagguggguua

SEQ ID NO: 252996 - RNA, 19 nt, Homo sapiens
  misc_RNA (1)...(19): siRNA sense strand
cagcgaugaugaggacauu

SEQ ID NO: 252997 - RNA, 19 nt, Homo sapiens
  misc_RNA (1)...(19): siRNA sense strand
cuaccuagaacugcauaua

SEQ ID NO: 252998 - RNA, 19 nt, Homo sapiens
  misc_RNA (1)...(19): siRNA sense strand
gagagucgaaacuacauca

SEQ ID NO: 252999 - RNA, 19 nt, Homo sapiens
  misc_RNA (1)...(19): siRNA sense strand
gacaaaucacguauaagug

SEQ ID NO: 253000 - RNA, 19 nt, Homo sapiens
  misc_RNA (1)...(19): siRNA sense strand
uauaaguggccuccuaaug

SEQ ID NO: 253001 - RNA, 19 nt, Homo sapiens
  misc_RNA (1)...(19): siRNA sense strand
gcaaaggugguggacaaau

SEQ ID NO: 253002 - RNA, 19 nt, Homo sapiens
  misc_RNA (1)...(19): siRNA sense strand
ugggaaauaccauguaguu

SEQ ID NO: 253003 - RNA, 19 nt, Homo sapiens
  misc_RNA (1)...(19): siRNA sense strand
uuagcacuguucagaaaga

SEQ ID NO: 253004 - RNA, 19 nt, Homo sapiens
  misc_RNA (1)...(19): siRNA sense strand
gccaagcaaccauaauaau

SEQ ID NO: 253005 - RNA, 19 nt, Homo sapiens
  misc_RNA (1)...(19): siRNA sense strand
caacagccacugccaugca

SEQ ID NO: 253006 - RNA, 19 nt, Homo sapiens
  misc_RNA (1)...(19): siRNA sense strand
gggcuguuguaaaggagaa

SEQ ID NO: 253007 - RNA, 19 nt, Homo sapiens
  misc_RNA (1)...(19): siRNA sense strand
caauggggcuguuguaaag

SEQ ID NO: 253008 - RNA, 19 nt, Homo sapiens
  misc_RNA (1)...(19): siRNA sense strand
ggguauggucguugggaua

SEQ ID NO: 253009 - RNA, 19 nt, Homo sapiens
  misc_RNA (1)...(19): siRNA sense strand
ggcuugaaaguucugaaua

SEQ ID NO: 253010 - RNA, 19 nt, Homo sapiens
  misc_RNA (1)...(19): siRNA sense strand
cuugaaaguucugaauaug

SEQ ID NO: 253011 - RNA, 19 nt, Homo sapiens
  misc_RNA (1)...(19): siRNA sense strand
aagcaaccauaauaauugg

SEQ ID NO: 253012 - RNA, 19 nt, Homo sapiens
  misc_RNA (1)...(19): siRNA sense strand
gguggacaaaucacguaua

SEQ ID NO: 253013 - RNA, 19 nt, Homo sapiens
  misc_RNA (1)...(19): siRNA sense strand
aauaccauguaguucguuu

SEQ ID NO: 253014 - RNA, 19 nt, Homo sapiens
  misc_RNA (1)...(19): siRNA sense strand
cguauaaguggccuccuaa

SEQ ID NO: 253015 - RNA, 19 nt, Homo sapiens
  misc_RNA (1)...(19): siRNA sense strand
acguauaaguggccuccua

SEQ ID NO: 253016 - RNA, 19 nt, Homo sapiens
  misc_RNA (1)...(19): siRNA sense strand
cuacaauggcuugaaaguu

SEQ ID NO: 253017 - RNA, 19 nt, Homo sapiens
  misc_RNA (1)...(19): siRNA sense strand
cuuccucuaugacaacuga

SEQ ID NO: 253018 - RNA, 19 nt, Homo sapiens
  misc_RNA (1)...(19): siRNA sense strand
uaacucagcacaguccaau

SEQ ID NO: 253019 - RNA, 19 nt, Homo sapiens
  misc_RNA (1)...(19): siRNA sense strand
gacgagagucgaaacuaca

SEQ ID NO: 253020 - RNA, 19 nt, Homo sapiens
  misc_RNA (1)...(19): siRNA sense strand
gccaugcaaucagagaugu

SEQ ID NO: 253021 - RNA, 19 nt, Homo sapiens
  misc_RNA (1)...(19): siRNA sense strand
cagagugucccagcgauga

SEQ ID NO: 253022 - RNA, 19 nt, Homo sapiens
  misc_RNA (1)...(19): siRNA sense strand
gcacagccagaagaggaaa

SEQ ID NO: 253023 - RNA, 19 nt, Homo sapiens
  misc_RNA (1)...(19): siRNA sense strand
gugccuuccucuaugacaa

SEQ ID NO: 253024 - RNA, 19 nt, Homo sapiens
  misc_RNA (1)...(19): siRNA sense strand
gucgaaacuacaucaguaa

SEQ ID NO: 253025 - RNA, 19 nt, Homo sapiens
  misc_RNA (1)...(19): siRNA sense strand
ugaaggcucauaccaugug

SEQ ID NO: 253026 - RNA, 19 nt, Homo sapiens
  misc_RNA (1)...(19): siRNA sense strand
cauuaaugaugggaaauac

SEQ ID NO: 253027 - RNA, 19 nt, Homo sapiens
  misc_RNA (1)...(19): siRNA sense strand
gccauagugggaaauguga

SEQ ID NO: 253028 - RNA, 19 nt, Homo sapiens
  misc_RNA (1)...(19): siRNA sense strand
uagcacuguucagaaagaa

SEQ ID NO: 253029 - RNA, 19 nt, Homo sapiens
  misc_RNA (1)...(19): siRNA sense strand
cagacagacuggccauagg

SEQ ID NO: 253030 - RNA, 19 nt, Homo sapiens
  misc_RNA (1)...(19): siRNA sense strand
aaaggugguggacaaauca

SEQ ID NO: 253031 - RNA, 19 nt, Homo sapiens
  misc_RNA (1)...(19): siRNA sense strand
gacgacauauaucuuuagc

SEQ ID NO: 253032 - RNA, 19 nt, Homo sapiens
  misc_RNA (1)...(19): siRNA sense strand
ugggacgacauauaucuuu

SEQ ID NO: 253033 - RNA, 19 nt, Homo sapiens
  misc_RNA (1)...(19): siRNA sense strand
accuagaacugcauauaca

SEQ ID NO: 253034 - RNA, 19 nt, Homo sapiens
  misc_RNA (1)...(19): siRNA sense strand
gggcgucagcucacaaucu

SEQ ID NO: 253035 - RNA, 19 nt, Homo sapiens
  misc_RNA (1)...(19): siRNA sense strand
uauccaggcucagcagaag

SEQ ID NO: 253036 - RNA, 19 nt, Homo sapiens
  misc_RNA (1)...(19): siRNA sense strand
gcgaguggacaguucuuca

SEQ ID NO: 253037 - RNA, 19 nt, Homo sapiens
  misc_RNA (1)...(19): siRNA sense strand
cgucagcucacaaucuuca

SEQ ID NO: 253038 - RNA, 19 nt, Homo sapiens
  misc_RNA (1)...(19): siRNA sense strand
aaacuacaucaguaacuca

SEQ ID NO: 253039 - RNA, 19 nt, Homo sapiens
  misc_RNA (1)...(19): siRNA sense strand
gacagacuggccauagguu

SEQ ID NO: 253040 - RNA, 19 nt, Homo sapiens
  misc_RNA (1)...(19): siRNA sense strand
cauagugggaaaugugaga

SEQ ID NO: 253041 - RNA, 19 nt, Homo sapiens
  misc_RNA (1)...(19): siRNA sense strand
acaauggcuugaaaguucu

SEQ ID NO: 253042 - RNA, 19 nt, Homo sapiens
  misc_RNA (1)...(19): siRNA sense strand
agccaagcaaccauaauaa

SEQ ID NO: 253043 - RNA, 19 nt, Homo sapiens
  misc_RNA (1)...(19): siRNA sense strand
aaucuucaauagccaagca

SEQ ID NO: 253044 - RNA, 19 nt, Homo sapiens
  misc_RNA (1)...(19): siRNA sense strand
gggaaauaccauguaguuc

SEQ ID NO: 253045 - RNA, 19 nt, Homo sapiens
  misc_RNA (1)...(19): siRNA sense strand
guauccaggcucagcagaa

SEQ ID NO: 253046 - RNA, 19 nt, Homo sapiens
  misc_RNA (1)...(19): siRNA sense strand
gaauauggcagccgaaaac

SEQ ID NO: 253047 - RNA, 19 nt, Homo sapiens
  misc_RNA (1)...(19): siRNA sense strand
cacgaggagugguggcaau

SEQ ID NO: 253048 - RNA, 19 nt, Homo sapiens
  misc_RNA (1)...(19): siRNA sense strand
gggcaaagcugacuucaug

SEQ ID NO: 253049 - RNA, 19 nt, Homo sapiens
  misc_RNA (1)...(19): siRNA sense strand
gcaaacagcgcaaggaguu

SEQ ID NO: 253050 - RNA, 19 nt, Homo sapiens
  misc_RNA (1)...(19): siRNA sense strand
uugaugagcuuaagguaua

SEQ ID NO: 253051 - RNA, 19 nt, Homo sapiens
  misc_RNA (1)...(19): siRNA sense strand
caacaagcgugucgccuau

SEQ ID NO: 253052 - RNA, 19 nt, Homo sapiens
  misc_RNA (1)...(19): siRNA sense strand
gaauugacuuggaggagaa

SEQ ID NO: 253053 - RNA, 19 nt, Homo sapiens
  misc_RNA (1)...(19): siRNA sense strand
ccaaagaggagaagaagaa

SEQ ID NO: 253054 - RNA, 19 nt, Homo sapiens
  misc_RNA (1)...(19): siRNA sense strand
gcaaugagaacgaugaguu

SEQ ID NO: 253055 - RNA, 19 nt, Homo sapiens
  misc_RNA (1)...(19): siRNA sense strand
caccucagcucgaguacua

SEQ ID NO: 253056 - RNA, 19 nt, Homo sapiens
  misc_RNA (1)...(19): siRNA sense strand
gaagaagaaacccaagauu

SEQ ID NO: 253057 - RNA, 19 nt, Homo sapiens
  misc_RNA (1)...(19): siRNA sense strand
acacauggcuacaauaucu

SEQ ID NO: 253058 - RNA, 19 nt, Homo sapiens
  misc_RNA (1)...(19): siRNA sense strand
gaaguggaccucccagaga

SEQ ID NO: 253059 - RNA, 19 nt, Homo sapiens
  misc_RNA (1)...(19): siRNA sense strand
agaagaaacccaagauuga

SEQ ID NO: 253060 - RNA, 19 nt, Homo sapiens
  misc_RNA (1)...(19): siRNA sense strand
gcacagcauucccgacauc

SEQ ID NO: 253061 - RNA, 19 nt, Homo sapiens
  misc_RNA (1)...(19): siRNA sense strand
ucaagaaacuggagaccau

SEQ ID NO: 253062 - RNA, 19 nt, Homo sapiens
  misc_RNA (1)...(19): siRNA sense strand
cagaugagguggucuugga

SEQ ID NO: 253063 - RNA, 19 nt, Homo sapiens
  misc_RNA (1)...(19): siRNA sense strand
ggagcaacuucgacaacaa

SEQ ID NO: 253064 - RNA, 19 nt, Homo sapiens
  misc_RNA (1)...(19): siRNA sense strand
ugaaaucuaugaccaggau

SEQ ID NO: 253065 - RNA, 19 nt, Homo sapiens
  misc_RNA (1)...(19): siRNA sense strand
gcugcacacuuucaacuug

SEQ ID NO: 253066 - RNA, 19 nt, Homo sapiens
  misc_RNA (1)...(19): siRNA sense strand
gaagaaacccaagauugau

SEQ ID NO: 253067 - RNA, 19 nt, Homo sapiens
  misc_RNA (1)...(19): siRNA sense strand
ccaaggaccugcucuucuc

SEQ ID NO: 253068 - RNA, 19 nt, Homo sapiens
  misc_RNA (1)...(19): siRNA sense strand
ggacgacgacuucuucaca

SEQ ID NO: 253069 - RNA, 19 nt, Homo sapiens
  misc_RNA (1)...(19): siRNA sense strand
caaguacuuugccuccauu

SEQ ID NO: 253070 - RNA, 19 nt, Homo sapiens
  misc_RNA (1)...(19): siRNA sense strand
agaagaagaagaagaagaa

SEQ ID NO: 253071 - RNA, 19 nt, Homo sapiens
  misc_RNA (1)...(19): siRNA sense strand
gauccacaauuauaagaag

SEQ ID NO: 253072 - RNA, 19 nt, Homo sapiens
  misc_RNA (1)...(19): siRNA sense strand
ggaaguccuuugacaucga

SEQ ID NO: 253073 - RNA, 19 nt, Homo sapiens
  misc_RNA (1)...(19): siRNA sense strand
ccacacauggcuacaauau

SEQ ID NO: 253074 - RNA, 19 nt, Homo sapiens
  misc_RNA (1)...(19): siRNA sense strand
gagaagaagaagaagaaga

SEQ ID NO: 253075 - RNA, 19 nt, Homo sapiens
  misc_RNA (1)...(19): siRNA sense strand
ucaacacccucgucaagug

SEQ ID NO: 253076 - RNA, 19 nt, Homo sapiens
  misc_RNA (1)...(19): siRNA sense strand
ggaggacgacgacuucuuc

SEQ ID NO: 253077 - RNA, 19 nt, Homo sapiens
  misc_RNA (1)...(19): siRNA sense strand
agaaggagaagaagaagaa

SEQ ID NO: 253078 - RNA, 19 nt, Homo sapiens
  misc_RNA (1)...(19): siRNA sense strand
gcaaugaccccaucaaugu

SEQ ID NO: 253079 - RNA, 19 nt, Homo sapiens
  misc_RNA (1)...(19): siRNA sense strand
caaugagaacgaugaguuu

SEQ ID NO: 253080 - RNA, 19 nt, Homo sapiens
  misc_RNA (1)...(19): siRNA sense strand
ccaucgagcuggaccugaa

SEQ ID NO: 253081 - RNA, 19 nt, Homo sapiens
  misc_RNA (1)...(19): siRNA sense strand
caagaaggaguccauguuc

SEQ ID NO: 253082 - RNA, 19 nt, Homo sapiens
  misc_RNA (1)...(19): siRNA sense strand
ccaagaaggaguccauguu

SEQ ID NO: 253083 - RNA, 19 nt, Homo sapiens
  misc_RNA (1)...(19): siRNA sense strand
gcccaucauugucauugaa

SEQ ID NO: 253084 - RNA, 19 nt, Homo sapiens
  misc_RNA (1)...(19): siRNA sense strand
aggacuggcugcacacuuu

SEQ ID NO: 253085 - RNA, 19 nt, Homo sapiens
  misc_RNA (1)...(19): siRNA sense strand
aagaagaaacccaagauug

SEQ ID NO: 253086 - RNA, 19 nt, Homo sapiens
  misc_RNA (1)...(19): siRNA sense strand
gagaagaagaaacccaaga

SEQ ID NO: 253087 - RNA, 19 nt, Homo sapiens
  misc_RNA (1)...(19): siRNA sense strand
cgucccugauccacaauua

SEQ ID NO: 253088 - RNA, 19 nt, Homo sapiens
  misc_RNA (1)...(19): siRNA sense strand
gcagcucaacccugucuuu

SEQ ID NO: 253089 - RNA, 19 nt, Homo sapiens
  misc_RNA (1)...(19): siRNA sense strand
ggacgauccgcccaucauu

SEQ ID NO: 253090 - RNA, 19 nt, Homo sapiens
  misc_RNA (1)...(19): siRNA sense strand
acacagacguccacuacca

SEQ ID NO: 253091 - RNA, 19 nt, Homo sapiens
  misc_RNA (1)...(19): siRNA sense strand
ggagaaguccagugacauc

SEQ ID NO: 253092 - RNA, 19 nt, Homo sapiens
  misc_RNA (1)...(19): siRNA sense strand
gaguggaggugcuguucug

SEQ ID NO: 253093 - RNA, 19 nt, Homo sapiens
  misc_RNA (1)...(19): siRNA sense strand
ggacgccucuggacaucuc

SEQ ID NO: 253094 - RNA, 19 nt, Homo sapiens
  misc_RNA (1)...(19): siRNA sense strand
caagauugaugagcuuaag

SEQ ID NO: 253095 - RNA, 19 nt, Homo sapiens
  misc_RNA (1)...(19): siRNA sense strand
gccagaacuuccugcagaa

SEQ ID NO: 253096 - RNA, 19 nt, Homo sapiens
  misc_RNA (1)...(19): siRNA sense strand
gggagguuguggugacuau

SEQ ID NO: 253097 - RNA, 19 nt, Homo sapiens
  misc_RNA (1)...(19): siRNA sense strand
gagcuggaguccgaguuug

SEQ ID NO: 253098 - RNA, 19 nt, Homo sapiens
  misc_RNA (1)...(19): siRNA sense strand
ggacagugcaggccaaggu

SEQ ID NO: 253099 - RNA, 19 nt, Homo sapiens
  misc_RNA (1)...(19): siRNA sense strand
cagaggaggcagagaagaa

SEQ ID NO: 253100 - RNA, 19 nt, Homo sapiens
  misc_RNA (1)...(19): siRNA sense strand
cagcagaggaggcagagaa

SEQ ID NO: 253101 - RNA, 19 nt, Homo sapiens
  misc_RNA (1)...(19): siRNA sense strand
ccaaguacuuugccuccau

SEQ ID NO: 253102 - RNA, 19 nt, Homo sapiens
  misc_RNA (1)...(19): siRNA sense strand
caaugaagggcaaggagaa

SEQ ID NO: 253103 - RNA, 19 nt, Homo sapiens
  misc_RNA (1)...(19): siRNA sense strand
caacuggcgcuaccuguuc

SEQ ID NO: 253104 - RNA, 19 nt, Homo sapiens
  misc_RNA (1)...(19): siRNA sense strand
agaacuacaucuccaagca

SEQ ID NO: 253105 - RNA, 19 nt, Homo sapiens
  misc_RNA (1)...(19): siRNA sense strand
ugacgguggcuguguauga

SEQ ID NO: 253106 - RNA, 19 nt, Homo sapiens
  misc_RNA (1)...(19): siRNA sense strand
agagguacccaucaagaaa

SEQ ID NO: 253107 - RNA, 19 nt, Homo sapiens
  misc_RNA (1)...(19): siRNA sense strand
gcgcaaagacagccaagca

SEQ ID NO: 253108 - RNA, 19 nt, Homo sapiens
  misc_RNA (1)...(19): siRNA sense strand
gggacgagaccgaguacaa

SEQ ID NO: 253109 - RNA, 19 nt, Homo sapiens
  misc_RNA (1)...(19): siRNA sense strand
aagaggagaagaagaagaa

SEQ ID NO: 253110 - RNA, 19 nt, Homo sapiens
  misc_RNA (1)...(19): siRNA sense strand
ucgacaaccuggagcucua

SEQ ID NO: 253111 - RNA, 19 nt, Homo sapiens
  misc_RNA (1)...(19): siRNA sense strand
gcacccugcugacaucaac

SEQ ID NO: 253112 - RNA, 19 nt, Homo sapiens
  misc_RNA (1)...(19): siRNA sense strand
cgacagcagcggacucuca

SEQ ID NO: 253113 - RNA, 19 nt, Homo sapiens
  misc_RNA (1)...(19): siRNA sense strand
aggcugagcugcauuuacu

SEQ ID NO: 253114 - RNA, 19 nt, Homo sapiens
  misc_RNA (1)...(19): siRNA sense strand
gagaaggagaagaagaaga

SEQ ID NO: 253115 - RNA, 19 nt, Homo sapiens
  misc_RNA (1)...(19): siRNA sense strand
gaggagaaggagaagaaga

SEQ ID NO: 253116 - RNA, 19 nt, Homo sapiens
  misc_RNA (1)...(19): siRNA sense strand
ccagagguacccaucaaga

SEQ ID NO: 253117 - RNA, 19 nt, Homo sapiens
  misc_RNA (1)...(19): siRNA sense strand
ggccuucggucgcuacaca

SEQ ID NO: 253118 - RNA, 19 nt, Homo sapiens
  misc_RNA (1)...(19): siRNA sense strand
ucccugauccacaauuaua

SEQ ID NO: 253119 - RNA, 19 nt, Homo sapiens
  misc_RNA (1)...(19): siRNA sense strand
aaguggaccucccagagaa

SEQ ID NO: 253120 - RNA, 19 nt, Homo sapiens
  misc_RNA (1)...(19): siRNA sense strand
cucggaagcccaagaagua

SEQ ID NO: 253121 - RNA, 19 nt, Homo sapiens
  misc_RNA (1)...(19): siRNA sense strand
ucacugggcccucugagau

SEQ ID NO: 253122 - RNA, 19 nt, Homo sapiens
  misc_RNA (1)...(19): siRNA sense strand
gaaggaggaaguggacaau

SEQ ID NO: 253123 - RNA, 19 nt, Homo sapiens
  misc_RNA (1)...(19): siRNA sense strand
gacgauccgcccaucauug

SEQ ID NO: 253124 - RNA, 19 nt, Homo sapiens
  misc_RNA (1)...(19): siRNA sense strand
gacgagaccgaguacaaga

SEQ ID NO: 253125 - RNA, 19 nt, Homo sapiens
  misc_RNA (1)...(19): siRNA sense strand
ggacgagaccgaguacaag

SEQ ID NO: 253126 - RNA, 19 nt, Homo sapiens
  misc_RNA (1)...(19): siRNA sense strand
cagagguacccaucaagaa

SEQ ID NO: 253127 - RNA, 19 nt, Homo sapiens
  misc_RNA (1)...(19): siRNA sense strand
aggccaagguggagcugua

SEQ ID NO: 253128 - RNA, 19 nt, Homo sapiens
  misc_RNA (1)...(19): siRNA sense strand
gcugagcugcauuuacuga

SEQ ID NO: 253129 - RNA, 19 nt, Homo sapiens
  misc_RNA (1)...(19): siRNA sense strand
cugcaaagacggcaaagug

SEQ ID NO: 253130 - RNA, 19 nt, Homo sapiens
  misc_RNA (1)...(19): siRNA sense strand
ccucuggaauugacuugga

SEQ ID NO: 253131 - RNA, 19 nt, Homo sapiens
  misc_RNA (1)...(19): siRNA sense strand
gacuauggagccagaggua

SEQ ID NO: 253132 - RNA, 19 nt, Homo sapiens
  misc_RNA (1)...(19): siRNA sense strand
cuucuccgcugacgacuuc

SEQ ID NO: 253133 - RNA, 19 nt, Homo sapiens
  misc_RNA (1)...(19): siRNA sense strand
cagcauucccgacaucuuc

SEQ ID NO: 253134 - RNA, 19 nt, Homo sapiens
  misc_RNA (1)...(19): siRNA sense strand
aggaggaaguggacaauac

SEQ ID NO: 253135 - RNA, 19 nt, Homo sapiens
  misc_RNA (1)...(19): siRNA sense strand
gagcaacuucgacaacaag

SEQ ID NO: 253136 - RNA, 19 nt, Homo sapiens
  misc_RNA (1)...(19): siRNA sense strand
ccaagaagcaggcguucca

SEQ ID NO: 253137 - RNA, 19 nt, Homo sapiens
  misc_RNA (1)...(19): siRNA sense strand
ugagaacgaugaguuugag

SEQ ID NO: 253138 - RNA, 19 nt, Homo sapiens
  misc_RNA (1)...(19): siRNA sense strand
agacugacauccgcgacaa

SEQ ID NO: 253139 - RNA, 19 nt, Homo sapiens
  misc_RNA (1)...(19): siRNA sense strand
gauugaugagcuuaaggua

SEQ ID NO: 253140 - RNA, 19 nt, Homo sapiens
  misc_RNA (1)...(19): siRNA sense strand
ccauugacaccaugaagga

SEQ ID NO: 253141 - RNA, 19 nt, Homo sapiens
  misc_RNA (1)...(19): siRNA sense strand
cgccucaaguccugcauga

SEQ ID NO: 253142 - RNA, 19 nt, Homo sapiens
  misc_RNA (1)...(19): siRNA sense strand
ugagggagcuggaaaacau

SEQ ID NO: 253143 - RNA, 19 nt, Homo sapiens
  misc_RNA (1)...(19): siRNA sense strand
gauccgcccaucauuguca

SEQ ID NO: 253144 - RNA, 19 nt, Homo sapiens
  misc_RNA (1)...(19): siRNA sense strand
ggacugcgccaaggucaag

SEQ ID NO: 253145 - RNA, 19 nt, Homo sapiens
  misc_RNA (1)...(19): siRNA sense strand
ggaggcugagcugcauuua

SEQ ID NO: 253146 - RNA, 19 nt, Homo sapiens
  misc_RNA (1)...(19): siRNA sense strand
guguccaucuucaagcaaa

SEQ ID NO: 253147 - RNA, 19 nt, Homo sapiens
  misc_RNA (1)...(19): siRNA sense strand
cgacaaggagaacuacauc

SEQ ID NO: 253148 - RNA, 19 nt, Homo sapiens
  misc_RNA (1)...(19): siRNA sense strand
gggcaaagcugacuucaug

SEQ ID NO: 253149 - RNA, 19 nt, Homo sapiens
  misc_RNA (1)...(19): siRNA sense strand
gcaaacagcgcaaggaguu

SEQ ID NO: 253150 - RNA, 19 nt, Homo sapiens
  misc_RNA (1)...(19): siRNA sense strand
uugaugagcuuaagguaua

SEQ ID NO: 253151 - RNA, 19 nt, Homo sapiens
  misc_RNA (1)...(19): siRNA sense strand
caacaagcgugucgccuau

SEQ ID NO: 253152 - RNA, 19 nt, Homo sapiens
  misc_RNA (1)...(19): siRNA sense strand
gaauugacuuggaggagaa

SEQ ID NO: 253153 - RNA, 19 nt, Homo sapiens
  misc_RNA (1)...(19): siRNA sense strand
ccaaagaggagaagaagaa

SEQ ID NO: 253154 - RNA, 19 nt, Homo sapiens
  misc_RNA (1)...(19): siRNA sense strand
gcaaugagaacgaugaguu

SEQ ID NO: 253155 - RNA, 19 nt, Homo sapiens
  misc_RNA (1)...(19): siRNA sense strand
caccucagcucgaguacua

SEQ ID NO: 253156 - RNA, 19 nt, Homo sapiens
  misc_RNA (1)...(19): siRNA sense strand
gaagaagaaacccaagauu

SEQ ID NO: 253157 - RNA, 19 nt, Homo sapiens
  misc_RNA (1)...(19): siRNA sense strand
acacauggcuacaauaucu

SEQ ID NO: 253158 - RNA, 19 nt, Homo sapiens
  misc_RNA (1)...(19): siRNA sense strand
gaaguggaccucccagaga

SEQ ID NO: 253159 - RNA, 19 nt, Homo sapiens
  misc_RNA (1)...(19): siRNA sense strand
agaagaaacccaagauuga

SEQ ID NO: 253160 - RNA, 19 nt, Homo sapiens
  misc_RNA (1)...(19): siRNA sense strand
gcacagcauucccgacauc

SEQ ID NO: 253161 - RNA, 19 nt, Homo sapiens
  misc_RNA (1)...(19): siRNA sense strand
ucaagaaacuggagaccau

SEQ ID NO: 253162 - RNA, 19 nt, Homo sapiens
  misc_RNA (1)...(19): siRNA sense strand
cagaugagguggucuugga

SEQ ID NO: 253163 - RNA, 19 nt, Homo sapiens
  misc_RNA (1)...(19): siRNA sense strand
ggagcaacuucgacaacaa

SEQ ID NO: 253164 - RNA, 19 nt, Homo sapiens
  misc_RNA (1)...(19): siRNA sense strand
ugaaaucuaugaccaggau

SEQ ID NO: 253165 - RNA, 19 nt, Homo sapiens
  misc_RNA (1)...(19): siRNA sense strand
gcugcacacuuucaacuug

SEQ ID NO: 253166 - RNA, 19 nt, Homo sapiens
  misc_RNA (1)...(19): siRNA sense strand
gaagaaacccaagauugau

SEQ ID NO: 253167 - RNA, 19 nt, Homo sapiens
  misc_RNA (1)...(19): siRNA sense strand
ccaaggaccugcucuucuc

SEQ ID NO: 253168 - RNA, 19 nt, Homo sapiens
  misc_RNA (1)...(19): siRNA sense strand
ggacgacgacuucuucaca

SEQ ID NO: 253169 - RNA, 19 nt, Homo sapiens
  misc_RNA (1)...(19): siRNA sense strand
caaguacuuugccuccauu

SEQ ID NO: 253170 - RNA, 19 nt, Homo sapiens
  misc_RNA (1)...(19): siRNA sense strand
agaagaagaagaagaagaa

SEQ ID NO: 253171 - RNA, 19 nt, Homo sapiens
  misc_RNA (1)...(19): siRNA sense strand
gauccacaauuauaagaag

SEQ ID NO: 253172 - RNA, 19 nt, Homo sapiens
  misc_RNA (1)...(19): siRNA sense strand
ggaaguccuuugacaucga

SEQ ID NO: 253173 - RNA, 19 nt, Homo sapiens
  misc_RNA (1)...(19): siRNA sense strand
ccacacauggcuacaauau

SEQ ID NO: 253174 - RNA, 19 nt, Homo sapiens
  misc_RNA (1)...(19): siRNA sense strand
gagaagaagaagaagaaga

SEQ ID NO: 253175 - RNA, 19 nt, Homo sapiens
  misc_RNA (1)...(19): siRNA sense strand
ucaacacccucgucaagug

SEQ ID NO: 253176 - RNA, 19 nt, Homo sapiens
  misc_RNA (1)...(19): siRNA sense strand
ggaggacgacgacuucuuc

SEQ ID NO: 253177 - RNA, 19 nt, Homo sapiens
  misc_RNA (1)...(19): siRNA sense strand
agaaggagaagaagaagaa

SEQ ID NO: 253178 - RNA, 19 nt, Homo sapiens
  misc_RNA (1)...(19): siRNA sense strand
gcaaugaccccaucaaugu

SEQ ID NO: 253179 - RNA, 19 nt, Homo sapiens
  misc_RNA (1)...(19): siRNA sense strand
caaugagaacgaugaguuu

SEQ ID NO: 253180 - RNA, 19 nt, Homo sapiens
  misc_RNA (1)...(19): siRNA sense strand
ccaucgagcuggaccugaa

SEQ ID NO: 253181 - RNA, 19 nt, Homo sapiens
  misc_RNA (1)...(19): siRNA sense strand
caagaaggaguccauguuc

SEQ ID NO: 253182 - RNA, 19 nt, Homo sapiens
  misc_RNA (1)...(19): siRNA sense strand
ccaagaaggaguccauguu

SEQ ID NO: 253183 - RNA, 19 nt, Homo sapiens
  misc_RNA (1)...(19): siRNA sense strand
gcccaucauugucauugaa

SEQ ID NO: 253184 - RNA, 19 nt, Homo sapiens
  misc_RNA (1)...(19): siRNA sense strand
aggacuggcugcacacuuu

SEQ ID NO: 253185 - RNA, 19 nt, Homo sapiens
  misc_RNA (1)...(19): siRNA sense strand
aagaagaaacccaagauug

SEQ ID NO: 253186 - RNA, 19 nt, Homo sapiens
  misc_RNA (1)...(19): siRNA sense strand
gagaagaagaaacccaaga

SEQ ID NO: 253187 - RNA, 19 nt, Homo sapiens
  misc_RNA (1)...(19): siRNA sense strand
cgucccugauccacaauua

SEQ ID NO: 253188 - RNA, 19 nt, Homo sapiens
  misc_RNA (1)...(19): siRNA sense strand
gcagcucaacccugucuuu

SEQ ID NO: 253189 - RNA, 19 nt, Homo sapiens
  misc_RNA (1)...(19): siRNA sense strand
ggacgauccgcccaucauu

SEQ ID NO: 253190 - RNA, 19 nt, Homo sapiens
  misc_RNA (1)...(19): siRNA sense strand
acacagacguccacuacca

SEQ ID NO: 253191 - RNA, 19 nt, Homo sapiens
  misc_RNA (1)...(19): siRNA sense strand
ggagaaguccagugacauc

SEQ ID NO: 253192 - RNA, 19 nt, Homo sapiens
  misc_RNA (1)...(19): siRNA sense strand
gccagaacuuccugcagaa

SEQ ID NO: 253193 - RNA, 19 nt, Homo sapiens
  misc_RNA (1)...(19): siRNA sense strand
ggacgccucuggacaucuc

SEQ ID NO: 253194 - RNA, 19 nt, Homo sapiens
  misc_RNA (1)...(19): siRNA sense strand
caagauugaugagcuuaag

SEQ ID NO: 253195 - RNA, 19 nt, Homo sapiens
  misc_RNA (1)...(19): siRNA sense strand
gaguggaggugcuguucug

SEQ ID NO: 253196 - RNA, 19 nt, Homo sapiens
  misc_RNA (1)...(19): siRNA sense strand
gggagguuguggugacuau

SEQ ID NO: 253197 - RNA, 19 nt, Homo sapiens
  misc_RNA (1)...(19): siRNA sense strand
gagcuggaguccgaguuug

SEQ ID NO: 253198 - RNA, 19 nt, Homo sapiens
  misc_RNA (1)...(19): siRNA sense strand
ggacagugcaggccaaggu

SEQ ID NO: 253199 - RNA, 19 nt, Homo sapiens
  misc_RNA (1)...(19): siRNA sense strand
cagaggaggcagagaagaa

SEQ ID NO: 253200 - RNA, 19 nt, Homo sapiens
  misc_RNA (1)...(19): siRNA sense strand
cagcagaggaggcagagaa

SEQ ID NO: 253201 - RNA, 19 nt, Homo sapiens
  misc_RNA (1)...(19): siRNA sense strand
ccaaguacuuugccuccau

SEQ ID NO: 253202 - RNA, 19 nt, Homo sapiens
  misc_RNA (1)...(19): siRNA sense strand
caaugaagggcaaggagaa

SEQ ID NO: 253203 - RNA, 19 nt, Homo sapiens
  misc_RNA (1)...(19): siRNA sense strand
caacuggcgcuaccuguuc

SEQ ID NO: 253204 - RNA, 19 nt, Homo sapiens
  misc_RNA (1)...(19): siRNA sense strand
agaacuacaucuccaagca

SEQ ID NO: 253205 - RNA, 19 nt, Homo sapiens
  misc_RNA (1)...(19): siRNA sense strand
ugacgguggcuguguauga

SEQ ID NO: 253206 - RNA, 19 nt, Homo sapiens
  misc_RNA (1)...(19): siRNA sense strand
agagguacccaucaagaaa

SEQ ID NO: 253207 - RNA, 19 nt, Homo sapiens
  misc_RNA (1)...(19): siRNA sense strand
gcgcaaagacagccaagca

SEQ ID NO: 253208 - RNA, 19 nt, Homo sapiens
  misc_RNA (1)...(19): siRNA sense strand
gggacgagaccgaguacaa

SEQ ID NO: 253209 - RNA, 19 nt, Homo sapiens
  misc_RNA (1)...(19): siRNA sense strand
aagaggagaagaagaagaa

SEQ ID NO: 253210 - RNA, 19 nt, Homo sapiens
  misc_RNA (1)...(19): siRNA sense strand
ucgacaaccuggagcucua

SEQ ID NO: 253211 - RNA, 19 nt, Homo sapiens
  misc_RNA (1)...(19): siRNA sense strand
gcacccugcugacaucaac

SEQ ID NO: 253212 - RNA, 19 nt, Homo sapiens
  misc_RNA (1)...(19): siRNA sense strand
cgacagcagcggacucuca

SEQ ID NO: 253213 - RNA, 19 nt, Homo sapiens
  misc_RNA (1)...(19): siRNA sense strand
aggcugagcugcauuuacu

SEQ ID NO: 253214 - RNA, 19 nt, Homo sapiens
  misc_RNA (1)...(19): siRNA sense strand
gagaaggagaagaagaaga

SEQ ID NO: 253215 - RNA, 19 nt, Homo sapiens
  misc_RNA (1)...(19): siRNA sense strand
gaggagaaggagaagaaga

SEQ ID NO: 253216 - RNA, 19 nt, Homo sapiens
  misc_RNA (1)...(19): siRNA sense strand
ccagagguacccaucaaga

SEQ ID NO: 253217 - RNA, 19 nt, Homo sapiens
  misc_RNA (1)...(19): siRNA sense strand
ggccuucggucgcuacaca

SEQ ID NO: 253218 - RNA, 19 nt, Homo sapiens
  misc_RNA (1)...(19): siRNA sense strand
ucccugauccacaauuaua

SEQ ID NO: 253219 - RNA, 19 nt, Homo sapiens
  misc_RNA (1)...(19): siRNA sense strand
aagaaggccugaacgacau

SEQ ID NO: 253220 - RNA, 19 nt, Homo sapiens
  misc_RNA (1)...(19): siRNA sense strand
aaguggaccucccagagaa

SEQ ID NO: 253221 - RNA, 19 nt, Homo sapiens
  misc_RNA (1)...(19): siRNA sense strand
cucggaagcccaagaagua

SEQ ID NO: 253222 - RNA, 19 nt, Homo sapiens
  misc_RNA (1)...(19): siRNA sense strand
ucacugggcccucugagau

SEQ ID NO: 253223 - RNA, 19 nt, Homo sapiens
  misc_RNA (1)...(19): siRNA sense strand
gaaggaggaaguggacaau

SEQ ID NO: 253224 - RNA, 19 nt, Homo sapiens
  misc_RNA (1)...(19): siRNA sense strand
gacgauccgcccaucauug

SEQ ID NO: 253225 - RNA, 19 nt, Homo sapiens
  misc_RNA (1)...(19): siRNA sense strand
gacgagaccgaguacaaga

SEQ ID NO: 253226 - RNA, 19 nt, Homo sapiens
  misc_RNA (1)...(19): siRNA sense strand
ggacgagaccgaguacaag

SEQ ID NO: 253227 - RNA, 19 nt, Homo sapiens
  misc_RNA (1)...(19): siRNA sense strand
cagagguacccaucaagaa

SEQ ID NO: 253228 - RNA, 19 nt, Homo sapiens
  misc_RNA (1)...(19): siRNA sense strand
aggccaagguggagcugua

SEQ ID NO: 253229 - RNA, 19 nt, Homo sapiens
  misc_RNA (1)...(19): siRNA sense strand
gcugagcugcauuuacuga

SEQ ID NO: 253230 - RNA, 19 nt, Homo sapiens
  misc_RNA (1)...(19): siRNA sense strand
ugaacgacauacaggagau

SEQ ID NO: 253231 - RNA, 19 nt, Homo sapiens
  misc_RNA (1)...(19): siRNA sense strand
cugcaaagacggcaaagug

SEQ ID NO: 253232 - RNA, 19 nt, Homo sapiens
  misc_RNA (1)...(19): siRNA sense strand
ccucuggaauugacuugga

SEQ ID NO: 253233 - RNA, 19 nt, Homo sapiens
  misc_RNA (1)...(19): siRNA sense strand
gacuauggagccagaggua

SEQ ID NO: 253234 - RNA, 19 nt, Homo sapiens
  misc_RNA (1)...(19): siRNA sense strand
cuucuccgcugacgacuuc

SEQ ID NO: 253235 - RNA, 19 nt, Homo sapiens
  misc_RNA (1)...(19): siRNA sense strand
cagcauucccgacaucuuc

SEQ ID NO: 253236 - RNA, 19 nt, Homo sapiens
  misc_RNA (1)...(19): siRNA sense strand
aggaggaaguggacaauac

SEQ ID NO: 253237 - RNA, 19 nt, Homo sapiens
  misc_RNA (1)...(19): siRNA sense strand
gagcaacuucgacaacaag

SEQ ID NO: 253238 - RNA, 19 nt, Homo sapiens
  misc_RNA (1)...(19): siRNA sense strand
ccaagaagcaggcguucca

SEQ ID NO: 253239 - RNA, 19 nt, Homo sapiens
  misc_RNA (1)...(19): siRNA sense strand
ugagaacgaugaguuugag

SEQ ID NO: 253240 - RNA, 19 nt, Homo sapiens
  misc_RNA (1)...(19): siRNA sense strand
cgccucaaguccugcauga

SEQ ID NO: 253241 - RNA, 19 nt, Homo sapiens
  misc_RNA (1)...(19): siRNA sense strand
agacugacauccgcgacaa

SEQ ID NO: 253242 - RNA, 19 nt, Homo sapiens
  misc_RNA (1)...(19): siRNA sense strand
gauugaugagcuuaaggua

SEQ ID NO: 253243 - RNA, 19 nt, Homo sapiens
  misc_RNA (1)...(19): siRNA sense strand
ugagggagcuggaaaacau

SEQ ID NO: 253244 - RNA, 19 nt, Homo sapiens
  misc_RNA (1)...(19): siRNA sense strand
ccauugacaccaugaagga

SEQ ID NO: 253245 - RNA, 19 nt, Homo sapiens
  misc_RNA (1)...(19): siRNA sense strand
gauccgcccaucauuguca

SEQ ID NO: 253246 - RNA, 19 nt, Homo sapiens
  misc_RNA (1)...(19): siRNA sense strand
guguccaucuucaagcaaa

SEQ ID NO: 253247 - RNA, 19 nt, Homo sapiens
  misc_RNA (1)...(19): siRNA sense strand
ggaggcugagcugcauuua

SEQ ID NO: 253248 - RNA, 19 nt, Homo sapiens
  misc_RNA (1)...(19): siRNA sense strand
gggcaaagcugacuucaug

SEQ ID NO: 253249 - RNA, 19 nt, Homo sapiens
  misc_RNA (1)...(19): siRNA sense strand
gcaaacagcgcaaggaguu

SEQ ID NO: 253250 - RNA, 19 nt, Homo sapiens
  misc_RNA (1)...(19): siRNA sense strand
uugaugagcuuaagguaua

SEQ ID NO: 253251 - RNA, 19 nt, Homo sapiens
  misc_RNA (1)...(19): siRNA sense strand
caacaagcgugucgccuau

SEQ ID NO: 253252 - RNA, 19 nt, Homo sapiens
  misc_RNA (1)...(19): siRNA sense strand
gaauugacuuggaggagaa

SEQ ID NO: 253253 - RNA, 19 nt, Homo sapiens
  misc_RNA (1)...(19): siRNA sense strand
ccaaagaggagaagaagaa

SEQ ID NO: 253254 - RNA, 19 nt, Homo sapiens
  misc_RNA (1)...(19): siRNA sense strand
gcaaugagaacgaugaguu

SEQ ID NO: 253255 - RNA, 19 nt, Homo sapiens
  misc_RNA (1)...(19): siRNA sense strand
caccucagcucgaguacua

SEQ ID NO: 253256 - RNA, 19 nt, Homo sapiens
  misc_RNA (1)...(19): siRNA sense strand
gaagaagaaacccaagauu

SEQ ID NO: 253257 - RNA, 19 nt, Homo sapiens
  misc_RNA (1)...(19): siRNA sense strand
acacauggcuacaauaucu

SEQ ID NO: 253258 - RNA, 19 nt, Homo sapiens
  misc_RNA (1)...(19): siRNA sense strand
gaaguggaccucccagaga

SEQ ID NO: 253259 - RNA, 19 nt, Homo sapiens
  misc_RNA (1)...(19): siRNA sense strand
agaagaaacccaagauuga

SEQ ID NO: 253260 - RNA, 19 nt, Homo sapiens
  misc_RNA (1)...(19): siRNA sense strand
gcacagcauucccgacauc

SEQ ID NO: 253261 - RNA, 19 nt, Homo sapiens
  misc_RNA (1)...(19): siRNA sense strand
ucaagaaacuggagaccau

SEQ ID NO: 253262 - RNA, 19 nt, Homo sapiens
  misc_RNA (1)...(19): siRNA sense strand
cagaugagguggucuugga

SEQ ID NO: 253263 - RNA, 19 nt, Homo sapiens
  misc_RNA (1)...(19): siRNA sense strand
ggagcaacuucgacaacaa

SEQ ID NO: 253264 - RNA, 19 nt, Homo sapiens
  misc_RNA (1)...(19): siRNA sense strand
ugaaaucuaugaccaggau

SEQ ID NO: 253265 - RNA, 19 nt, Homo sapiens
  misc_RNA (1)...(19): siRNA sense strand
gcugcacacuuucaacuug

SEQ ID NO: 253266 - RNA, 19 nt, Homo sapiens
  misc_RNA (1)...(19): siRNA sense strand
gaagaaacccaagauugau

SEQ ID NO: 253267 - RNA, 19 nt, Homo sapiens
  misc_RNA (1)...(19): siRNA sense strand
ccaaggaccugcucuucuc

SEQ ID NO: 253268 - RNA, 19 nt, Homo sapiens
  misc_RNA (1)...(19): siRNA sense strand
ggacgacgacuucuucaca

SEQ ID NO: 253269 - RNA, 19 nt, Homo sapiens
  misc_RNA (1)...(19): siRNA sense strand
caaguacuuugccuccauu

SEQ ID NO: 253270 - RNA, 19 nt, Homo sapiens
  misc_RNA (1)...(19): siRNA sense strand
agaagaagaagaagaagaa

SEQ ID NO: 253271 - RNA, 19 nt, Homo sapiens
  misc_RNA (1)...(19): siRNA sense strand
gauccacaauuauaagaag

SEQ ID NO: 253272 - RNA, 19 nt, Homo sapiens
  misc_RNA (1)...(19): siRNA sense strand
ggaaguccuuugacaucga

SEQ ID NO: 253273 - RNA, 19 nt, Homo sapiens
  misc_RNA (1)...(19): siRNA sense strand
ccacacauggcuacaauau

SEQ ID NO: 253274 - RNA, 19 nt, Homo sapiens
  misc_RNA (1)...(19): siRNA sense strand
gagaagaagaagaagaaga

SEQ ID NO: 253275 - RNA, 19 nt, Homo sapiens
  misc_RNA (1)...(19): siRNA sense strand
ucaacacccucgucaagug

SEQ ID NO: 253276 - RNA, 19 nt, Homo sapiens
  misc_RNA (1)...(19): siRNA sense strand
ggaggacgacgacuucuuc

SEQ ID NO: 253277 - RNA, 19 nt, Homo sapiens
  misc_RNA (1)...(19): siRNA sense strand
agaaggagaagaagaagaa

SEQ ID NO: 253278 - RNA, 19 nt, Homo sapiens
  misc_RNA (1)...(19): siRNA sense strand
gcaaugaccccaucaaugu

SEQ ID NO: 253279 - RNA, 19 nt, Homo sapiens
  misc_RNA (1)...(19): siRNA sense strand
caaugagaacgaugaguuu

SEQ ID NO: 253280 - RNA, 19 nt, Homo sapiens
  misc_RNA (1)...(19): siRNA sense strand
ccaucgagcuggaccugaa

SEQ ID NO: 253281 - RNA, 19 nt, Homo sapiens
  misc_RNA (1)...(19): siRNA sense strand
caagaaggaguccauguuc

SEQ ID NO: 253282 - RNA, 19 nt, Homo sapiens
  misc_RNA (1)...(19): siRNA sense strand
ccaagaaggaguccauguu

SEQ ID NO: 253283 - RNA, 19 nt, Homo sapiens
  misc_RNA (1)...(19): siRNA sense strand
gcccaucauugucauugaa

SEQ ID NO: 253284 - RNA, 19 nt, Homo sapiens
  misc_RNA (1)...(19): siRNA sense strand
aggacuggcugcacacuuu

SEQ ID NO: 253285 - RNA, 19 nt, Homo sapiens
  misc_RNA (1)...(19): siRNA sense strand
aagaagaaacccaagauug

SEQ ID NO: 253286 - RNA, 19 nt, Homo sapiens
  misc_RNA (1)...(19): siRNA sense strand
gagaagaagaaacccaaga

SEQ ID NO: 253287 - RNA, 19 nt, Homo sapiens
  misc_RNA (1)...(19): siRNA sense strand
cgucccugauccacaauua

SEQ ID NO: 253288 - RNA, 19 nt, Homo sapiens
  misc_RNA (1)...(19): siRNA sense strand
gcagcucaacccugucuuu

SEQ ID NO: 253289 - RNA, 19 nt, Homo sapiens
  misc_RNA (1)...(19): siRNA sense strand
ggacgauccgcccaucauu

SEQ ID NO: 253290 - RNA, 19 nt, Homo sapiens
  misc_RNA (1)...(19): siRNA sense strand
acacagacguccacuacca

SEQ ID NO: 253291 - RNA, 19 nt, Homo sapiens
  misc_RNA (1)...(19): siRNA sense strand
ggagaaguccagugacauc

SEQ ID NO: 253292 - RNA, 19 nt, Homo sapiens
  misc_RNA (1)...(19): siRNA sense strand
gccagaacuuccugcagaa

SEQ ID NO: 253293 - RNA, 19 nt, Homo sapiens
  misc_RNA (1)...(19): siRNA sense strand
ggacgccucuggacaucuc

SEQ ID NO: 253294 - RNA, 19 nt, Homo sapiens
  misc_RNA (1)...(19): siRNA sense strand
caagauugaugagcuuaag

SEQ ID NO: 253295 - RNA, 19 nt, Homo sapiens
  misc_RNA (1)...(19): siRNA sense strand
gaguggaggugcuguucug

SEQ ID NO: 253296 - RNA, 19 nt, Homo sapiens
  misc_RNA (1)...(19): siRNA sense strand
gggagguuguggugacuau

SEQ ID NO: 253297 - RNA, 19 nt, Homo sapiens
  misc_RNA (1)...(19): siRNA sense strand
gagcuggaguccgaguuug

SEQ ID NO: 253298 - RNA, 19 nt, Homo sapiens
  misc_RNA (1)...(19): siRNA sense strand
ggacagugcaggccaaggu

SEQ ID NO: 253299 - RNA, 19 nt, Homo sapiens
  misc_RNA (1)...(19): siRNA sense strand
cagaggaggcagagaagaa

SEQ ID NO: 253300 - RNA, 19 nt, Homo sapiens
  misc_RNA (1)...(19): siRNA sense strand
cagcagaggaggcagagaa

SEQ ID NO: 253301 - RNA, 19 nt, Homo sapiens
  misc_RNA (1)...(19): siRNA sense strand
ccaaguacuuugccuccau

SEQ ID NO: 253302 - RNA, 19 nt, Homo sapiens
  misc_RNA (1)...(19): siRNA sense strand
caaugaagggcaaggagaa

SEQ ID NO: 253303 - RNA, 19 nt, Homo sapiens
  misc_RNA (1)...(19): siRNA sense strand
caacuggcgcuaccuguuc

SEQ ID NO: 253304 - RNA, 19 nt, Homo sapiens
  misc_RNA (1)...(19): siRNA sense strand
agaacuacaucuccaagca

SEQ ID NO: 253305 - RNA, 19 nt, Homo sapiens
  misc_RNA (1)...(19): siRNA sense strand
ugacgguggcuguguauga

SEQ ID NO: 253306 - RNA, 19 nt, Homo sapiens
  misc_RNA (1)...(19): siRNA sense strand
agagguacccaucaagaaa

SEQ ID NO: 253307 - RNA, 19 nt, Homo sapiens
  misc_RNA (1)...(19): siRNA sense strand
gcgcaaagacagccaagca

SEQ ID NO: 253308 - RNA, 19 nt, Homo sapiens
  misc_RNA (1)...(19): siRNA sense strand
gggacgagaccgaguacaa

SEQ ID NO: 253309 - RNA, 19 nt, Homo sapiens
  misc_RNA (1)...(19): siRNA sense strand
aagaggagaagaagaagaa

SEQ ID NO: 253310 - RNA, 19 nt, Homo sapiens
  misc_RNA (1)...(19): siRNA sense strand
ucgacaaccuggagcucua

SEQ ID NO: 253311 - RNA, 19 nt, Homo sapiens
  misc_RNA (1)...(19): siRNA sense strand
gcacccugcugacaucaac

SEQ ID NO: 253312 - RNA, 19 nt, Homo sapiens
  misc_RNA (1)...(19): siRNA sense strand
cgacagcagcggacucuca

SEQ ID NO: 253313 - RNA, 19 nt, Homo sapiens
  misc_RNA (1)...(19): siRNA sense strand
aggcugagcugcauuuacu

SEQ ID NO: 253314 - RNA, 19 nt, Homo sapiens
  misc_RNA (1)...(19): siRNA sense strand
gagaaggagaagaagaaga

SEQ ID NO: 253315 - RNA, 19 nt, Homo sapiens
  misc_RNA (1)...(19): siRNA sense strand
gaggagaaggagaagaaga

SEQ ID NO: 253316 - RNA, 19 nt, Homo sapiens
  misc_RNA (1)...(19): siRNA sense strand
ccagagguacccaucaaga

SEQ ID NO: 253317 - RNA, 19 nt, Homo sapiens
  misc_RNA (1)...(19): siRNA sense strand
ggccuucggucgcuacaca

SEQ ID NO: 253318 - RNA, 19 nt, Homo sapiens
  misc_RNA (1)...(19): siRNA sense strand
ucccugauccacaauuaua

SEQ ID NO: 253319 - RNA, 19 nt, Homo sapiens
  misc_RNA (1)...(19): siRNA sense strand
aagaaggccugaacgacau

SEQ ID NO: 253320 - RNA, 19 nt, Homo sapiens
  misc_RNA (1)...(19): siRNA sense strand
aaguggaccucccagagaa

SEQ ID NO: 253321 - RNA, 19 nt, Homo sapiens
  misc_RNA (1)...(19): siRNA sense strand
cucggaagcccaagaagua

SEQ ID NO: 253322 - RNA, 19 nt, Homo sapiens
  misc_RNA (1)...(19): siRNA sense strand
ucacugggcccucugagau

SEQ ID NO: 253323 - RNA, 19 nt, Homo sapiens
  misc_RNA (1)...(19): siRNA sense strand
gaaggaggaaguggacaau

SEQ ID NO: 253324 - RNA, 19 nt, Homo sapiens
  misc_RNA (1)...(19): siRNA sense strand
gacgauccgcccaucauug

SEQ ID NO: 253325 - RNA, 19 nt, Homo sapiens
  misc_RNA (1)...(19): siRNA sense strand
gacgagaccgaguacaaga

SEQ ID NO: 253326 - RNA, 19 nt, Homo sapiens
  misc_RNA (1)...(19): siRNA sense strand
ggacgagaccgaguacaag

SEQ ID NO: 253327 - RNA, 19 nt, Homo sapiens
  misc_RNA (1)...(19): siRNA sense strand
cagagguacccaucaagaa

SEQ ID NO: 253328 - RNA, 19 nt, Homo sapiens
  misc_RNA (1)...(19): siRNA sense strand
aggccaagguggagcugua

SEQ ID NO: 253329 - RNA, 19 nt, Homo sapiens
  misc_RNA (1)...(19): siRNA sense strand
gcugagcugcauuuacuga

SEQ ID NO: 253330 - RNA, 19 nt, Homo sapiens
  misc_RNA (1)...(19): siRNA sense strand
ugaacgacauacaggagau

SEQ ID NO: 253331 - RNA, 19 nt, Homo sapiens
  misc_RNA (1)...(19): siRNA sense strand
cugcaaagacggcaaagug

SEQ ID NO: 253332 - RNA, 19 nt, Homo sapiens
  misc_RNA (1)...(19): siRNA sense strand
ccucuggaauugacuugga

SEQ ID NO: 253333 - RNA, 19 nt, Homo sapiens
  misc_RNA (1)...(19): siRNA sense strand
gacuauggagccagaggua

SEQ ID NO: 253334 - RNA, 19 nt, Homo sapiens
  misc_RNA (1)...(19): siRNA sense strand
cuucuccgcugacgacuuc

SEQ ID NO: 253335 - RNA, 19 nt, Homo sapiens
  misc_RNA (1)...(19): siRNA sense strand
cagcauucccgacaucuuc

SEQ ID NO: 253336 - RNA, 19 nt, Homo sapiens
  misc_RNA (1)...(19): siRNA sense strand
aggaggaaguggacaauac

SEQ ID NO: 253337 - RNA, 19 nt, Homo sapiens
  misc_RNA (1)...(19): siRNA sense strand
gagcaacuucgacaacaag

SEQ ID NO: 253338 - RNA, 19 nt, Homo sapiens
  misc_RNA (1)...(19): siRNA sense strand
ccaagaagcaggcguucca

SEQ ID NO: 253339 - RNA, 19 nt, Homo sapiens
  misc_RNA (1)...(19): siRNA sense strand
ugagaacgaugaguuugag

SEQ ID NO: 253340 - RNA, 19 nt, Homo sapiens
  misc_RNA (1)...(19): siRNA sense strand
cgccucaaguccugcauga

SEQ ID NO: 253341 - RNA, 19 nt, Homo sapiens
  misc_RNA (1)...(19): siRNA sense strand
agacugacauccgcgacaa

SEQ ID NO: 253342 - RNA, 19 nt, Homo sapiens
  misc_RNA (1)...(19): siRNA sense strand
gauugaugagcuuaaggua

SEQ ID NO: 253343 - RNA, 19 nt, Homo sapiens
  misc_RNA (1)...(19): siRNA sense strand
ugagggagcuggaaaacau

SEQ ID NO: 253344 - RNA, 19 nt, Homo sapiens
  misc_RNA (1)...(19): siRNA sense strand
ccauugacaccaugaagga

SEQ ID NO: 253345 - RNA, 19 nt, Homo sapiens
  misc_RNA (1)...(19): siRNA sense strand
gauccgcccaucauuguca

SEQ ID NO: 253346 - RNA, 19 nt, Homo sapiens
  misc_RNA (1)...(19): siRNA sense strand
guguccaucuucaagcaaa

SEQ ID NO: 253347 - RNA, 19 nt, Homo sapiens
  misc_RNA (1)...(19): siRNA sense strand
ggaggcugagcugcauuua

SEQ ID NO: 253348 - RNA, 19 nt, Homo sapiens
  misc_RNA (1)...(19): siRNA sense strand
gggcaaagcugacuucaug

SEQ ID NO: 253349 - RNA, 19 nt, Homo sapiens
  misc_RNA (1)...(19): siRNA sense strand
gcaaacagcgcaaggaguu

SEQ ID NO: 253350 - RNA, 19 nt, Homo sapiens
  misc_RNA (1)...(19): siRNA sense strand
uugaugagcuuaagguaua

SEQ ID NO: 253351 - RNA, 19 nt, Homo sapiens
  misc_RNA (1)...(19): siRNA sense strand
caacaagcgugucgccuau

SEQ ID NO: 253352 - RNA, 19 nt, Homo sapiens
  misc_RNA (1)...(19): siRNA sense strand
gaauugacuuggaggagaa

SEQ ID NO: 253353 - RNA, 19 nt, Homo sapiens
  misc_RNA (1)...(19): siRNA sense strand
ccaaagaggagaagaagaa

SEQ ID NO: 253354 - RNA, 19 nt, Homo sapiens
  misc_RNA (1)...(19): siRNA sense strand
gcaaugagaacgaugaguu

SEQ ID NO: 253355 - RNA, 19 nt, Homo sapiens
  misc_RNA (1)...(19): siRNA sense strand
caccucagcucgaguacua

SEQ ID NO: 253356 - RNA, 19 nt, Homo sapiens
  misc_RNA (1)...(19): siRNA sense strand
gaagaagaaacccaagauu

SEQ ID NO: 253357 - RNA, 19 nt, Homo sapiens
  misc_RNA (1)...(19): siRNA sense strand
acacauggcuacaauaucu

SEQ ID NO: 253358 - RNA, 19 nt, Homo sapiens
  misc_RNA (1)...(19): siRNA sense strand
acaaguggcucaucaucaa

SEQ ID NO: 253359 - RNA, 19 nt, Homo sapiens
  misc_RNA (1)...(19): siRNA sense strand
gaaguggaccucccagaga

SEQ ID NO: 253360 - RNA, 19 nt, Homo sapiens
  misc_RNA (1)...(19): siRNA sense strand
agaagaaacccaagauuga

SEQ ID NO: 253361 - RNA, 19 nt, Homo sapiens
  misc_RNA (1)...(19): siRNA sense strand
gcacagcauucccgacauc

SEQ ID NO: 253362 - RNA, 19 nt, Homo sapiens
  misc_RNA (1)...(19): siRNA sense strand
ucaagaaacuggagaccau

SEQ ID NO: 253363 - RNA, 19 nt, Homo sapiens
  misc_RNA (1)...(19): siRNA sense strand
cagaugagguggucuugga

SEQ ID NO: 253364 - RNA, 19 nt, Homo sapiens
  misc_RNA (1)...(19): siRNA sense strand
ggagcaacuucgacaacaa

SEQ ID NO: 253365 - RNA, 19 nt, Homo sapiens
  misc_RNA (1)...(19): siRNA sense strand
ugaaaucuaugaccaggau

SEQ ID NO: 253366 - RNA, 19 nt, Homo sapiens
  misc_RNA (1)...(19): siRNA sense strand
gcugcacacuuucaacuug

SEQ ID NO: 253367 - RNA, 19 nt, Homo sapiens
  misc_RNA (1)...(19): siRNA sense strand
gaagaaacccaagauugau

SEQ ID NO: 253368 - RNA, 19 nt, Homo sapiens
  misc_RNA (1)...(19): siRNA sense strand
ccaaggaccugcucuucuc

SEQ ID NO: 253369 - RNA, 19 nt, Homo sapiens
  misc_RNA (1)...(19): siRNA sense strand
ggacgacgacuucuucaca

SEQ ID NO: 253370 - RNA, 19 nt, Homo sapiens
  misc_RNA (1)...(19): siRNA sense strand
caaguacuuugccuccauu

SEQ ID NO: 253371 - RNA, 19 nt, Homo sapiens
  misc_RNA (1)...(19): siRNA sense strand
agaagaagaagaagaagaa

SEQ ID NO: 253372 - RNA, 19 nt, Homo sapiens
  misc_RNA (1)...(19): siRNA sense strand
gauccacaauuauaagaag

SEQ ID NO: 253373 - RNA, 19 nt, Homo sapiens
  misc_RNA (1)...(19): siRNA sense strand
ggaaguccuuugacaucga

SEQ ID NO: 253374 - RNA, 19 nt, Homo sapiens
  misc_RNA (1)...(19): siRNA sense strand
ccacacauggcuacaauau

SEQ ID NO: 253375 - RNA, 19 nt, Homo sapiens
  misc_RNA (1)...(19): siRNA sense strand
gagaagaagaagaagaaga

SEQ ID NO: 253376 - RNA, 19 nt, Homo sapiens
  misc_RNA (1)...(19): siRNA sense strand
ucaacacccucgucaagug

SEQ ID NO: 253377 - RNA, 19 nt, Homo sapiens
  misc_RNA (1)...(19): siRNA sense strand
ggaggacgacgacuucuuc

SEQ ID NO: 253378 - RNA, 19 nt, Homo sapiens
  misc_RNA (1)...(19): siRNA sense strand
agaaggagaagaagaagaa

SEQ ID NO: 253379 - RNA, 19 nt, Homo sapiens
  misc_RNA (1)...(19): siRNA sense strand
gcaaugaccccaucaaugu

SEQ ID NO: 253380 - RNA, 19 nt, Homo sapiens
  misc_RNA (1)...(19): siRNA sense strand
caaugagaacgaugaguuu

SEQ ID NO: 253381 - RNA, 19 nt, Homo sapiens
  misc_RNA (1)...(19): siRNA sense strand
ccaucgagcuggaccugaa

SEQ ID NO: 253382 - RNA, 19 nt, Homo sapiens
  misc_RNA (1)...(19): siRNA sense strand
caagaaggaguccauguuc

SEQ ID NO: 253383 - RNA, 19 nt, Homo sapiens
  misc_RNA (1)...(19): siRNA sense strand
ccaagaaggaguccauguu

SEQ ID NO: 253384 - RNA, 19 nt, Homo sapiens
  misc_RNA (1)...(19): siRNA sense strand
gcccaucauugucauugaa

SEQ ID NO: 253385 - RNA, 19 nt, Homo sapiens
  misc_RNA (1)...(19): siRNA sense strand
aggacuggcugcacacuuu

SEQ ID NO: 253386 - RNA, 19 nt, Homo sapiens
  misc_RNA (1)...(19): siRNA sense strand
aagaagaaacccaagauug

SEQ ID NO: 253387 - RNA, 19 nt, Homo sapiens
  misc_RNA (1)...(19): siRNA sense strand
gagaagaagaaacccaaga

SEQ ID NO: 253388 - RNA, 19 nt, Homo sapiens
  misc_RNA (1)...(19): siRNA sense strand
cgucccugauccacaauua

SEQ ID NO: 253389 - RNA, 19 nt, Homo sapiens
  misc_RNA (1)...(19): siRNA sense strand
gcagcucaacccugucuuu

SEQ ID NO: 253390 - RNA, 19 nt, Homo sapiens
  misc_RNA (1)...(19): siRNA sense strand
ggacgauccgcccaucauu

SEQ ID NO: 253391 - RNA, 19 nt, Homo sapiens
  misc_RNA (1)...(19): siRNA sense strand
acacagacguccacuacca

SEQ ID NO: 253392 - RNA, 19 nt, Homo sapiens
  misc_RNA (1)...(19): siRNA sense strand
ggagaaguccagugacauc

SEQ ID NO: 253393 - RNA, 19 nt, Homo sapiens
  misc_RNA (1)...(19): siRNA sense strand
gaguggaggugcuguucug

SEQ ID NO: 253394 - RNA, 19 nt, Homo sapiens
  misc_RNA (1)...(19): siRNA sense strand
ggacgccucuggacaucuc

SEQ ID NO: 253395 - RNA, 19 nt, Homo sapiens
  misc_RNA (1)...(19): siRNA sense strand
gccagaacuuccugcagaa

SEQ ID NO: 253396 - RNA, 19 nt, Homo sapiens
  misc_RNA (1)...(19): siRNA sense strand
caagauugaugagcuuaag

SEQ ID NO: 253397 - RNA, 19 nt, Homo sapiens
  misc_RNA (1)...(19): siRNA sense strand
gggagguuguggugacuau

SEQ ID NO: 253398 - RNA, 19 nt, Homo sapiens
  misc_RNA (1)...(19): siRNA sense strand
gagcuggaguccgaguuug

SEQ ID NO: 253399 - RNA, 19 nt, Homo sapiens
  misc_RNA (1)...(19): siRNA sense strand
ggacagugcaggccaaggu

SEQ ID NO: 253400 - RNA, 19 nt, Homo sapiens
  misc_RNA (1)...(19): siRNA sense strand
cagaggaggcagagaagaa

SEQ ID NO: 253401 - RNA, 19 nt, Homo sapiens
  misc_RNA (1)...(19): siRNA sense strand
cagcagaggaggcagagaa

SEQ ID NO: 253402 - RNA, 19 nt, Homo sapiens
  misc_RNA (1)...(19): siRNA sense strand
ccaaguacuuugccuccau

SEQ ID NO: 253403 - RNA, 19 nt, Homo sapiens
  misc_RNA (1)...(19): siRNA sense strand
caaugaagggcaaggagaa

SEQ ID NO: 253404 - RNA, 19 nt, Homo sapiens
  misc_RNA (1)...(19): siRNA sense strand
caacuggcgcuaccuguuc

SEQ ID NO: 253405 - RNA, 19 nt, Homo sapiens
  misc_RNA (1)...(19): siRNA sense strand
agaacuacaucuccaagca

SEQ ID NO: 253406 - RNA, 19 nt, Homo sapiens
  misc_RNA (1)...(19): siRNA sense strand
ugacgguggcuguguauga

SEQ ID NO: 253407 - RNA, 19 nt, Homo sapiens
  misc_RNA (1)...(19): siRNA sense strand
agagguacccaucaagaaa

SEQ ID NO: 253408 - RNA, 19 nt, Homo sapiens
  misc_RNA (1)...(19): siRNA sense strand
gcgcaaagacagccaagca

SEQ ID NO: 253409 - RNA, 19 nt, Homo sapiens
  misc_RNA (1)...(19): siRNA sense strand
gggacgagaccgaguacaa

SEQ ID NO: 253410 - RNA, 19 nt, Homo sapiens
  misc_RNA (1)...(19): siRNA sense strand
aagaggagaagaagaagaa

SEQ ID NO: 253411 - RNA, 19 nt, Homo sapiens
  misc_RNA (1)...(19): siRNA sense strand
ucgacaaccuggagcucua

SEQ ID NO: 253412 - RNA, 19 nt, Homo sapiens
  misc_RNA (1)...(19): siRNA sense strand
gcacccugcugacaucaac

SEQ ID NO: 253413 - RNA, 19 nt, Homo sapiens
  misc_RNA (1)...(19): siRNA sense strand
cgacagcagcggacucuca

SEQ ID NO: 253414 - RNA, 19 nt, Homo sapiens
  misc_RNA (1)...(19): siRNA sense strand
aggcugagcugcauuuacu

SEQ ID NO: 253415 - RNA, 19 nt, Homo sapiens
  misc_RNA (1)...(19): siRNA sense strand
gagaaggagaagaagaaga

SEQ ID NO: 253416 - RNA, 19 nt, Homo sapiens
  misc_RNA (1)...(19): siRNA sense strand
gaggagaaggagaagaaga

SEQ ID NO: 253417 - RNA, 19 nt, Homo sapiens
  misc_RNA (1)...(19): siRNA sense strand
ccagagguacccaucaaga

SEQ ID NO: 253418 - RNA, 19 nt, Homo sapiens
  misc_RNA (1)...(19): siRNA sense strand
ggccuucggucgcuacaca

SEQ ID NO: 253419 - RNA, 19 nt, Homo sapiens
  misc_RNA (1)...(19): siRNA sense strand
ucccugauccacaauuaua

SEQ ID NO: 253420 - RNA, 19 nt, Homo sapiens
  misc_RNA (1)...(19): siRNA sense strand
aaguggaccucccagagaa

SEQ ID NO: 253421 - RNA, 19 nt, Homo sapiens
  misc_RNA (1)...(19): siRNA sense strand
guacaaguggcucaucauc

SEQ ID NO: 253422 - RNA, 19 nt, Homo sapiens
  misc_RNA (1)...(19): siRNA sense strand
cucggaagcccaagaagua

SEQ ID NO: 253423 - RNA, 19 nt, Homo sapiens
  misc_RNA (1)...(19): siRNA sense strand
ucacugggcccucugagau

SEQ ID NO: 253424 - RNA, 19 nt, Homo sapiens
  misc_RNA (1)...(19): siRNA sense strand
gaaggaggaaguggacaau

SEQ ID NO: 253425 - RNA, 19 nt, Homo sapiens
  misc_RNA (1)...(19): siRNA sense strand
gacgauccgcccaucauug

SEQ ID NO: 253426 - RNA, 19 nt, Homo sapiens
  misc_RNA (1)...(19): siRNA sense strand
gacgagaccgaguacaaga

SEQ ID NO: 253427 - RNA, 19 nt, Homo sapiens
  misc_RNA (1)...(19): siRNA sense strand
ggacgagaccgaguacaag

SEQ ID NO: 253428 - RNA, 19 nt, Homo sapiens
  misc_RNA (1)...(19): siRNA sense strand
cagagguacccaucaagaa

SEQ ID NO: 253429 - RNA, 19 nt, Homo sapiens
  misc_RNA (1)...(19): siRNA sense strand
aggccaagguggagcugua

SEQ ID NO: 253430 - RNA, 19 nt, Homo sapiens
  misc_RNA (1)...(19): siRNA sense strand
gcugagcugcauuuacuga

SEQ ID NO: 253431 - RNA, 19 nt, Homo sapiens
  misc_RNA (1)...(19): siRNA sense strand
cugcaaagacggcaaagug

SEQ ID NO: 253432 - RNA, 19 nt, Homo sapiens
  misc_RNA (1)...(19): siRNA sense strand
ccucuggaauugacuugga

SEQ ID NO: 253433 - RNA, 19 nt, Homo sapiens
  misc_RNA (1)...(19): siRNA sense strand
gacuauggagccagaggua

SEQ ID NO: 253434 - RNA, 19 nt, Homo sapiens
  misc_RNA (1)...(19): siRNA sense strand
cuucuccgcugacgacuuc

SEQ ID NO: 253435 - RNA, 19 nt, Homo sapiens
  misc_RNA (1)...(19): siRNA sense strand
cagcauucccgacaucuuc

SEQ ID NO: 253436 - RNA, 19 nt, Homo sapiens
  misc_RNA (1)...(19): siRNA sense strand
aggaggaaguggacaauac

SEQ ID NO: 253437 - RNA, 19 nt, Homo sapiens
  misc_RNA (1)...(19): siRNA sense strand
gagcaacuucgacaacaag

SEQ ID NO: 253438 - RNA, 19 nt, Homo sapiens
  misc_RNA (1)...(19): siRNA sense strand
gauccgcccaucauuguca

SEQ ID NO: 253439 - RNA, 19 nt, Homo sapiens
  misc_RNA (1)...(19): siRNA sense strand
ugagaacgaugaguuugag

SEQ ID NO: 253440 - RNA, 19 nt, Homo sapiens
  misc_RNA (1)...(19): siRNA sense strand
ccaagaagcaggcguucca

SEQ ID NO: 253441 - RNA, 19 nt, Homo sapiens
  misc_RNA (1)...(19): siRNA sense strand
agacugacauccgcgacaa

SEQ ID NO: 253442 - RNA, 19 nt, Homo sapiens
  misc_RNA (1)...(19): siRNA sense strand
ugagggagcuggaaaacau

SEQ ID NO: 253443 - RNA, 19 nt, Homo sapiens
  misc_RNA (1)...(19): siRNA sense strand
gauugaugagcuuaaggua

SEQ ID NO: 253444 - RNA, 19 nt, Homo sapiens
  misc_RNA (1)...(19): siRNA sense strand
cgccucaaguccugcauga

SEQ ID NO: 253445 - RNA, 19 nt, Homo sapiens
  misc_RNA (1)...(19): siRNA sense strand
ccauugacaccaugaagga

SEQ ID NO: 253446 - RNA, 19 nt, Homo sapiens
  misc_RNA (1)...(19): siRNA sense strand
guguccaucuucaagcaaa

SEQ ID NO: 253447 - RNA, 19 nt, Homo sapiens
  misc_RNA (1)...(19): siRNA sense strand
ggaggcugagcugcauuua

SEQ ID NO: 253448 - RNA, 19 nt, Homo sapiens
  misc_RNA (1)...(19): siRNA sense strand
gcucauaacugacaagaug

SEQ ID NO: 253449 - RNA, 19 nt, Homo sapiens
  misc_RNA (1)...(19): siRNA sense strand
ucaaggacaugaagacuaa

SEQ ID NO: 253450 - RNA, 19 nt, Homo sapiens
  misc_RNA (1)...(19): siRNA sense strand
gaaccacuccucacagaua

SEQ ID NO: 253451 - RNA, 19 nt, Homo sapiens
  misc_RNA (1)...(19): siRNA sense strand
ccacagagcugaaauccau

SEQ ID NO: 253452 - RNA, 19 nt, Homo sapiens
  misc_RNA (1)...(19): siRNA sense strand
ggaauaaggucaaggacau

SEQ ID NO: 253453 - RNA, 19 nt, Homo sapiens
  misc_RNA (1)...(19): siRNA sense strand
gaaggacacugcacagauc

SEQ ID NO: 253454 - RNA, 19 nt, Homo sapiens
  misc_RNA (1)...(19): siRNA sense strand
gauaggcucucucaucuuc

SEQ ID NO: 253455 - RNA, 19 nt, Homo sapiens
  misc_RNA (1)...(19): siRNA sense strand
caagcaggaugacaaguuu

SEQ ID NO: 253456 - RNA, 19 nt, Homo sapiens
  misc_RNA (1)...(19): siRNA sense strand
ccucacagauaaggaauaa

SEQ ID NO: 253457 - RNA, 19 nt, Homo sapiens
  misc_RNA (1)...(19): siRNA sense strand
gcaguuuccugacaugcuu

SEQ ID NO: 253458 - RNA, 19 nt, Homo sapiens
  misc_RNA (1)...(19): siRNA sense strand
ugaaauccaugacgaucuu

SEQ ID NO: 253459 - RNA, 19 nt, Homo sapiens
  misc_RNA (1)...(19): siRNA sense strand
caaugaguuugacuuggua

SEQ ID NO: 253460 - RNA, 19 nt, Homo sapiens
  misc_RNA (1)...(19): siRNA sense strand
gaugagcugugugugguuu

SEQ ID NO: 253461 - RNA, 19 nt, Homo sapiens
  misc_RNA (1)...(19): siRNA sense strand
ccgcaagugugaacaagaa

SEQ ID NO: 253462 - RNA, 19 nt, Homo sapiens
  misc_RNA (1)...(19): siRNA sense strand
gagaggagaacuucaagga

SEQ ID NO: 253463 - RNA, 19 nt, Homo sapiens
  misc_RNA (1)...(19): siRNA sense strand
gcauuucuuuggccacuga

SEQ ID NO: 253464 - RNA, 19 nt, Homo sapiens
  misc_RNA (1)...(19): siRNA sense strand
gagaugcuguuacgcagau

SEQ ID NO: 253465 - RNA, 19 nt, Homo sapiens
  misc_RNA (1)...(19): siRNA sense strand
gcuuucaccuguauuuguu

SEQ ID NO: 253466 - RNA, 19 nt, Homo sapiens
  misc_RNA (1)...(19): siRNA sense strand
gcauggagacgaagaagga

SEQ ID NO: 253467 - RNA, 19 nt, Homo sapiens
  misc_RNA (1)...(19): siRNA sense strand
gcagcugaaucugaccaua

SEQ ID NO: 253468 - RNA, 19 nt, Homo sapiens
  misc_RNA (1)...(19): siRNA sense strand
ggacagccuucaugaacag

SEQ ID NO: 253469 - RNA, 19 nt, Homo sapiens
  misc_RNA (1)...(19): siRNA sense strand
ucaccuguauuuguucuuu

SEQ ID NO: 253470 - RNA, 19 nt, Homo sapiens
  misc_RNA (1)...(19): siRNA sense strand
gaccauuccuucaaaucug

SEQ ID NO: 253471 - RNA, 19 nt, Homo sapiens
  misc_RNA (1)...(19): siRNA sense strand
cuaguagcccucaccuuua

SEQ ID NO: 253472 - RNA, 19 nt, Homo sapiens
  misc_RNA (1)...(19): siRNA sense strand
ggacaugaagacuaaggaa

SEQ ID NO: 253473 - RNA, 19 nt, Homo sapiens
  misc_RNA (1)...(19): siRNA sense strand
cauguuugcugaccacuuc

SEQ ID NO: 253474 - RNA, 19 nt, Homo sapiens
  misc_RNA (1)...(19): siRNA sense strand
uaguagcccucaccuuuau

SEQ ID NO: 253475 - RNA, 19 nt, Homo sapiens
  misc_RNA (1)...(19): siRNA sense strand
gaaccagcaugagguagca

SEQ ID NO: 253476 - RNA, 19 nt, Homo sapiens
  misc_RNA (1)...(19): siRNA sense strand
ccaagcaggaugacaaguu

SEQ ID NO: 253477 - RNA, 19 nt, Homo sapiens
  misc_RNA (1)...(19): siRNA sense strand
gggacagccuucaugaaca

SEQ ID NO: 253478 - RNA, 19 nt, Homo sapiens
  misc_RNA (1)...(19): siRNA sense strand
ccgauaggcucucucaucu

SEQ ID NO: 253479 - RNA, 19 nt, Homo sapiens
  misc_RNA (1)...(19): siRNA sense strand
gaucuauccugacgcuaag

SEQ ID NO: 253480 - RNA, 19 nt, Homo sapiens
  misc_RNA (1)...(19): siRNA sense strand
acagacacaugccaagaug

SEQ ID NO: 253481 - RNA, 19 nt, Homo sapiens
  misc_RNA (1)...(19): siRNA sense strand
gauaaggaauaaggucaag

SEQ ID NO: 253482 - RNA, 19 nt, Homo sapiens
  misc_RNA (1)...(19): siRNA sense strand
agacucaaguggccacguu

SEQ ID NO: 253483 - RNA, 19 nt, Homo sapiens
  misc_RNA (1)...(19): siRNA sense strand
cuaaggaaacaucaucuga

SEQ ID NO: 253484 - RNA, 19 nt, Homo sapiens
  misc_RNA (1)...(19): siRNA sense strand
gacaugaagacuaaggaaa

SEQ ID NO: 253485 - RNA, 19 nt, Homo sapiens
  misc_RNA (1)...(19): siRNA sense strand
ugaaagggaaggugaagga

SEQ ID NO: 253486 - RNA, 19 nt, Homo sapiens
  misc_RNA (1)...(19): siRNA sense strand
ccagaagcccuauugcaau

SEQ ID NO: 253487 - RNA, 19 nt, Homo sapiens
  misc_RNA (1)...(19): siRNA sense strand
uaaggaauaaggucaagga

SEQ ID NO: 253488 - RNA, 19 nt, Homo sapiens
  misc_RNA (1)...(19): siRNA sense strand
ggaacuugaaccagcauga

SEQ ID NO: 253489 - RNA, 19 nt, Homo sapiens
  misc_RNA (1)...(19): siRNA sense strand
caauggcaguuuccugaca

SEQ ID NO: 253490 - RNA, 19 nt, Homo sapiens
  misc_RNA (1)...(19): siRNA sense strand
gcaagugugaacaagaaga

SEQ ID NO: 253491 - RNA, 19 nt, Homo sapiens
  misc_RNA (1)...(19): siRNA sense strand
caugaagacuaaggaaaca

SEQ ID NO: 253492 - RNA, 19 nt, Homo sapiens
  misc_RNA (1)...(19): siRNA sense strand
aaccacuccucacagauaa

SEQ ID NO: 253493 - RNA, 19 nt, Homo sapiens
  misc_RNA (1)...(19): siRNA sense strand
ucacuguguucuuccucua

SEQ ID NO: 253494 - RNA, 19 nt, Homo sapiens
  misc_RNA (1)...(19): siRNA sense strand
gaguuugacuugguaugug

SEQ ID NO: 253495 - RNA, 19 nt, Homo sapiens
  misc_RNA (1)...(19): siRNA sense strand
caucaugucggccuucuuc

SEQ ID NO: 253496 - RNA, 19 nt, Homo sapiens
  misc_RNA (1)...(19): siRNA sense strand
gaagacuaaggaaacauca

SEQ ID NO: 253497 - RNA, 19 nt, Homo sapiens
  misc_RNA (1)...(19): siRNA sense strand
ucacagauaaggaauaagg

SEQ ID NO: 253498 - RNA, 19 nt, Homo sapiens
  misc_RNA (1)...(19): siRNA sense strand
cgcgguggcugaugaugaa

SEQ ID NO: 253499 - RNA, 19 nt, Homo sapiens
  misc_RNA (1)...(19): siRNA sense strand
cugaaccacuccucacaga

SEQ ID NO: 253500 - RNA, 19 nt, Homo sapiens
  misc_RNA (1)...(19): siRNA sense strand
ucaaugacacagacacaug

SEQ ID NO: 253501 - RNA, 19 nt, Homo sapiens
  misc_RNA (1)...(19): siRNA sense strand
cggcugugcugcaucuuuc

SEQ ID NO: 253502 - RNA, 19 nt, Homo sapiens
  misc_RNA (1)...(19): siRNA sense strand
uauguggcauggagacgaa

SEQ ID NO: 253503 - RNA, 19 nt, Homo sapiens
  misc_RNA (1)...(19): siRNA sense strand
acguugagccugagaauga

SEQ ID NO: 253504 - RNA, 19 nt, Homo sapiens
  misc_RNA (1)...(19): siRNA sense strand
caucuccuauaucuggauu

SEQ ID NO: 253505 - RNA, 19 nt, Homo sapiens
  misc_RNA (1)...(19): siRNA sense strand
gcugaucaucuucggcuuu

SEQ ID NO: 253506 - RNA, 19 nt, Homo sapiens
  misc_RNA (1)...(19): siRNA sense strand
ggacacugcacagaucaug

SEQ ID NO: 253507 - RNA, 19 nt, Homo sapiens
  misc_RNA (1)...(19): siRNA sense strand
cccagaagcccuauugcaa

SEQ ID NO: 253508 - RNA, 19 nt, Homo sapiens
  misc_RNA (1)...(19): siRNA sense strand
gucaaggacaugaagacua

SEQ ID NO: 253509 - RNA, 19 nt, Homo sapiens
  misc_RNA (1)...(19): siRNA sense strand
caggagaggagaacuucaa

SEQ ID NO: 253510 - RNA, 19 nt, Homo sapiens
  misc_RNA (1)...(19): siRNA sense strand
guauuuguucuuucgcuuu

SEQ ID NO: 253511 - RNA, 19 nt, Homo sapiens
  misc_RNA (1)...(19): siRNA sense strand
uagcaggacauccacauuc

SEQ ID NO: 253512 - RNA, 19 nt, Homo sapiens
  misc_RNA (1)...(19): siRNA sense strand
gcugaccacuucguguuca

SEQ ID NO: 253513 - RNA, 19 nt, Homo sapiens
  misc_RNA (1)...(19): siRNA sense strand
gaauaaggucaaggacaug

SEQ ID NO: 253514 - RNA, 19 nt, Homo sapiens
  misc_RNA (1)...(19): siRNA sense strand
acaccaagcaggaugacaa

SEQ ID NO: 253515 - RNA, 19 nt, Homo sapiens
  misc_RNA (1)...(19): siRNA sense strand
uaccgucaguuacaccuau

SEQ ID NO: 253516 - RNA, 19 nt, Homo sapiens
  misc_RNA (1)...(19): siRNA sense strand
uauuuguucuuucgcuuug

SEQ ID NO: 253517 - RNA, 19 nt, Homo sapiens
  misc_RNA (1)...(19): siRNA sense strand
cugcacagaucauguucau

SEQ ID NO: 253518 - RNA, 19 nt, Homo sapiens
  misc_RNA (1)...(19): siRNA sense strand
ugagggcuguccacaccaa

SEQ ID NO: 253519 - RNA, 19 nt, Homo sapiens
  misc_RNA (1)...(19): siRNA sense strand
gauucuaccauccaguuug

SEQ ID NO: 253520 - RNA, 19 nt, Homo sapiens
  misc_RNA (1)...(19): siRNA sense strand
gaacuugaaccagcaugag

SEQ ID NO: 253521 - RNA, 19 nt, Homo sapiens
  misc_RNA (1)...(19): siRNA sense strand
guagcaggacauccacauu

SEQ ID NO: 253522 - RNA, 19 nt, Homo sapiens
  misc_RNA (1)...(19): siRNA sense strand
caucagcagcauuucuuug

SEQ ID NO: 253523 - RNA, 19 nt, Homo sapiens
  misc_RNA (1)...(19): siRNA sense strand
acacugcacagaucauguu

SEQ ID NO: 253524 - RNA, 19 nt, Homo sapiens
  misc_RNA (1)...(19): siRNA sense strand
gccaucagcagcauuucuu

SEQ ID NO: 253525 - RNA, 19 nt, Homo sapiens
  misc_RNA (1)...(19): siRNA sense strand
cagcccagaagcccuauug

SEQ ID NO: 253526 - RNA, 19 nt, Homo sapiens
  misc_RNA (1)...(19): siRNA sense strand
ggcugugacucuccuccaa

SEQ ID NO: 253527 - RNA, 19 nt, Homo sapiens
  misc_RNA (1)...(19): siRNA sense strand
ucaaggaagagcucagauc

SEQ ID NO: 253528 - RNA, 19 nt, Homo sapiens
  misc_RNA (1)...(19): siRNA sense strand
cugaucaucuucggcuuug

SEQ ID NO: 253529 - RNA, 19 nt, Homo sapiens
  misc_RNA (1)...(19): siRNA sense strand
agaaggacacugcacagau

SEQ ID NO: 253530 - RNA, 19 nt, Homo sapiens
  misc_RNA (1)...(19): siRNA sense strand
cauccaguuuggccucaau

SEQ ID NO: 253531 - RNA, 19 nt, Homo sapiens
  misc_RNA (1)...(19): siRNA sense strand
agacuaaggaaacaucauc

SEQ ID NO: 253532 - RNA, 19 nt, Homo sapiens
  misc_RNA (1)...(19): siRNA sense strand
cauggcagggcucccgaua

SEQ ID NO: 253533 - RNA, 19 nt, Homo sapiens
  misc_RNA (1)...(19): siRNA sense strand
ugucggccuucuucauguu

SEQ ID NO: 253534 - RNA, 19 nt, Homo sapiens
  misc_RNA (1)...(19): siRNA sense strand
gcccagaagcccuauugca

SEQ ID NO: 253535 - RNA, 19 nt, Homo sapiens
  misc_RNA (1)...(19): siRNA sense strand
ggcgugagcguccacuuca

SEQ ID NO: 253536 - RNA, 19 nt, Homo sapiens
  misc_RNA (1)...(19): siRNA sense strand
gggaucgccuacggucuuc

SEQ ID NO: 253537 - RNA, 19 nt, Homo sapiens
  misc_RNA (1)...(19): siRNA sense strand
caguuuggccucaaugaca

SEQ ID NO: 253538 - RNA, 19 nt, Homo sapiens
  misc_RNA (1)...(19): siRNA sense strand
agaggagaacuucaaggaa

SEQ ID NO: 253539 - RNA, 19 nt, Homo sapiens
  misc_RNA (1)...(19): siRNA sense strand
ugaagacuaaggaaacauc

SEQ ID NO: 253540 - RNA, 19 nt, Homo sapiens
  misc_RNA (1)...(19): siRNA sense strand
gcucaugcucagagaguuc

SEQ ID NO: 253541 - RNA, 19 nt, Homo sapiens
  misc_RNA (1)...(19): siRNA sense strand
caucaucuggugcuugcuu

SEQ ID NO: 253542 - RNA, 19 nt, Homo sapiens
  misc_RNA (1)...(19): siRNA sense strand
gaacaagaagaccauuccu

SEQ ID NO: 253543 - RNA, 19 nt, Homo sapiens
  misc_RNA (1)...(19): siRNA sense strand
gugggugggauacuuguga

SEQ ID NO: 253544 - RNA, 19 nt, Homo sapiens
  misc_RNA (1)...(19): siRNA sense strand
guggugggcuacgccauca

SEQ ID NO: 253545 - RNA, 19 nt, Homo sapiens
  misc_RNA (1)...(19): siRNA sense strand
ggacuuagcuucagcaaug

SEQ ID NO: 253546 - RNA, 19 nt, Homo sapiens
  misc_RNA (1)...(19): siRNA sense strand
ggaaugcccuggaucuguu

SEQ ID NO: 253547 - RNA, 19 nt, Homo sapiens
  misc_RNA (1)...(19): siRNA sense strand
ugaaauaggugacuuuggu

SEQ ID NO: 253548 - RNA, 19 nt, Homo sapiens
  misc_RNA (1)...(19): siRNA sense strand
ccaaaucagugcccucaga

SEQ ID NO: 253549 - RNA, 19 nt, Homo sapiens
  misc_RNA (1)...(19): siRNA sense strand
cgauacaacugauccagaa

SEQ ID NO: 253550 - RNA, 19 nt, Homo sapiens
  misc_RNA (1)...(19): siRNA sense strand
gagcagcacauacuucuga

SEQ ID NO: 253551 - RNA, 19 nt, Homo sapiens
  misc_RNA (1)...(19): siRNA sense strand
ugacgcagcucaucuuugg

SEQ ID NO: 253552 - RNA, 19 nt, Homo sapiens
  misc_RNA (1)...(19): siRNA sense strand
ccagagcccugccucaugu

SEQ ID NO: 253553 - RNA, 19 nt, Homo sapiens
  misc_RNA (1)...(19): siRNA sense strand
ucccaucccugaagaauga

SEQ ID NO: 253554 - RNA, 19 nt, Homo sapiens
  misc_RNA (1)...(19): siRNA sense strand
ggucuuggguggccugaug

SEQ ID NO: 253555 - RNA, 19 nt, Homo sapiens
  misc_RNA (1)...(19): siRNA sense strand
uaucuucugugucugguuu

SEQ ID NO: 253556 - RNA, 19 nt, Homo sapiens
  misc_RNA (1)...(19): siRNA sense strand
ggaaggugacccugauuau

SEQ ID NO: 253557 - RNA, 19 nt, Homo sapiens
  misc_RNA (1)...(19): siRNA sense strand
gguccuggcugaaauaggu

SEQ ID NO: 253558 - RNA, 19 nt, Homo sapiens
  misc_RNA (1)...(19): siRNA sense strand
gaaggacaccacacaguca

SEQ ID NO: 253559 - RNA, 19 nt, Homo sapiens
  misc_RNA (1)...(19): siRNA sense strand
gcuuacugcucuucuucua

SEQ ID NO: 253560 - RNA, 19 nt, Homo sapiens
  misc_RNA (1)...(19): siRNA sense strand
gagacgcagccuugugaua

SEQ ID NO: 253561 - RNA, 19 nt, Homo sapiens
  misc_RNA (1)...(19): siRNA sense strand
gggaauauccugagaacag

SEQ ID NO: 253562 - RNA, 19 nt, Homo sapiens
  misc_RNA (1)...(19): siRNA sense strand
caaccugagugcugcugaa

SEQ ID NO: 253563 - RNA, 19 nt, Homo sapiens
  misc_RNA (1)...(19): siRNA sense strand
gaggauggacgaggcgaua

SEQ ID NO: 253564 - RNA, 19 nt, Homo sapiens
  misc_RNA (1)...(19): siRNA sense strand
cugauuaucuucugugucu

SEQ ID NO: 253565 - RNA, 19 nt, Homo sapiens
  misc_RNA (1)...(19): siRNA sense strand
cuacauggcccugcgcuuu

SEQ ID NO: 253566 - RNA, 19 nt, Homo sapiens
  misc_RNA (1)...(19): siRNA sense strand
gaaggugacccugauuauc

SEQ ID NO: 253567 - RNA, 19 nt, Homo sapiens
  misc_RNA (1)...(19): siRNA sense strand
ggacgaggcgauacaacug

SEQ ID NO: 253568 - RNA, 19 nt, Homo sapiens
  misc_RNA (1)...(19): siRNA sense strand
gacgcagccuugugauaug

SEQ ID NO: 253569 - RNA, 19 nt, Homo sapiens
  misc_RNA (1)...(19): siRNA sense strand
gggugaagaaccacacuuu

SEQ ID NO: 253570 - RNA, 19 nt, Homo sapiens
  misc_RNA (1)...(19): siRNA sense strand
cggaaggugacccugauua

SEQ ID NO: 253571 - RNA, 19 nt, Homo sapiens
  misc_RNA (1)...(19): siRNA sense strand
ccucagagaaggaaacaga

SEQ ID NO: 253572 - RNA, 19 nt, Homo sapiens
  misc_RNA (1)...(19): siRNA sense strand
gaagaaccacacuuucaac

SEQ ID NO: 253573 - RNA, 19 nt, Homo sapiens
  misc_RNA (1)...(19): siRNA sense strand
gcaguggcuugggugaaga

SEQ ID NO: 253574 - RNA, 19 nt, Homo sapiens
  misc_RNA (1)...(19): siRNA sense strand
ccagauacagcuauugauc

SEQ ID NO: 253575 - RNA, 19 nt, Homo sapiens
  misc_RNA (1)...(19): siRNA sense strand
uggguggccugauguguau

SEQ ID NO: 253576 - RNA, 19 nt, Homo sapiens
  misc_RNA (1)...(19): siRNA sense strand
gcuguguguucucaacuuc

SEQ ID NO: 253577 - RNA, 19 nt, Homo sapiens
  misc_RNA (1)...(19): siRNA sense strand
agacgcagccuugugauau

SEQ ID NO: 253578 - RNA, 19 nt, Homo sapiens
  misc_RNA (1)...(19): siRNA sense strand
agccaccgcuucaaugaga

SEQ ID NO: 253579 - RNA, 19 nt, Homo sapiens
  misc_RNA (1)...(19): siRNA sense strand
aaucagugcccucagagaa

SEQ ID NO: 253580 - RNA, 19 nt, Homo sapiens
  misc_RNA (1)...(19): siRNA sense strand
gcugcugccuuuaccaucu

SEQ ID NO: 253581 - RNA, 19 nt, Homo sapiens
  misc_RNA (1)...(19): siRNA sense strand
gggaaugcccuggaucugu

SEQ ID NO: 253582 - RNA, 19 nt, Homo sapiens
  misc_RNA (1)...(19): siRNA sense strand
gcacugcgccuggcuuacu

SEQ ID NO: 253583 - RNA, 19 nt, Homo sapiens
  misc_RNA (1)...(19): siRNA sense strand
ggccuggacgucuaucuga

SEQ ID NO: 253584 - RNA, 19 nt, Homo sapiens
  misc_RNA (1)...(19): siRNA sense strand
uuacugcucuucuucuacu

SEQ ID NO: 253585 - RNA, 19 nt, Homo sapiens
  misc_RNA (1)...(19): siRNA sense strand
uggcgcagcugcuccucuu

SEQ ID NO: 253586 - RNA, 19 nt, Homo sapiens
  misc_RNA (1)...(19): siRNA sense strand
gucaauaggcggaaacucu

SEQ ID NO: 253587 - RNA, 19 nt, Homo sapiens
  misc_RNA (1)...(19): siRNA sense strand
gacgaggcgauacaacuga

SEQ ID NO: 253588 - RNA, 19 nt, Homo sapiens
  misc_RNA (1)...(19): siRNA sense strand
gggacucgccuacgguuuc

SEQ ID NO: 253589 - RNA, 19 nt, Homo sapiens
  misc_RNA (1)...(19): siRNA sense strand
ucacccuacugacagaaug

SEQ ID NO: 253590 - RNA, 19 nt, Homo sapiens
  misc_RNA (1)...(19): siRNA sense strand
ggugaagaaccacacuuuc

SEQ ID NO: 253591 - RNA, 19 nt, Homo sapiens
  misc_RNA (1)...(19): siRNA sense strand
ucagccaccgcuucaauga

SEQ ID NO: 253592 - RNA, 19 nt, Homo sapiens
  misc_RNA (1)...(19): siRNA sense strand
ccuuuaccaucuccuaugu

SEQ ID NO: 253593 - RNA, 19 nt, Homo sapiens
  misc_RNA (1)...(19): siRNA sense strand
gcuuccagauacagcuauu

SEQ ID NO: 253594 - RNA, 19 nt, Homo sapiens
  misc_RNA (1)...(19): siRNA sense strand
gcgcagcugcuccucuuca

SEQ ID NO: 253595 - RNA, 19 nt, Homo sapiens
  misc_RNA (1)...(19): siRNA sense strand
gcugaaauaggugacuuug

SEQ ID NO: 253596 - RNA, 19 nt, Homo sapiens
  misc_RNA (1)...(19): siRNA sense strand
aaggugacccugauuaucu

SEQ ID NO: 253597 - RNA, 19 nt, Homo sapiens
  misc_RNA (1)...(19): siRNA sense strand
uguguacucugccgagcuu

SEQ ID NO: 253598 - RNA, 19 nt, Homo sapiens
  misc_RNA (1)...(19): siRNA sense strand
uuuaccaucuccuaugugu

SEQ ID NO: 253599 - RNA, 19 nt, Homo sapiens
  misc_RNA (1)...(19): siRNA sense strand
guuccagcaucuucaugau

SEQ ID NO: 253600 - RNA, 19 nt, Homo sapiens
  misc_RNA (1)...(19): siRNA sense strand
ccugagugcugcugaacag

SEQ ID NO: 253601 - RNA, 19 nt, Homo sapiens
  misc_RNA (1)...(19): siRNA sense strand
guuggcacccucauguuug

SEQ ID NO: 253602 - RNA, 19 nt, Homo sapiens
  misc_RNA (1)...(19): siRNA sense strand
uuuggucgcuuccagauac

SEQ ID NO: 253603 - RNA, 19 nt, Homo sapiens
  misc_RNA (1)...(19): siRNA sense strand
uaccaucuccuauguguac

SEQ ID NO: 253604 - RNA, 19 nt, Homo sapiens
  misc_RNA (1)...(19): siRNA sense strand
uggcuugggugaagaacca

SEQ ID NO: 253605 - RNA, 19 nt, Homo sapiens
  misc_RNA (1)...(19): siRNA sense strand
gacccugauuaucuucugu

SEQ ID NO: 253606 - RNA, 19 nt, Homo sapiens
  misc_RNA (1)...(19): siRNA sense strand
uauugauccugcugugugu

SEQ ID NO: 253607 - RNA, 19 nt, Homo sapiens
  misc_RNA (1)...(19): siRNA sense strand
ggauggacgaggcgauaca

SEQ ID NO: 253608 - RNA, 19 nt, Homo sapiens
  misc_RNA (1)...(19): siRNA sense strand
gcugagacacuucuaaauu

SEQ ID NO: 253609 - RNA, 19 nt, Homo sapiens
  misc_RNA (1)...(19): siRNA sense strand
ugaaacagcugagacacuu

SEQ ID NO: 253610 - RNA, 19 nt, Homo sapiens
  misc_RNA (1)...(19): siRNA sense strand
gaacaggagcucucagaag

SEQ ID NO: 253611 - RNA, 19 nt, Homo sapiens
  misc_RNA (1)...(19): siRNA sense strand
gagagaccauugccagugu

SEQ ID NO: 253612 - RNA, 19 nt, Homo sapiens
  misc_RNA (1)...(19): siRNA sense strand
gcgcagcuuucaguauuaa

SEQ ID NO: 253613 - RNA, 19 nt, Homo sapiens
  misc_RNA (1)...(19): siRNA sense strand
cugagacacuucuaaauuc

SEQ ID NO: 253614 - RNA, 19 nt, Homo sapiens
  misc_RNA (1)...(19): siRNA sense strand
gcagauucuugaugauauc

SEQ ID NO: 253615 - RNA, 19 nt, Homo sapiens
  misc_RNA (1)...(19): siRNA sense strand
ucacagcucaucuuuccua

SEQ ID NO: 253616 - RNA, 19 nt, Homo sapiens
  misc_RNA (1)...(19): siRNA sense strand
ugagacacuucuaaauuca

SEQ ID NO: 253617 - RNA, 19 nt, Homo sapiens
  misc_RNA (1)...(19): siRNA sense strand
uugaugauauccagacaaa

SEQ ID NO: 253618 - RNA, 19 nt, Homo sapiens
  misc_RNA (1)...(19): siRNA sense strand
gagggacgguuugaagaug

SEQ ID NO: 253619 - RNA, 19 nt, Homo sapiens
  misc_RNA (1)...(19): siRNA sense strand
cagcagauucuugaugaua

SEQ ID NO: 253620 - RNA, 19 nt, Homo sapiens
  misc_RNA (1)...(19): siRNA sense strand
aacaggagcucucagaagu

SEQ ID NO: 253621 - RNA, 19 nt, Homo sapiens
  misc_RNA (1)...(19): siRNA sense strand
cuacacagcccguuucagu

SEQ ID NO: 253622 - RNA, 19 nt, Homo sapiens
  misc_RNA (1)...(19): siRNA sense strand
ugcagcagauucuugauga

SEQ ID NO: 253623 - RNA, 19 nt, Homo sapiens
  misc_RNA (1)...(19): siRNA sense strand
agacacuucuaaauucaga

SEQ ID NO: 253624 - RNA, 19 nt, Homo sapiens
  misc_RNA (1)...(19): siRNA sense strand
cagcugagacacuucuaaa

SEQ ID NO: 253625 - RNA, 19 nt, Homo sapiens
  misc_RNA (1)...(19): siRNA sense strand
gaugauauccagacaaagc

SEQ ID NO: 253626 - RNA, 19 nt, Homo sapiens
  misc_RNA (1)...(19): siRNA sense strand
ggagggacgguuugaagau

SEQ ID NO: 253627 - RNA, 19 nt, Homo sapiens
  misc_RNA (1)...(19): siRNA sense strand
ccucacagcucaucuuucc

SEQ ID NO: 253628 - RNA, 19 nt, Homo sapiens
  misc_RNA (1)...(19): siRNA sense strand
cgaaagcagcagaaugaga

SEQ ID NO: 253629 - RNA, 19 nt, Homo sapiens
  misc_RNA (1)...(19): siRNA sense strand
gcagcagauucuugaugau

SEQ ID NO: 253630 - RNA, 19 nt, Homo sapiens
  misc_RNA (1)...(19): siRNA sense strand
ggacgaacaggagcucuca

SEQ ID NO: 253631 - RNA, 19 nt, Homo sapiens
  misc_RNA (1)...(19): siRNA sense strand
aguuugaguuggccuguuu

SEQ ID NO: 253632 - RNA, 19 nt, Homo sapiens
  misc_RNA (1)...(19): siRNA sense strand
ccguuucagucguuucaaa

SEQ ID NO: 253633 - RNA, 19 nt, Homo sapiens
  misc_RNA (1)...(19): siRNA sense strand
caggagcucucagaagucu

SEQ ID NO: 253634 - RNA, 19 nt, Homo sapiens
  misc_RNA (1)...(19): siRNA sense strand
caucgaaagcagcagaaug

SEQ ID NO: 253635 - RNA, 19 nt, Homo sapiens
  misc_RNA (1)...(19): siRNA sense strand
gccaaccuuugcccagaga

SEQ ID NO: 253636 - RNA, 19 nt, Homo sapiens
  misc_RNA (1)...(19): siRNA sense strand
cgaacaggagcucucagaa

SEQ ID NO: 253637 - RNA, 19 nt, Homo sapiens
  misc_RNA (1)...(19): siRNA sense strand
agcagauucuugaugauau

SEQ ID NO: 253638 - RNA, 19 nt, Homo sapiens
  misc_RNA (1)...(19): siRNA sense strand
cacagcucaucuuuccuaa

SEQ ID NO: 253639 - RNA, 19 nt, Homo sapiens
  misc_RNA (1)...(19): siRNA sense strand
aucgaaagcagcagaauga

SEQ ID NO: 253640 - RNA, 19 nt, Homo sapiens
  misc_RNA (1)...(19): siRNA sense strand
gaaacagcugagacacuuc

SEQ ID NO: 253641 - RNA, 19 nt, Homo sapiens
  misc_RNA (1)...(19): siRNA sense strand
agggacgguuugaagauga

SEQ ID NO: 253642 - RNA, 19 nt, Homo sapiens
  misc_RNA (1)...(19): siRNA sense strand
uucagaaguucauaugcuu

SEQ ID NO: 253643 - RNA, 19 nt, Homo sapiens
  misc_RNA (1)...(19): siRNA sense strand
ggaguccaaggcucuaauc

SEQ ID NO: 253644 - RNA, 19 nt, Homo sapiens
  misc_RNA (1)...(19): siRNA sense strand
agcgcagcuuucaguauua

SEQ ID NO: 253645 - RNA, 19 nt, Homo sapiens
  misc_RNA (1)...(19): siRNA sense strand
ggaccgagcucaccaacug

SEQ ID NO: 253646 - RNA, 19 nt, Homo sapiens
  misc_RNA (1)...(19): siRNA sense strand
gcaagacgcaguaccuguu

SEQ ID NO: 253647 - RNA, 19 nt, Homo sapiens
  misc_RNA (1)...(19): siRNA sense strand
ccaggaaguucuacuacau

SEQ ID NO: 253648 - RNA, 19 nt, Homo sapiens
  misc_RNA (1)...(19): siRNA sense strand
gcguggagguggaugaaga

SEQ ID NO: 253649 - RNA, 19 nt, Homo sapiens
  misc_RNA (1)...(19): siRNA sense strand
acaugcagcuguacgacua

SEQ ID NO: 253650 - RNA, 19 nt, Homo sapiens
  misc_RNA (1)...(19): siRNA sense strand
gcuucaugcucaucuugua

SEQ ID NO: 253651 - RNA, 19 nt, Homo sapiens
  misc_RNA (1)...(19): siRNA sense strand
gcuacaaccuguccuucau

SEQ ID NO: 253652 - RNA, 19 nt, Homo sapiens
  misc_RNA (1)...(19): siRNA sense strand
cguacaaccuggccaacaa

SEQ ID NO: 253653 - RNA, 19 nt, Homo sapiens
  misc_RNA (1)...(19): siRNA sense strand
gaagggcgacgacgugauc

SEQ ID NO: 253654 - RNA, 19 nt, Homo sapiens
  misc_RNA (1)...(19): siRNA sense strand
ucaacgaccuggacaugca

SEQ ID NO: 253655 - RNA, 19 nt, Homo sapiens
  misc_RNA (1)...(19): siRNA sense strand
ucgcugcgcuucgacauga

SEQ ID NO: 253656 - RNA, 19 nt, Homo sapiens
  misc_RNA (1)...(19): siRNA sense strand
gcugcacgcuacaggaguu

SEQ ID NO: 253657 - RNA, 19 nt, Homo sapiens
  misc_RNA (1)...(19): siRNA sense strand
ggacguucaaccucaaguu

SEQ ID NO: 253658 - RNA, 19 nt, Homo sapiens
  misc_RNA (1)...(19): siRNA sense strand
ccgacgaccuguaccuguu

SEQ ID NO: 253659 - RNA, 19 nt, Homo sapiens
  misc_RNA (1)...(19): siRNA sense strand
ugagccacaucauugagaa

SEQ ID NO: 253660 - RNA, 19 nt, Homo sapiens
  misc_RNA (1)...(19): siRNA sense strand
gcacgcccaggaaguucua

SEQ ID NO: 253661 - RNA, 19 nt, Homo sapiens
  misc_RNA (1)...(19): siRNA sense strand
gcucaacgaccuggacaug

SEQ ID NO: 253662 - RNA, 19 nt, Homo sapiens
  misc_RNA (1)...(19): siRNA sense strand
agaagaagugcaccugcua

SEQ ID NO: 253663 - RNA, 19 nt, Homo sapiens
  misc_RNA (1)...(19): siRNA sense strand
aggaaguucuacuacauca

SEQ ID NO: 253664 - RNA, 19 nt, Homo sapiens
  misc_RNA (1)...(19): siRNA sense strand
ccgcgagacuuggcucuuc

SEQ ID NO: 253665 - RNA, 19 nt, Homo sapiens
  misc_RNA (1)...(19): siRNA sense strand
caagacgcaguaccuguuc

SEQ ID NO: 253666 - RNA, 19 nt, Homo sapiens
  misc_RNA (1)...(19): siRNA sense strand
gacguucaaccucaaguuc

SEQ ID NO: 253667 - RNA, 19 nt, Homo sapiens
  misc_RNA (1)...(19): siRNA sense strand
cccaggaaguucuacuaca

SEQ ID NO: 253668 - RNA, 19 nt, Homo sapiens
  misc_RNA (1)...(19): siRNA sense strand
cuacaucacccugcuacga

SEQ ID NO: 253669 - RNA, 19 nt, Homo sapiens
  misc_RNA (1)...(19): siRNA sense strand
gcaucgaggagcucaacga

SEQ ID NO: 253670 - RNA, 19 nt, Homo sapiens
  misc_RNA (1)...(19): siRNA sense strand
gccacaucauugagaagug

SEQ ID NO: 253671 - RNA, 19 nt, Homo sapiens
  misc_RNA (1)...(19): siRNA sense strand
caaaucaguucgagaauua

SEQ ID NO: 253672 - RNA, 19 nt, Homo sapiens
  misc_RNA (1)...(19): siRNA sense strand
gaaaggauuugauguauuc

SEQ ID NO: 253673 - RNA, 19 nt, Homo sapiens
  misc_RNA (1)...(19): siRNA sense strand
gacaauauguuccgauuug

SEQ ID NO: 253674 - RNA, 19 nt, Homo sapiens
  misc_RNA (1)...(19): siRNA sense strand
cagcaaacauucggauuua

SEQ ID NO: 253675 - RNA, 19 nt, Homo sapiens
  misc_RNA (1)...(19): siRNA sense strand
ugaagaagaugguagaaau

SEQ ID NO: 253676 - RNA, 19 nt, Homo sapiens
  misc_RNA (1)...(19): siRNA sense strand
cagagugucuucaaauaaa

SEQ ID NO: 253677 - RNA, 19 nt, Homo sapiens
  misc_RNA (1)...(19): siRNA sense strand
gcacauuauugacacguuu

SEQ ID NO: 253678 - RNA, 19 nt, Homo sapiens
  misc_RNA (1)...(19): siRNA sense strand
uauaggagauggcaauuug

SEQ ID NO: 253679 - RNA, 19 nt, Homo sapiens
  misc_RNA (1)...(19): siRNA sense strand
aguauuaccuguacaauug

SEQ ID NO: 253680 - RNA, 19 nt, Homo sapiens
  misc_RNA (1)...(19): siRNA sense strand
acacuuaccugaagcaguu

SEQ ID NO: 253681 - RNA, 19 nt, Homo sapiens
  misc_RNA (1)...(19): siRNA sense strand
gcacuggauuugauggaaa

SEQ ID NO: 253682 - RNA, 19 nt, Homo sapiens
  misc_RNA (1)...(19): siRNA sense strand
cgaaaggauuugauguauu

SEQ ID NO: 253683 - RNA, 19 nt, Homo sapiens
  misc_RNA (1)...(19): siRNA sense strand
agagaacaaugaagcuaua

SEQ ID NO: 253684 - RNA, 19 nt, Homo sapiens
  misc_RNA (1)...(19): siRNA sense strand
uuacaaagacuucagguuu

SEQ ID NO: 253685 - RNA, 19 nt, Homo sapiens
  misc_RNA (1)...(19): siRNA sense strand
gucagagugucuucaaaua

SEQ ID NO: 253686 - RNA, 19 nt, Homo sapiens
  misc_RNA (1)...(19): siRNA sense strand
ggaguuauacacguuguua

SEQ ID NO: 253687 - RNA, 19 nt, Homo sapiens
  misc_RNA (1)...(19): siRNA sense strand
agaauuacguagaagauga

SEQ ID NO: 253688 - RNA, 19 nt, Homo sapiens
  misc_RNA (1)...(19): siRNA sense strand
cguagaagaugaugacaau

SEQ ID NO: 253689 - RNA, 19 nt, Homo sapiens
  misc_RNA (1)...(19): siRNA sense strand
ucaaaucaguucgagaauu

SEQ ID NO: 253690 - RNA, 19 nt, Homo sapiens
  misc_RNA (1)...(19): siRNA sense strand
cauaagaaguugagaucga

SEQ ID NO: 253691 - RNA, 19 nt, Homo sapiens
  misc_RNA (1)...(19): siRNA sense strand
acgguaaacugacugauuu

SEQ ID NO: 253692 - RNA, 19 nt, Homo sapiens
  misc_RNA (1)...(19): siRNA sense strand
gcaaacauucggauuuaug

SEQ ID NO: 253693 - RNA, 19 nt, Homo sapiens
  misc_RNA (1)...(19): siRNA sense strand
gaugguagaaaucaacuuu

SEQ ID NO: 253694 - RNA, 19 nt, Homo sapiens
  misc_RNA (1)...(19): siRNA sense strand
ucaaggaguuauacacguu

SEQ ID NO: 253695 - RNA, 19 nt, Homo sapiens
  misc_RNA (1)...(19): siRNA sense strand
caauugaaccagauaaaga

SEQ ID NO: 253696 - RNA, 19 nt, Homo sapiens
  misc_RNA (1)...(19): siRNA sense strand
caaugaagcuauacagacu

SEQ ID NO: 253697 - RNA, 19 nt, Homo sapiens
  misc_RNA (1)...(19): siRNA sense strand
gcaccacccugcucacaag

SEQ ID NO: 253698 - RNA, 19 nt, Homo sapiens
  misc_RNA (1)...(19): siRNA sense strand
gugggacacuuuagacuug

SEQ ID NO: 253699 - RNA, 19 nt, Homo sapiens
  misc_RNA (1)...(19): siRNA sense strand
caaagccgccuacucauuc

SEQ ID NO: 253700 - RNA, 19 nt, Homo sapiens
  misc_RNA (1)...(19): siRNA sense strand
aaacuggucggguucauaa

SEQ ID NO: 253701 - RNA, 19 nt, Homo sapiens
  misc_RNA (1)...(19): siRNA sense strand
agaagaaacagaagagaaa

SEQ ID NO: 253702 - RNA, 19 nt, Homo sapiens
  misc_RNA (1)...(19): siRNA sense strand
ccgaagugcucaaggaguu

SEQ ID NO: 253703 - RNA, 19 nt, Homo sapiens
  misc_RNA (1)...(19): siRNA sense strand
uaagugccaucccagcaaa

SEQ ID NO: 253704 - RNA, 19 nt, Homo sapiens
  misc_RNA (1)...(19): siRNA sense strand
ugaaaagguuggacuagua

SEQ ID NO: 253705 - RNA, 19 nt, Homo sapiens
  misc_RNA (1)...(19): siRNA sense strand
cauccuggcuaaaucgaaa

SEQ ID NO: 253706 - RNA, 19 nt, Homo sapiens
  misc_RNA (1)...(19): siRNA sense strand
ccucaaagccgccuacuca

SEQ ID NO: 253707 - RNA, 19 nt, Homo sapiens
  misc_RNA (1)...(19): siRNA sense strand
uaucaaaucaguucgagaa

SEQ ID NO: 253708 - RNA, 19 nt, Homo sapiens
  misc_RNA (1)...(19): siRNA sense strand
gaagucauaacaucucaug

SEQ ID NO: 253709 - RNA, 19 nt, Homo sapiens
  misc_RNA (1)...(19): siRNA sense strand
caaacauucggauuuauga

SEQ ID NO: 253710 - RNA, 19 nt, Homo sapiens
  misc_RNA (1)...(19): siRNA sense strand
agaagaugaugacaauaug

SEQ ID NO: 253711 - RNA, 19 nt, Homo sapiens
  misc_RNA (1)...(19): siRNA sense strand
aaucaacacuuaccugaag

SEQ ID NO: 253712 - RNA, 19 nt, Homo sapiens
  misc_RNA (1)...(19): siRNA sense strand
gaagaagaugguagaaauc

SEQ ID NO: 253713 - RNA, 19 nt, Homo sapiens
  misc_RNA (1)...(19): siRNA sense strand
ucagagugucuucaaauaa

SEQ ID NO: 253714 - RNA, 19 nt, Homo sapiens
  misc_RNA (1)...(19): siRNA sense strand
ucacuugaguagaaauaug

SEQ ID NO: 253715 - RNA, 19 nt, Homo sapiens
  misc_RNA (1)...(19): siRNA sense strand
gaaaauugguagaagugaa

SEQ ID NO: 253716 - RNA, 19 nt, Homo sapiens
  misc_RNA (1)...(19): siRNA sense strand
ccagcaaacauucggauuu

SEQ ID NO: 253717 - RNA, 19 nt, Homo sapiens
  misc_RNA (1)...(19): siRNA sense strand
auacagacuuccagauguu

SEQ ID NO: 253718 - RNA, 19 nt, Homo sapiens
  misc_RNA (1)...(19): siRNA sense strand
ucgaaaggauuugauguau

SEQ ID NO: 253719 - RNA, 19 nt, Homo sapiens
  misc_RNA (1)...(19): siRNA sense strand
ugacugauuuccugagcuu

SEQ ID NO: 253720 - RNA, 19 nt, Homo sapiens
  misc_RNA (1)...(19): siRNA sense strand
gaagaugaugacaauaugu

SEQ ID NO: 253721 - RNA, 19 nt, Homo sapiens
  misc_RNA (1)...(19): siRNA sense strand
gaacaaugaagcuauacag

SEQ ID NO: 253722 - RNA, 19 nt, Homo sapiens
  misc_RNA (1)...(19): siRNA sense strand
acacacaaccgguaccaaa

SEQ ID NO: 253723 - RNA, 19 nt, Homo sapiens
  misc_RNA (1)...(19): siRNA sense strand
ucaaagccgccuacucauu

SEQ ID NO: 253724 - RNA, 19 nt, Homo sapiens
  misc_RNA (1)...(19): siRNA sense strand
ggucagagugucuucaaau

SEQ ID NO: 253725 - RNA, 19 nt, Homo sapiens
  misc_RNA (1)...(19): siRNA sense strand
guucgagaauuaaucaaca

SEQ ID NO: 253726 - RNA, 19 nt, Homo sapiens
  misc_RNA (1)...(19): siRNA sense strand
ugagaccaauggaaccaaa

SEQ ID NO: 253727 - RNA, 19 nt, Homo sapiens
  misc_RNA (1)...(19): siRNA sense strand
uauacagacuuccagaugu

SEQ ID NO: 253728 - RNA, 19 nt, Homo sapiens
  misc_RNA (1)...(19): siRNA sense strand
gcaauugaaccagauaaag

SEQ ID NO: 253729 - RNA, 19 nt, Homo sapiens
  misc_RNA (1)...(19): siRNA sense strand
cgggagugguucuuccuaa

SEQ ID NO: 253730 - RNA, 19 nt, Homo sapiens
  misc_RNA (1)...(19): siRNA sense strand
gaagaugguagaaaucaac

SEQ ID NO: 253731 - RNA, 19 nt, Homo sapiens
  misc_RNA (1)...(19): siRNA sense strand
cgagagaucacuagaagag

SEQ ID NO: 253732 - RNA, 19 nt, Homo sapiens
  misc_RNA (1)...(19): siRNA sense strand
caaguuugguauaggagau

SEQ ID NO: 253733 - RNA, 19 nt, Homo sapiens
  misc_RNA (1)...(19): siRNA sense strand
auacuggcaucgaucacua

SEQ ID NO: 253734 - RNA, 19 nt, Homo sapiens
  misc_RNA (1)...(19): siRNA sense strand
auaagaaguugagaucgaa

SEQ ID NO: 253735 - RNA, 19 nt, Homo sapiens
  misc_RNA (1)...(19): siRNA sense strand
agugauggaugaagaggaa

SEQ ID NO: 253736 - RNA, 19 nt, Homo sapiens
  misc_RNA (1)...(19): siRNA sense strand
guuccgauuugacuauuca

SEQ ID NO: 253737 - RNA, 19 nt, Homo sapiens
  misc_RNA (1)...(19): siRNA sense strand
ggagacggagcacgccaaa

SEQ ID NO: 253738 - RNA, 19 nt, Homo sapiens
  misc_RNA (1)...(19): siRNA sense strand
ucuacaacauccacacaga

SEQ ID NO: 253739 - RNA, 19 nt, Homo sapiens
  misc_RNA (1)...(19): siRNA sense strand
caacuuucuuuguguucau

SEQ ID NO: 253740 - RNA, 19 nt, Homo sapiens
  misc_RNA (1)...(19): siRNA sense strand
ccaggacacgugcgggaua

SEQ ID NO: 253741 - RNA, 19 nt, Homo sapiens
  misc_RNA (1)...(19): siRNA sense strand
gagaauuacguagaagaug

SEQ ID NO: 253742 - RNA, 19 nt, Homo sapiens
  misc_RNA (1)...(19): siRNA sense strand
guauaggagauggcaauuu

SEQ ID NO: 253743 - RNA, 19 nt, Homo sapiens
  misc_RNA (1)...(19): siRNA sense strand
gggagugguucuuccuaag

SEQ ID NO: 253744 - RNA, 19 nt, Homo sapiens
  misc_RNA (1)...(19): siRNA sense strand
acaauauguuccgauuuga

SEQ ID NO: 253745 - RNA, 19 nt, Homo sapiens
  misc_RNA (1)...(19): siRNA sense strand
caggauauccagagagcaa

SEQ ID NO: 253746 - RNA, 19 nt, Homo sapiens
  misc_RNA (1)...(19): siRNA sense strand
agaagaugguagaaaucaa

SEQ ID NO: 253747 - RNA, 19 nt, Homo sapiens
  misc_RNA (1)...(19): siRNA sense strand
aagaagaaacagaagagaa

SEQ ID NO: 253748 - RNA, 19 nt, Homo sapiens
  misc_RNA (1)...(19): siRNA sense strand
gggucagagugucuucaaa

SEQ ID NO: 253749 - RNA, 19 nt, Homo sapiens
  misc_RNA (1)...(19): siRNA sense strand
acacguuguuaaaugagaa

SEQ ID NO: 253750 - RNA, 19 nt, Homo sapiens
  misc_RNA (1)...(19): siRNA sense strand
caguauuaccuguacaauu

SEQ ID NO: 253751 - RNA, 19 nt, Homo sapiens
  misc_RNA (1)...(19): siRNA sense strand
acucaaguuugguauagga

SEQ ID NO: 253752 - RNA, 19 nt, Homo sapiens
  misc_RNA (1)...(19): siRNA sense strand
cagagaacaaugaagcuau

SEQ ID NO: 253753 - RNA, 19 nt, Homo sapiens
  misc_RNA (1)...(19): siRNA sense strand
gugaagaagaugguagaaa

SEQ ID NO: 253754 - RNA, 19 nt, Homo sapiens
  misc_RNA (1)...(19): siRNA sense strand
ugacaauauguuccgauuu

SEQ ID NO: 253755 - RNA, 19 nt, Homo sapiens
  misc_RNA (1)...(19): siRNA sense strand
gaauuacguagaagaugau

SEQ ID NO: 253756 - RNA, 19 nt, Homo sapiens
  misc_RNA (1)...(19): siRNA sense strand
uaacaucucauggugcaau

SEQ ID NO: 253757 - RNA, 19 nt, Homo sapiens
  misc_RNA (1)...(19): siRNA sense strand
gcgcucauccuggcuaaau

SEQ ID NO: 253758 - RNA, 19 nt, Homo sapiens
  misc_RNA (1)...(19): siRNA sense strand
ccaauggaaccaaaagaua

SEQ ID NO: 253759 - RNA, 19 nt, Homo sapiens
  misc_RNA (1)...(19): siRNA sense strand
uccgagagaucacuagaag

SEQ ID NO: 253760 - RNA, 19 nt, Homo sapiens
  misc_RNA (1)...(19): siRNA sense strand
caaagcacagauaccaguu

SEQ ID NO: 253761 - RNA, 19 nt, Homo sapiens
  misc_RNA (1)...(19): siRNA sense strand
gaguuauacacguuguuaa

SEQ ID NO: 253762 - RNA, 19 nt, Homo sapiens
  misc_RNA (1)...(19): siRNA sense strand
agacaacguacgccaagaa

SEQ ID NO: 253763 - RNA, 19 nt, Homo sapiens
  misc_RNA (1)...(19): siRNA sense strand
caucucauggugcaauuga

SEQ ID NO: 253764 - RNA, 19 nt, Homo sapiens
  misc_RNA (1)...(19): siRNA sense strand
aaauucagcagccuucgaa

SEQ ID NO: 253765 - RNA, 19 nt, Homo sapiens
  misc_RNA (1)...(19): siRNA sense strand
ucacuaaaccccagaaaau

SEQ ID NO: 253766 - RNA, 19 nt, Homo sapiens
  misc_RNA (1)...(19): siRNA sense strand
gugcuaauccgagagauca

SEQ ID NO: 253767 - RNA, 19 nt, Homo sapiens
  misc_RNA (1)...(19): siRNA sense strand
gaaguccuggaggguauuu

SEQ ID NO: 253768 - RNA, 19 nt, Homo sapiens
  misc_RNA (1)...(19): siRNA sense strand
gaagugcucaaggaguuau

SEQ ID NO: 253769 - RNA, 19 nt, Homo sapiens
  misc_RNA (1)...(19): siRNA sense strand
gauggaugaagaggaagua

SEQ ID NO: 253770 - RNA, 19 nt, Homo sapiens
  misc_RNA (1)...(19): siRNA sense strand
aaagguuggacuaguacua

SEQ ID NO: 253771 - RNA, 19 nt, Homo sapiens
  misc_RNA (1)...(19): siRNA sense strand
gcagaaggcuuucaugaga

SEQ ID NO: 253772 - RNA, 19 nt, Homo sapiens
  misc_RNA (1)...(19): siRNA sense strand
agaguuagaugccuuauug

SEQ ID NO: 253773 - RNA, 19 nt, Homo sapiens
  misc_RNA (1)...(19): siRNA sense strand
ucaggacagugaugaauau

SEQ ID NO: 253774 - RNA, 19 nt, Homo sapiens
  misc_RNA (1)...(19): siRNA sense strand
gcucauggcucaccugacu

SEQ ID NO: 253775 - RNA, 19 nt, Homo sapiens
  misc_RNA (1)...(19): siRNA sense strand
ggaagaguuagaugccuua

SEQ ID NO: 253776 - RNA, 19 nt, Homo sapiens
  misc_RNA (1)...(19): siRNA sense strand
ggacagugaugaauauucc

SEQ ID NO: 253777 - RNA, 19 nt, Homo sapiens
  misc_RNA (1)...(19): siRNA sense strand
ugucaaccuugcuucaaua

SEQ ID NO: 253778 - RNA, 19 nt, Homo sapiens
  misc_RNA (1)...(19): siRNA sense strand
cuucggagauccuuucuau

SEQ ID NO: 253779 - RNA, 19 nt, Homo sapiens
  misc_RNA (1)...(19): siRNA sense strand
aauaagcucuucccacugu

SEQ ID NO: 253780 - RNA, 19 nt, Homo sapiens
  misc_RNA (1)...(19): siRNA sense strand
gcgcagcucguguauacua

SEQ ID NO: 253781 - RNA, 19 nt, Homo sapiens
  misc_RNA (1)...(19): siRNA sense strand
gaagccauauugccgaaag

SEQ ID NO: 253782 - RNA, 19 nt, Homo sapiens
  misc_RNA (1)...(19): siRNA sense strand
gaucagcauuccagaaagg

SEQ ID NO: 253783 - RNA, 19 nt, Homo sapiens
  misc_RNA (1)...(19): siRNA sense strand
cagaaggcuuucaugagaa

SEQ ID NO: 253784 - RNA, 19 nt, Homo sapiens
  misc_RNA (1)...(19): siRNA sense strand
uccaggagcucaaugucua

SEQ ID NO: 253785 - RNA, 19 nt, Homo sapiens
  misc_RNA (1)...(19): siRNA sense strand
aagaagcacuuaccagaca

SEQ ID NO: 253786 - RNA, 19 nt, Homo sapiens
  misc_RNA (1)...(19): siRNA sense strand
ggccaagguugcagugaga

SEQ ID NO: 253787 - RNA, 19 nt, Homo sapiens
  misc_RNA (1)...(19): siRNA sense strand
cggcgcagcucguguauac

SEQ ID NO: 253788 - RNA, 19 nt, Homo sapiens
  misc_RNA (1)...(19): siRNA sense strand
caacgacuaccaccaacuu

SEQ ID NO: 253789 - RNA, 19 nt, Homo sapiens
  misc_RNA (1)...(19): siRNA sense strand
agaaugacaagaccuauug

SEQ ID NO: 253790 - RNA, 19 nt, Homo sapiens
  misc_RNA (1)...(19): siRNA sense strand
gagacuaaccuugaugaga

SEQ ID NO: 253791 - RNA, 19 nt, Homo sapiens
  misc_RNA (1)...(19): siRNA sense strand
gcccaucacuggccguugu

SEQ ID NO: 253792 - RNA, 19 nt, Homo sapiens
  misc_RNA (1)...(19): siRNA sense strand
ccagagugcuuuguuugug

SEQ ID NO: 253793 - RNA, 19 nt, Homo sapiens
  misc_RNA (1)...(19): siRNA sense strand
cauggcauccugagcauuu

SEQ ID NO: 253794 - RNA, 19 nt, Homo sapiens
  misc_RNA (1)...(19): siRNA sense strand
ggagcucaaugucuacagu

SEQ ID NO: 253795 - RNA, 19 nt, Homo sapiens
  misc_RNA (1)...(19): siRNA sense strand
ucggagauccuuucuauuc

SEQ ID NO: 253796 - RNA, 19 nt, Homo sapiens
  misc_RNA (1)...(19): siRNA sense strand
ggagauccuuucuauucag

SEQ ID NO: 253797 - RNA, 19 nt, Homo sapiens
  misc_RNA (1)...(19): siRNA sense strand
ucuacuggcuccuucuuug

SEQ ID NO: 253798 - RNA, 19 nt, Homo sapiens
  misc_RNA (1)...(19): siRNA sense strand
gugcagaaggcuuucauga

SEQ ID NO: 253799 - RNA, 19 nt, Homo sapiens
  misc_RNA (1)...(19): siRNA sense strand
gaaggugauccaugcucua

SEQ ID NO: 253800 - RNA, 19 nt, Homo sapiens
  misc_RNA (1)...(19): siRNA sense strand
caagugugguggcugcaau

SEQ ID NO: 253801 - RNA, 19 nt, Homo sapiens
  misc_RNA (1)...(19): siRNA sense strand
gcuccagucccuucuuuga

SEQ ID NO: 253802 - RNA, 19 nt, Homo sapiens
  misc_RNA (1)...(19): siRNA sense strand
cacccagagugcuuuguuu

SEQ ID NO: 253803 - RNA, 19 nt, Homo sapiens
  misc_RNA (1)...(19): siRNA sense strand
cauauugccgaaaggauuu

SEQ ID NO: 253804 - RNA, 19 nt, Homo sapiens
  misc_RNA (1)...(19): siRNA sense strand
agaaggacaagaagccaua

SEQ ID NO: 253805 - RNA, 19 nt, Homo sapiens
  misc_RNA (1)...(19): siRNA sense strand
cggagauccuuucuauuca

SEQ ID NO: 253806 - RNA, 19 nt, Homo sapiens
  misc_RNA (1)...(19): siRNA sense strand
ucugugagcuccauuacca

SEQ ID NO: 253807 - RNA, 19 nt, Homo sapiens
  misc_RNA (1)...(19): siRNA sense strand
ccauauugccgaaaggauu

SEQ ID NO: 253808 - RNA, 19 nt, Homo sapiens
  misc_RNA (1)...(19): siRNA sense strand
ggaguggcuuggccuacug

SEQ ID NO: 253809 - RNA, 19 nt, Homo sapiens
  misc_RNA (1)...(19): siRNA sense strand
ugucuguacucauugcaaa

SEQ ID NO: 253810 - RNA, 19 nt, Homo sapiens
  misc_RNA (1)...(19): siRNA sense strand
ucagggagcagaaugacaa

SEQ ID NO: 253811 - RNA, 19 nt, Homo sapiens
  misc_RNA (1)...(19): siRNA sense strand
gcacccagagcacuucuuc

SEQ ID NO: 253812 - RNA, 19 nt, Homo sapiens
  misc_RNA (1)...(19): siRNA sense strand
gcucguguauacuaccaau

SEQ ID NO: 253813 - RNA, 19 nt, Homo sapiens
  misc_RNA (1)...(19): siRNA sense strand
gaaucaccaccaccuucua

SEQ ID NO: 253814 - RNA, 19 nt, Homo sapiens
  misc_RNA (1)...(19): siRNA sense strand
ggacaagaagccauauugc

SEQ ID NO: 253815 - RNA, 19 nt, Homo sapiens
  misc_RNA (1)...(19): siRNA sense strand
cagcugcucaguuggauga

SEQ ID NO: 253816 - RNA, 19 nt, Homo sapiens
  misc_RNA (1)...(19): siRNA sense strand
ggaucagcauuccagaaag

SEQ ID NO: 253817 - RNA, 19 nt, Homo sapiens
  misc_RNA (1)...(19): siRNA sense strand
ggaaucaccaccaccuucu

SEQ ID NO: 253818 - RNA, 19 nt, Homo sapiens
  misc_RNA (1)...(19): siRNA sense strand
cagaaugacaagaccuauu

SEQ ID NO: 253819 - RNA, 19 nt, Homo sapiens
  misc_RNA (1)...(19): siRNA sense strand
cagacaagcaggaucacaa

SEQ ID NO: 253820 - RNA, 19 nt, Homo sapiens
  misc_RNA (1)...(19): siRNA sense strand
guacucauugcaaagaaga

SEQ ID NO: 253821 - RNA, 19 nt, Homo sapiens
  misc_RNA (1)...(19): siRNA sense strand
caagaccuauugucaaccu

SEQ ID NO: 253822 - RNA, 19 nt, Homo sapiens
  misc_RNA (1)...(19): siRNA sense strand
gcaaucgcccaguguugga

SEQ ID NO: 253823 - RNA, 19 nt, Homo sapiens
  misc_RNA (1)...(19): siRNA sense strand
uggcuccagucccuucuuu

SEQ ID NO: 253824 - RNA, 19 nt, Homo sapiens
  misc_RNA (1)...(19): siRNA sense strand
aaucaccaccaccuucuaa

SEQ ID NO: 253825 - RNA, 19 nt, Homo sapiens
  misc_RNA (1)...(19): siRNA sense strand
guuccauccugagcacuuu

SEQ ID NO: 253826 - RNA, 19 nt, Homo sapiens
  misc_RNA (1)...(19): siRNA sense strand
gccauguucucacccaagu

SEQ ID NO: 253827 - RNA, 19 nt, Homo sapiens
  misc_RNA (1)...(19): siRNA sense strand
uaagcucuucccacuguaa

SEQ ID NO: 253828 - RNA, 19 nt, Homo sapiens
  misc_RNA (1)...(19): siRNA sense strand
gcucaaugucuacagugaa

SEQ ID NO: 253829 - RNA, 19 nt, Homo sapiens
  misc_RNA (1)...(19): siRNA sense strand
agaaggcuuucaugagaag

SEQ ID NO: 253830 - RNA, 19 nt, Homo sapiens
  misc_RNA (1)...(19): siRNA sense strand
agagguguuuggugcagaa

SEQ ID NO: 253831 - RNA, 19 nt, Homo sapiens
  misc_RNA (1)...(19): siRNA sense strand
cccaagagccaaaggaauc

SEQ ID NO: 253832 - RNA, 19 nt, Homo sapiens
  misc_RNA (1)...(19): siRNA sense strand
ucacugcggagagguguuu

SEQ ID NO: 253833 - RNA, 19 nt, Homo sapiens
  misc_RNA (1)...(19): siRNA sense strand
gaaggacaagaagccauau

SEQ ID NO: 253834 - RNA, 19 nt, Homo sapiens
  misc_RNA (1)...(19): siRNA sense strand
uuucagccauggacacugu

SEQ ID NO: 253835 - RNA, 19 nt, Homo sapiens
  misc_RNA (1)...(19): siRNA sense strand
gcagaaugacaagaccuau

SEQ ID NO: 253836 - RNA, 19 nt, Homo sapiens
  misc_RNA (1)...(19): siRNA sense strand
cauuuugucuguacucauu

SEQ ID NO: 253837 - RNA, 19 nt, Homo sapiens
  misc_RNA (1)...(19): siRNA sense strand
cuacuggcuccuucuuuga

SEQ ID NO: 253838 - RNA, 19 nt, Homo sapiens
  misc_RNA (1)...(19): siRNA sense strand
ucguguauacuaccaauau

SEQ ID NO: 253839 - RNA, 19 nt, Homo sapiens
  misc_RNA (1)...(19): siRNA sense strand
aggacaagaagccauauug

SEQ ID NO: 253840 - RNA, 19 nt, Homo sapiens
  misc_RNA (1)...(19): siRNA sense strand
gugaagcccaagagccaaa

SEQ ID NO: 253841 - RNA, 19 nt, Homo sapiens
  misc_RNA (1)...(19): siRNA sense strand
aaggauuucuuagccaugu

SEQ ID NO: 253842 - RNA, 19 nt, Homo sapiens
  misc_RNA (1)...(19): siRNA sense strand
ccagaaaggagacuaaccu

SEQ ID NO: 253843 - RNA, 19 nt, Homo sapiens
  misc_RNA (1)...(19): siRNA sense strand
ugaugagacuucggagauc

SEQ ID NO: 253844 - RNA, 19 nt, Homo sapiens
  misc_RNA (1)...(19): siRNA sense strand
agaagcacuuaccagacaa

SEQ ID NO: 253845 - RNA, 19 nt, Homo sapiens
  misc_RNA (1)...(19): siRNA sense strand
ccaagagccaaaggaauca

SEQ ID NO: 253846 - RNA, 19 nt, Homo sapiens
  misc_RNA (1)...(19): siRNA sense strand
gucaaccuugcuucaauaa

SEQ ID NO: 253847 - RNA, 19 nt, Homo sapiens
  misc_RNA (1)...(19): siRNA sense strand
gcagcaaauuggcuuauua

SEQ ID NO: 253848 - RNA, 19 nt, Homo sapiens
  misc_RNA (1)...(19): siRNA sense strand
ggacaggucagaauaauaa

SEQ ID NO: 253849 - RNA, 19 nt, Homo sapiens
  misc_RNA (1)...(19): siRNA sense strand
gaaauaaacccuucaacug

SEQ ID NO: 253850 - RNA, 19 nt, Homo sapiens
  misc_RNA (1)...(19): siRNA sense strand
ccaaagauauccauagugu

SEQ ID NO: 253851 - RNA, 19 nt, Homo sapiens
  misc_RNA (1)...(19): siRNA sense strand
caccauagcucuacuuguu

SEQ ID NO: 253852 - RNA, 19 nt, Homo sapiens
  misc_RNA (1)...(19): siRNA sense strand
gcaaauuggcuuauuaaug

SEQ ID NO: 253853 - RNA, 19 nt, Homo sapiens
  misc_RNA (1)...(19): siRNA sense strand
guaaugcaccacauaguua

SEQ ID NO: 253854 - RNA, 19 nt, Homo sapiens
  misc_RNA (1)...(19): siRNA sense strand
gagcggauguugucaugaa

SEQ ID NO: 253855 - RNA, 19 nt, Homo sapiens
  misc_RNA (1)...(19): siRNA sense strand
gcaaggacaggucagaaua

SEQ ID NO: 253856 - RNA, 19 nt, Homo sapiens
  misc_RNA (1)...(19): siRNA sense strand
ccauagcucuacuuguuua

SEQ ID NO: 253857 - RNA, 19 nt, Homo sapiens
  misc_RNA (1)...(19): siRNA sense strand
gagauaacaucacuuacug

SEQ ID NO: 253858 - RNA, 19 nt, Homo sapiens
  misc_RNA (1)...(19): siRNA sense strand
ccacacaguuccagagcua

SEQ ID NO: 253859 - RNA, 19 nt, Homo sapiens
  misc_RNA (1)...(19): siRNA sense strand
gcaacaaacugggaucuag

SEQ ID NO: 253860 - RNA, 19 nt, Homo sapiens
  misc_RNA (1)...(19): siRNA sense strand
guccagaccuaauaacauu

SEQ ID NO: 253861 - RNA, 19 nt, Homo sapiens
  misc_RNA (1)...(19): siRNA sense strand
gagaacagugucaccuuua

SEQ ID NO: 253862 - RNA, 19 nt, Homo sapiens
  misc_RNA (1)...(19): siRNA sense strand
ggagccaucuugucuggaa

SEQ ID NO: 253863 - RNA, 19 nt, Homo sapiens
  misc_RNA (1)...(19): siRNA sense strand
uaacuucgacuucaagauu

SEQ ID NO: 253864 - RNA, 19 nt, Homo sapiens
  misc_RNA (1)...(19): siRNA sense strand
caauggagcaucaaugaaa

SEQ ID NO: 253865 - RNA, 19 nt, Homo sapiens
  misc_RNA (1)...(19): siRNA sense strand
cuggaaaccuggaaauaaa

SEQ ID NO: 253866 - RNA, 19 nt, Homo sapiens
  misc_RNA (1)...(19): siRNA sense strand
caacugagauaacaucacu

SEQ ID NO: 253867 - RNA, 19 nt, Homo sapiens
  misc_RNA (1)...(19): siRNA sense strand
aaauaaacccuucaacuga

SEQ ID NO: 253868 - RNA, 19 nt, Homo sapiens
  misc_RNA (1)...(19): siRNA sense strand
gacaaaugcugaauaacuc

SEQ ID NO: 253869 - RNA, 19 nt, Homo sapiens
  misc_RNA (1)...(19): siRNA sense strand
ugagaacagugucaccuuu

SEQ ID NO: 253870 - RNA, 19 nt, Homo sapiens
  misc_RNA (1)...(19): siRNA sense strand
uacgacaaaugcugaauaa

SEQ ID NO: 253871 - RNA, 19 nt, Homo sapiens
  misc_RNA (1)...(19): siRNA sense strand
gagagcggauguugucaug

SEQ ID NO: 253872 - RNA, 19 nt, Homo sapiens
  misc_RNA (1)...(19): siRNA sense strand
ggaaauaaacccuucaacu

SEQ ID NO: 253873 - RNA, 19 nt, Homo sapiens
  misc_RNA (1)...(19): siRNA sense strand
cacaacauuuccuaaacua

SEQ ID NO: 253874 - RNA, 19 nt, Homo sapiens
  misc_RNA (1)...(19): siRNA sense strand
ccaccuggcucuacugcuu

SEQ ID NO: 253875 - RNA, 19 nt, Homo sapiens
  misc_RNA (1)...(19): siRNA sense strand
ugaccaggcugcagcaaau

SEQ ID NO: 253876 - RNA, 19 nt, Homo sapiens
  misc_RNA (1)...(19): siRNA sense strand
caaggacaggucagaauaa

SEQ ID NO: 253877 - RNA, 19 nt, Homo sapiens
  misc_RNA (1)...(19): siRNA sense strand
gauccuggcagucaccaua

SEQ ID NO: 253878 - RNA, 19 nt, Homo sapiens
  misc_RNA (1)...(19): siRNA sense strand
cagcaaauuggcuuauuaa

SEQ ID NO: 253879 - RNA, 19 nt, Homo sapiens
  misc_RNA (1)...(19): siRNA sense strand
ggaagaauugaaucucuga

SEQ ID NO: 253880 - RNA, 19 nt, Homo sapiens
  misc_RNA (1)...(19): siRNA sense strand
aaagauauccauagugugu

SEQ ID NO: 253881 - RNA, 19 nt, Homo sapiens
  misc_RNA (1)...(19): siRNA sense strand
aaauaacaauggagcauca

SEQ ID NO: 253882 - RNA, 19 nt, Homo sapiens
  misc_RNA (1)...(19): siRNA sense strand
gagcucauguugccaaacu

SEQ ID NO: 253883 - RNA, 19 nt, Homo sapiens
  misc_RNA (1)...(19): siRNA sense strand
ccacaacauuuccuaaacu

SEQ ID NO: 253884 - RNA, 19 nt, Homo sapiens
  misc_RNA (1)...(19): siRNA sense strand
cgacaaaugcugaauaacu

SEQ ID NO: 253885 - RNA, 19 nt, Homo sapiens
  misc_RNA (1)...(19): siRNA sense strand
ggauaagccaggaguguau

SEQ ID NO: 253886 - RNA, 19 nt, Homo sapiens
  misc_RNA (1)...(19): siRNA sense strand
gacuuugaguggaagaauu

SEQ ID NO: 253887 - RNA, 19 nt, Homo sapiens
  misc_RNA (1)...(19): siRNA sense strand
guaaugauguauguaaugc

SEQ ID NO: 253888 - RNA, 19 nt, Homo sapiens
  misc_RNA (1)...(19): siRNA sense strand
caggucagaauaauaagua

SEQ ID NO: 253889 - RNA, 19 nt, Homo sapiens
  misc_RNA (1)...(19): siRNA sense strand
cggauguugucaugaaauu

SEQ ID NO: 253890 - RNA, 19 nt, Homo sapiens
  misc_RNA (1)...(19): siRNA sense strand
cagccuaccuugacuggau

SEQ ID NO: 253891 - RNA, 19 nt, Homo sapiens
  misc_RNA (1)...(19): siRNA sense strand
uaccaaagauauccauagu

SEQ ID NO: 253892 - RNA, 19 nt, Homo sapiens
  misc_RNA (1)...(19): siRNA sense strand
gcacuugugagacuugaga

SEQ ID NO: 253893 - RNA, 19 nt, Homo sapiens
  misc_RNA (1)...(19): siRNA sense strand
caacauuuccuaaacuaag

SEQ ID NO: 253894 - RNA, 19 nt, Homo sapiens
  misc_RNA (1)...(19): siRNA sense strand
gauguugucaugaaauuuc

SEQ ID NO: 253895 - RNA, 19 nt, Homo sapiens
  misc_RNA (1)...(19): siRNA sense strand
agaauaugcuggccacaca

SEQ ID NO: 253896 - RNA, 19 nt, Homo sapiens
  misc_RNA (1)...(19): siRNA sense strand
aaacugaggcaagauggua

SEQ ID NO: 253897 - RNA, 19 nt, Homo sapiens
  misc_RNA (1)...(19): siRNA sense strand
gauaagccaggaguguaua

SEQ ID NO: 253898 - RNA, 19 nt, Homo sapiens
  misc_RNA (1)...(19): siRNA sense strand
ugacauugcacuugugaga

SEQ ID NO: 253899 - RNA, 19 nt, Homo sapiens
  misc_RNA (1)...(19): siRNA sense strand
uaacaauggagcaucaaug

SEQ ID NO: 253900 - RNA, 19 nt, Homo sapiens
  misc_RNA (1)...(19): siRNA sense strand
caauaaugcccaccacugu

SEQ ID NO: 253901 - RNA, 19 nt, Homo sapiens
  misc_RNA (1)...(19): siRNA sense strand
acugagauaacaucacuua

SEQ ID NO: 253902 - RNA, 19 nt, Homo sapiens
  misc_RNA (1)...(19): siRNA sense strand
caguuaaauucaccagcua

SEQ ID NO: 253903 - RNA, 19 nt, Homo sapiens
  misc_RNA (1)...(19): siRNA sense strand
uaaauucaccagcuacaca

SEQ ID NO: 253904 - RNA, 19 nt, Homo sapiens
  misc_RNA (1)...(19): siRNA sense strand
ucuggaaaccuggaaauaa

SEQ ID NO: 253905 - RNA, 19 nt, Homo sapiens
  misc_RNA (1)...(19): siRNA sense strand
acacaggaauacaggacuu

SEQ ID NO: 253906 - RNA, 19 nt, Homo sapiens
  misc_RNA (1)...(19): siRNA sense strand
guggaagaauugaaucucu

SEQ ID NO: 253907 - RNA, 19 nt, Homo sapiens
  misc_RNA (1)...(19): siRNA sense strand
aguguggccugccggauaa

SEQ ID NO: 253908 - RNA, 19 nt, Homo sapiens
  misc_RNA (1)...(19): siRNA sense strand
gcaccacauaguuauaaug

SEQ ID NO: 253909 - RNA, 19 nt, Homo sapiens
  misc_RNA (1)...(19): siRNA sense strand
gcacguguaacuucgacuu

SEQ ID NO: 253910 - RNA, 19 nt, Homo sapiens
  misc_RNA (1)...(19): siRNA sense strand
uagcucuacuuguuuacuu

SEQ ID NO: 253911 - RNA, 19 nt, Homo sapiens
  misc_RNA (1)...(19): siRNA sense strand
cagcugcuacccagaauau

SEQ ID NO: 253912 - RNA, 19 nt, Homo sapiens
  misc_RNA (1)...(19): siRNA sense strand
guagugauccuggcaguca

SEQ ID NO: 253913 - RNA, 19 nt, Homo sapiens
  misc_RNA (1)...(19): siRNA sense strand
uguaguauguuucauuguc

SEQ ID NO: 253914 - RNA, 19 nt, Homo sapiens
  misc_RNA (1)...(19): siRNA sense strand
uuacgacaaaugcugaaua

SEQ ID NO: 253915 - RNA, 19 nt, Homo sapiens
  misc_RNA (1)...(19): siRNA sense strand
uaagaaaucaguucaucag

SEQ ID NO: 253916 - RNA, 19 nt, Homo sapiens
  misc_RNA (1)...(19): siRNA sense strand
uacaggacuuugaguggaa

SEQ ID NO: 253917 - RNA, 19 nt, Homo sapiens
  misc_RNA (1)...(19): siRNA sense strand
guauaggccagcacgugua

SEQ ID NO: 253918 - RNA, 19 nt, Homo sapiens
  misc_RNA (1)...(19): siRNA sense strand
gcucauguugccaaacuga

SEQ ID NO: 253919 - RNA, 19 nt, Homo sapiens
  misc_RNA (1)...(19): siRNA sense strand
uggcucuacugcuuaugua

SEQ ID NO: 253920 - RNA, 19 nt, Homo sapiens
  misc_RNA (1)...(19): siRNA sense strand
gcugcuacccagaauauuc

SEQ ID NO: 253921 - RNA, 19 nt, Homo sapiens
  misc_RNA (1)...(19): siRNA sense strand
aacaauggagcaucaauga

SEQ ID NO: 253922 - RNA, 19 nt, Homo sapiens
  misc_RNA (1)...(19): siRNA sense strand
caccagcuacacaggaaua

SEQ ID NO: 253923 - RNA, 19 nt, Homo sapiens
  misc_RNA (1)...(19): siRNA sense strand
uguaaugcaccacauaguu

SEQ ID NO: 253924 - RNA, 19 nt, Homo sapiens
  misc_RNA (1)...(19): siRNA sense strand
gcagccugaucaauaacau

SEQ ID NO: 253925 - RNA, 19 nt, Homo sapiens
  misc_RNA (1)...(19): siRNA sense strand
ucagucugcggcucaauaa

SEQ ID NO: 253926 - RNA, 19 nt, Homo sapiens
  misc_RNA (1)...(19): siRNA sense strand
ugagauaacaucacuuacu

SEQ ID NO: 253927 - RNA, 19 nt, Homo sapiens
  misc_RNA (1)...(19): siRNA sense strand
caguguggccugccggaua

SEQ ID NO: 253928 - RNA, 19 nt, Homo sapiens
  misc_RNA (1)...(19): siRNA sense strand
caagaugguagugguguga

SEQ ID NO: 253929 - RNA, 19 nt, Homo sapiens
  misc_RNA (1)...(19): siRNA sense strand
cacuagaaauaacaaugga

SEQ ID NO: 253930 - RNA, 19 nt, Homo sapiens
  misc_RNA (1)...(19): siRNA sense strand
ggccagcacguguaacuuc

SEQ ID NO: 253931 - RNA, 19 nt, Homo sapiens
  misc_RNA (1)...(19): siRNA sense strand
aaggacaggucagaauaau

SEQ ID NO: 253932 - RNA, 19 nt, Homo sapiens
  misc_RNA (1)...(19): siRNA sense strand
cuaagaaugagaguaagaa

SEQ ID NO: 253933 - RNA, 19 nt, Homo sapiens
  misc_RNA (1)...(19): siRNA sense strand
gguauuuccacaacauuuc

SEQ ID NO: 253934 - RNA, 19 nt, Homo sapiens
  misc_RNA (1)...(19): siRNA sense strand
gaagcuggccguggcaagu

SEQ ID NO: 253935 - RNA, 19 nt, Homo sapiens
  misc_RNA (1)...(19): siRNA sense strand
ucugaauccauauguagua

SEQ ID NO: 253936 - RNA, 19 nt, Homo sapiens
  misc_RNA (1)...(19): siRNA sense strand
aacuucgacuucaagauuu

SEQ ID NO: 253937 - RNA, 19 nt, Homo sapiens
  misc_RNA (1)...(19): siRNA sense strand
auaaaucugcaacucauga

SEQ ID NO: 253938 - RNA, 19 nt, Homo sapiens
  misc_RNA (1)...(19): siRNA sense strand
ggauugccacgucugguau

SEQ ID NO: 253939 - RNA, 19 nt, Homo sapiens
  misc_RNA (1)...(19): siRNA sense strand
auaaacccuucaacugaga

SEQ ID NO: 253940 - RNA, 19 nt, Homo sapiens
  misc_RNA (1)...(19): siRNA sense strand
ggaauacaggacuuugagu

SEQ ID NO: 253941 - RNA, 19 nt, Homo sapiens
  misc_RNA (1)...(19): siRNA sense strand
uaaugcaccacauaguuau

SEQ ID NO: 253942 - RNA, 19 nt, Homo sapiens
  misc_RNA (1)...(19): siRNA sense strand
ggcaaggacaggucagaau

SEQ ID NO: 253943 - RNA, 19 nt, Homo sapiens
  misc_RNA (1)...(19): siRNA sense strand
caggaauacaggacuuuga

SEQ ID NO: 253944 - RNA, 19 nt, Homo sapiens
  misc_RNA (1)...(19): siRNA sense strand
cguguaacuucgacuucaa

SEQ ID NO: 253945 - RNA, 19 nt, Homo sapiens
  misc_RNA (1)...(19): siRNA sense strand
gucagucugcggcucaaua

SEQ ID NO: 253946 - RNA, 19 nt, Homo sapiens
  misc_RNA (1)...(19): siRNA sense strand
ucacuagaaauaacaaugg

SEQ ID NO: 253947 - RNA, 19 nt, Homo sapiens
  misc_RNA (1)...(19): siRNA sense strand
gcucuuggcugguguugug

SEQ ID NO: 253948 - RNA, 19 nt, Homo sapiens
  misc_RNA (1)...(19): siRNA sense strand
ggucagaggucguggaaac

SEQ ID NO: 253949 - RNA, 19 nt, Homo sapiens
  misc_RNA (1)...(19): siRNA sense strand
gcaggucgauucgccgauu

SEQ ID NO: 253950 - RNA, 19 nt, Homo sapiens
  misc_RNA (1)...(19): siRNA sense strand
ugucagagcugguguacuc

SEQ ID NO: 253951 - RNA, 19 nt, Homo sapiens
  misc_RNA (1)...(19): siRNA sense strand
ggaccauccugcugcucua

SEQ ID NO: 253952 - RNA, 19 nt, Homo sapiens
  misc_RNA (1)...(19): siRNA sense strand
ccacagcccuggcaaccau

SEQ ID NO: 253953 - RNA, 19 nt, Homo sapiens
  misc_RNA (1)...(19): siRNA sense strand
ggagaccaucgcagaguuu

SEQ ID NO: 253954 - RNA, 19 nt, Homo sapiens
  misc_RNA (1)...(19): siRNA sense strand
gcguggagguguucaugga

SEQ ID NO: 253955 - RNA, 19 nt, Homo sapiens
  misc_RNA (1)...(19): siRNA sense strand
gccugagccuccugaguga

SEQ ID NO: 253956 - RNA, 19 nt, Homo sapiens
  misc_RNA (1)...(19): siRNA sense strand
gcaaccaugagcaguccua

SEQ ID NO: 253957 - RNA, 19 nt, Homo sapiens
  misc_RNA (1)...(19): siRNA sense strand
ccauccugcugcucuacua

SEQ ID NO: 253958 - RNA, 19 nt, Homo sapiens
  misc_RNA (1)...(19): siRNA sense strand
guggaaacccuggcucuug

SEQ ID NO: 253959 - RNA, 19 nt, Homo sapiens
  misc_RNA (1)...(19): siRNA sense strand
gugcgaacccuccagaaca

SEQ ID NO: 253960 - RNA, 19 nt, Homo sapiens
  misc_RNA (1)...(19): siRNA sense strand
gguguacucugccucuaac

SEQ ID NO: 253961 - RNA, 19 nt, Homo sapiens
  misc_RNA (1)...(19): siRNA sense strand
cugcugcgcucuccuuucu

SEQ ID NO: 253962 - RNA, 19 nt, Homo sapiens
  misc_RNA (1)...(19): siRNA sense strand
gcucaaugacgggauccua

SEQ ID NO: 253963 - RNA, 19 nt, Homo sapiens
  misc_RNA (1)...(19): siRNA sense strand
ugcuugugcugcucaauga

SEQ ID NO: 253964 - RNA, 19 nt, Homo sapiens
  misc_RNA (1)...(19): siRNA sense strand
gacggcagcagcagcauca

SEQ ID NO: 253965 - RNA, 19 nt, Homo sapiens
  misc_RNA (1)...(19): siRNA sense strand
aggagaccaucgcagaguu

SEQ ID NO: 253966 - RNA, 19 nt, Homo sapiens
  misc_RNA (1)...(19): siRNA sense strand
gcucuuggcugguguugug

SEQ ID NO: 253967 - RNA, 19 nt, Homo sapiens
  misc_RNA (1)...(19): siRNA sense strand
ggucagaggucguggaaac

SEQ ID NO: 253968 - RNA, 19 nt, Homo sapiens
  misc_RNA (1)...(19): siRNA sense strand
gcaggucgauucgccgauu

SEQ ID NO: 253969 - RNA, 19 nt, Homo sapiens
  misc_RNA (1)...(19): siRNA sense strand
ugucagagcugguguacuc

SEQ ID NO: 253970 - RNA, 19 nt, Homo sapiens
  misc_RNA (1)...(19): siRNA sense strand
ggaccauccugcugcucua

SEQ ID NO: 253971 - RNA, 19 nt, Homo sapiens
  misc_RNA (1)...(19): siRNA sense strand
ccacagcccuggcaaccau

SEQ ID NO: 253972 - RNA, 19 nt, Homo sapiens
  misc_RNA (1)...(19): siRNA sense strand
ggagaccaucgcagaguuu

SEQ ID NO: 253973 - RNA, 19 nt, Homo sapiens
  misc_RNA (1)...(19): siRNA sense strand
gcguggagguguucaugga

SEQ ID NO: 253974 - RNA, 19 nt, Homo sapiens
  misc_RNA (1)...(19): siRNA sense strand
gccugagccuccugaguga

SEQ ID NO: 253975 - RNA, 19 nt, Homo sapiens
  misc_RNA (1)...(19): siRNA sense strand
gcaaccaugagcaguccua

SEQ ID NO: 253976 - RNA, 19 nt, Homo sapiens
  misc_RNA (1)...(19): siRNA sense strand
ccauccugcugcucuacua

SEQ ID NO: 253977 - RNA, 19 nt, Homo sapiens
  misc_RNA (1)...(19): siRNA sense strand
guggaaacccuggcucuug

SEQ ID NO: 253978 - RNA, 19 nt, Homo sapiens
  misc_RNA (1)...(19): siRNA sense strand
gugcgaacccuccagaaca

SEQ ID NO: 253979 - RNA, 19 nt, Homo sapiens
  misc_RNA (1)...(19): siRNA sense strand
gguguacucugccucuaac

SEQ ID NO: 253980 - RNA, 19 nt, Homo sapiens
  misc_RNA (1)...(19): siRNA sense strand
cugcugcgcucuccuuucu

SEQ ID NO: 253981 - RNA, 19 nt, Homo sapiens
  misc_RNA (1)...(19): siRNA sense strand
gcucaaugacgggauccua

SEQ ID NO: 253982 - RNA, 19 nt, Homo sapiens
  misc_RNA (1)...(19): siRNA sense strand
ugcuugugcugcucaauga

SEQ ID NO: 253983 - RNA, 19 nt, Homo sapiens
  misc_RNA (1)...(19): siRNA sense strand
gacggcagcagcagcauca

SEQ ID NO: 253984 - RNA, 19 nt, Homo sapiens
  misc_RNA (1)...(19): siRNA sense strand
aggagaccaucgcagaguu

SEQ ID NO: 253985 - RNA, 19 nt, Homo sapiens
  misc_RNA (1)...(19): siRNA sense strand
ggaaaugucaagucuauua

SEQ ID NO: 253986 - RNA, 19 nt, Homo sapiens
  misc_RNA (1)...(19): siRNA sense strand
caauuaagcuuucgaguau

SEQ ID NO: 253987 - RNA, 19 nt, Homo sapiens
  misc_RNA (1)...(19): siRNA sense strand
gcacgaggaccuugaaaua

SEQ ID NO: 253988 - RNA, 19 nt, Homo sapiens
  misc_RNA (1)...(19): siRNA sense strand
gagaucacauuuacaacua

SEQ ID NO: 253989 - RNA, 19 nt, Homo sapiens
  misc_RNA (1)...(19): siRNA sense strand
gagaaagcauuuagcauca

SEQ ID NO: 253990 - RNA, 19 nt, Homo sapiens
  misc_RNA (1)...(19): siRNA sense strand
gaaauaggagcacaucauu

SEQ ID NO: 253991 - RNA, 19 nt, Homo sapiens
  misc_RNA (1)...(19): siRNA sense strand
ccauugagcuucuaggaaa

SEQ ID NO: 253992 - RNA, 19 nt, Homo sapiens
  misc_RNA (1)...(19): siRNA sense strand
cggcagaacuguauccauu

SEQ ID NO: 253993 - RNA, 19 nt, Homo sapiens
  misc_RNA (1)...(19): siRNA sense strand
aauaggagcacaucauuua

SEQ ID NO: 253994 - RNA, 19 nt, Homo sapiens
  misc_RNA (1)...(19): siRNA sense strand
caaacacuauuccaacuau

SEQ ID NO: 253995 - RNA, 19 nt, Homo sapiens
  misc_RNA (1)...(19): siRNA sense strand
gaaaagaccccuuaagguu

SEQ ID NO: 253996 - RNA, 19 nt, Homo sapiens
  misc_RNA (1)...(19): siRNA sense strand
gcugaaguguuaccuaaug

SEQ ID NO: 253997 - RNA, 19 nt, Homo sapiens
  misc_RNA (1)...(19): siRNA sense strand
cagaggaguuuagauauga

SEQ ID NO: 253998 - RNA, 19 nt, Homo sapiens
  misc_RNA (1)...(19): siRNA sense strand
aaagaaagggucuggauuu

SEQ ID NO: 253999 - RNA, 19 nt, Homo sapiens
  misc_RNA (1)...(19): siRNA sense strand
ggacacggcagaacuguau

SEQ ID NO: 254000 - RNA, 19 nt, Homo sapiens
  misc_RNA (1)...(19): siRNA sense strand
aagauguccuggagaaaua

SEQ ID NO: 254001 - RNA, 19 nt, Homo sapiens
  misc_RNA (1)...(19): siRNA sense strand
uaggaaaugucaagucuau

SEQ ID NO: 254002 - RNA, 19 nt, Homo sapiens
  misc_RNA (1)...(19): siRNA sense strand
gaugacaaguuugcauauu

SEQ ID NO: 254003 - RNA, 19 nt, Homo sapiens
  misc_RNA (1)...(19): siRNA sense strand
caacauacccauugagcuu

SEQ ID NO: 254004 - RNA, 19 nt, Homo sapiens
  misc_RNA (1)...(19): siRNA sense strand
gcaaggauggucagaaguu

SEQ ID NO: 254005 - RNA, 19 nt, Homo sapiens
  misc_RNA (1)...(19): siRNA sense strand
ggcaagauguccuggagaa

SEQ ID NO: 254006 - RNA, 19 nt, Homo sapiens
  misc_RNA (1)...(19): siRNA sense strand
ggauuugacucucaguuca

SEQ ID NO: 254007 - RNA, 19 nt, Homo sapiens
  misc_RNA (1)...(19): siRNA sense strand
gcaaacacuauuccaacua

SEQ ID NO: 254008 - RNA, 19 nt, Homo sapiens
  misc_RNA (1)...(19): siRNA sense strand
ccagaggaguuuagauaug

SEQ ID NO: 254009 - RNA, 19 nt, Homo sapiens
  misc_RNA (1)...(19): siRNA sense strand
uauagaagaugguaagaag

SEQ ID NO: 254010 - RNA, 19 nt, Homo sapiens
  misc_RNA (1)...(19): siRNA sense strand
aagcugaaguguuaccuaa

SEQ ID NO: 254011 - RNA, 19 nt, Homo sapiens
  misc_RNA (1)...(19): siRNA sense strand
gaaagcauuuagcaucagu

SEQ ID NO: 254012 - RNA, 19 nt, Homo sapiens
  misc_RNA (1)...(19): siRNA sense strand
ugacaugaaugaugagcuu

SEQ ID NO: 254013 - RNA, 19 nt, Homo sapiens
  misc_RNA (1)...(19): siRNA sense strand
caaggauggucagaaguuu

SEQ ID NO: 254014 - RNA, 19 nt, Homo sapiens
  misc_RNA (1)...(19): siRNA sense strand
gguauucaguauccagauu

SEQ ID NO: 254015 - RNA, 19 nt, Homo sapiens
  misc_RNA (1)...(19): siRNA sense strand
gauaagcccauaggacuaa

SEQ ID NO: 254016 - RNA, 19 nt, Homo sapiens
  misc_RNA (1)...(19): siRNA sense strand
acaauuaagcuuucgagua

SEQ ID NO: 254017 - RNA, 19 nt, Homo sapiens
  misc_RNA (1)...(19): siRNA sense strand
ugacgaaauugaccguuug

SEQ ID NO: 254018 - RNA, 19 nt, Homo sapiens
  misc_RNA (1)...(19): siRNA sense strand
gcacaucauuuaggcuuuc

SEQ ID NO: 254019 - RNA, 19 nt, Homo sapiens
  misc_RNA (1)...(19): siRNA sense strand
gugacgaaauugaccguuu

SEQ ID NO: 254020 - RNA, 19 nt, Homo sapiens
  misc_RNA (1)...(19): siRNA sense strand
gaaaacacuucaaaagcaa

SEQ ID NO: 254021 - RNA, 19 nt, Homo sapiens
  misc_RNA (1)...(19): siRNA sense strand
gaggaggauuugacucuca

SEQ ID NO: 254022 - RNA, 19 nt, Homo sapiens
  misc_RNA (1)...(19): siRNA sense strand
cgacuguccucauauucaa

SEQ ID NO: 254023 - RNA, 19 nt, Homo sapiens
  misc_RNA (1)...(19): siRNA sense strand
gcaacauggugacacuuuc

SEQ ID NO: 254024 - RNA, 19 nt, Homo sapiens
  misc_RNA (1)...(19): siRNA sense strand
gcgaaagggagacuuggua

SEQ ID NO: 254025 - RNA, 19 nt, Homo sapiens
  misc_RNA (1)...(19): siRNA sense strand
gaacaauuggacagccuaa

SEQ ID NO: 254026 - RNA, 19 nt, Homo sapiens
  misc_RNA (1)...(19): siRNA sense strand
caucuuuccuccaguccua

SEQ ID NO: 254027 - RNA, 19 nt, Homo sapiens
  misc_RNA (1)...(19): siRNA sense strand
uuacgacuguccucauauu

SEQ ID NO: 254028 - RNA, 19 nt, Homo sapiens
  misc_RNA (1)...(19): siRNA sense strand
gcauuuagcaucagucagu

SEQ ID NO: 254029 - RNA, 19 nt, Homo sapiens
  misc_RNA (1)...(19): siRNA sense strand
gaguuuagauaugaucguu

SEQ ID NO: 254030 - RNA, 19 nt, Homo sapiens
  misc_RNA (1)...(19): siRNA sense strand
agccuaaucugccuagaaa

SEQ ID NO: 254031 - RNA, 19 nt, Homo sapiens
  misc_RNA (1)...(19): siRNA sense strand
uagaagaugguaagaagaa

SEQ ID NO: 254032 - RNA, 19 nt, Homo sapiens
  misc_RNA (1)...(19): siRNA sense strand
ucaccucugcuaucaauuu

SEQ ID NO: 254033 - RNA, 19 nt, Homo sapiens
  misc_RNA (1)...(19): siRNA sense strand
cggugagccuccauugaua

SEQ ID NO: 254034 - RNA, 19 nt, Homo sapiens
  misc_RNA (1)...(19): siRNA sense strand
gaaaugucaagucuauuag

SEQ ID NO: 254035 - RNA, 19 nt, Homo sapiens
  misc_RNA (1)...(19): siRNA sense strand
gcaaauguccaggccgauu

SEQ ID NO: 254036 - RNA, 19 nt, Homo sapiens
  misc_RNA (1)...(19): siRNA sense strand
ggacuacugugugcgaaag

SEQ ID NO: 254037 - RNA, 19 nt, Homo sapiens
  misc_RNA (1)...(19): siRNA sense strand
gacauacucuuggaaagca

SEQ ID NO: 254038 - RNA, 19 nt, Homo sapiens
  misc_RNA (1)...(19): siRNA sense strand
ggcaauguauuaucuucug

SEQ ID NO: 254039 - RNA, 19 nt, Homo sapiens
  misc_RNA (1)...(19): siRNA sense strand
uauccaacauacccauuga

SEQ ID NO: 254040 - RNA, 19 nt, Homo sapiens
  misc_RNA (1)...(19): siRNA sense strand
caagauguccuggagaaau

SEQ ID NO: 254041 - RNA, 19 nt, Homo sapiens
  misc_RNA (1)...(19): siRNA sense strand
gguggaaaguacauaacau

SEQ ID NO: 254042 - RNA, 19 nt, Homo sapiens
  misc_RNA (1)...(19): siRNA sense strand
uggugacccugaaaucuuu

SEQ ID NO: 254043 - RNA, 19 nt, Homo sapiens
  misc_RNA (1)...(19): siRNA sense strand
cgaggaccuugaaauagga

SEQ ID NO: 254044 - RNA, 19 nt, Homo sapiens
  misc_RNA (1)...(19): siRNA sense strand
guggaaaguacauaacauu

SEQ ID NO: 254045 - RNA, 19 nt, Homo sapiens
  misc_RNA (1)...(19): siRNA sense strand
uacagccgcuuguuguuug

SEQ ID NO: 254046 - RNA, 19 nt, Homo sapiens
  misc_RNA (1)...(19): siRNA sense strand
aaacuacagccgcuuguug

SEQ ID NO: 254047 - RNA, 19 nt, Homo sapiens
  misc_RNA (1)...(19): siRNA sense strand
ggugagccuccauugauaa

SEQ ID NO: 254048 - RNA, 19 nt, Homo sapiens
  misc_RNA (1)...(19): siRNA sense strand
ccaguaccagcuagugaua

SEQ ID NO: 254049 - RNA, 19 nt, Homo sapiens
  misc_RNA (1)...(19): siRNA sense strand
cuuuacgacuguccucaua

SEQ ID NO: 254050 - RNA, 19 nt, Homo sapiens
  misc_RNA (1)...(19): siRNA sense strand
aguaccagcuagugauaaa

SEQ ID NO: 254051 - RNA, 19 nt, Homo sapiens
  misc_RNA (1)...(19): siRNA sense strand
caacauggugacacuuuca

SEQ ID NO: 254052 - RNA, 19 nt, Homo sapiens
  misc_RNA (1)...(19): siRNA sense strand
ggcaaacacuauuccaacu

SEQ ID NO: 254053 - RNA, 19 nt, Homo sapiens
  misc_RNA (1)...(19): siRNA sense strand
ugaaauaggagcacaucau

SEQ ID NO: 254054 - RNA, 19 nt, Homo sapiens
  misc_RNA (1)...(19): siRNA sense strand
uaaaaugcuucucaucaga

SEQ ID NO: 254055 - RNA, 19 nt, Homo sapiens
  misc_RNA (1)...(19): siRNA sense strand
gagcuucuaggaaauguca

SEQ ID NO: 254056 - RNA, 19 nt, Homo sapiens
  misc_RNA (1)...(19): siRNA sense strand
gagcuucaccucugcuauc

SEQ ID NO: 254057 - RNA, 19 nt, Homo sapiens
  misc_RNA (1)...(19): siRNA sense strand
ggagugguccugaacuuac

SEQ ID NO: 254058 - RNA, 19 nt, Homo sapiens
  misc_RNA (1)...(19): siRNA sense strand
ucuaggaaaugucaagucu

SEQ ID NO: 254059 - RNA, 19 nt, Homo sapiens
  misc_RNA (1)...(19): siRNA sense strand
cuucaccucugcuaucaau

SEQ ID NO: 254060 - RNA, 19 nt, Homo sapiens
  misc_RNA (1)...(19): siRNA sense strand
ccauccaccucaccagaga

SEQ ID NO: 254061 - RNA, 19 nt, Homo sapiens
  misc_RNA (1)...(19): siRNA sense strand
uuucaaagcaggcaagaug

SEQ ID NO: 254062 - RNA, 19 nt, Homo sapiens
  misc_RNA (1)...(19): siRNA sense strand
guuguuugguauucaguau

SEQ ID NO: 254063 - RNA, 19 nt, Homo sapiens
  misc_RNA (1)...(19): siRNA sense strand
cuacagccgcuuguuguuu

SEQ ID NO: 254064 - RNA, 19 nt, Homo sapiens
  misc_RNA (1)...(19): siRNA sense strand
ccauaggacuaaacuacag

SEQ ID NO: 254065 - RNA, 19 nt, Homo sapiens
  misc_RNA (1)...(19): siRNA sense strand
gcaagauguccuggagaaa

SEQ ID NO: 254066 - RNA, 19 nt, Homo sapiens
  misc_RNA (1)...(19): siRNA sense strand
gucaacaggucaaaagaaa

SEQ ID NO: 254067 - RNA, 19 nt, Homo sapiens
  misc_RNA (1)...(19): siRNA sense strand
gcccauaggacuaaacuac

SEQ ID NO: 254068 - RNA, 19 nt, Homo sapiens
  misc_RNA (1)...(19): siRNA sense strand
agaagaugguaagaagaaa

SEQ ID NO: 254069 - RNA, 19 nt, Homo sapiens
  misc_RNA (1)...(19): siRNA sense strand
ccauucugcagcucaauaa

SEQ ID NO: 254070 - RNA, 19 nt, Homo sapiens
  misc_RNA (1)...(19): siRNA sense strand
agacuugguagccaucuuu

SEQ ID NO: 254071 - RNA, 19 nt, Homo sapiens
  misc_RNA (1)...(19): siRNA sense strand
caacuauguucugggcaau

SEQ ID NO: 254072 - RNA, 19 nt, Homo sapiens
  misc_RNA (1)...(19): siRNA sense strand
uagcaucagucaguugcaa

SEQ ID NO: 254073 - RNA, 19 nt, Homo sapiens
  misc_RNA (1)...(19): siRNA sense strand
gagacuugguagccaucuu

SEQ ID NO: 254074 - RNA, 19 nt, Homo sapiens
  misc_RNA (1)...(19): siRNA sense strand
aaacacuauuccaacuaug

SEQ ID NO: 254075 - RNA, 19 nt, Homo sapiens
  misc_RNA (1)...(19): siRNA sense strand
aaaguuagccaagaugcaa

SEQ ID NO: 254076 - RNA, 19 nt, Homo sapiens
  misc_RNA (1)...(19): siRNA sense strand
uucugcagcucaauaauau

SEQ ID NO: 254077 - RNA, 19 nt, Homo sapiens
  misc_RNA (1)...(19): siRNA sense strand
ggacauacucuuggaaagc

SEQ ID NO: 254078 - RNA, 19 nt, Homo sapiens
  misc_RNA (1)...(19): siRNA sense strand
acgaggaccuugaaauagg

SEQ ID NO: 254079 - RNA, 19 nt, Homo sapiens
  misc_RNA (1)...(19): siRNA sense strand
cagcagugcgugacgaaau

SEQ ID NO: 254080 - RNA, 19 nt, Homo sapiens
  misc_RNA (1)...(19): siRNA sense strand
ugauaagcccauaggacua

SEQ ID NO: 254081 - RNA, 19 nt, Homo sapiens
  misc_RNA (1)...(19): siRNA sense strand
auucugcagcucaauaaua

SEQ ID NO: 254082 - RNA, 19 nt, Homo sapiens
  misc_RNA (1)...(19): siRNA sense strand
gaagaugguaagaagaaaa

SEQ ID NO: 254083 - RNA, 19 nt, Homo sapiens
  misc_RNA (1)...(19): siRNA sense strand
aaagcaacauggugacacu

SEQ ID NO: 254084 - RNA, 19 nt, Homo sapiens
  misc_RNA (1)...(19): siRNA sense strand
agcagugcgugacgaaauu

SEQ ID NO: 254085 - RNA, 19 nt, Homo sapiens
  misc_RNA (1)...(19): siRNA sense strand
acaccaagcucuccaagau

SEQ ID NO: 254086 - RNA, 19 nt, Homo sapiens
  misc_RNA (1)...(19): siRNA sense strand
gagcggagacgcacugaga

SEQ ID NO: 254087 - RNA, 19 nt, Homo sapiens
  misc_RNA (1)...(19): siRNA sense strand
ccacgaacccuuccucuuc

SEQ ID NO: 254088 - RNA, 19 nt, Homo sapiens
  misc_RNA (1)...(19): siRNA sense strand
gcucaggacccaagaagga

SEQ ID NO: 254089 - RNA, 19 nt, Homo sapiens
  misc_RNA (1)...(19): siRNA sense strand
gcacugagagcauuaacag

SEQ ID NO: 254090 - RNA, 19 nt, Homo sapiens
  misc_RNA (1)...(19): siRNA sense strand
ucugggcgcuggaguuaaa

SEQ ID NO: 254091 - RNA, 19 nt, Homo sapiens
  misc_RNA (1)...(19): siRNA sense strand
gagacgcacugagagcauu

SEQ ID NO: 254092 - RNA, 19 nt, Homo sapiens
  misc_RNA (1)...(19): siRNA sense strand
ggccaaggaugcacagucu

SEQ ID NO: 254093 - RNA, 19 nt, Homo sapiens
  misc_RNA (1)...(19): siRNA sense strand
accaagcucuccaagauca

SEQ ID NO: 254094 - RNA, 19 nt, Homo sapiens
  misc_RNA (1)...(19): siRNA sense strand
ucuccaagaucaagacucu

SEQ ID NO: 254095 - RNA, 19 nt, Homo sapiens
  misc_RNA (1)...(19): siRNA sense strand
gagcauuaacagcgcauuc

SEQ ID NO: 254096 - RNA, 19 nt, Homo sapiens
  misc_RNA (1)...(19): siRNA sense strand
gcagcuacgcacaccauca

SEQ ID NO: 254097 - RNA, 19 nt, Homo sapiens
  misc_RNA (1)...(19): siRNA sense strand
ccagucgagaagaggauua

SEQ ID NO: 254098 - RNA, 19 nt, Homo sapiens
  misc_RNA (1)...(19): siRNA sense strand
cgagaagaggauuaaagga

SEQ ID NO: 254099 - RNA, 19 nt, Homo sapiens
  misc_RNA (1)...(19): siRNA sense strand
agucugggcgcuggaguua

SEQ ID NO: 254100 - RNA, 19 nt, Homo sapiens
  misc_RNA (1)...(19): siRNA sense strand
agacgcacugagagcauua

SEQ ID NO: 254101 - RNA, 19 nt, Homo sapiens
  misc_RNA (1)...(19): siRNA sense strand
ucaaggcugaacucaagaa

SEQ ID NO: 254102 - RNA, 19 nt, Homo sapiens
  misc_RNA (1)...(19): siRNA sense strand
uggacgugcuggccaagga

SEQ ID NO: 254103 - RNA, 19 nt, Homo sapiens
  misc_RNA (1)...(19): siRNA sense strand
ucaggaaaggcccuacuuc

SEQ ID NO: 254104 - RNA, 19 nt, Homo sapiens
  misc_RNA (1)...(19): siRNA sense strand
gacaccaagcucuccaaga

SEQ ID NO: 254105 - RNA, 19 nt, Homo sapiens
  misc_RNA (1)...(19): siRNA sense strand
ggacaucgccugcaagugu

SEQ ID NO: 254106 - RNA, 19 nt, Homo sapiens
  misc_RNA (1)...(19): siRNA sense strand
gaacaucaucuccguguau

SEQ ID NO: 254107 - RNA, 19 nt, Homo sapiens
  misc_RNA (1)...(19): siRNA sense strand
ggcaagaaguucgaaguga

SEQ ID NO: 254108 - RNA, 19 nt, Homo sapiens
  misc_RNA (1)...(19): siRNA sense strand
gcugaagauuaacaugaaa

SEQ ID NO: 254109 - RNA, 19 nt, Homo sapiens
  misc_RNA (1)...(19): siRNA sense strand
gcugcaagcccuuccacua

SEQ ID NO: 254110 - RNA, 19 nt, Homo sapiens
  misc_RNA (1)...(19): siRNA sense strand
caacauggagcucuacaag

SEQ ID NO: 254111 - RNA, 19 nt, Homo sapiens
  misc_RNA (1)...(19): siRNA sense strand
ggcaaaaccugcaaccaaa

SEQ ID NO: 254112 - RNA, 19 nt, Homo sapiens
  misc_RNA (1)...(19): siRNA sense strand
gcaagcccuuccacuacga

SEQ ID NO: 254113 - RNA, 19 nt, Homo sapiens
  misc_RNA (1)...(19): siRNA sense strand
ugacggguaucaccugcaa

SEQ ID NO: 254114 - RNA, 19 nt, Homo sapiens
  misc_RNA (1)...(19): siRNA sense strand
ucaagccccucaagaagua

SEQ ID NO: 254115 - RNA, 19 nt, Homo sapiens
  misc_RNA (1)...(19): siRNA sense strand
aacaucaucuccguguaua

SEQ ID NO: 254116 - RNA, 19 nt, Homo sapiens
  misc_RNA (1)...(19): siRNA sense strand
ccgaguccauggccaucua

SEQ ID NO: 254117 - RNA, 19 nt, Homo sapiens
  misc_RNA (1)...(19): siRNA sense strand
ccaaaccaccggccagugu

SEQ ID NO: 254118 - RNA, 19 nt, Homo sapiens
  misc_RNA (1)...(19): siRNA sense strand
ugaacaucaucuccgugua

SEQ ID NO: 254119 - RNA, 19 nt, Homo sapiens
  misc_RNA (1)...(19): siRNA sense strand
acgagugcguggccuguaa

SEQ ID NO: 254120 - RNA, 19 nt, Homo sapiens
  misc_RNA (1)...(19): siRNA sense strand
aggggaagcugaagauuaa

SEQ ID NO: 254121 - RNA, 19 nt, Homo sapiens
  misc_RNA (1)...(19): siRNA sense strand
gcuucaacauggagcucua

SEQ ID NO: 254122 - RNA, 19 nt, Homo sapiens
  misc_RNA (1)...(19): siRNA sense strand
aagcugaagauuaacauga

SEQ ID NO: 254123 - RNA, 19 nt, Homo sapiens
  misc_RNA (1)...(19): siRNA sense strand
gaagggcaagugcaagaag

SEQ ID NO: 254124 - RNA, 19 nt, Homo sapiens
  misc_RNA (1)...(19): siRNA sense strand
gcuggcaguccgagaacua

SEQ ID NO: 254125 - RNA, 19 nt, Homo sapiens
  misc_RNA (1)...(19): siRNA sense strand
gaagcugaagauuaacaug

SEQ ID NO: 254126 - RNA, 19 nt, Homo sapiens
  misc_RNA (1)...(19): siRNA sense strand
gcaagugucccaaaaucaa

SEQ ID NO: 254127 - RNA, 19 nt, Homo sapiens
  misc_RNA (1)...(19): siRNA sense strand
agaagaagggcaagugcaa

SEQ ID NO: 254128 - RNA, 19 nt, Homo sapiens
  misc_RNA (1)...(19): siRNA sense strand
ccauggccaucuacaaguc

SEQ ID NO: 254129 - RNA, 19 nt, Homo sapiens
  misc_RNA (1)...(19): siRNA sense strand
ggucacggccacagacauc

SEQ ID NO: 254130 - RNA, 19 nt, Homo sapiens
  misc_RNA (1)...(19): siRNA sense strand
ugugggugcugcuggcaaa

SEQ ID NO: 254131 - RNA, 19 nt, Homo sapiens
  misc_RNA (1)...(19): siRNA sense strand
gcgcugccgcuucaacaug

SEQ ID NO: 254132 - RNA, 19 nt, Homo sapiens
  misc_RNA (1)...(19): siRNA sense strand
agcugaagauuaacaugaa

SEQ ID NO: 254133 - RNA, 19 nt, Homo sapiens
  misc_RNA (1)...(19): siRNA sense strand
ggaagcugaagauuaacau

SEQ ID NO: 254134 - RNA, 19 nt, Homo sapiens
  misc_RNA (1)...(19): siRNA sense strand
gggcuacuaccgcgacaug

SEQ ID NO: 254135 - RNA, 19 nt, Homo sapiens
  misc_RNA (1)...(19): siRNA sense strand
gggaagcugaagauuaaca

SEQ ID NO: 254136 - RNA, 19 nt, Homo sapiens
  misc_RNA (1)...(19): siRNA sense strand
aagaagggcaagugcaaga

SEQ ID NO: 254137 - RNA, 19 nt, Homo sapiens
  misc_RNA (1)...(19): siRNA sense strand
caucaucuccguguauaag

SEQ ID NO: 254138 - RNA, 19 nt, Homo sapiens
  misc_RNA (1)...(19): siRNA sense strand
gcgcacgacuucgacaacu

SEQ ID NO: 254139 - RNA, 19 nt, Homo sapiens
  misc_RNA (1)...(19): siRNA sense strand
ccucaacugucgccacaac

SEQ ID NO: 254140 - RNA, 19 nt, Homo sapiens
  misc_RNA (1)...(19): siRNA sense strand
ucagccgccugcacacguu

SEQ ID NO: 254141 - RNA, 19 nt, Homo sapiens
  misc_RNA (1)...(19): siRNA sense strand
gcacaacgucacgcucaca

SEQ ID NO: 254142 - RNA, 19 nt, Homo sapiens
  misc_RNA (1)...(19): siRNA sense strand
gcgcgacucguacuucuac

SEQ ID NO: 254143 - RNA, 19 nt, Homo sapiens
  misc_RNA (1)...(19): siRNA sense strand
gcucgugccaccucugcaa

SEQ ID NO: 254144 - RNA, 19 nt, Homo sapiens
  misc_RNA (1)...(19): siRNA sense strand
acacaacgccacugacuga

SEQ ID NO: 254145 - RNA, 19 nt, Homo sapiens
  misc_RNA (1)...(19): siRNA sense strand
gaggaggccuggagcuucu

SEQ ID NO: 254146 - RNA, 19 nt, Homo sapiens
  misc_RNA (1)...(19): siRNA sense strand
gcacuugguggcccuguug

SEQ ID NO: 254147 - RNA, 19 nt, Homo sapiens
  misc_RNA (1)...(19): siRNA sense strand
ggucacagucuaccucuuc

SEQ ID NO: 254148 - RNA, 19 nt, Homo sapiens
  misc_RNA (1)...(19): siRNA sense strand
acaaggugcuggucacagu

SEQ ID NO: 254149 - RNA, 19 nt, Homo sapiens
  misc_RNA (1)...(19): siRNA sense strand
guagugaccgucugcuuuc

SEQ ID NO: 254150 - RNA, 19 nt, Homo sapiens
  misc_RNA (1)...(19): siRNA sense strand
cguagugaccgucugcuuu

SEQ ID NO: 254151 - RNA, 19 nt, Homo sapiens
  misc_RNA (1)...(19): siRNA sense strand
gccuucuacuucugcuuua

SEQ ID NO: 254152 - RNA, 19 nt, Homo sapiens
  misc_RNA (1)...(19): siRNA sense strand
guacacaacgccacugacu

SEQ ID NO: 254153 - RNA, 19 nt, Homo sapiens
  misc_RNA (1)...(19): siRNA sense strand
ggccuucuccaucgccuuu

SEQ ID NO: 254154 - RNA, 19 nt, Homo sapiens
  misc_RNA (1)...(19): siRNA sense strand
cuucuuggaugccuucuac

SEQ ID NO: 254155 - RNA, 19 nt, Homo sapiens
  misc_RNA (1)...(19): siRNA sense strand
ggcgggucgugcuugcuaa

SEQ ID NO: 254156 - RNA, 19 nt, Homo sapiens
  misc_RNA (1)...(19): siRNA sense strand
cuucgccucugcucucuuc

SEQ ID NO: 254157 - RNA, 19 nt, Homo sapiens
  misc_RNA (1)...(19): siRNA sense strand
cgccucugcucucuucuuc

SEQ ID NO: 254158 - RNA, 19 nt, Homo sapiens
  misc_RNA (1)...(19): siRNA sense strand
cuacuucugcuuuaucucu

SEQ ID NO: 254159 - RNA, 19 nt, Homo sapiens
  misc_RNA (1)...(19): siRNA sense strand
gagaauaacucacuaaauc

SEQ ID NO: 254160 - RNA, 19 nt, Homo sapiens
  misc_RNA (1)...(19): siRNA sense strand
gaagaucgaugaguucuga

SEQ ID NO: 254161 - RNA, 19 nt, Homo sapiens
  misc_RNA (1)...(19): siRNA sense strand
gaagugaugguucgcauua

SEQ ID NO: 254162 - RNA, 19 nt, Homo sapiens
  misc_RNA (1)...(19): siRNA sense strand
gaaacuucgugaauacuuu

SEQ ID NO: 254163 - RNA, 19 nt, Homo sapiens
  misc_RNA (1)...(19): siRNA sense strand
gaaagugccuacagauaca

SEQ ID NO: 254164 - RNA, 19 nt, Homo sapiens
  misc_RNA (1)...(19): siRNA sense strand
gcaucuauauugccucuuu

SEQ ID NO: 254165 - RNA, 19 nt, Homo sapiens
  misc_RNA (1)...(19): siRNA sense strand
gaaauuuauugacgacaga

SEQ ID NO: 254166 - RNA, 19 nt, Homo sapiens
  misc_RNA (1)...(19): siRNA sense strand
gacaagcgauugcguuuca

SEQ ID NO: 254167 - RNA, 19 nt, Homo sapiens
  misc_RNA (1)...(19): siRNA sense strand
uaaaguacuugcagaggaa

SEQ ID NO: 254168 - RNA, 19 nt, Homo sapiens
  misc_RNA (1)...(19): siRNA sense strand
guucauggaugcauuaaca

SEQ ID NO: 254169 - RNA, 19 nt, Homo sapiens
  misc_RNA (1)...(19): siRNA sense strand
gcaauccaguugugcuuga

SEQ ID NO: 254170 - RNA, 19 nt, Homo sapiens
  misc_RNA (1)...(19): siRNA sense strand
acaaaguccucagagaaua

SEQ ID NO: 254171 - RNA, 19 nt, Homo sapiens
  misc_RNA (1)...(19): siRNA sense strand
uaagaagcccauuauugua

SEQ ID NO: 254172 - RNA, 19 nt, Homo sapiens
  misc_RNA (1)...(19): siRNA sense strand
agaggaagaucgaugaguu

SEQ ID NO: 254173 - RNA, 19 nt, Homo sapiens
  misc_RNA (1)...(19): siRNA sense strand
ccacaaaguccucagagaa

SEQ ID NO: 254174 - RNA, 19 nt, Homo sapiens
  misc_RNA (1)...(19): siRNA sense strand
cagaaagugccuacagaua

SEQ ID NO: 254175 - RNA, 19 nt, Homo sapiens
  misc_RNA (1)...(19): siRNA sense strand
guacaucuccguucaugga

SEQ ID NO: 254176 - RNA, 19 nt, Homo sapiens
  misc_RNA (1)...(19): siRNA sense strand
uuaagaagcccauuauugu

SEQ ID NO: 254177 - RNA, 19 nt, Homo sapiens
  misc_RNA (1)...(19): siRNA sense strand
gagauauuguggucaggaa

SEQ ID NO: 254178 - RNA, 19 nt, Homo sapiens
  misc_RNA (1)...(19): siRNA sense strand
guuguggacuugacuuuau

SEQ ID NO: 254179 - RNA, 19 nt, Homo sapiens
  misc_RNA (1)...(19): siRNA sense strand
gccuacagauacagagaua

SEQ ID NO: 254180 - RNA, 19 nt, Homo sapiens
  misc_RNA (1)...(19): siRNA sense strand
ucuaggagcaucuauauug

SEQ ID NO: 254181 - RNA, 19 nt, Homo sapiens
  misc_RNA (1)...(19): siRNA sense strand
ucagaaacuucgugaauac

SEQ ID NO: 254182 - RNA, 19 nt, Homo sapiens
  misc_RNA (1)...(19): siRNA sense strand
caaaguccucagagaauaa

SEQ ID NO: 254183 - RNA, 19 nt, Homo sapiens
  misc_RNA (1)...(19): siRNA sense strand
caauuuaagaagcccauua

SEQ ID NO: 254184 - RNA, 19 nt, Homo sapiens
  misc_RNA (1)...(19): siRNA sense strand
caaccaacauacagacauc

SEQ ID NO: 254185 - RNA, 19 nt, Homo sapiens
  misc_RNA (1)...(19): siRNA sense strand
gaagagaccagccuuuuga

SEQ ID NO: 254186 - RNA, 19 nt, Homo sapiens
  misc_RNA (1)...(19): siRNA sense strand
gauggcuguucuaccguua

SEQ ID NO: 254187 - RNA, 19 nt, Homo sapiens
  misc_RNA (1)...(19): siRNA sense strand
cuacagauacagagauauu

SEQ ID NO: 254188 - RNA, 19 nt, Homo sapiens
  misc_RNA (1)...(19): siRNA sense strand
gaaaagagaaagcacuaaa

SEQ ID NO: 254189 - RNA, 19 nt, Homo sapiens
  misc_RNA (1)...(19): siRNA sense strand
ggucuaggagcaucuauau

SEQ ID NO: 254190 - RNA, 19 nt, Homo sapiens
  misc_RNA (1)...(19): siRNA sense strand
ggcagaagcuaucagaaac

SEQ ID NO: 254191 - RNA, 19 nt, Homo sapiens
  misc_RNA (1)...(19): siRNA sense strand
cagaagcuaucagaaacuu

SEQ ID NO: 254192 - RNA, 19 nt, Homo sapiens
  misc_RNA (1)...(19): siRNA sense strand
uaucagaaacuucgugaau

SEQ ID NO: 254193 - RNA, 19 nt, Homo sapiens
  misc_RNA (1)...(19): siRNA sense strand
agugugaggugcugaagaa

SEQ ID NO: 254194 - RNA, 19 nt, Homo sapiens
  misc_RNA (1)...(19): siRNA sense strand
cguuauguuucccaagaua

SEQ ID NO: 254195 - RNA, 19 nt, Homo sapiens
  misc_RNA (1)...(19): siRNA sense strand
uuuaagaagcccauuauug

SEQ ID NO: 254196 - RNA, 19 nt, Homo sapiens
  misc_RNA (1)...(19): siRNA sense strand
gcgaugugguuugggcuaa

SEQ ID NO: 254197 - RNA, 19 nt, Homo sapiens
  misc_RNA (1)...(19): siRNA sense strand
uggcagaagcuaucagaaa

SEQ ID NO: 254198 - RNA, 19 nt, Homo sapiens
  misc_RNA (1)...(19): siRNA sense strand
ccaacgagagggaguguga

SEQ ID NO: 254199 - RNA, 19 nt, Homo sapiens
  misc_RNA (1)...(19): siRNA sense strand
caaugggacaaccaacaua

SEQ ID NO: 254200 - RNA, 19 nt, Homo sapiens
  misc_RNA (1)...(19): siRNA sense strand
gcugcaacaugaagaugga

SEQ ID NO: 254201 - RNA, 19 nt, Homo sapiens
  misc_RNA (1)...(19): siRNA sense strand
gaauaacucacuaaaucca

SEQ ID NO: 254202 - RNA, 19 nt, Homo sapiens
  misc_RNA (1)...(19): siRNA sense strand
gauaaugggaggagcaucu

SEQ ID NO: 254203 - RNA, 19 nt, Homo sapiens
  misc_RNA (1)...(19): siRNA sense strand
aacagaaagugccuacaga

SEQ ID NO: 254204 - RNA, 19 nt, Homo sapiens
  misc_RNA (1)...(19): siRNA sense strand
aucagaaacuucgugaaua

SEQ ID NO: 254205 - RNA, 19 nt, Homo sapiens
  misc_RNA (1)...(19): siRNA sense strand
cagagaauaacucacuaaa

SEQ ID NO: 254206 - RNA, 19 nt, Homo sapiens
  misc_RNA (1)...(19): siRNA sense strand
gaugugguuugggcuaaug

SEQ ID NO: 254207 - RNA, 19 nt, Homo sapiens
  misc_RNA (1)...(19): siRNA sense strand
cacaaaguccucagagaau

SEQ ID NO: 254208 - RNA, 19 nt, Homo sapiens
  misc_RNA (1)...(19): siRNA sense strand
ggaagugaugguucgcauu

SEQ ID NO: 254209 - RNA, 19 nt, Homo sapiens
  misc_RNA (1)...(19): siRNA sense strand
ucagagaauaacucacuaa

SEQ ID NO: 254210 - RNA, 19 nt, Homo sapiens
  misc_RNA (1)...(19): siRNA sense strand
ucacccacaucuuguuauc

SEQ ID NO: 254211 - RNA, 19 nt, Homo sapiens
  misc_RNA (1)...(19): siRNA sense strand
aggagugacugccagcaaa

SEQ ID NO: 254212 - RNA, 19 nt, Homo sapiens
  misc_RNA (1)...(19): siRNA sense strand
agaaagugccuacagauac

SEQ ID NO: 254213 - RNA, 19 nt, Homo sapiens
  misc_RNA (1)...(19): siRNA sense strand
gaggaagaucgaugaguuc

SEQ ID NO: 254214 - RNA, 19 nt, Homo sapiens
  misc_RNA (1)...(19): siRNA sense strand
gggaggagcaucugcaaac

SEQ ID NO: 254215 - RNA, 19 nt, Homo sapiens
  misc_RNA (1)...(19): siRNA sense strand
cucacuaaauccagaggua

SEQ ID NO: 254216 - RNA, 19 nt, Homo sapiens
  misc_RNA (1)...(19): siRNA sense strand
cucgugcgcugcaacauga

SEQ ID NO: 254217 - RNA, 19 nt, Homo sapiens
  misc_RNA (1)...(19): siRNA sense strand
caucuauauugccucuuug

SEQ ID NO: 254218 - RNA, 19 nt, Homo sapiens
  misc_RNA (1)...(19): siRNA sense strand
cgucuucuguuguggacuu

SEQ ID NO: 254219 - RNA, 19 nt, Homo sapiens
  misc_RNA (1)...(19): siRNA sense strand
ggcagcgucuucuguugug

SEQ ID NO: 254220 - RNA, 19 nt, Homo sapiens
  misc_RNA (1)...(19): siRNA sense strand
ucacuaaauccagagguaa

SEQ ID NO: 254221 - RNA, 19 nt, Homo sapiens
  misc_RNA (1)...(19): siRNA sense strand
caguugugcuugaggaauc

SEQ ID NO: 254222 - RNA, 19 nt, Homo sapiens
  misc_RNA (1)...(19): siRNA sense strand
aaacagaaagugccuacag

SEQ ID NO: 254223 - RNA, 19 nt, Homo sapiens
  misc_RNA (1)...(19): siRNA sense strand
gcuguucuaccguuauguu

SEQ ID NO: 254224 - RNA, 19 nt, Homo sapiens
  misc_RNA (1)...(19): siRNA sense strand
uggcuucacccacaucuug

SEQ ID NO: 254225 - RNA, 19 nt, Homo sapiens
  misc_RNA (1)...(19): siRNA sense strand
ggacguucacucaggaagu

SEQ ID NO: 254226 - RNA, 19 nt, Homo sapiens
  misc_RNA (1)...(19): siRNA sense strand
uauaccaccuucggacaga

SEQ ID NO: 254227 - RNA, 19 nt, Homo sapiens
  misc_RNA (1)...(19): siRNA sense strand
gaagcccauuauuguagca

SEQ ID NO: 254228 - RNA, 19 nt, Homo sapiens
  misc_RNA (1)...(19): siRNA sense strand
aagaagcccauuauuguag

SEQ ID NO: 254229 - RNA, 19 nt, Homo sapiens
  misc_RNA (1)...(19): siRNA sense strand
gggacaaccaacauacaga

SEQ ID NO: 254230 - RNA, 19 nt, Homo sapiens
  misc_RNA (1)...(19): siRNA sense strand
auccagagguaaugagaga

SEQ ID NO: 254231 - RNA, 19 nt, Homo sapiens
  misc_RNA (1)...(19): siRNA sense strand
gugaggugcugaagaaaau

SEQ ID NO: 254232 - RNA, 19 nt, Homo sapiens
  misc_RNA (1)...(19): siRNA sense strand
ccaaugggacaaccaacau

SEQ ID NO: 254233 - RNA, 19 nt, Homo sapiens
  misc_RNA (1)...(19): siRNA sense strand
guggacuugacuuuauuua

SEQ ID NO: 254234 - RNA, 19 nt, Homo sapiens
  misc_RNA (1)...(19): siRNA sense strand
gaggagcaucugcaaacga

SEQ ID NO: 254235 - RNA, 19 nt, Homo sapiens
  misc_RNA (1)...(19): siRNA sense strand
ggaggagcaucugcaaacg

SEQ ID NO: 254236 - RNA, 19 nt, Homo sapiens
  misc_RNA (1)...(19): siRNA sense strand
gcagaagcuaucagaaacu

SEQ ID NO: 254237 - RNA, 19 nt, Homo sapiens
  misc_RNA (1)...(19): siRNA sense strand
cuucacccacaucuuguua

SEQ ID NO: 254238 - RNA, 19 nt, Homo sapiens
  misc_RNA (1)...(19): siRNA sense strand
cuaggagcaucuauauugc

SEQ ID NO: 254239 - RNA, 19 nt, Homo sapiens
  misc_RNA (1)...(19): siRNA sense strand
uccacaaaguccucagaga

SEQ ID NO: 254240 - RNA, 19 nt, Homo sapiens
  misc_RNA (1)...(19): siRNA sense strand
acagaagagaccagccuuu

SEQ ID NO: 254241 - RNA, 19 nt, Homo sapiens
  misc_RNA (1)...(19): siRNA sense strand
cuaaauccagagguaauga

SEQ ID NO: 254242 - RNA, 19 nt, Homo sapiens
  misc_RNA (1)...(19): siRNA sense strand
ccucagagaauaacucacu

SEQ ID NO: 254243 - RNA, 19 nt, Homo sapiens
  misc_RNA (1)...(19): siRNA sense strand
accguuauguuucccaaga

SEQ ID NO: 254244 - RNA, 19 nt, Homo sapiens
  misc_RNA (1)...(19): siRNA sense strand
acagauacagagauauugu

SEQ ID NO: 254245 - RNA, 19 nt, Homo sapiens
  misc_RNA (1)...(19): siRNA sense strand
gccaaugggacaaccaaca

SEQ ID NO: 254246 - RNA, 19 nt, Homo sapiens
  misc_RNA (1)...(19): siRNA sense strand
agaaacuucgugaauacuu

SEQ ID NO: 254247 - RNA, 19 nt, Homo sapiens
  misc_RNA (1)...(19): siRNA sense strand
gaguccagauggcuguucu

SEQ ID NO: 254248 - RNA, 19 nt, Homo sapiens
  misc_RNA (1)...(19): siRNA sense strand
gagaauaacucacuaaauc

SEQ ID NO: 254249 - RNA, 19 nt, Homo sapiens
  misc_RNA (1)...(19): siRNA sense strand
gaagaucgaugaguucuga

SEQ ID NO: 254250 - RNA, 19 nt, Homo sapiens
  misc_RNA (1)...(19): siRNA sense strand
gaagugaugguucgcauua

SEQ ID NO: 254251 - RNA, 19 nt, Homo sapiens
  misc_RNA (1)...(19): siRNA sense strand
gaaacuucgugaauacuuu

SEQ ID NO: 254252 - RNA, 19 nt, Homo sapiens
  misc_RNA (1)...(19): siRNA sense strand
gaaagugccuacagauaca

SEQ ID NO: 254253 - RNA, 19 nt, Homo sapiens
  misc_RNA (1)...(19): siRNA sense strand
gcaucuauauugccucuuu

SEQ ID NO: 254254 - RNA, 19 nt, Homo sapiens
  misc_RNA (1)...(19): siRNA sense strand
gaaauuuauugacgacaga

SEQ ID NO: 254255 - RNA, 19 nt, Homo sapiens
  misc_RNA (1)...(19): siRNA sense strand
gacaagcgauugcguuuca

SEQ ID NO: 254256 - RNA, 19 nt, Homo sapiens
  misc_RNA (1)...(19): siRNA sense strand
uaaaguacuugcagaggaa

SEQ ID NO: 254257 - RNA, 19 nt, Homo sapiens
  misc_RNA (1)...(19): siRNA sense strand
guucauggaugcauuaaca

SEQ ID NO: 254258 - RNA, 19 nt, Homo sapiens
  misc_RNA (1)...(19): siRNA sense strand
gcaauccaguugugcuuga

SEQ ID NO: 254259 - RNA, 19 nt, Homo sapiens
  misc_RNA (1)...(19): siRNA sense strand
acaaaguccucagagaaua

SEQ ID NO: 254260 - RNA, 19 nt, Homo sapiens
  misc_RNA (1)...(19): siRNA sense strand
uaagaagcccauuauugua

SEQ ID NO: 254261 - RNA, 19 nt, Homo sapiens
  misc_RNA (1)...(19): siRNA sense strand
agaggaagaucgaugaguu

SEQ ID NO: 254262 - RNA, 19 nt, Homo sapiens
  misc_RNA (1)...(19): siRNA sense strand
ccacaaaguccucagagaa

SEQ ID NO: 254263 - RNA, 19 nt, Homo sapiens
  misc_RNA (1)...(19): siRNA sense strand
cagaaagugccuacagaua

SEQ ID NO: 254264 - RNA, 19 nt, Homo sapiens
  misc_RNA (1)...(19): siRNA sense strand
guacaucuccguucaugga

SEQ ID NO: 254265 - RNA, 19 nt, Homo sapiens
  misc_RNA (1)...(19): siRNA sense strand
uuaagaagcccauuauugu

SEQ ID NO: 254266 - RNA, 19 nt, Homo sapiens
  misc_RNA (1)...(19): siRNA sense strand
gagauauuguggucaggaa

SEQ ID NO: 254267 - RNA, 19 nt, Homo sapiens
  misc_RNA (1)...(19): siRNA sense strand
guuguggacuugacuuuau

SEQ ID NO: 254268 - RNA, 19 nt, Homo sapiens
  misc_RNA (1)...(19): siRNA sense strand
gccuacagauacagagaua

SEQ ID NO: 254269 - RNA, 19 nt, Homo sapiens
  misc_RNA (1)...(19): siRNA sense strand
ucuaggagcaucuauauug

SEQ ID NO: 254270 - RNA, 19 nt, Homo sapiens
  misc_RNA (1)...(19): siRNA sense strand
ucagaaacuucgugaauac

SEQ ID NO: 254271 - RNA, 19 nt, Homo sapiens
  misc_RNA (1)...(19): siRNA sense strand
caaaguccucagagaauaa

SEQ ID NO: 254272 - RNA, 19 nt, Homo sapiens
  misc_RNA (1)...(19): siRNA sense strand
caauuuaagaagcccauua

SEQ ID NO: 254273 - RNA, 19 nt, Homo sapiens
  misc_RNA (1)...(19): siRNA sense strand
caaccaacauacagacauc

SEQ ID NO: 254274 - RNA, 19 nt, Homo sapiens
  misc_RNA (1)...(19): siRNA sense strand
gaagagaccagccuuuuga

SEQ ID NO: 254275 - RNA, 19 nt, Homo sapiens
  misc_RNA (1)...(19): siRNA sense strand
gauggcuguucuaccguua

SEQ ID NO: 254276 - RNA, 19 nt, Homo sapiens
  misc_RNA (1)...(19): siRNA sense strand
cuacagauacagagauauu

SEQ ID NO: 254277 - RNA, 19 nt, Homo sapiens
  misc_RNA (1)...(19): siRNA sense strand
gaaaagagaaagcacuaaa

SEQ ID NO: 254278 - RNA, 19 nt, Homo sapiens
  misc_RNA (1)...(19): siRNA sense strand
ggucuaggagcaucuauau

SEQ ID NO: 254279 - RNA, 19 nt, Homo sapiens
  misc_RNA (1)...(19): siRNA sense strand
ggcagaagcuaucagaaac

SEQ ID NO: 254280 - RNA, 19 nt, Homo sapiens
  misc_RNA (1)...(19): siRNA sense strand
cagaagcuaucagaaacuu

SEQ ID NO: 254281 - RNA, 19 nt, Homo sapiens
  misc_RNA (1)...(19): siRNA sense strand
uaucagaaacuucgugaau

SEQ ID NO: 254282 - RNA, 19 nt, Homo sapiens
  misc_RNA (1)...(19): siRNA sense strand
agugugaggugcugaagaa

SEQ ID NO: 254283 - RNA, 19 nt, Homo sapiens
  misc_RNA (1)...(19): siRNA sense strand
cguuauguuucccaagaua

SEQ ID NO: 254284 - RNA, 19 nt, Homo sapiens
  misc_RNA (1)...(19): siRNA sense strand
uuuaagaagcccauuauug

SEQ ID NO: 254285 - RNA, 19 nt, Homo sapiens
  misc_RNA (1)...(19): siRNA sense strand
gcgaugugguuugggcuaa

SEQ ID NO: 254286 - RNA, 19 nt, Homo sapiens
  misc_RNA (1)...(19): siRNA sense strand
uggcagaagcuaucagaaa

SEQ ID NO: 254287 - RNA, 19 nt, Homo sapiens
  misc_RNA (1)...(19): siRNA sense strand
ccaacgagagggaguguga

SEQ ID NO: 254288 - RNA, 19 nt, Homo sapiens
  misc_RNA (1)...(19): siRNA sense strand
caaugggacaaccaacaua

SEQ ID NO: 254289 - RNA, 19 nt, Homo sapiens
  misc_RNA (1)...(19): siRNA sense strand
gcugcaacaugaagaugga

SEQ ID NO: 254290 - RNA, 19 nt, Homo sapiens
  misc_RNA (1)...(19): siRNA sense strand
gaauaacucacuaaaucca

SEQ ID NO: 254291 - RNA, 19 nt, Homo sapiens
  misc_RNA (1)...(19): siRNA sense strand
gauaaugggaggagcaucu

SEQ ID NO: 254292 - RNA, 19 nt, Homo sapiens
  misc_RNA (1)...(19): siRNA sense strand
aacagaaagugccuacaga

SEQ ID NO: 254293 - RNA, 19 nt, Homo sapiens
  misc_RNA (1)...(19): siRNA sense strand
aucagaaacuucgugaaua

SEQ ID NO: 254294 - RNA, 19 nt, Homo sapiens
  misc_RNA (1)...(19): siRNA sense strand
cagagaauaacucacuaaa

SEQ ID NO: 254295 - RNA, 19 nt, Homo sapiens
  misc_RNA (1)...(19): siRNA sense strand
gaugugguuugggcuaaug

SEQ ID NO: 254296 - RNA, 19 nt, Homo sapiens
  misc_RNA (1)...(19): siRNA sense strand
cacaaaguccucagagaau

SEQ ID NO: 254297 - RNA, 19 nt, Homo sapiens
  misc_RNA (1)...(19): siRNA sense strand
ggaagugaugguucgcauu

SEQ ID NO: 254298 - RNA, 19 nt, Homo sapiens
  misc_RNA (1)...(19): siRNA sense strand
ucagagaauaacucacuaa

SEQ ID NO: 254299 - RNA, 19 nt, Homo sapiens
  misc_RNA (1)...(19): siRNA sense strand
ucacccacaucuuguuauc

SEQ ID NO: 254300 - RNA, 19 nt, Homo sapiens
  misc_RNA (1)...(19): siRNA sense strand
aggagugacugccagcaaa

SEQ ID NO: 254301 - RNA, 19 nt, Homo sapiens
  misc_RNA (1)...(19): siRNA sense strand
agaaagugccuacagauac

SEQ ID NO: 254302 - RNA, 19 nt, Homo sapiens
  misc_RNA (1)...(19): siRNA sense strand
gaggaagaucgaugaguuc

SEQ ID NO: 254303 - RNA, 19 nt, Homo sapiens
  misc_RNA (1)...(19): siRNA sense strand
gggaggagcaucugcaaac

SEQ ID NO: 254304 - RNA, 19 nt, Homo sapiens
  misc_RNA (1)...(19): siRNA sense strand
cucacuaaauccagaggua

SEQ ID NO: 254305 - RNA, 19 nt, Homo sapiens
  misc_RNA (1)...(19): siRNA sense strand
cucgugcgcugcaacauga

SEQ ID NO: 254306 - RNA, 19 nt, Homo sapiens
  misc_RNA (1)...(19): siRNA sense strand
caucuauauugccucuuug

SEQ ID NO: 254307 - RNA, 19 nt, Homo sapiens
  misc_RNA (1)...(19): siRNA sense strand
cgucuucuguuguggacuu

SEQ ID NO: 254308 - RNA, 19 nt, Homo sapiens
  misc_RNA (1)...(19): siRNA sense strand
ggcagcgucuucuguugug

SEQ ID NO: 254309 - RNA, 19 nt, Homo sapiens
  misc_RNA (1)...(19): siRNA sense strand
ucacuaaauccagagguaa

SEQ ID NO: 254310 - RNA, 19 nt, Homo sapiens
  misc_RNA (1)...(19): siRNA sense strand
caguugugcuugaggaauc

SEQ ID NO: 254311 - RNA, 19 nt, Homo sapiens
  misc_RNA (1)...(19): siRNA sense strand
aaacagaaagugccuacag

SEQ ID NO: 254312 - RNA, 19 nt, Homo sapiens
  misc_RNA (1)...(19): siRNA sense strand
gcuguucuaccguuauguu

SEQ ID NO: 254313 - RNA, 19 nt, Homo sapiens
  misc_RNA (1)...(19): siRNA sense strand
uggcuucacccacaucuug

SEQ ID NO: 254314 - RNA, 19 nt, Homo sapiens
  misc_RNA (1)...(19): siRNA sense strand
ggacguucacucaggaagu

SEQ ID NO: 254315 - RNA, 19 nt, Homo sapiens
  misc_RNA (1)...(19): siRNA sense strand
uauaccaccuucggacaga

SEQ ID NO: 254316 - RNA, 19 nt, Homo sapiens
  misc_RNA (1)...(19): siRNA sense strand
gaagcccauuauuguagca

SEQ ID NO: 254317 - RNA, 19 nt, Homo sapiens
  misc_RNA (1)...(19): siRNA sense strand
aagaagcccauuauuguag

SEQ ID NO: 254318 - RNA, 19 nt, Homo sapiens
  misc_RNA (1)...(19): siRNA sense strand
gggacaaccaacauacaga

SEQ ID NO: 254319 - RNA, 19 nt, Homo sapiens
  misc_RNA (1)...(19): siRNA sense strand
auccagagguaaugagaga

SEQ ID NO: 254320 - RNA, 19 nt, Homo sapiens
  misc_RNA (1)...(19): siRNA sense strand
gugaggugcugaagaaaau

SEQ ID NO: 254321 - RNA, 19 nt, Homo sapiens
  misc_RNA (1)...(19): siRNA sense strand
ccaaugggacaaccaacau

SEQ ID NO: 254322 - RNA, 19 nt, Homo sapiens
  misc_RNA (1)...(19): siRNA sense strand
guggacuugacuuuauuua

SEQ ID NO: 254323 - RNA, 19 nt, Homo sapiens
  misc_RNA (1)...(19): siRNA sense strand
gaggagcaucugcaaacga

SEQ ID NO: 254324 - RNA, 19 nt, Homo sapiens
  misc_RNA (1)...(19): siRNA sense strand
ggaggagcaucugcaaacg

SEQ ID NO: 254325 - RNA, 19 nt, Homo sapiens
  misc_RNA (1)...(19): siRNA sense strand
gcagaagcuaucagaaacu

SEQ ID NO: 254326 - RNA, 19 nt, Homo sapiens
  misc_RNA (1)...(19): siRNA sense strand
cuucacccacaucuuguua

SEQ ID NO: 254327 - RNA, 19 nt, Homo sapiens
  misc_RNA (1)...(19): siRNA sense strand
cuaggagcaucuauauugc

SEQ ID NO: 254328 - RNA, 19 nt, Homo sapiens
  misc_RNA (1)...(19): siRNA sense strand
uccacaaaguccucagaga

SEQ ID NO: 254329 - RNA, 19 nt, Homo sapiens
  misc_RNA (1)...(19): siRNA sense strand
acagaagagaccagccuuu

SEQ ID NO: 254330 - RNA, 19 nt, Homo sapiens
  misc_RNA (1)...(19): siRNA sense strand
cuaaauccagagguaauga

SEQ ID NO: 254331 - RNA, 19 nt, Homo sapiens
  misc_RNA (1)...(19): siRNA sense strand
ccucagagaauaacucacu

SEQ ID NO: 254332 - RNA, 19 nt, Homo sapiens
  misc_RNA (1)...(19): siRNA sense strand
accguuauguuucccaaga

SEQ ID NO: 254333 - RNA, 19 nt, Homo sapiens
  misc_RNA (1)...(19): siRNA sense strand
acagauacagagauauugu

SEQ ID NO: 254334 - RNA, 19 nt, Homo sapiens
  misc_RNA (1)...(19): siRNA sense strand
gccaaugggacaaccaaca

SEQ ID NO: 254335 - RNA, 19 nt, Homo sapiens
  misc_RNA (1)...(19): siRNA sense strand
agaaacuucgugaauacuu

SEQ ID NO: 254336 - RNA, 19 nt, Homo sapiens
  misc_RNA (1)...(19): siRNA sense strand
gaguccagauggcuguucu

SEQ ID NO: 254337 - RNA, 19 nt, Homo sapiens
  misc_RNA (1)...(19): siRNA sense strand
gagaauaacucacuaaauc

SEQ ID NO: 254338 - RNA, 19 nt, Homo sapiens
  misc_RNA (1)...(19): siRNA sense strand
gaagaucgaugaguucuga

SEQ ID NO: 254339 - RNA, 19 nt, Homo sapiens
  misc_RNA (1)...(19): siRNA sense strand
gaagugaugguucgcauua

SEQ ID NO: 254340 - RNA, 19 nt, Homo sapiens
  misc_RNA (1)...(19): siRNA sense strand
gaaacuucgugaauacuuu

SEQ ID NO: 254341 - RNA, 19 nt, Homo sapiens
  misc_RNA (1)...(19): siRNA sense strand
gaaagugccuacagauaca

SEQ ID NO: 254342 - RNA, 19 nt, Homo sapiens
  misc_RNA (1)...(19): siRNA sense strand
gcaucuauauugccucuuu

SEQ ID NO: 254343 - RNA, 19 nt, Homo sapiens
  misc_RNA (1)...(19): siRNA sense strand
gaaauuuauugacgacaga

SEQ ID NO: 254344 - RNA, 19 nt, Homo sapiens
  misc_RNA (1)...(19): siRNA sense strand
gacaagcgauugcguuuca

SEQ ID NO: 254345 - RNA, 19 nt, Homo sapiens
  misc_RNA (1)...(19): siRNA sense strand
uaaaguacuugcagaggaa

SEQ ID NO: 254346 - RNA, 19 nt, Homo sapiens
  misc_RNA (1)...(19): siRNA sense strand
gcaauccaguugugcuuga

SEQ ID NO: 254347 - RNA, 19 nt, Homo sapiens
  misc_RNA (1)...(19): siRNA sense strand
acaaaguccucagagaaua

SEQ ID NO: 254348 - RNA, 19 nt, Homo sapiens
  misc_RNA (1)...(19): siRNA sense strand
uaagaagcccauuauugua

SEQ ID NO: 254349 - RNA, 19 nt, Homo sapiens
  misc_RNA (1)...(19): siRNA sense strand
agaggaagaucgaugaguu

SEQ ID NO: 254350 - RNA, 19 nt, Homo sapiens
  misc_RNA (1)...(19): siRNA sense strand
ccacaaaguccucagagaa

SEQ ID NO: 254351 - RNA, 19 nt, Homo sapiens
  misc_RNA (1)...(19): siRNA sense strand
cagaaagugccuacagaua

SEQ ID NO: 254352 - RNA, 19 nt, Homo sapiens
  misc_RNA (1)...(19): siRNA sense strand
uuaagaagcccauuauugu

SEQ ID NO: 254353 - RNA, 19 nt, Homo sapiens
  misc_RNA (1)...(19): siRNA sense strand
gagauauuguggucaggaa

SEQ ID NO: 254354 - RNA, 19 nt, Homo sapiens
  misc_RNA (1)...(19): siRNA sense strand
guuguggacuugacuuuau

SEQ ID NO: 254355 - RNA, 19 nt, Homo sapiens
  misc_RNA (1)...(19): siRNA sense strand
gccuacagauacagagaua

SEQ ID NO: 254356 - RNA, 19 nt, Homo sapiens
  misc_RNA (1)...(19): siRNA sense strand
ucuaggagcaucuauauug

SEQ ID NO: 254357 - RNA, 19 nt, Homo sapiens
  misc_RNA (1)...(19): siRNA sense strand
ucagaaacuucgugaauac

SEQ ID NO: 254358 - RNA, 19 nt, Homo sapiens
  misc_RNA (1)...(19): siRNA sense strand
caaaguccucagagaauaa

SEQ ID NO: 254359 - RNA, 19 nt, Homo sapiens
  misc_RNA (1)...(19): siRNA sense strand
caauuuaagaagcccauua

SEQ ID NO: 254360 - RNA, 19 nt, Homo sapiens
  misc_RNA (1)...(19): siRNA sense strand
caaccaacauacagacauc

SEQ ID NO: 254361 - RNA, 19 nt, Homo sapiens
  misc_RNA (1)...(19): siRNA sense strand
gaagagaccagccuuuuga

SEQ ID NO: 254362 - RNA, 19 nt, Homo sapiens
  misc_RNA (1)...(19): siRNA sense strand
gauggcuguucuaccguua

SEQ ID NO: 254363 - RNA, 19 nt, Homo sapiens
  misc_RNA (1)...(19): siRNA sense strand
cuacagauacagagauauu

SEQ ID NO: 254364 - RNA, 19 nt, Homo sapiens
  misc_RNA (1)...(19): siRNA sense strand
gaaaagagaaagcacuaaa

SEQ ID NO: 254365 - RNA, 19 nt, Homo sapiens
  misc_RNA (1)...(19): siRNA sense strand
ggucuaggagcaucuauau

SEQ ID NO: 254366 - RNA, 19 nt, Homo sapiens
  misc_RNA (1)...(19): siRNA sense strand
ggcagaagcuaucagaaac

SEQ ID NO: 254367 - RNA, 19 nt, Homo sapiens
  misc_RNA (1)...(19): siRNA sense strand
cagaagcuaucagaaacuu

SEQ ID NO: 254368 - RNA, 19 nt, Homo sapiens
  misc_RNA (1)...(19): siRNA sense strand
uaucagaaacuucgugaau

SEQ ID NO: 254369 - RNA, 19 nt, Homo sapiens
  misc_RNA (1)...(19): siRNA sense strand
agugugaggugcugaagaa

SEQ ID NO: 254370 - RNA, 19 nt, Homo sapiens
  misc_RNA (1)...(19): siRNA sense strand
cguuauguuucccaagaua

SEQ ID NO: 254371 - RNA, 19 nt, Homo sapiens
  misc_RNA (1)...(19): siRNA sense strand
uuuaagaagcccauuauug

SEQ ID NO: 254372 - RNA, 19 nt, Homo sapiens
  misc_RNA (1)...(19): siRNA sense strand
gcgaugugguuugggcuaa

SEQ ID NO: 254373 - RNA, 19 nt, Homo sapiens
  misc_RNA (1)...(19): siRNA sense strand
uggcagaagcuaucagaaa

SEQ ID NO: 254374 - RNA, 19 nt, Homo sapiens
  misc_RNA (1)...(19): siRNA sense strand
ccaacgagagggaguguga

SEQ ID NO: 254375 - RNA, 19 nt, Homo sapiens
  misc_RNA (1)...(19): siRNA sense strand
caaugggacaaccaacaua

SEQ ID NO: 254376 - RNA, 19 nt, Homo sapiens
  misc_RNA (1)...(19): siRNA sense strand
gcugcaacaugaagaugga

SEQ ID NO: 254377 - RNA, 19 nt, Homo sapiens
  misc_RNA (1)...(19): siRNA sense strand
gaauaacucacuaaaucca

SEQ ID NO: 254378 - RNA, 19 nt, Homo sapiens
  misc_RNA (1)...(19): siRNA sense strand
gauaaugggaggagcaucu

SEQ ID NO: 254379 - RNA, 19 nt, Homo sapiens
  misc_RNA (1)...(19): siRNA sense strand
aacagaaagugccuacaga

SEQ ID NO: 254380 - RNA, 19 nt, Homo sapiens
  misc_RNA (1)...(19): siRNA sense strand
aucagaaacuucgugaaua

SEQ ID NO: 254381 - RNA, 19 nt, Homo sapiens
  misc_RNA (1)...(19): siRNA sense strand
cagagaauaacucacuaaa

SEQ ID NO: 254382 - RNA, 19 nt, Homo sapiens
  misc_RNA (1)...(19): siRNA sense strand
gaugugguuugggcuaaug

SEQ ID NO: 254383 - RNA, 19 nt, Homo sapiens
  misc_RNA (1)...(19): siRNA sense strand
cacaaaguccucagagaau

SEQ ID NO: 254384 - RNA, 19 nt, Homo sapiens
  misc_RNA (1)...(19): siRNA sense strand
ggaagugaugguucgcauu

SEQ ID NO: 254385 - RNA, 19 nt, Homo sapiens
  misc_RNA (1)...(19): siRNA sense strand
ucagagaauaacucacuaa

SEQ ID NO: 254386 - RNA, 19 nt, Homo sapiens
  misc_RNA (1)...(19): siRNA sense strand
aggagugacugccagcaaa

SEQ ID NO: 254387 - RNA, 19 nt, Homo sapiens
  misc_RNA (1)...(19): siRNA sense strand
ucacccacaucuuguuauc

SEQ ID NO: 254388 - RNA, 19 nt, Homo sapiens
  misc_RNA (1)...(19): siRNA sense strand
agaaagugccuacagauac

SEQ ID NO: 254389 - RNA, 19 nt, Homo sapiens
  misc_RNA (1)...(19): siRNA sense strand
gaggaagaucgaugaguuc

SEQ ID NO: 254390 - RNA, 19 nt, Homo sapiens
  misc_RNA (1)...(19): siRNA sense strand
gggaggagcaucugcaaac

SEQ ID NO: 254391 - RNA, 19 nt, Homo sapiens
  misc_RNA (1)...(19): siRNA sense strand
cucacuaaauccagaggua

SEQ ID NO: 254392 - RNA, 19 nt, Homo sapiens
  misc_RNA (1)...(19): siRNA sense strand
cucgugcgcugcaacauga

SEQ ID NO: 254393 - RNA, 19 nt, Homo sapiens
  misc_RNA (1)...(19): siRNA sense strand
caucuauauugccucuuug

SEQ ID NO: 254394 - RNA, 19 nt, Homo sapiens
  misc_RNA (1)...(19): siRNA sense strand
cgucuucuguuguggacuu

SEQ ID NO: 254395 - RNA, 19 nt, Homo sapiens
  misc_RNA (1)...(19): siRNA sense strand
ggcagcgucuucuguugug

SEQ ID NO: 254396 - RNA, 19 nt, Homo sapiens
  misc_RNA (1)...(19): siRNA sense strand
ucacuaaauccagagguaa

SEQ ID NO: 254397 - RNA, 19 nt, Homo sapiens
  misc_RNA (1)...(19): siRNA sense strand
caguugugcuugaggaauc

SEQ ID NO: 254398 - RNA, 19 nt, Homo sapiens
  misc_RNA (1)...(19): siRNA sense strand
aaacagaaagugccuacag

SEQ ID NO: 254399 - RNA, 19 nt, Homo sapiens
  misc_RNA (1)...(19): siRNA sense strand
gcuguucuaccguuauguu

SEQ ID NO: 254400 - RNA, 19 nt, Homo sapiens
  misc_RNA (1)...(19): siRNA sense strand
uggcuucacccacaucuug

SEQ ID NO: 254401 - RNA, 19 nt, Homo sapiens
  misc_RNA (1)...(19): siRNA sense strand
ggacguucacucaggaagu

SEQ ID NO: 254402 - RNA, 19 nt, Homo sapiens
  misc_RNA (1)...(19): siRNA sense strand
uauaccaccuucggacaga

SEQ ID NO: 254403 - RNA, 19 nt, Homo sapiens
  misc_RNA (1)...(19): siRNA sense strand
gaagcccauuauuguagca

SEQ ID NO: 254404 - RNA, 19 nt, Homo sapiens
  misc_RNA (1)...(19): siRNA sense strand
aagaagcccauuauuguag

SEQ ID NO: 254405 - RNA, 19 nt, Homo sapiens
  misc_RNA (1)...(19): siRNA sense strand
gggacaaccaacauacaga

SEQ ID NO: 254406 - RNA, 19 nt, Homo sapiens
  misc_RNA (1)...(19): siRNA sense strand
auccagagguaaugagaga

SEQ ID NO: 254407 - RNA, 19 nt, Homo sapiens
  misc_RNA (1)...(19): siRNA sense strand
gugaggugcugaagaaaau

SEQ ID NO: 254408 - RNA, 19 nt, Homo sapiens
  misc_RNA (1)...(19): siRNA sense strand
ccaaugggacaaccaacau

SEQ ID NO: 254409 - RNA, 19 nt, Homo sapiens
  misc_RNA (1)...(19): siRNA sense strand
guggacuugacuuuauuua

SEQ ID NO: 254410 - RNA, 19 nt, Homo sapiens
  misc_RNA (1)...(19): siRNA sense strand
gaggagcaucugcaaacga

SEQ ID NO: 254411 - RNA, 19 nt, Homo sapiens
  misc_RNA (1)...(19): siRNA sense strand
ggaggagcaucugcaaacg

SEQ ID NO: 254412 - RNA, 19 nt, Homo sapiens
  misc_RNA (1)...(19): siRNA sense strand
gcagaagcuaucagaaacu

SEQ ID NO: 254413 - RNA, 19 nt, Homo sapiens
  misc_RNA (1)...(19): siRNA sense strand
cuucacccacaucuuguua

SEQ ID NO: 254414 - RNA, 19 nt, Homo sapiens
  misc_RNA (1)...(19): siRNA sense strand
cuaggagcaucuauauugc

SEQ ID NO: 254415 - RNA, 19 nt, Homo sapiens
  misc_RNA (1)...(19): siRNA sense strand
uccacaaaguccucagaga

SEQ ID NO: 254416 - RNA, 19 nt, Homo sapiens
  misc_RNA (1)...(19): siRNA sense strand
acagaagagaccagccuuu

SEQ ID NO: 254417 - RNA, 19 nt, Homo sapiens
  misc_RNA (1)...(19): siRNA sense strand
cuaaauccagagguaauga

SEQ ID NO: 254418 - RNA, 19 nt, Homo sapiens
  misc_RNA (1)...(19): siRNA sense strand
ccucagagaauaacucacu

SEQ ID NO: 254419 - RNA, 19 nt, Homo sapiens
  misc_RNA (1)...(19): siRNA sense strand
acagauacagagauauugu

SEQ ID NO: 254420 - RNA, 19 nt, Homo sapiens
  misc_RNA (1)...(19): siRNA sense strand
accguuauguuucccaaga

SEQ ID NO: 254421 - RNA, 19 nt, Homo sapiens
  misc_RNA (1)...(19): siRNA sense strand
gccaaugggacaaccaaca

SEQ ID NO: 254422 - RNA, 19 nt, Homo sapiens
  misc_RNA (1)...(19): siRNA sense strand
agaaacuucgugaauacuu

SEQ ID NO: 254423 - RNA, 19 nt, Homo sapiens
  misc_RNA (1)...(19): siRNA sense strand
gaguccagauggcuguucu

SEQ ID NO: 254424 - RNA, 19 nt, Homo sapiens
  misc_RNA (1)...(19): siRNA sense strand
uuaaggagcuugccucaua

SEQ ID NO: 254425 - RNA, 19 nt, Homo sapiens
  misc_RNA (1)...(19): siRNA sense strand
ccagauggcuguucuucua

SEQ ID NO: 254426 - RNA, 19 nt, Homo sapiens
  misc_RNA (1)...(19): siRNA sense strand
gcaagaacguuaggagaaa

SEQ ID NO: 254427 - RNA, 19 nt, Homo sapiens
  misc_RNA (1)...(19): siRNA sense strand
guggaaagguuaugacaaa

SEQ ID NO: 254428 - RNA, 19 nt, Homo sapiens
  misc_RNA (1)...(19): siRNA sense strand
uaaagcaucugccaaugaa

SEQ ID NO: 254429 - RNA, 19 nt, Homo sapiens
  misc_RNA (1)...(19): siRNA sense strand
gaagaaagaggauggauuc

SEQ ID NO: 254430 - RNA, 19 nt, Homo sapiens
  misc_RNA (1)...(19): siRNA sense strand
gaaaggguauagugguauu

SEQ ID NO: 254431 - RNA, 19 nt, Homo sapiens
  misc_RNA (1)...(19): siRNA sense strand
gagcuugccucauacaaug

SEQ ID NO: 254432 - RNA, 19 nt, Homo sapiens
  misc_RNA (1)...(19): siRNA sense strand
ucaacuagaucgacagaaa

SEQ ID NO: 254433 - RNA, 19 nt, Homo sapiens
  misc_RNA (1)...(19): siRNA sense strand
ccaaaggccuggucucuca

SEQ ID NO: 254434 - RNA, 19 nt, Homo sapiens
  misc_RNA (1)...(19): siRNA sense strand
aaacugacauggacuacaa

SEQ ID NO: 254435 - RNA, 19 nt, Homo sapiens
  misc_RNA (1)...(19): siRNA sense strand
gagcucagcccaagggaua

SEQ ID NO: 254436 - RNA, 19 nt, Homo sapiens
  misc_RNA (1)...(19): siRNA sense strand
gauggcuguucuucuauua

SEQ ID NO: 254437 - RNA, 19 nt, Homo sapiens
  misc_RNA (1)...(19): siRNA sense strand
gaacagacuggaauacaga

SEQ ID NO: 254438 - RNA, 19 nt, Homo sapiens
  misc_RNA (1)...(19): siRNA sense strand
cucguucgcuguaauauua

SEQ ID NO: 254439 - RNA, 19 nt, Homo sapiens
  misc_RNA (1)...(19): siRNA sense strand
aagaugcacuucaccauaa

SEQ ID NO: 254440 - RNA, 19 nt, Homo sapiens
  misc_RNA (1)...(19): siRNA sense strand
ccacuaaugucgcagaugu

SEQ ID NO: 254441 - RNA, 19 nt, Homo sapiens
  misc_RNA (1)...(19): siRNA sense strand
ggguauagugguauuaaua

SEQ ID NO: 254442 - RNA, 19 nt, Homo sapiens
  misc_RNA (1)...(19): siRNA sense strand
gcuguaauauuaaguugga

SEQ ID NO: 254443 - RNA, 19 nt, Homo sapiens
  misc_RNA (1)...(19): siRNA sense strand
guaaagcaucugccaauga

SEQ ID NO: 254444 - RNA, 19 nt, Homo sapiens
  misc_RNA (1)...(19): siRNA sense strand
gaaagguuaugacaaacag

SEQ ID NO: 254445 - RNA, 19 nt, Homo sapiens
  misc_RNA (1)...(19): siRNA sense strand
cccaagagguuaugauuca

SEQ ID NO: 254446 - RNA, 19 nt, Homo sapiens
  misc_RNA (1)...(19): siRNA sense strand
ccgaaaggguauaguggua

SEQ ID NO: 254447 - RNA, 19 nt, Homo sapiens
  misc_RNA (1)...(19): siRNA sense strand
gaacuuccagaucuacaaa

SEQ ID NO: 254448 - RNA, 19 nt, Homo sapiens
  misc_RNA (1)...(19): siRNA sense strand
ucaagaacuuugugaauac

SEQ ID NO: 254449 - RNA, 19 nt, Homo sapiens
  misc_RNA (1)...(19): siRNA sense strand
gaauacagaacaagacuca

SEQ ID NO: 254450 - RNA, 19 nt, Homo sapiens
  misc_RNA (1)...(19): siRNA sense strand
ggugggcaaagaaauauua

SEQ ID NO: 254451 - RNA, 19 nt, Homo sapiens
  misc_RNA (1)...(19): siRNA sense strand
gaauccauguuaaaguaug

SEQ ID NO: 254452 - RNA, 19 nt, Homo sapiens
  misc_RNA (1)...(19): siRNA sense strand
gugaggcacuuaaggaaug

SEQ ID NO: 254453 - RNA, 19 nt, Homo sapiens
  misc_RNA (1)...(19): siRNA sense strand
acagagacauuguagugaa

SEQ ID NO: 254454 - RNA, 19 nt, Homo sapiens
  misc_RNA (1)...(19): siRNA sense strand
ucuaagaacucuccuaaaa

SEQ ID NO: 254455 - RNA, 19 nt, Homo sapiens
  misc_RNA (1)...(19): siRNA sense strand
aaaggugggcaaagaaaua

SEQ ID NO: 254456 - RNA, 19 nt, Homo sapiens
  misc_RNA (1)...(19): siRNA sense strand
caauuguacuggaagaaug

SEQ ID NO: 254457 - RNA, 19 nt, Homo sapiens
  misc_RNA (1)...(19): siRNA sense strand
gcacugaauacagaaguaa

SEQ ID NO: 254458 - RNA, 19 nt, Homo sapiens
  misc_RNA (1)...(19): siRNA sense strand
ggaacaggccaaugagaga

SEQ ID NO: 254459 - RNA, 19 nt, Homo sapiens
  misc_RNA (1)...(19): siRNA sense strand
ccauaaggcuaacagaaag

SEQ ID NO: 254460 - RNA, 19 nt, Homo sapiens
  misc_RNA (1)...(19): siRNA sense strand
gaaaggcagcuucaacucu

SEQ ID NO: 254461 - RNA, 19 nt, Homo sapiens
  misc_RNA (1)...(19): siRNA sense strand
gcacuuaaggaaugacaga

SEQ ID NO: 254462 - RNA, 19 nt, Homo sapiens
  misc_RNA (1)...(19): siRNA sense strand
gaaaggugggcaaagaaau

SEQ ID NO: 254463 - RNA, 19 nt, Homo sapiens
  misc_RNA (1)...(19): siRNA sense strand
gguaaagcaucugccaaug

SEQ ID NO: 254464 - RNA, 19 nt, Homo sapiens
  misc_RNA (1)...(19): siRNA sense strand
cacaaagaauauggagaua

SEQ ID NO: 254465 - RNA, 19 nt, Homo sapiens
  misc_RNA (1)...(19): siRNA sense strand
ccaaugagagagaguguga

SEQ ID NO: 254466 - RNA, 19 nt, Homo sapiens
  misc_RNA (1)...(19): siRNA sense strand
ggaaagguuaugacaaaca

SEQ ID NO: 254467 - RNA, 19 nt, Homo sapiens
  misc_RNA (1)...(19): siRNA sense strand
aaacaaugccagaagaaga

SEQ ID NO: 254468 - RNA, 19 nt, Homo sapiens
  misc_RNA (1)...(19): siRNA sense strand
gcauccauccugccucuuu

SEQ ID NO: 254469 - RNA, 19 nt, Homo sapiens
  misc_RNA (1)...(19): siRNA sense strand
gagaaacuggacccuauug

SEQ ID NO: 254470 - RNA, 19 nt, Homo sapiens
  misc_RNA (1)...(19): siRNA sense strand
gaaacuggacccuauugca

SEQ ID NO: 254471 - RNA, 19 nt, Homo sapiens
  misc_RNA (1)...(19): siRNA sense strand
gauagaauccauguuaaag

SEQ ID NO: 254472 - RNA, 19 nt, Homo sapiens
  misc_RNA (1)...(19): siRNA sense strand
agacaugcauaccucaguu

SEQ ID NO: 254473 - RNA, 19 nt, Homo sapiens
  misc_RNA (1)...(19): siRNA sense strand
caagagguuaugauucaaa

SEQ ID NO: 254474 - RNA, 19 nt, Homo sapiens
  misc_RNA (1)...(19): siRNA sense strand
acaaacaggaugacacuug

SEQ ID NO: 254475 - RNA, 19 nt, Homo sapiens
  misc_RNA (1)...(19): siRNA sense strand
aaaaugcacugaauacaga

SEQ ID NO: 254476 - RNA, 19 nt, Homo sapiens
  misc_RNA (1)...(19): siRNA sense strand
ggauggauucacccagaua

SEQ ID NO: 254477 - RNA, 19 nt, Homo sapiens
  misc_RNA (1)...(19): siRNA sense strand
gagacauuguagugaagaa

SEQ ID NO: 254478 - RNA, 19 nt, Homo sapiens
  misc_RNA (1)...(19): siRNA sense strand
gagaaaggcagcuucaacu

SEQ ID NO: 254479 - RNA, 19 nt, Homo sapiens
  misc_RNA (1)...(19): siRNA sense strand
ggagaaaggcagcuucaac

SEQ ID NO: 254480 - RNA, 19 nt, Homo sapiens
  misc_RNA (1)...(19): siRNA sense strand
gggcaaagaaauauuacug

SEQ ID NO: 254481 - RNA, 19 nt, Homo sapiens
  misc_RNA (1)...(19): siRNA sense strand
ggacaacagacaugcauac

SEQ ID NO: 254482 - RNA, 19 nt, Homo sapiens
  misc_RNA (1)...(19): siRNA sense strand
cagaugcacccacuaaugu

SEQ ID NO: 254483 - RNA, 19 nt, Homo sapiens
  misc_RNA (1)...(19): siRNA sense strand
uugagaaacuggacccuau

SEQ ID NO: 254484 - RNA, 19 nt, Homo sapiens
  misc_RNA (1)...(19): siRNA sense strand
acacaaagaauauggagau

SEQ ID NO: 254485 - RNA, 19 nt, Homo sapiens
  misc_RNA (1)...(19): siRNA sense strand
caaggugacagaagggaaa

SEQ ID NO: 254486 - RNA, 19 nt, Homo sapiens
  misc_RNA (1)...(19): siRNA sense strand
gcaauuguacuggaagaau

SEQ ID NO: 254487 - RNA, 19 nt, Homo sapiens
  misc_RNA (1)...(19): siRNA sense strand
uauacgaccuuuggacaga

SEQ ID NO: 254488 - RNA, 19 nt, Homo sapiens
  misc_RNA (1)...(19): siRNA sense strand
gaucucgugugggcuaaug

SEQ ID NO: 254489 - RNA, 19 nt, Homo sapiens
  misc_RNA (1)...(19): siRNA sense strand
caucaagaacuuugugaau

SEQ ID NO: 254490 - RNA, 19 nt, Homo sapiens
  misc_RNA (1)...(19): siRNA sense strand
ggcaaagaaauauuacuga

SEQ ID NO: 254491 - RNA, 19 nt, Homo sapiens
  misc_RNA (1)...(19): siRNA sense strand
ugaaaggugggcaaagaaa

SEQ ID NO: 254492 - RNA, 19 nt, Homo sapiens
  misc_RNA (1)...(19): siRNA sense strand
agacuggaauacagaacaa

SEQ ID NO: 254493 - RNA, 19 nt, Homo sapiens
  misc_RNA (1)...(19): siRNA sense strand
gagcagcaccucaugaacu

SEQ ID NO: 254494 - RNA, 19 nt, Homo sapiens
  misc_RNA (1)...(19): siRNA sense strand
gguauagugguauuaauag

SEQ ID NO: 254495 - RNA, 19 nt, Homo sapiens
  misc_RNA (1)...(19): siRNA sense strand
ggagcuugccucauacaau

SEQ ID NO: 254496 - RNA, 19 nt, Homo sapiens
  misc_RNA (1)...(19): siRNA sense strand
agugaaaggugggcaaaga

SEQ ID NO: 254497 - RNA, 19 nt, Homo sapiens
  misc_RNA (1)...(19): siRNA sense strand
ugaagaaagaggauggauu

SEQ ID NO: 254498 - RNA, 19 nt, Homo sapiens
  misc_RNA (1)...(19): siRNA sense strand
cccaggaguuugagguuga

SEQ ID NO: 254499 - RNA, 19 nt, Homo sapiens
  misc_RNA (1)...(19): siRNA sense strand
gagguugaagcuauuguug

SEQ ID NO: 254500 - RNA, 19 nt, Homo sapiens
  misc_RNA (1)...(19): siRNA sense strand
ucagaugcacccacuaaug

SEQ ID NO: 254501 - RNA, 19 nt, Homo sapiens
  misc_RNA (1)...(19): siRNA sense strand
ucagaaacuugagaaacug

SEQ ID NO: 254502 - RNA, 19 nt, Homo sapiens
  misc_RNA (1)...(19): siRNA sense strand
ggguaaagcaucugccaau

SEQ ID NO: 254503 - RNA, 19 nt, Homo sapiens
  misc_RNA (1)...(19): siRNA sense strand
cagagcagcaccucaugaa

SEQ ID NO: 254504 - RNA, 19 nt, Homo sapiens
  misc_RNA (1)...(19): siRNA sense strand
gcauaccucaguuccaaga

SEQ ID NO: 254505 - RNA, 19 nt, Homo sapiens
  misc_RNA (1)...(19): siRNA sense strand
uaagaacucuccuaaaacu

SEQ ID NO: 254506 - RNA, 19 nt, Homo sapiens
  misc_RNA (1)...(19): siRNA sense strand
agugugaggugcugaggaa

SEQ ID NO: 254507 - RNA, 19 nt, Homo sapiens
  misc_RNA (1)...(19): siRNA sense strand
guuaauugcugggcgaaag

SEQ ID NO: 254508 - RNA, 19 nt, Homo sapiens
  misc_RNA (1)...(19): siRNA sense strand
ucaaacaaugccagaagaa

SEQ ID NO: 254509 - RNA, 19 nt, Homo sapiens
  misc_RNA (1)...(19): siRNA sense strand
gguugaagcuauuguugac

SEQ ID NO: 254510 - RNA, 19 nt, Homo sapiens
  misc_RNA (1)...(19): siRNA sense strand
caagaacguuaggagaaag

SEQ ID NO: 254511 - RNA, 19 nt, Homo sapiens
  misc_RNA (1)...(19): siRNA sense strand
ggacaccaucaagaacuuu

SEQ ID NO: 254512 - RNA, 19 nt, Homo sapiens
  misc_RNA (1)...(19): siRNA sense strand
gugcagaacagacuggaau

SEQ ID NO: 254513 - RNA, 19 nt, Homo sapiens
  misc_RNA (1)...(19): siRNA sense strand
gaaaugguuaaugcucuga

SEQ ID NO: 254514 - RNA, 19 nt, Homo sapiens
  misc_RNA (1)...(19): siRNA sense strand
ggaugacacuugggaacca

SEQ ID NO: 254515 - RNA, 19 nt, Homo sapiens
  misc_RNA (1)...(19): siRNA sense strand
gcuguucuucuauuacauu

SEQ ID NO: 254516 - RNA, 19 nt, Homo sapiens
  misc_RNA (1)...(19): siRNA sense strand
cauccauccugccucuuug

SEQ ID NO: 254517 - RNA, 19 nt, Homo sapiens
  misc_RNA (1)...(19): siRNA sense strand
guauuugguucgguggaaa

SEQ ID NO: 254518 - RNA, 19 nt, Homo sapiens
  misc_RNA (1)...(19): siRNA sense strand
caccauaaggcuaacagaa

SEQ ID NO: 254519 - RNA, 19 nt, Homo sapiens
  misc_RNA (1)...(19): siRNA sense strand
ccaagagguuaugauucaa

SEQ ID NO: 254520 - RNA, 19 nt, Homo sapiens
  misc_RNA (1)...(19): siRNA sense strand
caagaacuuugugaauacu

SEQ ID NO: 254521 - RNA, 19 nt, Homo sapiens
  misc_RNA (1)...(19): siRNA sense strand
uaaggagcuugccucauac

SEQ ID NO: 254522 - RNA, 19 nt, Homo sapiens
  misc_RNA (1)...(19): siRNA sense strand
agauggcuguucuucuauu

SEQ ID NO: 254523 - RNA, 19 nt, Homo sapiens
  misc_RNA (1)...(19): siRNA sense strand
cauccugccucuuugugau

SEQ ID NO: 254524 - RNA, 19 nt, Homo sapiens
  misc_RNA (1)...(19): siRNA sense strand
ccaaaggucucacccauga

SEQ ID NO: 254525 - RNA, 19 nt, Homo sapiens
  misc_RNA (1)...(19): siRNA sense strand
ggacaaggaguaugaguuu

SEQ ID NO: 254526 - RNA, 19 nt, Homo sapiens
  misc_RNA (1)...(19): siRNA sense strand
gaccagcucuucuucauug

SEQ ID NO: 254527 - RNA, 19 nt, Homo sapiens
  misc_RNA (1)...(19): siRNA sense strand
gcauccagcucucaguuaa

SEQ ID NO: 254528 - RNA, 19 nt, Homo sapiens
  misc_RNA (1)...(19): siRNA sense strand
gaacagaaggcccaagaga

SEQ ID NO: 254529 - RNA, 19 nt, Homo sapiens
  misc_RNA (1)...(19): siRNA sense strand
gggagaacaucgcagauau

SEQ ID NO: 254530 - RNA, 19 nt, Homo sapiens
  misc_RNA (1)...(19): siRNA sense strand
caacuucacugucuacaac

SEQ ID NO: 254531 - RNA, 19 nt, Homo sapiens
  misc_RNA (1)...(19): siRNA sense strand
gcacuacgaugaguuccaa

SEQ ID NO: 254532 - RNA, 19 nt, Homo sapiens
  misc_RNA (1)...(19): siRNA sense strand
gaugucagcuccauguaca

SEQ ID NO: 254533 - RNA, 19 nt, Homo sapiens
  misc_RNA (1)...(19): siRNA sense strand
gggccaagcuccaguacau

SEQ ID NO: 254534 - RNA, 19 nt, Homo sapiens
  misc_RNA (1)...(19): siRNA sense strand
gcucaaugccuacuaucua

SEQ ID NO: 254535 - RNA, 19 nt, Homo sapiens
  misc_RNA (1)...(19): siRNA sense strand
agaagguccuggcagcaua

SEQ ID NO: 254536 - RNA, 19 nt, Homo sapiens
  misc_RNA (1)...(19): siRNA sense strand
ucaaccggcugcuguacaa

SEQ ID NO: 254537 - RNA, 19 nt, Homo sapiens
  misc_RNA (1)...(19): siRNA sense strand
ggcaggagguggacaaguc

SEQ ID NO: 254538 - RNA, 19 nt, Homo sapiens
  misc_RNA (1)...(19): siRNA sense strand
ccaggccaaucgccacuuu

SEQ ID NO: 254539 - RNA, 19 nt, Homo sapiens
  misc_RNA (1)...(19): siRNA sense strand
uggaggagcuggacuggau

SEQ ID NO: 254540 - RNA, 19 nt, Homo sapiens
  misc_RNA (1)...(19): siRNA sense strand
uggaagacaucaaguacau

SEQ ID NO: 254541 - RNA, 19 nt, Homo sapiens
  misc_RNA (1)...(19): siRNA sense strand
ugacggcgcacuacgauga

SEQ ID NO: 254542 - RNA, 19 nt, Homo sapiens
  misc_RNA (1)...(19): siRNA sense strand
cccaagagauccugcaagu

SEQ ID NO: 254543 - RNA, 19 nt, Homo sapiens
  misc_RNA (1)...(19): siRNA sense strand
ggagaacaucgcagauaug

SEQ ID NO: 254544 - RNA, 19 nt, Homo sapiens
  misc_RNA (1)...(19): siRNA sense strand
ccuacuaucuacccaacaa

SEQ ID NO: 254545 - RNA, 19 nt, Homo sapiens
  misc_RNA (1)...(19): siRNA sense strand
gccaggacuucuacucguu

SEQ ID NO: 254546 - RNA, 19 nt, Homo sapiens
  misc_RNA (1)...(19): siRNA sense strand
caugaacccugcccacaag

SEQ ID NO: 254547 - RNA, 19 nt, Homo sapiens
  misc_RNA (1)...(19): siRNA sense strand
gggcaucggcaccaucauu

SEQ ID NO: 254548 - RNA, 19 nt, Homo sapiens
  misc_RNA (1)...(19): siRNA sense strand
gcucucaguuaagaagauu

SEQ ID NO: 254549 - RNA, 19 nt, Homo sapiens
  misc_RNA (1)...(19): siRNA sense strand
acgacaagcucaccuaugg

SEQ ID NO: 254550 - RNA, 19 nt, Homo sapiens
  misc_RNA (1)...(19): siRNA sense strand
gaacccugcccacaagugu

SEQ ID NO: 254551 - RNA, 19 nt, Homo sapiens
  misc_RNA (1)...(19): siRNA sense strand
cauacaggguguucaugga

SEQ ID NO: 254552 - RNA, 19 nt, Homo sapiens
  misc_RNA (1)...(19): siRNA sense strand
gccaagcuccaguacauga

SEQ ID NO: 254553 - RNA, 19 nt, Homo sapiens
  misc_RNA (1)...(19): siRNA sense strand
acaaggaguaugaguuuga

SEQ ID NO: 254554 - RNA, 19 nt, Homo sapiens
  misc_RNA (1)...(19): siRNA sense strand
gacaaggaguaugaguuug

SEQ ID NO: 254555 - RNA, 19 nt, Homo sapiens
  misc_RNA (1)...(19): siRNA sense strand
ggcagugugucccaguuug

SEQ ID NO: 254556 - RNA, 19 nt, Homo sapiens
  misc_RNA (1)...(19): siRNA sense strand
gacccugacuucccacagu

SEQ ID NO: 254557 - RNA, 19 nt, Homo sapiens
  misc_RNA (1)...(19): siRNA sense strand
gcagugugucccaguuuga

SEQ ID NO: 254558 - RNA, 19 nt, Homo sapiens
  misc_RNA (1)...(19): siRNA sense strand
gagaacaucgcagauaugg

SEQ ID NO: 254559 - RNA, 19 nt, Homo sapiens
  misc_RNA (1)...(19): siRNA sense strand
acagaaggcccaagagauc

SEQ ID NO: 254560 - RNA, 19 nt, Homo sapiens
  misc_RNA (1)...(19): siRNA sense strand
ucagcuccauguacaacaa

SEQ ID NO: 254561 - RNA, 19 nt, Homo sapiens
  misc_RNA (1)...(19): siRNA sense strand
cgagaugucagcuccaugu

SEQ ID NO: 254562 - RNA, 19 nt, Homo sapiens
  misc_RNA (1)...(19): siRNA sense strand
ccgaugcuguggacaagga

SEQ ID NO: 254563 - RNA, 19 nt, Homo sapiens
  misc_RNA (1)...(19): siRNA sense strand
ggaggacuucucagaggaa

SEQ ID NO: 254564 - RNA, 19 nt, Homo sapiens
  misc_RNA (1)...(19): siRNA sense strand
gagaugucagcuccaugua

SEQ ID NO: 254565 - RNA, 19 nt, Homo sapiens
  misc_RNA (1)...(19): siRNA sense strand
uccaagaggucaaguacgu

SEQ ID NO: 254566 - RNA, 19 nt, Homo sapiens
  misc_RNA (1)...(19): siRNA sense strand
gugcaucguccgucucuau

SEQ ID NO: 254567 - RNA, 19 nt, Homo sapiens
  misc_RNA (1)...(19): siRNA sense strand
aguuugagguccaugagaa

SEQ ID NO: 254568 - RNA, 19 nt, Homo sapiens
  misc_RNA (1)...(19): siRNA sense strand
acaucacugugucagagua

SEQ ID NO: 254569 - RNA, 19 nt, Homo sapiens
  misc_RNA (1)...(19): siRNA sense strand
gggcagugugucccaguuu

SEQ ID NO: 254570 - RNA, 19 nt, Homo sapiens
  misc_RNA (1)...(19): siRNA sense strand
agaccuacuucaagaacau

SEQ ID NO: 254571 - RNA, 19 nt, Homo sapiens
  misc_RNA (1)...(19): siRNA sense strand
ugcagcagcuaguggaaga

SEQ ID NO: 254572 - RNA, 19 nt, Homo sapiens
  misc_RNA (1)...(19): siRNA sense strand
caaggaguaugaguuugag

SEQ ID NO: 254573 - RNA, 19 nt, Homo sapiens
  misc_RNA (1)...(19): siRNA sense strand
ccaugaacccugcccacaa

SEQ ID NO: 254574 - RNA, 19 nt, Homo sapiens
  misc_RNA (1)...(19): siRNA sense strand
gugcagacgcuguggaaca

SEQ ID NO: 254575 - RNA, 19 nt, Homo sapiens
  misc_RNA (1)...(19): siRNA sense strand
gcagcuaguggaagacauc

SEQ ID NO: 254576 - RNA, 19 nt, Homo sapiens
  misc_RNA (1)...(19): siRNA sense strand
gcaucguccgucucuauga

SEQ ID NO: 254577 - RNA, 19 nt, Homo sapiens
  misc_RNA (1)...(19): siRNA sense strand
ggcaucggcaccaucauug

SEQ ID NO: 254578 - RNA, 19 nt, Homo sapiens
  misc_RNA (1)...(19): siRNA sense strand
uaguggaagacaucaagua

SEQ ID NO: 254579 - RNA, 19 nt, Homo sapiens
  misc_RNA (1)...(19): siRNA sense strand
ucacugugucagaguauga

SEQ ID NO: 254580 - RNA, 19 nt, Homo sapiens
  misc_RNA (1)...(19): siRNA sense strand
gcucuucuucauugccuuu

SEQ ID NO: 254581 - RNA, 19 nt, Homo sapiens
  misc_RNA (1)...(19): siRNA sense strand
cggcucaaguacacacaug

SEQ ID NO: 254582 - RNA, 19 nt, Homo sapiens
  misc_RNA (1)...(19): siRNA sense strand
ggcgcucaaugccuacuau

SEQ ID NO: 254583 - RNA, 19 nt, Homo sapiens
  misc_RNA (1)...(19): siRNA sense strand
gggcagcugcagaagauca

SEQ ID NO: 254584 - RNA, 19 nt, Homo sapiens
  misc_RNA (1)...(19): siRNA sense strand
gagaagguccuggcagcau

SEQ ID NO: 254585 - RNA, 19 nt, Homo sapiens
  misc_RNA (1)...(19): siRNA sense strand
cagcauccagcucucaguu

SEQ ID NO: 254586 - RNA, 19 nt, Homo sapiens
  misc_RNA (1)...(19): siRNA sense strand
gcuaguggaagacaucaag

SEQ ID NO: 254587 - RNA, 19 nt, Homo sapiens
  misc_RNA (1)...(19): siRNA sense strand
cggcuaugcuggcccucaa

SEQ ID NO: 254588 - RNA, 19 nt, Homo sapiens
  misc_RNA (1)...(19): siRNA sense strand
cgacgacaagcucaccuau

SEQ ID NO: 254589 - RNA, 19 nt, Homo sapiens
  misc_RNA (1)...(19): siRNA sense strand
ucauugccuuugcccagaa

SEQ ID NO: 254590 - RNA, 19 nt, Homo sapiens
  misc_RNA (1)...(19): siRNA sense strand
cuaccacgccuaucagaag

SEQ ID NO: 254591 - RNA, 19 nt, Homo sapiens
  misc_RNA (1)...(19): siRNA sense strand
gacgacaagcucaccuaug

SEQ ID NO: 254592 - RNA, 19 nt, Homo sapiens
  misc_RNA (1)...(19): siRNA sense strand
gcuacgucauccgcauuga

SEQ ID NO: 254593 - RNA, 19 nt, Homo sapiens
  misc_RNA (1)...(19): siRNA sense strand
ugucccaguuugaggaguu

SEQ ID NO: 254594 - RNA, 19 nt, Homo sapiens
  misc_RNA (1)...(19): siRNA sense strand
ggcggucgcaguccaucua

SEQ ID NO: 254595 - RNA, 19 nt, Homo sapiens
  misc_RNA (1)...(19): siRNA sense strand
cacaugaccagcucuucuu

SEQ ID NO: 254596 - RNA, 19 nt, Homo sapiens
  misc_RNA (1)...(19): siRNA sense strand
gccucaagcuggccuacca

SEQ ID NO: 254597 - RNA, 19 nt, Homo sapiens
  misc_RNA (1)...(19): siRNA sense strand
gaccuacggcgagauguca

SEQ ID NO: 254598 - RNA, 19 nt, Homo sapiens
  misc_RNA (1)...(19): siRNA sense strand
ugcaggugcugacugacaa

SEQ ID NO: 254599 - RNA, 19 nt, Homo sapiens
  misc_RNA (1)...(19): siRNA sense strand
ugaccagcucuucuucauu

SEQ ID NO: 254600 - RNA, 19 nt, Homo sapiens
  misc_RNA (1)...(19): siRNA sense strand
ucccacagucucucaacua

SEQ ID NO: 254601 - RNA, 19 nt, Homo sapiens
  misc_RNA (1)...(19): siRNA sense strand
ggaugaggacagugagaag

SEQ ID NO: 254602 - RNA, 19 nt, Homo sapiens
  misc_RNA (1)...(19): siRNA sense strand
gaauggagcuuaucacuga

SEQ ID NO: 254603 - RNA, 19 nt, Homo sapiens
  misc_RNA (1)...(19): siRNA sense strand
gcagaugccuucuucguua

SEQ ID NO: 254604 - RNA, 19 nt, Homo sapiens
  misc_RNA (1)...(19): siRNA sense strand
caacaacuaugacgaauca

SEQ ID NO: 254605 - RNA, 19 nt, Homo sapiens
  misc_RNA (1)...(19): siRNA sense strand
aggcaaaucuucguuauua

SEQ ID NO: 254606 - RNA, 19 nt, Homo sapiens
  misc_RNA (1)...(19): siRNA sense strand
guuaugauguuuacccuua

SEQ ID NO: 254607 - RNA, 19 nt, Homo sapiens
  misc_RNA (1)...(19): siRNA sense strand
gauauuccaucuucaaguu

SEQ ID NO: 254608 - RNA, 19 nt, Homo sapiens
  misc_RNA (1)...(19): siRNA sense strand
aaacagagaagaagacuuu

SEQ ID NO: 254609 - RNA, 19 nt, Homo sapiens
  misc_RNA (1)...(19): siRNA sense strand
ggccuuggcuuguaugauu

SEQ ID NO: 254610 - RNA, 19 nt, Homo sapiens
  misc_RNA (1)...(19): siRNA sense strand
ucacaaccauugcaucuug

SEQ ID NO: 254611 - RNA, 19 nt, Homo sapiens
  misc_RNA (1)...(19): siRNA sense strand
ugucuuagcugcaaggaaa

SEQ ID NO: 254612 - RNA, 19 nt, Homo sapiens
  misc_RNA (1)...(19): siRNA sense strand
gauauggauuuacggcuuu

SEQ ID NO: 254613 - RNA, 19 nt, Homo sapiens
  misc_RNA (1)...(19): siRNA sense strand
uaauucagguuacguggua

SEQ ID NO: 254614 - RNA, 19 nt, Homo sapiens
  misc_RNA (1)...(19): siRNA sense strand
ugaaggagcuguguuaagu

SEQ ID NO: 254615 - RNA, 19 nt, Homo sapiens
  misc_RNA (1)...(19): siRNA sense strand
ggaaaacuguuaucugauu

SEQ ID NO: 254616 - RNA, 19 nt, Homo sapiens
  misc_RNA (1)...(19): siRNA sense strand
gaacaaucaucuucuccau

SEQ ID NO: 254617 - RNA, 19 nt, Homo sapiens
  misc_RNA (1)...(19): siRNA sense strand
uaacaucugcuaucgagua

SEQ ID NO: 254618 - RNA, 19 nt, Homo sapiens
  misc_RNA (1)...(19): siRNA sense strand
gauaagccacucauagaaa

SEQ ID NO: 254619 - RNA, 19 nt, Homo sapiens
  misc_RNA (1)...(19): siRNA sense strand
gagauguucugauaaaugg

SEQ ID NO: 254620 - RNA, 19 nt, Homo sapiens
  misc_RNA (1)...(19): siRNA sense strand
ggaggcaaaucuucguuau

SEQ ID NO: 254621 - RNA, 19 nt, Homo sapiens
  misc_RNA (1)...(19): siRNA sense strand
gaauaucaaugggaucaug

SEQ ID NO: 254622 - RNA, 19 nt, Homo sapiens
  misc_RNA (1)...(19): siRNA sense strand
ugucauggcuucaguacuu

SEQ ID NO: 254623 - RNA, 19 nt, Homo sapiens
  misc_RNA (1)...(19): siRNA sense strand
uaauaacccugcagacuuc

SEQ ID NO: 254624 - RNA, 19 nt, Homo sapiens
  misc_RNA (1)...(19): siRNA sense strand
gaaaaccaguugagaaaga

SEQ ID NO: 254625 - RNA, 19 nt, Homo sapiens
  misc_RNA (1)...(19): siRNA sense strand
acaaucaucuucuccauuc

SEQ ID NO: 254626 - RNA, 19 nt, Homo sapiens
  misc_RNA (1)...(19): siRNA sense strand
gcaaaucuucguuauuaga

SEQ ID NO: 254627 - RNA, 19 nt, Homo sapiens
  misc_RNA (1)...(19): siRNA sense strand
gacaaaagcugaauuacau

SEQ ID NO: 254628 - RNA, 19 nt, Homo sapiens
  misc_RNA (1)...(19): siRNA sense strand
cgaagaauauuugguaaag

SEQ ID NO: 254629 - RNA, 19 nt, Homo sapiens
  misc_RNA (1)...(19): siRNA sense strand
ggacaucauuaauggagau

SEQ ID NO: 254630 - RNA, 19 nt, Homo sapiens
  misc_RNA (1)...(19): siRNA sense strand
gaaggcauuuacugaagga

SEQ ID NO: 254631 - RNA, 19 nt, Homo sapiens
  misc_RNA (1)...(19): siRNA sense strand
caacuccuccuucuacaaa

SEQ ID NO: 254632 - RNA, 19 nt, Homo sapiens
  misc_RNA (1)...(19): siRNA sense strand
ggagauguucugauaaaug

SEQ ID NO: 254633 - RNA, 19 nt, Homo sapiens
  misc_RNA (1)...(19): siRNA sense strand
ggauaagccacucauagaa

SEQ ID NO: 254634 - RNA, 19 nt, Homo sapiens
  misc_RNA (1)...(19): siRNA sense strand
gguuauaggugccauuuac

SEQ ID NO: 254635 - RNA, 19 nt, Homo sapiens
  misc_RNA (1)...(19): siRNA sense strand
agaguuaggucuggauaaa

SEQ ID NO: 254636 - RNA, 19 nt, Homo sapiens
  misc_RNA (1)...(19): siRNA sense strand
aaggagcuguguuaaguuu

SEQ ID NO: 254637 - RNA, 19 nt, Homo sapiens
  misc_RNA (1)...(19): siRNA sense strand
cagagaagaagacuuuaaa

SEQ ID NO: 254638 - RNA, 19 nt, Homo sapiens
  misc_RNA (1)...(19): siRNA sense strand
guauaggaauggagcuuau

SEQ ID NO: 254639 - RNA, 19 nt, Homo sapiens
  misc_RNA (1)...(19): siRNA sense strand
guuauuagaugucuuagcu

SEQ ID NO: 254640 - RNA, 19 nt, Homo sapiens
  misc_RNA (1)...(19): siRNA sense strand
caugaaaccuggucucaac

SEQ ID NO: 254641 - RNA, 19 nt, Homo sapiens
  misc_RNA (1)...(19): siRNA sense strand
aagaguggcuuucuaccuu

SEQ ID NO: 254642 - RNA, 19 nt, Homo sapiens
  misc_RNA (1)...(19): siRNA sense strand
ccgcgacaguuuccaauga

SEQ ID NO: 254643 - RNA, 19 nt, Homo sapiens
  misc_RNA (1)...(19): siRNA sense strand
cagguuacgugguacaaga

SEQ ID NO: 254644 - RNA, 19 nt, Homo sapiens
  misc_RNA (1)...(19): siRNA sense strand
cuggagauguucugauaaa

SEQ ID NO: 254645 - RNA, 19 nt, Homo sapiens
  misc_RNA (1)...(19): siRNA sense strand
gaccaucuguuuuguguuu

SEQ ID NO: 254646 - RNA, 19 nt, Homo sapiens
  misc_RNA (1)...(19): siRNA sense strand
augaggauguuaccaagua

SEQ ID NO: 254647 - RNA, 19 nt, Homo sapiens
  misc_RNA (1)...(19): siRNA sense strand
ggcgaagaauauuugguaa

SEQ ID NO: 254648 - RNA, 19 nt, Homo sapiens
  misc_RNA (1)...(19): siRNA sense strand
guacuggcgaagaauauuu

SEQ ID NO: 254649 - RNA, 19 nt, Homo sapiens
  misc_RNA (1)...(19): siRNA sense strand
caacacuucucaugaccau

SEQ ID NO: 254650 - RNA, 19 nt, Homo sapiens
  misc_RNA (1)...(19): siRNA sense strand
ucacugauccuuccaucuu

SEQ ID NO: 254651 - RNA, 19 nt, Homo sapiens
  misc_RNA (1)...(19): siRNA sense strand
acaauugccuaccugaaau

SEQ ID NO: 254652 - RNA, 19 nt, Homo sapiens
  misc_RNA (1)...(19): siRNA sense strand
uuacggcuuugcagcauaa

SEQ ID NO: 254653 - RNA, 19 nt, Homo sapiens
  misc_RNA (1)...(19): siRNA sense strand
gagaagaagaagaagauca

SEQ ID NO: 254654 - RNA, 19 nt, Homo sapiens
  misc_RNA (1)...(19): siRNA sense strand
acuacagagugucaucuua

SEQ ID NO: 254655 - RNA, 19 nt, Homo sapiens
  misc_RNA (1)...(19): siRNA sense strand
gcaaggaaagauccaagug

SEQ ID NO: 254656 - RNA, 19 nt, Homo sapiens
  misc_RNA (1)...(19): siRNA sense strand
guagcaacacuucucauga

SEQ ID NO: 254657 - RNA, 19 nt, Homo sapiens
  misc_RNA (1)...(19): siRNA sense strand
gaaggagcuguguuaaguu

SEQ ID NO: 254658 - RNA, 19 nt, Homo sapiens
  misc_RNA (1)...(19): siRNA sense strand
ggacuaguauaggaaugga

SEQ ID NO: 254659 - RNA, 19 nt, Homo sapiens
  misc_RNA (1)...(19): siRNA sense strand
acugugaggccuauaauaa

SEQ ID NO: 254660 - RNA, 19 nt, Homo sapiens
  misc_RNA (1)...(19): siRNA sense strand
cacaauugccuaccugaaa

SEQ ID NO: 254661 - RNA, 19 nt, Homo sapiens
  misc_RNA (1)...(19): siRNA sense strand
gcgaagaauauuugguaaa

SEQ ID NO: 254662 - RNA, 19 nt, Homo sapiens
  misc_RNA (1)...(19): siRNA sense strand
uacagagugucaucuuauu

SEQ ID NO: 254663 - RNA, 19 nt, Homo sapiens
  misc_RNA (1)...(19): siRNA sense strand
uugauagccucaccuuauu

SEQ ID NO: 254664 - RNA, 19 nt, Homo sapiens
  misc_RNA (1)...(19): siRNA sense strand
gaucauugucacagucgua

SEQ ID NO: 254665 - RNA, 19 nt, Homo sapiens
  misc_RNA (1)...(19): siRNA sense strand
ugaauuacaucaacuuucc

SEQ ID NO: 254666 - RNA, 19 nt, Homo sapiens
  misc_RNA (1)...(19): siRNA sense strand
ucauagagccuuccaagca

SEQ ID NO: 254667 - RNA, 19 nt, Homo sapiens
  misc_RNA (1)...(19): siRNA sense strand
ugaaucagcugguuaucac

SEQ ID NO: 254668 - RNA, 19 nt, Homo sapiens
  misc_RNA (1)...(19): siRNA sense strand
gcaggauaagccacucaua

SEQ ID NO: 254669 - RNA, 19 nt, Homo sapiens
  misc_RNA (1)...(19): siRNA sense strand
gagaagaagacuuuaaagc

SEQ ID NO: 254670 - RNA, 19 nt, Homo sapiens
  misc_RNA (1)...(19): siRNA sense strand
caacauguacuggcgaaga

SEQ ID NO: 254671 - RNA, 19 nt, Homo sapiens
  misc_RNA (1)...(19): siRNA sense strand
ccaguaaugucgaaguuuu

SEQ ID NO: 254672 - RNA, 19 nt, Homo sapiens
  misc_RNA (1)...(19): siRNA sense strand
uauaggugccauuuacuuu

SEQ ID NO: 254673 - RNA, 19 nt, Homo sapiens
  misc_RNA (1)...(19): siRNA sense strand
uaaagccacagagaucaua

SEQ ID NO: 254674 - RNA, 19 nt, Homo sapiens
  misc_RNA (1)...(19): siRNA sense strand
uggcgaagaauauuuggua

SEQ ID NO: 254675 - RNA, 19 nt, Homo sapiens
  misc_RNA (1)...(19): siRNA sense strand
gauguuuacccuuaugaug

SEQ ID NO: 254676 - RNA, 19 nt, Homo sapiens
  misc_RNA (1)...(19): siRNA sense strand
gccauuuacuuugggcuaa

SEQ ID NO: 254677 - RNA, 19 nt, Homo sapiens
  misc_RNA (1)...(19): siRNA sense strand
guacugggacugguuauag

SEQ ID NO: 254678 - RNA, 19 nt, Homo sapiens
  misc_RNA (1)...(19): siRNA sense strand
cuacagagugucaucuuau

SEQ ID NO: 254679 - RNA, 19 nt, Homo sapiens
  misc_RNA (1)...(19): siRNA sense strand
ggacgaacaaucaucuucu

SEQ ID NO: 254680 - RNA, 19 nt, Homo sapiens
  misc_RNA (1)...(19): siRNA sense strand
cuucaguacuucagcauuc

SEQ ID NO: 254681 - RNA, 19 nt, Homo sapiens
  misc_RNA (1)...(19): siRNA sense strand
uagcaacacuucucaugac

SEQ ID NO: 254682 - RNA, 19 nt, Homo sapiens
  misc_RNA (1)...(19): siRNA sense strand
guacuucauguuaggauug

SEQ ID NO: 254683 - RNA, 19 nt, Homo sapiens
  misc_RNA (1)...(19): siRNA sense strand
caacucagauggguuucca

SEQ ID NO: 254684 - RNA, 19 nt, Homo sapiens
  misc_RNA (1)...(19): siRNA sense strand
acagagaagaagacuuuaa

SEQ ID NO: 254685 - RNA, 19 nt, Homo sapiens
  misc_RNA (1)...(19): siRNA sense strand
ggcauuaaacagagaagaa

SEQ ID NO: 254686 - RNA, 19 nt, Homo sapiens
  misc_RNA (1)...(19): siRNA sense strand
gaggcaaaucuucguuauu

SEQ ID NO: 254687 - RNA, 19 nt, Homo sapiens
  misc_RNA (1)...(19): siRNA sense strand
uugccuaccugaaauuguu

SEQ ID NO: 254688 - RNA, 19 nt, Homo sapiens
  misc_RNA (1)...(19): siRNA sense strand
uggcuuguaugauuguuau

SEQ ID NO: 254689 - RNA, 19 nt, Homo sapiens
  misc_RNA (1)...(19): siRNA sense strand
gaagaauauuugguaaagc

SEQ ID NO: 254690 - RNA, 19 nt, Homo sapiens
  misc_RNA (1)...(19): siRNA sense strand
ggacucaaugcaacaggaa

SEQ ID NO: 254691 - RNA, 19 nt, Homo sapiens
  misc_RNA (1)...(19): siRNA sense strand
cagaugccuucuucguuau

SEQ ID NO: 254692 - RNA, 19 nt, Homo sapiens
  misc_RNA (1)...(19): siRNA sense strand
ucugauuuauuacccauga

SEQ ID NO: 254693 - RNA, 19 nt, Homo sapiens
  misc_RNA (1)...(19): siRNA sense strand
caucagcggauacuacaga

SEQ ID NO: 254694 - RNA, 19 nt, Homo sapiens
  misc_RNA (1)...(19): siRNA sense strand
aagcagggacgaacaauca

SEQ ID NO: 254695 - RNA, 19 nt, Homo sapiens
  misc_RNA (1)...(19): siRNA sense strand
caacuggcuuagacucaag

SEQ ID NO: 254696 - RNA, 19 nt, Homo sapiens
  misc_RNA (1)...(19): siRNA sense strand
gagugugguuucuguagca

SEQ ID NO: 254697 - RNA, 19 nt, Homo sapiens
  misc_RNA (1)...(19): siRNA sense strand
gaugccuucuucguuauga

SEQ ID NO: 254698 - RNA, 19 nt, Homo sapiens
  misc_RNA (1)...(19): siRNA sense strand
augaauacaucagcggaua

SEQ ID NO: 254699 - RNA, 19 nt, Homo sapiens
  misc_RNA (1)...(19): siRNA sense strand
cucuauagcucagaucauu

SEQ ID NO: 254700 - RNA, 19 nt, Homo sapiens
  misc_RNA (1)...(19): siRNA sense strand
gugagaagaagaagaagau

SEQ ID NO: 254701 - RNA, 19 nt, Homo sapiens
  misc_RNA (1)...(19): siRNA sense strand
ucaaugggaucaugaaacc

SEQ ID NO: 254702 - RNA, 19 nt, Homo sapiens
  misc_RNA (1)...(19): siRNA sense strand
ggacagagcuggacaagca

SEQ ID NO: 254703 - RNA, 19 nt, Homo sapiens
  misc_RNA (1)...(19): siRNA sense strand
guaccgaccucgagacuau

SEQ ID NO: 254704 - RNA, 19 nt, Homo sapiens
  misc_RNA (1)...(19): siRNA sense strand
cgucaagccuguccgguua

SEQ ID NO: 254705 - RNA, 19 nt, Homo sapiens
  misc_RNA (1)...(19): siRNA sense strand
gcuugaacauucugccuua

SEQ ID NO: 254706 - RNA, 19 nt, Homo sapiens
  misc_RNA (1)...(19): siRNA sense strand
caaagaggcacuugaggaa

SEQ ID NO: 254707 - RNA, 19 nt, Homo sapiens
  misc_RNA (1)...(19): siRNA sense strand
ccucgagacuauacgguua

SEQ ID NO: 254708 - RNA, 19 nt, Homo sapiens
  misc_RNA (1)...(19): siRNA sense strand
gagcauccaugaccugaag

SEQ ID NO: 254709 - RNA, 19 nt, Homo sapiens
  misc_RNA (1)...(19): siRNA sense strand
caacgacguccgcaagaaa

SEQ ID NO: 254710 - RNA, 19 nt, Homo sapiens
  misc_RNA (1)...(19): siRNA sense strand
cccaaggucuccaaagcua

SEQ ID NO: 254711 - RNA, 19 nt, Homo sapiens
  misc_RNA (1)...(19): siRNA sense strand
gagacuauacgguuaacuu

SEQ ID NO: 254712 - RNA, 19 nt, Homo sapiens
  misc_RNA (1)...(19): siRNA sense strand
acacacaggguaacuggua

SEQ ID NO: 254713 - RNA, 19 nt, Homo sapiens
  misc_RNA (1)...(19): siRNA sense strand
acaggacgaucucgacaga

SEQ ID NO: 254714 - RNA, 19 nt, Homo sapiens
  misc_RNA (1)...(19): siRNA sense strand
agcggaagcucaccuuuga

SEQ ID NO: 254715 - RNA, 19 nt, Homo sapiens
  misc_RNA (1)...(19): siRNA sense strand
caggguaacugguaugacu

SEQ ID NO: 254716 - RNA, 19 nt, Homo sapiens
  misc_RNA (1)...(19): siRNA sense strand
ucaacgacguccgcaagaa

SEQ ID NO: 254717 - RNA, 19 nt, Homo sapiens
  misc_RNA (1)...(19): siRNA sense strand
uugggaagcucaucaacga

SEQ ID NO: 254718 - RNA, 19 nt, Homo sapiens
  misc_RNA (1)...(19): siRNA sense strand
caagcacaguggcaagauc

SEQ ID NO: 254719 - RNA, 19 nt, Homo sapiens
  misc_RNA (1)...(19): siRNA sense strand
acuauacgguuaacuugga

SEQ ID NO: 254720 - RNA, 19 nt, Homo sapiens
  misc_RNA (1)...(19): siRNA sense strand
gaacuggaaggagcuguca

SEQ ID NO: 254721 - RNA, 19 nt, Homo sapiens
  misc_RNA (1)...(19): siRNA sense strand
aggacgaucucgacagaau

SEQ ID NO: 254722 - RNA, 19 nt, Homo sapiens
  misc_RNA (1)...(19): siRNA sense strand
ucaagccuguccgguuaaa

SEQ ID NO: 254723 - RNA, 19 nt, Homo sapiens
  misc_RNA (1)...(19): siRNA sense strand
ucgaacagacgaacuggaa

SEQ ID NO: 254724 - RNA, 19 nt, Homo sapiens
  misc_RNA (1)...(19): siRNA sense strand
gcaagaaaaccaagaacga

SEQ ID NO: 254725 - RNA, 19 nt, Homo sapiens
  misc_RNA (1)...(19): siRNA sense strand
agacuauacgguuaacuug

SEQ ID NO: 254726 - RNA, 19 nt, Homo sapiens
  misc_RNA (1)...(19): siRNA sense strand
aaacacgacuugggaagcu

SEQ ID NO: 254727 - RNA, 19 nt, Homo sapiens
  misc_RNA (1)...(19): siRNA sense strand
aagaggcacuugaggaaac

SEQ ID NO: 254728 - RNA, 19 nt, Homo sapiens
  misc_RNA (1)...(19): siRNA sense strand
ccuccaaggcggacaguga

SEQ ID NO: 254729 - RNA, 19 nt, Homo sapiens
  misc_RNA (1)...(19): siRNA sense strand
gaccugaagagccgcaaug

SEQ ID NO: 254730 - RNA, 19 nt, Homo sapiens
  misc_RNA (1)...(19): siRNA sense strand
gacaagcacaguggcaaga

SEQ ID NO: 254731 - RNA, 19 nt, Homo sapiens
  misc_RNA (1)...(19): siRNA sense strand
gagcgugacgagaaugaca

SEQ ID NO: 254732 - RNA, 19 nt, Homo sapiens
  misc_RNA (1)...(19): siRNA sense strand
gagcaacauccggaacaug

SEQ ID NO: 254733 - RNA, 19 nt, Homo sapiens
  misc_RNA (1)...(19): siRNA sense strand
ggacaggguggacgagacu

SEQ ID NO: 254734 - RNA, 19 nt, Homo sapiens
  misc_RNA (1)...(19): siRNA sense strand
cgacuugggaagcucauca

SEQ ID NO: 254735 - RNA, 19 nt, Homo sapiens
  misc_RNA (1)...(19): siRNA sense strand
cacccaaggucuccaaagc

SEQ ID NO: 254736 - RNA, 19 nt, Homo sapiens
  misc_RNA (1)...(19): siRNA sense strand
cacacaggguaacugguau

SEQ ID NO: 254737 - RNA, 19 nt, Homo sapiens
  misc_RNA (1)...(19): siRNA sense strand
aaagaggcacuugaggaaa

SEQ ID NO: 254738 - RNA, 19 nt, Homo sapiens
  misc_RNA (1)...(19): siRNA sense strand
ggacgaucucgacagaauc

SEQ ID NO: 254739 - RNA, 19 nt, Homo sapiens
  misc_RNA (1)...(19): siRNA sense strand
gccuggagcgugacgagaa

SEQ ID NO: 254740 - RNA, 19 nt, Homo sapiens
  misc_RNA (1)...(19): siRNA sense strand
ccuggagcgugacgagaau

SEQ ID NO: 254741 - RNA, 19 nt, Homo sapiens
  misc_RNA (1)...(19): siRNA sense strand
ggaaagguguugaaaguga

SEQ ID NO: 254742 - RNA, 19 nt, Homo sapiens
  misc_RNA (1)...(19): siRNA sense strand
gaacaauaguaaagggaua

SEQ ID NO: 254743 - RNA, 19 nt, Homo sapiens
  misc_RNA (1)...(19): siRNA sense strand
gaagauggcaagcuugaua

SEQ ID NO: 254744 - RNA, 19 nt, Homo sapiens
  misc_RNA (1)...(19): siRNA sense strand
ggacaaaacuccucucuau

SEQ ID NO: 254745 - RNA, 19 nt, Homo sapiens
  misc_RNA (1)...(19): siRNA sense strand
gcauauaaguggucaaaca

SEQ ID NO: 254746 - RNA, 19 nt, Homo sapiens
  misc_RNA (1)...(19): siRNA sense strand
gaaguuacauaaagcuguu

SEQ ID NO: 254747 - RNA, 19 nt, Homo sapiens
  misc_RNA (1)...(19): siRNA sense strand
ugaaauguccauccacuua

SEQ ID NO: 254748 - RNA, 19 nt, Homo sapiens
  misc_RNA (1)...(19): siRNA sense strand
gcacuuccaggacaacuua

SEQ ID NO: 254749 - RNA, 19 nt, Homo sapiens
  misc_RNA (1)...(19): siRNA sense strand
gcaguaccaugcaggacua

SEQ ID NO: 254750 - RNA, 19 nt, Homo sapiens
  misc_RNA (1)...(19): siRNA sense strand
gagaaugucuacacagaag

SEQ ID NO: 254751 - RNA, 19 nt, Homo sapiens
  misc_RNA (1)...(19): siRNA sense strand
ccacugcccugcuccacua

SEQ ID NO: 254752 - RNA, 19 nt, Homo sapiens
  misc_RNA (1)...(19): siRNA sense strand
ggacuagcaucuggccuuu

SEQ ID NO: 254753 - RNA, 19 nt, Homo sapiens
  misc_RNA (1)...(19): siRNA sense strand
caaauccaacuaucaagua

SEQ ID NO: 254754 - RNA, 19 nt, Homo sapiens
  misc_RNA (1)...(19): siRNA sense strand
uaaaucagcagucauugaa

SEQ ID NO: 254755 - RNA, 19 nt, Homo sapiens
  misc_RNA (1)...(19): siRNA sense strand
aaacuccucucuauaguca

SEQ ID NO: 254756 - RNA, 19 nt, Homo sapiens
  misc_RNA (1)...(19): siRNA sense strand
ggucaaacaaguugcagua

SEQ ID NO: 254757 - RNA, 19 nt, Homo sapiens
  misc_RNA (1)...(19): siRNA sense strand
gaaagguguugaaagugau

SEQ ID NO: 254758 - RNA, 19 nt, Homo sapiens
  misc_RNA (1)...(19): siRNA sense strand
uaacgagaaugucuacaca

SEQ ID NO: 254759 - RNA, 19 nt, Homo sapiens
  misc_RNA (1)...(19): siRNA sense strand
gggaguaucugccaaacgu

SEQ ID NO: 254760 - RNA, 19 nt, Homo sapiens
  misc_RNA (1)...(19): siRNA sense strand
gaaccauccucuucauaac

SEQ ID NO: 254761 - RNA, 19 nt, Homo sapiens
  misc_RNA (1)...(19): siRNA sense strand
caaacaaguugcaguacca

SEQ ID NO: 254762 - RNA, 19 nt, Homo sapiens
  misc_RNA (1)...(19): siRNA sense strand
gaaauguccauccacuuau

SEQ ID NO: 254763 - RNA, 19 nt, Homo sapiens
  misc_RNA (1)...(19): siRNA sense strand
gagaaccauccucuucaua

SEQ ID NO: 254764 - RNA, 19 nt, Homo sapiens
  misc_RNA (1)...(19): siRNA sense strand
gaaagugaucgucgucaug

SEQ ID NO: 254765 - RNA, 19 nt, Homo sapiens
  misc_RNA (1)...(19): siRNA sense strand
gaugugaucagccgcauug

SEQ ID NO: 254766 - RNA, 19 nt, Homo sapiens
  misc_RNA (1)...(19): siRNA sense strand
ugggaaagguguugaaagu

SEQ ID NO: 254767 - RNA, 19 nt, Homo sapiens
  misc_RNA (1)...(19): siRNA sense strand
gauauaacgagaaugucua

SEQ ID NO: 254768 - RNA, 19 nt, Homo sapiens
  misc_RNA (1)...(19): siRNA sense strand
aaagggauauaacgagaau

SEQ ID NO: 254769 - RNA, 19 nt, Homo sapiens
  misc_RNA (1)...(19): siRNA sense strand
cacagaagauggcaagcuu

SEQ ID NO: 254770 - RNA, 19 nt, Homo sapiens
  misc_RNA (1)...(19): siRNA sense strand
caacuuacauucggucaac

SEQ ID NO: 254771 - RNA, 19 nt, Homo sapiens
  misc_RNA (1)...(19): siRNA sense strand
agaaccauccucuucauaa

SEQ ID NO: 254772 - RNA, 19 nt, Homo sapiens
  misc_RNA (1)...(19): siRNA sense strand
ugaccugguuaagaaguua

SEQ ID NO: 254773 - RNA, 19 nt, Homo sapiens
  misc_RNA (1)...(19): siRNA sense strand
gcucagcccacaacucuug

SEQ ID NO: 254774 - RNA, 19 nt, Homo sapiens
  misc_RNA (1)...(19): siRNA sense strand
uucaugaccugguuaagaa

SEQ ID NO: 254775 - RNA, 19 nt, Homo sapiens
  misc_RNA (1)...(19): siRNA sense strand
gucaacuccuucaagcaua

SEQ ID NO: 254776 - RNA, 19 nt, Homo sapiens
  misc_RNA (1)...(19): siRNA sense strand
uauaaguggucaaacaagu

SEQ ID NO: 254777 - RNA, 19 nt, Homo sapiens
  misc_RNA (1)...(19): siRNA sense strand
caauggaacaucagcaaug

SEQ ID NO: 254778 - RNA, 19 nt, Homo sapiens
  misc_RNA (1)...(19): siRNA sense strand
gauauaugguccaaaucca

SEQ ID NO: 254779 - RNA, 19 nt, Homo sapiens
  misc_RNA (1)...(19): siRNA sense strand
cuugauauaugguccaaau

SEQ ID NO: 254780 - RNA, 19 nt, Homo sapiens
  misc_RNA (1)...(19): siRNA sense strand
ccuaccaccucaauauguu

SEQ ID NO: 254781 - RNA, 19 nt, Homo sapiens
  misc_RNA (1)...(19): siRNA sense strand
ucaacuccuucaagcauau

SEQ ID NO: 254782 - RNA, 19 nt, Homo sapiens
  misc_RNA (1)...(19): siRNA sense strand
gauccuucaugaccugguu

SEQ ID NO: 254783 - RNA, 19 nt, Homo sapiens
  misc_RNA (1)...(19): siRNA sense strand
acgagaaugucuacacaga

SEQ ID NO: 254784 - RNA, 19 nt, Homo sapiens
  misc_RNA (1)...(19): siRNA sense strand
ggauauaacgagaaugucu

SEQ ID NO: 254785 - RNA, 19 nt, Homo sapiens
  misc_RNA (1)...(19): siRNA sense strand
cauauaaguggucaaacaa

SEQ ID NO: 254786 - RNA, 19 nt, Homo sapiens
  misc_RNA (1)...(19): siRNA sense strand
ugauaaaugucagugugaa

SEQ ID NO: 254787 - RNA, 19 nt, Homo sapiens
  misc_RNA (1)...(19): siRNA sense strand
gugguccgauccuucauga

SEQ ID NO: 254788 - RNA, 19 nt, Homo sapiens
  misc_RNA (1)...(19): siRNA sense strand
cagaagauggcaagcuuga

SEQ ID NO: 254789 - RNA, 19 nt, Homo sapiens
  misc_RNA (1)...(19): siRNA sense strand
ccacuuauccagacccaau

SEQ ID NO: 254790 - RNA, 19 nt, Homo sapiens
  misc_RNA (1)...(19): siRNA sense strand
caucuggccuuuuaaauca

SEQ ID NO: 254791 - RNA, 19 nt, Homo sapiens
  misc_RNA (1)...(19): siRNA sense strand
gaugggaguaucugccaaa

SEQ ID NO: 254792 - RNA, 19 nt, Homo sapiens
  misc_RNA (1)...(19): siRNA sense strand
uaaguggucaaacaaguug

SEQ ID NO: 254793 - RNA, 19 nt, Homo sapiens
  misc_RNA (1)...(19): siRNA sense strand
gauggcaagcuugauauau

SEQ ID NO: 254794 - RNA, 19 nt, Homo sapiens
  misc_RNA (1)...(19): siRNA sense strand
ugagaaccauccucuucau

SEQ ID NO: 254795 - RNA, 19 nt, Homo sapiens
  misc_RNA (1)...(19): siRNA sense strand
gaaugucuacacagaagau

SEQ ID NO: 254796 - RNA, 19 nt, Homo sapiens
  misc_RNA (1)...(19): siRNA sense strand
uuaaaucagcagucauuga

SEQ ID NO: 254797 - RNA, 19 nt, Homo sapiens
  misc_RNA (1)...(19): siRNA sense strand
gggagaaggccuuuauugc

SEQ ID NO: 254798 - RNA, 19 nt, Homo sapiens
  misc_RNA (1)...(19): siRNA sense strand
gguccaaauccaacuauca

SEQ ID NO: 254799 - RNA, 19 nt, Homo sapiens
  misc_RNA (1)...(19): siRNA sense strand
ugaaagugaucgucgucau

SEQ ID NO: 254800 - RNA, 19 nt, Homo sapiens
  misc_RNA (1)...(19): siRNA sense strand
acuagcaucuggccuuuua

SEQ ID NO: 254801 - RNA, 19 nt, Homo sapiens
  misc_RNA (1)...(19): siRNA sense strand
ccaaauccaacuaucaagu

SEQ ID NO: 254802 - RNA, 19 nt, Homo sapiens
  misc_RNA (1)...(19): siRNA sense strand
gugaucagccgcauugaca

SEQ ID NO: 254803 - RNA, 19 nt, Homo sapiens
  misc_RNA (1)...(19): siRNA sense strand
gcguuccgcuaaucagaug

SEQ ID NO: 254804 - RNA, 19 nt, Homo sapiens
  misc_RNA (1)...(19): siRNA sense strand
aaauguccauccacuuauc

SEQ ID NO: 254805 - RNA, 19 nt, Homo sapiens
  misc_RNA (1)...(19): siRNA sense strand
guaggcaagccaucugaga

SEQ ID NO: 254806 - RNA, 19 nt, Homo sapiens
  misc_RNA (1)...(19): siRNA sense strand
guccaaauccaacuaucaa

SEQ ID NO: 254807 - RNA, 19 nt, Homo sapiens
  misc_RNA (1)...(19): siRNA sense strand
auggcaagcuugauauaug

SEQ ID NO: 254808 - RNA, 19 nt, Homo sapiens
  misc_RNA (1)...(19): siRNA sense strand
cgggagaaggccuuuauug

SEQ ID NO: 254809 - RNA, 19 nt, Homo sapiens
  misc_RNA (1)...(19): siRNA sense strand
gugauaaaugucaguguga

SEQ ID NO: 254810 - RNA, 19 nt, Homo sapiens
  misc_RNA (1)...(19): siRNA sense strand
uggcaagcuugauauaugg

SEQ ID NO: 254811 - RNA, 19 nt, Homo sapiens
  misc_RNA (1)...(19): siRNA sense strand
uaaagggauauaacgagaa

SEQ ID NO: 254812 - RNA, 19 nt, Homo sapiens
  misc_RNA (1)...(19): siRNA sense strand
cuaaucagaugggaguauc

SEQ ID NO: 254813 - RNA, 19 nt, Homo sapiens
  misc_RNA (1)...(19): siRNA sense strand
cgagaaugucuacacagaa

SEQ ID NO: 254814 - RNA, 19 nt, Homo sapiens
  misc_RNA (1)...(19): siRNA sense strand
augcggagccuguucauug

SEQ ID NO: 254815 - RNA, 19 nt, Homo sapiens
  misc_RNA (1)...(19): siRNA sense strand
caaugcuucuggugaccuu

SEQ ID NO: 254816 - RNA, 19 nt, Homo sapiens
  misc_RNA (1)...(19): siRNA sense strand
gcuggaacgucugagcaau

SEQ ID NO: 254817 - RNA, 19 nt, Homo sapiens
  misc_RNA (1)...(19): siRNA sense strand
ugcggagccuguucauuga

SEQ ID NO: 254818 - RNA, 19 nt, Homo sapiens
  misc_RNA (1)...(19): siRNA sense strand
gacaaaacuccucucuaua

SEQ ID NO: 254819 - RNA, 19 nt, Homo sapiens
  misc_RNA (1)...(19): siRNA sense strand
auccaacuaucaaguauuc

SEQ ID NO: 254820 - RNA, 19 nt, Homo sapiens
  misc_RNA (1)...(19): siRNA sense strand
ggaguaucugccaaacgua

SEQ ID NO: 254821 - RNA, 19 nt, Homo sapiens
  misc_RNA (1)...(19): siRNA sense strand
caagccaucugagaaccau

SEQ ID NO: 254822 - RNA, 19 nt, Homo sapiens
  misc_RNA (1)...(19): siRNA sense strand
caaaacuccucucuauagu

SEQ ID NO: 254823 - RNA, 19 nt, Homo sapiens
  misc_RNA (1)...(19): siRNA sense strand
uguccuaccaccucaauau

SEQ ID NO: 254824 - RNA, 19 nt, Homo sapiens
  misc_RNA (1)...(19): siRNA sense strand
aagcauauaaguggucaaa

SEQ ID NO: 254825 - RNA, 19 nt, Homo sapiens
  misc_RNA (1)...(19): siRNA sense strand
acuaucaaguauuccagaa

SEQ ID NO: 254826 - RNA, 19 nt, Homo sapiens
  misc_RNA (1)...(19): siRNA sense strand
gaucgaacaauaguaaagg

SEQ ID NO: 254827 - RNA, 19 nt, Homo sapiens
  misc_RNA (1)...(19): siRNA sense strand
cagacccaauggaacauca

SEQ ID NO: 254828 - RNA, 19 nt, Homo sapiens
  misc_RNA (1)...(19): siRNA sense strand
gcuaaucagaugggaguau

SEQ ID NO: 254829 - RNA, 19 nt, Homo sapiens
  misc_RNA (1)...(19): siRNA sense strand
caacuccuucaagcauaua

SEQ ID NO: 254830 - RNA, 19 nt, Homo sapiens
  misc_RNA (1)...(19): siRNA sense strand
uaggcaagccaucugagaa

SEQ ID NO: 254831 - RNA, 19 nt, Homo sapiens
  misc_RNA (1)...(19): siRNA sense strand
cuucaugaccugguuaaga

SEQ ID NO: 254832 - RNA, 19 nt, Homo sapiens
  misc_RNA (1)...(19): siRNA sense strand
ucugagaaccauccucuuc

SEQ ID NO: 254833 - RNA, 19 nt, Homo sapiens
  misc_RNA (1)...(19): siRNA sense strand
gccgggagaaggccuuuau

SEQ ID NO: 254834 - RNA, 19 nt, Homo sapiens
  misc_RNA (1)...(19): siRNA sense strand
acaaaacuccucucuauag

SEQ ID NO: 254835 - RNA, 19 nt, Homo sapiens
  misc_RNA (1)...(19): siRNA sense strand
ucaaccgggaccucaauga

SEQ ID NO: 254836 - RNA, 19 nt, Homo sapiens
  misc_RNA (1)...(19): siRNA sense strand
ccaauggaacaucagcaau

SEQ ID NO: 254837 - RNA, 19 nt, Homo sapiens
  misc_RNA (1)...(19): siRNA sense strand
agauggcaagcuugauaua

SEQ ID NO: 254838 - RNA, 19 nt, Homo sapiens
  misc_RNA (1)...(19): siRNA sense strand
uggaacgucugagcaaucu

SEQ ID NO: 254839 - RNA, 19 nt, Homo sapiens
  misc_RNA (1)...(19): siRNA sense strand
gggaaagguguugaaagug

SEQ ID NO: 254840 - RNA, 19 nt, Homo sapiens
  misc_RNA (1)...(19): siRNA sense strand
guaggaagcuuuauuagaa

SEQ ID NO: 254841 - RNA, 19 nt, Homo sapiens
  misc_RNA (1)...(19): siRNA sense strand
gcaaugaaguuaaaugagu

SEQ ID NO: 254842 - RNA, 19 nt, Homo sapiens
  misc_RNA (1)...(19): siRNA sense strand
gagaaagacuggcaagguu

SEQ ID NO: 254843 - RNA, 19 nt, Homo sapiens
  misc_RNA (1)...(19): siRNA sense strand
gaaguuaaaugagugugua

SEQ ID NO: 254844 - RNA, 19 nt, Homo sapiens
  misc_RNA (1)...(19): siRNA sense strand
uagaggagguucugacuaa

SEQ ID NO: 254845 - RNA, 19 nt, Homo sapiens
  misc_RNA (1)...(19): siRNA sense strand
ugagaaagcuugccagaag

SEQ ID NO: 254846 - RNA, 19 nt, Homo sapiens
  misc_RNA (1)...(19): siRNA sense strand
gcaauucuaucucuaugau

SEQ ID NO: 254847 - RNA, 19 nt, Homo sapiens
  misc_RNA (1)...(19): siRNA sense strand
gagaaagcuugccagaaga

SEQ ID NO: 254848 - RNA, 19 nt, Homo sapiens
  misc_RNA (1)...(19): siRNA sense strand
gaggagguucugacuaaua

SEQ ID NO: 254849 - RNA, 19 nt, Homo sapiens
  misc_RNA (1)...(19): siRNA sense strand
uggaagcaaugaaguuaaa

SEQ ID NO: 254850 - RNA, 19 nt, Homo sapiens
  misc_RNA (1)...(19): siRNA sense strand
gguaggaagcuuuauuaga

SEQ ID NO: 254851 - RNA, 19 nt, Homo sapiens
  misc_RNA (1)...(19): siRNA sense strand
gcuggaagcaaugaaguua

SEQ ID NO: 254852 - RNA, 19 nt, Homo sapiens
  misc_RNA (1)...(19): siRNA sense strand
aggagguucugacuaauaa

SEQ ID NO: 254853 - RNA, 19 nt, Homo sapiens
  misc_RNA (1)...(19): siRNA sense strand
guaccuggaugaagcauac

SEQ ID NO: 254854 - RNA, 19 nt, Homo sapiens
  misc_RNA (1)...(19): siRNA sense strand
gaagcaaugaaguuaaaug

SEQ ID NO: 254855 - RNA, 19 nt, Homo sapiens
  misc_RNA (1)...(19): siRNA sense strand
ccaagggaaucaggcauga

SEQ ID NO: 254856 - RNA, 19 nt, Homo sapiens
  misc_RNA (1)...(19): siRNA sense strand
gagcucuacuuacagaaca

SEQ ID NO: 254857 - RNA, 19 nt, Homo sapiens
  misc_RNA (1)...(19): siRNA sense strand
aagccugagugguucuuua

SEQ ID NO: 254858 - RNA, 19 nt, Homo sapiens
  misc_RNA (1)...(19): siRNA sense strand
gaacggcuggaagcaauga

SEQ ID NO: 254859 - RNA, 19 nt, Homo sapiens
  misc_RNA (1)...(19): siRNA sense strand
aaaauaagccugagugguu

SEQ ID NO: 254860 - RNA, 19 nt, Homo sapiens
  misc_RNA (1)...(19): siRNA sense strand
gagguucugacuaauaaga

SEQ ID NO: 254861 - RNA, 19 nt, Homo sapiens
  misc_RNA (1)...(19): siRNA sense strand
ggaaucaggcaugaaguca

SEQ ID NO: 254862 - RNA, 19 nt, Homo sapiens
  misc_RNA (1)...(19): siRNA sense strand
gguggcaauucuaucucua

SEQ ID NO: 254863 - RNA, 19 nt, Homo sapiens
  misc_RNA (1)...(19): siRNA sense strand
cuaauaagaagacgaccuu

SEQ ID NO: 254864 - RNA, 19 nt, Homo sapiens
  misc_RNA (1)...(19): siRNA sense strand
agaaagacuggcaagguuu

SEQ ID NO: 254865 - RNA, 19 nt, Homo sapiens
  misc_RNA (1)...(19): siRNA sense strand
ucaucaauaucaaccugaa

SEQ ID NO: 254866 - RNA, 19 nt, Homo sapiens
  misc_RNA (1)...(19): siRNA sense strand
gaugaucuuagaguuguuu

SEQ ID NO: 254867 - RNA, 19 nt, Homo sapiens
  misc_RNA (1)...(19): siRNA sense strand
gcugagaggacgcgucuag

SEQ ID NO: 254868 - RNA, 19 nt, Homo sapiens
  misc_RNA (1)...(19): siRNA sense strand
gaccuucuuugguggcaau

SEQ ID NO: 254869 - RNA, 19 nt, Homo sapiens
  misc_RNA (1)...(19): siRNA sense strand
uugguaggaagcuuuauua

SEQ ID NO: 254870 - RNA, 19 nt, Homo sapiens
  misc_RNA (1)...(19): siRNA sense strand
uaggaagcuuuauuagaag

SEQ ID NO: 254871 - RNA, 19 nt, Homo sapiens
  misc_RNA (1)...(19): siRNA sense strand
agggucagcugaucuacga

SEQ ID NO: 254872 - RNA, 19 nt, Homo sapiens
  misc_RNA (1)...(19): siRNA sense strand
uugaacggcuggaagcaau

SEQ ID NO: 254873 - RNA, 19 nt, Homo sapiens
  misc_RNA (1)...(19): siRNA sense strand
uggcaauucuaucucuaug

SEQ ID NO: 254874 - RNA, 19 nt, Homo sapiens
  misc_RNA (1)...(19): siRNA sense strand
aagcauacccagggaagaa

SEQ ID NO: 254875 - RNA, 19 nt, Homo sapiens
  misc_RNA (1)...(19): siRNA sense strand
gcaucuacagcaugagguu

SEQ ID NO: 254876 - RNA, 19 nt, Homo sapiens
  misc_RNA (1)...(19): siRNA sense strand
agaagcuguugccggauga

SEQ ID NO: 254877 - RNA, 19 nt, Homo sapiens
  misc_RNA (1)...(19): siRNA sense strand
gaagcauacccagggaaga

SEQ ID NO: 254878 - RNA, 19 nt, Homo sapiens
  misc_RNA (1)...(19): siRNA sense strand
ugagaaagacuggcaaggu

SEQ ID NO: 254879 - RNA, 19 nt, Homo sapiens
  misc_RNA (1)...(19): siRNA sense strand
gaaagcuugccagaagaug

SEQ ID NO: 254880 - RNA, 19 nt, Homo sapiens
  misc_RNA (1)...(19): siRNA sense strand
gcccugaggccugugacua

SEQ ID NO: 254881 - RNA, 19 nt, Homo sapiens
  misc_RNA (1)...(19): siRNA sense strand
gggaaucaggcaugaaguc

SEQ ID NO: 254882 - RNA, 19 nt, Homo sapiens
  misc_RNA (1)...(19): siRNA sense strand
aaagcuugccagaagauga

SEQ ID NO: 254883 - RNA, 19 nt, Homo sapiens
  misc_RNA (1)...(19): siRNA sense strand
ggaugaccccuaugagaaa

SEQ ID NO: 254884 - RNA, 19 nt, Homo sapiens
  misc_RNA (1)...(19): siRNA sense strand
ccugaggccugugacuaug

SEQ ID NO: 254885 - RNA, 19 nt, Homo sapiens
  misc_RNA (1)...(19): siRNA sense strand
ggaagcaaugaaguuaaau

SEQ ID NO: 254886 - RNA, 19 nt, Homo sapiens
  misc_RNA (1)...(19): siRNA sense strand
ggcaauucuaucucuauga

SEQ ID NO: 254887 - RNA, 19 nt, Homo sapiens
  misc_RNA (1)...(19): siRNA sense strand
cuagaggagguucugacua

SEQ ID NO: 254888 - RNA, 19 nt, Homo sapiens
  misc_RNA (1)...(19): siRNA sense strand
caugagguucugcccguuu

SEQ ID NO: 254889 - RNA, 19 nt, Homo sapiens
  misc_RNA (1)...(19): siRNA sense strand
caucuggcccugguuugaa

SEQ ID NO: 254890 - RNA, 19 nt, Homo sapiens
  misc_RNA (1)...(19): siRNA sense strand
ugaaggaagaucccacagu

SEQ ID NO: 254891 - RNA, 19 nt, Homo sapiens
  misc_RNA (1)...(19): siRNA sense strand
ugagaggacgcgucuaguc

SEQ ID NO: 254892 - RNA, 19 nt, Homo sapiens
  misc_RNA (1)...(19): siRNA sense strand
ccucaucuggcccugguuu

SEQ ID NO: 254893 - RNA, 19 nt, Homo sapiens
  misc_RNA (1)...(19): siRNA sense strand
caucaauaucaaccugaaa

SEQ ID NO: 254894 - RNA, 19 nt, Homo sapiens
  misc_RNA (1)...(19): siRNA sense strand
gaacaauugugaaugguuu

SEQ ID NO: 254895 - RNA, 19 nt, Homo sapiens
  misc_RNA (1)...(19): siRNA sense strand
gaaaugaugucgcaaagca

SEQ ID NO: 254896 - RNA, 19 nt, Homo sapiens
  misc_RNA (1)...(19): siRNA sense strand
ggagaaaguugauaagcaa

SEQ ID NO: 254897 - RNA, 19 nt, Homo sapiens
  misc_RNA (1)...(19): siRNA sense strand
gcaggaaucuaucagagaa

SEQ ID NO: 254898 - RNA, 19 nt, Homo sapiens
  misc_RNA (1)...(19): siRNA sense strand
uaacaggccuggauaacau

SEQ ID NO: 254899 - RNA, 19 nt, Homo sapiens
  misc_RNA (1)...(19): siRNA sense strand
guagcuaccuugaugauuc

SEQ ID NO: 254900 - RNA, 19 nt, Homo sapiens
  misc_RNA (1)...(19): siRNA sense strand
gcacagugguuucuuagag

SEQ ID NO: 254901 - RNA, 19 nt, Homo sapiens
  misc_RNA (1)...(19): siRNA sense strand
uuaauacacugcugaaaga

SEQ ID NO: 254902 - RNA, 19 nt, Homo sapiens
  misc_RNA (1)...(19): siRNA sense strand
gcaaacagaauacaaguag

SEQ ID NO: 254903 - RNA, 19 nt, Homo sapiens
  misc_RNA (1)...(19): siRNA sense strand
gaaacgaggacacaaugaa

SEQ ID NO: 254904 - RNA, 19 nt, Homo sapiens
  misc_RNA (1)...(19): siRNA sense strand
caggagauguuucaugcua

SEQ ID NO: 254905 - RNA, 19 nt, Homo sapiens
  misc_RNA (1)...(19): siRNA sense strand
ucagacgaguuuaauauug

SEQ ID NO: 254906 - RNA, 19 nt, Homo sapiens
  misc_RNA (1)...(19): siRNA sense strand
ucaacacgcuucaaacuca

SEQ ID NO: 254907 - RNA, 19 nt, Homo sapiens
  misc_RNA (1)...(19): siRNA sense strand
auacacugcugaaagauaa

SEQ ID NO: 254908 - RNA, 19 nt, Homo sapiens
  misc_RNA (1)...(19): siRNA sense strand
gagauacucuugcuaacag

SEQ ID NO: 254909 - RNA, 19 nt, Homo sapiens
  misc_RNA (1)...(19): siRNA sense strand
gaauacaaguagcuaccuu

SEQ ID NO: 254910 - RNA, 19 nt, Homo sapiens
  misc_RNA (1)...(19): siRNA sense strand
gaaaguugauaagcaauac

SEQ ID NO: 254911 - RNA, 19 nt, Homo sapiens
  misc_RNA (1)...(19): siRNA sense strand
gugaaugguuuguuuguag

SEQ ID NO: 254912 - RNA, 19 nt, Homo sapiens
  misc_RNA (1)...(19): siRNA sense strand
cauagcaccauaaagguua

SEQ ID NO: 254913 - RNA, 19 nt, Homo sapiens
  misc_RNA (1)...(19): siRNA sense strand
ggaaggagauaagguucga

SEQ ID NO: 254914 - RNA, 19 nt, Homo sapiens
  misc_RNA (1)...(19): siRNA sense strand
ggauagguuuaaguucuuu

SEQ ID NO: 254915 - RNA, 19 nt, Homo sapiens
  misc_RNA (1)...(19): siRNA sense strand
ggagauguuucaugcuaca

SEQ ID NO: 254916 - RNA, 19 nt, Homo sapiens
  misc_RNA (1)...(19): siRNA sense strand
gcaagcaggagauguuuca

SEQ ID NO: 254917 - RNA, 19 nt, Homo sapiens
  misc_RNA (1)...(19): siRNA sense strand
caauacaaaucgguaacaa

SEQ ID NO: 254918 - RNA, 19 nt, Homo sapiens
  misc_RNA (1)...(19): siRNA sense strand
gaggacacaaugaaaugua

SEQ ID NO: 254919 - RNA, 19 nt, Homo sapiens
  misc_RNA (1)...(19): siRNA sense strand
gaugaagaccauucguauu

SEQ ID NO: 254920 - RNA, 19 nt, Homo sapiens
  misc_RNA (1)...(19): siRNA sense strand
gguuuaaguucuuucuuuc

SEQ ID NO: 254921 - RNA, 19 nt, Homo sapiens
  misc_RNA (1)...(19): siRNA sense strand
agaaggagaaaguugauaa

SEQ ID NO: 254922 - RNA, 19 nt, Homo sapiens
  misc_RNA (1)...(19): siRNA sense strand
gcaaacuacauacugcaaa

SEQ ID NO: 254923 - RNA, 19 nt, Homo sapiens
  misc_RNA (1)...(19): siRNA sense strand
uaaggaaggagauaagguu

SEQ ID NO: 254924 - RNA, 19 nt, Homo sapiens
  misc_RNA (1)...(19): siRNA sense strand
gcugacaucuggaguucau

SEQ ID NO: 254925 - RNA, 19 nt, Homo sapiens
  misc_RNA (1)...(19): siRNA sense strand
ccaaaagucucuccucaug

SEQ ID NO: 254926 - RNA, 19 nt, Homo sapiens
  misc_RNA (1)...(19): siRNA sense strand
guucauagcaccauaaagg

SEQ ID NO: 254927 - RNA, 19 nt, Homo sapiens
  misc_RNA (1)...(19): siRNA sense strand
cagaaaugaugucgcaaag

SEQ ID NO: 254928 - RNA, 19 nt, Homo sapiens
  misc_RNA (1)...(19): siRNA sense strand
gaggaacuggauagguuua

SEQ ID NO: 254929 - RNA, 19 nt, Homo sapiens
  misc_RNA (1)...(19): siRNA sense strand
aaacgaggacacaaugaaa

SEQ ID NO: 254930 - RNA, 19 nt, Homo sapiens
  misc_RNA (1)...(19): siRNA sense strand
gaagcgcuguuugccaguu

SEQ ID NO: 254931 - RNA, 19 nt, Homo sapiens
  misc_RNA (1)...(19): siRNA sense strand
gaacuggauagguuuaagu

SEQ ID NO: 254932 - RNA, 19 nt, Homo sapiens
  misc_RNA (1)...(19): siRNA sense strand
gaguaaauacaaggagaua

SEQ ID NO: 254933 - RNA, 19 nt, Homo sapiens
  misc_RNA (1)...(19): siRNA sense strand
caaacuacauacugcaaac

SEQ ID NO: 254934 - RNA, 19 nt, Homo sapiens
  misc_RNA (1)...(19): siRNA sense strand
ggaguucauagcaccauaa

SEQ ID NO: 254935 - RNA, 19 nt, Homo sapiens
  misc_RNA (1)...(19): siRNA sense strand
gaucaacacgcuucaaacu

SEQ ID NO: 254936 - RNA, 19 nt, Homo sapiens
  misc_RNA (1)...(19): siRNA sense strand
augaagaccauucguauuu

SEQ ID NO: 254937 - RNA, 19 nt, Homo sapiens
  misc_RNA (1)...(19): siRNA sense strand
gaggagaaggagaaaguug

SEQ ID NO: 254938 - RNA, 19 nt, Homo sapiens
  misc_RNA (1)...(19): siRNA sense strand
ggaacaauugugaaugguu

SEQ ID NO: 254939 - RNA, 19 nt, Homo sapiens
  misc_RNA (1)...(19): siRNA sense strand
gagaaggagaaaguugaua

SEQ ID NO: 254940 - RNA, 19 nt, Homo sapiens
  misc_RNA (1)...(19): siRNA sense strand
ggagauacucuugcuaaca

SEQ ID NO: 254941 - RNA, 19 nt, Homo sapiens
  misc_RNA (1)...(19): siRNA sense strand
gaaaugaguccugcugcau

SEQ ID NO: 254942 - RNA, 19 nt, Homo sapiens
  misc_RNA (1)...(19): siRNA sense strand
cagcugacaucuggaguuc

SEQ ID NO: 254943 - RNA, 19 nt, Homo sapiens
  misc_RNA (1)...(19): siRNA sense strand
guaaauacaaggagauacu

SEQ ID NO: 254944 - RNA, 19 nt, Homo sapiens
  misc_RNA (1)...(19): siRNA sense strand
gugaugaagaccauucgua

SEQ ID NO: 254945 - RNA, 19 nt, Homo sapiens
  misc_RNA (1)...(19): siRNA sense strand
ggaacuggauagguuuaag

SEQ ID NO: 254946 - RNA, 19 nt, Homo sapiens
  misc_RNA (1)...(19): siRNA sense strand
aggacacaaugaaauguaa

SEQ ID NO: 254947 - RNA, 19 nt, Homo sapiens
  misc_RNA (1)...(19): siRNA sense strand
aaggagauacucuugcuaa

SEQ ID NO: 254948 - RNA, 19 nt, Homo sapiens
  misc_RNA (1)...(19): siRNA sense strand
augaggaacuggauagguu

SEQ ID NO: 254949 - RNA, 19 nt, Homo sapiens
  misc_RNA (1)...(19): siRNA sense strand
ucagaaaugaugucgcaaa

SEQ ID NO: 254950 - RNA, 19 nt, Homo sapiens
  misc_RNA (1)...(19): siRNA sense strand
gaaggagaaaguugauaag

SEQ ID NO: 254951 - RNA, 19 nt, Homo sapiens
  misc_RNA (1)...(19): siRNA sense strand
ggcggugucugcagugaug

SEQ ID NO: 254952 - RNA, 19 nt, Homo sapiens
  misc_RNA (1)...(19): siRNA sense strand
ucggcacagugguuucuua

SEQ ID NO: 254953 - RNA, 19 nt, Homo sapiens
  misc_RNA (1)...(19): siRNA sense strand
aaaagucucuccucauguu

SEQ ID NO: 254954 - RNA, 19 nt, Homo sapiens
  misc_RNA (1)...(19): siRNA sense strand
gccacuaagucaagcugaa

SEQ ID NO: 254955 - RNA, 19 nt, Homo sapiens
  misc_RNA (1)...(19): siRNA sense strand
ucagagaaggguuucagaa

SEQ ID NO: 254956 - RNA, 19 nt, Homo sapiens
  misc_RNA (1)...(19): siRNA sense strand
gaaauguaaggaaggagau

SEQ ID NO: 254957 - RNA, 19 nt, Homo sapiens
  misc_RNA (1)...(19): siRNA sense strand
gcagugaugaagaccauuc

SEQ ID NO: 254958 - RNA, 19 nt, Homo sapiens
  misc_RNA (1)...(19): siRNA sense strand
aagcgcuguuugccaguua

SEQ ID NO: 254959 - RNA, 19 nt, Homo sapiens
  misc_RNA (1)...(19): siRNA sense strand
cugcagccaucagaaauga

SEQ ID NO: 254960 - RNA, 19 nt, Homo sapiens
  misc_RNA (1)...(19): siRNA sense strand
ccaaagccacuaagucaag

SEQ ID NO: 254961 - RNA, 19 nt, Homo sapiens
  misc_RNA (1)...(19): siRNA sense strand
cagacgaguuuaauauugc

SEQ ID NO: 254962 - RNA, 19 nt, Homo sapiens
  misc_RNA (1)...(19): siRNA sense strand
ggagaaggagaaaguugau

SEQ ID NO: 254963 - RNA, 19 nt, Homo sapiens
  misc_RNA (1)...(19): siRNA sense strand
uagcuaccuugaugauuca

SEQ ID NO: 254964 - RNA, 19 nt, Homo sapiens
  misc_RNA (1)...(19): siRNA sense strand
guuaaugucccgcugaaca

SEQ ID NO: 254965 - RNA, 19 nt, Homo sapiens
  misc_RNA (1)...(19): siRNA sense strand
cuacauacugcaaacagaa

SEQ ID NO: 254966 - RNA, 19 nt, Homo sapiens
  misc_RNA (1)...(19): siRNA sense strand
aaccaaagccacuaaguca

SEQ ID NO: 254967 - RNA, 19 nt, Homo sapiens
  misc_RNA (1)...(19): siRNA sense strand
ugaugaagaccauucguau

SEQ ID NO: 254968 - RNA, 19 nt, Homo sapiens
  misc_RNA (1)...(19): siRNA sense strand
aggagaaaguugauaagca

SEQ ID NO: 254969 - RNA, 19 nt, Homo sapiens
  misc_RNA (1)...(19): siRNA sense strand
cuggauagguuuaaguucu

SEQ ID NO: 254970 - RNA, 19 nt, Homo sapiens
  misc_RNA (1)...(19): siRNA sense strand
ugacaacacugggaaaaug

SEQ ID NO: 254971 - RNA, 19 nt, Homo sapiens
  misc_RNA (1)...(19): siRNA sense strand
guccagaagguaacagaaa

SEQ ID NO: 254972 - RNA, 19 nt, Homo sapiens
  misc_RNA (1)...(19): siRNA sense strand
ugugaaugguuuguuugua

SEQ ID NO: 254973 - RNA, 19 nt, Homo sapiens
  misc_RNA (1)...(19): siRNA sense strand
gaugcugaaucugaccaaa

SEQ ID NO: 254974 - RNA, 19 nt, Homo sapiens
  misc_RNA (1)...(19): siRNA sense strand
uagcgccucacguguguua

SEQ ID NO: 254975 - RNA, 19 nt, Homo sapiens
  misc_RNA (1)...(19): siRNA sense strand
ccacuaagucaagcugaaa

SEQ ID NO: 254976 - RNA, 19 nt, Homo sapiens
  misc_RNA (1)...(19): siRNA sense strand
gcaauacaaaucgguaaca

SEQ ID NO: 254977 - RNA, 19 nt, Homo sapiens
  misc_RNA (1)...(19): siRNA sense strand
gaugguggcccagcaggaa

SEQ ID NO: 254978 - RNA, 19 nt, Homo sapiens
  misc_RNA (1)...(19): siRNA sense strand
gccacaggcaaacuacaua

SEQ ID NO: 254979 - RNA, 19 nt, Homo sapiens
  misc_RNA (1)...(19): siRNA sense strand
uagaaacgaggacacaaug

SEQ ID NO: 254980 - RNA, 19 nt, Homo sapiens
  misc_RNA (1)...(19): siRNA sense strand
ugaaugguuuguuuguagu

SEQ ID NO: 254981 - RNA, 19 nt, Homo sapiens
  misc_RNA (1)...(19): siRNA sense strand
uggauagguuuaaguucuu

SEQ ID NO: 254982 - RNA, 19 nt, Homo sapiens
  misc_RNA (1)...(19): siRNA sense strand
aagucaagcugaaaugagu

SEQ ID NO: 254983 - RNA, 19 nt, Homo sapiens
  misc_RNA (1)...(19): siRNA sense strand
aauacacugcugaaagaua

SEQ ID NO: 254984 - RNA, 19 nt, Homo sapiens
  misc_RNA (1)...(19): siRNA sense strand
gaagguaacagaaaagaag

SEQ ID NO: 254985 - RNA, 19 nt, Homo sapiens
  misc_RNA (1)...(19): siRNA sense strand
uuaugguacugaaagcaaa

SEQ ID NO: 254986 - RNA, 19 nt, Homo sapiens
  misc_RNA (1)...(19): siRNA sense strand
aaugaaauguaaggaagga

SEQ ID NO: 254987 - RNA, 19 nt, Homo sapiens
  misc_RNA (1)...(19): siRNA sense strand
aagaucaacacgcuucaaa

SEQ ID NO: 254988 - RNA, 19 nt, Homo sapiens
  misc_RNA (1)...(19): siRNA sense strand
aaaccaaagccacuaaguc

SEQ ID NO: 254989 - RNA, 19 nt, Homo sapiens
  misc_RNA (1)...(19): siRNA sense strand
gaguucauagcaccauaaa

SEQ ID NO: 254990 - RNA, 19 nt, Homo sapiens
  misc_RNA (1)...(19): siRNA sense strand
cagaaaagcuggugaaacc

SEQ ID NO: 254991 - RNA, 19 nt, Homo sapiens
  misc_RNA (1)...(19): siRNA sense strand
aauagcgccucacgugugu

SEQ ID NO: 254992 - RNA, 19 nt, Homo sapiens
  misc_RNA (1)...(19): siRNA sense strand
cagagaaggguuucagaag

SEQ ID NO: 254993 - RNA, 19 nt, Homo sapiens
  misc_RNA (1)...(19): siRNA sense strand
ggaggagaaggagaaaguu

SEQ ID NO: 254994 - RNA, 19 nt, Homo sapiens
  misc_RNA (1)...(19): siRNA sense strand
gaaauacucucaucacaga

SEQ ID NO: 254995 - RNA, 19 nt, Homo sapiens
  misc_RNA (1)...(19): siRNA sense strand
gaccaacucuggcuuguua

SEQ ID NO: 254996 - RNA, 19 nt, Homo sapiens
  misc_RNA (1)...(19): siRNA sense strand
gaagugaucuuuggucuug

SEQ ID NO: 254997 - RNA, 19 nt, Homo sapiens
  misc_RNA (1)...(19): siRNA sense strand
gggaaggucuauccucuua

SEQ ID NO: 254998 - RNA, 19 nt, Homo sapiens
  misc_RNA (1)...(19): siRNA sense strand
uuacagaccuugugaagaa

SEQ ID NO: 254999 - RNA, 19 nt, Homo sapiens
  misc_RNA (1)...(19): siRNA sense strand
acagaaacauugcaacaua

SEQ ID NO: 255000 - RNA, 19 nt, Homo sapiens
  misc_RNA (1)...(19): siRNA sense strand
cgaagacgauuucaacaaa

SEQ ID NO: 255001 - RNA, 19 nt, Homo sapiens
  misc_RNA (1)...(19): siRNA sense strand
ggaacacacucaaagaaga

SEQ ID NO: 255002 - RNA, 19 nt, Homo sapiens
  misc_RNA (1)...(19): siRNA sense strand
gaggagaguugaaagagaa

SEQ ID NO: 255003 - RNA, 19 nt, Homo sapiens
  misc_RNA (1)...(19): siRNA sense strand
ggccagagguugaaaguga

SEQ ID NO: 255004 - RNA, 19 nt, Homo sapiens
  misc_RNA (1)...(19): siRNA sense strand
ggugaaacuuguugacuuu

SEQ ID NO: 255005 - RNA, 19 nt, Homo sapiens
  misc_RNA (1)...(19): siRNA sense strand
gaacccagaugccaccuau

SEQ ID NO: 255006 - RNA, 19 nt, Homo sapiens
  misc_RNA (1)...(19): siRNA sense strand
gaacgugccuggugagucu

SEQ ID NO: 255007 - RNA, 19 nt, Homo sapiens
  misc_RNA (1)...(19): siRNA sense strand
caaguuagaauccagcuua

SEQ ID NO: 255008 - RNA, 19 nt, Homo sapiens
  misc_RNA (1)...(19): siRNA sense strand
uaaguuacgugucuacuau

SEQ ID NO: 255009 - RNA, 19 nt, Homo sapiens
  misc_RNA (1)...(19): siRNA sense strand
gaaaucaaacuggagauaa

SEQ ID NO: 255010 - RNA, 19 nt, Homo sapiens
  misc_RNA (1)...(19): siRNA sense strand
caaaagggcucaaagacua

SEQ ID NO: 255011 - RNA, 19 nt, Homo sapiens
  misc_RNA (1)...(19): siRNA sense strand
gagccaaguuccauuguga

SEQ ID NO: 255012 - RNA, 19 nt, Homo sapiens
  misc_RNA (1)...(19): siRNA sense strand
ccaaaugaaaggcaaguua

SEQ ID NO: 255013 - RNA, 19 nt, Homo sapiens
  misc_RNA (1)...(19): siRNA sense strand
ucacaaugauccagaaguu

SEQ ID NO: 255014 - RNA, 19 nt, Homo sapiens
  misc_RNA (1)...(19): siRNA sense strand
gaaggucuauccucuuauc

SEQ ID NO: 255015 - RNA, 19 nt, Homo sapiens
  misc_RNA (1)...(19): siRNA sense strand
gaugagaccagaagccaua

SEQ ID NO: 255016 - RNA, 19 nt, Homo sapiens
  misc_RNA (1)...(19): siRNA sense strand
ggagauaaauaugcuaaag

SEQ ID NO: 255017 - RNA, 19 nt, Homo sapiens
  misc_RNA (1)...(19): siRNA sense strand
uaagucauuuggagaauug

SEQ ID NO: 255018 - RNA, 19 nt, Homo sapiens
  misc_RNA (1)...(19): siRNA sense strand
aaagagaacaggaguauau

SEQ ID NO: 255019 - RNA, 19 nt, Homo sapiens
  misc_RNA (1)...(19): siRNA sense strand
ggauugagcagcagaaaga

SEQ ID NO: 255020 - RNA, 19 nt, Homo sapiens
  misc_RNA (1)...(19): siRNA sense strand
ugacaugcauccaaugaga

SEQ ID NO: 255021 - RNA, 19 nt, Homo sapiens
  misc_RNA (1)...(19): siRNA sense strand
gaagagaggcgagaaagau

SEQ ID NO: 255022 - RNA, 19 nt, Homo sapiens
  misc_RNA (1)...(19): siRNA sense strand
gcagucagguuuauuucau

SEQ ID NO: 255023 - RNA, 19 nt, Homo sapiens
  misc_RNA (1)...(19): siRNA sense strand
gcggagaaauacguucaua

SEQ ID NO: 255024 - RNA, 19 nt, Homo sapiens
  misc_RNA (1)...(19): siRNA sense strand
caccaaggauguaguucua

SEQ ID NO: 255025 - RNA, 19 nt, Homo sapiens
  misc_RNA (1)...(19): siRNA sense strand
guaaauacaagaagagguu

SEQ ID NO: 255026 - RNA, 19 nt, Homo sapiens
  misc_RNA (1)...(19): siRNA sense strand
gauuguccaugaugaugua

SEQ ID NO: 255027 - RNA, 19 nt, Homo sapiens
  misc_RNA (1)...(19): siRNA sense strand
uaagggaucagccaaauga

SEQ ID NO: 255028 - RNA, 19 nt, Homo sapiens
  misc_RNA (1)...(19): siRNA sense strand
uauaagggucgacauguua

SEQ ID NO: 255029 - RNA, 19 nt, Homo sapiens
  misc_RNA (1)...(19): siRNA sense strand
gcagcagucagguuuauuu

SEQ ID NO: 255030 - RNA, 19 nt, Homo sapiens
  misc_RNA (1)...(19): siRNA sense strand
ucacuuggaugguguguuc

SEQ ID NO: 255031 - RNA, 19 nt, Homo sapiens
  misc_RNA (1)...(19): siRNA sense strand
uauauucgauccaaucaga

SEQ ID NO: 255032 - RNA, 19 nt, Homo sapiens
  misc_RNA (1)...(19): siRNA sense strand
gcaagauccuacccggaaa

SEQ ID NO: 255033 - RNA, 19 nt, Homo sapiens
  misc_RNA (1)...(19): siRNA sense strand
ggagagaaggcgcaaagaa

SEQ ID NO: 255034 - RNA, 19 nt, Homo sapiens
  misc_RNA (1)...(19): siRNA sense strand
gaagaagagaggcgagaaa

SEQ ID NO: 255035 - RNA, 19 nt, Homo sapiens
  misc_RNA (1)...(19): siRNA sense strand
cagaaacauugcaacauau

SEQ ID NO: 255036 - RNA, 19 nt, Homo sapiens
  misc_RNA (1)...(19): siRNA sense strand
gaagaguucuguggaaguc

SEQ ID NO: 255037 - RNA, 19 nt, Homo sapiens
  misc_RNA (1)...(19): siRNA sense strand
ugacaucuguggugggauu

SEQ ID NO: 255038 - RNA, 19 nt, Homo sapiens
  misc_RNA (1)...(19): siRNA sense strand
gcuuaaggaucauauagau

SEQ ID NO: 255039 - RNA, 19 nt, Homo sapiens
  misc_RNA (1)...(19): siRNA sense strand
ccaaagccauaucacaaau

SEQ ID NO: 255040 - RNA, 19 nt, Homo sapiens
  misc_RNA (1)...(19): siRNA sense strand
ggaaacuggucacuuggau

SEQ ID NO: 255041 - RNA, 19 nt, Homo sapiens
  misc_RNA (1)...(19): siRNA sense strand
cuaaagaaauacucucauc

SEQ ID NO: 255042 - RNA, 19 nt, Homo sapiens
  misc_RNA (1)...(19): siRNA sense strand
gaucguaccaggaagaaga

SEQ ID NO: 255043 - RNA, 19 nt, Homo sapiens
  misc_RNA (1)...(19): siRNA sense strand
cagaugccaccuaugauua

SEQ ID NO: 255044 - RNA, 19 nt, Homo sapiens
  misc_RNA (1)...(19): siRNA sense strand
uuacagaagugaucuuugg

SEQ ID NO: 255045 - RNA, 19 nt, Homo sapiens
  misc_RNA (1)...(19): siRNA sense strand
ggagagaaggccauagaga

SEQ ID NO: 255046 - RNA, 19 nt, Homo sapiens
  misc_RNA (1)...(19): siRNA sense strand
gaucagucuaugacauuua

SEQ ID NO: 255047 - RNA, 19 nt, Homo sapiens
  misc_RNA (1)...(19): siRNA sense strand
gcucaguggucaaugugaa

SEQ ID NO: 255048 - RNA, 19 nt, Homo sapiens
  misc_RNA (1)...(19): siRNA sense strand
gaucaucauccaagucuga

SEQ ID NO: 255049 - RNA, 19 nt, Homo sapiens
  misc_RNA (1)...(19): siRNA sense strand
gcagugggcagcagaauag

SEQ ID NO: 255050 - RNA, 19 nt, Homo sapiens
  misc_RNA (1)...(19): siRNA sense strand
gaaagagaacaggaguaua

SEQ ID NO: 255051 - RNA, 19 nt, Homo sapiens
  misc_RNA (1)...(19): siRNA sense strand
ggugccuggugaagaauua

SEQ ID NO: 255052 - RNA, 19 nt, Homo sapiens
  misc_RNA (1)...(19): siRNA sense strand
uggcacaucuucacauuca

SEQ ID NO: 255053 - RNA, 19 nt, Homo sapiens
  misc_RNA (1)...(19): siRNA sense strand
uguggaaacuggucacuug

SEQ ID NO: 255054 - RNA, 19 nt, Homo sapiens
  misc_RNA (1)...(19): siRNA sense strand
gagagaaggccauagagau

SEQ ID NO: 255055 - RNA, 19 nt, Homo sapiens
  misc_RNA (1)...(19): siRNA sense strand
guaaacacauauggaagga

SEQ ID NO: 255056 - RNA, 19 nt, Homo sapiens
  misc_RNA (1)...(19): siRNA sense strand
gauucugugugcugccuua

SEQ ID NO: 255057 - RNA, 19 nt, Homo sapiens
  misc_RNA (1)...(19): siRNA sense strand
guagcacacuccagaaaca

SEQ ID NO: 255058 - RNA, 19 nt, Homo sapiens
  misc_RNA (1)...(19): siRNA sense strand
ugaccgcacuggccaaaga

SEQ ID NO: 255059 - RNA, 19 nt, Homo sapiens
  misc_RNA (1)...(19): siRNA sense strand
ggaugucacugaggaugaa

SEQ ID NO: 255060 - RNA, 19 nt, Homo sapiens
  misc_RNA (1)...(19): siRNA sense strand
ucacaaauuuauggccuuu

SEQ ID NO: 255061 - RNA, 19 nt, Homo sapiens
  misc_RNA (1)...(19): siRNA sense strand
ccagauuacuacagauuuc

SEQ ID NO: 255062 - RNA, 19 nt, Homo sapiens
  misc_RNA (1)...(19): siRNA sense strand
gaaagaugaaacugaguau

SEQ ID NO: 255063 - RNA, 19 nt, Homo sapiens
  misc_RNA (1)...(19): siRNA sense strand
gaaaggagcaagccaagcu

SEQ ID NO: 255064 - RNA, 19 nt, Homo sapiens
  misc_RNA (1)...(19): siRNA sense strand
ggcaggacuucucuucuga

SEQ ID NO: 255065 - RNA, 19 nt, Homo sapiens
  misc_RNA (1)...(19): siRNA sense strand
ggaucagucuaugacauuu

SEQ ID NO: 255066 - RNA, 19 nt, Homo sapiens
  misc_RNA (1)...(19): siRNA sense strand
ggagaaauacguucauagg

SEQ ID NO: 255067 - RNA, 19 nt, Homo sapiens
  misc_RNA (1)...(19): siRNA sense strand
gcaaugacaagguguucuu

SEQ ID NO: 255068 - RNA, 19 nt, Homo sapiens
  misc_RNA (1)...(19): siRNA sense strand
gagagaaggcgcaaagaag

SEQ ID NO: 255069 - RNA, 19 nt, Homo sapiens
  misc_RNA (1)...(19): siRNA sense strand
gaacagcgaaggagagaac

SEQ ID NO: 255070 - RNA, 19 nt, Homo sapiens
  misc_RNA (1)...(19): siRNA sense strand
gaacgugaacagcgaagga

SEQ ID NO: 255071 - RNA, 19 nt, Homo sapiens
  misc_RNA (1)...(19): siRNA sense strand
ggaugaagaggaagaaauc

SEQ ID NO: 255072 - RNA, 19 nt, Homo sapiens
  misc_RNA (1)...(19): siRNA sense strand
gaggaaggccagagguuga

SEQ ID NO: 255073 - RNA, 19 nt, Homo sapiens
  misc_RNA (1)...(19): siRNA sense strand
gcagcgucaucucugaauu

SEQ ID NO: 255074 - RNA, 19 nt, Homo sapiens
  misc_RNA (1)...(19): siRNA sense strand
gaaaagaggagaguugaaa

SEQ ID NO: 255075 - RNA, 19 nt, Homo sapiens
  misc_RNA (1)...(19): siRNA sense strand
gagacgggcagaagaagaa

SEQ ID NO: 255076 - RNA, 19 nt, Homo sapiens
  misc_RNA (1)...(19): siRNA sense strand
gagaaggcgcaaagaagaa

SEQ ID NO: 255077 - RNA, 19 nt, Homo sapiens
  misc_RNA (1)...(19): siRNA sense strand
gggagcaggaagaauauaa

SEQ ID NO: 255078 - RNA, 19 nt, Homo sapiens
  misc_RNA (1)...(19): siRNA sense strand
ggagagccaaguuccauug

SEQ ID NO: 255079 - RNA, 19 nt, Homo sapiens
  misc_RNA (1)...(19): siRNA sense strand
aagaugaaacugaguauga

SEQ ID NO: 255080 - RNA, 19 nt, Homo sapiens
  misc_RNA (1)...(19): siRNA sense strand
gaaacuuguugacuuuggu

SEQ ID NO: 255081 - RNA, 19 nt, Homo sapiens
  misc_RNA (1)...(19): siRNA sense strand
ugaagaggaagaaaucaaa

SEQ ID NO: 255082 - RNA, 19 nt, Homo sapiens
  misc_RNA (1)...(19): siRNA sense strand
uagcauauauucgauccaa

SEQ ID NO: 255083 - RNA, 19 nt, Homo sapiens
  misc_RNA (1)...(19): siRNA sense strand
ugacauuuaucuaccaaca

SEQ ID NO: 255084 - RNA, 19 nt, Homo sapiens
  misc_RNA (1)...(19): siRNA sense strand
cuauaagggucgacauguu

SEQ ID NO: 255085 - RNA, 19 nt, Homo sapiens
  misc_RNA (1)...(19): siRNA sense strand
ggagcaggaagaauauaaa

SEQ ID NO: 255086 - RNA, 19 nt, Homo sapiens
  misc_RNA (1)...(19): siRNA sense strand
ggaagaagaggaggaagug

SEQ ID NO: 255087 - RNA, 19 nt, Homo sapiens
  misc_RNA (1)...(19): siRNA sense strand
gcgagaaagaugaaacuga

SEQ ID NO: 255088 - RNA, 19 nt, Homo sapiens
  misc_RNA (1)...(19): siRNA sense strand
gaggagacgggcagaagaa

SEQ ID NO: 255089 - RNA, 19 nt, Homo sapiens
  misc_RNA (1)...(19): siRNA sense strand
gguugaaagugaucuaugg

SEQ ID NO: 255090 - RNA, 19 nt, Homo sapiens
  misc_RNA (1)...(19): siRNA sense strand
ucaaauuucuggugauugc

SEQ ID NO: 255091 - RNA, 19 nt, Homo sapiens
  misc_RNA (1)...(19): siRNA sense strand
ggagauucguaaauacaag

SEQ ID NO: 255092 - RNA, 19 nt, Homo sapiens
  misc_RNA (1)...(19): siRNA sense strand
aaaucuuccuccuccuuua

SEQ ID NO: 255093 - RNA, 19 nt, Homo sapiens
  misc_RNA (1)...(19): siRNA sense strand
ggggaacgcuucagaguga

SEQ ID NO: 255094 - RNA, 19 nt, Homo sapiens
  misc_RNA (1)...(19): siRNA sense strand
gaaauacucucaucacaga

SEQ ID NO: 255095 - RNA, 19 nt, Homo sapiens
  misc_RNA (1)...(19): siRNA sense strand
gaccaacucuggcuuguua

SEQ ID NO: 255096 - RNA, 19 nt, Homo sapiens
  misc_RNA (1)...(19): siRNA sense strand
gaagugaucuuuggucuug

SEQ ID NO: 255097 - RNA, 19 nt, Homo sapiens
  misc_RNA (1)...(19): siRNA sense strand
gggaaggucuauccucuua

SEQ ID NO: 255098 - RNA, 19 nt, Homo sapiens
  misc_RNA (1)...(19): siRNA sense strand
uuacagaccuugugaagaa

SEQ ID NO: 255099 - RNA, 19 nt, Homo sapiens
  misc_RNA (1)...(19): siRNA sense strand
acagaaacauugcaacaua

SEQ ID NO: 255100 - RNA, 19 nt, Homo sapiens
  misc_RNA (1)...(19): siRNA sense strand
cgaagacgauuucaacaaa

SEQ ID NO: 255101 - RNA, 19 nt, Homo sapiens
  misc_RNA (1)...(19): siRNA sense strand
ggaacacacucaaagaaga

SEQ ID NO: 255102 - RNA, 19 nt, Homo sapiens
  misc_RNA (1)...(19): siRNA sense strand
gaggagaguugaaagagaa

SEQ ID NO: 255103 - RNA, 19 nt, Homo sapiens
  misc_RNA (1)...(19): siRNA sense strand
ggccagagguugaaaguga

SEQ ID NO: 255104 - RNA, 19 nt, Homo sapiens
  misc_RNA (1)...(19): siRNA sense strand
ggugaaacuuguugacuuu

SEQ ID NO: 255105 - RNA, 19 nt, Homo sapiens
  misc_RNA (1)...(19): siRNA sense strand
gaacccagaugccaccuau

SEQ ID NO: 255106 - RNA, 19 nt, Homo sapiens
  misc_RNA (1)...(19): siRNA sense strand
gaacgugccuggugagucu

SEQ ID NO: 255107 - RNA, 19 nt, Homo sapiens
  misc_RNA (1)...(19): siRNA sense strand
caaguuagaauccagcuua

SEQ ID NO: 255108 - RNA, 19 nt, Homo sapiens
  misc_RNA (1)...(19): siRNA sense strand
uaaguuacgugucuacuau

SEQ ID NO: 255109 - RNA, 19 nt, Homo sapiens
  misc_RNA (1)...(19): siRNA sense strand
gaaaucaaacuggagauaa

SEQ ID NO: 255110 - RNA, 19 nt, Homo sapiens
  misc_RNA (1)...(19): siRNA sense strand
caaaagggcucaaagacua

SEQ ID NO: 255111 - RNA, 19 nt, Homo sapiens
  misc_RNA (1)...(19): siRNA sense strand
gagccaaguuccauuguga

SEQ ID NO: 255112 - RNA, 19 nt, Homo sapiens
  misc_RNA (1)...(19): siRNA sense strand
ccaaaugaaaggcaaguua

SEQ ID NO: 255113 - RNA, 19 nt, Homo sapiens
  misc_RNA (1)...(19): siRNA sense strand
ucacaaugauccagaaguu

SEQ ID NO: 255114 - RNA, 19 nt, Homo sapiens
  misc_RNA (1)...(19): siRNA sense strand
gaaggucuauccucuuauc

SEQ ID NO: 255115 - RNA, 19 nt, Homo sapiens
  misc_RNA (1)...(19): siRNA sense strand
gaugagaccagaagccaua

SEQ ID NO: 255116 - RNA, 19 nt, Homo sapiens
  misc_RNA (1)...(19): siRNA sense strand
ggagauaaauaugcuaaag

SEQ ID NO: 255117 - RNA, 19 nt, Homo sapiens
  misc_RNA (1)...(19): siRNA sense strand
uaagucauuuggagaauug

SEQ ID NO: 255118 - RNA, 19 nt, Homo sapiens
  misc_RNA (1)...(19): siRNA sense strand
aaagagaacaggaguauau

SEQ ID NO: 255119 - RNA, 19 nt, Homo sapiens
  misc_RNA (1)...(19): siRNA sense strand
ggauugagcagcagaaaga

SEQ ID NO: 255120 - RNA, 19 nt, Homo sapiens
  misc_RNA (1)...(19): siRNA sense strand
ugacaugcauccaaugaga

SEQ ID NO: 255121 - RNA, 19 nt, Homo sapiens
  misc_RNA (1)...(19): siRNA sense strand
gaagagaggcgagaaagau

SEQ ID NO: 255122 - RNA, 19 nt, Homo sapiens
  misc_RNA (1)...(19): siRNA sense strand
gcagucagguuuauuucau

SEQ ID NO: 255123 - RNA, 19 nt, Homo sapiens
  misc_RNA (1)...(19): siRNA sense strand
gcggagaaauacguucaua

SEQ ID NO: 255124 - RNA, 19 nt, Homo sapiens
  misc_RNA (1)...(19): siRNA sense strand
caccaaggauguaguucua

SEQ ID NO: 255125 - RNA, 19 nt, Homo sapiens
  misc_RNA (1)...(19): siRNA sense strand
guaaauacaagaagagguu

SEQ ID NO: 255126 - RNA, 19 nt, Homo sapiens
  misc_RNA (1)...(19): siRNA sense strand
gauuguccaugaugaugua

SEQ ID NO: 255127 - RNA, 19 nt, Homo sapiens
  misc_RNA (1)...(19): siRNA sense strand
uaagggaucagccaaauga

SEQ ID NO: 255128 - RNA, 19 nt, Homo sapiens
  misc_RNA (1)...(19): siRNA sense strand
uauaagggucgacauguua

SEQ ID NO: 255129 - RNA, 19 nt, Homo sapiens
  misc_RNA (1)...(19): siRNA sense strand
gcagcagucagguuuauuu

SEQ ID NO: 255130 - RNA, 19 nt, Homo sapiens
  misc_RNA (1)...(19): siRNA sense strand
ucacuuggaugguguguuc

SEQ ID NO: 255131 - RNA, 19 nt, Homo sapiens
  misc_RNA (1)...(19): siRNA sense strand
uauauucgauccaaucaga

SEQ ID NO: 255132 - RNA, 19 nt, Homo sapiens
  misc_RNA (1)...(19): siRNA sense strand
gcaagauccuacccggaaa

SEQ ID NO: 255133 - RNA, 19 nt, Homo sapiens
  misc_RNA (1)...(19): siRNA sense strand
ggagagaaggcgcaaagaa

SEQ ID NO: 255134 - RNA, 19 nt, Homo sapiens
  misc_RNA (1)...(19): siRNA sense strand
gaagaagagaggcgagaaa

SEQ ID NO: 255135 - RNA, 19 nt, Homo sapiens
  misc_RNA (1)...(19): siRNA sense strand
cagaaacauugcaacauau

SEQ ID NO: 255136 - RNA, 19 nt, Homo sapiens
  misc_RNA (1)...(19): siRNA sense strand
gaagaguucuguggaaguc

SEQ ID NO: 255137 - RNA, 19 nt, Homo sapiens
  misc_RNA (1)...(19): siRNA sense strand
ugacaucuguggugggauu

SEQ ID NO: 255138 - RNA, 19 nt, Homo sapiens
  misc_RNA (1)...(19): siRNA sense strand
gcuuaaggaucauauagau

SEQ ID NO: 255139 - RNA, 19 nt, Homo sapiens
  misc_RNA (1)...(19): siRNA sense strand
ccaaagccauaucacaaau

SEQ ID NO: 255140 - RNA, 19 nt, Homo sapiens
  misc_RNA (1)...(19): siRNA sense strand
ggaaacuggucacuuggau

SEQ ID NO: 255141 - RNA, 19 nt, Homo sapiens
  misc_RNA (1)...(19): siRNA sense strand
cuaaagaaauacucucauc

SEQ ID NO: 255142 - RNA, 19 nt, Homo sapiens
  misc_RNA (1)...(19): siRNA sense strand
gaucguaccaggaagaaga

SEQ ID NO: 255143 - RNA, 19 nt, Homo sapiens
  misc_RNA (1)...(19): siRNA sense strand
cagaugccaccuaugauua

SEQ ID NO: 255144 - RNA, 19 nt, Homo sapiens
  misc_RNA (1)...(19): siRNA sense strand
uuacagaagugaucuuugg

SEQ ID NO: 255145 - RNA, 19 nt, Homo sapiens
  misc_RNA (1)...(19): siRNA sense strand
ggagagaaggccauagaga

SEQ ID NO: 255146 - RNA, 19 nt, Homo sapiens
  misc_RNA (1)...(19): siRNA sense strand
gaucagucuaugacauuua

SEQ ID NO: 255147 - RNA, 19 nt, Homo sapiens
  misc_RNA (1)...(19): siRNA sense strand
gcucaguggucaaugugaa

SEQ ID NO: 255148 - RNA, 19 nt, Homo sapiens
  misc_RNA (1)...(19): siRNA sense strand
gaucaucauccaagucuga

SEQ ID NO: 255149 - RNA, 19 nt, Homo sapiens
  misc_RNA (1)...(19): siRNA sense strand
gcagugggcagcagaauag

SEQ ID NO: 255150 - RNA, 19 nt, Homo sapiens
  misc_RNA (1)...(19): siRNA sense strand
gaaagagaacaggaguaua

SEQ ID NO: 255151 - RNA, 19 nt, Homo sapiens
  misc_RNA (1)...(19): siRNA sense strand
ggugccuggugaagaauua

SEQ ID NO: 255152 - RNA, 19 nt, Homo sapiens
  misc_RNA (1)...(19): siRNA sense strand
uggcacaucuucacauuca

SEQ ID NO: 255153 - RNA, 19 nt, Homo sapiens
  misc_RNA (1)...(19): siRNA sense strand
uguggaaacuggucacuug

SEQ ID NO: 255154 - RNA, 19 nt, Homo sapiens
  misc_RNA (1)...(19): siRNA sense strand
gagagaaggccauagagau

SEQ ID NO: 255155 - RNA, 19 nt, Homo sapiens
  misc_RNA (1)...(19): siRNA sense strand
guaaacacauauggaagga

SEQ ID NO: 255156 - RNA, 19 nt, Homo sapiens
  misc_RNA (1)...(19): siRNA sense strand
gauucugugugcugccuua

SEQ ID NO: 255157 - RNA, 19 nt, Homo sapiens
  misc_RNA (1)...(19): siRNA sense strand
guagcacacuccagaaaca

SEQ ID NO: 255158 - RNA, 19 nt, Homo sapiens
  misc_RNA (1)...(19): siRNA sense strand
ugaccgcacuggccaaaga

SEQ ID NO: 255159 - RNA, 19 nt, Homo sapiens
  misc_RNA (1)...(19): siRNA sense strand
ggaugucacugaggaugaa

SEQ ID NO: 255160 - RNA, 19 nt, Homo sapiens
  misc_RNA (1)...(19): siRNA sense strand
ucacaaauuuauggccuuu

SEQ ID NO: 255161 - RNA, 19 nt, Homo sapiens
  misc_RNA (1)...(19): siRNA sense strand
ccagauuacuacagauuuc

SEQ ID NO: 255162 - RNA, 19 nt, Homo sapiens
  misc_RNA (1)...(19): siRNA sense strand
gaaagaugaaacugaguau

SEQ ID NO: 255163 - RNA, 19 nt, Homo sapiens
  misc_RNA (1)...(19): siRNA sense strand
gaaaggagcaagccaagcu

SEQ ID NO: 255164 - RNA, 19 nt, Homo sapiens
  misc_RNA (1)...(19): siRNA sense strand
ggcaggacuucucuucuga

SEQ ID NO: 255165 - RNA, 19 nt, Homo sapiens
  misc_RNA (1)...(19): siRNA sense strand
ggaucagucuaugacauuu

SEQ ID NO: 255166 - RNA, 19 nt, Homo sapiens
  misc_RNA (1)...(19): siRNA sense strand
ggagaaauacguucauagg

SEQ ID NO: 255167 - RNA, 19 nt, Homo sapiens
  misc_RNA (1)...(19): siRNA sense strand
gcaaugacaagguguucuu

SEQ ID NO: 255168 - RNA, 19 nt, Homo sapiens
  misc_RNA (1)...(19): siRNA sense strand
gagagaaggcgcaaagaag

SEQ ID NO: 255169 - RNA, 19 nt, Homo sapiens
  misc_RNA (1)...(19): siRNA sense strand
gaacagcgaaggagagaac

SEQ ID NO: 255170 - RNA, 19 nt, Homo sapiens
  misc_RNA (1)...(19): siRNA sense strand
gaacgugaacagcgaagga

SEQ ID NO: 255171 - RNA, 19 nt, Homo sapiens
  misc_RNA (1)...(19): siRNA sense strand
ggaugaagaggaagaaauc

SEQ ID NO: 255172 - RNA, 19 nt, Homo sapiens
  misc_RNA (1)...(19): siRNA sense strand
gaggaaggccagagguuga

SEQ ID NO: 255173 - RNA, 19 nt, Homo sapiens
  misc_RNA (1)...(19): siRNA sense strand
gcagcgucaucucugaauu

SEQ ID NO: 255174 - RNA, 19 nt, Homo sapiens
  misc_RNA (1)...(19): siRNA sense strand
gaaaagaggagaguugaaa

SEQ ID NO: 255175 - RNA, 19 nt, Homo sapiens
  misc_RNA (1)...(19): siRNA sense strand
gagacgggcagaagaagaa

SEQ ID NO: 255176 - RNA, 19 nt, Homo sapiens
  misc_RNA (1)...(19): siRNA sense strand
gagaaggcgcaaagaagaa

SEQ ID NO: 255177 - RNA, 19 nt, Homo sapiens
  misc_RNA (1)...(19): siRNA sense strand
gggagcaggaagaauauaa

SEQ ID NO: 255178 - RNA, 19 nt, Homo sapiens
  misc_RNA (1)...(19): siRNA sense strand
ggagagccaaguuccauug

SEQ ID NO: 255179 - RNA, 19 nt, Homo sapiens
  misc_RNA (1)...(19): siRNA sense strand
aagaugaaacugaguauga

SEQ ID NO: 255180 - RNA, 19 nt, Homo sapiens
  misc_RNA (1)...(19): siRNA sense strand
gaaacuuguugacuuuggu

SEQ ID NO: 255181 - RNA, 19 nt, Homo sapiens
  misc_RNA (1)...(19): siRNA sense strand
ugaagaggaagaaaucaaa

SEQ ID NO: 255182 - RNA, 19 nt, Homo sapiens
  misc_RNA (1)...(19): siRNA sense strand
uagcauauauucgauccaa

SEQ ID NO: 255183 - RNA, 19 nt, Homo sapiens
  misc_RNA (1)...(19): siRNA sense strand
ugacauuuaucuaccaaca

SEQ ID NO: 255184 - RNA, 19 nt, Homo sapiens
  misc_RNA (1)...(19): siRNA sense strand
cuauaagggucgacauguu

SEQ ID NO: 255185 - RNA, 19 nt, Homo sapiens
  misc_RNA (1)...(19): siRNA sense strand
ggagcaggaagaauauaaa

SEQ ID NO: 255186 - RNA, 19 nt, Homo sapiens
  misc_RNA (1)...(19): siRNA sense strand
ggaagaagaggaggaagug

SEQ ID NO: 255187 - RNA, 19 nt, Homo sapiens
  misc_RNA (1)...(19): siRNA sense strand
gcgagaaagaugaaacuga

SEQ ID NO: 255188 - RNA, 19 nt, Homo sapiens
  misc_RNA (1)...(19): siRNA sense strand
gaggagacgggcagaagaa

SEQ ID NO: 255189 - RNA, 19 nt, Homo sapiens
  misc_RNA (1)...(19): siRNA sense strand
gguugaaagugaucuaugg

SEQ ID NO: 255190 - RNA, 19 nt, Homo sapiens
  misc_RNA (1)...(19): siRNA sense strand
ucaaauuucuggugauugc

SEQ ID NO: 255191 - RNA, 19 nt, Homo sapiens
  misc_RNA (1)...(19): siRNA sense strand
ggagauucguaaauacaag

SEQ ID NO: 255192 - RNA, 19 nt, Homo sapiens
  misc_RNA (1)...(19): siRNA sense strand
aaaucuuccuccuccuuua

SEQ ID NO: 255193 - RNA, 19 nt, Homo sapiens
  misc_RNA (1)...(19): siRNA sense strand
ggggaacgcuucagaguga

SEQ ID NO: 255194 - RNA, 19 nt, Homo sapiens
  misc_RNA (1)...(19): siRNA sense strand
gaaauacucucaucacaga

SEQ ID NO: 255195 - RNA, 19 nt, Homo sapiens
  misc_RNA (1)...(19): siRNA sense strand
gaccaacucuggcuuguua

SEQ ID NO: 255196 - RNA, 19 nt, Homo sapiens
  misc_RNA (1)...(19): siRNA sense strand
gaagugaucuuuggucuug

SEQ ID NO: 255197 - RNA, 19 nt, Homo sapiens
  misc_RNA (1)...(19): siRNA sense strand
gggaaggucuauccucuua

SEQ ID NO: 255198 - RNA, 19 nt, Homo sapiens
  misc_RNA (1)...(19): siRNA sense strand
uuacagaccuugugaagaa

SEQ ID NO: 255199 - RNA, 19 nt, Homo sapiens
  misc_RNA (1)...(19): siRNA sense strand
acagaaacauugcaacaua

SEQ ID NO: 255200 - RNA, 19 nt, Homo sapiens
  misc_RNA (1)...(19): siRNA sense strand
cgaagacgauuucaacaaa

SEQ ID NO: 255201 - RNA, 19 nt, Homo sapiens
  misc_RNA (1)...(19): siRNA sense strand
ggaacacacucaaagaaga

SEQ ID NO: 255202 - RNA, 19 nt, Homo sapiens
  misc_RNA (1)...(19): siRNA sense strand
gaggagaguugaaagagaa

SEQ ID NO: 255203 - RNA, 19 nt, Homo sapiens
  misc_RNA (1)...(19): siRNA sense strand
ggccagagguugaaaguga

SEQ ID NO: 255204 - RNA, 19 nt, Homo sapiens
  misc_RNA (1)...(19): siRNA sense strand
ggugaaacuuguugacuuu

SEQ ID NO: 255205 - RNA, 19 nt, Homo sapiens
  misc_RNA (1)...(19): siRNA sense strand
gaacccagaugccaccuau

SEQ ID NO: 255206 - RNA, 19 nt, Homo sapiens
  misc_RNA (1)...(19): siRNA sense strand
gaacgugccuggugagucu

SEQ ID NO: 255207 - RNA, 19 nt, Homo sapiens
  misc_RNA (1)...(19): siRNA sense strand
caaguuagaauccagcuua

SEQ ID NO: 255208 - RNA, 19 nt, Homo sapiens
  misc_RNA (1)...(19): siRNA sense strand
uaaguuacgugucuacuau

SEQ ID NO: 255209 - RNA, 19 nt, Homo sapiens
  misc_RNA (1)...(19): siRNA sense strand
gaaaucaaacuggagauaa

SEQ ID NO: 255210 - RNA, 19 nt, Homo sapiens
  misc_RNA (1)...(19): siRNA sense strand
caaaagggcucaaagacua

SEQ ID NO: 255211 - RNA, 19 nt, Homo sapiens
  misc_RNA (1)...(19): siRNA sense strand
gagccaaguuccauuguga

SEQ ID NO: 255212 - RNA, 19 nt, Homo sapiens
  misc_RNA (1)...(19): siRNA sense strand
ccaaaugaaaggcaaguua

SEQ ID NO: 255213 - RNA, 19 nt, Homo sapiens
  misc_RNA (1)...(19): siRNA sense strand
ucacaaugauccagaaguu

SEQ ID NO: 255214 - RNA, 19 nt, Homo sapiens
  misc_RNA (1)...(19): siRNA sense strand
gaaggucuauccucuuauc

SEQ ID NO: 255215 - RNA, 19 nt, Homo sapiens
  misc_RNA (1)...(19): siRNA sense strand
gaugagaccagaagccaua

SEQ ID NO: 255216 - RNA, 19 nt, Homo sapiens
  misc_RNA (1)...(19): siRNA sense strand
ggagauaaauaugcuaaag

SEQ ID NO: 255217 - RNA, 19 nt, Homo sapiens
  misc_RNA (1)...(19): siRNA sense strand
uaagucauuuggagaauug

SEQ ID NO: 255218 - RNA, 19 nt, Homo sapiens
  misc_RNA (1)...(19): siRNA sense strand
aaagagaacaggaguauau

SEQ ID NO: 255219 - RNA, 19 nt, Homo sapiens
  misc_RNA (1)...(19): siRNA sense strand
ggauugagcagcagaaaga

SEQ ID NO: 255220 - RNA, 19 nt, Homo sapiens
  misc_RNA (1)...(19): siRNA sense strand
ugacaugcauccaaugaga

SEQ ID NO: 255221 - RNA, 19 nt, Homo sapiens
  misc_RNA (1)...(19): siRNA sense strand
gaagagaggcgagaaagau

SEQ ID NO: 255222 - RNA, 19 nt, Homo sapiens
  misc_RNA (1)...(19): siRNA sense strand
gcagucagguuuauuucau

SEQ ID NO: 255223 - RNA, 19 nt, Homo sapiens
  misc_RNA (1)...(19): siRNA sense strand
gcggagaaauacguucaua

SEQ ID NO: 255224 - RNA, 19 nt, Homo sapiens
  misc_RNA (1)...(19): siRNA sense strand
caccaaggauguaguucua

SEQ ID NO: 255225 - RNA, 19 nt, Homo sapiens
  misc_RNA (1)...(19): siRNA sense strand
guaaauacaagaagagguu

SEQ ID NO: 255226 - RNA, 19 nt, Homo sapiens
  misc_RNA (1)...(19): siRNA sense strand
gauuguccaugaugaugua

SEQ ID NO: 255227 - RNA, 19 nt, Homo sapiens
  misc_RNA (1)...(19): siRNA sense strand
uaagggaucagccaaauga

SEQ ID NO: 255228 - RNA, 19 nt, Homo sapiens
  misc_RNA (1)...(19): siRNA sense strand
uauaagggucgacauguua

SEQ ID NO: 255229 - RNA, 19 nt, Homo sapiens
  misc_RNA (1)...(19): siRNA sense strand
gcagcagucagguuuauuu

SEQ ID NO: 255230 - RNA, 19 nt, Homo sapiens
  misc_RNA (1)...(19): siRNA sense strand
ucacuuggaugguguguuc

SEQ ID NO: 255231 - RNA, 19 nt, Homo sapiens
  misc_RNA (1)...(19): siRNA sense strand
uauauucgauccaaucaga

SEQ ID NO: 255232 - RNA, 19 nt, Homo sapiens
  misc_RNA (1)...(19): siRNA sense strand
gcaagauccuacccggaaa

SEQ ID NO: 255233 - RNA, 19 nt, Homo sapiens
  misc_RNA (1)...(19): siRNA sense strand
ggagagaaggcgcaaagaa

SEQ ID NO: 255234 - RNA, 19 nt, Homo sapiens
  misc_RNA (1)...(19): siRNA sense strand
gaagaagagaggcgagaaa

SEQ ID NO: 255235 - RNA, 19 nt, Homo sapiens
  misc_RNA (1)...(19): siRNA sense strand
cagaaacauugcaacauau

SEQ ID NO: 255236 - RNA, 19 nt, Homo sapiens
  misc_RNA (1)...(19): siRNA sense strand
gaagaguucuguggaaguc

SEQ ID NO: 255237 - RNA, 19 nt, Homo sapiens
  misc_RNA (1)...(19): siRNA sense strand
ugacaucuguggugggauu

SEQ ID NO: 255238 - RNA, 19 nt, Homo sapiens
  misc_RNA (1)...(19): siRNA sense strand
gcuuaaggaucauauagau

SEQ ID NO: 255239 - RNA, 19 nt, Homo sapiens
  misc_RNA (1)...(19): siRNA sense strand
ccaaagccauaucacaaau

SEQ ID NO: 255240 - RNA, 19 nt, Homo sapiens
  misc_RNA (1)...(19): siRNA sense strand
ggaaacuggucacuuggau

SEQ ID NO: 255241 - RNA, 19 nt, Homo sapiens
  misc_RNA (1)...(19): siRNA sense strand
cuaaagaaauacucucauc

SEQ ID NO: 255242 - RNA, 19 nt, Homo sapiens
  misc_RNA (1)...(19): siRNA sense strand
gaucguaccaggaagaaga

SEQ ID NO: 255243 - RNA, 19 nt, Homo sapiens
  misc_RNA (1)...(19): siRNA sense strand
cagaugccaccuaugauua

SEQ ID NO: 255244 - RNA, 19 nt, Homo sapiens
  misc_RNA (1)...(19): siRNA sense strand
uuacagaagugaucuuugg

SEQ ID NO: 255245 - RNA, 19 nt, Homo sapiens
  misc_RNA (1)...(19): siRNA sense strand
ggagagaaggccauagaga

SEQ ID NO: 255246 - RNA, 19 nt, Homo sapiens
  misc_RNA (1)...(19): siRNA sense strand
gaucagucuaugacauuua

SEQ ID NO: 255247 - RNA, 19 nt, Homo sapiens
  misc_RNA (1)...(19): siRNA sense strand
gcucaguggucaaugugaa

SEQ ID NO: 255248 - RNA, 19 nt, Homo sapiens
  misc_RNA (1)...(19): siRNA sense strand
gaucaucauccaagucuga

SEQ ID NO: 255249 - RNA, 19 nt, Homo sapiens
  misc_RNA (1)...(19): siRNA sense strand
gcagugggcagcagaauag

SEQ ID NO: 255250 - RNA, 19 nt, Homo sapiens
  misc_RNA (1)...(19): siRNA sense strand
gaaagagaacaggaguaua

SEQ ID NO: 255251 - RNA, 19 nt, Homo sapiens
  misc_RNA (1)...(19): siRNA sense strand
ggugccuggugaagaauua

SEQ ID NO: 255252 - RNA, 19 nt, Homo sapiens
  misc_RNA (1)...(19): siRNA sense strand
uggcacaucuucacauuca

SEQ ID NO: 255253 - RNA, 19 nt, Homo sapiens
  misc_RNA (1)...(19): siRNA sense strand
uguggaaacuggucacuug

SEQ ID NO: 255254 - RNA, 19 nt, Homo sapiens
  misc_RNA (1)...(19): siRNA sense strand
gagagaaggccauagagau

SEQ ID NO: 255255 - RNA, 19 nt, Homo sapiens
  misc_RNA (1)...(19): siRNA sense strand
guaaacacauauggaagga

SEQ ID NO: 255256 - RNA, 19 nt, Homo sapiens
  misc_RNA (1)...(19): siRNA sense strand
gauucugugugcugccuua

SEQ ID NO: 255257 - RNA, 19 nt, Homo sapiens
  misc_RNA (1)...(19): siRNA sense strand
guagcacacuccagaaaca

SEQ ID NO: 255258 - RNA, 19 nt, Homo sapiens
  misc_RNA (1)...(19): siRNA sense strand
ugaccgcacuggccaaaga

SEQ ID NO: 255259 - RNA, 19 nt, Homo sapiens
  misc_RNA (1)...(19): siRNA sense strand
ggaugucacugaggaugaa

SEQ ID NO: 255260 - RNA, 19 nt, Homo sapiens
  misc_RNA (1)...(19): siRNA sense strand
ucacaaauuuauggccuuu

SEQ ID NO: 255261 - RNA, 19 nt, Homo sapiens
  misc_RNA (1)...(19): siRNA sense strand
ccagauuacuacagauuuc

SEQ ID NO: 255262 - RNA, 19 nt, Homo sapiens
  misc_RNA (1)...(19): siRNA sense strand
gaaagaugaaacugaguau

SEQ ID NO: 255263 - RNA, 19 nt, Homo sapiens
  misc_RNA (1)...(19): siRNA sense strand
gaaaggagcaagccaagcu

SEQ ID NO: 255264 - RNA, 19 nt, Homo sapiens
  misc_RNA (1)...(19): siRNA sense strand
ggcaggacuucucuucuga

SEQ ID NO: 255265 - RNA, 19 nt, Homo sapiens
  misc_RNA (1)...(19): siRNA sense strand
ggaucagucuaugacauuu

SEQ ID NO: 255266 - RNA, 19 nt, Homo sapiens
  misc_RNA (1)...(19): siRNA sense strand
ggagaaauacguucauagg

SEQ ID NO: 255267 - RNA, 19 nt, Homo sapiens
  misc_RNA (1)...(19): siRNA sense strand
gcaaugacaagguguucuu

SEQ ID NO: 255268 - RNA, 19 nt, Homo sapiens
  misc_RNA (1)...(19): siRNA sense strand
gagagaaggcgcaaagaag

SEQ ID NO: 255269 - RNA, 19 nt, Homo sapiens
  misc_RNA (1)...(19): siRNA sense strand
gaacagcgaaggagagaac

SEQ ID NO: 255270 - RNA, 19 nt, Homo sapiens
  misc_RNA (1)...(19): siRNA sense strand
gaacgugaacagcgaagga

SEQ ID NO: 255271 - RNA, 19 nt, Homo sapiens
  misc_RNA (1)...(19): siRNA sense strand
ggaugaagaggaagaaauc

SEQ ID NO: 255272 - RNA, 19 nt, Homo sapiens
  misc_RNA (1)...(19): siRNA sense strand
gaggaaggccagagguuga

SEQ ID NO: 255273 - RNA, 19 nt, Homo sapiens
  misc_RNA (1)...(19): siRNA sense strand
gcagcgucaucucugaauu

SEQ ID NO: 255274 - RNA, 19 nt, Homo sapiens
  misc_RNA (1)...(19): siRNA sense strand
gaaaagaggagaguugaaa

SEQ ID NO: 255275 - RNA, 19 nt, Homo sapiens
  misc_RNA (1)...(19): siRNA sense strand
gagacgggcagaagaagaa

SEQ ID NO: 255276 - RNA, 19 nt, Homo sapiens
  misc_RNA (1)...(19): siRNA sense strand
gagaaggcgcaaagaagaa

SEQ ID NO: 255277 - RNA, 19 nt, Homo sapiens
  misc_RNA (1)...(19): siRNA sense strand
gggagcaggaagaauauaa

SEQ ID NO: 255278 - RNA, 19 nt, Homo sapiens
  misc_RNA (1)...(19): siRNA sense strand
ggagagccaaguuccauug

SEQ ID NO: 255279 - RNA, 19 nt, Homo sapiens
  misc_RNA (1)...(19): siRNA sense strand
aagaugaaacugaguauga

SEQ ID NO: 255280 - RNA, 19 nt, Homo sapiens
  misc_RNA (1)...(19): siRNA sense strand
gaaacuuguugacuuuggu

SEQ ID NO: 255281 - RNA, 19 nt, Homo sapiens
  misc_RNA (1)...(19): siRNA sense strand
ugaagaggaagaaaucaaa

SEQ ID NO: 255282 - RNA, 19 nt, Homo sapiens
  misc_RNA (1)...(19): siRNA sense strand
uagcauauauucgauccaa

SEQ ID NO: 255283 - RNA, 19 nt, Homo sapiens
  misc_RNA (1)...(19): siRNA sense strand
ugacauuuaucuaccaaca

SEQ ID NO: 255284 - RNA, 19 nt, Homo sapiens
  misc_RNA (1)...(19): siRNA sense strand
cuauaagggucgacauguu

SEQ ID NO: 255285 - RNA, 19 nt, Homo sapiens
  misc_RNA (1)...(19): siRNA sense strand
ggagcaggaagaauauaaa

SEQ ID NO: 255286 - RNA, 19 nt, Homo sapiens
  misc_RNA (1)...(19): siRNA sense strand
ggaagaagaggaggaagug

SEQ ID NO: 255287 - RNA, 19 nt, Homo sapiens
  misc_RNA (1)...(19): siRNA sense strand
gcgagaaagaugaaacuga

SEQ ID NO: 255288 - RNA, 19 nt, Homo sapiens
  misc_RNA (1)...(19): siRNA sense strand
gaggagacgggcagaagaa

SEQ ID NO: 255289 - RNA, 19 nt, Homo sapiens
  misc_RNA (1)...(19): siRNA sense strand
gguugaaagugaucuaugg

SEQ ID NO: 255290 - RNA, 19 nt, Homo sapiens
  misc_RNA (1)...(19): siRNA sense strand
ucaaauuucuggugauugc

SEQ ID NO: 255291 - RNA, 19 nt, Homo sapiens
  misc_RNA (1)...(19): siRNA sense strand
ggagauucguaaauacaag

SEQ ID NO: 255292 - RNA, 19 nt, Homo sapiens
  misc_RNA (1)...(19): siRNA sense strand
aaaucuuccuccuccuuua

SEQ ID NO: 255293 - RNA, 19 nt, Homo sapiens
  misc_RNA (1)...(19): siRNA sense strand
ggggaacgcuucagaguga

SEQ ID NO: 255294 - RNA, 19 nt, Homo sapiens
  misc_RNA (1)...(19): siRNA sense strand
gaggaugucuuauaucuua

SEQ ID NO: 255295 - RNA, 19 nt, Homo sapiens
  misc_RNA (1)...(19): siRNA sense strand
ggaagaauguucaaaguuu

SEQ ID NO: 255296 - RNA, 19 nt, Homo sapiens
  misc_RNA (1)...(19): siRNA sense strand
ugacauggcuuauaucuuu

SEQ ID NO: 255297 - RNA, 19 nt, Homo sapiens
  misc_RNA (1)...(19): siRNA sense strand
gaaauuaaauccagugaga

SEQ ID NO: 255298 - RNA, 19 nt, Homo sapiens
  misc_RNA (1)...(19): siRNA sense strand
ggacguuccucuucucuua

SEQ ID NO: 255299 - RNA, 19 nt, Homo sapiens
  misc_RNA (1)...(19): siRNA sense strand
gaacuucagucucuucuug

SEQ ID NO: 255300 - RNA, 19 nt, Homo sapiens
  misc_RNA (1)...(19): siRNA sense strand
gaagagaaacucaucauug

SEQ ID NO: 255301 - RNA, 19 nt, Homo sapiens
  misc_RNA (1)...(19): siRNA sense strand
gaacgguggugacuagauu

SEQ ID NO: 255302 - RNA, 19 nt, Homo sapiens
  misc_RNA (1)...(19): siRNA sense strand
ggaagaggaugcucaaauc

SEQ ID NO: 255303 - RNA, 19 nt, Homo sapiens
  misc_RNA (1)...(19): siRNA sense strand
gcaaacagaugaguguauu

SEQ ID NO: 255304 - RNA, 19 nt, Homo sapiens
  misc_RNA (1)...(19): siRNA sense strand
gaauugugguccauuguaa

SEQ ID NO: 255305 - RNA, 19 nt, Homo sapiens
  misc_RNA (1)...(19): siRNA sense strand
ggaaggagaagauauuaaa

SEQ ID NO: 255306 - RNA, 19 nt, Homo sapiens
  misc_RNA (1)...(19): siRNA sense strand
gaaaagagccuuguugaua

SEQ ID NO: 255307 - RNA, 19 nt, Homo sapiens
  misc_RNA (1)...(19): siRNA sense strand
gcucaaauccuuaaaguga

SEQ ID NO: 255308 - RNA, 19 nt, Homo sapiens
  misc_RNA (1)...(19): siRNA sense strand
gaagaucagcuaucagaaa

SEQ ID NO: 255309 - RNA, 19 nt, Homo sapiens
  misc_RNA (1)...(19): siRNA sense strand
gaaauauguuacucucuug

SEQ ID NO: 255310 - RNA, 19 nt, Homo sapiens
  misc_RNA (1)...(19): siRNA sense strand
ggaaauauuugauccugau

SEQ ID NO: 255311 - RNA, 19 nt, Homo sapiens
  misc_RNA (1)...(19): siRNA sense strand
gaaaacagcuggaguuaca

SEQ ID NO: 255312 - RNA, 19 nt, Homo sapiens
  misc_RNA (1)...(19): siRNA sense strand
gagaggaugucuuauaucu

SEQ ID NO: 255313 - RNA, 19 nt, Homo sapiens
  misc_RNA (1)...(19): siRNA sense strand
caaauguccugauaauguu

SEQ ID NO: 255314 - RNA, 19 nt, Homo sapiens
  misc_RNA (1)...(19): siRNA sense strand
aagagaaacucaucauuga

SEQ ID NO: 255315 - RNA, 19 nt, Homo sapiens
  misc_RNA (1)...(19): siRNA sense strand
gaagaauguucaaaguuuc

SEQ ID NO: 255316 - RNA, 19 nt, Homo sapiens
  misc_RNA (1)...(19): siRNA sense strand
cuaaagaacuucagucucu

SEQ ID NO: 255317 - RNA, 19 nt, Homo sapiens
  misc_RNA (1)...(19): siRNA sense strand
gcacuagguuauaaagaga

SEQ ID NO: 255318 - RNA, 19 nt, Homo sapiens
  misc_RNA (1)...(19): siRNA sense strand
gaggaggaauaugugauua

SEQ ID NO: 255319 - RNA, 19 nt, Homo sapiens
  misc_RNA (1)...(19): siRNA sense strand
caacaaagcaacagaagau

SEQ ID NO: 255320 - RNA, 19 nt, Homo sapiens
  misc_RNA (1)...(19): siRNA sense strand
ugaaaucacugguaacaca

SEQ ID NO: 255321 - RNA, 19 nt, Homo sapiens
  misc_RNA (1)...(19): siRNA sense strand
gaaagaccauguggacguu

SEQ ID NO: 255322 - RNA, 19 nt, Homo sapiens
  misc_RNA (1)...(19): siRNA sense strand
ggacaucauuuacgucaca

SEQ ID NO: 255323 - RNA, 19 nt, Homo sapiens
  misc_RNA (1)...(19): siRNA sense strand
gaagcugacugcaucaaca

SEQ ID NO: 255324 - RNA, 19 nt, Homo sapiens
  misc_RNA (1)...(19): siRNA sense strand
cagcagcacuagguuauaa

SEQ ID NO: 255325 - RNA, 19 nt, Homo sapiens
  misc_RNA (1)...(19): siRNA sense strand
gugaugaguuggaacaauu

SEQ ID NO: 255326 - RNA, 19 nt, Homo sapiens
  misc_RNA (1)...(19): siRNA sense strand
gaggaaguaugcacauuuc

SEQ ID NO: 255327 - RNA, 19 nt, Homo sapiens
  misc_RNA (1)...(19): siRNA sense strand
ugaaagcaaucguagcauu

SEQ ID NO: 255328 - RNA, 19 nt, Homo sapiens
  misc_RNA (1)...(19): siRNA sense strand
gcacagugaugaguuggaa

SEQ ID NO: 255329 - RNA, 19 nt, Homo sapiens
  misc_RNA (1)...(19): siRNA sense strand
gcuaauacuucucagacaa

SEQ ID NO: 255330 - RNA, 19 nt, Homo sapiens
  misc_RNA (1)...(19): siRNA sense strand
gaccucaauucuuccauaa

SEQ ID NO: 255331 - RNA, 19 nt, Homo sapiens
  misc_RNA (1)...(19): siRNA sense strand
gaagaagaacugaaaucaa

SEQ ID NO: 255332 - RNA, 19 nt, Homo sapiens
  misc_RNA (1)...(19): siRNA sense strand
guaauuauguccgugaaau

SEQ ID NO: 255333 - RNA, 19 nt, Homo sapiens
  misc_RNA (1)...(19): siRNA sense strand
aagaagaacugaaaucaag

SEQ ID NO: 255334 - RNA, 19 nt, Homo sapiens
  misc_RNA (1)...(19): siRNA sense strand
ucaaauguccugauaaugu

SEQ ID NO: 255335 - RNA, 19 nt, Homo sapiens
  misc_RNA (1)...(19): siRNA sense strand
gaggagcgguaccuuaugu

SEQ ID NO: 255336 - RNA, 19 nt, Homo sapiens
  misc_RNA (1)...(19): siRNA sense strand
ggaagaagaacugaaauca

SEQ ID NO: 255337 - RNA, 19 nt, Homo sapiens
  misc_RNA (1)...(19): siRNA sense strand
ucaugcgacuggagaaaua

SEQ ID NO: 255338 - RNA, 19 nt, Homo sapiens
  misc_RNA (1)...(19): siRNA sense strand
ggagcgguaccuuauguua

SEQ ID NO: 255339 - RNA, 19 nt, Homo sapiens
  misc_RNA (1)...(19): siRNA sense strand
gaagaacugaaaucaagaa

SEQ ID NO: 255340 - RNA, 19 nt, Homo sapiens
  misc_RNA (1)...(19): siRNA sense strand
gcuuauaucuuugggaguu

SEQ ID NO: 255341 - RNA, 19 nt, Homo sapiens
  misc_RNA (1)...(19): siRNA sense strand
aaaggaagacugagagaaa

SEQ ID NO: 255342 - RNA, 19 nt, Homo sapiens
  misc_RNA (1)...(19): siRNA sense strand
aaauggaagucaucaguug

SEQ ID NO: 255343 - RNA, 19 nt, Homo sapiens
  misc_RNA (1)...(19): siRNA sense strand
caaaguaggagguugucua

SEQ ID NO: 255344 - RNA, 19 nt, Homo sapiens
  misc_RNA (1)...(19): siRNA sense strand
ggaagagaaacucaucauu

SEQ ID NO: 255345 - RNA, 19 nt, Homo sapiens
  misc_RNA (1)...(19): siRNA sense strand
gaaagcaaucguagcauuc

SEQ ID NO: 255346 - RNA, 19 nt, Homo sapiens
  misc_RNA (1)...(19): siRNA sense strand
gaagcaaacagaugagugu

SEQ ID NO: 255347 - RNA, 19 nt, Homo sapiens
  misc_RNA (1)...(19): siRNA sense strand
guagugcucauucuucuuu

SEQ ID NO: 255348 - RNA, 19 nt, Homo sapiens
  misc_RNA (1)...(19): siRNA sense strand
uaaugaggaugaacuguca

SEQ ID NO: 255349 - RNA, 19 nt, Homo sapiens
  misc_RNA (1)...(19): siRNA sense strand
aggaauaugugauuaggaa

SEQ ID NO: 255350 - RNA, 19 nt, Homo sapiens
  misc_RNA (1)...(19): siRNA sense strand
ggaggaggaauaugugauu

SEQ ID NO: 255351 - RNA, 19 nt, Homo sapiens
  misc_RNA (1)...(19): siRNA sense strand
gaguuuaaguugucuacga

SEQ ID NO: 255352 - RNA, 19 nt, Homo sapiens
  misc_RNA (1)...(19): siRNA sense strand
gugacuagauuagaugaaa

SEQ ID NO: 255353 - RNA, 19 nt, Homo sapiens
  misc_RNA (1)...(19): siRNA sense strand
caacaaaccucagcaaacc

SEQ ID NO: 255354 - RNA, 19 nt, Homo sapiens
  misc_RNA (1)...(19): siRNA sense strand
gagcccagguauccucauu

SEQ ID NO: 255355 - RNA, 19 nt, Homo sapiens
  misc_RNA (1)...(19): siRNA sense strand
ccacuuaccaagaauuauu

SEQ ID NO: 255356 - RNA, 19 nt, Homo sapiens
  misc_RNA (1)...(19): siRNA sense strand
ucaacaacaucaaugacuu

SEQ ID NO: 255357 - RNA, 19 nt, Homo sapiens
  misc_RNA (1)...(19): siRNA sense strand
gaaggacgaggucagagaa

SEQ ID NO: 255358 - RNA, 19 nt, Homo sapiens
  misc_RNA (1)...(19): siRNA sense strand
ggccauggcucaaguacuc

SEQ ID NO: 255359 - RNA, 19 nt, Homo sapiens
  misc_RNA (1)...(19): siRNA sense strand
ggaaguaugcacauuucaa

SEQ ID NO: 255360 - RNA, 19 nt, Homo sapiens
  misc_RNA (1)...(19): siRNA sense strand
cagaagaucagcuaucaga

SEQ ID NO: 255361 - RNA, 19 nt, Homo sapiens
  misc_RNA (1)...(19): siRNA sense strand
gcaaacugaucaacagacu

SEQ ID NO: 255362 - RNA, 19 nt, Homo sapiens
  misc_RNA (1)...(19): siRNA sense strand
agaccucaauucuuccaua

SEQ ID NO: 255363 - RNA, 19 nt, Homo sapiens
  misc_RNA (1)...(19): siRNA sense strand
aaagaggagcgguaccuua

SEQ ID NO: 255364 - RNA, 19 nt, Homo sapiens
  misc_RNA (1)...(19): siRNA sense strand
guaugcacauuucaacaga

SEQ ID NO: 255365 - RNA, 19 nt, Homo sapiens
  misc_RNA (1)...(19): siRNA sense strand
guaacacaguggagagaau

SEQ ID NO: 255366 - RNA, 19 nt, Homo sapiens
  misc_RNA (1)...(19): siRNA sense strand
cgacuggagaaauauguua

SEQ ID NO: 255367 - RNA, 19 nt, Homo sapiens
  misc_RNA (1)...(19): siRNA sense strand
gagaaacucaucauugaag

SEQ ID NO: 255368 - RNA, 19 nt, Homo sapiens
  misc_RNA (1)...(19): siRNA sense strand
gaugaguggcuuuaucuau

SEQ ID NO: 255369 - RNA, 19 nt, Homo sapiens
  misc_RNA (1)...(19): siRNA sense strand
aagaacaaaucgugacaug

SEQ ID NO: 255370 - RNA, 19 nt, Homo sapiens
  misc_RNA (1)...(19): siRNA sense strand
gaaacucaucauugaagaa

SEQ ID NO: 255371 - RNA, 19 nt, Homo sapiens
  misc_RNA (1)...(19): siRNA sense strand
caaaucgugacauggcuua

SEQ ID NO: 255372 - RNA, 19 nt, Homo sapiens
  misc_RNA (1)...(19): siRNA sense strand
guacagcugcucuggaaga

SEQ ID NO: 255373 - RNA, 19 nt, Homo sapiens
  misc_RNA (1)...(19): siRNA sense strand
aaaccauccuucagcugua

SEQ ID NO: 255374 - RNA, 19 nt, Homo sapiens
  misc_RNA (1)...(19): siRNA sense strand
agucucuucuuguuacuua

SEQ ID NO: 255375 - RNA, 19 nt, Homo sapiens
  misc_RNA (1)...(19): siRNA sense strand
cgaggaaguaugcacauuu

SEQ ID NO: 255376 - RNA, 19 nt, Homo sapiens
  misc_RNA (1)...(19): siRNA sense strand
caggaacgguggugacuag

SEQ ID NO: 255377 - RNA, 19 nt, Homo sapiens
  misc_RNA (1)...(19): siRNA sense strand
cacaaguaauggugcagua

SEQ ID NO: 255378 - RNA, 19 nt, Homo sapiens
  misc_RNA (1)...(19): siRNA sense strand
caaaagccgucaaaggauu

SEQ ID NO: 255379 - RNA, 19 nt, Homo sapiens
  misc_RNA (1)...(19): siRNA sense strand
gaagcaaugccuggaagaa

SEQ ID NO: 255380 - RNA, 19 nt, Homo sapiens
  misc_RNA (1)...(19): siRNA sense strand
gaacugaagcaggaaaaua

SEQ ID NO: 255381 - RNA, 19 nt, Homo sapiens
  misc_RNA (1)...(19): siRNA sense strand
caucaaugacuuccugaaa

SEQ ID NO: 255382 - RNA, 19 nt, Homo sapiens
  misc_RNA (1)...(19): siRNA sense strand
ggaggaauaugugauuagg

SEQ ID NO: 255383 - RNA, 19 nt, Homo sapiens
  misc_RNA (1)...(19): siRNA sense strand
cgaccugcaccuccacuua

SEQ ID NO: 255384 - RNA, 19 nt, Homo sapiens
  misc_RNA (1)...(19): siRNA sense strand
gcaucaacaacaucaauga

SEQ ID NO: 255385 - RNA, 19 nt, Homo sapiens
  misc_RNA (1)...(19): siRNA sense strand
gguggugacuagauuagau

SEQ ID NO: 255386 - RNA, 19 nt, Homo sapiens
  misc_RNA (1)...(19): siRNA sense strand
guauggagcaugugaggaa

SEQ ID NO: 255387 - RNA, 19 nt, Homo sapiens
  misc_RNA (1)...(19): siRNA sense strand
gauacuguccgaaccuauu

SEQ ID NO: 255388 - RNA, 19 nt, Homo sapiens
  misc_RNA (1)...(19): siRNA sense strand
gaacauccuggacacugaa

SEQ ID NO: 255389 - RNA, 19 nt, Homo sapiens
  misc_RNA (1)...(19): siRNA sense strand
gcaaaggcagucaaagaca

SEQ ID NO: 255390 - RNA, 19 nt, Homo sapiens
  misc_RNA (1)...(19): siRNA sense strand
aaguacagcugcucuggaa

SEQ ID NO: 255391 - RNA, 19 nt, Homo sapiens
  misc_RNA (1)...(19): siRNA sense strand
cuauguaucuggcuuacug

SEQ ID NO: 255392 - RNA, 19 nt, Homo sapiens
  misc_RNA (1)...(19): siRNA sense strand
cuguggagguuacaucuuu

SEQ ID NO: 255393 - RNA, 19 nt, Homo sapiens
  misc_RNA (1)...(19): siRNA sense strand
caucagcagcacuagguua

SEQ ID NO: 255394 - RNA, 19 nt, Homo sapiens
  misc_RNA (1)...(19): siRNA sense strand
gaacauaacuccaguccaa

SEQ ID NO: 255395 - RNA, 19 nt, Homo sapiens
  misc_RNA (1)...(19): siRNA sense strand
gaaaguagccuuccuaaug

SEQ ID NO: 255396 - RNA, 19 nt, Homo sapiens
  misc_RNA (1)...(19): siRNA sense strand
ggaguuggcuugugccuua

SEQ ID NO: 255397 - RNA, 19 nt, Homo sapiens
  misc_RNA (1)...(19): siRNA sense strand
gcaaauaccucacccuuca

SEQ ID NO: 255398 - RNA, 19 nt, Homo sapiens
  misc_RNA (1)...(19): siRNA sense strand
ggacaagacuucugcuuug

SEQ ID NO: 255399 - RNA, 19 nt, Homo sapiens
  misc_RNA (1)...(19): siRNA sense strand
ccaaauccauugaggaaua

SEQ ID NO: 255400 - RNA, 19 nt, Homo sapiens
  misc_RNA (1)...(19): siRNA sense strand
gcucaucagugccucauua

SEQ ID NO: 255401 - RNA, 19 nt, Homo sapiens
  misc_RNA (1)...(19): siRNA sense strand
ccaaaggccucuauagauu

SEQ ID NO: 255402 - RNA, 19 nt, Homo sapiens
  misc_RNA (1)...(19): siRNA sense strand
gagcaugacuuauucugaa

SEQ ID NO: 255403 - RNA, 19 nt, Homo sapiens
  misc_RNA (1)...(19): siRNA sense strand
ggaaugaagcgcuuucuuu

SEQ ID NO: 255404 - RNA, 19 nt, Homo sapiens
  misc_RNA (1)...(19): siRNA sense strand
acacauaccucuugcuuug

SEQ ID NO: 255405 - RNA, 19 nt, Homo sapiens
  misc_RNA (1)...(19): siRNA sense strand
gaacugugccuugaugaua

SEQ ID NO: 255406 - RNA, 19 nt, Homo sapiens
  misc_RNA (1)...(19): siRNA sense strand
gaccaaagcagacaauauu

SEQ ID NO: 255407 - RNA, 19 nt, Homo sapiens
  misc_RNA (1)...(19): siRNA sense strand
ggacaacaguaucuucaug

SEQ ID NO: 255408 - RNA, 19 nt, Homo sapiens
  misc_RNA (1)...(19): siRNA sense strand
gcaggacaguucaaccuaa

SEQ ID NO: 255409 - RNA, 19 nt, Homo sapiens
  misc_RNA (1)...(19): siRNA sense strand
gaagauuucacuaaacgua

SEQ ID NO: 255410 - RNA, 19 nt, Homo sapiens
  misc_RNA (1)...(19): siRNA sense strand
caucagugccucauuauuu

SEQ ID NO: 255411 - RNA, 19 nt, Homo sapiens
  misc_RNA (1)...(19): siRNA sense strand
gaaagaaguguuugcauca

SEQ ID NO: 255412 - RNA, 19 nt, Homo sapiens
  misc_RNA (1)...(19): siRNA sense strand
ggacaguucaaccuaauaa

SEQ ID NO: 255413 - RNA, 19 nt, Homo sapiens
  misc_RNA (1)...(19): siRNA sense strand
cauggaagauuucacuaaa

SEQ ID NO: 255414 - RNA, 19 nt, Homo sapiens
  misc_RNA (1)...(19): siRNA sense strand
uaacaaagaggaauacaug

SEQ ID NO: 255415 - RNA, 19 nt, Homo sapiens
  misc_RNA (1)...(19): siRNA sense strand
guaaaugcuucagcuguaa

SEQ ID NO: 255416 - RNA, 19 nt, Homo sapiens
  misc_RNA (1)...(19): siRNA sense strand
ugagaaguaugaacaagaa

SEQ ID NO: 255417 - RNA, 19 nt, Homo sapiens
  misc_RNA (1)...(19): siRNA sense strand
gcagaaagguccccucgua

SEQ ID NO: 255418 - RNA, 19 nt, Homo sapiens
  misc_RNA (1)...(19): siRNA sense strand
guaucacaguucacauuua

SEQ ID NO: 255419 - RNA, 19 nt, Homo sapiens
  misc_RNA (1)...(19): siRNA sense strand
caucaacucuuacuguguu

SEQ ID NO: 255420 - RNA, 19 nt, Homo sapiens
  misc_RNA (1)...(19): siRNA sense strand
ggagcaauacaaagaauuu

SEQ ID NO: 255421 - RNA, 19 nt, Homo sapiens
  misc_RNA (1)...(19): siRNA sense strand
caaaguaccaggauucuuc

SEQ ID NO: 255422 - RNA, 19 nt, Homo sapiens
  misc_RNA (1)...(19): siRNA sense strand
cagcaagccuccucucaga

SEQ ID NO: 255423 - RNA, 19 nt, Homo sapiens
  misc_RNA (1)...(19): siRNA sense strand
gauauuaccaagucauuga

SEQ ID NO: 255424 - RNA, 19 nt, Homo sapiens
  misc_RNA (1)...(19): siRNA sense strand
gaacacuauugccaccaaa

SEQ ID NO: 255425 - RNA, 19 nt, Homo sapiens
  misc_RNA (1)...(19): siRNA sense strand
ugaaguggaucccagcaaa

SEQ ID NO: 255426 - RNA, 19 nt, Homo sapiens
  misc_RNA (1)...(19): siRNA sense strand
gaaggaucaugcugagaug

SEQ ID NO: 255427 - RNA, 19 nt, Homo sapiens
  misc_RNA (1)...(19): siRNA sense strand
agaagcugcugcuggaaua

SEQ ID NO: 255428 - RNA, 19 nt, Homo sapiens
  misc_RNA (1)...(19): siRNA sense strand
aagaggaacugaagaagga

SEQ ID NO: 255429 - RNA, 19 nt, Homo sapiens
  misc_RNA (1)...(19): siRNA sense strand
cugaaaggcuccaucaaga

SEQ ID NO: 255430 - RNA, 19 nt, Homo sapiens
  misc_RNA (1)...(19): siRNA sense strand
ggaagaaacugagcaaaau

SEQ ID NO: 255431 - RNA, 19 nt, Homo sapiens
  misc_RNA (1)...(19): siRNA sense strand
gaccuucuauucggauuaa

SEQ ID NO: 255432 - RNA, 19 nt, Homo sapiens
  misc_RNA (1)...(19): siRNA sense strand
gacaagacuucugcuuuga

SEQ ID NO: 255433 - RNA, 19 nt, Homo sapiens
  misc_RNA (1)...(19): siRNA sense strand
gaaaagugguauccaguga

SEQ ID NO: 255434 - RNA, 19 nt, Homo sapiens
  misc_RNA (1)...(19): siRNA sense strand
gcauggaagauuucacuaa

SEQ ID NO: 255435 - RNA, 19 nt, Homo sapiens
  misc_RNA (1)...(19): siRNA sense strand
ugacagugauuugcauaaa

SEQ ID NO: 255436 - RNA, 19 nt, Homo sapiens
  misc_RNA (1)...(19): siRNA sense strand
gcugugagcuggcuuucug

SEQ ID NO: 255437 - RNA, 19 nt, Homo sapiens
  misc_RNA (1)...(19): siRNA sense strand
gcaaauguucaucuaguga

SEQ ID NO: 255438 - RNA, 19 nt, Homo sapiens
  misc_RNA (1)...(19): siRNA sense strand
caugaugucuugaucuuca

SEQ ID NO: 255439 - RNA, 19 nt, Homo sapiens
  misc_RNA (1)...(19): siRNA sense strand
gggaguuuaucaaagcuuu

SEQ ID NO: 255440 - RNA, 19 nt, Homo sapiens
  misc_RNA (1)...(19): siRNA sense strand
gcuaauggcuguggaagag

SEQ ID NO: 255441 - RNA, 19 nt, Homo sapiens
  misc_RNA (1)...(19): siRNA sense strand
ccaagcaugcugagaagua

SEQ ID NO: 255442 - RNA, 19 nt, Homo sapiens
  misc_RNA (1)...(19): siRNA sense strand
ugaagaggauguggaagaa

SEQ ID NO: 255443 - RNA, 19 nt, Homo sapiens
  misc_RNA (1)...(19): siRNA sense strand
gauagacacauaccucuug

SEQ ID NO: 255444 - RNA, 19 nt, Homo sapiens
  misc_RNA (1)...(19): siRNA sense strand
aaaguagccuuccuaaugg

SEQ ID NO: 255445 - RNA, 19 nt, Homo sapiens
  misc_RNA (1)...(19): siRNA sense strand
cagcaaauguucaucuagu

SEQ ID NO: 255446 - RNA, 19 nt, Homo sapiens
  misc_RNA (1)...(19): siRNA sense strand
gaucaucaacucuuacugu

SEQ ID NO: 255447 - RNA, 19 nt, Homo sapiens
  misc_RNA (1)...(19): siRNA sense strand
caacacagacagcuacuuc

SEQ ID NO: 255448 - RNA, 19 nt, Homo sapiens
  misc_RNA (1)...(19): siRNA sense strand
agagagcccuguucccaaa

SEQ ID NO: 255449 - RNA, 19 nt, Homo sapiens
  misc_RNA (1)...(19): siRNA sense strand
ucucagagcaugacuuauu

SEQ ID NO: 255450 - RNA, 19 nt, Homo sapiens
  misc_RNA (1)...(19): siRNA sense strand
aguaaaugcuucagcugua

SEQ ID NO: 255451 - RNA, 19 nt, Homo sapiens
  misc_RNA (1)...(19): siRNA sense strand
gaagacagcaggaagaaaa

SEQ ID NO: 255452 - RNA, 19 nt, Homo sapiens
  misc_RNA (1)...(19): siRNA sense strand
ggugccagauagacacaua

SEQ ID NO: 255453 - RNA, 19 nt, Homo sapiens
  misc_RNA (1)...(19): siRNA sense strand
gagcuggcuuucugcaaga

SEQ ID NO: 255454 - RNA, 19 nt, Homo sapiens
  misc_RNA (1)...(19): siRNA sense strand
gccacacagugcuucuuua

SEQ ID NO: 255455 - RNA, 19 nt, Homo sapiens
  misc_RNA (1)...(19): siRNA sense strand
gauacccucuuugcucgua

SEQ ID NO: 255456 - RNA, 19 nt, Homo sapiens
  misc_RNA (1)...(19): siRNA sense strand
gcaagcaguuauugaugca

SEQ ID NO: 255457 - RNA, 19 nt, Homo sapiens
  misc_RNA (1)...(19): siRNA sense strand
gccgagagcuuucaguuuu

SEQ ID NO: 255458 - RNA, 19 nt, Homo sapiens
  misc_RNA (1)...(19): siRNA sense strand
gaucugggccgagagcuuu

SEQ ID NO: 255459 - RNA, 19 nt, Homo sapiens
  misc_RNA (1)...(19): siRNA sense strand
gccaaaggccucuauagau

SEQ ID NO: 255460 - RNA, 19 nt, Homo sapiens
  misc_RNA (1)...(19): siRNA sense strand
aauaauugaugcacaggaa

SEQ ID NO: 255461 - RNA, 19 nt, Homo sapiens
  misc_RNA (1)...(19): siRNA sense strand
agagacaaguggauggaaa

SEQ ID NO: 255462 - RNA, 19 nt, Homo sapiens
  misc_RNA (1)...(19): siRNA sense strand
guucuucguuuauggauca

SEQ ID NO: 255463 - RNA, 19 nt, Homo sapiens
  misc_RNA (1)...(19): siRNA sense strand
gaaugaagcgcuuucuuuu

SEQ ID NO: 255464 - RNA, 19 nt, Homo sapiens
  misc_RNA (1)...(19): siRNA sense strand
caagcaugcugagaaguau

SEQ ID NO: 255465 - RNA, 19 nt, Homo sapiens
  misc_RNA (1)...(19): siRNA sense strand
gaacaaugggcaguaugaa

SEQ ID NO: 255466 - RNA, 19 nt, Homo sapiens
  misc_RNA (1)...(19): siRNA sense strand
uaucacaguucacauuuac

SEQ ID NO: 255467 - RNA, 19 nt, Homo sapiens
  misc_RNA (1)...(19): siRNA sense strand
acacagugcuucuuuacgu

SEQ ID NO: 255468 - RNA, 19 nt, Homo sapiens
  misc_RNA (1)...(19): siRNA sense strand
gcaauagcagcauggaaga

SEQ ID NO: 255469 - RNA, 19 nt, Homo sapiens
  misc_RNA (1)...(19): siRNA sense strand
gaagccaaaguaacaguga

SEQ ID NO: 255470 - RNA, 19 nt, Homo sapiens
  misc_RNA (1)...(19): siRNA sense strand
gacaacaguaucuucauga

SEQ ID NO: 255471 - RNA, 19 nt, Homo sapiens
  misc_RNA (1)...(19): siRNA sense strand
gugcacauucuucaaagua

SEQ ID NO: 255472 - RNA, 19 nt, Homo sapiens
  misc_RNA (1)...(19): siRNA sense strand
uaauucugcuucugagaga

SEQ ID NO: 255473 - RNA, 19 nt, Homo sapiens
  misc_RNA (1)...(19): siRNA sense strand
gcugagaugcaagcaguua

SEQ ID NO: 255474 - RNA, 19 nt, Homo sapiens
  misc_RNA (1)...(19): siRNA sense strand
aaggagcgccugagaguuu

SEQ ID NO: 255475 - RNA, 19 nt, Homo sapiens
  misc_RNA (1)...(19): siRNA sense strand
ugacuaauccuacgccaau

SEQ ID NO: 255476 - RNA, 19 nt, Homo sapiens
  misc_RNA (1)...(19): siRNA sense strand
gaacaugaaugggguggaa

SEQ ID NO: 255477 - RNA, 19 nt, Homo sapiens
  misc_RNA (1)...(19): siRNA sense strand
ucaaacagcugcgggaaac

SEQ ID NO: 255478 - RNA, 19 nt, Homo sapiens
  misc_RNA (1)...(19): siRNA sense strand
gggcgaacauuuugaauuc

SEQ ID NO: 255479 - RNA, 19 nt, Homo sapiens
  misc_RNA (1)...(19): siRNA sense strand
ccaccaagcuuuccaucac

SEQ ID NO: 255480 - RNA, 19 nt, Homo sapiens
  misc_RNA (1)...(19): siRNA sense strand
ugagaacugugaaguggau

SEQ ID NO: 255481 - RNA, 19 nt, Homo sapiens
  misc_RNA (1)...(19): siRNA sense strand
gaaccuguaucagugaaac

SEQ ID NO: 255482 - RNA, 19 nt, Homo sapiens
  misc_RNA (1)...(19): siRNA sense strand
cacagugcuucuuuacgua

SEQ ID NO: 255483 - RNA, 19 nt, Homo sapiens
  misc_RNA (1)...(19): siRNA sense strand
uaacccaauuccagcaaug

SEQ ID NO: 255484 - RNA, 19 nt, Homo sapiens
  misc_RNA (1)...(19): siRNA sense strand
ucaccucaauaacccaauu

SEQ ID NO: 255485 - RNA, 19 nt, Homo sapiens
  misc_RNA (1)...(19): siRNA sense strand
ggacacucaugcugcucaa

SEQ ID NO: 255486 - RNA, 19 nt, Homo sapiens
  misc_RNA (1)...(19): siRNA sense strand
uaccucacccuucaaagua

SEQ ID NO: 255487 - RNA, 19 nt, Homo sapiens
  misc_RNA (1)...(19): siRNA sense strand
gacaggaggaccuucuauu

SEQ ID NO: 255488 - RNA, 19 nt, Homo sapiens
  misc_RNA (1)...(19): siRNA sense strand
aggaauaccucaaguuggu

SEQ ID NO: 255489 - RNA, 19 nt, Homo sapiens
  misc_RNA (1)...(19): siRNA sense strand
gaugcaagcaguuauugau

SEQ ID NO: 255490 - RNA, 19 nt, Homo sapiens
  misc_RNA (1)...(19): siRNA sense strand
gaacugaagaaggaucaug

SEQ ID NO: 255491 - RNA, 19 nt, Homo sapiens
  misc_RNA (1)...(19): siRNA sense strand
ggccgaaccugugcagaau

SEQ ID NO: 255492 - RNA, 19 nt, Homo sapiens
  misc_RNA (1)...(19): siRNA sense strand
ccagguggccagcaucaaa

SEQ ID NO: 255493 - RNA, 19 nt, Homo sapiens
  misc_RNA (1)...(19): siRNA sense strand
ucucggacucuaacucuua

SEQ ID NO: 255494 - RNA, 19 nt, Homo sapiens
  misc_RNA (1)...(19): siRNA sense strand
gaacauaacuccaguccaa

SEQ ID NO: 255495 - RNA, 19 nt, Homo sapiens
  misc_RNA (1)...(19): siRNA sense strand
gaaaguagccuuccuaaug

SEQ ID NO: 255496 - RNA, 19 nt, Homo sapiens
  misc_RNA (1)...(19): siRNA sense strand
ggaguuggcuugugccuua

SEQ ID NO: 255497 - RNA, 19 nt, Homo sapiens
  misc_RNA (1)...(19): siRNA sense strand
gcaaauaccucacccuuca

SEQ ID NO: 255498 - RNA, 19 nt, Homo sapiens
  misc_RNA (1)...(19): siRNA sense strand
ggacaagacuucugcuuug

SEQ ID NO: 255499 - RNA, 19 nt, Homo sapiens
  misc_RNA (1)...(19): siRNA sense strand
ccaaauccauugaggaaua

SEQ ID NO: 255500 - RNA, 19 nt, Homo sapiens
  misc_RNA (1)...(19): siRNA sense strand
gcucaucagugccucauua

SEQ ID NO: 255501 - RNA, 19 nt, Homo sapiens
  misc_RNA (1)...(19): siRNA sense strand
ccaaaggccucuauagauu

SEQ ID NO: 255502 - RNA, 19 nt, Homo sapiens
  misc_RNA (1)...(19): siRNA sense strand
gagcaugacuuauucugaa

SEQ ID NO: 255503 - RNA, 19 nt, Homo sapiens
  misc_RNA (1)...(19): siRNA sense strand
ggaaugaagcgcuuucuuu

SEQ ID NO: 255504 - RNA, 19 nt, Homo sapiens
  misc_RNA (1)...(19): siRNA sense strand
acacauaccucuugcuuug

SEQ ID NO: 255505 - RNA, 19 nt, Homo sapiens
  misc_RNA (1)...(19): siRNA sense strand
gaacugugccuugaugaua

SEQ ID NO: 255506 - RNA, 19 nt, Homo sapiens
  misc_RNA (1)...(19): siRNA sense strand
gaccaaagcagacaauauu

SEQ ID NO: 255507 - RNA, 19 nt, Homo sapiens
  misc_RNA (1)...(19): siRNA sense strand
ggacaacaguaucuucaug

SEQ ID NO: 255508 - RNA, 19 nt, Homo sapiens
  misc_RNA (1)...(19): siRNA sense strand
gcaggacaguucaaccuaa

SEQ ID NO: 255509 - RNA, 19 nt, Homo sapiens
  misc_RNA (1)...(19): siRNA sense strand
gaagauuucacuaaacgua

SEQ ID NO: 255510 - RNA, 19 nt, Homo sapiens
  misc_RNA (1)...(19): siRNA sense strand
caucagugccucauuauuu

SEQ ID NO: 255511 - RNA, 19 nt, Homo sapiens
  misc_RNA (1)...(19): siRNA sense strand
gaaagaaguguuugcauca

SEQ ID NO: 255512 - RNA, 19 nt, Homo sapiens
  misc_RNA (1)...(19): siRNA sense strand
ggacaguucaaccuaauaa

SEQ ID NO: 255513 - RNA, 19 nt, Homo sapiens
  misc_RNA (1)...(19): siRNA sense strand
cauggaagauuucacuaaa

SEQ ID NO: 255514 - RNA, 19 nt, Homo sapiens
  misc_RNA (1)...(19): siRNA sense strand
uaacaaagaggaauacaug

SEQ ID NO: 255515 - RNA, 19 nt, Homo sapiens
  misc_RNA (1)...(19): siRNA sense strand
guaaaugcuucagcuguaa

SEQ ID NO: 255516 - RNA, 19 nt, Homo sapiens
  misc_RNA (1)...(19): siRNA sense strand
ugagaaguaugaacaagaa

SEQ ID NO: 255517 - RNA, 19 nt, Homo sapiens
  misc_RNA (1)...(19): siRNA sense strand
gcagaaagguccccucgua

SEQ ID NO: 255518 - RNA, 19 nt, Homo sapiens
  misc_RNA (1)...(19): siRNA sense strand
guaucacaguucacauuua

SEQ ID NO: 255519 - RNA, 19 nt, Homo sapiens
  misc_RNA (1)...(19): siRNA sense strand
caucaacucuuacuguguu

SEQ ID NO: 255520 - RNA, 19 nt, Homo sapiens
  misc_RNA (1)...(19): siRNA sense strand
ggagcaauacaaagaauuu

SEQ ID NO: 255521 - RNA, 19 nt, Homo sapiens
  misc_RNA (1)...(19): siRNA sense strand
caaaguaccaggauucuuc

SEQ ID NO: 255522 - RNA, 19 nt, Homo sapiens
  misc_RNA (1)...(19): siRNA sense strand
cagcaagccuccucucaga

SEQ ID NO: 255523 - RNA, 19 nt, Homo sapiens
  misc_RNA (1)...(19): siRNA sense strand
gauauuaccaagucauuga

SEQ ID NO: 255524 - RNA, 19 nt, Homo sapiens
  misc_RNA (1)...(19): siRNA sense strand
gaacacuauugccaccaaa

SEQ ID NO: 255525 - RNA, 19 nt, Homo sapiens
  misc_RNA (1)...(19): siRNA sense strand
ugaaguggaucccagcaaa

SEQ ID NO: 255526 - RNA, 19 nt, Homo sapiens
  misc_RNA (1)...(19): siRNA sense strand
gaaggaucaugcugagaug

SEQ ID NO: 255527 - RNA, 19 nt, Homo sapiens
  misc_RNA (1)...(19): siRNA sense strand
agaagcugcugcuggaaua

SEQ ID NO: 255528 - RNA, 19 nt, Homo sapiens
  misc_RNA (1)...(19): siRNA sense strand
aagaggaacugaagaagga

SEQ ID NO: 255529 - RNA, 19 nt, Homo sapiens
  misc_RNA (1)...(19): siRNA sense strand
cugaaaggcuccaucaaga

SEQ ID NO: 255530 - RNA, 19 nt, Homo sapiens
  misc_RNA (1)...(19): siRNA sense strand
ggaagaaacugagcaaaau

SEQ ID NO: 255531 - RNA, 19 nt, Homo sapiens
  misc_RNA (1)...(19): siRNA sense strand
gaccuucuauucggauuaa

SEQ ID NO: 255532 - RNA, 19 nt, Homo sapiens
  misc_RNA (1)...(19): siRNA sense strand
gacaagacuucugcuuuga

SEQ ID NO: 255533 - RNA, 19 nt, Homo sapiens
  misc_RNA (1)...(19): siRNA sense strand
gaaaagugguauccaguga

SEQ ID NO: 255534 - RNA, 19 nt, Homo sapiens
  misc_RNA (1)...(19): siRNA sense strand
gcauggaagauuucacuaa

SEQ ID NO: 255535 - RNA, 19 nt, Homo sapiens
  misc_RNA (1)...(19): siRNA sense strand
ugacagugauuugcauaaa

SEQ ID NO: 255536 - RNA, 19 nt, Homo sapiens
  misc_RNA (1)...(19): siRNA sense strand
gcugugagcuggcuuucug

SEQ ID NO: 255537 - RNA, 19 nt, Homo sapiens
  misc_RNA (1)...(19): siRNA sense strand
gcaaauguucaucuaguga

SEQ ID NO: 255538 - RNA, 19 nt, Homo sapiens
  misc_RNA (1)...(19): siRNA sense strand
caugaugucuugaucuuca

SEQ ID NO: 255539 - RNA, 19 nt, Homo sapiens
  misc_RNA (1)...(19): siRNA sense strand
gggaguuuaucaaagcuuu

SEQ ID NO: 255540 - RNA, 19 nt, Homo sapiens
  misc_RNA (1)...(19): siRNA sense strand
gcuaauggcuguggaagag

SEQ ID NO: 255541 - RNA, 19 nt, Homo sapiens
  misc_RNA (1)...(19): siRNA sense strand
ccaagcaugcugagaagua

SEQ ID NO: 255542 - RNA, 19 nt, Homo sapiens
  misc_RNA (1)...(19): siRNA sense strand
ugaagaggauguggaagaa

SEQ ID NO: 255543 - RNA, 19 nt, Homo sapiens
  misc_RNA (1)...(19): siRNA sense strand
gauagacacauaccucuug

SEQ ID NO: 255544 - RNA, 19 nt, Homo sapiens
  misc_RNA (1)...(19): siRNA sense strand
aaaguagccuuccuaaugg

SEQ ID NO: 255545 - RNA, 19 nt, Homo sapiens
  misc_RNA (1)...(19): siRNA sense strand
cagcaaauguucaucuagu

SEQ ID NO: 255546 - RNA, 19 nt, Homo sapiens
  misc_RNA (1)...(19): siRNA sense strand
gaucaucaacucuuacugu

SEQ ID NO: 255547 - RNA, 19 nt, Homo sapiens
  misc_RNA (1)...(19): siRNA sense strand
caacacagacagcuacuuc

SEQ ID NO: 255548 - RNA, 19 nt, Homo sapiens
  misc_RNA (1)...(19): siRNA sense strand
agagagcccuguucccaaa

SEQ ID NO: 255549 - RNA, 19 nt, Homo sapiens
  misc_RNA (1)...(19): siRNA sense strand
ucucagagcaugacuuauu

SEQ ID NO: 255550 - RNA, 19 nt, Homo sapiens
  misc_RNA (1)...(19): siRNA sense strand
aguaaaugcuucagcugua

SEQ ID NO: 255551 - RNA, 19 nt, Homo sapiens
  misc_RNA (1)...(19): siRNA sense strand
gaagacagcaggaagaaaa

SEQ ID NO: 255552 - RNA, 19 nt, Homo sapiens
  misc_RNA (1)...(19): siRNA sense strand
ggugccagauagacacaua

SEQ ID NO: 255553 - RNA, 19 nt, Homo sapiens
  misc_RNA (1)...(19): siRNA sense strand
gagcuggcuuucugcaaga

SEQ ID NO: 255554 - RNA, 19 nt, Homo sapiens
  misc_RNA (1)...(19): siRNA sense strand
gccacacagugcuucuuua

SEQ ID NO: 255555 - RNA, 19 nt, Homo sapiens
  misc_RNA (1)...(19): siRNA sense strand
gauacccucuuugcucgua

SEQ ID NO: 255556 - RNA, 19 nt, Homo sapiens
  misc_RNA (1)...(19): siRNA sense strand
gcaagcaguuauugaugca

SEQ ID NO: 255557 - RNA, 19 nt, Homo sapiens
  misc_RNA (1)...(19): siRNA sense strand
gccgagagcuuucaguuuu

SEQ ID NO: 255558 - RNA, 19 nt, Homo sapiens
  misc_RNA (1)...(19): siRNA sense strand
gaucugggccgagagcuuu

SEQ ID NO: 255559 - RNA, 19 nt, Homo sapiens
  misc_RNA (1)...(19): siRNA sense strand
gccaaaggccucuauagau

SEQ ID NO: 255560 - RNA, 19 nt, Homo sapiens
  misc_RNA (1)...(19): siRNA sense strand
aauaauugaugcacaggaa

SEQ ID NO: 255561 - RNA, 19 nt, Homo sapiens
  misc_RNA (1)...(19): siRNA sense strand
agagacaaguggauggaaa

SEQ ID NO: 255562 - RNA, 19 nt, Homo sapiens
  misc_RNA (1)...(19): siRNA sense strand
guucuucguuuauggauca

SEQ ID NO: 255563 - RNA, 19 nt, Homo sapiens
  misc_RNA (1)...(19): siRNA sense strand
gaaugaagcgcuuucuuuu

SEQ ID NO: 255564 - RNA, 19 nt, Homo sapiens
  misc_RNA (1)...(19): siRNA sense strand
caagcaugcugagaaguau

SEQ ID NO: 255565 - RNA, 19 nt, Homo sapiens
  misc_RNA (1)...(19): siRNA sense strand
gaacaaugggcaguaugaa

SEQ ID NO: 255566 - RNA, 19 nt, Homo sapiens
  misc_RNA (1)...(19): siRNA sense strand
uaucacaguucacauuuac

SEQ ID NO: 255567 - RNA, 19 nt, Homo sapiens
  misc_RNA (1)...(19): siRNA sense strand
acacagugcuucuuuacgu

SEQ ID NO: 255568 - RNA, 19 nt, Homo sapiens
  misc_RNA (1)...(19): siRNA sense strand
gcaauagcagcauggaaga

SEQ ID NO: 255569 - RNA, 19 nt, Homo sapiens
  misc_RNA (1)...(19): siRNA sense strand
gaagccaaaguaacaguga

SEQ ID NO: 255570 - RNA, 19 nt, Homo sapiens
  misc_RNA (1)...(19): siRNA sense strand
gacaacaguaucuucauga

SEQ ID NO: 255571 - RNA, 19 nt, Homo sapiens
  misc_RNA (1)...(19): siRNA sense strand
gugcacauucuucaaagua

SEQ ID NO: 255572 - RNA, 19 nt, Homo sapiens
  misc_RNA (1)...(19): siRNA sense strand
uaauucugcuucugagaga

SEQ ID NO: 255573 - RNA, 19 nt, Homo sapiens
  misc_RNA (1)...(19): siRNA sense strand
gcugagaugcaagcaguua

SEQ ID NO: 255574 - RNA, 19 nt, Homo sapiens
  misc_RNA (1)...(19): siRNA sense strand
aaggagcgccugagaguuu

SEQ ID NO: 255575 - RNA, 19 nt, Homo sapiens
  misc_RNA (1)...(19): siRNA sense strand
ugacuaauccuacgccaau

SEQ ID NO: 255576 - RNA, 19 nt, Homo sapiens
  misc_RNA (1)...(19): siRNA sense strand
gaacaugaaugggguggaa

SEQ ID NO: 255577 - RNA, 19 nt, Homo sapiens
  misc_RNA (1)...(19): siRNA sense strand
ucaaacagcugcgggaaac

SEQ ID NO: 255578 - RNA, 19 nt, Homo sapiens
  misc_RNA (1)...(19): siRNA sense strand
gggcgaacauuuugaauuc

SEQ ID NO: 255579 - RNA, 19 nt, Homo sapiens
  misc_RNA (1)...(19): siRNA sense strand
ccaccaagcuuuccaucac

SEQ ID NO: 255580 - RNA, 19 nt, Homo sapiens
  misc_RNA (1)...(19): siRNA sense strand
ugagaacugugaaguggau

SEQ ID NO: 255581 - RNA, 19 nt, Homo sapiens
  misc_RNA (1)...(19): siRNA sense strand
gaaccuguaucagugaaac

SEQ ID NO: 255582 - RNA, 19 nt, Homo sapiens
  misc_RNA (1)...(19): siRNA sense strand
cacagugcuucuuuacgua

SEQ ID NO: 255583 - RNA, 19 nt, Homo sapiens
  misc_RNA (1)...(19): siRNA sense strand
uaacccaauuccagcaaug

SEQ ID NO: 255584 - RNA, 19 nt, Homo sapiens
  misc_RNA (1)...(19): siRNA sense strand
ucaccucaauaacccaauu

SEQ ID NO: 255585 - RNA, 19 nt, Homo sapiens
  misc_RNA (1)...(19): siRNA sense strand
ggacacucaugcugcucaa

SEQ ID NO: 255586 - RNA, 19 nt, Homo sapiens
  misc_RNA (1)...(19): siRNA sense strand
uaccucacccuucaaagua

SEQ ID NO: 255587 - RNA, 19 nt, Homo sapiens
  misc_RNA (1)...(19): siRNA sense strand
gacaggaggaccuucuauu

SEQ ID NO: 255588 - RNA, 19 nt, Homo sapiens
  misc_RNA (1)...(19): siRNA sense strand
aggaauaccucaaguuggu

SEQ ID NO: 255589 - RNA, 19 nt, Homo sapiens
  misc_RNA (1)...(19): siRNA sense strand
gaugcaagcaguuauugau

SEQ ID NO: 255590 - RNA, 19 nt, Homo sapiens
  misc_RNA (1)...(19): siRNA sense strand
gaacugaagaaggaucaug

SEQ ID NO: 255591 - RNA, 19 nt, Homo sapiens
  misc_RNA (1)...(19): siRNA sense strand
ggccgaaccugugcagaau

SEQ ID NO: 255592 - RNA, 19 nt, Homo sapiens
  misc_RNA (1)...(19): siRNA sense strand
ccagguggccagcaucaaa

SEQ ID NO: 255593 - RNA, 19 nt, Homo sapiens
  misc_RNA (1)...(19): siRNA sense strand
ucucggacucuaacucuua

SEQ ID NO: 255594 - RNA, 19 nt, Homo sapiens
  misc_RNA (1)...(19): siRNA sense strand
gaaccucagugcucuguua

SEQ ID NO: 255595 - RNA, 19 nt, Homo sapiens
  misc_RNA (1)...(19): siRNA sense strand
gggaacagcucaccauguc

SEQ ID NO: 255596 - RNA, 19 nt, Homo sapiens
  misc_RNA (1)...(19): siRNA sense strand
cuacauggccaucucauaa

SEQ ID NO: 255597 - RNA, 19 nt, Homo sapiens
  misc_RNA (1)...(19): siRNA sense strand
gaaccuagaaacccaaaug

SEQ ID NO: 255598 - RNA, 19 nt, Homo sapiens
  misc_RNA (1)...(19): siRNA sense strand
gaggaaccuuugcuucuau

SEQ ID NO: 255599 - RNA, 19 nt, Homo sapiens
  misc_RNA (1)...(19): siRNA sense strand
ggagaaagaagaggauuug

SEQ ID NO: 255600 - RNA, 19 nt, Homo sapiens
  misc_RNA (1)...(19): siRNA sense strand
aaaguaccguuccaacaaa

SEQ ID NO: 255601 - RNA, 19 nt, Homo sapiens
  misc_RNA (1)...(19): siRNA sense strand
gggaaccacuggagcaugu

SEQ ID NO: 255602 - RNA, 19 nt, Homo sapiens
  misc_RNA (1)...(19): siRNA sense strand
aaacccaaaugaagccaaa

SEQ ID NO: 255603 - RNA, 19 nt, Homo sapiens
  misc_RNA (1)...(19): siRNA sense strand
ggacuugcccauccuggaa

SEQ ID NO: 255604 - RNA, 19 nt, Homo sapiens
  misc_RNA (1)...(19): siRNA sense strand
ggagaaaguuccugauccu

SEQ ID NO: 255605 - RNA, 19 nt, Homo sapiens
  misc_RNA (1)...(19): siRNA sense strand
agaggaaccuuugcuucua

SEQ ID NO: 255606 - RNA, 19 nt, Homo sapiens
  misc_RNA (1)...(19): siRNA sense strand
cuguugagauccaagauuu

SEQ ID NO: 255607 - RNA, 19 nt, Homo sapiens
  misc_RNA (1)...(19): siRNA sense strand
caggugagcuacaaagucu

SEQ ID NO: 255608 - RNA, 19 nt, Homo sapiens
  misc_RNA (1)...(19): siRNA sense strand
ggaggccacuguccauugg

SEQ ID NO: 255609 - RNA, 19 nt, Homo sapiens
  misc_RNA (1)...(19): siRNA sense strand
gagaggaaccuuugcuucu

SEQ ID NO: 255610 - RNA, 19 nt, Homo sapiens
  misc_RNA (1)...(19): siRNA sense strand
gcugggagccucucaccaa

SEQ ID NO: 255611 - RNA, 19 nt, Homo sapiens
  misc_RNA (1)...(19): siRNA sense strand
ggaauuagcaccccuagug

SEQ ID NO: 255612 - RNA, 19 nt, Homo sapiens
  misc_RNA (1)...(19): siRNA sense strand
aaccuuugcuucuauggaa

SEQ ID NO: 255613 - RNA, 19 nt, Homo sapiens
  misc_RNA (1)...(19): siRNA sense strand
gagcugaguccagaaggaa

SEQ ID NO: 255614 - RNA, 19 nt, Homo sapiens
  misc_RNA (1)...(19): siRNA sense strand
gcugccggauggagaaaga

SEQ ID NO: 255615 - RNA, 19 nt, Homo sapiens
  misc_RNA (1)...(19): siRNA sense strand
gaaccuuugcuucuaugga

SEQ ID NO: 255616 - RNA, 19 nt, Homo sapiens
  misc_RNA (1)...(19): siRNA sense strand
gcaggugagcuacaaaguc

SEQ ID NO: 255617 - RNA, 19 nt, Homo sapiens
  misc_RNA (1)...(19): siRNA sense strand
ccuagaaacccaaaugaag

SEQ ID NO: 255618 - RNA, 19 nt, Homo sapiens
  misc_RNA (1)...(19): siRNA sense strand
aaccggagcugaagaccau

SEQ ID NO: 255619 - RNA, 19 nt, Homo sapiens
  misc_RNA (1)...(19): siRNA sense strand
gcagugcuacggaguugga

SEQ ID NO: 255620 - RNA, 19 nt, Homo sapiens
  misc_RNA (1)...(19): siRNA sense strand
agaaagaagaggauuugug

SEQ ID NO: 255621 - RNA, 19 nt, Homo sapiens
  misc_RNA (1)...(19): siRNA sense strand
acccugagguggaaaguuc

SEQ ID NO: 255622 - RNA, 19 nt, Homo sapiens
  misc_RNA (1)...(19): siRNA sense strand
gcugaguccagaaggaauu

SEQ ID NO: 255623 - RNA, 19 nt, Homo sapiens
  misc_RNA (1)...(19): siRNA sense strand
ccaccuacauggccaucuc

SEQ ID NO: 255624 - RNA, 19 nt, Homo sapiens
  misc_RNA (1)...(19): siRNA sense strand
ugagcugaguccagaagga

SEQ ID NO: 255625 - RNA, 19 nt, Homo sapiens
  misc_RNA (1)...(19): siRNA sense strand
ccaguuccacuaccgaaga

SEQ ID NO: 255626 - RNA, 19 nt, Homo sapiens
  misc_RNA (1)...(19): siRNA sense strand
ucuuuggucugcuuggauu

SEQ ID NO: 255627 - RNA, 19 nt, Homo sapiens
  misc_RNA (1)...(19): siRNA sense strand
caaaagauguguggguauc

SEQ ID NO: 255628 - RNA, 19 nt, Homo sapiens
  misc_RNA (1)...(19): siRNA sense strand
gaaccacuggagcauguag

SEQ ID NO: 255629 - RNA, 19 nt, Homo sapiens
  misc_RNA (1)...(19): siRNA sense strand
ccaccuaaggcacaaagug

SEQ ID NO: 255630 - RNA, 19 nt, Homo sapiens
  misc_RNA (1)...(19): siRNA sense strand
gcuacaaagucugguucug

SEQ ID NO: 255631 - RNA, 19 nt, Homo sapiens
  misc_RNA (1)...(19): siRNA sense strand
uacauggccaucucauaaa

SEQ ID NO: 255632 - RNA, 19 nt, Homo sapiens
  misc_RNA (1)...(19): siRNA sense strand
guucagggaggaauuagca

SEQ ID NO: 255633 - RNA, 19 nt, Homo sapiens
  misc_RNA (1)...(19): siRNA sense strand
acauggccaucucauaaag

SEQ ID NO: 255634 - RNA, 19 nt, Homo sapiens
  misc_RNA (1)...(19): siRNA sense strand
ccuacauggccaucucaua

SEQ ID NO: 255635 - RNA, 19 nt, Homo sapiens
  misc_RNA (1)...(19): siRNA sense strand
uggagaaagaagaggauuu

SEQ ID NO: 255636 - RNA, 19 nt, Homo sapiens
  misc_RNA (1)...(19): siRNA sense strand
ccgcuugacucuggguaug

SEQ ID NO: 255637 - RNA, 19 nt, Homo sapiens
  misc_RNA (1)...(19): siRNA sense strand
gugaguggcaacacacaga

SEQ ID NO: 255638 - RNA, 19 nt, Homo sapiens
  misc_RNA (1)...(19): siRNA sense strand
ccucagugcucuguuacca

SEQ ID NO: 255639 - RNA, 19 nt, Homo sapiens
  misc_RNA (1)...(19): siRNA sense strand
gaucugccaguuccacuac

SEQ ID NO: 255640 - RNA, 19 nt, Homo sapiens
  misc_RNA (1)...(19): siRNA sense strand
gcuaccaccuaaggcacaa

SEQ ID NO: 255641 - RNA, 19 nt, Homo sapiens
  misc_RNA (1)...(19): siRNA sense strand
aaaaguaccguuccaacaa

SEQ ID NO: 255642 - RNA, 19 nt, Homo sapiens
  misc_RNA (1)...(19): siRNA sense strand
gagaaagaagaggauuugu

SEQ ID NO: 255643 - RNA, 19 nt, Homo sapiens
  misc_RNA (1)...(19): siRNA sense strand
cugcagugcuacggaguug

SEQ ID NO: 255644 - RNA, 19 nt, Homo sapiens
  misc_RNA (1)...(19): siRNA sense strand
uggaggagaggaaccuuug

SEQ ID NO: 255645 - RNA, 19 nt, Homo sapiens
  misc_RNA (1)...(19): siRNA sense strand
caagagaucugccauccua

SEQ ID NO: 255646 - RNA, 19 nt, Homo sapiens
  misc_RNA (1)...(19): siRNA sense strand
agaaauacauggaguuuga

SEQ ID NO: 255647 - RNA, 19 nt, Homo sapiens
  misc_RNA (1)...(19): siRNA sense strand
uaauggaaauggcgauauu

SEQ ID NO: 255648 - RNA, 19 nt, Homo sapiens
  misc_RNA (1)...(19): siRNA sense strand
ccaagaaagcuaucucuga

SEQ ID NO: 255649 - RNA, 19 nt, Homo sapiens
  misc_RNA (1)...(19): siRNA sense strand
agaaagcuaucucugaguu

SEQ ID NO: 255650 - RNA, 19 nt, Homo sapiens
  misc_RNA (1)...(19): siRNA sense strand
ugaaacgaaugcuggagaa

SEQ ID NO: 255651 - RNA, 19 nt, Homo sapiens
  misc_RNA (1)...(19): siRNA sense strand
acauggaguuugaccuuaa

SEQ ID NO: 255652 - RNA, 19 nt, Homo sapiens
  misc_RNA (1)...(19): siRNA sense strand
gauaucaugucccugaaac

SEQ ID NO: 255653 - RNA, 19 nt, Homo sapiens
  misc_RNA (1)...(19): siRNA sense strand
agacucaccuagagcuaaa

SEQ ID NO: 255654 - RNA, 19 nt, Homo sapiens
  misc_RNA (1)...(19): siRNA sense strand
accuagagcuaaagaaauu

SEQ ID NO: 255655 - RNA, 19 nt, Homo sapiens
  misc_RNA (1)...(19): siRNA sense strand
ucaccuagagcuaaagaaa

SEQ ID NO: 255656 - RNA, 19 nt, Homo sapiens
  misc_RNA (1)...(19): siRNA sense strand
gaguuugaccuuaauggaa

SEQ ID NO: 255657 - RNA, 19 nt, Homo sapiens
  misc_RNA (1)...(19): siRNA sense strand
uacauggaguuugaccuua

SEQ ID NO: 255658 - RNA, 19 nt, Homo sapiens
  misc_RNA (1)...(19): siRNA sense strand
gaaagcuaucucugaguug

SEQ ID NO: 255659 - RNA, 19 nt, Homo sapiens
  misc_RNA (1)...(19): siRNA sense strand
gaaacgaaugcuggagaaa

SEQ ID NO: 255660 - RNA, 19 nt, Homo sapiens
  misc_RNA (1)...(19): siRNA sense strand
ggaguuugaccuuaaugga

SEQ ID NO: 255661 - RNA, 19 nt, Homo sapiens
  misc_RNA (1)...(19): siRNA sense strand
aguuugaccuuaauggaaa

SEQ ID NO: 255662 - RNA, 19 nt, Homo sapiens
  misc_RNA (1)...(19): siRNA sense strand
ucaugucccugaaacgaau

SEQ ID NO: 255663 - RNA, 19 nt, Homo sapiens
  misc_RNA (1)...(19): siRNA sense strand
cagcuacccugacuuucuc

SEQ ID NO: 255664 - RNA, 19 nt, Homo sapiens
  misc_RNA (1)...(19): siRNA sense strand
gagaaauacauggaguuug

SEQ ID NO: 255665 - RNA, 19 nt, Homo sapiens
  misc_RNA (1)...(19): siRNA sense strand
agagaaauacauggaguuu

SEQ ID NO: 255666 - RNA, 19 nt, Homo sapiens
  misc_RNA (1)...(19): siRNA sense strand
ggaugaugcugggcaagag

SEQ ID NO: 255667 - RNA, 19 nt, Homo sapiens
  misc_RNA (1)...(19): siRNA sense strand
cauggaguuugaccuuaau

SEQ ID NO: 255668 - RNA, 19 nt, Homo sapiens
  misc_RNA (1)...(19): siRNA sense strand
caagacucaccuagagcua

SEQ ID NO: 255669 - RNA, 19 nt, Homo sapiens
  misc_RNA (1)...(19): siRNA sense strand
agagaucugccauccuaaa

SEQ ID NO: 255670 - RNA, 19 nt, Homo sapiens
  misc_RNA (1)...(19): siRNA sense strand
cgaaugcuggagaaacuug

SEQ ID NO: 255671 - RNA, 19 nt, Homo sapiens
  misc_RNA (1)...(19): siRNA sense strand
gaugaugcugggcaagaga

SEQ ID NO: 255672 - RNA, 19 nt, Homo sapiens
  misc_RNA (1)...(19): siRNA sense strand
uaucaugucccugaaacga

SEQ ID NO: 255673 - RNA, 19 nt, Homo sapiens
  misc_RNA (1)...(19): siRNA sense strand
aacgaaugcuggagaaacu

SEQ ID NO: 255674 - RNA, 19 nt, Homo sapiens
  misc_RNA (1)...(19): siRNA sense strand
auacauggaguuugaccuu

SEQ ID NO: 255675 - RNA, 19 nt, Homo sapiens
  misc_RNA (1)...(19): siRNA sense strand
caagagaucugccauccua

SEQ ID NO: 255676 - RNA, 19 nt, Homo sapiens
  misc_RNA (1)...(19): siRNA sense strand
uaauggaaauggcgauauu

SEQ ID NO: 255677 - RNA, 19 nt, Homo sapiens
  misc_RNA (1)...(19): siRNA sense strand
ugaaacgaaugcuggagaa

SEQ ID NO: 255678 - RNA, 19 nt, Homo sapiens
  misc_RNA (1)...(19): siRNA sense strand
gauaucaugucccugaaac

SEQ ID NO: 255679 - RNA, 19 nt, Homo sapiens
  misc_RNA (1)...(19): siRNA sense strand
agacucaccuagagcuaaa

SEQ ID NO: 255680 - RNA, 19 nt, Homo sapiens
  misc_RNA (1)...(19): siRNA sense strand
accuagagcuaaagaaauu

SEQ ID NO: 255681 - RNA, 19 nt, Homo sapiens
  misc_RNA (1)...(19): siRNA sense strand
ucaccuagagcuaaagaaa

SEQ ID NO: 255682 - RNA, 19 nt, Homo sapiens
  misc_RNA (1)...(19): siRNA sense strand
gaguuugaccuuaauggaa

SEQ ID NO: 255683 - RNA, 19 nt, Homo sapiens
  misc_RNA (1)...(19): siRNA sense strand
gaaacgaaugcuggagaaa

SEQ ID NO: 255684 - RNA, 19 nt, Homo sapiens
  misc_RNA (1)...(19): siRNA sense strand
aguuugaccuuaauggaaa

SEQ ID NO: 255685 - RNA, 19 nt, Homo sapiens
  misc_RNA (1)...(19): siRNA sense strand
ggaguuugaccuuaaugga

SEQ ID NO: 255686 - RNA, 19 nt, Homo sapiens
  misc_RNA (1)...(19): siRNA sense strand
ucaugucccugaaacgaau

SEQ ID NO: 255687 - RNA, 19 nt, Homo sapiens
  misc_RNA (1)...(19): siRNA sense strand
cagcuacccugacuuucuc

SEQ ID NO: 255688 - RNA, 19 nt, Homo sapiens
  misc_RNA (1)...(19): siRNA sense strand
ggaugaugcugggcaagag

SEQ ID NO: 255689 - RNA, 19 nt, Homo sapiens
  misc_RNA (1)...(19): siRNA sense strand
caagacucaccuagagcua

SEQ ID NO: 255690 - RNA, 19 nt, Homo sapiens
  misc_RNA (1)...(19): siRNA sense strand
agagaucugccauccuaaa

SEQ ID NO: 255691 - RNA, 19 nt, Homo sapiens
  misc_RNA (1)...(19): siRNA sense strand
cgaaugcuggagaaacuug

SEQ ID NO: 255692 - RNA, 19 nt, Homo sapiens
  misc_RNA (1)...(19): siRNA sense strand
gaugaugcugggcaagaga

SEQ ID NO: 255693 - RNA, 19 nt, Homo sapiens
  misc_RNA (1)...(19): siRNA sense strand
uaucaugucccugaaacga

SEQ ID NO: 255694 - RNA, 19 nt, Homo sapiens
  misc_RNA (1)...(19): siRNA sense strand
aacgaaugcuggagaaacu

SEQ ID NO: 255695 - RNA, 19 nt, Homo sapiens
  misc_RNA (1)...(19): siRNA sense strand
caagagaucugccauccua

SEQ ID NO: 255696 - RNA, 19 nt, Homo sapiens
  misc_RNA (1)...(19): siRNA sense strand
uaauggaaauggcgauauu

SEQ ID NO: 255697 - RNA, 19 nt, Homo sapiens
  misc_RNA (1)...(19): siRNA sense strand
ccaagaaagcuaucucuga

SEQ ID NO: 255698 - RNA, 19 nt, Homo sapiens
  misc_RNA (1)...(19): siRNA sense strand
agaaagcuaucucugaguu

SEQ ID NO: 255699 - RNA, 19 nt, Homo sapiens
  misc_RNA (1)...(19): siRNA sense strand
ugaaacgaaugcuggagaa

SEQ ID NO: 255700 - RNA, 19 nt, Homo sapiens
  misc_RNA (1)...(19): siRNA sense strand
gauaucaugucccugaaac

SEQ ID NO: 255701 - RNA, 19 nt, Homo sapiens
  misc_RNA (1)...(19): siRNA sense strand
agacucaccuagagcuaaa

SEQ ID NO: 255702 - RNA, 19 nt, Homo sapiens
  misc_RNA (1)...(19): siRNA sense strand
accuagagcuaaagaaauu

SEQ ID NO: 255703 - RNA, 19 nt, Homo sapiens
  misc_RNA (1)...(19): siRNA sense strand
ucaccuagagcuaaagaaa

SEQ ID NO: 255704 - RNA, 19 nt, Homo sapiens
  misc_RNA (1)...(19): siRNA sense strand
gaguuugaccuuaauggaa

SEQ ID NO: 255705 - RNA, 19 nt, Homo sapiens
  misc_RNA (1)...(19): siRNA sense strand
gaaacgaaugcuggagaaa

SEQ ID NO: 255706 - RNA, 19 nt, Homo sapiens
  misc_RNA (1)...(19): siRNA sense strand
gaaagcuaucucugaguug

SEQ ID NO: 255707 - RNA, 19 nt, Homo sapiens
  misc_RNA (1)...(19): siRNA sense strand
ggaguuugaccuuaaugga

SEQ ID NO: 255708 - RNA, 19 nt, Homo sapiens
  misc_RNA (1)...(19): siRNA sense strand
aguuugaccuuaauggaaa

SEQ ID NO: 255709 - RNA, 19 nt, Homo sapiens
  misc_RNA (1)...(19): siRNA sense strand
ucaugucccugaaacgaau

SEQ ID NO: 255710 - RNA, 19 nt, Homo sapiens
  misc_RNA (1)...(19): siRNA sense strand
cagcuacccugacuuucuc

SEQ ID NO: 255711 - RNA, 19 nt, Homo sapiens
  misc_RNA (1)...(19): siRNA sense strand
ggaugaugcugggcaagag

SEQ ID NO: 255712 - RNA, 19 nt, Homo sapiens
  misc_RNA (1)...(19): siRNA sense strand
caagacucaccuagagcua

SEQ ID NO: 255713 - RNA, 19 nt, Homo sapiens
  misc_RNA (1)...(19): siRNA sense strand
agagaucugccauccuaaa

SEQ ID NO: 255714 - RNA, 19 nt, Homo sapiens
  misc_RNA (1)...(19): siRNA sense strand
cgaaugcuggagaaacuug

SEQ ID NO: 255715 - RNA, 19 nt, Homo sapiens
  misc_RNA (1)...(19): siRNA sense strand
gaugaugcugggcaagaga

SEQ ID NO: 255716 - RNA, 19 nt, Homo sapiens
  misc_RNA (1)...(19): siRNA sense strand
uaucaugucccugaaacga

SEQ ID NO: 255717 - RNA, 19 nt, Homo sapiens
  misc_RNA (1)...(19): siRNA sense strand
aacgaaugcuggagaaacu

SEQ ID NO: 255718 - RNA, 19 nt, Homo sapiens
  misc_RNA (1)...(19): siRNA sense strand
gaaaggaagugaaugguuu

SEQ ID NO: 255719 - RNA, 19 nt, Homo sapiens
  misc_RNA (1)...(19): siRNA sense strand
gcacugcccucucaccuua

SEQ ID NO: 255720 - RNA, 19 nt, Homo sapiens
  misc_RNA (1)...(19): siRNA sense strand
gaagaaagguggcguuuua

SEQ ID NO: 255721 - RNA, 19 nt, Homo sapiens
  misc_RNA (1)...(19): siRNA sense strand
gcauuaagcuuccaaauag

SEQ ID NO: 255722 - RNA, 19 nt, Homo sapiens
  misc_RNA (1)...(19): siRNA sense strand
gaaaugugcuugcucaaug

SEQ ID NO: 255723 - RNA, 19 nt, Homo sapiens
  misc_RNA (1)...(19): siRNA sense strand
gaaugugacuucaaaggua

SEQ ID NO: 255724 - RNA, 19 nt, Homo sapiens
  misc_RNA (1)...(19): siRNA sense strand
gguaagaauucaucucaua

SEQ ID NO: 255725 - RNA, 19 nt, Homo sapiens
  misc_RNA (1)...(19): siRNA sense strand
ucaaguaucucucucagua

SEQ ID NO: 255726 - RNA, 19 nt, Homo sapiens
  misc_RNA (1)...(19): siRNA sense strand
agacggagcugcuuaguaa

SEQ ID NO: 255727 - RNA, 19 nt, Homo sapiens
  misc_RNA (1)...(19): siRNA sense strand
caguaugccucaaauauua

SEQ ID NO: 255728 - RNA, 19 nt, Homo sapiens
  misc_RNA (1)...(19): siRNA sense strand
ggaaagagcugagguugga

SEQ ID NO: 255729 - RNA, 19 nt, Homo sapiens
  misc_RNA (1)...(19): siRNA sense strand
ggagaaaccauccagaaua

SEQ ID NO: 255730 - RNA, 19 nt, Homo sapiens
  misc_RNA (1)...(19): siRNA sense strand
gagaaaccauccagaauau

SEQ ID NO: 255731 - RNA, 19 nt, Homo sapiens
  misc_RNA (1)...(19): siRNA sense strand
gaagggcaguaaagauaua

SEQ ID NO: 255732 - RNA, 19 nt, Homo sapiens
  misc_RNA (1)...(19): siRNA sense strand
guaaagcacuuauggauag

SEQ ID NO: 255733 - RNA, 19 nt, Homo sapiens
  misc_RNA (1)...(19): siRNA sense strand
ggacauuugugaagauauu

SEQ ID NO: 255734 - RNA, 19 nt, Homo sapiens
  misc_RNA (1)...(19): siRNA sense strand
gcaagugcaucucaugaaa

SEQ ID NO: 255735 - RNA, 19 nt, Homo sapiens
  misc_RNA (1)...(19): siRNA sense strand
gcaaugggcuucuggacuu

SEQ ID NO: 255736 - RNA, 19 nt, Homo sapiens
  misc_RNA (1)...(19): siRNA sense strand
gcaaaugguugaucuaaag

SEQ ID NO: 255737 - RNA, 19 nt, Homo sapiens
  misc_RNA (1)...(19): siRNA sense strand
ggagguaucucaaguaucu

SEQ ID NO: 255738 - RNA, 19 nt, Homo sapiens
  misc_RNA (1)...(19): siRNA sense strand
gaaacagaguucucccuaa

SEQ ID NO: 255739 - RNA, 19 nt, Homo sapiens
  misc_RNA (1)...(19): siRNA sense strand
ggagaagaauuacaaggaa

SEQ ID NO: 255740 - RNA, 19 nt, Homo sapiens
  misc_RNA (1)...(19): siRNA sense strand
ggacaaagcgugaaaauaa

SEQ ID NO: 255741 - RNA, 19 nt, Homo sapiens
  misc_RNA (1)...(19): siRNA sense strand
caucagagauugcuuuaau

SEQ ID NO: 255742 - RNA, 19 nt, Homo sapiens
  misc_RNA (1)...(19): siRNA sense strand
gaagauuguccuccacuua

SEQ ID NO: 255743 - RNA, 19 nt, Homo sapiens
  misc_RNA (1)...(19): siRNA sense strand
guacuuaucucucucaucu

SEQ ID NO: 255744 - RNA, 19 nt, Homo sapiens
  misc_RNA (1)...(19): siRNA sense strand
gaugacgacuccaguauug

SEQ ID NO: 255745 - RNA, 19 nt, Homo sapiens
  misc_RNA (1)...(19): siRNA sense strand
ugacauagccucuucacua

SEQ ID NO: 255746 - RNA, 19 nt, Homo sapiens
  misc_RNA (1)...(19): siRNA sense strand
aaacagaguucucccuaaa

SEQ ID NO: 255747 - RNA, 19 nt, Homo sapiens
  misc_RNA (1)...(19): siRNA sense strand
gaagauauuucugaucaug

SEQ ID NO: 255748 - RNA, 19 nt, Homo sapiens
  misc_RNA (1)...(19): siRNA sense strand
ggaacugucugaaaugaau

SEQ ID NO: 255749 - RNA, 19 nt, Homo sapiens
  misc_RNA (1)...(19): siRNA sense strand
gaacugaaaggauggcuaa

SEQ ID NO: 255750 - RNA, 19 nt, Homo sapiens
  misc_RNA (1)...(19): siRNA sense strand
gggcuuagaugacaaggaa

SEQ ID NO: 255751 - RNA, 19 nt, Homo sapiens
  misc_RNA (1)...(19): siRNA sense strand
caagaacuccaaccuguua

SEQ ID NO: 255752 - RNA, 19 nt, Homo sapiens
  misc_RNA (1)...(19): siRNA sense strand
cccuaaagcugcugucuua

SEQ ID NO: 255753 - RNA, 19 nt, Homo sapiens
  misc_RNA (1)...(19): siRNA sense strand
uaacuaagagucucaguaa

SEQ ID NO: 255754 - RNA, 19 nt, Homo sapiens
  misc_RNA (1)...(19): siRNA sense strand
caaaugaucuccuugaaaa

SEQ ID NO: 255755 - RNA, 19 nt, Homo sapiens
  misc_RNA (1)...(19): siRNA sense strand
gagcuuauccgaaguguug

SEQ ID NO: 255756 - RNA, 19 nt, Homo sapiens
  misc_RNA (1)...(19): siRNA sense strand
gagaagaauuacaaggaaa

SEQ ID NO: 255757 - RNA, 19 nt, Homo sapiens
  misc_RNA (1)...(19): siRNA sense strand
agaaacaacugcaauacuu

SEQ ID NO: 255758 - RNA, 19 nt, Homo sapiens
  misc_RNA (1)...(19): siRNA sense strand
gaaaccauccagaauauug

SEQ ID NO: 255759 - RNA, 19 nt, Homo sapiens
  misc_RNA (1)...(19): siRNA sense strand
gagaagcucugacaaaugc

SEQ ID NO: 255760 - RNA, 19 nt, Homo sapiens
  misc_RNA (1)...(19): siRNA sense strand
gcaaauccaugcccuccuu

SEQ ID NO: 255761 - RNA, 19 nt, Homo sapiens
  misc_RNA (1)...(19): siRNA sense strand
gaagagcugugcaucaaag

SEQ ID NO: 255762 - RNA, 19 nt, Homo sapiens
  misc_RNA (1)...(19): siRNA sense strand
guaaugaggacccugguua

SEQ ID NO: 255763 - RNA, 19 nt, Homo sapiens
  misc_RNA (1)...(19): siRNA sense strand
gaaauggacauaaguaaca

SEQ ID NO: 255764 - RNA, 19 nt, Homo sapiens
  misc_RNA (1)...(19): siRNA sense strand
gaaaggcaaugguggaaag

SEQ ID NO: 255765 - RNA, 19 nt, Homo sapiens
  misc_RNA (1)...(19): siRNA sense strand
ggaugacucaggacaauua

SEQ ID NO: 255766 - RNA, 19 nt, Homo sapiens
  misc_RNA (1)...(19): siRNA sense strand
gugaagauauuucugauca

SEQ ID NO: 255767 - RNA, 19 nt, Homo sapiens
  misc_RNA (1)...(19): siRNA sense strand
gaaaguggaagccugguaa

SEQ ID NO: 255768 - RNA, 19 nt, Homo sapiens
  misc_RNA (1)...(19): siRNA sense strand
ugaaggacauggacucuga

SEQ ID NO: 255769 - RNA, 19 nt, Homo sapiens
  misc_RNA (1)...(19): siRNA sense strand
uaacucaaaucaaggagaa

SEQ ID NO: 255770 - RNA, 19 nt, Homo sapiens
  misc_RNA (1)...(19): siRNA sense strand
ggagagcuuucuuauacuu

SEQ ID NO: 255771 - RNA, 19 nt, Homo sapiens
  misc_RNA (1)...(19): siRNA sense strand
gaggagguaucucaaguau

SEQ ID NO: 255772 - RNA, 19 nt, Homo sapiens
  misc_RNA (1)...(19): siRNA sense strand
caaauggagagcuuucuua

SEQ ID NO: 255773 - RNA, 19 nt, Homo sapiens
  misc_RNA (1)...(19): siRNA sense strand
ggaagauauugaaugcuuu

SEQ ID NO: 255774 - RNA, 19 nt, Homo sapiens
  misc_RNA (1)...(19): siRNA sense strand
ccaauuacauagaagagaa

SEQ ID NO: 255775 - RNA, 19 nt, Homo sapiens
  misc_RNA (1)...(19): siRNA sense strand
gaacaaugaauacugagaa

SEQ ID NO: 255776 - RNA, 19 nt, Homo sapiens
  misc_RNA (1)...(19): siRNA sense strand
gcuaagagauacagagcuu

SEQ ID NO: 255777 - RNA, 19 nt, Homo sapiens
  misc_RNA (1)...(19): siRNA sense strand
gaccugcucucuccugaaa

SEQ ID NO: 255778 - RNA, 19 nt, Homo sapiens
  misc_RNA (1)...(19): siRNA sense strand
gaaagaggcaaaugguuga

SEQ ID NO: 255779 - RNA, 19 nt, Homo sapiens
  misc_RNA (1)...(19): siRNA sense strand
ggaggucaccaauuacaua

SEQ ID NO: 255780 - RNA, 19 nt, Homo sapiens
  misc_RNA (1)...(19): siRNA sense strand
gcaacgacgucgaggaguu

SEQ ID NO: 255781 - RNA, 19 nt, Homo sapiens
  misc_RNA (1)...(19): siRNA sense strand
gaaacaacugcaauacuuu

SEQ ID NO: 255782 - RNA, 19 nt, Homo sapiens
  misc_RNA (1)...(19): siRNA sense strand
uuaguaagguugaagcuuu

SEQ ID NO: 255783 - RNA, 19 nt, Homo sapiens
  misc_RNA (1)...(19): siRNA sense strand
ugagugacauucuuucuga

SEQ ID NO: 255784 - RNA, 19 nt, Homo sapiens
  misc_RNA (1)...(19): siRNA sense strand
agacagaaguauuggcuuu

SEQ ID NO: 255785 - RNA, 19 nt, Homo sapiens
  misc_RNA (1)...(19): siRNA sense strand
gagcugagguuggaaagga

SEQ ID NO: 255786 - RNA, 19 nt, Homo sapiens
  misc_RNA (1)...(19): siRNA sense strand
ggucaccaauuacauagaa

SEQ ID NO: 255787 - RNA, 19 nt, Homo sapiens
  misc_RNA (1)...(19): siRNA sense strand
gggcuagacuacauaaaga

SEQ ID NO: 255788 - RNA, 19 nt, Homo sapiens
  misc_RNA (1)...(19): siRNA sense strand
gcacugaugaugaagauga

SEQ ID NO: 255789 - RNA, 19 nt, Homo sapiens
  misc_RNA (1)...(19): siRNA sense strand
gguugaagcuuugaagaaa

SEQ ID NO: 255790 - RNA, 19 nt, Homo sapiens
  misc_RNA (1)...(19): siRNA sense strand
ggaagaguuugcugauaug

SEQ ID NO: 255791 - RNA, 19 nt, Homo sapiens
  misc_RNA (1)...(19): siRNA sense strand
agagauggaugaccuuaaa

SEQ ID NO: 255792 - RNA, 19 nt, Homo sapiens
  misc_RNA (1)...(19): siRNA sense strand
uaaaggacauuugugaaga

SEQ ID NO: 255793 - RNA, 19 nt, Homo sapiens
  misc_RNA (1)...(19): siRNA sense strand
ucucagaacuggcuuuaga

SEQ ID NO: 255794 - RNA, 19 nt, Homo sapiens
  misc_RNA (1)...(19): siRNA sense strand
gaauuacagaccuggauua

SEQ ID NO: 255795 - RNA, 19 nt, Homo sapiens
  misc_RNA (1)...(19): siRNA sense strand
ccacuuaccugaaauugag

SEQ ID NO: 255796 - RNA, 19 nt, Homo sapiens
  misc_RNA (1)...(19): siRNA sense strand
ugaaaucuauccaaccuau

SEQ ID NO: 255797 - RNA, 19 nt, Homo sapiens
  misc_RNA (1)...(19): siRNA sense strand
ccugacagauccaaacuuu

SEQ ID NO: 255798 - RNA, 19 nt, Homo sapiens
  misc_RNA (1)...(19): siRNA sense strand
uauccgaaguguugguuua

SEQ ID NO: 255799 - RNA, 19 nt, Homo sapiens
  misc_RNA (1)...(19): siRNA sense strand
uggaugaccuuaaacugua

SEQ ID NO: 255800 - RNA, 19 nt, Homo sapiens
  misc_RNA (1)...(19): siRNA sense strand
gagacacacuugaguuuua

SEQ ID NO: 255801 - RNA, 19 nt, Homo sapiens
  misc_RNA (1)...(19): siRNA sense strand
caaggaagauauugaaugc

SEQ ID NO: 255802 - RNA, 19 nt, Homo sapiens
  misc_RNA (1)...(19): siRNA sense strand
ccacaauguugaacucuau

SEQ ID NO: 255803 - RNA, 19 nt, Homo sapiens
  misc_RNA (1)...(19): siRNA sense strand
ggaaaggaaucugagacuu

SEQ ID NO: 255804 - RNA, 19 nt, Homo sapiens
  misc_RNA (1)...(19): siRNA sense strand
ggucaagccuccucuccaa

SEQ ID NO: 255805 - RNA, 19 nt, Homo sapiens
  misc_RNA (1)...(19): siRNA sense strand
gcagugagaugaccaaucc

SEQ ID NO: 255806 - RNA, 19 nt, Homo sapiens
  misc_RNA (1)...(19): siRNA sense strand
ccaaacagcucucccuuuu

SEQ ID NO: 255807 - RNA, 19 nt, Homo sapiens
  misc_RNA (1)...(19): siRNA sense strand
gaugaaauggacauaagua

SEQ ID NO: 255808 - RNA, 19 nt, Homo sapiens
  misc_RNA (1)...(19): siRNA sense strand
gagaagaggcaaugaagga

SEQ ID NO: 255809 - RNA, 19 nt, Homo sapiens
  misc_RNA (1)...(19): siRNA sense strand
cgacugcuauaaagagaaa

SEQ ID NO: 255810 - RNA, 19 nt, Homo sapiens
  misc_RNA (1)...(19): siRNA sense strand
ugcaacagaugaugaaauu

SEQ ID NO: 255811 - RNA, 19 nt, Homo sapiens
  misc_RNA (1)...(19): siRNA sense strand
gaagaagagcugugcauca

SEQ ID NO: 255812 - RNA, 19 nt, Homo sapiens
  misc_RNA (1)...(19): siRNA sense strand
gugacgagcucucucuuug

SEQ ID NO: 255813 - RNA, 19 nt, Homo sapiens
  misc_RNA (1)...(19): siRNA sense strand
gacauagccucuucacuag

SEQ ID NO: 255814 - RNA, 19 nt, Homo sapiens
  misc_RNA (1)...(19): siRNA sense strand
gaauuuguuucccaagaug

SEQ ID NO: 255815 - RNA, 19 nt, Homo sapiens
  misc_RNA (1)...(19): siRNA sense strand
gagaaaguguuggagcauu

SEQ ID NO: 255816 - RNA, 19 nt, Homo sapiens
  misc_RNA (1)...(19): siRNA sense strand
gaacaucuggacccacaaa

SEQ ID NO: 255817 - RNA, 19 nt, Homo sapiens
  misc_RNA (1)...(19): siRNA sense strand
gagaugcaguuaacguguu

SEQ ID NO: 255818 - RNA, 19 nt, Homo sapiens
  misc_RNA (1)...(19): siRNA sense strand
gaggaaagcugaucaugaa

SEQ ID NO: 255819 - RNA, 19 nt, Homo sapiens
  misc_RNA (1)...(19): siRNA sense strand
uaaaugagcuccuuaaaca

SEQ ID NO: 255820 - RNA, 19 nt, Homo sapiens
  misc_RNA (1)...(19): siRNA sense strand
guagaaaccuucccaauuc

SEQ ID NO: 255821 - RNA, 19 nt, Homo sapiens
  misc_RNA (1)...(19): siRNA sense strand
ggacaugaguuuauuccua

SEQ ID NO: 255822 - RNA, 19 nt, Homo sapiens
  misc_RNA (1)...(19): siRNA sense strand
gcaacuggcucguucaauu

SEQ ID NO: 255823 - RNA, 19 nt, Homo sapiens
  misc_RNA (1)...(19): siRNA sense strand
ugaaagagcuccaggauca

SEQ ID NO: 255824 - RNA, 19 nt, Homo sapiens
  misc_RNA (1)...(19): siRNA sense strand
agaaagaugugcuaaauga

SEQ ID NO: 255825 - RNA, 19 nt, Homo sapiens
  misc_RNA (1)...(19): siRNA sense strand
ugaaagaaauggagaagaa

SEQ ID NO: 255826 - RNA, 19 nt, Homo sapiens
  misc_RNA (1)...(19): siRNA sense strand
ugaaagagcuggagaucaa

SEQ ID NO: 255827 - RNA, 19 nt, Homo sapiens
  misc_RNA (1)...(19): siRNA sense strand
gaugauggcuagacacaaa

SEQ ID NO: 255828 - RNA, 19 nt, Homo sapiens
  misc_RNA (1)...(19): siRNA sense strand
gaagagagccagauucgaa

SEQ ID NO: 255829 - RNA, 19 nt, Homo sapiens
  misc_RNA (1)...(19): siRNA sense strand
cuaugaagcuucuuaguaa

SEQ ID NO: 255830 - RNA, 19 nt, Homo sapiens
  misc_RNA (1)...(19): siRNA sense strand
ggauaaacauggacaucua

SEQ ID NO: 255831 - RNA, 19 nt, Homo sapiens
  misc_RNA (1)...(19): siRNA sense strand
gcagaaauuuccaaacaug

SEQ ID NO: 255832 - RNA, 19 nt, Homo sapiens
  misc_RNA (1)...(19): siRNA sense strand
gcuggagacugccaaguua

SEQ ID NO: 255833 - RNA, 19 nt, Homo sapiens
  misc_RNA (1)...(19): siRNA sense strand
caggagagauuuacugauu

SEQ ID NO: 255834 - RNA, 19 nt, Homo sapiens
  misc_RNA (1)...(19): siRNA sense strand
guaaagaauugcagcagaa

SEQ ID NO: 255835 - RNA, 19 nt, Homo sapiens
  misc_RNA (1)...(19): siRNA sense strand
ggcaaagaaucuguuauua

SEQ ID NO: 255836 - RNA, 19 nt, Homo sapiens
  misc_RNA (1)...(19): siRNA sense strand
gagaauagaaagcuacaua

SEQ ID NO: 255837 - RNA, 19 nt, Homo sapiens
  misc_RNA (1)...(19): siRNA sense strand
ugaagaaagucaagagauu

SEQ ID NO: 255838 - RNA, 19 nt, Homo sapiens
  misc_RNA (1)...(19): siRNA sense strand
ggagagauuuacugauuug

SEQ ID NO: 255839 - RNA, 19 nt, Homo sapiens
  misc_RNA (1)...(19): siRNA sense strand
uauagcaccuugcaaagua

SEQ ID NO: 255840 - RNA, 19 nt, Homo sapiens
  misc_RNA (1)...(19): siRNA sense strand
gaaauaagcgcagcagcua

SEQ ID NO: 255841 - RNA, 19 nt, Homo sapiens
  misc_RNA (1)...(19): siRNA sense strand
gaaggagaauagaaagcua

SEQ ID NO: 255842 - RNA, 19 nt, Homo sapiens
  misc_RNA (1)...(19): siRNA sense strand
gaucaaguaucagaaagaa

SEQ ID NO: 255843 - RNA, 19 nt, Homo sapiens
  misc_RNA (1)...(19): siRNA sense strand
uagaauauguggccuagaa

SEQ ID NO: 255844 - RNA, 19 nt, Homo sapiens
  misc_RNA (1)...(19): siRNA sense strand
gagauuuacugauuuggaa

SEQ ID NO: 255845 - RNA, 19 nt, Homo sapiens
  misc_RNA (1)...(19): siRNA sense strand
aaacaggcaugguacauug

SEQ ID NO: 255846 - RNA, 19 nt, Homo sapiens
  misc_RNA (1)...(19): siRNA sense strand
ccaaggauauuccagauuc

SEQ ID NO: 255847 - RNA, 19 nt, Homo sapiens
  misc_RNA (1)...(19): siRNA sense strand
gaugauggguuuccagaau

SEQ ID NO: 255848 - RNA, 19 nt, Homo sapiens
  misc_RNA (1)...(19): siRNA sense strand
cagcuggaaucuaacaaua

SEQ ID NO: 255849 - RNA, 19 nt, Homo sapiens
  misc_RNA (1)...(19): siRNA sense strand
ucucaucugugcuuucuua

SEQ ID NO: 255850 - RNA, 19 nt, Homo sapiens
  misc_RNA (1)...(19): siRNA sense strand
gcagaagacuaugauguug

SEQ ID NO: 255851 - RNA, 19 nt, Homo sapiens
  misc_RNA (1)...(19): siRNA sense strand
aagagaagaucaugaaaga

SEQ ID NO: 255852 - RNA, 19 nt, Homo sapiens
  misc_RNA (1)...(19): siRNA sense strand
agaagaagcugaacauaag

SEQ ID NO: 255853 - RNA, 19 nt, Homo sapiens
  misc_RNA (1)...(19): siRNA sense strand
ggaugaaaccaaugcuuua

SEQ ID NO: 255854 - RNA, 19 nt, Homo sapiens
  misc_RNA (1)...(19): siRNA sense strand
gcagaagguuuaugcuaug

SEQ ID NO: 255855 - RNA, 19 nt, Homo sapiens
  misc_RNA (1)...(19): siRNA sense strand
gaaagauguucaagagcaa

SEQ ID NO: 255856 - RNA, 19 nt, Homo sapiens
  misc_RNA (1)...(19): siRNA sense strand
uuagggagcuuaaagaaga

SEQ ID NO: 255857 - RNA, 19 nt, Homo sapiens
  misc_RNA (1)...(19): siRNA sense strand
gaaaguggagaaccuauug

SEQ ID NO: 255858 - RNA, 19 nt, Homo sapiens
  misc_RNA (1)...(19): siRNA sense strand
gaagaaagagauauuaugg

SEQ ID NO: 255859 - RNA, 19 nt, Homo sapiens
  misc_RNA (1)...(19): siRNA sense strand
gcuaugaagcuucuuagua

SEQ ID NO: 255860 - RNA, 19 nt, Homo sapiens
  misc_RNA (1)...(19): siRNA sense strand
guuagaaaccugacauuaa

SEQ ID NO: 255861 - RNA, 19 nt, Homo sapiens
  misc_RNA (1)...(19): siRNA sense strand
gcacguguaugaagaugga

SEQ ID NO: 255862 - RNA, 19 nt, Homo sapiens
  misc_RNA (1)...(19): siRNA sense strand
gaaacuaauaggacacuaa

SEQ ID NO: 255863 - RNA, 19 nt, Homo sapiens
  misc_RNA (1)...(19): siRNA sense strand
gcagaagaaacaggaauua

SEQ ID NO: 255864 - RNA, 19 nt, Homo sapiens
  misc_RNA (1)...(19): siRNA sense strand
ucaaauauccacugagaaa

SEQ ID NO: 255865 - RNA, 19 nt, Homo sapiens
  misc_RNA (1)...(19): siRNA sense strand
gagauuaccuuacggaaaa

SEQ ID NO: 255866 - RNA, 19 nt, Homo sapiens
  misc_RNA (1)...(19): siRNA sense strand
gcauugggauaacauaaga

SEQ ID NO: 255867 - RNA, 19 nt, Homo sapiens
  misc_RNA (1)...(19): siRNA sense strand
guaaagacagugacauuga

SEQ ID NO: 255868 - RNA, 19 nt, Homo sapiens
  misc_RNA (1)...(19): siRNA sense strand
caaacuugguaaagaauug

SEQ ID NO: 255869 - RNA, 19 nt, Homo sapiens
  misc_RNA (1)...(19): siRNA sense strand
caagggacaugaguuuauu

SEQ ID NO: 255870 - RNA, 19 nt, Homo sapiens
  misc_RNA (1)...(19): siRNA sense strand
gacagcauccuuucuuuaa

SEQ ID NO: 255871 - RNA, 19 nt, Homo sapiens
  misc_RNA (1)...(19): siRNA sense strand
cuaaagaaauuccaaggau

SEQ ID NO: 255872 - RNA, 19 nt, Homo sapiens
  misc_RNA (1)...(19): siRNA sense strand
agaagacuaugauguugua

SEQ ID NO: 255873 - RNA, 19 nt, Homo sapiens
  misc_RNA (1)...(19): siRNA sense strand
gagaucaccuugaccaaag

SEQ ID NO: 255874 - RNA, 19 nt, Homo sapiens
  misc_RNA (1)...(19): siRNA sense strand
ggaagaaagagauauuaug

SEQ ID NO: 255875 - RNA, 19 nt, Homo sapiens
  misc_RNA (1)...(19): siRNA sense strand
gaauugaacugcagaugac

SEQ ID NO: 255876 - RNA, 19 nt, Homo sapiens
  misc_RNA (1)...(19): siRNA sense strand
auauggagcuuaaaucuga

SEQ ID NO: 255877 - RNA, 19 nt, Homo sapiens
  misc_RNA (1)...(19): siRNA sense strand
aaacucaagcugugaauaa

SEQ ID NO: 255878 - RNA, 19 nt, Homo sapiens
  misc_RNA (1)...(19): siRNA sense strand
cgaagaagccaaaucagaa

SEQ ID NO: 255879 - RNA, 19 nt, Homo sapiens
  misc_RNA (1)...(19): siRNA sense strand
gaaagcugaucaugaagca

SEQ ID NO: 255880 - RNA, 19 nt, Homo sapiens
  misc_RNA (1)...(19): siRNA sense strand
ugacaaaggagauguagaa

SEQ ID NO: 255881 - RNA, 19 nt, Homo sapiens
  misc_RNA (1)...(19): siRNA sense strand
acaacaugcucuuggauaa

SEQ ID NO: 255882 - RNA, 19 nt, Homo sapiens
  misc_RNA (1)...(19): siRNA sense strand
caaaggagauguagaaacc

SEQ ID NO: 255883 - RNA, 19 nt, Homo sapiens
  misc_RNA (1)...(19): siRNA sense strand
gauuauagcaccuugcaaa

SEQ ID NO: 255884 - RNA, 19 nt, Homo sapiens
  misc_RNA (1)...(19): siRNA sense strand
gaauagaaagcuacauaug

SEQ ID NO: 255885 - RNA, 19 nt, Homo sapiens
  misc_RNA (1)...(19): siRNA sense strand
agaagcagcuauuaacaga

SEQ ID NO: 255886 - RNA, 19 nt, Homo sapiens
  misc_RNA (1)...(19): siRNA sense strand
gaacauaaggccacaaagg

SEQ ID NO: 255887 - RNA, 19 nt, Homo sapiens
  misc_RNA (1)...(19): siRNA sense strand
gugcaaaucuguuaauacu

SEQ ID NO: 255888 - RNA, 19 nt, Homo sapiens
  misc_RNA (1)...(19): siRNA sense strand
ggauuuaccuacuauagag

SEQ ID NO: 255889 - RNA, 19 nt, Homo sapiens
  misc_RNA (1)...(19): siRNA sense strand
gaugaaggcagaagacuau

SEQ ID NO: 255890 - RNA, 19 nt, Homo sapiens
  misc_RNA (1)...(19): siRNA sense strand
gcaaagaaucuguuauuac

SEQ ID NO: 255891 - RNA, 19 nt, Homo sapiens
  misc_RNA (1)...(19): siRNA sense strand
ugaaaugcaggcacaaaua

SEQ ID NO: 255892 - RNA, 19 nt, Homo sapiens
  misc_RNA (1)...(19): siRNA sense strand
acagaaagaugugcuaaau

SEQ ID NO: 255893 - RNA, 19 nt, Homo sapiens
  misc_RNA (1)...(19): siRNA sense strand
gcauuaagacaguuagaaa

SEQ ID NO: 255894 - RNA, 19 nt, Homo sapiens
  misc_RNA (1)...(19): siRNA sense strand
caucugugcuuucuuaaca

SEQ ID NO: 255895 - RNA, 19 nt, Homo sapiens
  misc_RNA (1)...(19): siRNA sense strand
ccacaagggacaugaguuu

SEQ ID NO: 255896 - RNA, 19 nt, Homo sapiens
  misc_RNA (1)...(19): siRNA sense strand
gaaaugcaggcacaaauag

SEQ ID NO: 255897 - RNA, 19 nt, Homo sapiens
  misc_RNA (1)...(19): siRNA sense strand
gaaagaacugaaugaaaug

SEQ ID NO: 255898 - RNA, 19 nt, Homo sapiens
  misc_RNA (1)...(19): siRNA sense strand
uaaguuggcugagaucaug

SEQ ID NO: 255899 - RNA, 19 nt, Homo sapiens
  misc_RNA (1)...(19): siRNA sense strand
gcucgaagcagaacaguau

SEQ ID NO: 255900 - RNA, 19 nt, Homo sapiens
  misc_RNA (1)...(19): siRNA sense strand
caaaucagaagccaugaaa

SEQ ID NO: 255901 - RNA, 19 nt, Homo sapiens
  misc_RNA (1)...(19): siRNA sense strand
ucagucagcucuagaaucu

SEQ ID NO: 255902 - RNA, 19 nt, Homo sapiens
  misc_RNA (1)...(19): siRNA sense strand
gcagaaaguucaaaacaga

SEQ ID NO: 255903 - RNA, 19 nt, Homo sapiens
  misc_RNA (1)...(19): siRNA sense strand
aagaggaacuggaacagaa

SEQ ID NO: 255904 - RNA, 19 nt, Homo sapiens
  misc_RNA (1)...(19): siRNA sense strand
ggaugaaacaggcauggua

SEQ ID NO: 255905 - RNA, 19 nt, Homo sapiens
  misc_RNA (1)...(19): siRNA sense strand
ugaggcagaugauggguuu

SEQ ID NO: 255906 - RNA, 19 nt, Homo sapiens
  misc_RNA (1)...(19): siRNA sense strand
gaaauugacccagcagaug

SEQ ID NO: 255907 - RNA, 19 nt, Homo sapiens
  misc_RNA (1)...(19): siRNA sense strand
gaaaagagaaggagaauag

SEQ ID NO: 255908 - RNA, 19 nt, Homo sapiens
  misc_RNA (1)...(19): siRNA sense strand
aagcagcuauuaacagaaa

SEQ ID NO: 255909 - RNA, 19 nt, Homo sapiens
  misc_RNA (1)...(19): siRNA sense strand
uaagacaguuagaaagaga

SEQ ID NO: 255910 - RNA, 19 nt, Homo sapiens
  misc_RNA (1)...(19): siRNA sense strand
gaacaucuuagcaaugaga

SEQ ID NO: 255911 - RNA, 19 nt, Homo sapiens
  misc_RNA (1)...(19): siRNA sense strand
gaaaugggguggaagaaau

SEQ ID NO: 255912 - RNA, 19 nt, Homo sapiens
  misc_RNA (1)...(19): siRNA sense strand
cauaagaauucacuguguu

SEQ ID NO: 255913 - RNA, 19 nt, Homo sapiens
  misc_RNA (1)...(19): siRNA sense strand
cagaagccaugaaagaaau

SEQ ID NO: 255914 - RNA, 19 nt, Homo sapiens
  misc_RNA (1)...(19): siRNA sense strand
guaagaaggaacaagaauu

SEQ ID NO: 255915 - RNA, 19 nt, Homo sapiens
  misc_RNA (1)...(19): siRNA sense strand
guacgaaacaacacuaaga

SEQ ID NO: 255916 - RNA, 19 nt, Homo sapiens
  misc_RNA (1)...(19): siRNA sense strand
cagaugacauuggacagua

SEQ ID NO: 255917 - RNA, 19 nt, Homo sapiens
  misc_RNA (1)...(19): siRNA sense strand
aagagcaacugucaagauu

SEQ ID NO: 255918 - RNA, 19 nt, Homo sapiens
  misc_RNA (1)...(19): siRNA sense strand
aaacuucacuguugccuuu

SEQ ID NO: 255919 - RNA, 19 nt, Homo sapiens
  misc_RNA (1)...(19): siRNA sense strand
ggacaagcccaucuucgua

SEQ ID NO: 255920 - RNA, 19 nt, Homo sapiens
  misc_RNA (1)...(19): siRNA sense strand
ggaccaaguuugccauuca

SEQ ID NO: 255921 - RNA, 19 nt, Homo sapiens
  misc_RNA (1)...(19): siRNA sense strand
acagggaugugcaguauuu

SEQ ID NO: 255922 - RNA, 19 nt, Homo sapiens
  misc_RNA (1)...(19): siRNA sense strand
ccacaaaacuucacuguug

SEQ ID NO: 255923 - RNA, 19 nt, Homo sapiens
  misc_RNA (1)...(19): siRNA sense strand
gcagucuccuuccuucuug

SEQ ID NO: 255924 - RNA, 19 nt, Homo sapiens
  misc_RNA (1)...(19): siRNA sense strand
gaggacaagcugacuauug

SEQ ID NO: 255925 - RNA, 19 nt, Homo sapiens
  misc_RNA (1)...(19): siRNA sense strand
cagcagagcuccccaaguu

SEQ ID NO: 255926 - RNA, 19 nt, Homo sapiens
  misc_RNA (1)...(19): siRNA sense strand
gauccucggugacgucuuc

SEQ ID NO: 255927 - RNA, 19 nt, Homo sapiens
  misc_RNA (1)...(19): siRNA sense strand
caaguuugccauucaauau

SEQ ID NO: 255928 - RNA, 19 nt, Homo sapiens
  misc_RNA (1)...(19): siRNA sense strand
cuacagggaugugcaguau

SEQ ID NO: 255929 - RNA, 19 nt, Homo sapiens
  misc_RNA (1)...(19): siRNA sense strand
gacacuggcuccuccaauc

SEQ ID NO: 255930 - RNA, 19 nt, Homo sapiens
  misc_RNA (1)...(19): siRNA sense strand
ccaaguuugccauucaaua

SEQ ID NO: 255931 - RNA, 19 nt, Homo sapiens
  misc_RNA (1)...(19): siRNA sense strand
guaccucucucgaacuaca

SEQ ID NO: 255932 - RNA, 19 nt, Homo sapiens
  misc_RNA (1)...(19): siRNA sense strand
gaccaaguuugccauucaa

SEQ ID NO: 255933 - RNA, 19 nt, Homo sapiens
  misc_RNA (1)...(19): siRNA sense strand
gcucggaaaucccaaagcu

SEQ ID NO: 255934 - RNA, 19 nt, Homo sapiens
  misc_RNA (1)...(19): siRNA sense strand
ccgcaucccucuucaucga

SEQ ID NO: 255935 - RNA, 19 nt, Homo sapiens
  misc_RNA (1)...(19): siRNA sense strand
gagcaggggcuauuggaua

SEQ ID NO: 255936 - RNA, 19 nt, Homo sapiens
  misc_RNA (1)...(19): siRNA sense strand
cauccagacuacucgaaau

SEQ ID NO: 255937 - RNA, 19 nt, Homo sapiens
  misc_RNA (1)...(19): siRNA sense strand
gcgaggacaagcugacuau

SEQ ID NO: 255938 - RNA, 19 nt, Homo sapiens
  misc_RNA (1)...(19): siRNA sense strand
ggauauugggccucgguuu

SEQ ID NO: 255939 - RNA, 19 nt, Homo sapiens
  misc_RNA (1)...(19): siRNA sense strand
aggacaagcugacuauugg

SEQ ID NO: 255940 - RNA, 19 nt, Homo sapiens
  misc_RNA (1)...(19): siRNA sense strand
caggagaugccacuucuuc

SEQ ID NO: 255941 - RNA, 19 nt, Homo sapiens
  misc_RNA (1)...(19): siRNA sense strand
gaaucaagggugcaucagu

SEQ ID NO: 255942 - RNA, 19 nt, Homo sapiens
  misc_RNA (1)...(19): siRNA sense strand
ucguaccucucucgaacua

SEQ ID NO: 255943 - RNA, 19 nt, Homo sapiens
  misc_RNA (1)...(19): siRNA sense strand
cagugugcccugcugguua

SEQ ID NO: 255944 - RNA, 19 nt, Homo sapiens
  misc_RNA (1)...(19): siRNA sense strand
gagaugccacuucuucagu

SEQ ID NO: 255945 - RNA, 19 nt, Homo sapiens
  misc_RNA (1)...(19): siRNA sense strand
gacuauugguggaaucaag

SEQ ID NO: 255946 - RNA, 19 nt, Homo sapiens
  misc_RNA (1)...(19): siRNA sense strand
gauuacgucauccagacua

SEQ ID NO: 255947 - RNA, 19 nt, Homo sapiens
  misc_RNA (1)...(19): siRNA sense strand
gccaaugggaccaaguuug

SEQ ID NO: 255948 - RNA, 19 nt, Homo sapiens
  misc_RNA (1)...(19): siRNA sense strand
ggagaugccacuucuucag

SEQ ID NO: 255949 - RNA, 19 nt, Homo sapiens
  misc_RNA (1)...(19): siRNA sense strand
ggacccggcacacuacauc

SEQ ID NO: 255950 - RNA, 19 nt, Homo sapiens
  misc_RNA (1)...(19): siRNA sense strand
gauauugggccucgguuuu

SEQ ID NO: 255951 - RNA, 19 nt, Homo sapiens
  misc_RNA (1)...(19): siRNA sense strand
ccaaugggaccaaguuugc

SEQ ID NO: 255952 - RNA, 19 nt, Homo sapiens
  misc_RNA (1)...(19): siRNA sense strand
gggcacgucccucaucaca

SEQ ID NO: 255953 - RNA, 19 nt, Homo sapiens
  misc_RNA (1)...(19): siRNA sense strand
gggaccaaguuugccauuc

SEQ ID NO: 255954 - RNA, 19 nt, Homo sapiens
  misc_RNA (1)...(19): siRNA sense strand
gcugggaacgccuccacaa

SEQ ID NO: 255955 - RNA, 19 nt, Homo sapiens
  misc_RNA (1)...(19): siRNA sense strand
uuacaccaccgauuugauc

SEQ ID NO: 255956 - RNA, 19 nt, Homo sapiens
  misc_RNA (1)...(19): siRNA sense strand
gggacaagcccaucuucgu

SEQ ID NO: 255957 - RNA, 19 nt, Homo sapiens
  misc_RNA (1)...(19): siRNA sense strand
gcugcugccucugcugaau

SEQ ID NO: 255958 - RNA, 19 nt, Homo sapiens
  misc_RNA (1)...(19): siRNA sense strand
ggccaaugggaccaaguuu

SEQ ID NO: 255959 - RNA, 19 nt, Homo sapiens
  misc_RNA (1)...(19): siRNA sense strand
uggauaagccugucuucuc

SEQ ID NO: 255960 - RNA, 19 nt, Homo sapiens
  misc_RNA (1)...(19): siRNA sense strand
gaacgccuccacaaaacuu

SEQ ID NO: 255961 - RNA, 19 nt, Homo sapiens
  misc_RNA (1)...(19): siRNA sense strand
ccucacggcccaugauuac

SEQ ID NO: 255962 - RNA, 19 nt, Homo sapiens
  misc_RNA (1)...(19): siRNA sense strand
gaagaggaaggcuuucuaa

SEQ ID NO: 255963 - RNA, 19 nt, Homo sapiens
  misc_RNA (1)...(19): siRNA sense strand
gaggucgaauggucacaua

SEQ ID NO: 255964 - RNA, 19 nt, Homo sapiens
  misc_RNA (1)...(19): siRNA sense strand
aaagugaagaugagcauua

SEQ ID NO: 255965 - RNA, 19 nt, Homo sapiens
  misc_RNA (1)...(19): siRNA sense strand
gggagacggugcaagagaa

SEQ ID NO: 255966 - RNA, 19 nt, Homo sapiens
  misc_RNA (1)...(19): siRNA sense strand
gagugacacccgccauuua

SEQ ID NO: 255967 - RNA, 19 nt, Homo sapiens
  misc_RNA (1)...(19): siRNA sense strand
gcgagcaaauuccuacugu

SEQ ID NO: 255968 - RNA, 19 nt, Homo sapiens
  misc_RNA (1)...(19): siRNA sense strand
ggagugacacccgccauuu

SEQ ID NO: 255969 - RNA, 19 nt, Homo sapiens
  misc_RNA (1)...(19): siRNA sense strand
gucgaauggucacauauga

SEQ ID NO: 255970 - RNA, 19 nt, Homo sapiens
  misc_RNA (1)...(19): siRNA sense strand
gcaaggagaagcagcucuu

SEQ ID NO: 255971 - RNA, 19 nt, Homo sapiens
  misc_RNA (1)...(19): siRNA sense strand
ggucacauaugaacaucuc

SEQ ID NO: 255972 - RNA, 19 nt, Homo sapiens
  misc_RNA (1)...(19): siRNA sense strand
gcacagcccuagggaucau

SEQ ID NO: 255973 - RNA, 19 nt, Homo sapiens
  misc_RNA (1)...(19): siRNA sense strand
uuacagacacguagguauu

SEQ ID NO: 255974 - RNA, 19 nt, Homo sapiens
  misc_RNA (1)...(19): siRNA sense strand
aaacucgacuccaaaugca

SEQ ID NO: 255975 - RNA, 19 nt, Homo sapiens
  misc_RNA (1)...(19): siRNA sense strand
ugaagaggaaggcuuucua

SEQ ID NO: 255976 - RNA, 19 nt, Homo sapiens
  misc_RNA (1)...(19): siRNA sense strand
ggucgaauggucacauaug

SEQ ID NO: 255977 - RNA, 19 nt, Homo sapiens
  misc_RNA (1)...(19): siRNA sense strand
aagugaagaugagcauuau

SEQ ID NO: 255978 - RNA, 19 nt, Homo sapiens
  misc_RNA (1)...(19): siRNA sense strand
cauugaagaggaaggcuuu

SEQ ID NO: 255979 - RNA, 19 nt, Homo sapiens
  misc_RNA (1)...(19): siRNA sense strand
guugggagacggugcaaga

SEQ ID NO: 255980 - RNA, 19 nt, Homo sapiens
  misc_RNA (1)...(19): siRNA sense strand
ccaaaugcaaggagaagca

SEQ ID NO: 255981 - RNA, 19 nt, Homo sapiens
  misc_RNA (1)...(19): siRNA sense strand
cccuagggaucauugaaga

SEQ ID NO: 255982 - RNA, 19 nt, Homo sapiens
  misc_RNA (1)...(19): siRNA sense strand
uggccgagcuagcaaccuu

SEQ ID NO: 255983 - RNA, 19 nt, Homo sapiens
  misc_RNA (1)...(19): siRNA sense strand
ggagacggugcaagagaau

SEQ ID NO: 255984 - RNA, 19 nt, Homo sapiens
  misc_RNA (1)...(19): siRNA sense strand
uccgagagguuguguuugg

SEQ ID NO: 255985 - RNA, 19 nt, Homo sapiens
  misc_RNA (1)...(19): siRNA sense strand
gaggaggaggagaggcuuu

SEQ ID NO: 255986 - RNA, 19 nt, Homo sapiens
  misc_RNA (1)...(19): siRNA sense strand
cgaauggucacauaugaac

SEQ ID NO: 255987 - RNA, 19 nt, Homo sapiens
  misc_RNA (1)...(19): siRNA sense strand
aagaggaaggcuuucuaaa

SEQ ID NO: 255988 - RNA, 19 nt, Homo sapiens
  misc_RNA (1)...(19): siRNA sense strand
gaugagcauuauccccuuu

SEQ ID NO: 255989 - RNA, 19 nt, Homo sapiens
  misc_RNA (1)...(19): siRNA sense strand
agggaucauugaagaggaa

SEQ ID NO: 255990 - RNA, 19 nt, Homo sapiens
  misc_RNA (1)...(19): siRNA sense strand
gacacccgccauuuacaga

SEQ ID NO: 255991 - RNA, 19 nt, Homo sapiens
  misc_RNA (1)...(19): siRNA sense strand
ucuaaagcuuuggcaagga

SEQ ID NO: 255992 - RNA, 19 nt, Homo sapiens
  misc_RNA (1)...(19): siRNA sense strand
gaagggaaguuaccuaaag

SEQ ID NO: 255993 - RNA, 19 nt, Homo sapiens
  misc_RNA (1)...(19): siRNA sense strand
ggaaauuacuacaaucaag

SEQ ID NO: 255994 - RNA, 19 nt, Homo sapiens
  misc_RNA (1)...(19): siRNA sense strand
gcacucagaagggaaguua

SEQ ID NO: 255995 - RNA, 19 nt, Homo sapiens
  misc_RNA (1)...(19): siRNA sense strand
gcaaguacaucucccuucu

SEQ ID NO: 255996 - RNA, 19 nt, Homo sapiens
  misc_RNA (1)...(19): siRNA sense strand
caauguggcuccugugugu

SEQ ID NO: 255997 - RNA, 19 nt, Homo sapiens
  misc_RNA (1)...(19): siRNA sense strand
ugaaugugcugcgcaagua

SEQ ID NO: 255998 - RNA, 19 nt, Homo sapiens
  misc_RNA (1)...(19): siRNA sense strand
uugcagagcugugauguuu

SEQ ID NO: 255999 - RNA, 19 nt, Homo sapiens
  misc_RNA (1)...(19): siRNA sense strand
gagagacucguaagaaaga

SEQ ID NO: 256000 - RNA, 19 nt, Homo sapiens
  misc_RNA (1)...(19): siRNA sense strand
gcaggaaauuacuacaauc

SEQ ID NO: 256001 - RNA, 19 nt, Homo sapiens
  misc_RNA (1)...(19): siRNA sense strand
ucaaucugguggugacuuu

SEQ ID NO: 256002 - RNA, 19 nt, Homo sapiens
  misc_RNA (1)...(19): siRNA sense strand
guacaucucccuucuggau

SEQ ID NO: 256003 - RNA, 19 nt, Homo sapiens
  misc_RNA (1)...(19): siRNA sense strand
gcagagcugugauguuuug

SEQ ID NO: 256004 - RNA, 19 nt, Homo sapiens
  misc_RNA (1)...(19): siRNA sense strand
gcucugugcucacgcuuca

SEQ ID NO: 256005 - RNA, 19 nt, Homo sapiens
  misc_RNA (1)...(19): siRNA sense strand
ggguguaccugcuuugcuu

SEQ ID NO: 256006 - RNA, 19 nt, Homo sapiens
  misc_RNA (1)...(19): siRNA sense strand
cagaagggaaguuaccuaa

SEQ ID NO: 256007 - RNA, 19 nt, Homo sapiens
  misc_RNA (1)...(19): siRNA sense strand
aggagagacucguaagaaa

SEQ ID NO: 256008 - RNA, 19 nt, Homo sapiens
  misc_RNA (1)...(19): siRNA sense strand
agaagugaauggcaucaau

SEQ ID NO: 256009 - RNA, 19 nt, Homo sapiens
  misc_RNA (1)...(19): siRNA sense strand
ggagagacucguaagaaag

SEQ ID NO: 256010 - RNA, 19 nt, Homo sapiens
  misc_RNA (1)...(19): siRNA sense strand
ggacuccucagaacgaaug

SEQ ID NO: 256011 - RNA, 19 nt, Homo sapiens
  misc_RNA (1)...(19): siRNA sense strand
guaaguggccacagcaauc

SEQ ID NO: 256012 - RNA, 19 nt, Homo sapiens
  misc_RNA (1)...(19): siRNA sense strand
gaagugaauggcaucaauc

SEQ ID NO: 256013 - RNA, 19 nt, Homo sapiens
  misc_RNA (1)...(19): siRNA sense strand
ucacauugcucuguaugca

SEQ ID NO: 256014 - RNA, 19 nt, Homo sapiens
  misc_RNA (1)...(19): siRNA sense strand
gguggugacuuucgaugca

SEQ ID NO: 256015 - RNA, 19 nt, Homo sapiens
  misc_RNA (1)...(19): siRNA sense strand
ugcaggaaauuacuacaau

SEQ ID NO: 256016 - RNA, 19 nt, Homo sapiens
  misc_RNA (1)...(19): siRNA sense strand
caaggagagacucguaaga

SEQ ID NO: 256017 - RNA, 19 nt, Homo sapiens
  misc_RNA (1)...(19): siRNA sense strand
ugacgaugaagccauguuu

SEQ ID NO: 256018 - RNA, 19 nt, Homo sapiens
  misc_RNA (1)...(19): siRNA sense strand
caggaaauuacuacaauca

SEQ ID NO: 256019 - RNA, 19 nt, Homo sapiens
  misc_RNA (1)...(19): siRNA sense strand
uagcgcacccugacgauga

SEQ ID NO: 256020 - RNA, 19 nt, Homo sapiens
  misc_RNA (1)...(19): siRNA sense strand
gcucaacagcaaagaagug

SEQ ID NO: 256021 - RNA, 19 nt, Homo sapiens
  misc_RNA (1)...(19): siRNA sense strand
gcacuggguguaccugcuu

SEQ ID NO: 256022 - RNA, 19 nt, Homo sapiens
  misc_RNA (1)...(19): siRNA sense strand
uugcuucucugcaggaaau

SEQ ID NO: 256023 - RNA, 19 nt, Homo sapiens
  misc_RNA (1)...(19): siRNA sense strand
guaccugcuuugcuucucu

SEQ ID NO: 256024 - RNA, 19 nt, Homo sapiens
  misc_RNA (1)...(19): siRNA sense strand
aaggagagacucguaagaa

SEQ ID NO: 256025 - RNA, 19 nt, Homo sapiens
  misc_RNA (1)...(19): siRNA sense strand
aaucaaggagagacucgua

SEQ ID NO: 256026 - RNA, 19 nt, Homo sapiens
  misc_RNA (1)...(19): siRNA sense strand
ucagaagggaaguuaccua

SEQ ID NO: 256027 - RNA, 19 nt, Homo sapiens
  misc_RNA (1)...(19): siRNA sense strand
cagagcacguggccagagu

SEQ ID NO: 256028 - RNA, 19 nt, Homo sapiens
  misc_RNA (1)...(19): siRNA sense strand
acucuccaguguaaugauu

SEQ ID NO: 256029 - RNA, 19 nt, Homo sapiens
  misc_RNA (1)...(19): siRNA sense strand
gguuugggacuccucagaa

SEQ ID NO: 256030 - RNA, 19 nt, Homo sapiens
  misc_RNA (1)...(19): siRNA sense strand
uaaguggccacagcaauca

SEQ ID NO: 256031 - RNA, 19 nt, Homo sapiens
  misc_RNA (1)...(19): siRNA sense strand
agaagggaaguuaccuaaa

SEQ ID NO: 256032 - RNA, 19 nt, Homo sapiens
  misc_RNA (1)...(19): siRNA sense strand
gcaugcagugggacacaga

SEQ ID NO: 256033 - RNA, 19 nt, Homo sapiens
  misc_RNA (1)...(19): siRNA sense strand
ccuugucucugcuucauac

SEQ ID NO: 256034 - RNA, 19 nt, Homo sapiens
  misc_RNA (1)...(19): siRNA sense strand
ccucagaacgaaugaagag

SEQ ID NO: 256035 - RNA, 19 nt, Homo sapiens
  misc_RNA (1)...(19): siRNA sense strand
gcauagaagugaucaauaa

SEQ ID NO: 256036 - RNA, 19 nt, Homo sapiens
  misc_RNA (1)...(19): siRNA sense strand
cgacauaacuuacgacaaa

SEQ ID NO: 256037 - RNA, 19 nt, Homo sapiens
  misc_RNA (1)...(19): siRNA sense strand
gacaugaucuuuaacagua

SEQ ID NO: 256038 - RNA, 19 nt, Homo sapiens
  misc_RNA (1)...(19): siRNA sense strand
ggaagugacucaagaaguu

SEQ ID NO: 256039 - RNA, 19 nt, Homo sapiens
  misc_RNA (1)...(19): siRNA sense strand
ggacagaaauuggaaauag

SEQ ID NO: 256040 - RNA, 19 nt, Homo sapiens
  misc_RNA (1)...(19): siRNA sense strand
gaacaaaucacuauaaguc

SEQ ID NO: 256041 - RNA, 19 nt, Homo sapiens
  misc_RNA (1)...(19): siRNA sense strand
acaaguagauccagaguuu

SEQ ID NO: 256042 - RNA, 19 nt, Homo sapiens
  misc_RNA (1)...(19): siRNA sense strand
guacagaaguugaagugaa

SEQ ID NO: 256043 - RNA, 19 nt, Homo sapiens
  misc_RNA (1)...(19): siRNA sense strand
cagaagagguugaugaaga

SEQ ID NO: 256044 - RNA, 19 nt, Homo sapiens
  misc_RNA (1)...(19): siRNA sense strand
caacugaaggcuauuguua

SEQ ID NO: 256045 - RNA, 19 nt, Homo sapiens
  misc_RNA (1)...(19): siRNA sense strand
ugagguugaugccuuauua

SEQ ID NO: 256046 - RNA, 19 nt, Homo sapiens
  misc_RNA (1)...(19): siRNA sense strand
ggaaauagaacgacuggaa

SEQ ID NO: 256047 - RNA, 19 nt, Homo sapiens
  misc_RNA (1)...(19): siRNA sense strand
gagacucaguauucauuua

SEQ ID NO: 256048 - RNA, 19 nt, Homo sapiens
  misc_RNA (1)...(19): siRNA sense strand
gacaaaugaugauugauga

SEQ ID NO: 256049 - RNA, 19 nt, Homo sapiens
  misc_RNA (1)...(19): siRNA sense strand
gaaagaaugugagcguaga

SEQ ID NO: 256050 - RNA, 19 nt, Homo sapiens
  misc_RNA (1)...(19): siRNA sense strand
uaacccaucuguucaagaa

SEQ ID NO: 256051 - RNA, 19 nt, Homo sapiens
  misc_RNA (1)...(19): siRNA sense strand
ugaaacaacugaaggcuau

SEQ ID NO: 256052 - RNA, 19 nt, Homo sapiens
  misc_RNA (1)...(19): siRNA sense strand
caaccgaaauggagacuau

SEQ ID NO: 256053 - RNA, 19 nt, Homo sapiens
  misc_RNA (1)...(19): siRNA sense strand
gaucaagaguguugcauag

SEQ ID NO: 256054 - RNA, 19 nt, Homo sapiens
  misc_RNA (1)...(19): siRNA sense strand
gaaacgacauaacuuacga

SEQ ID NO: 256055 - RNA, 19 nt, Homo sapiens
  misc_RNA (1)...(19): siRNA sense strand
agaaggaacucuuugaugu

SEQ ID NO: 256056 - RNA, 19 nt, Homo sapiens
  misc_RNA (1)...(19): siRNA sense strand
gaaauagaacgacuggaaa

SEQ ID NO: 256057 - RNA, 19 nt, Homo sapiens
  misc_RNA (1)...(19): siRNA sense strand
gauugaagccuuagagaaa

SEQ ID NO: 256058 - RNA, 19 nt, Homo sapiens
  misc_RNA (1)...(19): siRNA sense strand
uaagagagaaccaaaugua

SEQ ID NO: 256059 - RNA, 19 nt, Homo sapiens
  misc_RNA (1)...(19): siRNA sense strand
gauaagaaccauaacaugu

SEQ ID NO: 256060 - RNA, 19 nt, Homo sapiens
  misc_RNA (1)...(19): siRNA sense strand
ccaaacagcuggagaugca

SEQ ID NO: 256061 - RNA, 19 nt, Homo sapiens
  misc_RNA (1)...(19): siRNA sense strand
agaauaaacucuggguuaa

SEQ ID NO: 256062 - RNA, 19 nt, Homo sapiens
  misc_RNA (1)...(19): siRNA sense strand
guacaagaauucugcaaag

SEQ ID NO: 256063 - RNA, 19 nt, Homo sapiens
  misc_RNA (1)...(19): siRNA sense strand
ccacugggcuuuccugauc

SEQ ID NO: 256064 - RNA, 19 nt, Homo sapiens
  misc_RNA (1)...(19): siRNA sense strand
ugaaggcuauuguuacuga

SEQ ID NO: 256065 - RNA, 19 nt, Homo sapiens
  misc_RNA (1)...(19): siRNA sense strand
caagggaaacuaaaugaaa

SEQ ID NO: 256066 - RNA, 19 nt, Homo sapiens
  misc_RNA (1)...(19): siRNA sense strand
ucaagaguguugcauagaa

SEQ ID NO: 256067 - RNA, 19 nt, Homo sapiens
  misc_RNA (1)...(19): siRNA sense strand
acagauggguagaucauaa

SEQ ID NO: 256068 - RNA, 19 nt, Homo sapiens
  misc_RNA (1)...(19): siRNA sense strand
uggaagaggugccguuuga

SEQ ID NO: 256069 - RNA, 19 nt, Homo sapiens
  misc_RNA (1)...(19): siRNA sense strand
gacagaaauuggaaauaga

SEQ ID NO: 256070 - RNA, 19 nt, Homo sapiens
  misc_RNA (1)...(19): siRNA sense strand
uggacaaucuguucaguuu

SEQ ID NO: 256071 - RNA, 19 nt, Homo sapiens
  misc_RNA (1)...(19): siRNA sense strand
uaauacaacuguucagcuu

SEQ ID NO: 256072 - RNA, 19 nt, Homo sapiens
  misc_RNA (1)...(19): siRNA sense strand
gggaacagauuacgugaag

SEQ ID NO: 256073 - RNA, 19 nt, Homo sapiens
  misc_RNA (1)...(19): siRNA sense strand
guauggaacuaacaagaug

SEQ ID NO: 256074 - RNA, 19 nt, Homo sapiens
  misc_RNA (1)...(19): siRNA sense strand
ccucuaacaugcaaacuga

SEQ ID NO: 256075 - RNA, 19 nt, Homo sapiens
  misc_RNA (1)...(19): siRNA sense strand
gaaauggagacuauaagga

SEQ ID NO: 256076 - RNA, 19 nt, Homo sapiens
  misc_RNA (1)...(19): siRNA sense strand
agagaaacgacauaacuua

SEQ ID NO: 256077 - RNA, 19 nt, Homo sapiens
  misc_RNA (1)...(19): siRNA sense strand
gagcagaagggaacagauu

SEQ ID NO: 256078 - RNA, 19 nt, Homo sapiens
  misc_RNA (1)...(19): siRNA sense strand
ggaugcagauggagacaau

SEQ ID NO: 256079 - RNA, 19 nt, Homo sapiens
  misc_RNA (1)...(19): siRNA sense strand
gaagauaagaaccauaaca

SEQ ID NO: 256080 - RNA, 19 nt, Homo sapiens
  misc_RNA (1)...(19): siRNA sense strand
gcuaaucccuuggucaaug

SEQ ID NO: 256081 - RNA, 19 nt, Homo sapiens
  misc_RNA (1)...(19): siRNA sense strand
gaaggaacucuuugauguu

SEQ ID NO: 256082 - RNA, 19 nt, Homo sapiens
  misc_RNA (1)...(19): siRNA sense strand
gauccagaguuugcagaua

SEQ ID NO: 256083 - RNA, 19 nt, Homo sapiens
  misc_RNA (1)...(19): siRNA sense strand
ggcugaagauuaugaagaa

SEQ ID NO: 256084 - RNA, 19 nt, Homo sapiens
  misc_RNA (1)...(19): siRNA sense strand
guuuggacaugaucuuuaa

SEQ ID NO: 256085 - RNA, 19 nt, Homo sapiens
  misc_RNA (1)...(19): siRNA sense strand
caguaucuguugcaaauga

SEQ ID NO: 256086 - RNA, 19 nt, Homo sapiens
  misc_RNA (1)...(19): siRNA sense strand
ggagacagauggguagauc

SEQ ID NO: 256087 - RNA, 19 nt, Homo sapiens
  misc_RNA (1)...(19): siRNA sense strand
guauggauguccuaagaga

SEQ ID NO: 256088 - RNA, 19 nt, Homo sapiens
  misc_RNA (1)...(19): siRNA sense strand
gaaguugaagugaaaucua

SEQ ID NO: 256089 - RNA, 19 nt, Homo sapiens
  misc_RNA (1)...(19): siRNA sense strand
gcuacagacucaaccgaaa

SEQ ID NO: 256090 - RNA, 19 nt, Homo sapiens
  misc_RNA (1)...(19): siRNA sense strand
uacagaaguugaagugaaa

SEQ ID NO: 256091 - RNA, 19 nt, Homo sapiens
  misc_RNA (1)...(19): siRNA sense strand
gugaagauaagaaccauaa

SEQ ID NO: 256092 - RNA, 19 nt, Homo sapiens
  misc_RNA (1)...(19): siRNA sense strand
gauaggaauaguauggaua

SEQ ID NO: 256093 - RNA, 19 nt, Homo sapiens
  misc_RNA (1)...(19): siRNA sense strand
gacaaucuguucaguuuac

SEQ ID NO: 256094 - RNA, 19 nt, Homo sapiens
  misc_RNA (1)...(19): siRNA sense strand
ggacaaucuguucaguuua

SEQ ID NO: 256095 - RNA, 19 nt, Homo sapiens
  misc_RNA (1)...(19): siRNA sense strand
gaucagaacgcaccaccaa

SEQ ID NO: 256096 - RNA, 19 nt, Homo sapiens
  misc_RNA (1)...(19): siRNA sense strand
ugacagaaacgacaaugaa

SEQ ID NO: 256097 - RNA, 19 nt, Homo sapiens
  misc_RNA (1)...(19): siRNA sense strand
gaugaucucaggacagaaa

SEQ ID NO: 256098 - RNA, 19 nt, Homo sapiens
  misc_RNA (1)...(19): siRNA sense strand
ccaaaccuccacaaucuaa

SEQ ID NO: 256099 - RNA, 19 nt, Homo sapiens
  misc_RNA (1)...(19): siRNA sense strand
aagcaagaaucaccaaaug

SEQ ID NO: 256100 - RNA, 19 nt, Homo sapiens
  misc_RNA (1)...(19): siRNA sense strand
ccggaaaccuaccgugaaa

SEQ ID NO: 256101 - RNA, 19 nt, Homo sapiens
  misc_RNA (1)...(19): siRNA sense strand
gaaauuggaaauagaacga

SEQ ID NO: 256102 - RNA, 19 nt, Homo sapiens
  misc_RNA (1)...(19): siRNA sense strand
gcuaauacccauuugaauc

SEQ ID NO: 256103 - RNA, 19 nt, Homo sapiens
  misc_RNA (1)...(19): siRNA sense strand
gaauaaacucuggguuaaa

SEQ ID NO: 256104 - RNA, 19 nt, Homo sapiens
  misc_RNA (1)...(19): siRNA sense strand
cgacaaaugaugauugaug

SEQ ID NO: 256105 - RNA, 19 nt, Homo sapiens
  misc_RNA (1)...(19): siRNA sense strand
aaaguuaacccaucuguuc

SEQ ID NO: 256106 - RNA, 19 nt, Homo sapiens
  misc_RNA (1)...(19): siRNA sense strand
ggaccgauguagaaacaag

SEQ ID NO: 256107 - RNA, 19 nt, Homo sapiens
  misc_RNA (1)...(19): siRNA sense strand
ugaauggaccgauguagaa

SEQ ID NO: 256108 - RNA, 19 nt, Homo sapiens
  misc_RNA (1)...(19): siRNA sense strand
ugacaaacgcagauuagaa

SEQ ID NO: 256109 - RNA, 19 nt, Homo sapiens
  misc_RNA (1)...(19): siRNA sense strand
uaaggagacucaguauuca

SEQ ID NO: 256110 - RNA, 19 nt, Homo sapiens
  misc_RNA (1)...(19): siRNA sense strand
gcuaagaacauguauggau

SEQ ID NO: 256111 - RNA, 19 nt, Homo sapiens
  misc_RNA (1)...(19): siRNA sense strand
gaagaggugccguuugauc

SEQ ID NO: 256112 - RNA, 19 nt, Homo sapiens
  misc_RNA (1)...(19): siRNA sense strand
gcagauaugauaacuguac

SEQ ID NO: 256113 - RNA, 19 nt, Homo sapiens
  misc_RNA (1)...(19): siRNA sense strand
ggagauugaaacuaaacua

SEQ ID NO: 256114 - RNA, 19 nt, Homo sapiens
  misc_RNA (1)...(19): siRNA sense strand
gaagugggagaaagaaugu

SEQ ID NO: 256115 - RNA, 19 nt, Homo sapiens
  misc_RNA (1)...(19): siRNA sense strand
aacaggaacuugaaacuca

SEQ ID NO: 256116 - RNA, 19 nt, Homo sapiens
  misc_RNA (1)...(19): siRNA sense strand
gcaagggaaacuaaaugaa

SEQ ID NO: 256117 - RNA, 19 nt, Homo sapiens
  misc_RNA (1)...(19): siRNA sense strand
aaagagacguauugcuaau

SEQ ID NO: 256118 - RNA, 19 nt, Homo sapiens
  misc_RNA (1)...(19): siRNA sense strand
uagugucuaugguguauuu

SEQ ID NO: 256119 - RNA, 19 nt, Homo sapiens
  misc_RNA (1)...(19): siRNA sense strand
ggaacucuuugauguugug

SEQ ID NO: 256120 - RNA, 19 nt, Homo sapiens
  misc_RNA (1)...(19): siRNA sense strand
uaacuuacgacaaaugaug

SEQ ID NO: 256121 - RNA, 19 nt, Homo sapiens
  misc_RNA (1)...(19): siRNA sense strand
ugaaguagcaagaccugua

SEQ ID NO: 256122 - RNA, 19 nt, Homo sapiens
  misc_RNA (1)...(19): siRNA sense strand
acgugaagcugguaauauu

SEQ ID NO: 256123 - RNA, 19 nt, Homo sapiens
  misc_RNA (1)...(19): siRNA sense strand
ggacaugaucuuuaacagu

SEQ ID NO: 256124 - RNA, 19 nt, Homo sapiens
  misc_RNA (1)...(19): siRNA sense strand
ucagaacgcaccaccaauu

SEQ ID NO: 256125 - RNA, 19 nt, Homo sapiens
  misc_RNA (1)...(19): siRNA sense strand
gagaagcuaugcccaaucc

SEQ ID NO: 256126 - RNA, 19 nt, Homo sapiens
  misc_RNA (1)...(19): siRNA sense strand
gcacucacaccacccagaa

SEQ ID NO: 256127 - RNA, 19 nt, Homo sapiens
  misc_RNA (1)...(19): siRNA sense strand
ggauauacagugugagguu

SEQ ID NO: 256128 - RNA, 19 nt, Homo sapiens
  misc_RNA (1)...(19): siRNA sense strand
gaagcuaugcccaauccaa

SEQ ID NO: 256129 - RNA, 19 nt, Homo sapiens
  misc_RNA (1)...(19): siRNA sense strand
ugaggaagauaaacgcaau

SEQ ID NO: 256130 - RNA, 19 nt, Homo sapiens
  misc_RNA (1)...(19): siRNA sense strand
ccaaauguauggaacuaac

SEQ ID NO: 256131 - RNA, 19 nt, Homo sapiens
  misc_RNA (1)...(19): siRNA sense strand
ggcaauaugugguuuaacg

SEQ ID NO: 256132 - RNA, 19 nt, Homo sapiens
  misc_RNA (1)...(19): siRNA sense strand
uagcuaagugugagaagua

SEQ ID NO: 256133 - RNA, 19 nt, Homo sapiens
  misc_RNA (1)...(19): siRNA sense strand
caagaguguugcauagaag

SEQ ID NO: 256134 - RNA, 19 nt, Homo sapiens
  misc_RNA (1)...(19): siRNA sense strand
uacgacaaaugaugauuga

SEQ ID NO: 256135 - RNA, 19 nt, Homo sapiens
  misc_RNA (1)...(19): siRNA sense strand
gcauagaagugaucaauaa

SEQ ID NO: 256136 - RNA, 19 nt, Homo sapiens
  misc_RNA (1)...(19): siRNA sense strand
cgacauaacuuacgacaaa

SEQ ID NO: 256137 - RNA, 19 nt, Homo sapiens
  misc_RNA (1)...(19): siRNA sense strand
gacaugaucuuuaacagua

SEQ ID NO: 256138 - RNA, 19 nt, Homo sapiens
  misc_RNA (1)...(19): siRNA sense strand
ggaagugacucaagaaguu

SEQ ID NO: 256139 - RNA, 19 nt, Homo sapiens
  misc_RNA (1)...(19): siRNA sense strand
ggacagaaauuggaaauag

SEQ ID NO: 256140 - RNA, 19 nt, Homo sapiens
  misc_RNA (1)...(19): siRNA sense strand
gaacaaaucacuauaaguc

SEQ ID NO: 256141 - RNA, 19 nt, Homo sapiens
  misc_RNA (1)...(19): siRNA sense strand
acaaguagauccagaguuu

SEQ ID NO: 256142 - RNA, 19 nt, Homo sapiens
  misc_RNA (1)...(19): siRNA sense strand
guacagaaguugaagugaa

SEQ ID NO: 256143 - RNA, 19 nt, Homo sapiens
  misc_RNA (1)...(19): siRNA sense strand
cagaagagguugaugaaga

SEQ ID NO: 256144 - RNA, 19 nt, Homo sapiens
  misc_RNA (1)...(19): siRNA sense strand
caacugaaggcuauuguua

SEQ ID NO: 256145 - RNA, 19 nt, Homo sapiens
  misc_RNA (1)...(19): siRNA sense strand
ugagguugaugccuuauua

SEQ ID NO: 256146 - RNA, 19 nt, Homo sapiens
  misc_RNA (1)...(19): siRNA sense strand
ggaaauagaacgacuggaa

SEQ ID NO: 256147 - RNA, 19 nt, Homo sapiens
  misc_RNA (1)...(19): siRNA sense strand
gagacucaguauucauuua

SEQ ID NO: 256148 - RNA, 19 nt, Homo sapiens
  misc_RNA (1)...(19): siRNA sense strand
gacaaaugaugauugauga

SEQ ID NO: 256149 - RNA, 19 nt, Homo sapiens
  misc_RNA (1)...(19): siRNA sense strand
gaaagaaugugagcguaga

SEQ ID NO: 256150 - RNA, 19 nt, Homo sapiens
  misc_RNA (1)...(19): siRNA sense strand
uaacccaucuguucaagaa

SEQ ID NO: 256151 - RNA, 19 nt, Homo sapiens
  misc_RNA (1)...(19): siRNA sense strand
ugaaacaacugaaggcuau

SEQ ID NO: 256152 - RNA, 19 nt, Homo sapiens
  misc_RNA (1)...(19): siRNA sense strand
caaccgaaauggagacuau

SEQ ID NO: 256153 - RNA, 19 nt, Homo sapiens
  misc_RNA (1)...(19): siRNA sense strand
gaucaagaguguugcauag

SEQ ID NO: 256154 - RNA, 19 nt, Homo sapiens
  misc_RNA (1)...(19): siRNA sense strand
gaaacgacauaacuuacga

SEQ ID NO: 256155 - RNA, 19 nt, Homo sapiens
  misc_RNA (1)...(19): siRNA sense strand
agaaggaacucuuugaugu

SEQ ID NO: 256156 - RNA, 19 nt, Homo sapiens
  misc_RNA (1)...(19): siRNA sense strand
gaaauagaacgacuggaaa

SEQ ID NO: 256157 - RNA, 19 nt, Homo sapiens
  misc_RNA (1)...(19): siRNA sense strand
gauugaagccuuagagaaa

SEQ ID NO: 256158 - RNA, 19 nt, Homo sapiens
  misc_RNA (1)...(19): siRNA sense strand
uaagagagaaccaaaugua

SEQ ID NO: 256159 - RNA, 19 nt, Homo sapiens
  misc_RNA (1)...(19): siRNA sense strand
gauaagaaccauaacaugu

SEQ ID NO: 256160 - RNA, 19 nt, Homo sapiens
  misc_RNA (1)...(19): siRNA sense strand
ccaaacagcuggagaugca

SEQ ID NO: 256161 - RNA, 19 nt, Homo sapiens
  misc_RNA (1)...(19): siRNA sense strand
agaauaaacucuggguuaa

SEQ ID NO: 256162 - RNA, 19 nt, Homo sapiens
  misc_RNA (1)...(19): siRNA sense strand
guacaagaauucugcaaag

SEQ ID NO: 256163 - RNA, 19 nt, Homo sapiens
  misc_RNA (1)...(19): siRNA sense strand
ccacugggcuuuccugauc

SEQ ID NO: 256164 - RNA, 19 nt, Homo sapiens
  misc_RNA (1)...(19): siRNA sense strand
ugaaggcuauuguuacuga

SEQ ID NO: 256165 - RNA, 19 nt, Homo sapiens
  misc_RNA (1)...(19): siRNA sense strand
caagggaaacuaaaugaaa

SEQ ID NO: 256166 - RNA, 19 nt, Homo sapiens
  misc_RNA (1)...(19): siRNA sense strand
ucaagaguguugcauagaa

SEQ ID NO: 256167 - RNA, 19 nt, Homo sapiens
  misc_RNA (1)...(19): siRNA sense strand
acagauggguagaucauaa

SEQ ID NO: 256168 - RNA, 19 nt, Homo sapiens
  misc_RNA (1)...(19): siRNA sense strand
uggaagaggugccguuuga

SEQ ID NO: 256169 - RNA, 19 nt, Homo sapiens
  misc_RNA (1)...(19): siRNA sense strand
gacagaaauuggaaauaga

SEQ ID NO: 256170 - RNA, 19 nt, Homo sapiens
  misc_RNA (1)...(19): siRNA sense strand
uggacaaucuguucaguuu

SEQ ID NO: 256171 - RNA, 19 nt, Homo sapiens
  misc_RNA (1)...(19): siRNA sense strand
uaauacaacuguucagcuu

SEQ ID NO: 256172 - RNA, 19 nt, Homo sapiens
  misc_RNA (1)...(19): siRNA sense strand
gggaacagauuacgugaag

SEQ ID NO: 256173 - RNA, 19 nt, Homo sapiens
  misc_RNA (1)...(19): siRNA sense strand
guauggaacuaacaagaug

SEQ ID NO: 256174 - RNA, 19 nt, Homo sapiens
  misc_RNA (1)...(19): siRNA sense strand
ccucuaacaugcaaacuga

SEQ ID NO: 256175 - RNA, 19 nt, Homo sapiens
  misc_RNA (1)...(19): siRNA sense strand
gaaauggagacuauaagga

SEQ ID NO: 256176 - RNA, 19 nt, Homo sapiens
  misc_RNA (1)...(19): siRNA sense strand
agagaaacgacauaacuua

SEQ ID NO: 256177 - RNA, 19 nt, Homo sapiens
  misc_RNA (1)...(19): siRNA sense strand
gagcagaagggaacagauu

SEQ ID NO: 256178 - RNA, 19 nt, Homo sapiens
  misc_RNA (1)...(19): siRNA sense strand
ggaugcagauggagacaau

SEQ ID NO: 256179 - RNA, 19 nt, Homo sapiens
  misc_RNA (1)...(19): siRNA sense strand
gaagauaagaaccauaaca

SEQ ID NO: 256180 - RNA, 19 nt, Homo sapiens
  misc_RNA (1)...(19): siRNA sense strand
gcuaaucccuuggucaaug

SEQ ID NO: 256181 - RNA, 19 nt, Homo sapiens
  misc_RNA (1)...(19): siRNA sense strand
gaaggaacucuuugauguu

SEQ ID NO: 256182 - RNA, 19 nt, Homo sapiens
  misc_RNA (1)...(19): siRNA sense strand
gauccagaguuugcagaua

SEQ ID NO: 256183 - RNA, 19 nt, Homo sapiens
  misc_RNA (1)...(19): siRNA sense strand
ggcugaagauuaugaagaa

SEQ ID NO: 256184 - RNA, 19 nt, Homo sapiens
  misc_RNA (1)...(19): siRNA sense strand
guuuggacaugaucuuuaa

SEQ ID NO: 256185 - RNA, 19 nt, Homo sapiens
  misc_RNA (1)...(19): siRNA sense strand
caguaucuguugcaaauga

SEQ ID NO: 256186 - RNA, 19 nt, Homo sapiens
  misc_RNA (1)...(19): siRNA sense strand
ggagacagauggguagauc

SEQ ID NO: 256187 - RNA, 19 nt, Homo sapiens
  misc_RNA (1)...(19): siRNA sense strand
guauggauguccuaagaga

SEQ ID NO: 256188 - RNA, 19 nt, Homo sapiens
  misc_RNA (1)...(19): siRNA sense strand
gaaguugaagugaaaucua

SEQ ID NO: 256189 - RNA, 19 nt, Homo sapiens
  misc_RNA (1)...(19): siRNA sense strand
gcuacagacucaaccgaaa

SEQ ID NO: 256190 - RNA, 19 nt, Homo sapiens
  misc_RNA (1)...(19): siRNA sense strand
uacagaaguugaagugaaa

SEQ ID NO: 256191 - RNA, 19 nt, Homo sapiens
  misc_RNA (1)...(19): siRNA sense strand
gugaagauaagaaccauaa

SEQ ID NO: 256192 - RNA, 19 nt, Homo sapiens
  misc_RNA (1)...(19): siRNA sense strand
gauaggaauaguauggaua

SEQ ID NO: 256193 - RNA, 19 nt, Homo sapiens
  misc_RNA (1)...(19): siRNA sense strand
gacaaucuguucaguuuac

SEQ ID NO: 256194 - RNA, 19 nt, Homo sapiens
  misc_RNA (1)...(19): siRNA sense strand
ggacaaucuguucaguuua

SEQ ID NO: 256195 - RNA, 19 nt, Homo sapiens
  misc_RNA (1)...(19): siRNA sense strand
gaucagaacgcaccaccaa

SEQ ID NO: 256196 - RNA, 19 nt, Homo sapiens
  misc_RNA (1)...(19): siRNA sense strand
ugacagaaacgacaaugaa

SEQ ID NO: 256197 - RNA, 19 nt, Homo sapiens
  misc_RNA (1)...(19): siRNA sense strand
gaugaucucaggacagaaa

SEQ ID NO: 256198 - RNA, 19 nt, Homo sapiens
  misc_RNA (1)...(19): siRNA sense strand
ccaaaccuccacaaucuaa

SEQ ID NO: 256199 - RNA, 19 nt, Homo sapiens
  misc_RNA (1)...(19): siRNA sense strand
aagcaagaaucaccaaaug

SEQ ID NO: 256200 - RNA, 19 nt, Homo sapiens
  misc_RNA (1)...(19): siRNA sense strand
ccggaaaccuaccgugaaa

SEQ ID NO: 256201 - RNA, 19 nt, Homo sapiens
  misc_RNA (1)...(19): siRNA sense strand
gaaauuggaaauagaacga

SEQ ID NO: 256202 - RNA, 19 nt, Homo sapiens
  misc_RNA (1)...(19): siRNA sense strand
gcuaauacccauuugaauc

SEQ ID NO: 256203 - RNA, 19 nt, Homo sapiens
  misc_RNA (1)...(19): siRNA sense strand
gaauaaacucuggguuaaa

SEQ ID NO: 256204 - RNA, 19 nt, Homo sapiens
  misc_RNA (1)...(19): siRNA sense strand
cgacaaaugaugauugaug

SEQ ID NO: 256205 - RNA, 19 nt, Homo sapiens
  misc_RNA (1)...(19): siRNA sense strand
aaaguuaacccaucuguuc

SEQ ID NO: 256206 - RNA, 19 nt, Homo sapiens
  misc_RNA (1)...(19): siRNA sense strand
ggaccgauguagaaacaag

SEQ ID NO: 256207 - RNA, 19 nt, Homo sapiens
  misc_RNA (1)...(19): siRNA sense strand
ugaauggaccgauguagaa

SEQ ID NO: 256208 - RNA, 19 nt, Homo sapiens
  misc_RNA (1)...(19): siRNA sense strand
ugacaaacgcagauuagaa

SEQ ID NO: 256209 - RNA, 19 nt, Homo sapiens
  misc_RNA (1)...(19): siRNA sense strand
uaaggagacucaguauuca

SEQ ID NO: 256210 - RNA, 19 nt, Homo sapiens
  misc_RNA (1)...(19): siRNA sense strand
gcuaagaacauguauggau

SEQ ID NO: 256211 - RNA, 19 nt, Homo sapiens
  misc_RNA (1)...(19): siRNA sense strand
gaagaggugccguuugauc

SEQ ID NO: 256212 - RNA, 19 nt, Homo sapiens
  misc_RNA (1)...(19): siRNA sense strand
gcagauaugauaacuguac

SEQ ID NO: 256213 - RNA, 19 nt, Homo sapiens
  misc_RNA (1)...(19): siRNA sense strand
ggagauugaaacuaaacua

SEQ ID NO: 256214 - RNA, 19 nt, Homo sapiens
  misc_RNA (1)...(19): siRNA sense strand
gaagugggagaaagaaugu

SEQ ID NO: 256215 - RNA, 19 nt, Homo sapiens
  misc_RNA (1)...(19): siRNA sense strand
aacaggaacuugaaacuca

SEQ ID NO: 256216 - RNA, 19 nt, Homo sapiens
  misc_RNA (1)...(19): siRNA sense strand
gcaagggaaacuaaaugaa

SEQ ID NO: 256217 - RNA, 19 nt, Homo sapiens
  misc_RNA (1)...(19): siRNA sense strand
aaagagacguauugcuaau

SEQ ID NO: 256218 - RNA, 19 nt, Homo sapiens
  misc_RNA (1)...(19): siRNA sense strand
uagugucuaugguguauuu

SEQ ID NO: 256219 - RNA, 19 nt, Homo sapiens
  misc_RNA (1)...(19): siRNA sense strand
ggaacucuuugauguugug

SEQ ID NO: 256220 - RNA, 19 nt, Homo sapiens
  misc_RNA (1)...(19): siRNA sense strand
uaacuuacgacaaaugaug

SEQ ID NO: 256221 - RNA, 19 nt, Homo sapiens
  misc_RNA (1)...(19): siRNA sense strand
ugaaguagcaagaccugua

SEQ ID NO: 256222 - RNA, 19 nt, Homo sapiens
  misc_RNA (1)...(19): siRNA sense strand
acgugaagcugguaauauu

SEQ ID NO: 256223 - RNA, 19 nt, Homo sapiens
  misc_RNA (1)...(19): siRNA sense strand
ggacaugaucuuuaacagu

SEQ ID NO: 256224 - RNA, 19 nt, Homo sapiens
  misc_RNA (1)...(19): siRNA sense strand
ucagaacgcaccaccaauu

SEQ ID NO: 256225 - RNA, 19 nt, Homo sapiens
  misc_RNA (1)...(19): siRNA sense strand
gagaagcuaugcccaaucc

SEQ ID NO: 256226 - RNA, 19 nt, Homo sapiens
  misc_RNA (1)...(19): siRNA sense strand
gcacucacaccacccagaa

SEQ ID NO: 256227 - RNA, 19 nt, Homo sapiens
  misc_RNA (1)...(19): siRNA sense strand
ggauauacagugugagguu

SEQ ID NO: 256228 - RNA, 19 nt, Homo sapiens
  misc_RNA (1)...(19): siRNA sense strand
gaagcuaugcccaauccaa

SEQ ID NO: 256229 - RNA, 19 nt, Homo sapiens
  misc_RNA (1)...(19): siRNA sense strand
ugaggaagauaaacgcaau

SEQ ID NO: 256230 - RNA, 19 nt, Homo sapiens
  misc_RNA (1)...(19): siRNA sense strand
ccaaauguauggaacuaac

SEQ ID NO: 256231 - RNA, 19 nt, Homo sapiens
  misc_RNA (1)...(19): siRNA sense strand
ggcaauaugugguuuaacg

SEQ ID NO: 256232 - RNA, 19 nt, Homo sapiens
  misc_RNA (1)...(19): siRNA sense strand
uagcuaagugugagaagua

SEQ ID NO: 256233 - RNA, 19 nt, Homo sapiens
  misc_RNA (1)...(19): siRNA sense strand
caagaguguugcauagaag

SEQ ID NO: 256234 - RNA, 19 nt, Homo sapiens
  misc_RNA (1)...(19): siRNA sense strand
uacgacaaaugaugauuga

SEQ ID NO: 256235 - RNA, 19 nt, Homo sapiens
  misc_RNA (1)...(19): siRNA sense strand
gaaauggccucugaugaua

SEQ ID NO: 256236 - RNA, 19 nt, Homo sapiens
  misc_RNA (1)...(19): siRNA sense strand
ggauagaacuucagaacaa

SEQ ID NO: 256237 - RNA, 19 nt, Homo sapiens
  misc_RNA (1)...(19): siRNA sense strand
uagaacagcugguuaauga

SEQ ID NO: 256238 - RNA, 19 nt, Homo sapiens
  misc_RNA (1)...(19): siRNA sense strand
ggaagaagcugaaauuuug

SEQ ID NO: 256239 - RNA, 19 nt, Homo sapiens
  misc_RNA (1)...(19): siRNA sense strand
gaaacagccucuucucuag

SEQ ID NO: 256240 - RNA, 19 nt, Homo sapiens
  misc_RNA (1)...(19): siRNA sense strand
gaagaagccaguaacagua

SEQ ID NO: 256241 - RNA, 19 nt, Homo sapiens
  misc_RNA (1)...(19): siRNA sense strand
gaacagcugguuaaugaaa

SEQ ID NO: 256242 - RNA, 19 nt, Homo sapiens
  misc_RNA (1)...(19): siRNA sense strand
gaagagaaauccaaaucag

SEQ ID NO: 256243 - RNA, 19 nt, Homo sapiens
  misc_RNA (1)...(19): siRNA sense strand
gcccaaagcuggcucugaa

SEQ ID NO: 256244 - RNA, 19 nt, Homo sapiens
  misc_RNA (1)...(19): siRNA sense strand
gaaggcaucucacggaaag

SEQ ID NO: 256245 - RNA, 19 nt, Homo sapiens
  misc_RNA (1)...(19): siRNA sense strand
gcaaggaaguguccacaag

SEQ ID NO: 256246 - RNA, 19 nt, Homo sapiens
  misc_RNA (1)...(19): siRNA sense strand
gauuguagcugaagaaacu

SEQ ID NO: 256247 - RNA, 19 nt, Homo sapiens
  misc_RNA (1)...(19): siRNA sense strand
gagaagagaucagcagaag

SEQ ID NO: 256248 - RNA, 19 nt, Homo sapiens
  misc_RNA (1)...(19): siRNA sense strand
gaacuucagaacaauauga

SEQ ID NO: 256249 - RNA, 19 nt, Homo sapiens
  misc_RNA (1)...(19): siRNA sense strand
gagccaauugcuauuauua

SEQ ID NO: 256250 - RNA, 19 nt, Homo sapiens
  misc_RNA (1)...(19): siRNA sense strand
gaaagugcaccaaauggaa

SEQ ID NO: 256251 - RNA, 19 nt, Homo sapiens
  misc_RNA (1)...(19): siRNA sense strand
gaacucuaauccuugaaga

SEQ ID NO: 256252 - RNA, 19 nt, Homo sapiens
  misc_RNA (1)...(19): siRNA sense strand
gaagagaucagcagaaggu

SEQ ID NO: 256253 - RNA, 19 nt, Homo sapiens
  misc_RNA (1)...(19): siRNA sense strand
uuaaugaaauggccucuga

SEQ ID NO: 256254 - RNA, 19 nt, Homo sapiens
  misc_RNA (1)...(19): siRNA sense strand
gaauggagccaauugcuau

SEQ ID NO: 256255 - RNA, 19 nt, Homo sapiens
  misc_RNA (1)...(19): siRNA sense strand
ggaaaagacuaugaaagua

SEQ ID NO: 256256 - RNA, 19 nt, Homo sapiens
  misc_RNA (1)...(19): siRNA sense strand
ggaagaagccaguaacagu

SEQ ID NO: 256257 - RNA, 19 nt, Homo sapiens
  misc_RNA (1)...(19): siRNA sense strand
aaacaaggaugagaagaga

SEQ ID NO: 256258 - RNA, 19 nt, Homo sapiens
  misc_RNA (1)...(19): siRNA sense strand
caauagaacagcugguuaa

SEQ ID NO: 256259 - RNA, 19 nt, Homo sapiens
  misc_RNA (1)...(19): siRNA sense strand
caacaaaggcuaagucaac

SEQ ID NO: 256260 - RNA, 19 nt, Homo sapiens
  misc_RNA (1)...(19): siRNA sense strand
ugaaacagccucuucucua

SEQ ID NO: 256261 - RNA, 19 nt, Homo sapiens
  misc_RNA (1)...(19): siRNA sense strand
gaaauccaaaucagaagaa

SEQ ID NO: 256262 - RNA, 19 nt, Homo sapiens
  misc_RNA (1)...(19): siRNA sense strand
gaaacuaagccaaaagaua

SEQ ID NO: 256263 - RNA, 19 nt, Homo sapiens
  misc_RNA (1)...(19): siRNA sense strand
ugaaugaucaggcaacaaa

SEQ ID NO: 256264 - RNA, 19 nt, Homo sapiens
  misc_RNA (1)...(19): siRNA sense strand
aaacaaucuucuacaguga

SEQ ID NO: 256265 - RNA, 19 nt, Homo sapiens
  misc_RNA (1)...(19): siRNA sense strand
ggagccaauugcuauuauu

SEQ ID NO: 256266 - RNA, 19 nt, Homo sapiens
  misc_RNA (1)...(19): siRNA sense strand
caaaucagaagaaagcaaa

SEQ ID NO: 256267 - RNA, 19 nt, Homo sapiens
  misc_RNA (1)...(19): siRNA sense strand
gcaucaaaguccaggaaga

SEQ ID NO: 256268 - RNA, 19 nt, Homo sapiens
  misc_RNA (1)...(19): siRNA sense strand
gaugaggucugugaaucaa

SEQ ID NO: 256269 - RNA, 19 nt, Homo sapiens
  misc_RNA (1)...(19): siRNA sense strand
ccaggaagaagcugaaauu

SEQ ID NO: 256270 - RNA, 19 nt, Homo sapiens
  misc_RNA (1)...(19): siRNA sense strand
gauagaacuucagaacaau

SEQ ID NO: 256271 - RNA, 19 nt, Homo sapiens
  misc_RNA (1)...(19): siRNA sense strand
ugggaucacugaagagaaa

SEQ ID NO: 256272 - RNA, 19 nt, Homo sapiens
  misc_RNA (1)...(19): siRNA sense strand
gaaucaaaugugagcaaua

SEQ ID NO: 256273 - RNA, 19 nt, Homo sapiens
  misc_RNA (1)...(19): siRNA sense strand
gaagaaauugaaacgauca

SEQ ID NO: 256274 - RNA, 19 nt, Homo sapiens
  misc_RNA (1)...(19): siRNA sense strand
guagaacuuggauuagaua

SEQ ID NO: 256275 - RNA, 19 nt, Homo sapiens
  misc_RNA (1)...(19): siRNA sense strand
ugaaauggccucugaugau

SEQ ID NO: 256276 - RNA, 19 nt, Homo sapiens
  misc_RNA (1)...(19): siRNA sense strand
aaucaaaugugagcaauag

SEQ ID NO: 256277 - RNA, 19 nt, Homo sapiens
  misc_RNA (1)...(19): siRNA sense strand
gccaaaagauacugaauug

SEQ ID NO: 256278 - RNA, 19 nt, Homo sapiens
  misc_RNA (1)...(19): siRNA sense strand
caguagaacuuggauuaga

SEQ ID NO: 256279 - RNA, 19 nt, Homo sapiens
  misc_RNA (1)...(19): siRNA sense strand
aaagaaagcagccaaagca

SEQ ID NO: 256280 - RNA, 19 nt, Homo sapiens
  misc_RNA (1)...(19): siRNA sense strand
gcaauuccagaucaacaaa

SEQ ID NO: 256281 - RNA, 19 nt, Homo sapiens
  misc_RNA (1)...(19): siRNA sense strand
ccuagaaagugcaccaaau

SEQ ID NO: 256282 - RNA, 19 nt, Homo sapiens
  misc_RNA (1)...(19): siRNA sense strand
uaacaguacccuagaaagu

SEQ ID NO: 256283 - RNA, 19 nt, Homo sapiens
  misc_RNA (1)...(19): siRNA sense strand
gccaguacuuucugauguu

SEQ ID NO: 256284 - RNA, 19 nt, Homo sapiens
  misc_RNA (1)...(19): siRNA sense strand
agagaaauccaaaucagaa

SEQ ID NO: 256285 - RNA, 19 nt, Homo sapiens
  misc_RNA (1)...(19): siRNA sense strand
gauaaugguuuugaggaua

SEQ ID NO: 256286 - RNA, 19 nt, Homo sapiens
  misc_RNA (1)...(19): siRNA sense strand
ggucagagucuucaaagca

SEQ ID NO: 256287 - RNA, 19 nt, Homo sapiens
  misc_RNA (1)...(19): siRNA sense strand
gcugaaaggcagaaggaaa

SEQ ID NO: 256288 - RNA, 19 nt, Homo sapiens
  misc_RNA (1)...(19): siRNA sense strand
ucaauagaacagcugguua

SEQ ID NO: 256289 - RNA, 19 nt, Homo sapiens
  misc_RNA (1)...(19): siRNA sense strand
gaagaaagcaaaagaaugg

SEQ ID NO: 256290 - RNA, 19 nt, Homo sapiens
  misc_RNA (1)...(19): siRNA sense strand
aaggaaguguccacaagaa

SEQ ID NO: 256291 - RNA, 19 nt, Homo sapiens
  misc_RNA (1)...(19): siRNA sense strand
gaaagaaagcagccaaagc

SEQ ID NO: 256292 - RNA, 19 nt, Homo sapiens
  misc_RNA (1)...(19): siRNA sense strand
uuucugauguuccuccuuu

SEQ ID NO: 256293 - RNA, 19 nt, Homo sapiens
  misc_RNA (1)...(19): siRNA sense strand
ugaggucugugaaucaaau

SEQ ID NO: 256294 - RNA, 19 nt, Homo sapiens
  misc_RNA (1)...(19): siRNA sense strand
caacccaggaucuaaguga

SEQ ID NO: 256295 - RNA, 19 nt, Homo sapiens
  misc_RNA (1)...(19): siRNA sense strand
cuaugaaaguacagagauu

SEQ ID NO: 256296 - RNA, 19 nt, Homo sapiens
  misc_RNA (1)...(19): siRNA sense strand
ggccucugaugauaauaaa

SEQ ID NO: 256297 - RNA, 19 nt, Homo sapiens
  misc_RNA (1)...(19): siRNA sense strand
gcaaaagaauggagccaau

SEQ ID NO: 256298 - RNA, 19 nt, Homo sapiens
  misc_RNA (1)...(19): siRNA sense strand
caucaaaguccaggaagaa

SEQ ID NO: 256299 - RNA, 19 nt, Homo sapiens
  misc_RNA (1)...(19): siRNA sense strand
ugaauugagccaagaauca

SEQ ID NO: 256300 - RNA, 19 nt, Homo sapiens
  misc_RNA (1)...(19): siRNA sense strand
caaggaaguguccacaaga

SEQ ID NO: 256301 - RNA, 19 nt, Homo sapiens
  misc_RNA (1)...(19): siRNA sense strand
cgggaacucuaauccuuga

SEQ ID NO: 256302 - RNA, 19 nt, Homo sapiens
  misc_RNA (1)...(19): siRNA sense strand
aaugugagcaauagcauaa

SEQ ID NO: 256303 - RNA, 19 nt, Homo sapiens
  misc_RNA (1)...(19): siRNA sense strand
gugaugaggucugugaauc

SEQ ID NO: 256304 - RNA, 19 nt, Homo sapiens
  misc_RNA (1)...(19): siRNA sense strand
ugaggaugcugaucuuucu

SEQ ID NO: 256305 - RNA, 19 nt, Homo sapiens
  misc_RNA (1)...(19): siRNA sense strand
gacuuaagauucccugcau

SEQ ID NO: 256306 - RNA, 19 nt, Homo sapiens
  misc_RNA (1)...(19): siRNA sense strand
gaggauagaacuucagaac

SEQ ID NO: 256307 - RNA, 19 nt, Homo sapiens
  misc_RNA (1)...(19): siRNA sense strand
gcucugaagcugcugaugu

SEQ ID NO: 256308 - RNA, 19 nt, Homo sapiens
  misc_RNA (1)...(19): siRNA sense strand
cuuaagauucccugcauaa

SEQ ID NO: 256309 - RNA, 19 nt, Homo sapiens
  misc_RNA (1)...(19): siRNA sense strand
aaaaugggaucacugaaga

SEQ ID NO: 256310 - RNA, 19 nt, Homo sapiens
  misc_RNA (1)...(19): siRNA sense strand
cuagaaagugcaccaaaug

SEQ ID NO: 256311 - RNA, 19 nt, Homo sapiens
  misc_RNA (1)...(19): siRNA sense strand
ggaguaaucauuccaaaau

SEQ ID NO: 256312 - RNA, 19 nt, Homo sapiens
  misc_RNA (1)...(19): siRNA sense strand
caguaacaguacccuagaa

SEQ ID NO: 256313 - RNA, 19 nt, Homo sapiens
  misc_RNA (1)...(19): siRNA sense strand
gagaucagcagaagguagu

SEQ ID NO: 256314 - RNA, 19 nt, Homo sapiens
  misc_RNA (1)...(19): siRNA sense strand
ugcaauaaaugcugaggau

SEQ ID NO: 256315 - RNA, 19 nt, Homo sapiens
  misc_RNA (1)...(19): siRNA sense strand
cugcugauguggcaaggaa

SEQ ID NO: 256316 - RNA, 19 nt, Homo sapiens
  misc_RNA (1)...(19): siRNA sense strand
ugaagagaaauccaaauca

SEQ ID NO: 256317 - RNA, 19 nt, Homo sapiens
  misc_RNA (1)...(19): siRNA sense strand
gcaacaaaggcuaagucaa

SEQ ID NO: 256318 - RNA, 19 nt, Homo sapiens
  misc_RNA (1)...(19): siRNA sense strand
gaaguguccacaagaagca

SEQ ID NO: 256319 - RNA, 19 nt, Homo sapiens
  misc_RNA (1)...(19): siRNA sense strand
ucagugaauuugauguuac

SEQ ID NO: 256320 - RNA, 19 nt, Homo sapiens
  misc_RNA (1)...(19): siRNA sense strand
caucagcagccaguacuuu

SEQ ID NO: 256321 - RNA, 19 nt, Homo sapiens
  misc_RNA (1)...(19): siRNA sense strand
uucaguagaacuuggauua

SEQ ID NO: 256322 - RNA, 19 nt, Homo sapiens
  misc_RNA (1)...(19): siRNA sense strand
ugaaucaaaugugagcaau

SEQ ID NO: 256323 - RNA, 19 nt, Homo sapiens
  misc_RNA (1)...(19): siRNA sense strand
uaagucaacccaggaucua

SEQ ID NO: 256324 - RNA, 19 nt, Homo sapiens
  misc_RNA (1)...(19): siRNA sense strand
cugaagaaacuaagccaaa

SEQ ID NO: 256325 - RNA, 19 nt, Homo sapiens
  misc_RNA (1)...(19): siRNA sense strand
gagauuguagcugaagaaa

SEQ ID NO: 256326 - RNA, 19 nt, Homo sapiens
  misc_RNA (1)...(19): siRNA sense strand
aacgggaacucuaauccuu

SEQ ID NO: 256327 - RNA, 19 nt, Homo sapiens
  misc_RNA (1)...(19): siRNA sense strand
aaaugucccuaagcaauuc

SEQ ID NO: 256328 - RNA, 19 nt, Homo sapiens
  misc_RNA (1)...(19): siRNA sense strand
ugaagaaacuaagccaaaa

SEQ ID NO: 256329 - RNA, 19 nt, Homo sapiens
  misc_RNA (1)...(19): siRNA sense strand
aaagugcaccaaauggaaa

SEQ ID NO: 256330 - RNA, 19 nt, Homo sapiens
  misc_RNA (1)...(19): siRNA sense strand
uaccugcaauuccagauca

SEQ ID NO: 256331 - RNA, 19 nt, Homo sapiens
  misc_RNA (1)...(19): siRNA sense strand
agaauggagccaauugcua

SEQ ID NO: 256332 - RNA, 19 nt, Homo sapiens
  misc_RNA (1)...(19): siRNA sense strand
gggcugaaaggcagaagga

SEQ ID NO: 256333 - RNA, 19 nt, Homo sapiens
  misc_RNA (1)...(19): siRNA sense strand
ucacugaagagaaauccaa

SEQ ID NO: 256334 - RNA, 19 nt, Homo sapiens
  misc_RNA (1)...(19): siRNA sense strand
gaaaaugggaucacugaag

SEQ ID NO: 256335 - RNA, 19 nt, Homo sapiens
  misc_RNA (1)...(19): siRNA sense strand
gaaagaaucuguagagaaa

SEQ ID NO: 256336 - RNA, 19 nt, Homo sapiens
  misc_RNA (1)...(19): siRNA sense strand
ggagggaaguuacauauua

SEQ ID NO: 256337 - RNA, 19 nt, Homo sapiens
  misc_RNA (1)...(19): siRNA sense strand
gcaaugagcuguuugaaga

SEQ ID NO: 256338 - RNA, 19 nt, Homo sapiens
  misc_RNA (1)...(19): siRNA sense strand
gggaagaacuggugaagua

SEQ ID NO: 256339 - RNA, 19 nt, Homo sapiens
  misc_RNA (1)...(19): siRNA sense strand
ugacaaagguggauaaauu

SEQ ID NO: 256340 - RNA, 19 nt, Homo sapiens
  misc_RNA (1)...(19): siRNA sense strand
ggaaauggaucucuuugaa

SEQ ID NO: 256341 - RNA, 19 nt, Homo sapiens
  misc_RNA (1)...(19): siRNA sense strand
gaagggcaauucaaagaua

SEQ ID NO: 256342 - RNA, 19 nt, Homo sapiens
  misc_RNA (1)...(19): siRNA sense strand
ggaaggaaaugcagaagaa

SEQ ID NO: 256343 - RNA, 19 nt, Homo sapiens
  misc_RNA (1)...(19): siRNA sense strand
gcuaagagcugcagaacaa

SEQ ID NO: 256344 - RNA, 19 nt, Homo sapiens
  misc_RNA (1)...(19): siRNA sense strand
caacaaauacgaauccuua

SEQ ID NO: 256345 - RNA, 19 nt, Homo sapiens
  misc_RNA (1)...(19): siRNA sense strand
caacaaaucugugaaugaa

SEQ ID NO: 256346 - RNA, 19 nt, Homo sapiens
  misc_RNA (1)...(19): siRNA sense strand
gaagaagcauuugccauuu

SEQ ID NO: 256347 - RNA, 19 nt, Homo sapiens
  misc_RNA (1)...(19): siRNA sense strand
gaaagaagggcaauucaaa

SEQ ID NO: 256348 - RNA, 19 nt, Homo sapiens
  misc_RNA (1)...(19): siRNA sense strand
gggcuaacgucccaaauaa

SEQ ID NO: 256349 - RNA, 19 nt, Homo sapiens
  misc_RNA (1)...(19): siRNA sense strand
gaauccagcuagcaaagua

SEQ ID NO: 256350 - RNA, 19 nt, Homo sapiens
  misc_RNA (1)...(19): siRNA sense strand
gggaauguuuacugaauua

SEQ ID NO: 256351 - RNA, 19 nt, Homo sapiens
  misc_RNA (1)...(19): siRNA sense strand
gagaauggcuguacguaau

SEQ ID NO: 256352 - RNA, 19 nt, Homo sapiens
  misc_RNA (1)...(19): siRNA sense strand
caaaguaauugcacugaaa

SEQ ID NO: 256353 - RNA, 19 nt, Homo sapiens
  misc_RNA (1)...(19): siRNA sense strand
ggugccagauuaucaauua

SEQ ID NO: 256354 - RNA, 19 nt, Homo sapiens
  misc_RNA (1)...(19): siRNA sense strand
caacuacuuugguuccuua

SEQ ID NO: 256355 - RNA, 19 nt, Homo sapiens
  misc_RNA (1)...(19): siRNA sense strand
gaaagugucucagcccauu

SEQ ID NO: 256356 - RNA, 19 nt, Homo sapiens
  misc_RNA (1)...(19): siRNA sense strand
ucagguggcuucuaaauau

SEQ ID NO: 256357 - RNA, 19 nt, Homo sapiens
  misc_RNA (1)...(19): siRNA sense strand
gcaaucagauguucacaca

SEQ ID NO: 256358 - RNA, 19 nt, Homo sapiens
  misc_RNA (1)...(19): siRNA sense strand
gcagaagaaucaacguuau

SEQ ID NO: 256359 - RNA, 19 nt, Homo sapiens
  misc_RNA (1)...(19): siRNA sense strand
gaugugguguucuugauaa

SEQ ID NO: 256360 - RNA, 19 nt, Homo sapiens
  misc_RNA (1)...(19): siRNA sense strand
guacacguguuauggagua

SEQ ID NO: 256361 - RNA, 19 nt, Homo sapiens
  misc_RNA (1)...(19): siRNA sense strand
agggacagcucaacaaaua

SEQ ID NO: 256362 - RNA, 19 nt, Homo sapiens
  misc_RNA (1)...(19): siRNA sense strand
gacaaagguggauaaauua

SEQ ID NO: 256363 - RNA, 19 nt, Homo sapiens
  misc_RNA (1)...(19): siRNA sense strand
gauuguagaugucuuuaug

SEQ ID NO: 256364 - RNA, 19 nt, Homo sapiens
  misc_RNA (1)...(19): siRNA sense strand
cugcagaccuuccuaauga

SEQ ID NO: 256365 - RNA, 19 nt, Homo sapiens
  misc_RNA (1)...(19): siRNA sense strand
guagaagacucccuagaau

SEQ ID NO: 256366 - RNA, 19 nt, Homo sapiens
  misc_RNA (1)...(19): siRNA sense strand
guagaugucuuuauggaau

SEQ ID NO: 256367 - RNA, 19 nt, Homo sapiens
  misc_RNA (1)...(19): siRNA sense strand
aagauaagcuggaauguuc

SEQ ID NO: 256368 - RNA, 19 nt, Homo sapiens
  misc_RNA (1)...(19): siRNA sense strand
ggagagauuucuucgugaa

SEQ ID NO: 256369 - RNA, 19 nt, Homo sapiens
  misc_RNA (1)...(19): siRNA sense strand
ucacacagauuguagaugu

SEQ ID NO: 256370 - RNA, 19 nt, Homo sapiens
  misc_RNA (1)...(19): siRNA sense strand
gaacuauacuacagagcaa

SEQ ID NO: 256371 - RNA, 19 nt, Homo sapiens
  misc_RNA (1)...(19): siRNA sense strand
gcaguaugcuucugaaucu

SEQ ID NO: 256372 - RNA, 19 nt, Homo sapiens
  misc_RNA (1)...(19): siRNA sense strand
gcaaaucaaagaaguagaa

SEQ ID NO: 256373 - RNA, 19 nt, Homo sapiens
  misc_RNA (1)...(19): siRNA sense strand
gcaauacaguucuacuuag

SEQ ID NO: 256374 - RNA, 19 nt, Homo sapiens
  misc_RNA (1)...(19): siRNA sense strand
gaaaggauccagaauugug

SEQ ID NO: 256375 - RNA, 19 nt, Homo sapiens
  misc_RNA (1)...(19): siRNA sense strand
gaggauuacuugauguuga

SEQ ID NO: 256376 - RNA, 19 nt, Homo sapiens
  misc_RNA (1)...(19): siRNA sense strand
gcagacagcgccaucauga

SEQ ID NO: 256377 - RNA, 19 nt, Homo sapiens
  misc_RNA (1)...(19): siRNA sense strand
ggacccagaugugcacuuu

SEQ ID NO: 256378 - RNA, 19 nt, Homo sapiens
  misc_RNA (1)...(19): siRNA sense strand
gcagcuauauucuguagau

SEQ ID NO: 256379 - RNA, 19 nt, Homo sapiens
  misc_RNA (1)...(19): siRNA sense strand
uuaaccgccuggauaauua

SEQ ID NO: 256380 - RNA, 19 nt, Homo sapiens
  misc_RNA (1)...(19): siRNA sense strand
ggcaguggaugucuucuuu

SEQ ID NO: 256381 - RNA, 19 nt, Homo sapiens
  misc_RNA (1)...(19): siRNA sense strand
gagggaaguuacauauuau

SEQ ID NO: 256382 - RNA, 19 nt, Homo sapiens
  misc_RNA (1)...(19): siRNA sense strand
agaaaggaauggugaaaga

SEQ ID NO: 256383 - RNA, 19 nt, Homo sapiens
  misc_RNA (1)...(19): siRNA sense strand
ucgaaaggauccagaauug

SEQ ID NO: 256384 - RNA, 19 nt, Homo sapiens
  misc_RNA (1)...(19): siRNA sense strand
gaaguuggcacaccaccua

SEQ ID NO: 256385 - RNA, 19 nt, Homo sapiens
  misc_RNA (1)...(19): siRNA sense strand
gaauggcuguacguaauaa

SEQ ID NO: 256386 - RNA, 19 nt, Homo sapiens
  misc_RNA (1)...(19): siRNA sense strand
ggucaauucucuacugaug

SEQ ID NO: 256387 - RNA, 19 nt, Homo sapiens
  misc_RNA (1)...(19): siRNA sense strand
gacaaauucaucugcauua

SEQ ID NO: 256388 - RNA, 19 nt, Homo sapiens
  misc_RNA (1)...(19): siRNA sense strand
uaacuuagccggugcugaa

SEQ ID NO: 256389 - RNA, 19 nt, Homo sapiens
  misc_RNA (1)...(19): siRNA sense strand
ggcacaauaucauggauuu

SEQ ID NO: 256390 - RNA, 19 nt, Homo sapiens
  misc_RNA (1)...(19): siRNA sense strand
ucaggagaauugcugcuua

SEQ ID NO: 256391 - RNA, 19 nt, Homo sapiens
  misc_RNA (1)...(19): siRNA sense strand
ucaagccucuguuguuaaa

SEQ ID NO: 256392 - RNA, 19 nt, Homo sapiens
  misc_RNA (1)...(19): siRNA sense strand
gaacacaggaaucugcaaa

SEQ ID NO: 256393 - RNA, 19 nt, Homo sapiens
  misc_RNA (1)...(19): siRNA sense strand
gaauacgguugcucuuguu

SEQ ID NO: 256394 - RNA, 19 nt, Homo sapiens
  misc_RNA (1)...(19): siRNA sense strand
gacccuacauuggcacuua

SEQ ID NO: 256395 - RNA, 19 nt, Homo sapiens
  misc_RNA (1)...(19): siRNA sense strand
gaagauaagcuggaauguu

SEQ ID NO: 256396 - RNA, 19 nt, Homo sapiens
  misc_RNA (1)...(19): siRNA sense strand
uugaugcucugaagaauaa

SEQ ID NO: 256397 - RNA, 19 nt, Homo sapiens
  misc_RNA (1)...(19): siRNA sense strand
gcagaacaagcucaucuuu

SEQ ID NO: 256398 - RNA, 19 nt, Homo sapiens
  misc_RNA (1)...(19): siRNA sense strand
guaugaugcugcuaaguug

SEQ ID NO: 256399 - RNA, 19 nt, Homo sapiens
  misc_RNA (1)...(19): siRNA sense strand
gaacguggccaaugugauc

SEQ ID NO: 256400 - RNA, 19 nt, Homo sapiens
  misc_RNA (1)...(19): siRNA sense strand
gaaggucucuuuuauuuuc

SEQ ID NO: 256401 - RNA, 19 nt, Homo sapiens
  misc_RNA (1)...(19): siRNA sense strand
ccaaagggaauucuucgua

SEQ ID NO: 256402 - RNA, 19 nt, Homo sapiens
  misc_RNA (1)...(19): siRNA sense strand
uuucugggauccauuguua

SEQ ID NO: 256403 - RNA, 19 nt, Homo sapiens
  misc_RNA (1)...(19): siRNA sense strand
guucacacccaucuucuua

SEQ ID NO: 256404 - RNA, 19 nt, Homo sapiens
  misc_RNA (1)...(19): siRNA sense strand
agccacagcuggaauaauu

SEQ ID NO: 256405 - RNA, 19 nt, Homo sapiens
  misc_RNA (1)...(19): siRNA sense strand
ugaauuggcugaagaacuc

SEQ ID NO: 256406 - RNA, 19 nt, Homo sapiens
  misc_RNA (1)...(19): siRNA sense strand
ggaaagaagggcaauucaa

SEQ ID NO: 256407 - RNA, 19 nt, Homo sapiens
  misc_RNA (1)...(19): siRNA sense strand
uauauuaaccgccuggaua

SEQ ID NO: 256408 - RNA, 19 nt, Homo sapiens
  misc_RNA (1)...(19): siRNA sense strand
gauuugacuuuguccauga

SEQ ID NO: 256409 - RNA, 19 nt, Homo sapiens
  misc_RNA (1)...(19): siRNA sense strand
gaucagcuaccacuuauca

SEQ ID NO: 256410 - RNA, 19 nt, Homo sapiens
  misc_RNA (1)...(19): siRNA sense strand
cagaugugcacuuuaaaua

SEQ ID NO: 256411 - RNA, 19 nt, Homo sapiens
  misc_RNA (1)...(19): siRNA sense strand
gaagaauaaucgcccaucu

SEQ ID NO: 256412 - RNA, 19 nt, Homo sapiens
  misc_RNA (1)...(19): siRNA sense strand
agaaacaggucaaguccaa

SEQ ID NO: 256413 - RNA, 19 nt, Homo sapiens
  misc_RNA (1)...(19): siRNA sense strand
gaacuuaucaacuacuauc

SEQ ID NO: 256414 - RNA, 19 nt, Homo sapiens
  misc_RNA (1)...(19): siRNA sense strand
ugaagaagcauuugccauu

SEQ ID NO: 256415 - RNA, 19 nt, Homo sapiens
  misc_RNA (1)...(19): siRNA sense strand
gaucuggaacuuauuaaug

SEQ ID NO: 256416 - RNA, 19 nt, Homo sapiens
  misc_RNA (1)...(19): siRNA sense strand
gauguugacuguucugaag

SEQ ID NO: 256417 - RNA, 19 nt, Homo sapiens
  misc_RNA (1)...(19): siRNA sense strand
gcaaacauuggcuucagua

SEQ ID NO: 256418 - RNA, 19 nt, Homo sapiens
  misc_RNA (1)...(19): siRNA sense strand
gaaauggaucucuuugaau

SEQ ID NO: 256419 - RNA, 19 nt, Homo sapiens
  misc_RNA (1)...(19): siRNA sense strand
gaagaacaagcuacagaga

SEQ ID NO: 256420 - RNA, 19 nt, Homo sapiens
  misc_RNA (1)...(19): siRNA sense strand
agaacaagcucaucuuugg

SEQ ID NO: 256421 - RNA, 19 nt, Homo sapiens
  misc_RNA (1)...(19): siRNA sense strand
aaaccgccuugcagaguua

SEQ ID NO: 256422 - RNA, 19 nt, Homo sapiens
  misc_RNA (1)...(19): siRNA sense strand
gcagauggcccguaagaag

SEQ ID NO: 256423 - RNA, 19 nt, Homo sapiens
  misc_RNA (1)...(19): siRNA sense strand
ucauugaacugcuggagaa

SEQ ID NO: 256424 - RNA, 19 nt, Homo sapiens
  misc_RNA (1)...(19): siRNA sense strand
gaaaaucccuacuaugaca

SEQ ID NO: 256425 - RNA, 19 nt, Homo sapiens
  misc_RNA (1)...(19): siRNA sense strand
gaaguagaaagaaucugua

SEQ ID NO: 256426 - RNA, 19 nt, Homo sapiens
  misc_RNA (1)...(19): siRNA sense strand
gcagcuagcuuugcacagu

SEQ ID NO: 256427 - RNA, 19 nt, Homo sapiens
  misc_RNA (1)...(19): siRNA sense strand
ggcuguacguaauaacuua

SEQ ID NO: 256428 - RNA, 19 nt, Homo sapiens
  misc_RNA (1)...(19): siRNA sense strand
cuuuggagcuugucuguuu

SEQ ID NO: 256429 - RNA, 19 nt, Homo sapiens
  misc_RNA (1)...(19): siRNA sense strand
guguagagcugugcaagaa

SEQ ID NO: 256430 - RNA, 19 nt, Homo sapiens
  misc_RNA (1)...(19): siRNA sense strand
aacaaucgcuggaaacaga

SEQ ID NO: 256431 - RNA, 19 nt, Homo sapiens
  misc_RNA (1)...(19): siRNA sense strand
ucagaaccauaacaacaaa

SEQ ID NO: 256432 - RNA, 19 nt, Homo sapiens
  misc_RNA (1)...(19): siRNA sense strand
gaggucaauucucuacuga

SEQ ID NO: 256433 - RNA, 19 nt, Homo sapiens
  misc_RNA (1)...(19): siRNA sense strand
cagaucagcuaccacuuau

SEQ ID NO: 256434 - RNA, 19 nt, Homo sapiens
  misc_RNA (1)...(19): siRNA sense strand
guacugcauucuugcuuga

SEQ ID NO: 256435 - RNA, 19 nt, Homo sapiens
  misc_RNA (1)...(19): siRNA sense strand
gcaccaaacugcuacuuau

SEQ ID NO: 256436 - RNA, 19 nt, Homo sapiens
  misc_RNA (1)...(19): siRNA sense strand
ggaaagaacgggaaaguga

SEQ ID NO: 256437 - RNA, 19 nt, Homo sapiens
  misc_RNA (1)...(19): siRNA sense strand
gggaugaaguggagguuua

SEQ ID NO: 256438 - RNA, 19 nt, Homo sapiens
  misc_RNA (1)...(19): siRNA sense strand
gaagggagauuucuauguc

SEQ ID NO: 256439 - RNA, 19 nt, Homo sapiens
  misc_RNA (1)...(19): siRNA sense strand
gcaaagugauuggaaagaa

SEQ ID NO: 256440 - RNA, 19 nt, Homo sapiens
  misc_RNA (1)...(19): siRNA sense strand
gcacuaaacccucagaaga

SEQ ID NO: 256441 - RNA, 19 nt, Homo sapiens
  misc_RNA (1)...(19): siRNA sense strand
gaagagaccugcacuuucc

SEQ ID NO: 256442 - RNA, 19 nt, Homo sapiens
  misc_RNA (1)...(19): siRNA sense strand
gaagccugcuccaaugaaa

SEQ ID NO: 256443 - RNA, 19 nt, Homo sapiens
  misc_RNA (1)...(19): siRNA sense strand
ggaaagugauccaggagau

SEQ ID NO: 256444 - RNA, 19 nt, Homo sapiens
  misc_RNA (1)...(19): siRNA sense strand
ugaaggauguccaugaaga

SEQ ID NO: 256445 - RNA, 19 nt, Homo sapiens
  misc_RNA (1)...(19): siRNA sense strand
agaauggccuggaagauga

SEQ ID NO: 256446 - RNA, 19 nt, Homo sapiens
  misc_RNA (1)...(19): siRNA sense strand
ggagauuucuaugucauug

SEQ ID NO: 256447 - RNA, 19 nt, Homo sapiens
  misc_RNA (1)...(19): siRNA sense strand
gagagaagccugcuccaau

SEQ ID NO: 256448 - RNA, 19 nt, Homo sapiens
  misc_RNA (1)...(19): siRNA sense strand
ugaaggauccagacaguaa

SEQ ID NO: 256449 - RNA, 19 nt, Homo sapiens
  misc_RNA (1)...(19): siRNA sense strand
cgacaaggcuggauauagc

SEQ ID NO: 256450 - RNA, 19 nt, Homo sapiens
  misc_RNA (1)...(19): siRNA sense strand
acagugagcucuucauucu

SEQ ID NO: 256451 - RNA, 19 nt, Homo sapiens
  misc_RNA (1)...(19): siRNA sense strand
cuacuuaugucccgcaaug

SEQ ID NO: 256452 - RNA, 19 nt, Homo sapiens
  misc_RNA (1)...(19): siRNA sense strand
gaugccaccuacaaugaaa

SEQ ID NO: 256453 - RNA, 19 nt, Homo sapiens
  misc_RNA (1)...(19): siRNA sense strand
gaagcuaccuugaguuuuc

SEQ ID NO: 256454 - RNA, 19 nt, Homo sapiens
  misc_RNA (1)...(19): siRNA sense strand
ggagccaacugcaucuuuc

SEQ ID NO: 256455 - RNA, 19 nt, Homo sapiens
  misc_RNA (1)...(19): siRNA sense strand
ccauaaagaguucaagaaa

SEQ ID NO: 256456 - RNA, 19 nt, Homo sapiens
  misc_RNA (1)...(19): siRNA sense strand
cauaaagaguucaagaaag

SEQ ID NO: 256457 - RNA, 19 nt, Homo sapiens
  misc_RNA (1)...(19): siRNA sense strand
ccuggaagaugaaucaaga

SEQ ID NO: 256458 - RNA, 19 nt, Homo sapiens
  misc_RNA (1)...(19): siRNA sense strand
gagaauggccuggaagaug

SEQ ID NO: 256459 - RNA, 19 nt, Homo sapiens
  misc_RNA (1)...(19): siRNA sense strand
ggauauagcacugaugaga

SEQ ID NO: 256460 - RNA, 19 nt, Homo sapiens
  misc_RNA (1)...(19): siRNA sense strand
gaugaagggagauuucuau

SEQ ID NO: 256461 - RNA, 19 nt, Homo sapiens
  misc_RNA (1)...(19): siRNA sense strand
uggagaggcuacaaauuga

SEQ ID NO: 256462 - RNA, 19 nt, Homo sapiens
  misc_RNA (1)...(19): siRNA sense strand
ggaaggugauaaugacaag

SEQ ID NO: 256463 - RNA, 19 nt, Homo sapiens
  misc_RNA (1)...(19): siRNA sense strand
agagaagccugcuccaaug

SEQ ID NO: 256464 - RNA, 19 nt, Homo sapiens
  misc_RNA (1)...(19): siRNA sense strand
gagcgacuucggccaguua

SEQ ID NO: 256465 - RNA, 19 nt, Homo sapiens
  misc_RNA (1)...(19): siRNA sense strand
ggcagcuucuucaagguua

SEQ ID NO: 256466 - RNA, 19 nt, Homo sapiens
  misc_RNA (1)...(19): siRNA sense strand
gugaagagaccugcacuuu

SEQ ID NO: 256467 - RNA, 19 nt, Homo sapiens
  misc_RNA (1)...(19): siRNA sense strand
gacagagaauggccuggaa

SEQ ID NO: 256468 - RNA, 19 nt, Homo sapiens
  misc_RNA (1)...(19): siRNA sense strand
gcugaaggauccagacagu

SEQ ID NO: 256469 - RNA, 19 nt, Homo sapiens
  misc_RNA (1)...(19): siRNA sense strand
cgagagaacaucagcaaug

SEQ ID NO: 256470 - RNA, 19 nt, Homo sapiens
  misc_RNA (1)...(19): siRNA sense strand
gaaagaacgggaaagugau

SEQ ID NO: 256471 - RNA, 19 nt, Homo sapiens
  misc_RNA (1)...(19): siRNA sense strand
ggugaggguucgaguggaa

SEQ ID NO: 256472 - RNA, 19 nt, Homo sapiens
  misc_RNA (1)...(19): siRNA sense strand
aaacguccauaaagaguuc

SEQ ID NO: 256473 - RNA, 19 nt, Homo sapiens
  misc_RNA (1)...(19): siRNA sense strand
gagagaacaucagcaaugc

SEQ ID NO: 256474 - RNA, 19 nt, Homo sapiens
  misc_RNA (1)...(19): siRNA sense strand
gcccgaagcuaccuugagu

SEQ ID NO: 256475 - RNA, 19 nt, Homo sapiens
  misc_RNA (1)...(19): siRNA sense strand
gaaagugauccaggagauu

SEQ ID NO: 256476 - RNA, 19 nt, Homo sapiens
  misc_RNA (1)...(19): siRNA sense strand
gucaccaucuucuuugaaa

SEQ ID NO: 256477 - RNA, 19 nt, Homo sapiens
  misc_RNA (1)...(19): siRNA sense strand
gcagagugagagacaaauu

SEQ ID NO: 256478 - RNA, 19 nt, Homo sapiens
  misc_RNA (1)...(19): siRNA sense strand
ucagaugugucuacagcuu

SEQ ID NO: 256479 - RNA, 19 nt, Homo sapiens
  misc_RNA (1)...(19): siRNA sense strand
gacuguggcugacuauauc

SEQ ID NO: 256480 - RNA, 19 nt, Homo sapiens
  misc_RNA (1)...(19): siRNA sense strand
gagaagccugcuccaauga

SEQ ID NO: 256481 - RNA, 19 nt, Homo sapiens
  misc_RNA (1)...(19): siRNA sense strand
ucagaugggcccaacauga

SEQ ID NO: 256482 - RNA, 19 nt, Homo sapiens
  misc_RNA (1)...(19): siRNA sense strand
caaagugauuggaaagaac

SEQ ID NO: 256483 - RNA, 19 nt, Homo sapiens
  misc_RNA (1)...(19): siRNA sense strand
ccaagcaccuagagacaag

SEQ ID NO: 256484 - RNA, 19 nt, Homo sapiens
  misc_RNA (1)...(19): siRNA sense strand
ugaauaugcugccugugau

SEQ ID NO: 256485 - RNA, 19 nt, Homo sapiens
  misc_RNA (1)...(19): siRNA sense strand
ugugaaggauguccaugaa

SEQ ID NO: 256486 - RNA, 19 nt, Homo sapiens
  misc_RNA (1)...(19): siRNA sense strand
gaguggaaggugauaauga

SEQ ID NO: 256487 - RNA, 19 nt, Homo sapiens
  misc_RNA (1)...(19): siRNA sense strand
auaaagaguucaagaaagc

SEQ ID NO: 256488 - RNA, 19 nt, Homo sapiens
  misc_RNA (1)...(19): siRNA sense strand
gagcagcuucggcagauug

SEQ ID NO: 256489 - RNA, 19 nt, Homo sapiens
  misc_RNA (1)...(19): siRNA sense strand
aaacagugagcucuucauu

SEQ ID NO: 256490 - RNA, 19 nt, Homo sapiens
  misc_RNA (1)...(19): siRNA sense strand
ggauguccaugaagacucu

SEQ ID NO: 256491 - RNA, 19 nt, Homo sapiens
  misc_RNA (1)...(19): siRNA sense strand
ggcccaacaugacagagaa

SEQ ID NO: 256492 - RNA, 19 nt, Homo sapiens
  misc_RNA (1)...(19): siRNA sense strand
ccaaacugcuacuuauguc

SEQ ID NO: 256493 - RNA, 19 nt, Homo sapiens
  misc_RNA (1)...(19): siRNA sense strand
gcaaugaagaagcuaccaa

SEQ ID NO: 256494 - RNA, 19 nt, Homo sapiens
  misc_RNA (1)...(19): siRNA sense strand
gugauaaugacaagaagaa

SEQ ID NO: 256495 - RNA, 19 nt, Homo sapiens
  misc_RNA (1)...(19): siRNA sense strand
ccgaagcuaccuugaguuu

SEQ ID NO: 256496 - RNA, 19 nt, Homo sapiens
  misc_RNA (1)...(19): siRNA sense strand
ugacuguggcugacuauau

SEQ ID NO: 256497 - RNA, 19 nt, Homo sapiens
  misc_RNA (1)...(19): siRNA sense strand
aggcuuugcuggaguauca

SEQ ID NO: 256498 - RNA, 19 nt, Homo sapiens
  misc_RNA (1)...(19): siRNA sense strand
ggauggaggccuggaauca

SEQ ID NO: 256499 - RNA, 19 nt, Homo sapiens
  misc_RNA (1)...(19): siRNA sense strand
gugaugccaccuacaauga

SEQ ID NO: 256500 - RNA, 19 nt, Homo sapiens
  misc_RNA (1)...(19): siRNA sense strand
cgagauacaauucuucauc

SEQ ID NO: 256501 - RNA, 19 nt, Homo sapiens
  misc_RNA (1)...(19): siRNA sense strand
ccacuucgagauacaauuc

SEQ ID NO: 256502 - RNA, 19 nt, Homo sapiens
  misc_RNA (1)...(19): siRNA sense strand
gcacuuuccgcaucuaugg

SEQ ID NO: 256503 - RNA, 19 nt, Homo sapiens
  misc_RNA (1)...(19): siRNA sense strand
gaugaugaagggagauuuc

SEQ ID NO: 256504 - RNA, 19 nt, Homo sapiens
  misc_RNA (1)...(19): siRNA sense strand
uuggagaggcuacaaauug

SEQ ID NO: 256505 - RNA, 19 nt, Homo sapiens
  misc_RNA (1)...(19): siRNA sense strand
uagagcagcuucgcuugga

SEQ ID NO: 256506 - RNA, 19 nt, Homo sapiens
  misc_RNA (1)...(19): siRNA sense strand
agugagcucuucauucugu

SEQ ID NO: 256507 - RNA, 19 nt, Homo sapiens
  misc_RNA (1)...(19): siRNA sense strand
ccaacugcaucuuucucaa

SEQ ID NO: 256508 - RNA, 19 nt, Homo sapiens
  misc_RNA (1)...(19): siRNA sense strand
caaaggcagcuucuucaag

SEQ ID NO: 256509 - RNA, 19 nt, Homo sapiens
  misc_RNA (1)...(19): siRNA sense strand
gagaggcuacaaauugaug

SEQ ID NO: 256510 - RNA, 19 nt, Homo sapiens
  misc_RNA (1)...(19): siRNA sense strand
ccauugaguugggugaaga

SEQ ID NO: 256511 - RNA, 19 nt, Homo sapiens
  misc_RNA (1)...(19): siRNA sense strand
ggugaccgccauugaguug

SEQ ID NO: 256512 - RNA, 19 nt, Homo sapiens
  misc_RNA (1)...(19): siRNA sense strand
gggagccaacugcaucuuu

SEQ ID NO: 256513 - RNA, 19 nt, Homo sapiens
  misc_RNA (1)...(19): siRNA sense strand
aguaaucccuacagccuau

SEQ ID NO: 256514 - RNA, 19 nt, Homo sapiens
  misc_RNA (1)...(19): siRNA sense strand
gaaggauccagacaguaau

SEQ ID NO: 256515 - RNA, 19 nt, Homo sapiens
  misc_RNA (1)...(19): siRNA sense strand
ccaggagauuguggauaaa

SEQ ID NO: 256516 - RNA, 19 nt, Homo sapiens
  misc_RNA (1)...(19): siRNA sense strand
ugaagagaccugcacuuuc

SEQ ID NO: 256517 - RNA, 19 nt, Homo sapiens
  misc_RNA (1)...(19): siRNA sense strand
gaauaugcugccugugaug

SEQ ID NO: 256518 - RNA, 19 nt, Homo sapiens
  misc_RNA (1)...(19): siRNA sense strand
ccaugcgacucgaaccuau

SEQ ID NO: 256519 - RNA, 19 nt, Homo sapiens
  misc_RNA (1)...(19): siRNA sense strand
acaaauugaugagcagcuu

SEQ ID NO: 256520 - RNA, 19 nt, Homo sapiens
  misc_RNA (1)...(19): siRNA sense strand
auaauaaggagaucacaga

SEQ ID NO: 256521 - RNA, 19 nt, Homo sapiens
  misc_RNA (1)...(19): siRNA sense strand
caucucugcugggugauau

SEQ ID NO: 256522 - RNA, 19 nt, Homo sapiens
  misc_RNA (1)...(19): siRNA sense strand
gcccgaggaucugagagaa

SEQ ID NO: 256523 - RNA, 19 nt, Homo sapiens
  misc_RNA (1)...(19): siRNA sense strand
ccagcugacuauaauaagg

SEQ ID NO: 256524 - RNA, 19 nt, Homo sapiens
  misc_RNA (1)...(19): siRNA sense strand
ggagcgacuucggccaguu

SEQ ID NO: 256525 - RNA, 19 nt, Homo sapiens
  misc_RNA (1)...(19): siRNA sense strand
aaagugauccaggagauug

SEQ ID NO: 256526 - RNA, 19 nt, Homo sapiens
  misc_RNA (1)...(19): siRNA sense strand
ugaagggagauuucuaugu

SEQ ID NO: 256527 - RNA, 19 nt, Homo sapiens
  misc_RNA (1)...(19): siRNA sense strand
agacaggaccgucauggau

SEQ ID NO: 256528 - RNA, 19 nt, Homo sapiens
  misc_RNA (1)...(19): siRNA sense strand
cacaaacagugagcucuuc

SEQ ID NO: 256529 - RNA, 19 nt, Homo sapiens
  misc_RNA (1)...(19): siRNA sense strand
ccaaaggcagcuucuucaa

SEQ ID NO: 256530 - RNA, 19 nt, Homo sapiens
  misc_RNA (1)...(19): siRNA sense strand
uugaauaugcugccuguga

SEQ ID NO: 256531 - RNA, 19 nt, Homo sapiens
  misc_RNA (1)...(19): siRNA sense strand
ugaugggacuggcaauugg

SEQ ID NO: 256532 - RNA, 19 nt, Homo sapiens
  misc_RNA (1)...(19): siRNA sense strand
uaauaaggagaucacagaa

SEQ ID NO: 256533 - RNA, 19 nt, Homo sapiens
  misc_RNA (1)...(19): siRNA sense strand
gcgacaaggcuggauauag

SEQ ID NO: 256534 - RNA, 19 nt, Homo sapiens
  misc_RNA (1)...(19): siRNA sense strand
gcagauugggcugggcuuu

SEQ ID NO: 256535 - RNA, 19 nt, Homo sapiens
  misc_RNA (1)...(19): siRNA sense strand
gcgacaagcugaccgaguu

SEQ ID NO: 256536 - RNA, 19 nt, Homo sapiens
  misc_RNA (1)...(19): siRNA sense strand
gaaguucauucgcgauuuc

SEQ ID NO: 256537 - RNA, 19 nt, Homo sapiens
  misc_RNA (1)...(19): siRNA sense strand
ucaccaagcucuggaaguu

SEQ ID NO: 256538 - RNA, 19 nt, Homo sapiens
  misc_RNA (1)...(19): siRNA sense strand
ggaaguucauucgcgauuu

SEQ ID NO: 256539 - RNA, 19 nt, Homo sapiens
  misc_RNA (1)...(19): siRNA sense strand
gaaaccugcucuucuucga

SEQ ID NO: 256540 - RNA, 19 nt, Homo sapiens
  misc_RNA (1)...(19): siRNA sense strand
gcuacaaccucaagaagag

SEQ ID NO: 256541 - RNA, 19 nt, Homo sapiens
  misc_RNA (1)...(19): siRNA sense strand
ugaccgaguuccugcaaga

SEQ ID NO: 256542 - RNA, 19 nt, Homo sapiens
  misc_RNA (1)...(19): siRNA sense strand
gaccaacgccaucuucauc

SEQ ID NO: 256543 - RNA, 19 nt, Homo sapiens
  misc_RNA (1)...(19): siRNA sense strand
uggaggacgugcucuacuu

SEQ ID NO: 256544 - RNA, 19 nt, Homo sapiens
  misc_RNA (1)...(19): siRNA sense strand
gaccugggcuaugacaaca

SEQ ID NO: 256545 - RNA, 19 nt, Homo sapiens
  misc_RNA (1)...(19): siRNA sense strand
uccgaaaccugcucuucuu

SEQ ID NO: 256546 - RNA, 19 nt, Homo sapiens
  misc_RNA (1)...(19): siRNA sense strand
gcuucaacaucaucugcaa

SEQ ID NO: 256547 - RNA, 19 nt, Homo sapiens
  misc_RNA (1)...(19): siRNA sense strand
gcgcgcucuucacuaguuu

SEQ ID NO: 256548 - RNA, 19 nt, Homo sapiens
  misc_RNA (1)...(19): siRNA sense strand
cagaagcaccggcucaagu

SEQ ID NO: 256549 - RNA, 19 nt, Homo sapiens
  misc_RNA (1)...(19): siRNA sense strand
ggacgugcucuacuucaag

SEQ ID NO: 256550 - RNA, 19 nt, Homo sapiens
  misc_RNA (1)...(19): siRNA sense strand
ggaggacgugcucuacuuc

SEQ ID NO: 256551 - RNA, 19 nt, Homo sapiens
  misc_RNA (1)...(19): siRNA sense strand
caaguucgccuucccuaac

SEQ ID NO: 256552 - RNA, 19 nt, Homo sapiens
  misc_RNA (1)...(19): siRNA sense strand
agaagcaccggcucaaguu

SEQ ID NO: 256553 - RNA, 19 nt, Homo sapiens
  misc_RNA (1)...(19): siRNA sense strand
ccacaugcgcuuccacuac

SEQ ID NO: 256554 - RNA, 19 nt, Homo sapiens
  misc_RNA (1)...(19): siRNA sense strand
gaagcaccggcucaaguuc

SEQ ID NO: 256555 - RNA, 19 nt, Homo sapiens
  misc_RNA (1)...(19): siRNA sense strand
ucaaguucgccuucccuaa

SEQ ID NO: 256556 - RNA, 19 nt, Homo sapiens
  misc_RNA (1)...(19): siRNA sense strand
accaagcucuggaaguuca

SEQ ID NO: 256557 - RNA, 19 nt, Homo sapiens
  misc_RNA (1)...(19): siRNA sense strand
cgagauccaguaccugaug

SEQ ID NO: 256558 - RNA, 19 nt, Homo sapiens
  misc_RNA (1)...(19): siRNA sense strand
ggcuacaaccucaagaaga

SEQ ID NO: 256559 - RNA, 19 nt, Homo sapiens
  misc_RNA (1)...(19): siRNA sense strand
caucaucugcaaccacaug

SEQ ID NO: 256560 - RNA, 19 nt, Homo sapiens
  misc_RNA (1)...(19): siRNA sense strand
cgacuacccgaccuucuuc

SEQ ID NO: 256561 - RNA, 19 nt, Homo sapiens
  misc_RNA (1)...(19): siRNA sense strand
ccugggaguccauggcuaa

SEQ ID NO: 256562 - RNA, 19 nt, Homo sapiens
  misc_RNA (1)...(19): siRNA sense strand
cggcuucaaugcccacuac

SEQ ID NO: 256563 - RNA, 19 nt, Homo sapiens
  misc_RNA (1)...(19): siRNA sense strand
ucuucgaccugggcuauga

SEQ ID NO: 256564 - RNA, 19 nt, Homo sapiens
  misc_RNA (1)...(19): siRNA sense strand
gggcuacaaccucaagaag

SEQ ID NO: 256565 - RNA, 19 nt, Homo sapiens
  misc_RNA (1)...(19): siRNA sense strand
gagcgcaugcggaccaucu

SEQ ID NO: 256566 - RNA, 19 nt, Homo sapiens
  misc_RNA (1)...(19): siRNA sense strand
gaggacgugcucuacuuca

SEQ ID NO: 256567 - RNA, 19 nt, Homo sapiens
  misc_RNA (1)...(19): siRNA sense strand
gcacccugcucaacauccu

SEQ ID NO: 256568 - RNA, 19 nt, Homo sapiens
  misc_RNA (1)...(19): siRNA sense strand
gcaaagagguggauucuaa

SEQ ID NO: 256569 - RNA, 19 nt, Homo sapiens
  misc_RNA (1)...(19): siRNA sense strand
gaacagaaagccauugaug

SEQ ID NO: 256570 - RNA, 19 nt, Homo sapiens
  misc_RNA (1)...(19): siRNA sense strand
ggacacaucccaauucaag

SEQ ID NO: 256571 - RNA, 19 nt, Homo sapiens
  misc_RNA (1)...(19): siRNA sense strand
gaagguagaggugaaaguu

SEQ ID NO: 256572 - RNA, 19 nt, Homo sapiens
  misc_RNA (1)...(19): siRNA sense strand
ccaagaguguggcuacaga

SEQ ID NO: 256573 - RNA, 19 nt, Homo sapiens
  misc_RNA (1)...(19): siRNA sense strand
gaaaacaaaccagaaagua

SEQ ID NO: 256574 - RNA, 19 nt, Homo sapiens
  misc_RNA (1)...(19): siRNA sense strand
ggagcaggcuguagacaac

SEQ ID NO: 256575 - RNA, 19 nt, Homo sapiens
  misc_RNA (1)...(19): siRNA sense strand
ggagagacggugucaggaa

SEQ ID NO: 256576 - RNA, 19 nt, Homo sapiens
  misc_RNA (1)...(19): siRNA sense strand
gaaaccacucagccagaua

SEQ ID NO: 256577 - RNA, 19 nt, Homo sapiens
  misc_RNA (1)...(19): siRNA sense strand
guucagaccaucuuggaaa

SEQ ID NO: 256578 - RNA, 19 nt, Homo sapiens
  misc_RNA (1)...(19): siRNA sense strand
ccacucagccagauaaaca

SEQ ID NO: 256579 - RNA, 19 nt, Homo sapiens
  misc_RNA (1)...(19): siRNA sense strand
ucgagaaacugcaccuguu

SEQ ID NO: 256580 - RNA, 19 nt, Homo sapiens
  misc_RNA (1)...(19): siRNA sense strand
aaacaaaccagaaaguaag

SEQ ID NO: 256581 - RNA, 19 nt, Homo sapiens
  misc_RNA (1)...(19): siRNA sense strand
caaagagguggauucuaaa

SEQ ID NO: 256582 - RNA, 19 nt, Homo sapiens
  misc_RNA (1)...(19): siRNA sense strand
ucaggaagguucagaccau

SEQ ID NO: 256583 - RNA, 19 nt, Homo sapiens
  misc_RNA (1)...(19): siRNA sense strand
cacaacagccgcaccacua

SEQ ID NO: 256584 - RNA, 19 nt, Homo sapiens
  misc_RNA (1)...(19): siRNA sense strand
aaaccacucagccagauaa

SEQ ID NO: 256585 - RNA, 19 nt, Homo sapiens
  misc_RNA (1)...(19): siRNA sense strand
gaguguggcuacagaagag

SEQ ID NO: 256586 - RNA, 19 nt, Homo sapiens
  misc_RNA (1)...(19): siRNA sense strand
gaugaucgaagaguauuug

SEQ ID NO: 256587 - RNA, 19 nt, Homo sapiens
  misc_RNA (1)...(19): siRNA sense strand
gggaaggccacccugugua

SEQ ID NO: 256588 - RNA, 19 nt, Homo sapiens
  misc_RNA (1)...(19): siRNA sense strand
cagcagcagcgacuucaaa

SEQ ID NO: 256589 - RNA, 19 nt, Homo sapiens
  misc_RNA (1)...(19): siRNA sense strand
gcccaugacccaucgagaa

SEQ ID NO: 256590 - RNA, 19 nt, Homo sapiens
  misc_RNA (1)...(19): siRNA sense strand
gaagauccccacacagaaa

SEQ ID NO: 256591 - RNA, 19 nt, Homo sapiens
  misc_RNA (1)...(19): siRNA sense strand
uggaagccauccuggagaa

SEQ ID NO: 256592 - RNA, 19 nt, Homo sapiens
  misc_RNA (1)...(19): siRNA sense strand
gcuccgaccaggcuacauu

SEQ ID NO: 256593 - RNA, 19 nt, Homo sapiens
  misc_RNA (1)...(19): siRNA sense strand
aaaaguaccugaugaucga

SEQ ID NO: 256594 - RNA, 19 nt, Homo sapiens
  misc_RNA (1)...(19): siRNA sense strand
cagcaaccuugaagcagau

SEQ ID NO: 256595 - RNA, 19 nt, Homo sapiens
  misc_RNA (1)...(19): siRNA sense strand
ggaagguucagaccaucuu

SEQ ID NO: 256596 - RNA, 19 nt, Homo sapiens
  misc_RNA (1)...(19): siRNA sense strand
ccauuccugugcuccauga

SEQ ID NO: 256597 - RNA, 19 nt, Homo sapiens
  misc_RNA (1)...(19): siRNA sense strand
acagaaagccauugauguc

SEQ ID NO: 256598 - RNA, 19 nt, Homo sapiens
  misc_RNA (1)...(19): siRNA sense strand
ggaaggccacccuguguac

SEQ ID NO: 256599 - RNA, 19 nt, Homo sapiens
  misc_RNA (1)...(19): siRNA sense strand
caggucaaguccaggucua

SEQ ID NO: 256600 - RNA, 19 nt, Homo sapiens
  misc_RNA (1)...(19): siRNA sense strand
caucuccauuccggugaua

SEQ ID NO: 256601 - RNA, 19 nt, Homo sapiens
  misc_RNA (1)...(19): siRNA sense strand
cugagaagguagaggugaa

SEQ ID NO: 256602 - RNA, 19 nt, Homo sapiens
  misc_RNA (1)...(19): siRNA sense strand
gguggauucuaaaccuguu

SEQ ID NO: 256603 - RNA, 19 nt, Homo sapiens
  misc_RNA (1)...(19): siRNA sense strand
gaagguucagaccaucuug

SEQ ID NO: 256604 - RNA, 19 nt, Homo sapiens
  misc_RNA (1)...(19): siRNA sense strand
agaaaccacucagccagau

SEQ ID NO: 256605 - RNA, 19 nt, Homo sapiens
  misc_RNA (1)...(19): siRNA sense strand
acacaucccaauucaagug

SEQ ID NO: 256606 - RNA, 19 nt, Homo sapiens
  misc_RNA (1)...(19): siRNA sense strand
ggugcacccuuuccauguc

SEQ ID NO: 256607 - RNA, 19 nt, Homo sapiens
  misc_RNA (1)...(19): siRNA sense strand
ccacagcagcagcgacuuc

SEQ ID NO: 256608 - RNA, 19 nt, Homo sapiens
  misc_RNA (1)...(19): siRNA sense strand
cagcagacaagggcaagaa

SEQ ID NO: 256609 - RNA, 19 nt, Homo sapiens
  misc_RNA (1)...(19): siRNA sense strand
caacuuugaaggcaagaag

SEQ ID NO: 256610 - RNA, 19 nt, Homo sapiens
  misc_RNA (1)...(19): siRNA sense strand
gcaggcuguagacaacuuu

SEQ ID NO: 256611 - RNA, 19 nt, Homo sapiens
  misc_RNA (1)...(19): siRNA sense strand
caagaguguggcuacagaa

SEQ ID NO: 256612 - RNA, 19 nt, Homo sapiens
  misc_RNA (1)...(19): siRNA sense strand
cuggacacaucccaauuca

SEQ ID NO: 256613 - RNA, 19 nt, Homo sapiens
  misc_RNA (1)...(19): siRNA sense strand
ucaaguccaggucuaugaa

SEQ ID NO: 256614 - RNA, 19 nt, Homo sapiens
  misc_RNA (1)...(19): siRNA sense strand
gucaaguccaggucuauga

SEQ ID NO: 256615 - RNA, 19 nt, Homo sapiens
  misc_RNA (1)...(19): siRNA sense strand
gagcugcuggcccuggauu

SEQ ID NO: 256616 - RNA, 19 nt, Homo sapiens
  misc_RNA (1)...(19): siRNA sense strand
gaaggcaagaagacugaca

SEQ ID NO: 256617 - RNA, 19 nt, Homo sapiens
  misc_RNA (1)...(19): siRNA sense strand
cccaugacccaucgagaaa

SEQ ID NO: 256618 - RNA, 19 nt, Homo sapiens
  misc_RNA (1)...(19): siRNA sense strand
cagaagauccccacacaga

SEQ ID NO: 256619 - RNA, 19 nt, Homo sapiens
  misc_RNA (1)...(19): siRNA sense strand
caugacccaucgagaaacu

SEQ ID NO: 256620 - RNA, 19 nt, Homo sapiens
  misc_RNA (1)...(19): siRNA sense strand
ugacagacaccccugguaa

SEQ ID NO: 256621 - RNA, 19 nt, Homo sapiens
  misc_RNA (1)...(19): siRNA sense strand
caucccaauucaagugauc

SEQ ID NO: 256622 - RNA, 19 nt, Homo sapiens
  misc_RNA (1)...(19): siRNA sense strand
auacacgagcagaacguua

SEQ ID NO: 256623 - RNA, 19 nt, Homo sapiens
  misc_RNA (1)...(19): siRNA sense strand
gcaggugcacccuuuccau

SEQ ID NO: 256624 - RNA, 19 nt, Homo sapiens
  misc_RNA (1)...(19): siRNA sense strand
gcagacaagggcaagaaaa

SEQ ID NO: 256625 - RNA, 19 nt, Homo sapiens
  misc_RNA (1)...(19): siRNA sense strand
augcagcgauuccgaacug

SEQ ID NO: 256626 - RNA, 19 nt, Homo sapiens
  misc_RNA (1)...(19): siRNA sense strand
gagacggugucaggaaggu

SEQ ID NO: 256627 - RNA, 19 nt, Homo sapiens
  misc_RNA (1)...(19): siRNA sense strand
ucgaagaguauuugaccaa

SEQ ID NO: 256628 - RNA, 19 nt, Homo sapiens
  misc_RNA (1)...(19): siRNA sense strand
gcagucaucucacuaguua

SEQ ID NO: 256629 - RNA, 19 nt, Homo sapiens
  misc_RNA (1)...(19): siRNA sense strand
caccaggacuugaugaaua

SEQ ID NO: 256630 - RNA, 19 nt, Homo sapiens
  misc_RNA (1)...(19): siRNA sense strand
caacaggugugauguccaa

SEQ ID NO: 256631 - RNA, 19 nt, Homo sapiens
  misc_RNA (1)...(19): siRNA sense strand
ucaguuugcuguacaugua

SEQ ID NO: 256632 - RNA, 19 nt, Homo sapiens
  misc_RNA (1)...(19): siRNA sense strand
uuacacaagugacaagaaa

SEQ ID NO: 256633 - RNA, 19 nt, Homo sapiens
  misc_RNA (1)...(19): siRNA sense strand
aagaaaagccgcagaauua

SEQ ID NO: 256634 - RNA, 19 nt, Homo sapiens
  misc_RNA (1)...(19): siRNA sense strand
acuccaagcugcaggauuu

SEQ ID NO: 256635 - RNA, 19 nt, Homo sapiens
  misc_RNA (1)...(19): siRNA sense strand
ugucggaccuuguuucuau

SEQ ID NO: 256636 - RNA, 19 nt, Homo sapiens
  misc_RNA (1)...(19): siRNA sense strand
cagaggaacauccagcuua

SEQ ID NO: 256637 - RNA, 19 nt, Homo sapiens
  misc_RNA (1)...(19): siRNA sense strand
auacacagauugcaaagga

SEQ ID NO: 256638 - RNA, 19 nt, Homo sapiens
  misc_RNA (1)...(19): siRNA sense strand
gggcauuggugguuggauu

SEQ ID NO: 256639 - RNA, 19 nt, Homo sapiens
  misc_RNA (1)...(19): siRNA sense strand
ggcccaagcugaacuucuu

SEQ ID NO: 256640 - RNA, 19 nt, Homo sapiens
  misc_RNA (1)...(19): siRNA sense strand
caaaagacaguaaagcuua

SEQ ID NO: 256641 - RNA, 19 nt, Homo sapiens
  misc_RNA (1)...(19): siRNA sense strand
ucaaggguaaccagauuua

SEQ ID NO: 256642 - RNA, 19 nt, Homo sapiens
  misc_RNA (1)...(19): siRNA sense strand
gugugaagaugccuaaugu

SEQ ID NO: 256643 - RNA, 19 nt, Homo sapiens
  misc_RNA (1)...(19): siRNA sense strand
gagugacaguucauuuaga

SEQ ID NO: 256644 - RNA, 19 nt, Homo sapiens
  misc_RNA (1)...(19): siRNA sense strand
caauacacaaccagcaaua

SEQ ID NO: 256645 - RNA, 19 nt, Homo sapiens
  misc_RNA (1)...(19): siRNA sense strand
agaaugcuuucaaggguaa

SEQ ID NO: 256646 - RNA, 19 nt, Homo sapiens
  misc_RNA (1)...(19): siRNA sense strand
cuucaaggauccaucaguu

SEQ ID NO: 256647 - RNA, 19 nt, Homo sapiens
  misc_RNA (1)...(19): siRNA sense strand
gcaaaugcagcuucaacug

SEQ ID NO: 256648 - RNA, 19 nt, Homo sapiens
  misc_RNA (1)...(19): siRNA sense strand
caagugacaagaaauguuc

SEQ ID NO: 256649 - RNA, 19 nt, Homo sapiens
  misc_RNA (1)...(19): siRNA sense strand
agaggaacauccagcuuau

SEQ ID NO: 256650 - RNA, 19 nt, Homo sapiens
  misc_RNA (1)...(19): siRNA sense strand
acacaaccagcaauaauga

SEQ ID NO: 256651 - RNA, 19 nt, Homo sapiens
  misc_RNA (1)...(19): siRNA sense strand
caacaggaguuugcaacag

SEQ ID NO: 256652 - RNA, 19 nt, Homo sapiens
  misc_RNA (1)...(19): siRNA sense strand
ggccaccucuuccuagcaa

SEQ ID NO: 256653 - RNA, 19 nt, Homo sapiens
  misc_RNA (1)...(19): siRNA sense strand
gugcagcucagaaugcuuu

SEQ ID NO: 256654 - RNA, 19 nt, Homo sapiens
  misc_RNA (1)...(19): siRNA sense strand
gaacauccagcuuauacac

SEQ ID NO: 256655 - RNA, 19 nt, Homo sapiens
  misc_RNA (1)...(19): siRNA sense strand
uuucaaggguaaccagauu

SEQ ID NO: 256656 - RNA, 19 nt, Homo sapiens
  misc_RNA (1)...(19): siRNA sense strand
caagcugcaggauuucaua

SEQ ID NO: 256657 - RNA, 19 nt, Homo sapiens
  misc_RNA (1)...(19): siRNA sense strand
cgucuauauuugucaguuu

SEQ ID NO: 256658 - RNA, 19 nt, Homo sapiens
  misc_RNA (1)...(19): siRNA sense strand
gaggaacauccagcuuaua

SEQ ID NO: 256659 - RNA, 19 nt, Homo sapiens
  misc_RNA (1)...(19): siRNA sense strand
cgacccggaucucaacaau

SEQ ID NO: 256660 - RNA, 19 nt, Homo sapiens
  misc_RNA (1)...(19): siRNA sense strand
ugacaguucauuuagauuc

SEQ ID NO: 256661 - RNA, 19 nt, Homo sapiens
  misc_RNA (1)...(19): siRNA sense strand
guauucuucuucgucuaua

SEQ ID NO: 256662 - RNA, 19 nt, Homo sapiens
  misc_RNA (1)...(19): siRNA sense strand
uguagacauuccuguagaa

SEQ ID NO: 256663 - RNA, 19 nt, Homo sapiens
  misc_RNA (1)...(19): siRNA sense strand
ggugugauguccaacaaaa

SEQ ID NO: 256664 - RNA, 19 nt, Homo sapiens
  misc_RNA (1)...(19): siRNA sense strand
acacaagugacaagaaaug

SEQ ID NO: 256665 - RNA, 19 nt, Homo sapiens
  misc_RNA (1)...(19): siRNA sense strand
caggugugauguccaacaa

SEQ ID NO: 256666 - RNA, 19 nt, Homo sapiens
  misc_RNA (1)...(19): siRNA sense strand
caucagcagucaucucacu

SEQ ID NO: 256667 - RNA, 19 nt, Homo sapiens
  misc_RNA (1)...(19): siRNA sense strand
gacaguucauuuagauucu

SEQ ID NO: 256668 - RNA, 19 nt, Homo sapiens
  misc_RNA (1)...(19): siRNA sense strand
gugaagaugccuaauguac

SEQ ID NO: 256669 - RNA, 19 nt, Homo sapiens
  misc_RNA (1)...(19): siRNA sense strand
gcugcaggauuucauaacu

SEQ ID NO: 256670 - RNA, 19 nt, Homo sapiens
  misc_RNA (1)...(19): siRNA sense strand
ggacuugaugaauauaauc

SEQ ID NO: 256671 - RNA, 19 nt, Homo sapiens
  misc_RNA (1)...(19): siRNA sense strand
ggugugaagaugccuaaug

SEQ ID NO: 256672 - RNA, 19 nt, Homo sapiens
  misc_RNA (1)...(19): siRNA sense strand
ucucaacaaucccuucaag

SEQ ID NO: 256673 - RNA, 19 nt, Homo sapiens
  misc_RNA (1)...(19): siRNA sense strand
cacaacaggugcuaguuuu

SEQ ID NO: 256674 - RNA, 19 nt, Homo sapiens
  misc_RNA (1)...(19): siRNA sense strand
gucuauauuugucaguuug

SEQ ID NO: 256675 - RNA, 19 nt, Homo sapiens
  misc_RNA (1)...(19): siRNA sense strand
aagcuuauguacuacuugu

SEQ ID NO: 256676 - RNA, 19 nt, Homo sapiens
  misc_RNA (1)...(19): siRNA sense strand
gcaauaaugaaaccaacag

SEQ ID NO: 256677 - RNA, 19 nt, Homo sapiens
  misc_RNA (1)...(19): siRNA sense strand
accaggacuugaugaauau

SEQ ID NO: 256678 - RNA, 19 nt, Homo sapiens
  misc_RNA (1)...(19): siRNA sense strand
gauaaucauagcagcacuu

SEQ ID NO: 256679 - RNA, 19 nt, Homo sapiens
  misc_RNA (1)...(19): siRNA sense strand
gaaaagccgcagaauuaga

SEQ ID NO: 256680 - RNA, 19 nt, Homo sapiens
  misc_RNA (1)...(19): siRNA sense strand
acaaccagcaauaaugaaa

SEQ ID NO: 256681 - RNA, 19 nt, Homo sapiens
  misc_RNA (1)...(19): siRNA sense strand
gaaaccaacagaggaacau

SEQ ID NO: 256682 - RNA, 19 nt, Homo sapiens
  misc_RNA (1)...(19): siRNA sense strand
caaggguaaccagauuuaa

SEQ ID NO: 256683 - RNA, 19 nt, Homo sapiens
  misc_RNA (1)...(19): siRNA sense strand
ucaucucacuaguuauguu

SEQ ID NO: 256684 - RNA, 19 nt, Homo sapiens
  misc_RNA (1)...(19): siRNA sense strand
agugacaguucauuuagau

SEQ ID NO: 256685 - RNA, 19 nt, Homo sapiens
  misc_RNA (1)...(19): siRNA sense strand
gacaguaaagcuuauguac

SEQ ID NO: 256686 - RNA, 19 nt, Homo sapiens
  misc_RNA (1)...(19): siRNA sense strand
agacaguaaagcuuaugua

SEQ ID NO: 256687 - RNA, 19 nt, Homo sapiens
  misc_RNA (1)...(19): siRNA sense strand
gcccaagcugaacuucuua

SEQ ID NO: 256688 - RNA, 19 nt, Homo sapiens
  misc_RNA (1)...(19): siRNA sense strand
gaucucaacaaucccuuca

SEQ ID NO: 256689 - RNA, 19 nt, Homo sapiens
  misc_RNA (1)...(19): siRNA sense strand
gaaggcccaacaggaguuu

SEQ ID NO: 256690 - RNA, 19 nt, Homo sapiens
  misc_RNA (1)...(19): siRNA sense strand
ggcauuggugguuggauuu

SEQ ID NO: 256691 - RNA, 19 nt, Homo sapiens
  misc_RNA (1)...(19): siRNA sense strand
ccagaccgcagcugcaaau

SEQ ID NO: 256692 - RNA, 19 nt, Homo sapiens
  misc_RNA (1)...(19): siRNA sense strand
ucaaggauccaucaguuac

SEQ ID NO: 256693 - RNA, 19 nt, Homo sapiens
  misc_RNA (1)...(19): siRNA sense strand
aaaccucagucaacauggu

SEQ ID NO: 256694 - RNA, 19 nt, Homo sapiens
  misc_RNA (1)...(19): siRNA sense strand
ggaacauccagcuuauaca

SEQ ID NO: 256695 - RNA, 19 nt, Homo sapiens
  misc_RNA (1)...(19): siRNA sense strand
uggacuauaucgcacaaca

SEQ ID NO: 256696 - RNA, 19 nt, Homo sapiens
  misc_RNA (1)...(19): siRNA sense strand
caaccaaaauauuccuguu

SEQ ID NO: 256697 - RNA, 19 nt, Homo sapiens
  misc_RNA (1)...(19): siRNA sense strand
gcaaaggaacaugcauugg

SEQ ID NO: 256698 - RNA, 19 nt, Homo sapiens
  misc_RNA (1)...(19): siRNA sense strand
auacacaaccagcaauaau

SEQ ID NO: 256699 - RNA, 19 nt, Homo sapiens
  misc_RNA (1)...(19): siRNA sense strand
caggacuugaugaauauaa

SEQ ID NO: 256700 - RNA, 19 nt, Homo sapiens
  misc_RNA (1)...(19): siRNA sense strand
cauggacuauaucgcacaa

SEQ ID NO: 256701 - RNA, 19 nt, Homo sapiens
  misc_RNA (1)...(19): siRNA sense strand
cagcagucaucucacuagu

SEQ ID NO: 256702 - RNA, 19 nt, Homo sapiens
  misc_RNA (1)...(19): siRNA sense strand
gcuuauacacagauugcaa

SEQ ID NO: 256703 - RNA, 19 nt, Homo sapiens
  misc_RNA (1)...(19): siRNA sense strand
acaagugacaagaaauguu

SEQ ID NO: 256704 - RNA, 19 nt, Homo sapiens
  misc_RNA (1)...(19): siRNA sense strand
cuguagacauuccuguaga

SEQ ID NO: 256705 - RNA, 19 nt, Homo sapiens
  misc_RNA (1)...(19): siRNA sense strand
ccaccucuuccuagcaauu

SEQ ID NO: 256706 - RNA, 19 nt, Homo sapiens
  misc_RNA (1)...(19): siRNA sense strand
aaagaaaagccgcagaauu

SEQ ID NO: 256707 - RNA, 19 nt, Homo sapiens
  misc_RNA (1)...(19): siRNA sense strand
uacacaaccagcaauaaug

SEQ ID NO: 256708 - RNA, 19 nt, Homo sapiens
  misc_RNA (1)...(19): siRNA sense strand
caauaaugaaaccaacaga

SEQ ID NO: 256709 - RNA, 19 nt, Homo sapiens
  misc_RNA (1)...(19): siRNA sense strand
cagcucagaaugcuuucaa

SEQ ID NO: 256710 - RNA, 19 nt, Homo sapiens
  misc_RNA (1)...(19): siRNA sense strand
aaugaaaccaacagaggaa

SEQ ID NO: 256711 - RNA, 19 nt, Homo sapiens
  misc_RNA (1)...(19): siRNA sense strand
ggauccaucaguuacacaa

SEQ ID NO: 256712 - RNA, 19 nt, Homo sapiens
  misc_RNA (1)...(19): siRNA sense strand
ucagucaacaugguagaaa

SEQ ID NO: 256713 - RNA, 19 nt, Homo sapiens
  misc_RNA (1)...(19): siRNA sense strand
cugcaggauuucauaacug

SEQ ID NO: 256714 - RNA, 19 nt, Homo sapiens
  misc_RNA (1)...(19): siRNA sense strand
ccaauacacaaccagcaau

SEQ ID NO: 256715 - RNA, 19 nt, Homo sapiens
  misc_RNA (1)...(19): siRNA sense strand
cauccagcuuauacacaga

SEQ ID NO: 256716 - RNA, 19 nt, Homo sapiens
  misc_RNA (1)...(19): siRNA sense strand
caaggauccaucaguuaca

SEQ ID NO: 256717 - RNA, 19 nt, Homo sapiens
  misc_RNA (1)...(19): siRNA sense strand
agucaucucacuaguuaug

SEQ ID NO: 256718 - RNA, 19 nt, Homo sapiens
  misc_RNA (1)...(19): siRNA sense strand
cuuauacacagauugcaaa

SEQ ID NO: 256719 - RNA, 19 nt, Homo sapiens
  misc_RNA (1)...(19): siRNA sense strand
uucaaggauccaucaguua

SEQ ID NO: 256720 - RNA, 19 nt, Homo sapiens
  misc_RNA (1)...(19): siRNA sense strand
ugccuaauguacccaauac

SEQ ID NO: 256721 - RNA, 19 nt, Homo sapiens
  misc_RNA (1)...(19): siRNA sense strand
ccaacaggaguuugcaaca

SEQ ID NO: 256722 - RNA, 19 nt, Homo sapiens
  misc_RNA (1)...(19): siRNA sense strand
ccagcaauaaugaaaccaa

SEQ ID NO: 256723 - RNA, 19 nt, Homo sapiens
  misc_RNA (1)...(19): siRNA sense strand
uuucgacaguaacccguuu

SEQ ID NO: 256724 - RNA, 19 nt, Homo sapiens
  misc_RNA (1)...(19): siRNA sense strand
caccaggacuugaugaaua

SEQ ID NO: 256725 - RNA, 19 nt, Homo sapiens
  misc_RNA (1)...(19): siRNA sense strand
uuacacaagugacaagaaa

SEQ ID NO: 256726 - RNA, 19 nt, Homo sapiens
  misc_RNA (1)...(19): siRNA sense strand
aagaaaagccgcagaauua

SEQ ID NO: 256727 - RNA, 19 nt, Homo sapiens
  misc_RNA (1)...(19): siRNA sense strand
ugucggaccuuguuucuau

SEQ ID NO: 256728 - RNA, 19 nt, Homo sapiens
  misc_RNA (1)...(19): siRNA sense strand
cagaggaacauccagcuua

SEQ ID NO: 256729 - RNA, 19 nt, Homo sapiens
  misc_RNA (1)...(19): siRNA sense strand
auacacagauugcaaagga

SEQ ID NO: 256730 - RNA, 19 nt, Homo sapiens
  misc_RNA (1)...(19): siRNA sense strand
ggcccaagcugaacuucuu

SEQ ID NO: 256731 - RNA, 19 nt, Homo sapiens
  misc_RNA (1)...(19): siRNA sense strand
caaaagacaguaaagcuua

SEQ ID NO: 256732 - RNA, 19 nt, Homo sapiens
  misc_RNA (1)...(19): siRNA sense strand
gugugaagaugccuaaugu

SEQ ID NO: 256733 - RNA, 19 nt, Homo sapiens
  misc_RNA (1)...(19): siRNA sense strand
caauacacaaccagcaaua

SEQ ID NO: 256734 - RNA, 19 nt, Homo sapiens
  misc_RNA (1)...(19): siRNA sense strand
cuucaaggauccaucaguu

SEQ ID NO: 256735 - RNA, 19 nt, Homo sapiens
  misc_RNA (1)...(19): siRNA sense strand
caagugacaagaaauguuc

SEQ ID NO: 256736 - RNA, 19 nt, Homo sapiens
  misc_RNA (1)...(19): siRNA sense strand
agaggaacauccagcuuau

SEQ ID NO: 256737 - RNA, 19 nt, Homo sapiens
  misc_RNA (1)...(19): siRNA sense strand
acacaaccagcaauaauga

SEQ ID NO: 256738 - RNA, 19 nt, Homo sapiens
  misc_RNA (1)...(19): siRNA sense strand
ggccaccucuuccuagcaa

SEQ ID NO: 256739 - RNA, 19 nt, Homo sapiens
  misc_RNA (1)...(19): siRNA sense strand
gaacauccagcuuauacac

SEQ ID NO: 256740 - RNA, 19 nt, Homo sapiens
  misc_RNA (1)...(19): siRNA sense strand
cgacccggaucucaacaau

SEQ ID NO: 256741 - RNA, 19 nt, Homo sapiens
  misc_RNA (1)...(19): siRNA sense strand
gaggaacauccagcuuaua

SEQ ID NO: 256742 - RNA, 19 nt, Homo sapiens
  misc_RNA (1)...(19): siRNA sense strand
acacaagugacaagaaaug

SEQ ID NO: 256743 - RNA, 19 nt, Homo sapiens
  misc_RNA (1)...(19): siRNA sense strand
uguagacauuccuguagaa

SEQ ID NO: 256744 - RNA, 19 nt, Homo sapiens
  misc_RNA (1)...(19): siRNA sense strand
gugaagaugccuaauguac

SEQ ID NO: 256745 - RNA, 19 nt, Homo sapiens
  misc_RNA (1)...(19): siRNA sense strand
ggacuugaugaauauaauc

SEQ ID NO: 256746 - RNA, 19 nt, Homo sapiens
  misc_RNA (1)...(19): siRNA sense strand
ggugugaagaugccuaaug

SEQ ID NO: 256747 - RNA, 19 nt, Homo sapiens
  misc_RNA (1)...(19): siRNA sense strand
gcaauaaugaaaccaacag

SEQ ID NO: 256748 - RNA, 19 nt, Homo sapiens
  misc_RNA (1)...(19): siRNA sense strand
aagcuuauguacuacuugu

SEQ ID NO: 256749 - RNA, 19 nt, Homo sapiens
  misc_RNA (1)...(19): siRNA sense strand
ucucaacaaucccuucaag

SEQ ID NO: 256750 - RNA, 19 nt, Homo sapiens
  misc_RNA (1)...(19): siRNA sense strand
accaggacuugaugaauau

SEQ ID NO: 256751 - RNA, 19 nt, Homo sapiens
  misc_RNA (1)...(19): siRNA sense strand
gaaaagccgcagaauuaga

SEQ ID NO: 256752 - RNA, 19 nt, Homo sapiens
  misc_RNA (1)...(19): siRNA sense strand
acaaccagcaauaaugaaa

SEQ ID NO: 256753 - RNA, 19 nt, Homo sapiens
  misc_RNA (1)...(19): siRNA sense strand
gaaaccaacagaggaacau

SEQ ID NO: 256754 - RNA, 19 nt, Homo sapiens
  misc_RNA (1)...(19): siRNA sense strand
gacaguaaagcuuauguac

SEQ ID NO: 256755 - RNA, 19 nt, Homo sapiens
  misc_RNA (1)...(19): siRNA sense strand
agacaguaaagcuuaugua

SEQ ID NO: 256756 - RNA, 19 nt, Homo sapiens
  misc_RNA (1)...(19): siRNA sense strand
gaucucaacaaucccuuca

SEQ ID NO: 256757 - RNA, 19 nt, Homo sapiens
  misc_RNA (1)...(19): siRNA sense strand
gcccaagcugaacuucuua

SEQ ID NO: 256758 - RNA, 19 nt, Homo sapiens
  misc_RNA (1)...(19): siRNA sense strand
aaaccucagucaacauggu

SEQ ID NO: 256759 - RNA, 19 nt, Homo sapiens
  misc_RNA (1)...(19): siRNA sense strand
ucaaggauccaucaguuac

SEQ ID NO: 256760 - RNA, 19 nt, Homo sapiens
  misc_RNA (1)...(19): siRNA sense strand
auacacaaccagcaauaau

SEQ ID NO: 256761 - RNA, 19 nt, Homo sapiens
  misc_RNA (1)...(19): siRNA sense strand
gcaaaggaacaugcauugg

SEQ ID NO: 256762 - RNA, 19 nt, Homo sapiens
  misc_RNA (1)...(19): siRNA sense strand
ggaacauccagcuuauaca

SEQ ID NO: 256763 - RNA, 19 nt, Homo sapiens
  misc_RNA (1)...(19): siRNA sense strand
caggacuugaugaauauaa

SEQ ID NO: 256764 - RNA, 19 nt, Homo sapiens
  misc_RNA (1)...(19): siRNA sense strand
uacacaaccagcaauaaug

SEQ ID NO: 256765 - RNA, 19 nt, Homo sapiens
  misc_RNA (1)...(19): siRNA sense strand
cuguagacauuccuguaga

SEQ ID NO: 256766 - RNA, 19 nt, Homo sapiens
  misc_RNA (1)...(19): siRNA sense strand
ccaccucuuccuagcaauu

SEQ ID NO: 256767 - RNA, 19 nt, Homo sapiens
  misc_RNA (1)...(19): siRNA sense strand
aaagaaaagccgcagaauu

SEQ ID NO: 256768 - RNA, 19 nt, Homo sapiens
  misc_RNA (1)...(19): siRNA sense strand
acaagugacaagaaauguu

SEQ ID NO: 256769 - RNA, 19 nt, Homo sapiens
  misc_RNA (1)...(19): siRNA sense strand
gcuuauacacagauugcaa

SEQ ID NO: 256770 - RNA, 19 nt, Homo sapiens
  misc_RNA (1)...(19): siRNA sense strand
ggauccaucaguuacacaa

SEQ ID NO: 256771 - RNA, 19 nt, Homo sapiens
  misc_RNA (1)...(19): siRNA sense strand
ucagucaacaugguagaaa

SEQ ID NO: 256772 - RNA, 19 nt, Homo sapiens
  misc_RNA (1)...(19): siRNA sense strand
aaugaaaccaacagaggaa

SEQ ID NO: 256773 - RNA, 19 nt, Homo sapiens
  misc_RNA (1)...(19): siRNA sense strand
caauaaugaaaccaacaga

SEQ ID NO: 256774 - RNA, 19 nt, Homo sapiens
  misc_RNA (1)...(19): siRNA sense strand
ccaauacacaaccagcaau

SEQ ID NO: 256775 - RNA, 19 nt, Homo sapiens
  misc_RNA (1)...(19): siRNA sense strand
cauccagcuuauacacaga

SEQ ID NO: 256776 - RNA, 19 nt, Homo sapiens
  misc_RNA (1)...(19): siRNA sense strand
caaggauccaucaguuaca

SEQ ID NO: 256777 - RNA, 19 nt, Homo sapiens
  misc_RNA (1)...(19): siRNA sense strand
ugccuaauguacccaauac

SEQ ID NO: 256778 - RNA, 19 nt, Homo sapiens
  misc_RNA (1)...(19): siRNA sense strand
uuucgacaguaacccguuu

SEQ ID NO: 256779 - RNA, 19 nt, Homo sapiens
  misc_RNA (1)...(19): siRNA sense strand
cuuauacacagauugcaaa

SEQ ID NO: 256780 - RNA, 19 nt, Homo sapiens
  misc_RNA (1)...(19): siRNA sense strand
uucaaggauccaucaguua

SEQ ID NO: 256781 - RNA, 19 nt, Homo sapiens
  misc_RNA (1)...(19): siRNA sense strand
ccagcaauaaugaaaccaa

SEQ ID NO: 256782 - RNA, 19 nt, Homo sapiens
  misc_RNA (1)...(19): siRNA sense strand
cagaagaacugagcuauuu

SEQ ID NO: 256783 - RNA, 19 nt, Homo sapiens
  misc_RNA (1)...(19): siRNA sense strand
gaaagaacaugaccaccuu

SEQ ID NO: 256784 - RNA, 19 nt, Homo sapiens
  misc_RNA (1)...(19): siRNA sense strand
gaacuugaccugaaacuag

SEQ ID NO: 256785 - RNA, 19 nt, Homo sapiens
  misc_RNA (1)...(19): siRNA sense strand
gaacaugaccaccuucgaa

SEQ ID NO: 256786 - RNA, 19 nt, Homo sapiens
  misc_RNA (1)...(19): siRNA sense strand
gaagucaauucacagcaaa

SEQ ID NO: 256787 - RNA, 19 nt, Homo sapiens
  misc_RNA (1)...(19): siRNA sense strand
gggaagaucucaggaaaca

SEQ ID NO: 256788 - RNA, 19 nt, Homo sapiens
  misc_RNA (1)...(19): siRNA sense strand
aaauaugacuucacagaga

SEQ ID NO: 256789 - RNA, 19 nt, Homo sapiens
  misc_RNA (1)...(19): siRNA sense strand
ggaagacgcgacagguaua

SEQ ID NO: 256790 - RNA, 19 nt, Homo sapiens
  misc_RNA (1)...(19): siRNA sense strand
gagacauauugcaggauua

SEQ ID NO: 256791 - RNA, 19 nt, Homo sapiens
  misc_RNA (1)...(19): siRNA sense strand
ggaguaaacaacagaagaa

SEQ ID NO: 256792 - RNA, 19 nt, Homo sapiens
  misc_RNA (1)...(19): siRNA sense strand
ggaaagggagaaucuuaug

SEQ ID NO: 256793 - RNA, 19 nt, Homo sapiens
  misc_RNA (1)...(19): siRNA sense strand
ucacagagaggaauguuga

SEQ ID NO: 256794 - RNA, 19 nt, Homo sapiens
  misc_RNA (1)...(19): siRNA sense strand
caagacagaauguuugaga

SEQ ID NO: 256795 - RNA, 19 nt, Homo sapiens
  misc_RNA (1)...(19): siRNA sense strand
caacagaagaacugagcua

SEQ ID NO: 256796 - RNA, 19 nt, Homo sapiens
  misc_RNA (1)...(19): siRNA sense strand
aaaugaacuugaccugaaa

SEQ ID NO: 256797 - RNA, 19 nt, Homo sapiens
  misc_RNA (1)...(19): siRNA sense strand
guaaacaacagaagaacug

SEQ ID NO: 256798 - RNA, 19 nt, Homo sapiens
  misc_RNA (1)...(19): siRNA sense strand
agagacauauugcaggauu

SEQ ID NO: 256799 - RNA, 19 nt, Homo sapiens
  misc_RNA (1)...(19): siRNA sense strand
gaaaauaugacuucacaga

SEQ ID NO: 256800 - RNA, 19 nt, Homo sapiens
  misc_RNA (1)...(19): siRNA sense strand
gacagaauguuugagacaa

SEQ ID NO: 256801 - RNA, 19 nt, Homo sapiens
  misc_RNA (1)...(19): siRNA sense strand
gcaggauuauacacaugaa

SEQ ID NO: 256802 - RNA, 19 nt, Homo sapiens
  misc_RNA (1)...(19): siRNA sense strand
aaaaugaacuugaccugaa

SEQ ID NO: 256803 - RNA, 19 nt, Homo sapiens
  misc_RNA (1)...(19): siRNA sense strand
cgauugagauugaacaacu

SEQ ID NO: 256804 - RNA, 19 nt, Homo sapiens
  misc_RNA (1)...(19): siRNA sense strand
cgggaaagggagaaucuua

SEQ ID NO: 256805 - RNA, 19 nt, Homo sapiens
  misc_RNA (1)...(19): siRNA sense strand
caacaccccuuuuaaaugg

SEQ ID NO: 256806 - RNA, 19 nt, Homo sapiens
  misc_RNA (1)...(19): siRNA sense strand
gauugagauugaacaacuu

SEQ ID NO: 256807 - RNA, 19 nt, Homo sapiens
  misc_RNA (1)...(19): siRNA sense strand
gaucaagccaagacagaau

SEQ ID NO: 256808 - RNA, 19 nt, Homo sapiens
  misc_RNA (1)...(19): siRNA sense strand
gaaagggagaaucuuaugg

SEQ ID NO: 256809 - RNA, 19 nt, Homo sapiens
  misc_RNA (1)...(19): siRNA sense strand
gggaaagggagaaucuuau

SEQ ID NO: 256810 - RNA, 19 nt, Homo sapiens
  misc_RNA (1)...(19): siRNA sense strand
aagcaaacuuuauggcaau

SEQ ID NO: 256811 - RNA, 19 nt, Homo sapiens
  misc_RNA (1)...(19): siRNA sense strand
cgacagguauaguucugau

SEQ ID NO: 256812 - RNA, 19 nt, Homo sapiens
  misc_RNA (1)...(19): siRNA sense strand
cugggaagaucucaggaaa

SEQ ID NO: 256813 - RNA, 19 nt, Homo sapiens
  misc_RNA (1)...(19): siRNA sense strand
agagaggaauguugaaguc

SEQ ID NO: 256814 - RNA, 19 nt, Homo sapiens
  misc_RNA (1)...(19): siRNA sense strand
ggauuauacacaugaauuc

SEQ ID NO: 256815 - RNA, 19 nt, Homo sapiens
  misc_RNA (1)...(19): siRNA sense strand
cagaauguuugagacaaug

SEQ ID NO: 256816 - RNA, 19 nt, Homo sapiens
  misc_RNA (1)...(19): siRNA sense strand
cggcagggaccagcaguua

SEQ ID NO: 256817 - RNA, 19 nt, Homo sapiens
  misc_RNA (1)...(19): siRNA sense strand
acagaauguuugagacaau

SEQ ID NO: 256818 - RNA, 19 nt, Homo sapiens
  misc_RNA (1)...(19): siRNA sense strand
ggcagaauauaccaacagu

SEQ ID NO: 256819 - RNA, 19 nt, Homo sapiens
  misc_RNA (1)...(19): siRNA sense strand
gccaagacagaauguuuga

SEQ ID NO: 256820 - RNA, 19 nt, Homo sapiens
  misc_RNA (1)...(19): siRNA sense strand
ucugauagaagagacaaua

SEQ ID NO: 256821 - RNA, 19 nt, Homo sapiens
  misc_RNA (1)...(19): siRNA sense strand
aaaagugggucuggaguaa

SEQ ID NO: 256822 - RNA, 19 nt, Homo sapiens
  misc_RNA (1)...(19): siRNA sense strand
gcuguaugcguuccauuga

SEQ ID NO: 256823 - RNA, 19 nt, Homo sapiens
  misc_RNA (1)...(19): siRNA sense strand
aagccaagacagaauguuu

SEQ ID NO: 256824 - RNA, 19 nt, Homo sapiens
  misc_RNA (1)...(19): siRNA sense strand
gauagaagagacaauaagc

SEQ ID NO: 256825 - RNA, 19 nt, Homo sapiens
  misc_RNA (1)...(19): siRNA sense strand
acagcggcauagagacaua

SEQ ID NO: 256826 - RNA, 19 nt, Homo sapiens
  misc_RNA (1)...(19): siRNA sense strand
gauacaacaccccuuuuaa

SEQ ID NO: 256827 - RNA, 19 nt, Homo sapiens
  misc_RNA (1)...(19): siRNA sense strand
acacuuuggccaaucguuu

SEQ ID NO: 256828 - RNA, 19 nt, Homo sapiens
  misc_RNA (1)...(19): siRNA sense strand
ggaucaagccaagacagaa

SEQ ID NO: 256829 - RNA, 19 nt, Homo sapiens
  misc_RNA (1)...(19): siRNA sense strand
cauuacagcggcauagaga

SEQ ID NO: 256830 - RNA, 19 nt, Homo sapiens
  misc_RNA (1)...(19): siRNA sense strand
gcagggaccagcaguuacu

SEQ ID NO: 256831 - RNA, 19 nt, Homo sapiens
  misc_RNA (1)...(19): siRNA sense strand
cagcccugaugcauacauu

SEQ ID NO: 256832 - RNA, 19 nt, Homo sapiens
  misc_RNA (1)...(19): siRNA sense strand
uagaagagacaauaagcau

SEQ ID NO: 256833 - RNA, 19 nt, Homo sapiens
  misc_RNA (1)...(19): siRNA sense strand
ugaccaccuucgaaacuca

SEQ ID NO: 256834 - RNA, 19 nt, Homo sapiens
  misc_RNA (1)...(19): siRNA sense strand
acagaagaacugagcuauu

SEQ ID NO: 256835 - RNA, 19 nt, Homo sapiens
  misc_RNA (1)...(19): siRNA sense strand
ggagaaucuuaugggauca

SEQ ID NO: 256836 - RNA, 19 nt, Homo sapiens
  misc_RNA (1)...(19): siRNA sense strand
gaagacgcgacagguauag

SEQ ID NO: 256837 - RNA, 19 nt, Homo sapiens
  misc_RNA (1)...(19): siRNA sense strand
acagcaaaaugaacacuuu

SEQ ID NO: 256838 - RNA, 19 nt, Homo sapiens
  misc_RNA (1)...(19): siRNA sense strand
cuuaugggaucaguacgaa

SEQ ID NO: 256839 - RNA, 19 nt, Homo sapiens
  misc_RNA (1)...(19): siRNA sense strand
gguguuauugggaucugua

SEQ ID NO: 256840 - RNA, 19 nt, Homo sapiens
  misc_RNA (1)...(19): siRNA sense strand
aaugaacacuuuggccaau

SEQ ID NO: 256841 - RNA, 19 nt, Homo sapiens
  misc_RNA (1)...(19): siRNA sense strand
ggucuggaguaaacaacag

SEQ ID NO: 256842 - RNA, 19 nt, Homo sapiens
  misc_RNA (1)...(19): siRNA sense strand
gacagguauaguucugaua

SEQ ID NO: 256843 - RNA, 19 nt, Homo sapiens
  misc_RNA (1)...(19): siRNA sense strand
ucaauucacagcaaaauga

SEQ ID NO: 256844 - RNA, 19 nt, Homo sapiens
  misc_RNA (1)...(19): siRNA sense strand
agaagagacaauaagcauu

SEQ ID NO: 256845 - RNA, 19 nt, Homo sapiens
  misc_RNA (1)...(19): siRNA sense strand
ucagcaaacuauguacaag

SEQ ID NO: 256846 - RNA, 19 nt, Homo sapiens
  misc_RNA (1)...(19): siRNA sense strand
gcgggacucgcucauccua

SEQ ID NO: 256847 - RNA, 19 nt, Homo sapiens
  misc_RNA (1)...(19): siRNA sense strand
uggaagacgcgacagguau

SEQ ID NO: 256848 - RNA, 19 nt, Homo sapiens
  misc_RNA (1)...(19): siRNA sense strand
agacagaauguuugagaca

SEQ ID NO: 256849 - RNA, 19 nt, Homo sapiens
  misc_RNA (1)...(19): siRNA sense strand
cagcaaacuauguacaagu

SEQ ID NO: 256850 - RNA, 19 nt, Homo sapiens
  misc_RNA (1)...(19): siRNA sense strand
gagaggaauguugaaguca

SEQ ID NO: 256851 - RNA, 19 nt, Homo sapiens
  misc_RNA (1)...(19): siRNA sense strand
gaucgucugauagaagaga

SEQ ID NO: 256852 - RNA, 19 nt, Homo sapiens
  misc_RNA (1)...(19): siRNA sense strand
uaaacaacagaagaacuga

SEQ ID NO: 256853 - RNA, 19 nt, Homo sapiens
  misc_RNA (1)...(19): siRNA sense strand
agacauauugcaggauuau

SEQ ID NO: 256854 - RNA, 19 nt, Homo sapiens
  misc_RNA (1)...(19): siRNA sense strand
agacgcgacagguauaguu

SEQ ID NO: 256855 - RNA, 19 nt, Homo sapiens
  misc_RNA (1)...(19): siRNA sense strand
caaacuuuauggcaauacg

SEQ ID NO: 256856 - RNA, 19 nt, Homo sapiens
  misc_RNA (1)...(19): siRNA sense strand
gacauauugcaggauuaua

SEQ ID NO: 256857 - RNA, 19 nt, Homo sapiens
  misc_RNA (1)...(19): siRNA sense strand
ugauacaacaccccuuuua

SEQ ID NO: 256858 - RNA, 19 nt, Homo sapiens
  misc_RNA (1)...(19): siRNA sense strand
cucgacagcuggaaaauga

SEQ ID NO: 256859 - RNA, 19 nt, Homo sapiens
  misc_RNA (1)...(19): siRNA sense strand
gaaucuuaugggaucagua

SEQ ID NO: 256860 - RNA, 19 nt, Homo sapiens
  misc_RNA (1)...(19): siRNA sense strand
cagagaggaauguugaagu

SEQ ID NO: 256861 - RNA, 19 nt, Homo sapiens
  misc_RNA (1)...(19): siRNA sense strand
aacaugaccaccuucgaaa

SEQ ID NO: 256862 - RNA, 19 nt, Homo sapiens
  misc_RNA (1)...(19): siRNA sense strand
guacaaguuacagucauag

SEQ ID NO: 256863 - RNA, 19 nt, Homo sapiens
  misc_RNA (1)...(19): siRNA sense strand
acgaaaagauauugaguca

SEQ ID NO: 256864 - RNA, 19 nt, Homo sapiens
  misc_RNA (1)...(19): siRNA sense strand
ggacagaaaucagaaauua

SEQ ID NO: 256865 - RNA, 19 nt, Homo sapiens
  misc_RNA (1)...(19): siRNA sense strand
gaaauagacucuguagaua

SEQ ID NO: 256866 - RNA, 19 nt, Homo sapiens
  misc_RNA (1)...(19): siRNA sense strand
gaagaaggcauccaagaua

SEQ ID NO: 256867 - RNA, 19 nt, Homo sapiens
  misc_RNA (1)...(19): siRNA sense strand
caacauccuucuauuagua

SEQ ID NO: 256868 - RNA, 19 nt, Homo sapiens
  misc_RNA (1)...(19): siRNA sense strand
gaacguccuuggaaacuug

SEQ ID NO: 256869 - RNA, 19 nt, Homo sapiens
  misc_RNA (1)...(19): siRNA sense strand
gaucacauauauugacuug

SEQ ID NO: 256870 - RNA, 19 nt, Homo sapiens
  misc_RNA (1)...(19): siRNA sense strand
agacacaacuaaagcauuu

SEQ ID NO: 256871 - RNA, 19 nt, Homo sapiens
  misc_RNA (1)...(19): siRNA sense strand
ucaaagaguuggagcagaa

SEQ ID NO: 256872 - RNA, 19 nt, Homo sapiens
  misc_RNA (1)...(19): siRNA sense strand
gaaguucuuucauuugaug

SEQ ID NO: 256873 - RNA, 19 nt, Homo sapiens
  misc_RNA (1)...(19): siRNA sense strand
ggagggagguaguagaaga

SEQ ID NO: 256874 - RNA, 19 nt, Homo sapiens
  misc_RNA (1)...(19): siRNA sense strand
ugcaaacucugaucacaua

SEQ ID NO: 256875 - RNA, 19 nt, Homo sapiens
  misc_RNA (1)...(19): siRNA sense strand
ugaaauagacucuguagau

SEQ ID NO: 256876 - RNA, 19 nt, Homo sapiens
  misc_RNA (1)...(19): siRNA sense strand
gaaaccaacauccuucuau

SEQ ID NO: 256877 - RNA, 19 nt, Homo sapiens
  misc_RNA (1)...(19): siRNA sense strand
caagagaaugagagaaaua

SEQ ID NO: 256878 - RNA, 19 nt, Homo sapiens
  misc_RNA (1)...(19): siRNA sense strand
gcaacugcguaacugauga

SEQ ID NO: 256879 - RNA, 19 nt, Homo sapiens
  misc_RNA (1)...(19): siRNA sense strand
ccugaaaucugaugaaugg

SEQ ID NO: 256880 - RNA, 19 nt, Homo sapiens
  misc_RNA (1)...(19): siRNA sense strand
aaaccaacauccuucuauu

SEQ ID NO: 256881 - RNA, 19 nt, Homo sapiens
  misc_RNA (1)...(19): siRNA sense strand
gaggagcacccaucccaua

SEQ ID NO: 256882 - RNA, 19 nt, Homo sapiens
  misc_RNA (1)...(19): siRNA sense strand
acaagaaacuggagaggau

SEQ ID NO: 256883 - RNA, 19 nt, Homo sapiens
  misc_RNA (1)...(19): siRNA sense strand
gaacuucuccaagcacaaa

SEQ ID NO: 256884 - RNA, 19 nt, Homo sapiens
  misc_RNA (1)...(19): siRNA sense strand
gcugaucgcugaccuggau

SEQ ID NO: 256885 - RNA, 19 nt, Homo sapiens
  misc_RNA (1)...(19): siRNA sense strand
uaaagcauuugaccugaga

SEQ ID NO: 256886 - RNA, 19 nt, Homo sapiens
  misc_RNA (1)...(19): siRNA sense strand
ggaagcagacacaacuaaa

SEQ ID NO: 256887 - RNA, 19 nt, Homo sapiens
  misc_RNA (1)...(19): siRNA sense strand
uggagaggauucuaacaaa

SEQ ID NO: 256888 - RNA, 19 nt, Homo sapiens
  misc_RNA (1)...(19): siRNA sense strand
gaaaagguccucaagagaa

SEQ ID NO: 256889 - RNA, 19 nt, Homo sapiens
  misc_RNA (1)...(19): siRNA sense strand
guaucacacuuuaaccaaa

SEQ ID NO: 256890 - RNA, 19 nt, Homo sapiens
  misc_RNA (1)...(19): siRNA sense strand
uuaguaggcuucaggaaau

SEQ ID NO: 256891 - RNA, 19 nt, Homo sapiens
  misc_RNA (1)...(19): siRNA sense strand
gagcacccaucccauaaag

SEQ ID NO: 256892 - RNA, 19 nt, Homo sapiens
  misc_RNA (1)...(19): siRNA sense strand
ggauugaaauacagaacau

SEQ ID NO: 256893 - RNA, 19 nt, Homo sapiens
  misc_RNA (1)...(19): siRNA sense strand
caaacucugaucacauaua

SEQ ID NO: 256894 - RNA, 19 nt, Homo sapiens
  misc_RNA (1)...(19): siRNA sense strand
acaaaacccuucugaauug

SEQ ID NO: 256895 - RNA, 19 nt, Homo sapiens
  misc_RNA (1)...(19): siRNA sense strand
ggagauauucagcaagcua

SEQ ID NO: 256896 - RNA, 19 nt, Homo sapiens
  misc_RNA (1)...(19): siRNA sense strand
guguaaggcugccaggaaa

SEQ ID NO: 256897 - RNA, 19 nt, Homo sapiens
  misc_RNA (1)...(19): siRNA sense strand
gcacaaaacccuucugaau

SEQ ID NO: 256898 - RNA, 19 nt, Homo sapiens
  misc_RNA (1)...(19): siRNA sense strand
gaccugagacagaaucauu

SEQ ID NO: 256899 - RNA, 19 nt, Homo sapiens
  misc_RNA (1)...(19): siRNA sense strand
aagaaggcauccaagauau

SEQ ID NO: 256900 - RNA, 19 nt, Homo sapiens
  misc_RNA (1)...(19): siRNA sense strand
gaccugaaaucugaugaau

SEQ ID NO: 256901 - RNA, 19 nt, Homo sapiens
  misc_RNA (1)...(19): siRNA sense strand
gagagaaaauugugccauu

SEQ ID NO: 256902 - RNA, 19 nt, Homo sapiens
  misc_RNA (1)...(19): siRNA sense strand
gaaggcauccaagauauca

SEQ ID NO: 256903 - RNA, 19 nt, Homo sapiens
  misc_RNA (1)...(19): siRNA sense strand
ggaggcaacugcguaacug

SEQ ID NO: 256904 - RNA, 19 nt, Homo sapiens
  misc_RNA (1)...(19): siRNA sense strand
agcaagguaucacacuuua

SEQ ID NO: 256905 - RNA, 19 nt, Homo sapiens
  misc_RNA (1)...(19): siRNA sense strand
gaaccgauaagaacuacau

SEQ ID NO: 256906 - RNA, 19 nt, Homo sapiens
  misc_RNA (1)...(19): siRNA sense strand
ggaaaccaacauccuucua

SEQ ID NO: 256907 - RNA, 19 nt, Homo sapiens
  misc_RNA (1)...(19): siRNA sense strand
gaugagguaagucuugaaa

SEQ ID NO: 256908 - RNA, 19 nt, Homo sapiens
  misc_RNA (1)...(19): siRNA sense strand
ggguuuaauuggacaguug

SEQ ID NO: 256909 - RNA, 19 nt, Homo sapiens
  misc_RNA (1)...(19): siRNA sense strand
gcauuugaccugagacaga

SEQ ID NO: 256910 - RNA, 19 nt, Homo sapiens
  misc_RNA (1)...(19): siRNA sense strand
aaucgaagacugcaugaaa

SEQ ID NO: 256911 - RNA, 19 nt, Homo sapiens
  misc_RNA (1)...(19): siRNA sense strand
ggagaggauucuaacaaaa

SEQ ID NO: 256912 - RNA, 19 nt, Homo sapiens
  misc_RNA (1)...(19): siRNA sense strand
ggaacguccuuggaaacuu

SEQ ID NO: 256913 - RNA, 19 nt, Homo sapiens
  misc_RNA (1)...(19): siRNA sense strand
ugcaagagauaaucgaaga

SEQ ID NO: 256914 - RNA, 19 nt, Homo sapiens
  misc_RNA (1)...(19): siRNA sense strand
ugaccuggaugcucuagau

SEQ ID NO: 256915 - RNA, 19 nt, Homo sapiens
  misc_RNA (1)...(19): siRNA sense strand
cuuggaaacuugucugaga

SEQ ID NO: 256916 - RNA, 19 nt, Homo sapiens
  misc_RNA (1)...(19): siRNA sense strand
aaacuggagaggauucuaa

SEQ ID NO: 256917 - RNA, 19 nt, Homo sapiens
  misc_RNA (1)...(19): siRNA sense strand
gaagcagacacaacuaaag

SEQ ID NO: 256918 - RNA, 19 nt, Homo sapiens
  misc_RNA (1)...(19): siRNA sense strand
aaccaacauccuucuauua

SEQ ID NO: 256919 - RNA, 19 nt, Homo sapiens
  misc_RNA (1)...(19): siRNA sense strand
gacaagaauuacaagaaac

SEQ ID NO: 256920 - RNA, 19 nt, Homo sapiens
  misc_RNA (1)...(19): siRNA sense strand
aaagcaagguaucacacuu

SEQ ID NO: 256921 - RNA, 19 nt, Homo sapiens
  misc_RNA (1)...(19): siRNA sense strand
ggaagaggaagcagacaca

SEQ ID NO: 256922 - RNA, 19 nt, Homo sapiens
  misc_RNA (1)...(19): siRNA sense strand
gcaagguaucacacuuuaa

SEQ ID NO: 256923 - RNA, 19 nt, Homo sapiens
  misc_RNA (1)...(19): siRNA sense strand
acucugaucacauauauug

SEQ ID NO: 256924 - RNA, 19 nt, Homo sapiens
  misc_RNA (1)...(19): siRNA sense strand
ccaacauccuucuauuagu

SEQ ID NO: 256925 - RNA, 19 nt, Homo sapiens
  misc_RNA (1)...(19): siRNA sense strand
ucaagagaaugagagaaau

SEQ ID NO: 256926 - RNA, 19 nt, Homo sapiens
  misc_RNA (1)...(19): siRNA sense strand
ggagguaguagaagauauc

SEQ ID NO: 256927 - RNA, 19 nt, Homo sapiens
  misc_RNA (1)...(19): siRNA sense strand
cauuugaccugagacagaa

SEQ ID NO: 256928 - RNA, 19 nt, Homo sapiens
  misc_RNA (1)...(19): siRNA sense strand
ggagcacccaucccauaaa

SEQ ID NO: 256929 - RNA, 19 nt, Homo sapiens
  misc_RNA (1)...(19): siRNA sense strand
ugaagaaggcauccaagau

SEQ ID NO: 256930 - RNA, 19 nt, Homo sapiens
  misc_RNA (1)...(19): siRNA sense strand
ucaacuucgugauguguga

SEQ ID NO: 256931 - RNA, 19 nt, Homo sapiens
  misc_RNA (1)...(19): siRNA sense strand
cauccaagauaucauucug

SEQ ID NO: 256932 - RNA, 19 nt, Homo sapiens
  misc_RNA (1)...(19): siRNA sense strand
cagaugacaagaauuacaa

SEQ ID NO: 256933 - RNA, 19 nt, Homo sapiens
  misc_RNA (1)...(19): siRNA sense strand
gggagguaguagaagauau

SEQ ID NO: 256934 - RNA, 19 nt, Homo sapiens
  misc_RNA (1)...(19): siRNA sense strand
caagguaucacacuuuaac

SEQ ID NO: 256935 - RNA, 19 nt, Homo sapiens
  misc_RNA (1)...(19): siRNA sense strand
gggcagcacaggagacaga

SEQ ID NO: 256936 - RNA, 19 nt, Homo sapiens
  misc_RNA (1)...(19): siRNA sense strand
uaauuggacaguuggauga

SEQ ID NO: 256937 - RNA, 19 nt, Homo sapiens
  misc_RNA (1)...(19): siRNA sense strand
gaaagcaagguaucacacu

SEQ ID NO: 256938 - RNA, 19 nt, Homo sapiens
  misc_RNA (1)...(19): siRNA sense strand
gaggcugacacauguuaaa

SEQ ID NO: 256939 - RNA, 19 nt, Homo sapiens
  misc_RNA (1)...(19): siRNA sense strand
gaacuacauccggcuggaa

SEQ ID NO: 256940 - RNA, 19 nt, Homo sapiens
  misc_RNA (1)...(19): siRNA sense strand
gguaucacacuuuaaccaa

SEQ ID NO: 256941 - RNA, 19 nt, Homo sapiens
  misc_RNA (1)...(19): siRNA sense strand
gcagggagaagagaagugu

SEQ ID NO: 256942 - RNA, 19 nt, Homo sapiens
  misc_RNA (1)...(19): siRNA sense strand
ucuggaacguccuuggaaa

SEQ ID NO: 256943 - RNA, 19 nt, Homo sapiens
  misc_RNA (1)...(19): siRNA sense strand
ggugcaaacucugaucaca

SEQ ID NO: 256944 - RNA, 19 nt, Homo sapiens
  misc_RNA (1)...(19): siRNA sense strand
gaggaagcagacacaacua

SEQ ID NO: 256945 - RNA, 19 nt, Homo sapiens
  misc_RNA (1)...(19): siRNA sense strand
ugaugggugugaacaacaa

SEQ ID NO: 256946 - RNA, 19 nt, Homo sapiens
  misc_RNA (1)...(19): siRNA sense strand
gcacuucugauggguguga

SEQ ID NO: 256947 - RNA, 19 nt, Homo sapiens
  misc_RNA (1)...(19): siRNA sense strand
uagacucuguagauacuga

SEQ ID NO: 256948 - RNA, 19 nt, Homo sapiens
  misc_RNA (1)...(19): siRNA sense strand
aauagacucuguagauacu

SEQ ID NO: 256949 - RNA, 19 nt, Homo sapiens
  misc_RNA (1)...(19): siRNA sense strand
gguaguagaagauaucaac

SEQ ID NO: 256950 - RNA, 19 nt, Homo sapiens
  misc_RNA (1)...(19): siRNA sense strand
gaaacuggagaggauucua

SEQ ID NO: 256951 - RNA, 19 nt, Homo sapiens
  misc_RNA (1)...(19): siRNA sense strand
gaugacaagaauuacaaga

SEQ ID NO: 256952 - RNA, 19 nt, Homo sapiens
  misc_RNA (1)...(19): siRNA sense strand
aaaaggagauauucagcaa

SEQ ID NO: 256953 - RNA, 19 nt, Homo sapiens
  misc_RNA (1)...(19): siRNA sense strand
aagcaagguaucacacuuu

SEQ ID NO: 256954 - RNA, 19 nt, Homo sapiens
  misc_RNA (1)...(19): siRNA sense strand
aaaugaacuucuccaagca

SEQ ID NO: 256955 - RNA, 19 nt, Homo sapiens
  misc_RNA (1)...(19): siRNA sense strand
gaagaggaagcagacacaa

SEQ ID NO: 256956 - RNA, 19 nt, Homo sapiens
  misc_RNA (1)...(19): siRNA sense strand
ggugugaacaacaaugaga

SEQ ID NO: 256957 - RNA, 19 nt, Homo sapiens
  misc_RNA (1)...(19): siRNA sense strand
cccagucccucgugagaga

SEQ ID NO: 256958 - RNA, 19 nt, Homo sapiens
  misc_RNA (1)...(19): siRNA sense strand
cggcuucaguggucuguca

SEQ ID NO: 256959 - RNA, 19 nt, Homo sapiens
  misc_RNA (1)...(19): siRNA sense strand
gcagugaucgaggugcaaa

SEQ ID NO: 256960 - RNA, 19 nt, Homo sapiens
  misc_RNA (1)...(19): siRNA sense strand
uggaugagguaagucuuga

SEQ ID NO: 256961 - RNA, 19 nt, Homo sapiens
  misc_RNA (1)...(19): siRNA sense strand
acacaacuaaagcauuuga

SEQ ID NO: 256962 - RNA, 19 nt, Homo sapiens
  misc_RNA (1)...(19): siRNA sense strand
acaguuggaugagguaagu

SEQ ID NO: 256963 - RNA, 19 nt, Homo sapiens
  misc_RNA (1)...(19): siRNA sense strand
uagaaaagguccucaagag

SEQ ID NO: 256964 - RNA, 19 nt, Homo sapiens
  misc_RNA (1)...(19): siRNA sense strand
gaacaaugaugauucagau

SEQ ID NO: 256965 - RNA, 19 nt, Homo sapiens
  misc_RNA (1)...(19): siRNA sense strand
gaaaagaggcuguuuguaa

SEQ ID NO: 256966 - RNA, 19 nt, Homo sapiens
  misc_RNA (1)...(19): siRNA sense strand
gccagaguuugaauucuua

SEQ ID NO: 256967 - RNA, 19 nt, Homo sapiens
  misc_RNA (1)...(19): siRNA sense strand
ccacagaaguuccaaguac

SEQ ID NO: 256968 - RNA, 19 nt, Homo sapiens
  misc_RNA (1)...(19): siRNA sense strand
uauccuagcuacaauucua

SEQ ID NO: 256969 - RNA, 19 nt, Homo sapiens
  misc_RNA (1)...(19): siRNA sense strand
ucacagaacccuggaauga

SEQ ID NO: 256970 - RNA, 19 nt, Homo sapiens
  misc_RNA (1)...(19): siRNA sense strand
ggacagugaacaaugauga

SEQ ID NO: 256971 - RNA, 19 nt, Homo sapiens
  misc_RNA (1)...(19): siRNA sense strand
gagaagguccaguaucuug

SEQ ID NO: 256972 - RNA, 19 nt, Homo sapiens
  misc_RNA (1)...(19): siRNA sense strand
ggccagaguuugaauucuu

SEQ ID NO: 256973 - RNA, 19 nt, Homo sapiens
  misc_RNA (1)...(19): siRNA sense strand
guagaagaauuuguaggaa

SEQ ID NO: 256974 - RNA, 19 nt, Homo sapiens
  misc_RNA (1)...(19): siRNA sense strand
acacccaccuccacccuua

SEQ ID NO: 256975 - RNA, 19 nt, Homo sapiens
  misc_RNA (1)...(19): siRNA sense strand
guuauacucagaccaguua

SEQ ID NO: 256976 - RNA, 19 nt, Homo sapiens
  misc_RNA (1)...(19): siRNA sense strand
gaucaaaguagcagucuuc

SEQ ID NO: 256977 - RNA, 19 nt, Homo sapiens
  misc_RNA (1)...(19): siRNA sense strand
gauauccgccuucacagaa

SEQ ID NO: 256978 - RNA, 19 nt, Homo sapiens
  misc_RNA (1)...(19): siRNA sense strand
gcaccugguuauacucaga

SEQ ID NO: 256979 - RNA, 19 nt, Homo sapiens
  misc_RNA (1)...(19): siRNA sense strand
gagcagccaccauauccua

SEQ ID NO: 256980 - RNA, 19 nt, Homo sapiens
  misc_RNA (1)...(19): siRNA sense strand
gaacaagaaguagaagaau

SEQ ID NO: 256981 - RNA, 19 nt, Homo sapiens
  misc_RNA (1)...(19): siRNA sense strand
gcccaaggauucuucauac

SEQ ID NO: 256982 - RNA, 19 nt, Homo sapiens
  misc_RNA (1)...(19): siRNA sense strand
uggaagaaaugcuaaccaa

SEQ ID NO: 256983 - RNA, 19 nt, Homo sapiens
  misc_RNA (1)...(19): siRNA sense strand
gaagguccaguaucuugaa

SEQ ID NO: 256984 - RNA, 19 nt, Homo sapiens
  misc_RNA (1)...(19): siRNA sense strand
gguccaguaucuugaacaa

SEQ ID NO: 256985 - RNA, 19 nt, Homo sapiens
  misc_RNA (1)...(19): siRNA sense strand
aagaaaugcuaaccaagga

SEQ ID NO: 256986 - RNA, 19 nt, Homo sapiens
  misc_RNA (1)...(19): siRNA sense strand
ugaacaagaaguagaagaa

SEQ ID NO: 256987 - RNA, 19 nt, Homo sapiens
  misc_RNA (1)...(19): siRNA sense strand
ggaauucuacugcgagauc

SEQ ID NO: 256988 - RNA, 19 nt, Homo sapiens
  misc_RNA (1)...(19): siRNA sense strand
gaauguguaccuucagaug

SEQ ID NO: 256989 - RNA, 19 nt, Homo sapiens
  misc_RNA (1)...(19): siRNA sense strand
cgagaucuagggcuccuua

SEQ ID NO: 256990 - RNA, 19 nt, Homo sapiens
  misc_RNA (1)...(19): siRNA sense strand
caaugaugauucagaucuu

SEQ ID NO: 256991 - RNA, 19 nt, Homo sapiens
  misc_RNA (1)...(19): siRNA sense strand
cuacaugacugaaaguacu

SEQ ID NO: 256992 - RNA, 19 nt, Homo sapiens
  misc_RNA (1)...(19): siRNA sense strand
gggcuucuccuggugcuua

SEQ ID NO: 256993 - RNA, 19 nt, Homo sapiens
  misc_RNA (1)...(19): siRNA sense strand
ucauacaugugcuggagaa

SEQ ID NO: 256994 - RNA, 19 nt, Homo sapiens
  misc_RNA (1)...(19): siRNA sense strand
agccucagcuguaugguaa

SEQ ID NO: 256995 - RNA, 19 nt, Homo sapiens
  misc_RNA (1)...(19): siRNA sense strand
gcaugaaccggcacaacuu

SEQ ID NO: 256996 - RNA, 19 nt, Homo sapiens
  misc_RNA (1)...(19): siRNA sense strand
uggaauggguggccguuau

SEQ ID NO: 256997 - RNA, 19 nt, Homo sapiens
  misc_RNA (1)...(19): siRNA sense strand
ggauauccgccuucacaga

SEQ ID NO: 256998 - RNA, 19 nt, Homo sapiens
  misc_RNA (1)...(19): siRNA sense strand
gaaguagaagaauuuguag

SEQ ID NO: 256999 - RNA, 19 nt, Homo sapiens
  misc_RNA (1)...(19): siRNA sense strand
gagccucagcuguauggua

SEQ ID NO: 257000 - RNA, 19 nt, Homo sapiens
  misc_RNA (1)...(19): siRNA sense strand
cggcacaacuuuccuugca

SEQ ID NO: 257001 - RNA, 19 nt, Homo sapiens
  misc_RNA (1)...(19): siRNA sense strand
gaugguaaucguaguguuc

SEQ ID NO: 257002 - RNA, 19 nt, Homo sapiens
  misc_RNA (1)...(19): siRNA sense strand
aagaauguguaccuucaga

SEQ ID NO: 257003 - RNA, 19 nt, Homo sapiens
  misc_RNA (1)...(19): siRNA sense strand
ccagugaccaucccaacaa

SEQ ID NO: 257004 - RNA, 19 nt, Homo sapiens
  misc_RNA (1)...(19): siRNA sense strand
caggauauccgccuucaca

SEQ ID NO: 257005 - RNA, 19 nt, Homo sapiens
  misc_RNA (1)...(19): siRNA sense strand
gaggcuguuuguaagauuc

SEQ ID NO: 257006 - RNA, 19 nt, Homo sapiens
  misc_RNA (1)...(19): siRNA sense strand
caacaaucaagaucaaagu

SEQ ID NO: 257007 - RNA, 19 nt, Homo sapiens
  misc_RNA (1)...(19): siRNA sense strand
gcaaauacugccucauacu

SEQ ID NO: 257008 - RNA, 19 nt, Homo sapiens
  misc_RNA (1)...(19): siRNA sense strand
caccauauccuagcuacaa

SEQ ID NO: 257009 - RNA, 19 nt, Homo sapiens
  misc_RNA (1)...(19): siRNA sense strand
gaauugcaaggccagaguu

SEQ ID NO: 257010 - RNA, 19 nt, Homo sapiens
  misc_RNA (1)...(19): siRNA sense strand
aggaggcgauggcuacuau

SEQ ID NO: 257011 - RNA, 19 nt, Homo sapiens
  misc_RNA (1)...(19): siRNA sense strand
caaauacugccucauacuc

SEQ ID NO: 257012 - RNA, 19 nt, Homo sapiens
  misc_RNA (1)...(19): siRNA sense strand
ggagaugguaaucguagug

SEQ ID NO: 257013 - RNA, 19 nt, Homo sapiens
  misc_RNA (1)...(19): siRNA sense strand
uguaagaccagaauugcaa

SEQ ID NO: 257014 - RNA, 19 nt, Homo sapiens
  misc_RNA (1)...(19): siRNA sense strand
caugaaccggcacaacuuu

SEQ ID NO: 257015 - RNA, 19 nt, Homo sapiens
  misc_RNA (1)...(19): siRNA sense strand
ccaaguacuuaccguucau

SEQ ID NO: 257016 - RNA, 19 nt, Homo sapiens
  misc_RNA (1)...(19): siRNA sense strand
cuuauuaugcaccugguua

SEQ ID NO: 257017 - RNA, 19 nt, Homo sapiens
  misc_RNA (1)...(19): siRNA sense strand
uauagccaaucagaucaaa

SEQ ID NO: 257018 - RNA, 19 nt, Homo sapiens
  misc_RNA (1)...(19): siRNA sense strand
guggagaugugccgguaca

SEQ ID NO: 257019 - RNA, 19 nt, Homo sapiens
  misc_RNA (1)...(19): siRNA sense strand
gcaaggccagaguuugaau

SEQ ID NO: 257020 - RNA, 19 nt, Homo sapiens
  misc_RNA (1)...(19): siRNA sense strand
aaaagaggcuguuuguaag

SEQ ID NO: 257021 - RNA, 19 nt, Homo sapiens
  misc_RNA (1)...(19): siRNA sense strand
ggagaagguccaguaucuu

SEQ ID NO: 257022 - RNA, 19 nt, Homo sapiens
  misc_RNA (1)...(19): siRNA sense strand
ggaauggguggccguuauc

SEQ ID NO: 257023 - RNA, 19 nt, Homo sapiens
  misc_RNA (1)...(19): siRNA sense strand
gaccaguuacuccacagaa

SEQ ID NO: 257024 - RNA, 19 nt, Homo sapiens
  misc_RNA (1)...(19): siRNA sense strand
gugaccaucccaacaauca

SEQ ID NO: 257025 - RNA, 19 nt, Homo sapiens
  misc_RNA (1)...(19): siRNA sense strand
cagcccaacuccagucucu

SEQ ID NO: 257026 - RNA, 19 nt, Homo sapiens
  misc_RNA (1)...(19): siRNA sense strand
ccucagcuguaugguaaug

SEQ ID NO: 257027 - RNA, 19 nt, Homo sapiens
  misc_RNA (1)...(19): siRNA sense strand
aaagaggcuguuuguaaga

SEQ ID NO: 257028 - RNA, 19 nt, Homo sapiens
  misc_RNA (1)...(19): siRNA sense strand
caagaaguagaagaauuug

SEQ ID NO: 257029 - RNA, 19 nt, Homo sapiens
  misc_RNA (1)...(19): siRNA sense strand
cuagcuacaauucuaacua

SEQ ID NO: 257030 - RNA, 19 nt, Homo sapiens
  misc_RNA (1)...(19): siRNA sense strand
ucccaacaaucaagaucaa

SEQ ID NO: 257031 - RNA, 19 nt, Homo sapiens
  misc_RNA (1)...(19): siRNA sense strand
caaggccagaguuugaauu

SEQ ID NO: 257032 - RNA, 19 nt, Homo sapiens
  misc_RNA (1)...(19): siRNA sense strand
aaagacagacaaagcauac

SEQ ID NO: 257033 - RNA, 19 nt, Homo sapiens
  misc_RNA (1)...(19): siRNA sense strand
uacaugugcuggagaaggu

SEQ ID NO: 257034 - RNA, 19 nt, Homo sapiens
  misc_RNA (1)...(19): siRNA sense strand
gaauucuacugcgagaucu

SEQ ID NO: 257035 - RNA, 19 nt, Homo sapiens
  misc_RNA (1)...(19): siRNA sense strand
uugcaaggccagaguuuga

SEQ ID NO: 257036 - RNA, 19 nt, Homo sapiens
  misc_RNA (1)...(19): siRNA sense strand
aguagaagaauuuguagga

SEQ ID NO: 257037 - RNA, 19 nt, Homo sapiens
  misc_RNA (1)...(19): siRNA sense strand
aaauacugccucauacuca

SEQ ID NO: 257038 - RNA, 19 nt, Homo sapiens
  misc_RNA (1)...(19): siRNA sense strand
gauucaggccauacuggaa

SEQ ID NO: 257039 - RNA, 19 nt, Homo sapiens
  misc_RNA (1)...(19): siRNA sense strand
agaggcuguuuguaagauu

SEQ ID NO: 257040 - RNA, 19 nt, Homo sapiens
  misc_RNA (1)...(19): siRNA sense strand
ccaacaaucaagaucaaag

SEQ ID NO: 257041 - RNA, 19 nt, Homo sapiens
  misc_RNA (1)...(19): siRNA sense strand
gcaguguccaucaguacga

SEQ ID NO: 257042 - RNA, 19 nt, Homo sapiens
  misc_RNA (1)...(19): siRNA sense strand
gcaccacccggcaaucucu

SEQ ID NO: 257043 - RNA, 19 nt, Homo sapiens
  misc_RNA (1)...(19): siRNA sense strand
cagugaccaucccaacaau

SEQ ID NO: 257044 - RNA, 19 nt, Homo sapiens
  misc_RNA (1)...(19): siRNA sense strand
cacagaaguuccaaguacu

SEQ ID NO: 257045 - RNA, 19 nt, Homo sapiens
  misc_RNA (1)...(19): siRNA sense strand
gaggaggcgauggcuacua

SEQ ID NO: 257046 - RNA, 19 nt, Homo sapiens
  misc_RNA (1)...(19): siRNA sense strand
gcaaucucuacaugacuga

SEQ ID NO: 257047 - RNA, 19 nt, Homo sapiens
  misc_RNA (1)...(19): siRNA sense strand
uccaaguacuuaccguuca

SEQ ID NO: 257048 - RNA, 19 nt, Homo sapiens
  misc_RNA (1)...(19): siRNA sense strand
gacuguacgaccacaagaa

SEQ ID NO: 257049 - RNA, 19 nt, Homo sapiens
  misc_RNA (1)...(19): siRNA sense strand
gaccaucccaacaaucaag

SEQ ID NO: 257050 - RNA, 19 nt, Homo sapiens
  misc_RNA (1)...(19): siRNA sense strand
auucagaucuuuuggauuc

SEQ ID NO: 257051 - RNA, 19 nt, Homo sapiens
  misc_RNA (1)...(19): siRNA sense strand
acaaugaugauucagaucu

SEQ ID NO: 257052 - RNA, 19 nt, Homo sapiens
  misc_RNA (1)...(19): siRNA sense strand
accaggagcagccaccaua

SEQ ID NO: 257053 - RNA, 19 nt, Homo sapiens
  misc_RNA (1)...(19): siRNA sense strand
uauuaugcaccugguuaua

SEQ ID NO: 257054 - RNA, 19 nt, Homo sapiens
  misc_RNA (1)...(19): siRNA sense strand
aagaggcuguuuguaagau

SEQ ID NO: 257055 - RNA, 19 nt, Homo sapiens
  misc_RNA (1)...(19): siRNA sense strand
acaaucaagaucaaaguag

SEQ ID NO: 257056 - RNA, 19 nt, Homo sapiens
  misc_RNA (1)...(19): siRNA sense strand
ccauauccuagcuacaauu

SEQ ID NO: 257057 - RNA, 19 nt, Homo sapiens
  misc_RNA (1)...(19): siRNA sense strand
cauauccuagcuacaauuc

SEQ ID NO: 257058 - RNA, 19 nt, Homo sapiens
  misc_RNA (1)...(19): siRNA sense strand
uuauggagaugguaaucgu

SEQ ID NO: 257059 - RNA, 19 nt, Homo sapiens
  misc_RNA (1)...(19): siRNA sense strand
ccaguuacuccacagaagu

SEQ ID NO: 257060 - RNA, 19 nt, Homo sapiens
  misc_RNA (1)...(19): siRNA sense strand
ccugaagaauguguaccuu

SEQ ID NO: 257061 - RNA, 19 nt, Homo sapiens
  misc_RNA (1)...(19): siRNA sense strand
aaguagcagucuuccugaa

SEQ ID NO: 257062 - RNA, 19 nt, Homo sapiens
  misc_RNA (1)...(19): siRNA sense strand
cuugcaguguccaucagua

SEQ ID NO: 257063 - RNA, 19 nt, Homo sapiens
  misc_RNA (1)...(19): siRNA sense strand
gaagaacucucaccguuga

SEQ ID NO: 257064 - RNA, 19 nt, Homo sapiens
  misc_RNA (1)...(19): siRNA sense strand
uaaaggagcugguuccaaa

SEQ ID NO: 257065 - RNA, 19 nt, Homo sapiens
  misc_RNA (1)...(19): siRNA sense strand
ccacaaggauuauugauga

SEQ ID NO: 257066 - RNA, 19 nt, Homo sapiens
  misc_RNA (1)...(19): siRNA sense strand
ucaauaaguuucuggauga

SEQ ID NO: 257067 - RNA, 19 nt, Homo sapiens
  misc_RNA (1)...(19): siRNA sense strand
guaauuggcugugcucuug

SEQ ID NO: 257068 - RNA, 19 nt, Homo sapiens
  misc_RNA (1)...(19): siRNA sense strand
gcagaucagugacggagaa

SEQ ID NO: 257069 - RNA, 19 nt, Homo sapiens
  misc_RNA (1)...(19): siRNA sense strand
gaucagaaguuucaaucca

SEQ ID NO: 257070 - RNA, 19 nt, Homo sapiens
  misc_RNA (1)...(19): siRNA sense strand
ggagaaagagaagaauuaa

SEQ ID NO: 257071 - RNA, 19 nt, Homo sapiens
  misc_RNA (1)...(19): siRNA sense strand
gagacucugcuuagaaaua

SEQ ID NO: 257072 - RNA, 19 nt, Homo sapiens
  misc_RNA (1)...(19): siRNA sense strand
ucagaaguuucaauccaua

SEQ ID NO: 257073 - RNA, 19 nt, Homo sapiens
  misc_RNA (1)...(19): siRNA sense strand
gcaagaaucccuaaagcau

SEQ ID NO: 257074 - RNA, 19 nt, Homo sapiens
  misc_RNA (1)...(19): siRNA sense strand
gcucaggguugaagcuuug

SEQ ID NO: 257075 - RNA, 19 nt, Homo sapiens
  misc_RNA (1)...(19): siRNA sense strand
ccaaaacucugcaacaaaa

SEQ ID NO: 257076 - RNA, 19 nt, Homo sapiens
  misc_RNA (1)...(19): siRNA sense strand
gaaguuucaauccauagua

SEQ ID NO: 257077 - RNA, 19 nt, Homo sapiens
  misc_RNA (1)...(19): siRNA sense strand
cggagaaagagaagaauua

SEQ ID NO: 257078 - RNA, 19 nt, Homo sapiens
  misc_RNA (1)...(19): siRNA sense strand
gaaaugauccacaguaucc

SEQ ID NO: 257079 - RNA, 19 nt, Homo sapiens
  misc_RNA (1)...(19): siRNA sense strand
gguugaagcuuugagagaa

SEQ ID NO: 257080 - RNA, 19 nt, Homo sapiens
  misc_RNA (1)...(19): siRNA sense strand
gaucagugacggagaaaga

SEQ ID NO: 257081 - RNA, 19 nt, Homo sapiens
  misc_RNA (1)...(19): siRNA sense strand
aggcgaagaucaacgcuaa

SEQ ID NO: 257082 - RNA, 19 nt, Homo sapiens
  misc_RNA (1)...(19): siRNA sense strand
ugacaaggccaucaagcua

SEQ ID NO: 257083 - RNA, 19 nt, Homo sapiens
  misc_RNA (1)...(19): siRNA sense strand
aagcaugccacaaggauua

SEQ ID NO: 257084 - RNA, 19 nt, Homo sapiens
  misc_RNA (1)...(19): siRNA sense strand
gaaauccuucuggaaauga

SEQ ID NO: 257085 - RNA, 19 nt, Homo sapiens
  misc_RNA (1)...(19): siRNA sense strand
gaauuaaaucugacugcaa

SEQ ID NO: 257086 - RNA, 19 nt, Homo sapiens
  misc_RNA (1)...(19): siRNA sense strand
gcucuacagugcauguuca

SEQ ID NO: 257087 - RNA, 19 nt, Homo sapiens
  misc_RNA (1)...(19): siRNA sense strand
acaaggccaucaagcuauu

SEQ ID NO: 257088 - RNA, 19 nt, Homo sapiens
  misc_RNA (1)...(19): siRNA sense strand
agacucugcuuagaaauau

SEQ ID NO: 257089 - RNA, 19 nt, Homo sapiens
  misc_RNA (1)...(19): siRNA sense strand
gcaagagaaagaaauccuu

SEQ ID NO: 257090 - RNA, 19 nt, Homo sapiens
  misc_RNA (1)...(19): siRNA sense strand
gccaguugaucagaaguuu

SEQ ID NO: 257091 - RNA, 19 nt, Homo sapiens
  misc_RNA (1)...(19): siRNA sense strand
guugaagugucaguagaaa

SEQ ID NO: 257092 - RNA, 19 nt, Homo sapiens
  misc_RNA (1)...(19): siRNA sense strand
caaaauagccaggacauga

SEQ ID NO: 257093 - RNA, 19 nt, Homo sapiens
  misc_RNA (1)...(19): siRNA sense strand
gcagcaagaaucccuaaag

SEQ ID NO: 257094 - RNA, 19 nt, Homo sapiens
  misc_RNA (1)...(19): siRNA sense strand
ugacggagaaagagaagaa

SEQ ID NO: 257095 - RNA, 19 nt, Homo sapiens
  misc_RNA (1)...(19): siRNA sense strand
ggaaaugauccacaguauc

SEQ ID NO: 257096 - RNA, 19 nt, Homo sapiens
  misc_RNA (1)...(19): siRNA sense strand
gacaaggccaucaagcuau

SEQ ID NO: 257097 - RNA, 19 nt, Homo sapiens
  misc_RNA (1)...(19): siRNA sense strand
cagcaagaaucccuaaagc

SEQ ID NO: 257098 - RNA, 19 nt, Homo sapiens
  misc_RNA (1)...(19): siRNA sense strand
ugaagugucaguagaaaca

SEQ ID NO: 257099 - RNA, 19 nt, Homo sapiens
  misc_RNA (1)...(19): siRNA sense strand
gaugagguggucaauaagu

SEQ ID NO: 257100 - RNA, 19 nt, Homo sapiens
  misc_RNA (1)...(19): siRNA sense strand
uaaagcaugccacaaggau

SEQ ID NO: 257101 - RNA, 19 nt, Homo sapiens
  misc_RNA (1)...(19): siRNA sense strand
ugagguggucaauaaguuu

SEQ ID NO: 257102 - RNA, 19 nt, Homo sapiens
  misc_RNA (1)...(19): siRNA sense strand
caauaaguuucuggaugau

SEQ ID NO: 257103 - RNA, 19 nt, Homo sapiens
  misc_RNA (1)...(19): siRNA sense strand
uaagagaagauuagagacu

SEQ ID NO: 257104 - RNA, 19 nt, Homo sapiens
  misc_RNA (1)...(19): siRNA sense strand
gaacucucaccguugaagu

SEQ ID NO: 257105 - RNA, 19 nt, Homo sapiens
  misc_RNA (1)...(19): siRNA sense strand
ucucaccguugaaguguca

SEQ ID NO: 257106 - RNA, 19 nt, Homo sapiens
  misc_RNA (1)...(19): siRNA sense strand
gccacaaggauuauugaug

SEQ ID NO: 257107 - RNA, 19 nt, Homo sapiens
  misc_RNA (1)...(19): siRNA sense strand
gcaacaaaaugcugaaagc

SEQ ID NO: 257108 - RNA, 19 nt, Homo sapiens
  misc_RNA (1)...(19): siRNA sense strand
caaggccaucaagcuauua

SEQ ID NO: 257109 - RNA, 19 nt, Homo sapiens
  misc_RNA (1)...(19): siRNA sense strand
ggguugaagcuuugagaga

SEQ ID NO: 257110 - RNA, 19 nt, Homo sapiens
  misc_RNA (1)...(19): siRNA sense strand
ccacaugggccaguugauc

SEQ ID NO: 257111 - RNA, 19 nt, Homo sapiens
  misc_RNA (1)...(19): siRNA sense strand
guugaagcuuugagagaag

SEQ ID NO: 257112 - RNA, 19 nt, Homo sapiens
  misc_RNA (1)...(19): siRNA sense strand
gcgaagaucaacgcuaaag

SEQ ID NO: 257113 - RNA, 19 nt, Homo sapiens
  misc_RNA (1)...(19): siRNA sense strand
acaugaggcagaucaguga

SEQ ID NO: 257114 - RNA, 19 nt, Homo sapiens
  misc_RNA (1)...(19): siRNA sense strand
caguugaucagaaguuuca

SEQ ID NO: 257115 - RNA, 19 nt, Homo sapiens
  misc_RNA (1)...(19): siRNA sense strand
ggacaugaggcagaucagu

SEQ ID NO: 257116 - RNA, 19 nt, Homo sapiens
  misc_RNA (1)...(19): siRNA sense strand
cagcagcaagaaucccuaa

SEQ ID NO: 257117 - RNA, 19 nt, Homo sapiens
  misc_RNA (1)...(19): siRNA sense strand
guagaaacaauuagaaacc

SEQ ID NO: 257118 - RNA, 19 nt, Homo sapiens
  misc_RNA (1)...(19): siRNA sense strand
ccguugaagugucaguaga

SEQ ID NO: 257119 - RNA, 19 nt, Homo sapiens
  misc_RNA (1)...(19): siRNA sense strand
cuacagugcauguucaucu

SEQ ID NO: 257120 - RNA, 19 nt, Homo sapiens
  misc_RNA (1)...(19): siRNA sense strand
gaagugucaguagaaacaa

SEQ ID NO: 257121 - RNA, 19 nt, Homo sapiens
  misc_RNA (1)...(19): siRNA sense strand
augagguggucaauaaguu

SEQ ID NO: 257122 - RNA, 19 nt, Homo sapiens
  misc_RNA (1)...(19): siRNA sense strand
gccaggacaugaggcagau

SEQ ID NO: 257123 - RNA, 19 nt, Homo sapiens
  misc_RNA (1)...(19): siRNA sense strand
cacaugggccaguugauca

SEQ ID NO: 257124 - RNA, 19 nt, Homo sapiens
  misc_RNA (1)...(19): siRNA sense strand
gucaguagaaacaauuaga

SEQ ID NO: 257125 - RNA, 19 nt, Homo sapiens
  misc_RNA (1)...(19): siRNA sense strand
gagguggucaauaaguuuc

SEQ ID NO: 257126 - RNA, 19 nt, Homo sapiens
  misc_RNA (1)...(19): siRNA sense strand
ugggaaaugccaagaguca

SEQ ID NO: 257127 - RNA, 19 nt, Homo sapiens
  misc_RNA (1)...(19): siRNA sense strand
gaagucugaucaccaguuu

SEQ ID NO: 257128 - RNA, 19 nt, Homo sapiens
  misc_RNA (1)...(19): siRNA sense strand
caaaggugcuggaguuaau

SEQ ID NO: 257129 - RNA, 19 nt, Homo sapiens
  misc_RNA (1)...(19): siRNA sense strand
gacagaaucuacccaguga

SEQ ID NO: 257130 - RNA, 19 nt, Homo sapiens
  misc_RNA (1)...(19): siRNA sense strand
gggcacagcugcuauccaa

SEQ ID NO: 257131 - RNA, 19 nt, Homo sapiens
  misc_RNA (1)...(19): siRNA sense strand
gacaauaaguacaagcaaa

SEQ ID NO: 257132 - RNA, 19 nt, Homo sapiens
  misc_RNA (1)...(19): siRNA sense strand
gggaggaggugacaucaau

SEQ ID NO: 257133 - RNA, 19 nt, Homo sapiens
  misc_RNA (1)...(19): siRNA sense strand
ggucuagggacaauaagua

SEQ ID NO: 257134 - RNA, 19 nt, Homo sapiens
  misc_RNA (1)...(19): siRNA sense strand
gcagagacaaggccaguau

SEQ ID NO: 257135 - RNA, 19 nt, Homo sapiens
  misc_RNA (1)...(19): siRNA sense strand
ccggauggcuggagcuauu

SEQ ID NO: 257136 - RNA, 19 nt, Homo sapiens
  misc_RNA (1)...(19): siRNA sense strand
ggaguuaaucuuauucuag

SEQ ID NO: 257137 - RNA, 19 nt, Homo sapiens
  misc_RNA (1)...(19): siRNA sense strand
ggugcuggaguuaaucuua

SEQ ID NO: 257138 - RNA, 19 nt, Homo sapiens
  misc_RNA (1)...(19): siRNA sense strand
gugcuggaguuaaucuuau

SEQ ID NO: 257139 - RNA, 19 nt, Homo sapiens
  misc_RNA (1)...(19): siRNA sense strand
gaggauuucucugaagcaa

SEQ ID NO: 257140 - RNA, 19 nt, Homo sapiens
  misc_RNA (1)...(19): siRNA sense strand
ggaagucugaucaccaguu

SEQ ID NO: 257141 - RNA, 19 nt, Homo sapiens
  misc_RNA (1)...(19): siRNA sense strand
ugaggcaucuggacaugug

SEQ ID NO: 257142 - RNA, 19 nt, Homo sapiens
  misc_RNA (1)...(19): siRNA sense strand
gagacuaugugcuaaucca

SEQ ID NO: 257143 - RNA, 19 nt, Homo sapiens
  misc_RNA (1)...(19): siRNA sense strand
ccaggagccagcaacauuu

SEQ ID NO: 257144 - RNA, 19 nt, Homo sapiens
  misc_RNA (1)...(19): siRNA sense strand
gcuggagacuaugugcuaa

SEQ ID NO: 257145 - RNA, 19 nt, Homo sapiens
  misc_RNA (1)...(19): siRNA sense strand
ggacaauaaguacaagcaa

SEQ ID NO: 257146 - RNA, 19 nt, Homo sapiens
  misc_RNA (1)...(19): siRNA sense strand
uguuacaucuugugggaaa

SEQ ID NO: 257147 - RNA, 19 nt, Homo sapiens
  misc_RNA (1)...(19): siRNA sense strand
gcacagcugcuauccaacu

SEQ ID NO: 257148 - RNA, 19 nt, Homo sapiens
  misc_RNA (1)...(19): siRNA sense strand
ccaaaggugcuggaguuaa

SEQ ID NO: 257149 - RNA, 19 nt, Homo sapiens
  misc_RNA (1)...(19): siRNA sense strand
gcugcuggauucaauuaca

SEQ ID NO: 257150 - RNA, 19 nt, Homo sapiens
  misc_RNA (1)...(19): siRNA sense strand
ugaggucuagggacaauaa

SEQ ID NO: 257151 - RNA, 19 nt, Homo sapiens
  misc_RNA (1)...(19): siRNA sense strand
gcaagaucguccuggaacu

SEQ ID NO: 257152 - RNA, 19 nt, Homo sapiens
  misc_RNA (1)...(19): siRNA sense strand
guacauggaggccaacaag

SEQ ID NO: 257153 - RNA, 19 nt, Homo sapiens
  misc_RNA (1)...(19): siRNA sense strand
gugaaguccuccugaaggu

SEQ ID NO: 257154 - RNA, 19 nt, Homo sapiens
  misc_RNA (1)...(19): siRNA sense strand
ccaguuugcugaggucuag

SEQ ID NO: 257155 - RNA, 19 nt, Homo sapiens
  misc_RNA (1)...(19): siRNA sense strand
gucgauggguucucuaugg

SEQ ID NO: 257156 - RNA, 19 nt, Homo sapiens
  misc_RNA (1)...(19): siRNA sense strand
uccaggaggcccauaagua

SEQ ID NO: 257157 - RNA, 19 nt, Homo sapiens
  misc_RNA (1)...(19): siRNA sense strand
gggagaagaacgucaacug

SEQ ID NO: 257158 - RNA, 19 nt, Homo sapiens
  misc_RNA (1)...(19): siRNA sense strand
gauggucgauggguucucu

SEQ ID NO: 257159 - RNA, 19 nt, Homo sapiens
  misc_RNA (1)...(19): siRNA sense strand
ccaggaggcccauaaguac

SEQ ID NO: 257160 - RNA, 19 nt, Homo sapiens
  misc_RNA (1)...(19): siRNA sense strand
aaaugcuggugaaugcuuu

SEQ ID NO: 257161 - RNA, 19 nt, Homo sapiens
  misc_RNA (1)...(19): siRNA sense strand
caaaugcuggugaaugcuu

SEQ ID NO: 257162 - RNA, 19 nt, Homo sapiens
  misc_RNA (1)...(19): siRNA sense strand
gcugaggucuagggacaau

SEQ ID NO: 257163 - RNA, 19 nt, Homo sapiens
  misc_RNA (1)...(19): siRNA sense strand
gauccuacugggagaagaa

SEQ ID NO: 257164 - RNA, 19 nt, Homo sapiens
  misc_RNA (1)...(19): siRNA sense strand
acauggaggccaacaagaa

SEQ ID NO: 257165 - RNA, 19 nt, Homo sapiens
  misc_RNA (1)...(19): siRNA sense strand
gagcaaauucugccucacu

SEQ ID NO: 257166 - RNA, 19 nt, Homo sapiens
  misc_RNA (1)...(19): siRNA sense strand
cggaaaaccucuacgugaa

SEQ ID NO: 257167 - RNA, 19 nt, Homo sapiens
  misc_RNA (1)...(19): siRNA sense strand
acaagaacauaggcaagau

SEQ ID NO: 257168 - RNA, 19 nt, Homo sapiens
  misc_RNA (1)...(19): siRNA sense strand
gcaaauucugccucacuuc

SEQ ID NO: 257169 - RNA, 19 nt, Homo sapiens
  misc_RNA (1)...(19): siRNA sense strand
cugaagcaacgcugaaauu

SEQ ID NO: 257170 - RNA, 19 nt, Homo sapiens
  misc_RNA (1)...(19): siRNA sense strand
agagacaaggccaguauga

SEQ ID NO: 257171 - RNA, 19 nt, Homo sapiens
  misc_RNA (1)...(19): siRNA sense strand
caaauucugccucacuucu

SEQ ID NO: 257172 - RNA, 19 nt, Homo sapiens
  misc_RNA (1)...(19): siRNA sense strand
uuccagcuguuacaucuug

SEQ ID NO: 257173 - RNA, 19 nt, Homo sapiens
  misc_RNA (1)...(19): siRNA sense strand
ggacuuaaugcagagacaa

SEQ ID NO: 257174 - RNA, 19 nt, Homo sapiens
  misc_RNA (1)...(19): siRNA sense strand
ugaagcaacgcugaaauuc

SEQ ID NO: 257175 - RNA, 19 nt, Homo sapiens
  misc_RNA (1)...(19): siRNA sense strand
gaggaggugacaucaaugg

SEQ ID NO: 257176 - RNA, 19 nt, Homo sapiens
  misc_RNA (1)...(19): siRNA sense strand
ggaggccaacaagaacaua

SEQ ID NO: 257177 - RNA, 19 nt, Homo sapiens
  misc_RNA (1)...(19): siRNA sense strand
uguucaggcuggagacuau

SEQ ID NO: 257178 - RNA, 19 nt, Homo sapiens
  misc_RNA (1)...(19): siRNA sense strand
ggaggcccauaaguacaug

SEQ ID NO: 257179 - RNA, 19 nt, Homo sapiens
  misc_RNA (1)...(19): siRNA sense strand
gaaauccaggaggcccaua

SEQ ID NO: 257180 - RNA, 19 nt, Homo sapiens
  misc_RNA (1)...(19): siRNA sense strand
caauaaguacaagcaaaug

SEQ ID NO: 257181 - RNA, 19 nt, Homo sapiens
  misc_RNA (1)...(19): siRNA sense strand
ggcuggagacuaugugcua

SEQ ID NO: 257182 - RNA, 19 nt, Homo sapiens
  misc_RNA (1)...(19): siRNA sense strand
uccaggagccagcaacauu

SEQ ID NO: 257183 - RNA, 19 nt, Homo sapiens
  misc_RNA (1)...(19): siRNA sense strand
cuagggacaauaaguacaa

SEQ ID NO: 257184 - RNA, 19 nt, Homo sapiens
  misc_RNA (1)...(19): siRNA sense strand
gguucucuauggucugaug

SEQ ID NO: 257185 - RNA, 19 nt, Homo sapiens
  misc_RNA (1)...(19): siRNA sense strand
cugcuggauucaauuacaa

SEQ ID NO: 257186 - RNA, 19 nt, Homo sapiens
  misc_RNA (1)...(19): siRNA sense strand
ggaggaggugacaucaaug

SEQ ID NO: 257187 - RNA, 19 nt, Homo sapiens
  misc_RNA (1)...(19): siRNA sense strand
caagaacauaggcaagauc

SEQ ID NO: 257188 - RNA, 19 nt, Homo sapiens
  misc_RNA (1)...(19): siRNA sense strand
caucuugugggaaauguuc

SEQ ID NO: 257189 - RNA, 19 nt, Homo sapiens
  misc_RNA (1)...(19): siRNA sense strand
uuuaagcgaggaagucuga

SEQ ID NO: 257190 - RNA, 19 nt, Homo sapiens
  misc_RNA (1)...(19): siRNA sense strand
caagaucguccuggaacug

SEQ ID NO: 257191 - RNA, 19 nt, Homo sapiens
  misc_RNA (1)...(19): siRNA sense strand
gggacaauaaguacaagca

SEQ ID NO: 257192 - RNA, 19 nt, Homo sapiens
  misc_RNA (1)...(19): siRNA sense strand
gaagucugaucaccaguuu

SEQ ID NO: 257193 - RNA, 19 nt, Homo sapiens
  misc_RNA (1)...(19): siRNA sense strand
caaaggugcuggaguuaau

SEQ ID NO: 257194 - RNA, 19 nt, Homo sapiens
  misc_RNA (1)...(19): siRNA sense strand
gacagaaucuacccaguga

SEQ ID NO: 257195 - RNA, 19 nt, Homo sapiens
  misc_RNA (1)...(19): siRNA sense strand
gggcacagcugcuauccaa

SEQ ID NO: 257196 - RNA, 19 nt, Homo sapiens
  misc_RNA (1)...(19): siRNA sense strand
gacaauaaguacaagcaaa

SEQ ID NO: 257197 - RNA, 19 nt, Homo sapiens
  misc_RNA (1)...(19): siRNA sense strand
gggaggaggugacaucaau

SEQ ID NO: 257198 - RNA, 19 nt, Homo sapiens
  misc_RNA (1)...(19): siRNA sense strand
ggucuagggacaauaagua

SEQ ID NO: 257199 - RNA, 19 nt, Homo sapiens
  misc_RNA (1)...(19): siRNA sense strand
gcagagacaaggccaguau

SEQ ID NO: 257200 - RNA, 19 nt, Homo sapiens
  misc_RNA (1)...(19): siRNA sense strand
ccggauggcuggagcuauu

SEQ ID NO: 257201 - RNA, 19 nt, Homo sapiens
  misc_RNA (1)...(19): siRNA sense strand
ggaguuaaucuuauucuag

SEQ ID NO: 257202 - RNA, 19 nt, Homo sapiens
  misc_RNA (1)...(19): siRNA sense strand
ggugcuggaguuaaucuua

SEQ ID NO: 257203 - RNA, 19 nt, Homo sapiens
  misc_RNA (1)...(19): siRNA sense strand
gugcuggaguuaaucuuau

SEQ ID NO: 257204 - RNA, 19 nt, Homo sapiens
  misc_RNA (1)...(19): siRNA sense strand
gaggauuucucugaagcaa

SEQ ID NO: 257205 - RNA, 19 nt, Homo sapiens
  misc_RNA (1)...(19): siRNA sense strand
ggaagucugaucaccaguu

SEQ ID NO: 257206 - RNA, 19 nt, Homo sapiens
  misc_RNA (1)...(19): siRNA sense strand
ugaggcaucuggacaugug

SEQ ID NO: 257207 - RNA, 19 nt, Homo sapiens
  misc_RNA (1)...(19): siRNA sense strand
gagacuaugugcuaaucca

SEQ ID NO: 257208 - RNA, 19 nt, Homo sapiens
  misc_RNA (1)...(19): siRNA sense strand
ccaggagccagcaacauuu

SEQ ID NO: 257209 - RNA, 19 nt, Homo sapiens
  misc_RNA (1)...(19): siRNA sense strand
gcuggagacuaugugcuaa

SEQ ID NO: 257210 - RNA, 19 nt, Homo sapiens
  misc_RNA (1)...(19): siRNA sense strand
ggacaauaaguacaagcaa

SEQ ID NO: 257211 - RNA, 19 nt, Homo sapiens
  misc_RNA (1)...(19): siRNA sense strand
uguuacaucuugugggaaa

SEQ ID NO: 257212 - RNA, 19 nt, Homo sapiens
  misc_RNA (1)...(19): siRNA sense strand
gcacagcugcuauccaacu

SEQ ID NO: 257213 - RNA, 19 nt, Homo sapiens
  misc_RNA (1)...(19): siRNA sense strand
ccaaaggugcuggaguuaa

SEQ ID NO: 257214 - RNA, 19 nt, Homo sapiens
  misc_RNA (1)...(19): siRNA sense strand
gcugcuggauucaauuaca

SEQ ID NO: 257215 - RNA, 19 nt, Homo sapiens
  misc_RNA (1)...(19): siRNA sense strand
ugaggucuagggacaauaa

SEQ ID NO: 257216 - RNA, 19 nt, Homo sapiens
  misc_RNA (1)...(19): siRNA sense strand
gcaagaucguccuggaacu

SEQ ID NO: 257217 - RNA, 19 nt, Homo sapiens
  misc_RNA (1)...(19): siRNA sense strand
guacauggaggccaacaag

SEQ ID NO: 257218 - RNA, 19 nt, Homo sapiens
  misc_RNA (1)...(19): siRNA sense strand
gugaaguccuccugaaggu

SEQ ID NO: 257219 - RNA, 19 nt, Homo sapiens
  misc_RNA (1)...(19): siRNA sense strand
ccaguuugcugaggucuag

SEQ ID NO: 257220 - RNA, 19 nt, Homo sapiens
  misc_RNA (1)...(19): siRNA sense strand
gucgauggguucucuaugg

SEQ ID NO: 257221 - RNA, 19 nt, Homo sapiens
  misc_RNA (1)...(19): siRNA sense strand
uccaggaggcccauaagua

SEQ ID NO: 257222 - RNA, 19 nt, Homo sapiens
  misc_RNA (1)...(19): siRNA sense strand
gggagaagaacgucaacug

SEQ ID NO: 257223 - RNA, 19 nt, Homo sapiens
  misc_RNA (1)...(19): siRNA sense strand
gauggucgauggguucucu

SEQ ID NO: 257224 - RNA, 19 nt, Homo sapiens
  misc_RNA (1)...(19): siRNA sense strand
ccaggaggcccauaaguac

SEQ ID NO: 257225 - RNA, 19 nt, Homo sapiens
  misc_RNA (1)...(19): siRNA sense strand
aaaugcuggugaaugcuuu

SEQ ID NO: 257226 - RNA, 19 nt, Homo sapiens
  misc_RNA (1)...(19): siRNA sense strand
caaaugcuggugaaugcuu

SEQ ID NO: 257227 - RNA, 19 nt, Homo sapiens
  misc_RNA (1)...(19): siRNA sense strand
gcugaggucuagggacaau

SEQ ID NO: 257228 - RNA, 19 nt, Homo sapiens
  misc_RNA (1)...(19): siRNA sense strand
gauccuacugggagaagaa

SEQ ID NO: 257229 - RNA, 19 nt, Homo sapiens
  misc_RNA (1)...(19): siRNA sense strand
acauggaggccaacaagaa

SEQ ID NO: 257230 - RNA, 19 nt, Homo sapiens
  misc_RNA (1)...(19): siRNA sense strand
gagcaaauucugccucacu

SEQ ID NO: 257231 - RNA, 19 nt, Homo sapiens
  misc_RNA (1)...(19): siRNA sense strand
cggaaaaccucuacgugaa

SEQ ID NO: 257232 - RNA, 19 nt, Homo sapiens
  misc_RNA (1)...(19): siRNA sense strand
acaagaacauaggcaagau

SEQ ID NO: 257233 - RNA, 19 nt, Homo sapiens
  misc_RNA (1)...(19): siRNA sense strand
gcaaauucugccucacuuc

SEQ ID NO: 257234 - RNA, 19 nt, Homo sapiens
  misc_RNA (1)...(19): siRNA sense strand
cugaagcaacgcugaaauu

SEQ ID NO: 257235 - RNA, 19 nt, Homo sapiens
  misc_RNA (1)...(19): siRNA sense strand
agagacaaggccaguauga

SEQ ID NO: 257236 - RNA, 19 nt, Homo sapiens
  misc_RNA (1)...(19): siRNA sense strand
caaauucugccucacuucu

SEQ ID NO: 257237 - RNA, 19 nt, Homo sapiens
  misc_RNA (1)...(19): siRNA sense strand
uuccagcuguuacaucuug

SEQ ID NO: 257238 - RNA, 19 nt, Homo sapiens
  misc_RNA (1)...(19): siRNA sense strand
ggacuuaaugcagagacaa

SEQ ID NO: 257239 - RNA, 19 nt, Homo sapiens
  misc_RNA (1)...(19): siRNA sense strand
ugaagcaacgcugaaauuc

SEQ ID NO: 257240 - RNA, 19 nt, Homo sapiens
  misc_RNA (1)...(19): siRNA sense strand
gaggaggugacaucaaugg

SEQ ID NO: 257241 - RNA, 19 nt, Homo sapiens
  misc_RNA (1)...(19): siRNA sense strand
ggaggccaacaagaacaua

SEQ ID NO: 257242 - RNA, 19 nt, Homo sapiens
  misc_RNA (1)...(19): siRNA sense strand
uguucaggcuggagacuau

SEQ ID NO: 257243 - RNA, 19 nt, Homo sapiens
  misc_RNA (1)...(19): siRNA sense strand
ggaggcccauaaguacaug

SEQ ID NO: 257244 - RNA, 19 nt, Homo sapiens
  misc_RNA (1)...(19): siRNA sense strand
gaaauccaggaggcccaua

SEQ ID NO: 257245 - RNA, 19 nt, Homo sapiens
  misc_RNA (1)...(19): siRNA sense strand
caauaaguacaagcaaaug

SEQ ID NO: 257246 - RNA, 19 nt, Homo sapiens
  misc_RNA (1)...(19): siRNA sense strand
ggcuggagacuaugugcua

SEQ ID NO: 257247 - RNA, 19 nt, Homo sapiens
  misc_RNA (1)...(19): siRNA sense strand
uccaggagccagcaacauu

SEQ ID NO: 257248 - RNA, 19 nt, Homo sapiens
  misc_RNA (1)...(19): siRNA sense strand
cuagggacaauaaguacaa

SEQ ID NO: 257249 - RNA, 19 nt, Homo sapiens
  misc_RNA (1)...(19): siRNA sense strand
gguucucuauggucugaug

SEQ ID NO: 257250 - RNA, 19 nt, Homo sapiens
  misc_RNA (1)...(19): siRNA sense strand
cugcuggauucaauuacaa

SEQ ID NO: 257251 - RNA, 19 nt, Homo sapiens
  misc_RNA (1)...(19): siRNA sense strand
ggaggaggugacaucaaug

SEQ ID NO: 257252 - RNA, 19 nt, Homo sapiens
  misc_RNA (1)...(19): siRNA sense strand
caagaacauaggcaagauc

SEQ ID NO: 257253 - RNA, 19 nt, Homo sapiens
  misc_RNA (1)...(19): siRNA sense strand
caucuugugggaaauguuc

SEQ ID NO: 257254 - RNA, 19 nt, Homo sapiens
  misc_RNA (1)...(19): siRNA sense strand
uuuaagcgaggaagucuga

SEQ ID NO: 257255 - RNA, 19 nt, Homo sapiens
  misc_RNA (1)...(19): siRNA sense strand
caagaucguccuggaacug

SEQ ID NO: 257256 - RNA, 19 nt, Homo sapiens
  misc_RNA (1)...(19): siRNA sense strand
gggacaauaaguacaagca

SEQ ID NO: 257257 - RNA, 19 nt, Homo sapiens
  misc_RNA (1)...(19): siRNA sense strand
gaugccagcugccacauau

SEQ ID NO: 257258 - RNA, 19 nt, Homo sapiens
  misc_RNA (1)...(19): siRNA sense strand
ccuggacggugucauauuu

SEQ ID NO: 257259 - RNA, 19 nt, Homo sapiens
  misc_RNA (1)...(19): siRNA sense strand
gauggaacuugaugaguca

SEQ ID NO: 257260 - RNA, 19 nt, Homo sapiens
  misc_RNA (1)...(19): siRNA sense strand
ccgagacccuggcuuccua

SEQ ID NO: 257261 - RNA, 19 nt, Homo sapiens
  misc_RNA (1)...(19): siRNA sense strand
caagaugcucugccacgua

SEQ ID NO: 257262 - RNA, 19 nt, Homo sapiens
  misc_RNA (1)...(19): siRNA sense strand
agcaggagcucaagcaguu

SEQ ID NO: 257263 - RNA, 19 nt, Homo sapiens
  misc_RNA (1)...(19): siRNA sense strand
ucagucggauggaacuuga

SEQ ID NO: 257264 - RNA, 19 nt, Homo sapiens
  misc_RNA (1)...(19): siRNA sense strand
aagaugcucugccacguau

SEQ ID NO: 257265 - RNA, 19 nt, Homo sapiens
  misc_RNA (1)...(19): siRNA sense strand
ggacccagaugaggauucu

SEQ ID NO: 257266 - RNA, 19 nt, Homo sapiens
  misc_RNA (1)...(19): siRNA sense strand
gacggugccucuagucaca

SEQ ID NO: 257267 - RNA, 19 nt, Homo sapiens
  misc_RNA (1)...(19): siRNA sense strand
gcucaucgcccaggccauu

SEQ ID NO: 257268 - RNA, 19 nt, Homo sapiens
  misc_RNA (1)...(19): siRNA sense strand
ccacauaucgccuccuuac

SEQ ID NO: 257269 - RNA, 19 nt, Homo sapiens
  misc_RNA (1)...(19): siRNA sense strand
gcgccugccaccuccauaa

SEQ ID NO: 257270 - RNA, 19 nt, Homo sapiens
  misc_RNA (1)...(19): siRNA sense strand
ccuccuggacggugucaua

SEQ ID NO: 257271 - RNA, 19 nt, Homo sapiens
  misc_RNA (1)...(19): siRNA sense strand
gaugcucugccacguauuc

SEQ ID NO: 257272 - RNA, 19 nt, Homo sapiens
  misc_RNA (1)...(19): siRNA sense strand
gcuccugucugccgaagcu

SEQ ID NO: 257273 - RNA, 19 nt, Homo sapiens
  misc_RNA (1)...(19): siRNA sense strand
gagacggugccucuaguca

SEQ ID NO: 257274 - RNA, 19 nt, Homo sapiens
  misc_RNA (1)...(19): siRNA sense strand
ugagaucaaugggcagagu

SEQ ID NO: 257275 - RNA, 19 nt, Homo sapiens
  misc_RNA (1)...(19): siRNA sense strand
ccaccaagaggaucaaggu

SEQ ID NO: 257276 - RNA, 19 nt, Homo sapiens
  misc_RNA (1)...(19): siRNA sense strand
gagggcagcaggagcucaa

SEQ ID NO: 257277 - RNA, 19 nt, Homo sapiens
  misc_RNA (1)...(19): siRNA sense strand
gcucugccacguauucuac

SEQ ID NO: 257278 - RNA, 19 nt, Homo sapiens
  misc_RNA (1)...(19): siRNA sense strand
ggaccacuucuccaacagu

SEQ ID NO: 257279 - RNA, 19 nt, Homo sapiens
  misc_RNA (1)...(19): siRNA sense strand
cgaugccagcugccacaua

SEQ ID NO: 257280 - RNA, 19 nt, Homo sapiens
  misc_RNA (1)...(19): siRNA sense strand
ccaagaagcucuacauuga

SEQ ID NO: 257281 - RNA, 19 nt, Homo sapiens
  misc_RNA (1)...(19): siRNA sense strand
gaaagaaggugcccacugu

SEQ ID NO: 257282 - RNA, 19 nt, Homo sapiens
  misc_RNA (1)...(19): siRNA sense strand
caucaacacugaauugcaa

SEQ ID NO: 257283 - RNA, 19 nt, Homo sapiens
  misc_RNA (1)...(19): siRNA sense strand
cuaagcaacucuuucgaaa

SEQ ID NO: 257284 - RNA, 19 nt, Homo sapiens
  misc_RNA (1)...(19): siRNA sense strand
gaagaaaucuaggcuccau

SEQ ID NO: 257285 - RNA, 19 nt, Homo sapiens
  misc_RNA (1)...(19): siRNA sense strand
gccgggaccuucaacagua

SEQ ID NO: 257286 - RNA, 19 nt, Homo sapiens
  misc_RNA (1)...(19): siRNA sense strand
gcacucagaauuugaugaa

SEQ ID NO: 257287 - RNA, 19 nt, Homo sapiens
  misc_RNA (1)...(19): siRNA sense strand
uagaagauuugcacucaga

SEQ ID NO: 257288 - RNA, 19 nt, Homo sapiens
  misc_RNA (1)...(19): siRNA sense strand
gauuugcacucagaauuug

SEQ ID NO: 257289 - RNA, 19 nt, Homo sapiens
  misc_RNA (1)...(19): siRNA sense strand
gaucaugguggccaauauu

SEQ ID NO: 257290 - RNA, 19 nt, Homo sapiens
  misc_RNA (1)...(19): siRNA sense strand
ggaucaugguggccaauau

SEQ ID NO: 257291 - RNA, 19 nt, Homo sapiens
  misc_RNA (1)...(19): siRNA sense strand
aaucuaggcuccaucaaca

SEQ ID NO: 257292 - RNA, 19 nt, Homo sapiens
  misc_RNA (1)...(19): siRNA sense strand
acacugaauugcaagaugu

SEQ ID NO: 257293 - RNA, 19 nt, Homo sapiens
  misc_RNA (1)...(19): siRNA sense strand
gcuaagcaacucuuucgaa

SEQ ID NO: 257294 - RNA, 19 nt, Homo sapiens
  misc_RNA (1)...(19): siRNA sense strand
ccuagaagauuugcacuca

SEQ ID NO: 257295 - RNA, 19 nt, Homo sapiens
  misc_RNA (1)...(19): siRNA sense strand
caagaaauaccgccaggau

SEQ ID NO: 257296 - RNA, 19 nt, Homo sapiens
  misc_RNA (1)...(19): siRNA sense strand
gaagcacucucagcauugg

SEQ ID NO: 257297 - RNA, 19 nt, Homo sapiens
  misc_RNA (1)...(19): siRNA sense strand
ugacagucgugcucgaaga

SEQ ID NO: 257298 - RNA, 19 nt, Homo sapiens
  misc_RNA (1)...(19): siRNA sense strand
ucucagcauuggauucaaa

SEQ ID NO: 257299 - RNA, 19 nt, Homo sapiens
  misc_RNA (1)...(19): siRNA sense strand
uaccagauguaccuuggaa

SEQ ID NO: 257300 - RNA, 19 nt, Homo sapiens
  misc_RNA (1)...(19): siRNA sense strand
ugccaaacuugcagcagua

SEQ ID NO: 257301 - RNA, 19 nt, Homo sapiens
  misc_RNA (1)...(19): siRNA sense strand
uugccuaccuagaagauuu

SEQ ID NO: 257302 - RNA, 19 nt, Homo sapiens
  misc_RNA (1)...(19): siRNA sense strand
aagaagcucuacauugaca

SEQ ID NO: 257303 - RNA, 19 nt, Homo sapiens
  misc_RNA (1)...(19): siRNA sense strand
gaagauuugcacucagaau

SEQ ID NO: 257304 - RNA, 19 nt, Homo sapiens
  misc_RNA (1)...(19): siRNA sense strand
ucccgacccuauuccuuua

SEQ ID NO: 257305 - RNA, 19 nt, Homo sapiens
  misc_RNA (1)...(19): siRNA sense strand
aauaguguauguccgauuc

SEQ ID NO: 257306 - RNA, 19 nt, Homo sapiens
  misc_RNA (1)...(19): siRNA sense strand
uguccagucuguccaagaa

SEQ ID NO: 257307 - RNA, 19 nt, Homo sapiens
  misc_RNA (1)...(19): siRNA sense strand
gaugcgaaguacuugaaca

SEQ ID NO: 257308 - RNA, 19 nt, Homo sapiens
  misc_RNA (1)...(19): siRNA sense strand
gcguuccacuuaugccaaa

SEQ ID NO: 257309 - RNA, 19 nt, Homo sapiens
  misc_RNA (1)...(19): siRNA sense strand
gacccuauuccuuuauuga

SEQ ID NO: 257310 - RNA, 19 nt, Homo sapiens
  misc_RNA (1)...(19): siRNA sense strand
aagcaggagccaugacuuu

SEQ ID NO: 257311 - RNA, 19 nt, Homo sapiens
  misc_RNA (1)...(19): siRNA sense strand
gguggccaauauugaagaa

SEQ ID NO: 257312 - RNA, 19 nt, Homo sapiens
  misc_RNA (1)...(19): siRNA sense strand
gcaggaggacgaacagucu

SEQ ID NO: 257313 - RNA, 19 nt, Homo sapiens
  misc_RNA (1)...(19): siRNA sense strand
acucagaauuugaugaaca

SEQ ID NO: 257314 - RNA, 19 nt, Homo sapiens
  misc_RNA (1)...(19): siRNA sense strand
agauuugcacucagaauuu

SEQ ID NO: 257315 - RNA, 19 nt, Homo sapiens
  misc_RNA (1)...(19): siRNA sense strand
caagaugugcagaggauca

SEQ ID NO: 257316 - RNA, 19 nt, Homo sapiens
  misc_RNA (1)...(19): siRNA sense strand
gaagcaggagccaugacuu

SEQ ID NO: 257317 - RNA, 19 nt, Homo sapiens
  misc_RNA (1)...(19): siRNA sense strand
ccagucuguccaagaaaua

SEQ ID NO: 257318 - RNA, 19 nt, Homo sapiens
  misc_RNA (1)...(19): siRNA sense strand
ggccaauauugaagaagug

SEQ ID NO: 257319 - RNA, 19 nt, Homo sapiens
  misc_RNA (1)...(19): siRNA sense strand
agaauuugaugaacagcau

SEQ ID NO: 257320 - RNA, 19 nt, Homo sapiens
  misc_RNA (1)...(19): siRNA sense strand
ugaagaaguguuacaacga

SEQ ID NO: 257321 - RNA, 19 nt, Homo sapiens
  misc_RNA (1)...(19): siRNA sense strand
caugguggccaauauugaa

SEQ ID NO: 257322 - RNA, 19 nt, Homo sapiens
  misc_RNA (1)...(19): siRNA sense strand
ugaacagcauggaaagaag

SEQ ID NO: 257323 - RNA, 19 nt, Homo sapiens
  misc_RNA (1)...(19): siRNA sense strand
aagcugccuucccuaagaa

SEQ ID NO: 257324 - RNA, 19 nt, Homo sapiens
  misc_RNA (1)...(19): siRNA sense strand
gauucaaaggcuaacaauu

SEQ ID NO: 257325 - RNA, 19 nt, Homo sapiens
  misc_RNA (1)...(19): siRNA sense strand
cgacccuauuccuuuauug

SEQ ID NO: 257326 - RNA, 19 nt, Homo sapiens
  misc_RNA (1)...(19): siRNA sense strand
gccaggaugcgaaguacuu

SEQ ID NO: 257327 - RNA, 19 nt, Homo sapiens
  misc_RNA (1)...(19): siRNA sense strand
uaggcuccaucaacacuga

SEQ ID NO: 257328 - RNA, 19 nt, Homo sapiens
  misc_RNA (1)...(19): siRNA sense strand
aagauuugcacucagaauu

SEQ ID NO: 257329 - RNA, 19 nt, Homo sapiens
  misc_RNA (1)...(19): siRNA sense strand
ggauucaaaggcuaacaau

SEQ ID NO: 257330 - RNA, 19 nt, Homo sapiens
  misc_RNA (1)...(19): siRNA sense strand
gacagucgugcucgaagaa

SEQ ID NO: 257331 - RNA, 19 nt, Homo sapiens
  misc_RNA (1)...(19): siRNA sense strand
gucccgacccuauuccuuu

SEQ ID NO: 257332 - RNA, 19 nt, Homo sapiens
  misc_RNA (1)...(19): siRNA sense strand
gaugaacagcauggaaaga

SEQ ID NO: 257333 - RNA, 19 nt, Homo sapiens
  misc_RNA (1)...(19): siRNA sense strand
ggaagcaggagccaugacu

SEQ ID NO: 257334 - RNA, 19 nt, Homo sapiens
  misc_RNA (1)...(19): siRNA sense strand
uggccaauauugaagaagu

SEQ ID NO: 257335 - RNA, 19 nt, Homo sapiens
  misc_RNA (1)...(19): siRNA sense strand
aaaccaagaagcucuacau

SEQ ID NO: 257336 - RNA, 19 nt, Homo sapiens
  misc_RNA (1)...(19): siRNA sense strand
ccgacccuauuccuuuauu

SEQ ID NO: 257337 - RNA, 19 nt, Homo sapiens
  misc_RNA (1)...(19): siRNA sense strand
gaccuucaacaguaucaga

SEQ ID NO: 257338 - RNA, 19 nt, Homo sapiens
  misc_RNA (1)...(19): siRNA sense strand
gaaaucuaggcuccaucaa

SEQ ID NO: 257339 - RNA, 19 nt, Homo sapiens
  misc_RNA (1)...(19): siRNA sense strand
agaaaucuaggcuccauca

SEQ ID NO: 257340 - RNA, 19 nt, Homo sapiens
  misc_RNA (1)...(19): siRNA sense strand
gaagcucuacauugacagu

SEQ ID NO: 257341 - RNA, 19 nt, Homo sapiens
  misc_RNA (1)...(19): siRNA sense strand
aacaugcguuccacuuaug

SEQ ID NO: 257342 - RNA, 19 nt, Homo sapiens
  misc_RNA (1)...(19): siRNA sense strand
gaacaguccccuaccagau

SEQ ID NO: 257343 - RNA, 19 nt, Homo sapiens
  misc_RNA (1)...(19): siRNA sense strand
accaagaagcucuacauug

SEQ ID NO: 257344 - RNA, 19 nt, Homo sapiens
  misc_RNA (1)...(19): siRNA sense strand
ucccuaagaaguuggcuuu

SEQ ID NO: 257345 - RNA, 19 nt, Homo sapiens
  misc_RNA (1)...(19): siRNA sense strand
uuucgaaaguugaaugaac

SEQ ID NO: 257346 - RNA, 19 nt, Homo sapiens
  misc_RNA (1)...(19): siRNA sense strand
gcacucucagcauuggauu

SEQ ID NO: 257347 - RNA, 19 nt, Homo sapiens
  misc_RNA (1)...(19): siRNA sense strand
agaagcacucucagcauug

SEQ ID NO: 257348 - RNA, 19 nt, Homo sapiens
  misc_RNA (1)...(19): siRNA sense strand
cagucgugcucgaagaaau

SEQ ID NO: 257349 - RNA, 19 nt, Homo sapiens
  misc_RNA (1)...(19): siRNA sense strand
ccgggaccuucaacaguau

SEQ ID NO: 257350 - RNA, 19 nt, Homo sapiens
  misc_RNA (1)...(19): siRNA sense strand
uucgaaaguugaaugaaca

SEQ ID NO: 257351 - RNA, 19 nt, Homo sapiens
  misc_RNA (1)...(19): siRNA sense strand
ccuaagaaguuggcuuuug

SEQ ID NO: 257352 - RNA, 19 nt, Homo sapiens
  misc_RNA (1)...(19): siRNA sense strand
gguguguuauuugguuuua

SEQ ID NO: 257353 - RNA, 19 nt, Homo sapiens
  misc_RNA (1)...(19): siRNA sense strand
uugaugaacagcauggaaa

SEQ ID NO: 257354 - RNA, 19 nt, Homo sapiens
  misc_RNA (1)...(19): siRNA sense strand
uccagucuguccaagaaau

SEQ ID NO: 257355 - RNA, 19 nt, Homo sapiens
  misc_RNA (1)...(19): siRNA sense strand
gaagaagccuguaucuaaa

SEQ ID NO: 257356 - RNA, 19 nt, Homo sapiens
  misc_RNA (1)...(19): siRNA sense strand
gaaacacgcuggagaagaa

SEQ ID NO: 257357 - RNA, 19 nt, Homo sapiens
  misc_RNA (1)...(19): siRNA sense strand
agaagaagccuguaucuaa

SEQ ID NO: 257358 - RNA, 19 nt, Homo sapiens
  misc_RNA (1)...(19): siRNA sense strand
ugaaggccaucuccaguua

SEQ ID NO: 257359 - RNA, 19 nt, Homo sapiens
  misc_RNA (1)...(19): siRNA sense strand
gaagcagggugaagucagu

SEQ ID NO: 257360 - RNA, 19 nt, Homo sapiens
  misc_RNA (1)...(19): siRNA sense strand
ggaagaagaaguccaccaa

SEQ ID NO: 257361 - RNA, 19 nt, Homo sapiens
  misc_RNA (1)...(19): siRNA sense strand
aagaagaaguccaccaaga

SEQ ID NO: 257362 - RNA, 19 nt, Homo sapiens
  misc_RNA (1)...(19): siRNA sense strand
auaagaagcugaaauccau

SEQ ID NO: 257363 - RNA, 19 nt, Homo sapiens
  misc_RNA (1)...(19): siRNA sense strand
gcaucuaugugcaggaaau

SEQ ID NO: 257364 - RNA, 19 nt, Homo sapiens
  misc_RNA (1)...(19): siRNA sense strand
ggagcuggcuggcaaugca

SEQ ID NO: 257365 - RNA, 19 nt, Homo sapiens
  misc_RNA (1)...(19): siRNA sense strand
ucacaguccucuccaccaa

SEQ ID NO: 257366 - RNA, 19 nt, Homo sapiens
  misc_RNA (1)...(19): siRNA sense strand
gaaagguggcaaggaguuu

SEQ ID NO: 257367 - RNA, 19 nt, Homo sapiens
  misc_RNA (1)...(19): siRNA sense strand
gcuuggcccuggcugauga

SEQ ID NO: 257368 - RNA, 19 nt, Homo sapiens
  misc_RNA (1)...(19): siRNA sense strand
ggaaacacgcuggagaaga

SEQ ID NO: 257369 - RNA, 19 nt, Homo sapiens
  misc_RNA (1)...(19): siRNA sense strand
acaauguccucuuccauca

SEQ ID NO: 257370 - RNA, 19 nt, Homo sapiens
  misc_RNA (1)...(19): siRNA sense strand
gauaagaagcugaaaucca

SEQ ID NO: 257371 - RNA, 19 nt, Homo sapiens
  misc_RNA (1)...(19): siRNA sense strand
ccgaguugcuagcgaagaa

SEQ ID NO: 257372 - RNA, 19 nt, Homo sapiens
  misc_RNA (1)...(19): siRNA sense strand
gcagacaagugugaagaac

SEQ ID NO: 257373 - RNA, 19 nt, Homo sapiens
  misc_RNA (1)...(19): siRNA sense strand
gugauccacuguaauaguc

SEQ ID NO: 257374 - RNA, 19 nt, Homo sapiens
  misc_RNA (1)...(19): siRNA sense strand
aauguccucuuccaucaaa

SEQ ID NO: 257375 - RNA, 19 nt, Homo sapiens
  misc_RNA (1)...(19): siRNA sense strand
gaugauaagaagcugaaau

SEQ ID NO: 257376 - RNA, 19 nt, Homo sapiens
  misc_RNA (1)...(19): siRNA sense strand
cagaagaagccuguaucua

SEQ ID NO: 257377 - RNA, 19 nt, Homo sapiens
  misc_RNA (1)...(19): siRNA sense strand
gcuaaaaggagucaccaua

SEQ ID NO: 257378 - RNA, 19 nt, Homo sapiens
  misc_RNA (1)...(19): siRNA sense strand
ggcccuggcugaugauaag

SEQ ID NO: 257379 - RNA, 19 nt, Homo sapiens
  misc_RNA (1)...(19): siRNA sense strand
uuugugauccacuguaaua

SEQ ID NO: 257380 - RNA, 19 nt, Homo sapiens
  misc_RNA (1)...(19): siRNA sense strand
ccaagucuccaucccagaa

SEQ ID NO: 257381 - RNA, 19 nt, Homo sapiens
  misc_RNA (1)...(19): siRNA sense strand
acaguccucuccaccaaga

SEQ ID NO: 257382 - RNA, 19 nt, Homo sapiens
  misc_RNA (1)...(19): siRNA sense strand
gcagcgagagacaacaaga

SEQ ID NO: 257383 - RNA, 19 nt, Homo sapiens
  misc_RNA (1)...(19): siRNA sense strand
ugaaucagcugcuaaaagg

SEQ ID NO: 257384 - RNA, 19 nt, Homo sapiens
  misc_RNA (1)...(19): siRNA sense strand
gcgagaguauaggcaucua

SEQ ID NO: 257385 - RNA, 19 nt, Homo sapiens
  misc_RNA (1)...(19): siRNA sense strand
aagcugaaauccauugcau

SEQ ID NO: 257386 - RNA, 19 nt, Homo sapiens
  misc_RNA (1)...(19): siRNA sense strand
uaggaaacacgcuggagaa

SEQ ID NO: 257387 - RNA, 19 nt, Homo sapiens
  misc_RNA (1)...(19): siRNA sense strand
ggccaucuccaguuacuuc

SEQ ID NO: 257388 - RNA, 19 nt, Homo sapiens
  misc_RNA (1)...(19): siRNA sense strand
gcaaugcagcgagagacaa

SEQ ID NO: 257389 - RNA, 19 nt, Homo sapiens
  misc_RNA (1)...(19): siRNA sense strand
guuggaagccaucaucaca

SEQ ID NO: 257390 - RNA, 19 nt, Homo sapiens
  misc_RNA (1)...(19): siRNA sense strand
caagcuggacgccaacuag

SEQ ID NO: 257391 - RNA, 19 nt, Homo sapiens
  misc_RNA (1)...(19): siRNA sense strand
cagcgagagacaacaagaa

SEQ ID NO: 257392 - RNA, 19 nt, Homo sapiens
  misc_RNA (1)...(19): siRNA sense strand
ccaaugaugaagagcugaa

SEQ ID NO: 257393 - RNA, 19 nt, Homo sapiens
  misc_RNA (1)...(19): siRNA sense strand
agaaagguggcaaggaguu

SEQ ID NO: 257394 - RNA, 19 nt, Homo sapiens
  misc_RNA (1)...(19): siRNA sense strand
gcagcggcaggaacgguuu

SEQ ID NO: 257395 - RNA, 19 nt, Homo sapiens
  misc_RNA (1)...(19): siRNA sense strand
aguuugugauccacuguaa

SEQ ID NO: 257396 - RNA, 19 nt, Homo sapiens
  misc_RNA (1)...(19): siRNA sense strand
gaaaguuggaagccaucau

SEQ ID NO: 257397 - RNA, 19 nt, Homo sapiens
  misc_RNA (1)...(19): siRNA sense strand
ccagaagaagccuguaucu

SEQ ID NO: 257398 - RNA, 19 nt, Homo sapiens
  misc_RNA (1)...(19): siRNA sense strand
gggauccaaaggaaaguug

SEQ ID NO: 257399 - RNA, 19 nt, Homo sapiens
  misc_RNA (1)...(19): siRNA sense strand
uggcaaggaguuuguggaa

SEQ ID NO: 257400 - RNA, 19 nt, Homo sapiens
  misc_RNA (1)...(19): siRNA sense strand
ugccaaagcaggagucauc

SEQ ID NO: 257401 - RNA, 19 nt, Homo sapiens
  misc_RNA (1)...(19): siRNA sense strand
gaagcugaaauccauugca

SEQ ID NO: 257402 - RNA, 19 nt, Homo sapiens
  misc_RNA (1)...(19): siRNA sense strand
gaagaagcggggauccaaa

SEQ ID NO: 257403 - RNA, 19 nt, Homo sapiens
  misc_RNA (1)...(19): siRNA sense strand
aggcaucuaugugcaggaa

SEQ ID NO: 257404 - RNA, 19 nt, Homo sapiens
  misc_RNA (1)...(19): siRNA sense strand
uaagaagcugaaauccauu

SEQ ID NO: 257405 - RNA, 19 nt, Homo sapiens
  misc_RNA (1)...(19): siRNA sense strand
aaaguuggaagccaucauc

SEQ ID NO: 257406 - RNA, 19 nt, Homo sapiens
  misc_RNA (1)...(19): siRNA sense strand
gaagaagccuguaucuaaa

SEQ ID NO: 257407 - RNA, 19 nt, Homo sapiens
  misc_RNA (1)...(19): siRNA sense strand
gaaacacgcuggagaagaa

SEQ ID NO: 257408 - RNA, 19 nt, Homo sapiens
  misc_RNA (1)...(19): siRNA sense strand
agaagaagccuguaucuaa

SEQ ID NO: 257409 - RNA, 19 nt, Homo sapiens
  misc_RNA (1)...(19): siRNA sense strand
ugaaggccaucuccaguua

SEQ ID NO: 257410 - RNA, 19 nt, Homo sapiens
  misc_RNA (1)...(19): siRNA sense strand
gaagcagggugaagucagu

SEQ ID NO: 257411 - RNA, 19 nt, Homo sapiens
  misc_RNA (1)...(19): siRNA sense strand
ggaagaagaaguccaccaa

SEQ ID NO: 257412 - RNA, 19 nt, Homo sapiens
  misc_RNA (1)...(19): siRNA sense strand
aagaagaaguccaccaaga

SEQ ID NO: 257413 - RNA, 19 nt, Homo sapiens
  misc_RNA (1)...(19): siRNA sense strand
auaagaagcugaaauccau

SEQ ID NO: 257414 - RNA, 19 nt, Homo sapiens
  misc_RNA (1)...(19): siRNA sense strand
gcaucuaugugcaggaaau

SEQ ID NO: 257415 - RNA, 19 nt, Homo sapiens
  misc_RNA (1)...(19): siRNA sense strand
ggagcuggcuggcaaugca

SEQ ID NO: 257416 - RNA, 19 nt, Homo sapiens
  misc_RNA (1)...(19): siRNA sense strand
ucacaguccucuccaccaa

SEQ ID NO: 257417 - RNA, 19 nt, Homo sapiens
  misc_RNA (1)...(19): siRNA sense strand
gaaagguggcaaggaguuu

SEQ ID NO: 257418 - RNA, 19 nt, Homo sapiens
  misc_RNA (1)...(19): siRNA sense strand
gcuuggcccuggcugauga

SEQ ID NO: 257419 - RNA, 19 nt, Homo sapiens
  misc_RNA (1)...(19): siRNA sense strand
ggaaacacgcuggagaaga

SEQ ID NO: 257420 - RNA, 19 nt, Homo sapiens
  misc_RNA (1)...(19): siRNA sense strand
acaauguccucuuccauca

SEQ ID NO: 257421 - RNA, 19 nt, Homo sapiens
  misc_RNA (1)...(19): siRNA sense strand
gauaagaagcugaaaucca

SEQ ID NO: 257422 - RNA, 19 nt, Homo sapiens
  misc_RNA (1)...(19): siRNA sense strand
ccgaguugcuagcgaagaa

SEQ ID NO: 257423 - RNA, 19 nt, Homo sapiens
  misc_RNA (1)...(19): siRNA sense strand
gcagacaagugugaagaac

SEQ ID NO: 257424 - RNA, 19 nt, Homo sapiens
  misc_RNA (1)...(19): siRNA sense strand
gugauccacuguaauaguc

SEQ ID NO: 257425 - RNA, 19 nt, Homo sapiens
  misc_RNA (1)...(19): siRNA sense strand
aauguccucuuccaucaaa

SEQ ID NO: 257426 - RNA, 19 nt, Homo sapiens
  misc_RNA (1)...(19): siRNA sense strand
gaugauaagaagcugaaau

SEQ ID NO: 257427 - RNA, 19 nt, Homo sapiens
  misc_RNA (1)...(19): siRNA sense strand
cagaagaagccuguaucua

SEQ ID NO: 257428 - RNA, 19 nt, Homo sapiens
  misc_RNA (1)...(19): siRNA sense strand
gcuaaaaggagucaccaua

SEQ ID NO: 257429 - RNA, 19 nt, Homo sapiens
  misc_RNA (1)...(19): siRNA sense strand
ggcccuggcugaugauaag

SEQ ID NO: 257430 - RNA, 19 nt, Homo sapiens
  misc_RNA (1)...(19): siRNA sense strand
uuugugauccacuguaaua

SEQ ID NO: 257431 - RNA, 19 nt, Homo sapiens
  misc_RNA (1)...(19): siRNA sense strand
ccaagucuccaucccagaa

SEQ ID NO: 257432 - RNA, 19 nt, Homo sapiens
  misc_RNA (1)...(19): siRNA sense strand
acaguccucuccaccaaga

SEQ ID NO: 257433 - RNA, 19 nt, Homo sapiens
  misc_RNA (1)...(19): siRNA sense strand
gcagcgagagacaacaaga

SEQ ID NO: 257434 - RNA, 19 nt, Homo sapiens
  misc_RNA (1)...(19): siRNA sense strand
ugaaucagcugcuaaaagg

SEQ ID NO: 257435 - RNA, 19 nt, Homo sapiens
  misc_RNA (1)...(19): siRNA sense strand
gcgagaguauaggcaucua

SEQ ID NO: 257436 - RNA, 19 nt, Homo sapiens
  misc_RNA (1)...(19): siRNA sense strand
aagcugaaauccauugcau

SEQ ID NO: 257437 - RNA, 19 nt, Homo sapiens
  misc_RNA (1)...(19): siRNA sense strand
uaggaaacacgcuggagaa

SEQ ID NO: 257438 - RNA, 19 nt, Homo sapiens
  misc_RNA (1)...(19): siRNA sense strand
ggccaucuccaguuacuuc

SEQ ID NO: 257439 - RNA, 19 nt, Homo sapiens
  misc_RNA (1)...(19): siRNA sense strand
gcaaugcagcgagagacaa

SEQ ID NO: 257440 - RNA, 19 nt, Homo sapiens
  misc_RNA (1)...(19): siRNA sense strand
guuggaagccaucaucaca

SEQ ID NO: 257441 - RNA, 19 nt, Homo sapiens
  misc_RNA (1)...(19): siRNA sense strand
caagcuggacgccaacuag

SEQ ID NO: 257442 - RNA, 19 nt, Homo sapiens
  misc_RNA (1)...(19): siRNA sense strand
cagcgagagacaacaagaa

SEQ ID NO: 257443 - RNA, 19 nt, Homo sapiens
  misc_RNA (1)...(19): siRNA sense strand
ccaaugaugaagagcugaa

SEQ ID NO: 257444 - RNA, 19 nt, Homo sapiens
  misc_RNA (1)...(19): siRNA sense strand
agaaagguggcaaggaguu

SEQ ID NO: 257445 - RNA, 19 nt, Homo sapiens
  misc_RNA (1)...(19): siRNA sense strand
gcagcggcaggaacgguuu

SEQ ID NO: 257446 - RNA, 19 nt, Homo sapiens
  misc_RNA (1)...(19): siRNA sense strand
aguuugugauccacuguaa

SEQ ID NO: 257447 - RNA, 19 nt, Homo sapiens
  misc_RNA (1)...(19): siRNA sense strand
gaaaguuggaagccaucau

SEQ ID NO: 257448 - RNA, 19 nt, Homo sapiens
  misc_RNA (1)...(19): siRNA sense strand
ccagaagaagccuguaucu

SEQ ID NO: 257449 - RNA, 19 nt, Homo sapiens
  misc_RNA (1)...(19): siRNA sense strand
gggauccaaaggaaaguug

SEQ ID NO: 257450 - RNA, 19 nt, Homo sapiens
  misc_RNA (1)...(19): siRNA sense strand
uggcaaggaguuuguggaa

SEQ ID NO: 257451 - RNA, 19 nt, Homo sapiens
  misc_RNA (1)...(19): siRNA sense strand
ugccaaagcaggagucauc

SEQ ID NO: 257452 - RNA, 19 nt, Homo sapiens
  misc_RNA (1)...(19): siRNA sense strand
gaagcugaaauccauugca

SEQ ID NO: 257453 - RNA, 19 nt, Homo sapiens
  misc_RNA (1)...(19): siRNA sense strand
gaagaagcggggauccaaa

SEQ ID NO: 257454 - RNA, 19 nt, Homo sapiens
  misc_RNA (1)...(19): siRNA sense strand
aggcaucuaugugcaggaa

SEQ ID NO: 257455 - RNA, 19 nt, Homo sapiens
  misc_RNA (1)...(19): siRNA sense strand
uaagaagcugaaauccauu

SEQ ID NO: 257456 - RNA, 19 nt, Homo sapiens
  misc_RNA (1)...(19): siRNA sense strand
aaaguuggaagccaucauc

SEQ ID NO: 257457 - RNA, 19 nt, Homo sapiens
  misc_RNA (1)...(19): siRNA sense strand
gaagaagccuguaucuaaa

SEQ ID NO: 257458 - RNA, 19 nt, Homo sapiens
  misc_RNA (1)...(19): siRNA sense strand
gaaacacgcuggagaagaa

SEQ ID NO: 257459 - RNA, 19 nt, Homo sapiens
  misc_RNA (1)...(19): siRNA sense strand
agaagaagccuguaucuaa

SEQ ID NO: 257460 - RNA, 19 nt, Homo sapiens
  misc_RNA (1)...(19): siRNA sense strand
ugaaggccaucuccaguua

SEQ ID NO: 257461 - RNA, 19 nt, Homo sapiens
  misc_RNA (1)...(19): siRNA sense strand
gaagcagggugaagucagu

SEQ ID NO: 257462 - RNA, 19 nt, Homo sapiens
  misc_RNA (1)...(19): siRNA sense strand
ggaagaagaaguccaccaa

SEQ ID NO: 257463 - RNA, 19 nt, Homo sapiens
  misc_RNA (1)...(19): siRNA sense strand
aagaagaaguccaccaaga

SEQ ID NO: 257464 - RNA, 19 nt, Homo sapiens
  misc_RNA (1)...(19): siRNA sense strand
auaagaagcugaaauccau

SEQ ID NO: 257465 - RNA, 19 nt, Homo sapiens
  misc_RNA (1)...(19): siRNA sense strand
gcaucuaugugcaggaaau

SEQ ID NO: 257466 - RNA, 19 nt, Homo sapiens
  misc_RNA (1)...(19): siRNA sense strand
ggagcuggcuggcaaugca

SEQ ID NO: 257467 - RNA, 19 nt, Homo sapiens
  misc_RNA (1)...(19): siRNA sense strand
ucacaguccucuccaccaa

SEQ ID NO: 257468 - RNA, 19 nt, Homo sapiens
  misc_RNA (1)...(19): siRNA sense strand
gaaagguggcaaggaguuu

SEQ ID NO: 257469 - RNA, 19 nt, Homo sapiens
  misc_RNA (1)...(19): siRNA sense strand
gcuuggcccuggcugauga

SEQ ID NO: 257470 - RNA, 19 nt, Homo sapiens
  misc_RNA (1)...(19): siRNA sense strand
ggaaacacgcuggagaaga

SEQ ID NO: 257471 - RNA, 19 nt, Homo sapiens
  misc_RNA (1)...(19): siRNA sense strand
acaauguccucuuccauca

SEQ ID NO: 257472 - RNA, 19 nt, Homo sapiens
  misc_RNA (1)...(19): siRNA sense strand
gauaagaagcugaaaucca

SEQ ID NO: 257473 - RNA, 19 nt, Homo sapiens
  misc_RNA (1)...(19): siRNA sense strand
ccgaguugcuagcgaagaa

SEQ ID NO: 257474 - RNA, 19 nt, Homo sapiens
  misc_RNA (1)...(19): siRNA sense strand
gcagacaagugugaagaac

SEQ ID NO: 257475 - RNA, 19 nt, Homo sapiens
  misc_RNA (1)...(19): siRNA sense strand
gugauccacuguaauaguc

SEQ ID NO: 257476 - RNA, 19 nt, Homo sapiens
  misc_RNA (1)...(19): siRNA sense strand
aauguccucuuccaucaaa

SEQ ID NO: 257477 - RNA, 19 nt, Homo sapiens
  misc_RNA (1)...(19): siRNA sense strand
gaugauaagaagcugaaau

SEQ ID NO: 257478 - RNA, 19 nt, Homo sapiens
  misc_RNA (1)...(19): siRNA sense strand
cagaagaagccuguaucua

SEQ ID NO: 257479 - RNA, 19 nt, Homo sapiens
  misc_RNA (1)...(19): siRNA sense strand
gcuaaaaggagucaccaua

SEQ ID NO: 257480 - RNA, 19 nt, Homo sapiens
  misc_RNA (1)...(19): siRNA sense strand
ggcccuggcugaugauaag

SEQ ID NO: 257481 - RNA, 19 nt, Homo sapiens
  misc_RNA (1)...(19): siRNA sense strand
uuugugauccacuguaaua

SEQ ID NO: 257482 - RNA, 19 nt, Homo sapiens
  misc_RNA (1)...(19): siRNA sense strand
ccaagucuccaucccagaa

SEQ ID NO: 257483 - RNA, 19 nt, Homo sapiens
  misc_RNA (1)...(19): siRNA sense strand
acaguccucuccaccaaga

SEQ ID NO: 257484 - RNA, 19 nt, Homo sapiens
  misc_RNA (1)...(19): siRNA sense strand
gcagcgagagacaacaaga

SEQ ID NO: 257485 - RNA, 19 nt, Homo sapiens
  misc_RNA (1)...(19): siRNA sense strand
ugaaucagcugcuaaaagg

SEQ ID NO: 257486 - RNA, 19 nt, Homo sapiens
  misc_RNA (1)...(19): siRNA sense strand
gcgagaguauaggcaucua

SEQ ID NO: 257487 - RNA, 19 nt, Homo sapiens
  misc_RNA (1)...(19): siRNA sense strand
aagcugaaauccauugcau

SEQ ID NO: 257488 - RNA, 19 nt, Homo sapiens
  misc_RNA (1)...(19): siRNA sense strand
uaggaaacacgcuggagaa

SEQ ID NO: 257489 - RNA, 19 nt, Homo sapiens
  misc_RNA (1)...(19): siRNA sense strand
ggccaucuccaguuacuuc

SEQ ID NO: 257490 - RNA, 19 nt, Homo sapiens
  misc_RNA (1)...(19): siRNA sense strand
gcaaugcagcgagagacaa

SEQ ID NO: 257491 - RNA, 19 nt, Homo sapiens
  misc_RNA (1)...(19): siRNA sense strand
guuggaagccaucaucaca

SEQ ID NO: 257492 - RNA, 19 nt, Homo sapiens
  misc_RNA (1)...(19): siRNA sense strand
caagcuggacgccaacuag

SEQ ID NO: 257493 - RNA, 19 nt, Homo sapiens
  misc_RNA (1)...(19): siRNA sense strand
cagcgagagacaacaagaa

SEQ ID NO: 257494 - RNA, 19 nt, Homo sapiens
  misc_RNA (1)...(19): siRNA sense strand
ccaaugaugaagagcugaa

SEQ ID NO: 257495 - RNA, 19 nt, Homo sapiens
  misc_RNA (1)...(19): siRNA sense strand
agaaagguggcaaggaguu

SEQ ID NO: 257496 - RNA, 19 nt, Homo sapiens
  misc_RNA (1)...(19): siRNA sense strand
gcagcggcaggaacgguuu

SEQ ID NO: 257497 - RNA, 19 nt, Homo sapiens
  misc_RNA (1)...(19): siRNA sense strand
aguuugugauccacuguaa

SEQ ID NO: 257498 - RNA, 19 nt, Homo sapiens
  misc_RNA (1)...(19): siRNA sense strand
gaaaguuggaagccaucau

SEQ ID NO: 257499 - RNA, 19 nt, Homo sapiens
  misc_RNA (1)...(19): siRNA sense strand
ccagaagaagccuguaucu

SEQ ID NO: 257500 - RNA, 19 nt, Homo sapiens
  misc_RNA (1)...(19): siRNA sense strand
gggauccaaaggaaaguug

SEQ ID NO: 257501 - RNA, 19 nt, Homo sapiens
  misc_RNA (1)...(19): siRNA sense strand
uggcaaggaguuuguggaa

SEQ ID NO: 257502 - RNA, 19 nt, Homo sapiens
  misc_RNA (1)...(19): siRNA sense strand
ugccaaagcaggagucauc

SEQ ID NO: 257503 - RNA, 19 nt, Homo sapiens
  misc_RNA (1)...(19): siRNA sense strand
gaagcugaaauccauugca

SEQ ID NO: 257504 - RNA, 19 nt, Homo sapiens
  misc_RNA (1)...(19): siRNA sense strand
gaagaagcggggauccaaa

SEQ ID NO: 257505 - RNA, 19 nt, Homo sapiens
  misc_RNA (1)...(19): siRNA sense strand
aggcaucuaugugcaggaa

SEQ ID NO: 257506 - RNA, 19 nt, Homo sapiens
  misc_RNA (1)...(19): siRNA sense strand
uaagaagcugaaauccauu

SEQ ID NO: 257507 - RNA, 19 nt, Homo sapiens
  misc_RNA (1)...(19): siRNA sense strand
aaaguuggaagccaucauc

SEQ ID NO: 257508 - RNA, 19 nt, Homo sapiens
  misc_RNA (1)...(19): siRNA sense strand
ccgaggagcugaucucuaa

SEQ ID NO: 257509 - RNA, 19 nt, Homo sapiens
  misc_RNA (1)...(19): siRNA sense strand
ucucuaagcuggcuaauga

SEQ ID NO: 257510 - RNA, 19 nt, Homo sapiens
  misc_RNA (1)...(19): siRNA sense strand
gcagcccucuguccgauua

SEQ ID NO: 257511 - RNA, 19 nt, Homo sapiens
  misc_RNA (1)...(19): siRNA sense strand
ggacaugucuccauaaucc

SEQ ID NO: 257512 - RNA, 19 nt, Homo sapiens
  misc_RNA (1)...(19): siRNA sense strand
gcacacagccucccucuuc

SEQ ID NO: 257513 - RNA, 19 nt, Homo sapiens
  misc_RNA (1)...(19): siRNA sense strand
ccagggacaugucuccaua

SEQ ID NO: 257514 - RNA, 19 nt, Homo sapiens
  misc_RNA (1)...(19): siRNA sense strand
ccacagaacucgggaccuu

SEQ ID NO: 257515 - RNA, 19 nt, Homo sapiens
  misc_RNA (1)...(19): siRNA sense strand
gggcuacgcucggaucuug

SEQ ID NO: 257516 - RNA, 19 nt, Homo sapiens
  misc_RNA (1)...(19): siRNA sense strand
gaagacggccgaggacuau

SEQ ID NO: 257517 - RNA, 19 nt, Homo sapiens
  misc_RNA (1)...(19): siRNA sense strand
gcacaagcuucaggucuuc

SEQ ID NO: 257518 - RNA, 19 nt, Homo sapiens
  misc_RNA (1)...(19): siRNA sense strand
uggagagccuggcccauaa

SEQ ID NO: 257519 - RNA, 19 nt, Homo sapiens
  misc_RNA (1)...(19): siRNA sense strand
gccaugagcccaagaagug

SEQ ID NO: 257520 - RNA, 19 nt, Homo sapiens
  misc_RNA (1)...(19): siRNA sense strand
ggcacaagcuucaggucuu

SEQ ID NO: 257521 - RNA, 19 nt, Homo sapiens
  misc_RNA (1)...(19): siRNA sense strand
ggcaggaucuucuacuucu

SEQ ID NO: 257522 - RNA, 19 nt, Homo sapiens
  misc_RNA (1)...(19): siRNA sense strand
uaagcuggcuaaugacauc

SEQ ID NO: 257523 - RNA, 19 nt, Homo sapiens
  misc_RNA (1)...(19): siRNA sense strand
ggaccuggcuaagaaguac

SEQ ID NO: 257524 - RNA, 19 nt, Homo sapiens
  misc_RNA (1)...(19): siRNA sense strand
ccucuuaucccauaucuuc

SEQ ID NO: 257525 - RNA, 19 nt, Homo sapiens
  misc_RNA (1)...(19): siRNA sense strand
uguaccggguggaccauua

SEQ ID NO: 257526 - RNA, 19 nt, Homo sapiens
  misc_RNA (1)...(19): siRNA sense strand
ccggguggaccauuacuua

SEQ ID NO: 257527 - RNA, 19 nt, Homo sapiens
  misc_RNA (1)...(19): siRNA sense strand
ugaagacggccgaggacua

SEQ ID NO: 257528 - RNA, 19 nt, Homo sapiens
  misc_RNA (1)...(19): siRNA sense strand
gcccgcaacaucaacagua

SEQ ID NO: 257529 - RNA, 19 nt, Homo sapiens
  misc_RNA (1)...(19): siRNA sense strand
ggggaggggucacaguuuu

SEQ ID NO: 257530 - RNA, 19 nt, Homo sapiens
  misc_RNA (1)...(19): siRNA sense strand
ugagaauggccgucuguug

SEQ ID NO: 257531 - RNA, 19 nt, Homo sapiens
  misc_RNA (1)...(19): siRNA sense strand
cuucgcagguguccuagug

SEQ ID NO: 257532 - RNA, 19 nt, Homo sapiens
  misc_RNA (1)...(19): siRNA sense strand
gugagcaggugcgcagaga

SEQ ID NO: 257533 - RNA, 19 nt, Homo sapiens
  misc_RNA (1)...(19): siRNA sense strand
ucucagacccggaguccaa

SEQ ID NO: 257534 - RNA, 19 nt, Homo sapiens
  misc_RNA (1)...(19): siRNA sense strand
gaaagagaccguggaugcu

SEQ ID NO: 257535 - RNA, 19 nt, Homo sapiens
  misc_RNA (1)...(19): siRNA sense strand
cccaagaaguggcccaucu

SEQ ID NO: 257536 - RNA, 19 nt, Homo sapiens
  misc_RNA (1)...(19): siRNA sense strand
ugaggaguacggugucauu

SEQ ID NO: 257537 - RNA, 19 nt, Homo sapiens
  misc_RNA (1)...(19): siRNA sense strand
ugugguacauggacuacga

SEQ ID NO: 257538 - RNA, 19 nt, Homo sapiens
  misc_RNA (1)...(19): siRNA sense strand
agaaacccuuuggccauga

SEQ ID NO: 257539 - RNA, 19 nt, Homo sapiens
  misc_RNA (1)...(19): siRNA sense strand
cuggagagccuggcccaua

SEQ ID NO: 257540 - RNA, 19 nt, Homo sapiens
  misc_RNA (1)...(19): siRNA sense strand
gggagggcgugccuuucau

SEQ ID NO: 257541 - RNA, 19 nt, Homo sapiens
  misc_RNA (1)...(19): siRNA sense strand
cgcccacuccguccucuua

SEQ ID NO: 257542 - RNA, 19 nt, Homo sapiens
  misc_RNA (1)...(19): siRNA sense strand
gggaccuggcuaagaagua

SEQ ID NO: 257543 - RNA, 19 nt, Homo sapiens
  misc_RNA (1)...(19): siRNA sense strand
uccguccucuuaucccaua

SEQ ID NO: 257544 - RNA, 19 nt, Homo sapiens
  misc_RNA (1)...(19): siRNA sense strand
uccauggccggaagaauuu

SEQ ID NO: 257545 - RNA, 19 nt, Homo sapiens
  misc_RNA (1)...(19): siRNA sense strand
agggacaugucuccauaau

SEQ ID NO: 257546 - RNA, 19 nt, Homo sapiens
  misc_RNA (1)...(19): siRNA sense strand
ggccgucuguuggacuuug

SEQ ID NO: 257547 - RNA, 19 nt, Homo sapiens
  misc_RNA (1)...(19): siRNA sense strand
gcuacgcucggaucuuguu

SEQ ID NO: 257548 - RNA, 19 nt, Homo sapiens
  misc_RNA (1)...(19): siRNA sense strand
ccauggagcugccccacaa

SEQ ID NO: 257549 - RNA, 19 nt, Homo sapiens
  misc_RNA (1)...(19): siRNA sense strand
gaaacccuuuggccaugac

SEQ ID NO: 257550 - RNA, 19 nt, Homo sapiens
  misc_RNA (1)...(19): siRNA sense strand
cagcuucuaugaggaguac

SEQ ID NO: 257551 - RNA, 19 nt, Homo sapiens
  misc_RNA (1)...(19): siRNA sense strand
gcaggaucuucuacuucuc

SEQ ID NO: 257552 - RNA, 19 nt, Homo sapiens
  misc_RNA (1)...(19): siRNA sense strand
gcagcucgucuuccacauc

SEQ ID NO: 257553 - RNA, 19 nt, Homo sapiens
  misc_RNA (1)...(19): siRNA sense strand
gcagcuggccacagaacuc

SEQ ID NO: 257554 - RNA, 19 nt, Homo sapiens
  misc_RNA (1)...(19): siRNA sense strand
caggaucuucuacuucuca

SEQ ID NO: 257555 - RNA, 19 nt, Homo sapiens
  misc_RNA (1)...(19): siRNA sense strand
uagccugccucucaucaac

SEQ ID NO: 257556 - RNA, 19 nt, Homo sapiens
  misc_RNA (1)...(19): siRNA sense strand
caucaccacagagaacuug

SEQ ID NO: 257557 - RNA, 19 nt, Homo sapiens
  misc_RNA (1)...(19): siRNA sense strand
ggagggcgugccuuucauc

SEQ ID NO: 257558 - RNA, 19 nt, Homo sapiens
  misc_RNA (1)...(19): siRNA sense strand
caaagaaggucaucauuua

SEQ ID NO: 257559 - RNA, 19 nt, Homo sapiens
  misc_RNA (1)...(19): siRNA sense strand
caacagacuuuacagagua

SEQ ID NO: 257560 - RNA, 19 nt, Homo sapiens
  misc_RNA (1)...(19): siRNA sense strand
gcuggaaagugauucauua

SEQ ID NO: 257561 - RNA, 19 nt, Homo sapiens
  misc_RNA (1)...(19): siRNA sense strand
gcaaagaaggucaucauuu

SEQ ID NO: 257562 - RNA, 19 nt, Homo sapiens
  misc_RNA (1)...(19): siRNA sense strand
ggacaaaucuacuguucug

SEQ ID NO: 257563 - RNA, 19 nt, Homo sapiens
  misc_RNA (1)...(19): siRNA sense strand
gaguuuacaucuagacaua

SEQ ID NO: 257564 - RNA, 19 nt, Homo sapiens
  misc_RNA (1)...(19): siRNA sense strand
aaaccuacauuccuuagua

SEQ ID NO: 257565 - RNA, 19 nt, Homo sapiens
  misc_RNA (1)...(19): siRNA sense strand
caacuugcaccuauaaaua

SEQ ID NO: 257566 - RNA, 19 nt, Homo sapiens
  misc_RNA (1)...(19): siRNA sense strand
cgacaggacuggaaaccua

SEQ ID NO: 257567 - RNA, 19 nt, Homo sapiens
  misc_RNA (1)...(19): siRNA sense strand
gcacacauaggccaucuua

SEQ ID NO: 257568 - RNA, 19 nt, Homo sapiens
  misc_RNA (1)...(19): siRNA sense strand
gaacaacggacacgcauga

SEQ ID NO: 257569 - RNA, 19 nt, Homo sapiens
  misc_RNA (1)...(19): siRNA sense strand
ggauuuggcuucagacuca

SEQ ID NO: 257570 - RNA, 19 nt, Homo sapiens
  misc_RNA (1)...(19): siRNA sense strand
ggaaaggcaaaucauguua

SEQ ID NO: 257571 - RNA, 19 nt, Homo sapiens
  misc_RNA (1)...(19): siRNA sense strand
gaauggaaguuucuguuuc

SEQ ID NO: 257572 - RNA, 19 nt, Homo sapiens
  misc_RNA (1)...(19): siRNA sense strand
ggaaguuucuguuucuaga

SEQ ID NO: 257573 - RNA, 19 nt, Homo sapiens
  misc_RNA (1)...(19): siRNA sense strand
cuagaaagauggacaaauc

SEQ ID NO: 257574 - RNA, 19 nt, Homo sapiens
  misc_RNA (1)...(19): siRNA sense strand
caaaggagccaucuaccua

SEQ ID NO: 257575 - RNA, 19 nt, Homo sapiens
  misc_RNA (1)...(19): siRNA sense strand
caugacagauggaagcaua

SEQ ID NO: 257576 - RNA, 19 nt, Homo sapiens
  misc_RNA (1)...(19): siRNA sense strand
gauccaugcuuccugguaa

SEQ ID NO: 257577 - RNA, 19 nt, Homo sapiens
  misc_RNA (1)...(19): siRNA sense strand
gacgagaacuuggcauuga

SEQ ID NO: 257578 - RNA, 19 nt, Homo sapiens
  misc_RNA (1)...(19): siRNA sense strand
gcaacaagaagaacuaaga

SEQ ID NO: 257579 - RNA, 19 nt, Homo sapiens
  misc_RNA (1)...(19): siRNA sense strand
aaaaugagcucgauuguug

SEQ ID NO: 257580 - RNA, 19 nt, Homo sapiens
  misc_RNA (1)...(19): siRNA sense strand
ggccagaguuuauuguuug

SEQ ID NO: 257581 - RNA, 19 nt, Homo sapiens
  misc_RNA (1)...(19): siRNA sense strand
gaaagacgacgagaacuug

SEQ ID NO: 257582 - RNA, 19 nt, Homo sapiens
  misc_RNA (1)...(19): siRNA sense strand
aaacaucucuacccaguca

SEQ ID NO: 257583 - RNA, 19 nt, Homo sapiens
  misc_RNA (1)...(19): siRNA sense strand
ccagugaugucucaagcua

SEQ ID NO: 257584 - RNA, 19 nt, Homo sapiens
  misc_RNA (1)...(19): siRNA sense strand
gagaagauggugcaaagaa

SEQ ID NO: 257585 - RNA, 19 nt, Homo sapiens
  misc_RNA (1)...(19): siRNA sense strand
ugacagagaugacaguagu

SEQ ID NO: 257586 - RNA, 19 nt, Homo sapiens
  misc_RNA (1)...(19): siRNA sense strand
uauuauagguuccugacua

SEQ ID NO: 257587 - RNA, 19 nt, Homo sapiens
  misc_RNA (1)...(19): siRNA sense strand
ggacaggcagauaagauuu

SEQ ID NO: 257588 - RNA, 19 nt, Homo sapiens
  misc_RNA (1)...(19): siRNA sense strand
gaaacguagagaucaauuu

SEQ ID NO: 257589 - RNA, 19 nt, Homo sapiens
  misc_RNA (1)...(19): siRNA sense strand
agaaggucaucauuuagua

SEQ ID NO: 257590 - RNA, 19 nt, Homo sapiens
  misc_RNA (1)...(19): siRNA sense strand
ggacaaagcgaaaagagua

SEQ ID NO: 257591 - RNA, 19 nt, Homo sapiens
  misc_RNA (1)...(19): siRNA sense strand
gccaaguuguuccuacuaa

SEQ ID NO: 257592 - RNA, 19 nt, Homo sapiens
  misc_RNA (1)...(19): siRNA sense strand
gucucaagcuacaaauuua

SEQ ID NO: 257593 - RNA, 19 nt, Homo sapiens
  misc_RNA (1)...(19): siRNA sense strand
gaaaggcaaaucauguuau

SEQ ID NO: 257594 - RNA, 19 nt, Homo sapiens
  misc_RNA (1)...(19): siRNA sense strand
gaagauagaguuuguuuug

SEQ ID NO: 257595 - RNA, 19 nt, Homo sapiens
  misc_RNA (1)...(19): siRNA sense strand
ggaaagugauucauuaacc

SEQ ID NO: 257596 - RNA, 19 nt, Homo sapiens
  misc_RNA (1)...(19): siRNA sense strand
gaacauuuaccaucugauc

SEQ ID NO: 257597 - RNA, 19 nt, Homo sapiens
  misc_RNA (1)...(19): siRNA sense strand
gaggaacaauagacccaaa

SEQ ID NO: 257598 - RNA, 19 nt, Homo sapiens
  misc_RNA (1)...(19): siRNA sense strand
ggagccaucuaccuaugaa

SEQ ID NO: 257599 - RNA, 19 nt, Homo sapiens
  misc_RNA (1)...(19): siRNA sense strand
agagaugacaguaguauuu

SEQ ID NO: 257600 - RNA, 19 nt, Homo sapiens
  misc_RNA (1)...(19): siRNA sense strand
ucacagggcaccacccaua

SEQ ID NO: 257601 - RNA, 19 nt, Homo sapiens
  misc_RNA (1)...(19): siRNA sense strand
aaagaaacguagagaucaa

SEQ ID NO: 257602 - RNA, 19 nt, Homo sapiens
  misc_RNA (1)...(19): siRNA sense strand
gcagucaugguaccuagua

SEQ ID NO: 257603 - RNA, 19 nt, Homo sapiens
  misc_RNA (1)...(19): siRNA sense strand
caugagcacuuaaugcaau

SEQ ID NO: 257604 - RNA, 19 nt, Homo sapiens
  misc_RNA (1)...(19): siRNA sense strand
ggaaaugugcacuguugaa

SEQ ID NO: 257605 - RNA, 19 nt, Homo sapiens
  misc_RNA (1)...(19): siRNA sense strand
aaggaaaugugcacuguug

SEQ ID NO: 257606 - RNA, 19 nt, Homo sapiens
  misc_RNA (1)...(19): siRNA sense strand
guauaacacuauggugauu

SEQ ID NO: 257607 - RNA, 19 nt, Homo sapiens
  misc_RNA (1)...(19): siRNA sense strand
gaacaauagacccaaagga

SEQ ID NO: 257608 - RNA, 19 nt, Homo sapiens
  misc_RNA (1)...(19): siRNA sense strand
caacaacagacuuuacaga

SEQ ID NO: 257609 - RNA, 19 nt, Homo sapiens
  misc_RNA (1)...(19): siRNA sense strand
gcacaacucagcacaugau

SEQ ID NO: 257610 - RNA, 19 nt, Homo sapiens
  misc_RNA (1)...(19): siRNA sense strand
caacaagaagaacuaagaa

SEQ ID NO: 257611 - RNA, 19 nt, Homo sapiens
  misc_RNA (1)...(19): siRNA sense strand
uguaguaaguuaugcagaa

SEQ ID NO: 257612 - RNA, 19 nt, Homo sapiens
  misc_RNA (1)...(19): siRNA sense strand
ggcuucagacucauuauua

SEQ ID NO: 257613 - RNA, 19 nt, Homo sapiens
  misc_RNA (1)...(19): siRNA sense strand
agacauaguuuagaaugga

SEQ ID NO: 257614 - RNA, 19 nt, Homo sapiens
  misc_RNA (1)...(19): siRNA sense strand
caacucagcacaugauaca

SEQ ID NO: 257615 - RNA, 19 nt, Homo sapiens
  misc_RNA (1)...(19): siRNA sense strand
gaacuuggcauugaagagu

SEQ ID NO: 257616 - RNA, 19 nt, Homo sapiens
  misc_RNA (1)...(19): siRNA sense strand
gaauucaaggccagaguuu

SEQ ID NO: 257617 - RNA, 19 nt, Homo sapiens
  misc_RNA (1)...(19): siRNA sense strand
gaacauucagagguuuaua

SEQ ID NO: 257618 - RNA, 19 nt, Homo sapiens
  misc_RNA (1)...(19): siRNA sense strand
caacggacacgcaugauag

SEQ ID NO: 257619 - RNA, 19 nt, Homo sapiens
  misc_RNA (1)...(19): siRNA sense strand
aaugugcacuguugaagaa

SEQ ID NO: 257620 - RNA, 19 nt, Homo sapiens
  misc_RNA (1)...(19): siRNA sense strand
agaauucuguugucacaug

SEQ ID NO: 257621 - RNA, 19 nt, Homo sapiens
  misc_RNA (1)...(19): siRNA sense strand
gucagaugcuagugaaauu

SEQ ID NO: 257622 - RNA, 19 nt, Homo sapiens
  misc_RNA (1)...(19): siRNA sense strand
ccagagugcugcaguaacu

SEQ ID NO: 257623 - RNA, 19 nt, Homo sapiens
  misc_RNA (1)...(19): siRNA sense strand
guucaacuuucuucuggaa

SEQ ID NO: 257624 - RNA, 19 nt, Homo sapiens
  misc_RNA (1)...(19): siRNA sense strand
gaaaagaaacguagagauc

SEQ ID NO: 257625 - RNA, 19 nt, Homo sapiens
  misc_RNA (1)...(19): siRNA sense strand
gcuucagacucauuauuau

SEQ ID NO: 257626 - RNA, 19 nt, Homo sapiens
  misc_RNA (1)...(19): siRNA sense strand
cuacucaucugcuggaaag

SEQ ID NO: 257627 - RNA, 19 nt, Homo sapiens
  misc_RNA (1)...(19): siRNA sense strand
caaggcaugucccaguuuc

SEQ ID NO: 257628 - RNA, 19 nt, Homo sapiens
  misc_RNA (1)...(19): siRNA sense strand
aguagucaguccauaaauu

SEQ ID NO: 257629 - RNA, 19 nt, Homo sapiens
  misc_RNA (1)...(19): siRNA sense strand
ucaaggaaaugugcacugu

SEQ ID NO: 257630 - RNA, 19 nt, Homo sapiens
  misc_RNA (1)...(19): siRNA sense strand
cauucucucugcugcauuu

SEQ ID NO: 257631 - RNA, 19 nt, Homo sapiens
  misc_RNA (1)...(19): siRNA sense strand
gccagguggugacugcaua

SEQ ID NO: 257632 - RNA, 19 nt, Homo sapiens
  misc_RNA (1)...(19): siRNA sense strand
acacuauggugauuucuca

SEQ ID NO: 257633 - RNA, 19 nt, Homo sapiens
  misc_RNA (1)...(19): siRNA sense strand
gauacaacaacagacuuua

SEQ ID NO: 257634 - RNA, 19 nt, Homo sapiens
  misc_RNA (1)...(19): siRNA sense strand
ucuguugguucaucauuaa

SEQ ID NO: 257635 - RNA, 19 nt, Homo sapiens
  misc_RNA (1)...(19): siRNA sense strand
guagucaguccauaaauuc

SEQ ID NO: 257636 - RNA, 19 nt, Homo sapiens
  misc_RNA (1)...(19): siRNA sense strand
ggaagcauuggaaagguuu

SEQ ID NO: 257637 - RNA, 19 nt, Homo sapiens
  misc_RNA (1)...(19): siRNA sense strand
gggaaaggcaaaucauguu

SEQ ID NO: 257638 - RNA, 19 nt, Homo sapiens
  misc_RNA (1)...(19): siRNA sense strand
uaggguauuugccauuuga

SEQ ID NO: 257639 - RNA, 19 nt, Homo sapiens
  misc_RNA (1)...(19): siRNA sense strand
cagauggaagcauaauaua

SEQ ID NO: 257640 - RNA, 19 nt, Homo sapiens
  misc_RNA (1)...(19): siRNA sense strand
caacagcaacagucacaga

SEQ ID NO: 257641 - RNA, 19 nt, Homo sapiens
  misc_RNA (1)...(19): siRNA sense strand
caaaguggaaugaauacug

SEQ ID NO: 257642 - RNA, 19 nt, Homo sapiens
  misc_RNA (1)...(19): siRNA sense strand
ggucagauaaucguauaaa

SEQ ID NO: 257643 - RNA, 19 nt, Homo sapiens
  misc_RNA (1)...(19): siRNA sense strand
ggaauucaaggccagaguu

SEQ ID NO: 257644 - RNA, 19 nt, Homo sapiens
  misc_RNA (1)...(19): siRNA sense strand
ggacuggaaaccuacauuc

SEQ ID NO: 257645 - RNA, 19 nt, Homo sapiens
  misc_RNA (1)...(19): siRNA sense strand
gaaagaccaauuggaacaa

SEQ ID NO: 257646 - RNA, 19 nt, Homo sapiens
  misc_RNA (1)...(19): siRNA sense strand
ggucaucauuuaguaguca

SEQ ID NO: 257647 - RNA, 19 nt, Homo sapiens
  misc_RNA (1)...(19): siRNA sense strand
uaaacaguguauccucuuc

SEQ ID NO: 257648 - RNA, 19 nt, Homo sapiens
  misc_RNA (1)...(19): siRNA sense strand
gagcucgauuguugacaga

SEQ ID NO: 257649 - RNA, 19 nt, Homo sapiens
  misc_RNA (1)...(19): siRNA sense strand
gggaacauucagagguuua

SEQ ID NO: 257650 - RNA, 19 nt, Homo sapiens
  misc_RNA (1)...(19): siRNA sense strand
gcucgauuguugacagaga

SEQ ID NO: 257651 - RNA, 19 nt, Homo sapiens
  misc_RNA (1)...(19): siRNA sense strand
uaacacagccagugauguc

SEQ ID NO: 257652 - RNA, 19 nt, Homo sapiens
  misc_RNA (1)...(19): siRNA sense strand
gacauaguuuagaauggaa

SEQ ID NO: 257653 - RNA, 19 nt, Homo sapiens
  misc_RNA (1)...(19): siRNA sense strand
agaacccaaugaagaguuu

SEQ ID NO: 257654 - RNA, 19 nt, Homo sapiens
  misc_RNA (1)...(19): siRNA sense strand
uuaaagaacugggauccau

SEQ ID NO: 257655 - RNA, 19 nt, Homo sapiens
  misc_RNA (1)...(19): siRNA sense strand
acagauggaagcauaauau

SEQ ID NO: 257656 - RNA, 19 nt, Homo sapiens
  misc_RNA (1)...(19): siRNA sense strand
ucccucaacucaacucauu

SEQ ID NO: 257657 - RNA, 19 nt, Homo sapiens
  misc_RNA (1)...(19): siRNA sense strand
cagagcaccuucccucagu

SEQ ID NO: 257658 - RNA, 19 nt, Homo sapiens
  misc_RNA (1)...(19): siRNA sense strand
aaacagagcugcagcaaug

SEQ ID NO: 257659 - RNA, 19 nt, Homo sapiens
  misc_RNA (1)...(19): siRNA sense strand
gaaagaaagcgaaguagaa

SEQ ID NO: 257660 - RNA, 19 nt, Homo sapiens
  misc_RNA (1)...(19): siRNA sense strand
gaaaguauccagcugauga

SEQ ID NO: 257661 - RNA, 19 nt, Homo sapiens
  misc_RNA (1)...(19): siRNA sense strand
ggaaaggacuggaauugau

SEQ ID NO: 257662 - RNA, 19 nt, Homo sapiens
  misc_RNA (1)...(19): siRNA sense strand
caagggauauggauuuauu

SEQ ID NO: 257663 - RNA, 19 nt, Homo sapiens
  misc_RNA (1)...(19): siRNA sense strand
gauaacagcagcauaugua

SEQ ID NO: 257664 - RNA, 19 nt, Homo sapiens
  misc_RNA (1)...(19): siRNA sense strand
gagagaaccuauugauaau

SEQ ID NO: 257665 - RNA, 19 nt, Homo sapiens
  misc_RNA (1)...(19): siRNA sense strand
gauuaaggaugaugugauu

SEQ ID NO: 257666 - RNA, 19 nt, Homo sapiens
  misc_RNA (1)...(19): siRNA sense strand
ugagagaaccuauugauaa

SEQ ID NO: 257667 - RNA, 19 nt, Homo sapiens
  misc_RNA (1)...(19): siRNA sense strand
ggaacaacuuaauggauuu

SEQ ID NO: 257668 - RNA, 19 nt, Homo sapiens
  misc_RNA (1)...(19): siRNA sense strand
ccaaaggaauugcuuaugu

SEQ ID NO: 257669 - RNA, 19 nt, Homo sapiens
  misc_RNA (1)...(19): siRNA sense strand
ccucauagcaucaaauuaa

SEQ ID NO: 257670 - RNA, 19 nt, Homo sapiens
  misc_RNA (1)...(19): siRNA sense strand
gcaggugguuugcugguaa

SEQ ID NO: 257671 - RNA, 19 nt, Homo sapiens
  misc_RNA (1)...(19): siRNA sense strand
ccaacucucuaacauguuu

SEQ ID NO: 257672 - RNA, 19 nt, Homo sapiens
  misc_RNA (1)...(19): siRNA sense strand
gaaaggacuggaauugauu

SEQ ID NO: 257673 - RNA, 19 nt, Homo sapiens
  misc_RNA (1)...(19): siRNA sense strand
caaaggaauugcuuaugug

SEQ ID NO: 257674 - RNA, 19 nt, Homo sapiens
  misc_RNA (1)...(19): siRNA sense strand
gaagcgaaguagagacaga

SEQ ID NO: 257675 - RNA, 19 nt, Homo sapiens
  misc_RNA (1)...(19): siRNA sense strand
gaaaguuggucauguuacu

SEQ ID NO: 257676 - RNA, 19 nt, Homo sapiens
  misc_RNA (1)...(19): siRNA sense strand
aagauuggguugccucaua

SEQ ID NO: 257677 - RNA, 19 nt, Homo sapiens
  misc_RNA (1)...(19): siRNA sense strand
caagggauuuggaagaguu

SEQ ID NO: 257678 - RNA, 19 nt, Homo sapiens
  misc_RNA (1)...(19): siRNA sense strand
gaugggauaccgagauuaa

SEQ ID NO: 257679 - RNA, 19 nt, Homo sapiens
  misc_RNA (1)...(19): siRNA sense strand
caagagcccugugagagaa

SEQ ID NO: 257680 - RNA, 19 nt, Homo sapiens
  misc_RNA (1)...(19): siRNA sense strand
uggaacaacuuaauggauu

SEQ ID NO: 257681 - RNA, 19 nt, Homo sapiens
  misc_RNA (1)...(19): siRNA sense strand
gacagaaauucaagacguu

SEQ ID NO: 257682 - RNA, 19 nt, Homo sapiens
  misc_RNA (1)...(19): siRNA sense strand
gaacggaagcgaaguagag

SEQ ID NO: 257683 - RNA, 19 nt, Homo sapiens
  misc_RNA (1)...(19): siRNA sense strand
gaagaaguuggaugggaua

SEQ ID NO: 257684 - RNA, 19 nt, Homo sapiens
  misc_RNA (1)...(19): siRNA sense strand
gggaagugcuggaccuaug

SEQ ID NO: 257685 - RNA, 19 nt, Homo sapiens
  misc_RNA (1)...(19): siRNA sense strand
gagcagaagucguagucau

SEQ ID NO: 257686 - RNA, 19 nt, Homo sapiens
  misc_RNA (1)...(19): siRNA sense strand
auaccgagauuaaggauga

SEQ ID NO: 257687 - RNA, 19 nt, Homo sapiens
  misc_RNA (1)...(19): siRNA sense strand
acagcaagcucuacagaug

SEQ ID NO: 257688 - RNA, 19 nt, Homo sapiens
  misc_RNA (1)...(19): siRNA sense strand
gggaacaacuggucgucuu

SEQ ID NO: 257689 - RNA, 19 nt, Homo sapiens
  misc_RNA (1)...(19): siRNA sense strand
ggaauugauuugggaacaa

SEQ ID NO: 257690 - RNA, 19 nt, Homo sapiens
  misc_RNA (1)...(19): siRNA sense strand
gcaggaagaccaaugaaag

SEQ ID NO: 257691 - RNA, 19 nt, Homo sapiens
  misc_RNA (1)...(19): siRNA sense strand
caacuuaccacaaccuguu

SEQ ID NO: 257692 - RNA, 19 nt, Homo sapiens
  misc_RNA (1)...(19): siRNA sense strand
ucaaacagaagaagaaguu

SEQ ID NO: 257693 - RNA, 19 nt, Homo sapiens
  misc_RNA (1)...(19): siRNA sense strand
gaguggcucuuuggcauuu

SEQ ID NO: 257694 - RNA, 19 nt, Homo sapiens
  misc_RNA (1)...(19): siRNA sense strand
ggaagaccaaugaaaguug

SEQ ID NO: 257695 - RNA, 19 nt, Homo sapiens
  misc_RNA (1)...(19): siRNA sense strand
gaacuggaaaggacuggaa

SEQ ID NO: 257696 - RNA, 19 nt, Homo sapiens
  misc_RNA (1)...(19): siRNA sense strand
gugaagugcccaucaauug

SEQ ID NO: 257697 - RNA, 19 nt, Homo sapiens
  misc_RNA (1)...(19): siRNA sense strand
cgaaguagaagcaaagaga

SEQ ID NO: 257698 - RNA, 19 nt, Homo sapiens
  misc_RNA (1)...(19): siRNA sense strand
gcacagcaagcucuacaga

SEQ ID NO: 257699 - RNA, 19 nt, Homo sapiens
  misc_RNA (1)...(19): siRNA sense strand
gcagaagucguagucauga

SEQ ID NO: 257700 - RNA, 19 nt, Homo sapiens
  misc_RNA (1)...(19): siRNA sense strand
cgaaagagaagcaaaagua

SEQ ID NO: 257701 - RNA, 19 nt, Homo sapiens
  misc_RNA (1)...(19): siRNA sense strand
cagcaauggcaaacaauuu

SEQ ID NO: 257702 - RNA, 19 nt, Homo sapiens
  misc_RNA (1)...(19): siRNA sense strand
gugagagaaccuauugaua

SEQ ID NO: 257703 - RNA, 19 nt, Homo sapiens
  misc_RNA (1)...(19): siRNA sense strand
gaacuagcaggaagaccaa

SEQ ID NO: 257704 - RNA, 19 nt, Homo sapiens
  misc_RNA (1)...(19): siRNA sense strand
ggaagugcuggaccuauga

SEQ ID NO: 257705 - RNA, 19 nt, Homo sapiens
  misc_RNA (1)...(19): siRNA sense strand
gcagcuggcggcaagaauu

SEQ ID NO: 257706 - RNA, 19 nt, Homo sapiens
  misc_RNA (1)...(19): siRNA sense strand
ggaaagguucgagauguga

SEQ ID NO: 257707 - RNA, 19 nt, Homo sapiens
  misc_RNA (1)...(19): siRNA sense strand
gaaagagaagcaaaaguaa

SEQ ID NO: 257708 - RNA, 19 nt, Homo sapiens
  misc_RNA (1)...(19): siRNA sense strand
gcagcaauggcaaacaauu

SEQ ID NO: 257709 - RNA, 19 nt, Homo sapiens
  misc_RNA (1)...(19): siRNA sense strand
cucagugccucuagcaaua

SEQ ID NO: 257710 - RNA, 19 nt, Homo sapiens
  misc_RNA (1)...(19): siRNA sense strand
gaacgaaagagaagcaaaa

SEQ ID NO: 257711 - RNA, 19 nt, Homo sapiens
  misc_RNA (1)...(19): siRNA sense strand
ggguacagguuugcagauu

SEQ ID NO: 257712 - RNA, 19 nt, Homo sapiens
  misc_RNA (1)...(19): siRNA sense strand
caacggccaugaagaacgu

SEQ ID NO: 257713 - RNA, 19 nt, Homo sapiens
  misc_RNA (1)...(19): siRNA sense strand
cgagaugugaggaugauuu

SEQ ID NO: 257714 - RNA, 19 nt, Homo sapiens
  misc_RNA (1)...(19): siRNA sense strand
uaggaaagguucgagaugu

SEQ ID NO: 257715 - RNA, 19 nt, Homo sapiens
  misc_RNA (1)...(19): siRNA sense strand
gcaaaaguccauucagaaa

SEQ ID NO: 257716 - RNA, 19 nt, Homo sapiens
  misc_RNA (1)...(19): siRNA sense strand
gcaaaagccgugaaagaaa

SEQ ID NO: 257717 - RNA, 19 nt, Homo sapiens
  misc_RNA (1)...(19): siRNA sense strand
cacaaccuguuuccugauu

SEQ ID NO: 257718 - RNA, 19 nt, Homo sapiens
  misc_RNA (1)...(19): siRNA sense strand
acagaugaguggcucuuug

SEQ ID NO: 257719 - RNA, 19 nt, Homo sapiens
  misc_RNA (1)...(19): siRNA sense strand
gguacagguuugcagauuc

SEQ ID NO: 257720 - RNA, 19 nt, Homo sapiens
  misc_RNA (1)...(19): siRNA sense strand
ggaccuaugaggcuuuaug

SEQ ID NO: 257721 - RNA, 19 nt, Homo sapiens
  misc_RNA (1)...(19): siRNA sense strand
aggaugaugugauugaaga

SEQ ID NO: 257722 - RNA, 19 nt, Homo sapiens
  misc_RNA (1)...(19): siRNA sense strand
uaacauguuuaacccucaa

SEQ ID NO: 257723 - RNA, 19 nt, Homo sapiens
  misc_RNA (1)...(19): siRNA sense strand
aaauuaagcagacgacguu

SEQ ID NO: 257724 - RNA, 19 nt, Homo sapiens
  misc_RNA (1)...(19): siRNA sense strand
uaaggaugaugugauugaa

SEQ ID NO: 257725 - RNA, 19 nt, Homo sapiens
  misc_RNA (1)...(19): siRNA sense strand
uaauggauuugaacuagca

SEQ ID NO: 257726 - RNA, 19 nt, Homo sapiens
  misc_RNA (1)...(19): siRNA sense strand
gaacaacuuaauggauuug

SEQ ID NO: 257727 - RNA, 19 nt, Homo sapiens
  misc_RNA (1)...(19): siRNA sense strand
aaagcgaaguagaagcaaa

SEQ ID NO: 257728 - RNA, 19 nt, Homo sapiens
  misc_RNA (1)...(19): siRNA sense strand
ugaaagaaagcgaaguaga

SEQ ID NO: 257729 - RNA, 19 nt, Homo sapiens
  misc_RNA (1)...(19): siRNA sense strand
aggauuaacuggccaacga

SEQ ID NO: 257730 - RNA, 19 nt, Homo sapiens
  misc_RNA (1)...(19): siRNA sense strand
gcaaacaauuuacaaaagg

SEQ ID NO: 257731 - RNA, 19 nt, Homo sapiens
  misc_RNA (1)...(19): siRNA sense strand
gcauauguaccucuuccaa

SEQ ID NO: 257732 - RNA, 19 nt, Homo sapiens
  misc_RNA (1)...(19): siRNA sense strand
cgugaaagaaagcgaagua

SEQ ID NO: 257733 - RNA, 19 nt, Homo sapiens
  misc_RNA (1)...(19): siRNA sense strand
gaacaacuggucgucuuca

SEQ ID NO: 257734 - RNA, 19 nt, Homo sapiens
  misc_RNA (1)...(19): siRNA sense strand
aaugauaacagcagcauau

SEQ ID NO: 257735 - RNA, 19 nt, Homo sapiens
  misc_RNA (1)...(19): siRNA sense strand
gcucagugccucuagcaau

SEQ ID NO: 257736 - RNA, 19 nt, Homo sapiens
  misc_RNA (1)...(19): siRNA sense strand
uaugugaagugcccaucaa

SEQ ID NO: 257737 - RNA, 19 nt, Homo sapiens
  misc_RNA (1)...(19): siRNA sense strand
gauuugcaaacaagacuuu

SEQ ID NO: 257738 - RNA, 19 nt, Homo sapiens
  misc_RNA (1)...(19): siRNA sense strand
gagcaaaagccgugaaaga

SEQ ID NO: 257739 - RNA, 19 nt, Homo sapiens
  misc_RNA (1)...(19): siRNA sense strand
gaauugauuugggaacaac

SEQ ID NO: 257740 - RNA, 19 nt, Homo sapiens
  misc_RNA (1)...(19): siRNA sense strand
agcaauggcaaacaauuua

SEQ ID NO: 257741 - RNA, 19 nt, Homo sapiens
  misc_RNA (1)...(19): siRNA sense strand
agcaagagcagaagucgua

SEQ ID NO: 257742 - RNA, 19 nt, Homo sapiens
  misc_RNA (1)...(19): siRNA sense strand
uuaaggaugaugugauuga

SEQ ID NO: 257743 - RNA, 19 nt, Homo sapiens
  misc_RNA (1)...(19): siRNA sense strand
uggaugggauaccgagauu

SEQ ID NO: 257744 - RNA, 19 nt, Homo sapiens
  misc_RNA (1)...(19): siRNA sense strand
cuuaauggauuugaacuag

SEQ ID NO: 257745 - RNA, 19 nt, Homo sapiens
  misc_RNA (1)...(19): siRNA sense strand
agaauucgaccaagggauu

SEQ ID NO: 257746 - RNA, 19 nt, Homo sapiens
  misc_RNA (1)...(19): siRNA sense strand
gaauucgaccaagggauuu

SEQ ID NO: 257747 - RNA, 19 nt, Homo sapiens
  misc_RNA (1)...(19): siRNA sense strand
caaccuguuuccugauucu

SEQ ID NO: 257748 - RNA, 19 nt, Homo sapiens
  misc_RNA (1)...(19): siRNA sense strand
auguaccucuuccaacuua

SEQ ID NO: 257749 - RNA, 19 nt, Homo sapiens
  misc_RNA (1)...(19): siRNA sense strand
caaaagccgugaaagaaag

SEQ ID NO: 257750 - RNA, 19 nt, Homo sapiens
  misc_RNA (1)...(19): siRNA sense strand
cagaagucguagucaugaa

SEQ ID NO: 257751 - RNA, 19 nt, Homo sapiens
  misc_RNA (1)...(19): siRNA sense strand
uggaagaauugaaaguauc

SEQ ID NO: 257752 - RNA, 19 nt, Homo sapiens
  misc_RNA (1)...(19): siRNA sense strand
uaugugggcucauuacacu

SEQ ID NO: 257753 - RNA, 19 nt, Homo sapiens
  misc_RNA (1)...(19): siRNA sense strand
cugcagcaauggcaaacaa

SEQ ID NO: 257754 - RNA, 19 nt, Homo sapiens
  misc_RNA (1)...(19): siRNA sense strand
guaggaaagguucgagaug

SEQ ID NO: 257755 - RNA, 19 nt, Homo sapiens
  misc_RNA (1)...(19): siRNA sense strand
gagauuaaggaugauguga

SEQ ID NO: 257756 - RNA, 19 nt, Homo sapiens
  misc_RNA (1)...(19): siRNA sense strand
gcaauguguaugugaagug

SEQ ID NO: 257757 - RNA, 19 nt, Homo sapiens
  misc_RNA (1)...(19): siRNA sense strand
ugaugugauugaagaaugu

SEQ ID NO: 257758 - RNA, 19 nt, Homo sapiens
  misc_RNA (1)...(19): siRNA sense strand
aaacagagcugcagcaaug

SEQ ID NO: 257759 - RNA, 19 nt, Homo sapiens
  misc_RNA (1)...(19): siRNA sense strand
gaaagaaagcgaaguagaa

SEQ ID NO: 257760 - RNA, 19 nt, Homo sapiens
  misc_RNA (1)...(19): siRNA sense strand
gaaaguauccagcugauga

SEQ ID NO: 257761 - RNA, 19 nt, Homo sapiens
  misc_RNA (1)...(19): siRNA sense strand
ggaaaggacuggaauugau

SEQ ID NO: 257762 - RNA, 19 nt, Homo sapiens
  misc_RNA (1)...(19): siRNA sense strand
caagggauauggauuuauu

SEQ ID NO: 257763 - RNA, 19 nt, Homo sapiens
  misc_RNA (1)...(19): siRNA sense strand
gauaacagcagcauaugua

SEQ ID NO: 257764 - RNA, 19 nt, Homo sapiens
  misc_RNA (1)...(19): siRNA sense strand
gagagaaccuauugauaau

SEQ ID NO: 257765 - RNA, 19 nt, Homo sapiens
  misc_RNA (1)...(19): siRNA sense strand
gauuaaggaugaugugauu

SEQ ID NO: 257766 - RNA, 19 nt, Homo sapiens
  misc_RNA (1)...(19): siRNA sense strand
ugagagaaccuauugauaa

SEQ ID NO: 257767 - RNA, 19 nt, Homo sapiens
  misc_RNA (1)...(19): siRNA sense strand
ggaacaacuuaauggauuu

SEQ ID NO: 257768 - RNA, 19 nt, Homo sapiens
  misc_RNA (1)...(19): siRNA sense strand
ccaaaggaauugcuuaugu

SEQ ID NO: 257769 - RNA, 19 nt, Homo sapiens
  misc_RNA (1)...(19): siRNA sense strand
ccucauagcaucaaauuaa

SEQ ID NO: 257770 - RNA, 19 nt, Homo sapiens
  misc_RNA (1)...(19): siRNA sense strand
gcaggugguuugcugguaa

SEQ ID NO: 257771 - RNA, 19 nt, Homo sapiens
  misc_RNA (1)...(19): siRNA sense strand
ccaacucucuaacauguuu

SEQ ID NO: 257772 - RNA, 19 nt, Homo sapiens
  misc_RNA (1)...(19): siRNA sense strand
gaaaggacuggaauugauu

SEQ ID NO: 257773 - RNA, 19 nt, Homo sapiens
  misc_RNA (1)...(19): siRNA sense strand
caaaggaauugcuuaugug

SEQ ID NO: 257774 - RNA, 19 nt, Homo sapiens
  misc_RNA (1)...(19): siRNA sense strand
gaagcgaaguagagacaga

SEQ ID NO: 257775 - RNA, 19 nt, Homo sapiens
  misc_RNA (1)...(19): siRNA sense strand
gaaaguuggucauguuacu

SEQ ID NO: 257776 - RNA, 19 nt, Homo sapiens
  misc_RNA (1)...(19): siRNA sense strand
aagauuggguugccucaua

SEQ ID NO: 257777 - RNA, 19 nt, Homo sapiens
  misc_RNA (1)...(19): siRNA sense strand
caagggauuuggaagaguu

SEQ ID NO: 257778 - RNA, 19 nt, Homo sapiens
  misc_RNA (1)...(19): siRNA sense strand
gaugggauaccgagauuaa

SEQ ID NO: 257779 - RNA, 19 nt, Homo sapiens
  misc_RNA (1)...(19): siRNA sense strand
caagagcccugugagagaa

SEQ ID NO: 257780 - RNA, 19 nt, Homo sapiens
  misc_RNA (1)...(19): siRNA sense strand
uggaacaacuuaauggauu

SEQ ID NO: 257781 - RNA, 19 nt, Homo sapiens
  misc_RNA (1)...(19): siRNA sense strand
gacagaaauucaagacguu

SEQ ID NO: 257782 - RNA, 19 nt, Homo sapiens
  misc_RNA (1)...(19): siRNA sense strand
gaacggaagcgaaguagag

SEQ ID NO: 257783 - RNA, 19 nt, Homo sapiens
  misc_RNA (1)...(19): siRNA sense strand
gaagaaguuggaugggaua

SEQ ID NO: 257784 - RNA, 19 nt, Homo sapiens
  misc_RNA (1)...(19): siRNA sense strand
gggaagugcuggaccuaug

SEQ ID NO: 257785 - RNA, 19 nt, Homo sapiens
  misc_RNA (1)...(19): siRNA sense strand
gagcagaagucguagucau

SEQ ID NO: 257786 - RNA, 19 nt, Homo sapiens
  misc_RNA (1)...(19): siRNA sense strand
auaccgagauuaaggauga

SEQ ID NO: 257787 - RNA, 19 nt, Homo sapiens
  misc_RNA (1)...(19): siRNA sense strand
acagcaagcucuacagaug

SEQ ID NO: 257788 - RNA, 19 nt, Homo sapiens
  misc_RNA (1)...(19): siRNA sense strand
gggaacaacuggucgucuu

SEQ ID NO: 257789 - RNA, 19 nt, Homo sapiens
  misc_RNA (1)...(19): siRNA sense strand
ggaauugauuugggaacaa

SEQ ID NO: 257790 - RNA, 19 nt, Homo sapiens
  misc_RNA (1)...(19): siRNA sense strand
gcaggaagaccaaugaaag

SEQ ID NO: 257791 - RNA, 19 nt, Homo sapiens
  misc_RNA (1)...(19): siRNA sense strand
caacuuaccacaaccuguu

SEQ ID NO: 257792 - RNA, 19 nt, Homo sapiens
  misc_RNA (1)...(19): siRNA sense strand
ucaaacagaagaagaaguu

SEQ ID NO: 257793 - RNA, 19 nt, Homo sapiens
  misc_RNA (1)...(19): siRNA sense strand
gaguggcucuuuggcauuu

SEQ ID NO: 257794 - RNA, 19 nt, Homo sapiens
  misc_RNA (1)...(19): siRNA sense strand
ggaagaccaaugaaaguug

SEQ ID NO: 257795 - RNA, 19 nt, Homo sapiens
  misc_RNA (1)...(19): siRNA sense strand
gaacuggaaaggacuggaa

SEQ ID NO: 257796 - RNA, 19 nt, Homo sapiens
  misc_RNA (1)...(19): siRNA sense strand
gugaagugcccaucaauug

SEQ ID NO: 257797 - RNA, 19 nt, Homo sapiens
  misc_RNA (1)...(19): siRNA sense strand
cgaaguagaagcaaagaga

SEQ ID NO: 257798 - RNA, 19 nt, Homo sapiens
  misc_RNA (1)...(19): siRNA sense strand
gcacagcaagcucuacaga

SEQ ID NO: 257799 - RNA, 19 nt, Homo sapiens
  misc_RNA (1)...(19): siRNA sense strand
gcagaagucguagucauga

SEQ ID NO: 257800 - RNA, 19 nt, Homo sapiens
  misc_RNA (1)...(19): siRNA sense strand
cgaaagagaagcaaaagua

SEQ ID NO: 257801 - RNA, 19 nt, Homo sapiens
  misc_RNA (1)...(19): siRNA sense strand
cagcaauggcaaacaauuu

SEQ ID NO: 257802 - RNA, 19 nt, Homo sapiens
  misc_RNA (1)...(19): siRNA sense strand
gugagagaaccuauugaua

SEQ ID NO: 257803 - RNA, 19 nt, Homo sapiens
  misc_RNA (1)...(19): siRNA sense strand
gaacuagcaggaagaccaa

SEQ ID NO: 257804 - RNA, 19 nt, Homo sapiens
  misc_RNA (1)...(19): siRNA sense strand
ggaagugcuggaccuauga

SEQ ID NO: 257805 - RNA, 19 nt, Homo sapiens
  misc_RNA (1)...(19): siRNA sense strand
gcagcuggcggcaagaauu

SEQ ID NO: 257806 - RNA, 19 nt, Homo sapiens
  misc_RNA (1)...(19): siRNA sense strand
ggaaagguucgagauguga

SEQ ID NO: 257807 - RNA, 19 nt, Homo sapiens
  misc_RNA (1)...(19): siRNA sense strand
gaaagagaagcaaaaguaa

SEQ ID NO: 257808 - RNA, 19 nt, Homo sapiens
  misc_RNA (1)...(19): siRNA sense strand
gcagcaauggcaaacaauu

SEQ ID NO: 257809 - RNA, 19 nt, Homo sapiens
  misc_RNA (1)...(19): siRNA sense strand
cucagugccucuagcaaua

SEQ ID NO: 257810 - RNA, 19 nt, Homo sapiens
  misc_RNA (1)...(19): siRNA sense strand
gaacgaaagagaagcaaaa

SEQ ID NO: 257811 - RNA, 19 nt, Homo sapiens
  misc_RNA (1)...(19): siRNA sense strand
ggguacagguuugcagauu

SEQ ID NO: 257812 - RNA, 19 nt, Homo sapiens
  misc_RNA (1)...(19): siRNA sense strand
caacggccaugaagaacgu

SEQ ID NO: 257813 - RNA, 19 nt, Homo sapiens
  misc_RNA (1)...(19): siRNA sense strand
cgagaugugaggaugauuu

SEQ ID NO: 257814 - RNA, 19 nt, Homo sapiens
  misc_RNA (1)...(19): siRNA sense strand
uaggaaagguucgagaugu

SEQ ID NO: 257815 - RNA, 19 nt, Homo sapiens
  misc_RNA (1)...(19): siRNA sense strand
gcaaaaguccauucagaaa

SEQ ID NO: 257816 - RNA, 19 nt, Homo sapiens
  misc_RNA (1)...(19): siRNA sense strand
gcaaaagccgugaaagaaa

SEQ ID NO: 257817 - RNA, 19 nt, Homo sapiens
  misc_RNA (1)...(19): siRNA sense strand
cacaaccuguuuccugauu

SEQ ID NO: 257818 - RNA, 19 nt, Homo sapiens
  misc_RNA (1)...(19): siRNA sense strand
acagaugaguggcucuuug

SEQ ID NO: 257819 - RNA, 19 nt, Homo sapiens
  misc_RNA (1)...(19): siRNA sense strand
gguacagguuugcagauuc

SEQ ID NO: 257820 - RNA, 19 nt, Homo sapiens
  misc_RNA (1)...(19): siRNA sense strand
ggaccuaugaggcuuuaug

SEQ ID NO: 257821 - RNA, 19 nt, Homo sapiens
  misc_RNA (1)...(19): siRNA sense strand
aggaugaugugauugaaga

SEQ ID NO: 257822 - RNA, 19 nt, Homo sapiens
  misc_RNA (1)...(19): siRNA sense strand
uaacauguuuaacccucaa

SEQ ID NO: 257823 - RNA, 19 nt, Homo sapiens
  misc_RNA (1)...(19): siRNA sense strand
aaauuaagcagacgacguu

SEQ ID NO: 257824 - RNA, 19 nt, Homo sapiens
  misc_RNA (1)...(19): siRNA sense strand
uaaggaugaugugauugaa

SEQ ID NO: 257825 - RNA, 19 nt, Homo sapiens
  misc_RNA (1)...(19): siRNA sense strand
uaauggauuugaacuagca

SEQ ID NO: 257826 - RNA, 19 nt, Homo sapiens
  misc_RNA (1)...(19): siRNA sense strand
gaacaacuuaauggauuug

SEQ ID NO: 257827 - RNA, 19 nt, Homo sapiens
  misc_RNA (1)...(19): siRNA sense strand
aaagcgaaguagaagcaaa

SEQ ID NO: 257828 - RNA, 19 nt, Homo sapiens
  misc_RNA (1)...(19): siRNA sense strand
ugaaagaaagcgaaguaga

SEQ ID NO: 257829 - RNA, 19 nt, Homo sapiens
  misc_RNA (1)...(19): siRNA sense strand
aggauuaacuggccaacga

SEQ ID NO: 257830 - RNA, 19 nt, Homo sapiens
  misc_RNA (1)...(19): siRNA sense strand
gcaaacaauuuacaaaagg

SEQ ID NO: 257831 - RNA, 19 nt, Homo sapiens
  misc_RNA (1)...(19): siRNA sense strand
gcauauguaccucuuccaa

SEQ ID NO: 257832 - RNA, 19 nt, Homo sapiens
  misc_RNA (1)...(19): siRNA sense strand
cgugaaagaaagcgaagua

SEQ ID NO: 257833 - RNA, 19 nt, Homo sapiens
  misc_RNA (1)...(19): siRNA sense strand
gaacaacuggucgucuuca

SEQ ID NO: 257834 - RNA, 19 nt, Homo sapiens
  misc_RNA (1)...(19): siRNA sense strand
aaugauaacagcagcauau

SEQ ID NO: 257835 - RNA, 19 nt, Homo sapiens
  misc_RNA (1)...(19): siRNA sense strand
gcucagugccucuagcaau

SEQ ID NO: 257836 - RNA, 19 nt, Homo sapiens
  misc_RNA (1)...(19): siRNA sense strand
uaugugaagugcccaucaa

SEQ ID NO: 257837 - RNA, 19 nt, Homo sapiens
  misc_RNA (1)...(19): siRNA sense strand
gauuugcaaacaagacuuu

SEQ ID NO: 257838 - RNA, 19 nt, Homo sapiens
  misc_RNA (1)...(19): siRNA sense strand
gagcaaaagccgugaaaga

SEQ ID NO: 257839 - RNA, 19 nt, Homo sapiens
  misc_RNA (1)...(19): siRNA sense strand
gaauugauuugggaacaac

SEQ ID NO: 257840 - RNA, 19 nt, Homo sapiens
  misc_RNA (1)...(19): siRNA sense strand
agcaauggcaaacaauuua

SEQ ID NO: 257841 - RNA, 19 nt, Homo sapiens
  misc_RNA (1)...(19): siRNA sense strand
agcaagagcagaagucgua

SEQ ID NO: 257842 - RNA, 19 nt, Homo sapiens
  misc_RNA (1)...(19): siRNA sense strand
uuaaggaugaugugauuga

SEQ ID NO: 257843 - RNA, 19 nt, Homo sapiens
  misc_RNA (1)...(19): siRNA sense strand
uggaugggauaccgagauu

SEQ ID NO: 257844 - RNA, 19 nt, Homo sapiens
  misc_RNA (1)...(19): siRNA sense strand
cuuaauggauuugaacuag

SEQ ID NO: 257845 - RNA, 19 nt, Homo sapiens
  misc_RNA (1)...(19): siRNA sense strand
agaauucgaccaagggauu

SEQ ID NO: 257846 - RNA, 19 nt, Homo sapiens
  misc_RNA (1)...(19): siRNA sense strand
gaauucgaccaagggauuu

SEQ ID NO: 257847 - RNA, 19 nt, Homo sapiens
  misc_RNA (1)...(19): siRNA sense strand
caaccuguuuccugauucu

SEQ ID NO: 257848 - RNA, 19 nt, Homo sapiens
  misc_RNA (1)...(19): siRNA sense strand
auguaccucuuccaacuua

SEQ ID NO: 257849 - RNA, 19 nt, Homo sapiens
  misc_RNA (1)...(19): siRNA sense strand
caaaagccgugaaagaaag

SEQ ID NO: 257850 - RNA, 19 nt, Homo sapiens
  misc_RNA (1)...(19): siRNA sense strand
cagaagucguagucaugaa

SEQ ID NO: 257851 - RNA, 19 nt, Homo sapiens
  misc_RNA (1)...(19): siRNA sense strand
uggaagaauugaaaguauc

SEQ ID NO: 257852 - RNA, 19 nt, Homo sapiens
  misc_RNA (1)...(19): siRNA sense strand
uaugugggcucauuacacu

SEQ ID NO: 257853 - RNA, 19 nt, Homo sapiens
  misc_RNA (1)...(19): siRNA sense strand
cugcagcaauggcaaacaa

SEQ ID NO: 257854 - RNA, 19 nt, Homo sapiens
  misc_RNA (1)...(19): siRNA sense strand
guaggaaagguucgagaug

SEQ ID NO: 257855 - RNA, 19 nt, Homo sapiens
  misc_RNA (1)...(19): siRNA sense strand
gagauuaaggaugauguga

SEQ ID NO: 257856 - RNA, 19 nt, Homo sapiens
  misc_RNA (1)...(19): siRNA sense strand
gcaauguguaugugaagug

SEQ ID NO: 257857 - RNA, 19 nt, Homo sapiens
  misc_RNA (1)...(19): siRNA sense strand
ugaugugauugaagaaugu

SEQ ID NO: 257858 - RNA, 19 nt, Homo sapiens
  misc_RNA (1)...(19): siRNA sense strand
aaacagagcugcagcaaug

SEQ ID NO: 257859 - RNA, 19 nt, Homo sapiens
  misc_RNA (1)...(19): siRNA sense strand
gaaaguauccagcugauga

SEQ ID NO: 257860 - RNA, 19 nt, Homo sapiens
  misc_RNA (1)...(19): siRNA sense strand
ggaaaggacuggaauugau

SEQ ID NO: 257861 - RNA, 19 nt, Homo sapiens
  misc_RNA (1)...(19): siRNA sense strand
caagggauauggauuuauu

SEQ ID NO: 257862 - RNA, 19 nt, Homo sapiens
  misc_RNA (1)...(19): siRNA sense strand
gauaacagcagcauaugua

SEQ ID NO: 257863 - RNA, 19 nt, Homo sapiens
  misc_RNA (1)...(19): siRNA sense strand
gauuaaggaugaugugauu

SEQ ID NO: 257864 - RNA, 19 nt, Homo sapiens
  misc_RNA (1)...(19): siRNA sense strand
ggaacaacuuaauggauuu

SEQ ID NO: 257865 - RNA, 19 nt, Homo sapiens
  misc_RNA (1)...(19): siRNA sense strand
ccaaaggaauugcuuaugu

SEQ ID NO: 257866 - RNA, 19 nt, Homo sapiens
  misc_RNA (1)...(19): siRNA sense strand
gcaggugguuugcugguaa

SEQ ID NO: 257867 - RNA, 19 nt, Homo sapiens
  misc_RNA (1)...(19): siRNA sense strand
ccaacucucuaacauguuu

SEQ ID NO: 257868 - RNA, 19 nt, Homo sapiens
  misc_RNA (1)...(19): siRNA sense strand
gaaaggacuggaauugauu

SEQ ID NO: 257869 - RNA, 19 nt, Homo sapiens
  misc_RNA (1)...(19): siRNA sense strand
caaaggaauugcuuaugug

SEQ ID NO: 257870 - RNA, 19 nt, Homo sapiens
  misc_RNA (1)...(19): siRNA sense strand
gaaaguuggucauguuacu

SEQ ID NO: 257871 - RNA, 19 nt, Homo sapiens
  misc_RNA (1)...(19): siRNA sense strand
gaugggauaccgagauuaa

SEQ ID NO: 257872 - RNA, 19 nt, Homo sapiens
  misc_RNA (1)...(19): siRNA sense strand
caagggauuuggaagaguu

SEQ ID NO: 257873 - RNA, 19 nt, Homo sapiens
  misc_RNA (1)...(19): siRNA sense strand
uggaacaacuuaauggauu

SEQ ID NO: 257874 - RNA, 19 nt, Homo sapiens
  misc_RNA (1)...(19): siRNA sense strand
gacagaaauucaagacguu

SEQ ID NO: 257875 - RNA, 19 nt, Homo sapiens
  misc_RNA (1)...(19): siRNA sense strand
gaagaaguuggaugggaua

SEQ ID NO: 257876 - RNA, 19 nt, Homo sapiens
  misc_RNA (1)...(19): siRNA sense strand
gggaagugcuggaccuaug

SEQ ID NO: 257877 - RNA, 19 nt, Homo sapiens
  misc_RNA (1)...(19): siRNA sense strand
gggaacaacuggucgucuu

SEQ ID NO: 257878 - RNA, 19 nt, Homo sapiens
  misc_RNA (1)...(19): siRNA sense strand
auaccgagauuaaggauga

SEQ ID NO: 257879 - RNA, 19 nt, Homo sapiens
  misc_RNA (1)...(19): siRNA sense strand
acagcaagcucuacagaug

SEQ ID NO: 257880 - RNA, 19 nt, Homo sapiens
  misc_RNA (1)...(19): siRNA sense strand
ggaauugauuugggaacaa

SEQ ID NO: 257881 - RNA, 19 nt, Homo sapiens
  misc_RNA (1)...(19): siRNA sense strand
gcaggaagaccaaugaaag

SEQ ID NO: 257882 - RNA, 19 nt, Homo sapiens
  misc_RNA (1)...(19): siRNA sense strand
caacuuaccacaaccuguu

SEQ ID NO: 257883 - RNA, 19 nt, Homo sapiens
  misc_RNA (1)...(19): siRNA sense strand
ucaaacagaagaagaaguu

SEQ ID NO: 257884 - RNA, 19 nt, Homo sapiens
  misc_RNA (1)...(19): siRNA sense strand
gaguggcucuuuggcauuu

SEQ ID NO: 257885 - RNA, 19 nt, Homo sapiens
  misc_RNA (1)...(19): siRNA sense strand
ggaagaccaaugaaaguug

SEQ ID NO: 257886 - RNA, 19 nt, Homo sapiens
  misc_RNA (1)...(19): siRNA sense strand
gaacuggaaaggacuggaa

SEQ ID NO: 257887 - RNA, 19 nt, Homo sapiens
  misc_RNA (1)...(19): siRNA sense strand
gugaagugcccaucaauug

SEQ ID NO: 257888 - RNA, 19 nt, Homo sapiens
  misc_RNA (1)...(19): siRNA sense strand
gcacagcaagcucuacaga

SEQ ID NO: 257889 - RNA, 19 nt, Homo sapiens
  misc_RNA (1)...(19): siRNA sense strand
cagcaauggcaaacaauuu

SEQ ID NO: 257890 - RNA, 19 nt, Homo sapiens
  misc_RNA (1)...(19): siRNA sense strand
gcagcuggcggcaagaauu

SEQ ID NO: 257891 - RNA, 19 nt, Homo sapiens
  misc_RNA (1)...(19): siRNA sense strand
gaacuagcaggaagaccaa

SEQ ID NO: 257892 - RNA, 19 nt, Homo sapiens
  misc_RNA (1)...(19): siRNA sense strand
ggaagugcuggaccuauga

SEQ ID NO: 257893 - RNA, 19 nt, Homo sapiens
  misc_RNA (1)...(19): siRNA sense strand
cucagugccucuagcaaua

SEQ ID NO: 257894 - RNA, 19 nt, Homo sapiens
  misc_RNA (1)...(19): siRNA sense strand
ggaaagguucgagauguga

SEQ ID NO: 257895 - RNA, 19 nt, Homo sapiens
  misc_RNA (1)...(19): siRNA sense strand
gcagcaauggcaaacaauu

SEQ ID NO: 257896 - RNA, 19 nt, Homo sapiens
  misc_RNA (1)...(19): siRNA sense strand
cgagaugugaggaugauuu

SEQ ID NO: 257897 - RNA, 19 nt, Homo sapiens
  misc_RNA (1)...(19): siRNA sense strand
uaggaaagguucgagaugu

SEQ ID NO: 257898 - RNA, 19 nt, Homo sapiens
  misc_RNA (1)...(19): siRNA sense strand
ggguacagguuugcagauu

SEQ ID NO: 257899 - RNA, 19 nt, Homo sapiens
  misc_RNA (1)...(19): siRNA sense strand
gguacagguuugcagauuc

SEQ ID NO: 257900 - RNA, 19 nt, Homo sapiens
  misc_RNA (1)...(19): siRNA sense strand
cacaaccuguuuccugauu

SEQ ID NO: 257901 - RNA, 19 nt, Homo sapiens
  misc_RNA (1)...(19): siRNA sense strand
acagaugaguggcucuuug

SEQ ID NO: 257902 - RNA, 19 nt, Homo sapiens
  misc_RNA (1)...(19): siRNA sense strand
ggaccuaugaggcuuuaug

SEQ ID NO: 257903 - RNA, 19 nt, Homo sapiens
  misc_RNA (1)...(19): siRNA sense strand
aggaugaugugauugaaga

SEQ ID NO: 257904 - RNA, 19 nt, Homo sapiens
  misc_RNA (1)...(19): siRNA sense strand
uaacauguuuaacccucaa

SEQ ID NO: 257905 - RNA, 19 nt, Homo sapiens
  misc_RNA (1)...(19): siRNA sense strand
gaacaacuuaauggauuug

SEQ ID NO: 257906 - RNA, 19 nt, Homo sapiens
  misc_RNA (1)...(19): siRNA sense strand
uaaggaugaugugauugaa

SEQ ID NO: 257907 - RNA, 19 nt, Homo sapiens
  misc_RNA (1)...(19): siRNA sense strand
uaauggauuugaacuagca

SEQ ID NO: 257908 - RNA, 19 nt, Homo sapiens
  misc_RNA (1)...(19): siRNA sense strand
aggauuaacuggccaacga

SEQ ID NO: 257909 - RNA, 19 nt, Homo sapiens
  misc_RNA (1)...(19): siRNA sense strand
gcaaacaauuuacaaaagg

SEQ ID NO: 257910 - RNA, 19 nt, Homo sapiens
  misc_RNA (1)...(19): siRNA sense strand
gcauauguaccucuuccaa

SEQ ID NO: 257911 - RNA, 19 nt, Homo sapiens
  misc_RNA (1)...(19): siRNA sense strand
gaacaacuggucgucuuca

SEQ ID NO: 257912 - RNA, 19 nt, Homo sapiens
  misc_RNA (1)...(19): siRNA sense strand
aaugauaacagcagcauau

SEQ ID NO: 257913 - RNA, 19 nt, Homo sapiens
  misc_RNA (1)...(19): siRNA sense strand
agcaauggcaaacaauuua

SEQ ID NO: 257914 - RNA, 19 nt, Homo sapiens
  misc_RNA (1)...(19): siRNA sense strand
uaugugaagugcccaucaa

SEQ ID NO: 257915 - RNA, 19 nt, Homo sapiens
  misc_RNA (1)...(19): siRNA sense strand
gauuugcaaacaagacuuu

SEQ ID NO: 257916 - RNA, 19 nt, Homo sapiens
  misc_RNA (1)...(19): siRNA sense strand
gaauugauuugggaacaac

SEQ ID NO: 257917 - RNA, 19 nt, Homo sapiens
  misc_RNA (1)...(19): siRNA sense strand
gcucagugccucuagcaau

SEQ ID NO: 257918 - RNA, 19 nt, Homo sapiens
  misc_RNA (1)...(19): siRNA sense strand
cuuaauggauuugaacuag

SEQ ID NO: 257919 - RNA, 19 nt, Homo sapiens
  misc_RNA (1)...(19): siRNA sense strand
uuaaggaugaugugauuga

SEQ ID NO: 257920 - RNA, 19 nt, Homo sapiens
  misc_RNA (1)...(19): siRNA sense strand
agaauucgaccaagggauu

SEQ ID NO: 257921 - RNA, 19 nt, Homo sapiens
  misc_RNA (1)...(19): siRNA sense strand
uggaugggauaccgagauu

SEQ ID NO: 257922 - RNA, 19 nt, Homo sapiens
  misc_RNA (1)...(19): siRNA sense strand
cugcagcaauggcaaacaa

SEQ ID NO: 257923 - RNA, 19 nt, Homo sapiens
  misc_RNA (1)...(19): siRNA sense strand
caaccuguuuccugauucu

SEQ ID NO: 257924 - RNA, 19 nt, Homo sapiens
  misc_RNA (1)...(19): siRNA sense strand
auguaccucuuccaacuua

SEQ ID NO: 257925 - RNA, 19 nt, Homo sapiens
  misc_RNA (1)...(19): siRNA sense strand
guaggaaagguucgagaug

SEQ ID NO: 257926 - RNA, 19 nt, Homo sapiens
  misc_RNA (1)...(19): siRNA sense strand
gaauucgaccaagggauuu

SEQ ID NO: 257927 - RNA, 19 nt, Homo sapiens
  misc_RNA (1)...(19): siRNA sense strand
uggaagaauugaaaguauc

SEQ ID NO: 257928 - RNA, 19 nt, Homo sapiens
  misc_RNA (1)...(19): siRNA sense strand
uaugugggcucauuacacu

SEQ ID NO: 257929 - RNA, 19 nt, Homo sapiens
  misc_RNA (1)...(19): siRNA sense strand
gccucuagcaauaggauua

SEQ ID NO: 257930 - RNA, 19 nt, Homo sapiens
  misc_RNA (1)...(19): siRNA sense strand
gcaauguguaugugaagug

SEQ ID NO: 257931 - RNA, 19 nt, Homo sapiens
  misc_RNA (1)...(19): siRNA sense strand
ugaugugauugaagaaugu

SEQ ID NO: 257932 - RNA, 19 nt, Homo sapiens
  misc_RNA (1)...(19): siRNA sense strand
gagauuaaggaugauguga

SEQ ID NO: 257933 - RNA, 19 nt, Homo sapiens
  misc_RNA (1)...(19): siRNA sense strand
cagcaagcucuacagauga

SEQ ID NO: 257934 - RNA, 19 nt, Homo sapiens
  misc_RNA (1)...(19): siRNA sense strand
ugacucagaaugugccaaa

SEQ ID NO: 257935 - RNA, 19 nt, Homo sapiens
  misc_RNA (1)...(19): siRNA sense strand
cucauuacacuucaacaua

SEQ ID NO: 257936 - RNA, 19 nt, Homo sapiens
  misc_RNA (1)...(19): siRNA sense strand
gagaugugaggaugauuuc

SEQ ID NO: 257937 - RNA, 19 nt, Homo sapiens
  misc_RNA (1)...(19): siRNA sense strand
gaugugaggaugauuucug

SEQ ID NO: 257938 - RNA, 19 nt, Homo sapiens
  misc_RNA (1)...(19): siRNA sense strand
acacaauguuuccaacucu

SEQ ID NO: 257939 - RNA, 19 nt, Homo sapiens
  misc_RNA (1)...(19): siRNA sense strand
guacagguuugcagauucc

SEQ ID NO: 257940 - RNA, 19 nt, Homo sapiens
  misc_RNA (1)...(19): siRNA sense strand
uucaagacguuccaaagga

SEQ ID NO: 257941 - RNA, 19 nt, Homo sapiens
  misc_RNA (1)...(19): siRNA sense strand
aaauucagcucagggcaau

SEQ ID NO: 257942 - RNA, 19 nt, Homo sapiens
  misc_RNA (1)...(19): siRNA sense strand
uuccaacucucuaacaugu

SEQ ID NO: 257943 - RNA, 19 nt, Homo sapiens
  misc_RNA (1)...(19): siRNA sense strand
ggaacaacuggucgucuuc

SEQ ID NO: 257944 - RNA, 19 nt, Homo sapiens
  misc_RNA (1)...(19): siRNA sense strand
gaugauggacagugaaacu

SEQ ID NO: 257945 - RNA, 19 nt, Homo sapiens
  misc_RNA (1)...(19): siRNA sense strand
ggcaggugguuugcuggua

SEQ ID NO: 257946 - RNA, 19 nt, Homo sapiens
  misc_RNA (1)...(19): siRNA sense strand
gagcugcagcaauggcaaa

SEQ ID NO: 257947 - RNA, 19 nt, Homo sapiens
  misc_RNA (1)...(19): siRNA sense strand
gaauugcuuauguggaguu

SEQ ID NO: 257948 - RNA, 19 nt, Homo sapiens
  misc_RNA (1)...(19): siRNA sense strand
caacuuaauggauuugaac

SEQ ID NO: 257949 - RNA, 19 nt, Homo sapiens
  misc_RNA (1)...(19): siRNA sense strand
cagcucagggcaaugugua

SEQ ID NO: 257950 - RNA, 19 nt, Homo sapiens
  misc_RNA (1)...(19): siRNA sense strand
caggugguuugcugguaaa

SEQ ID NO: 257951 - RNA, 19 nt, Homo sapiens
  misc_RNA (1)...(19): siRNA sense strand
gcaauggcaaacaauuuac

SEQ ID NO: 257952 - RNA, 19 nt, Homo sapiens
  misc_RNA (1)...(19): siRNA sense strand
gaagugcccaucaauugcu

SEQ ID NO: 257953 - RNA, 19 nt, Homo sapiens
  misc_RNA (1)...(19): siRNA sense strand
aaaggacuggaauugauuu

SEQ ID NO: 257954 - RNA, 19 nt, Homo sapiens
  misc_RNA (1)...(19): siRNA sense strand
gaaauucaagacguuccaa

SEQ ID NO: 257955 - RNA, 19 nt, Homo sapiens
  misc_RNA (1)...(19): siRNA sense strand
caggaagaccaaugaaagu

SEQ ID NO: 257956 - RNA, 19 nt, Homo sapiens
  misc_RNA (1)...(19): siRNA sense strand
uugcagaggguacagguuu

SEQ ID NO: 257957 - RNA, 19 nt, Homo sapiens
  misc_RNA (1)...(19): siRNA sense strand
uucgagugcuaguucauuu

SEQ ID NO: 257958 - RNA, 19 nt, Homo sapiens
  misc_RNA (1)...(19): siRNA sense strand
aaacagagcugcagcaaug

SEQ ID NO: 257959 - RNA, 19 nt, Homo sapiens
  misc_RNA (1)...(19): siRNA sense strand
gaaaguauccagcugauga

SEQ ID NO: 257960 - RNA, 19 nt, Homo sapiens
  misc_RNA (1)...(19): siRNA sense strand
ggaaaggacuggaauugau

SEQ ID NO: 257961 - RNA, 19 nt, Homo sapiens
  misc_RNA (1)...(19): siRNA sense strand
caagggauauggauuuauu

SEQ ID NO: 257962 - RNA, 19 nt, Homo sapiens
  misc_RNA (1)...(19): siRNA sense strand
gauaacagcagcauaugua

SEQ ID NO: 257963 - RNA, 19 nt, Homo sapiens
  misc_RNA (1)...(19): siRNA sense strand
gauuaaggaugaugugauu

SEQ ID NO: 257964 - RNA, 19 nt, Homo sapiens
  misc_RNA (1)...(19): siRNA sense strand
ggaacaacuuaauggauuu

SEQ ID NO: 257965 - RNA, 19 nt, Homo sapiens
  misc_RNA (1)...(19): siRNA sense strand
ccaaaggaauugcuuaugu

SEQ ID NO: 257966 - RNA, 19 nt, Homo sapiens
  misc_RNA (1)...(19): siRNA sense strand
gcaggugguuugcugguaa

SEQ ID NO: 257967 - RNA, 19 nt, Homo sapiens
  misc_RNA (1)...(19): siRNA sense strand
ccaacucucuaacauguuu

SEQ ID NO: 257968 - RNA, 19 nt, Homo sapiens
  misc_RNA (1)...(19): siRNA sense strand
gaaaggacuggaauugauu

SEQ ID NO: 257969 - RNA, 19 nt, Homo sapiens
  misc_RNA (1)...(19): siRNA sense strand
caaaggaauugcuuaugug

SEQ ID NO: 257970 - RNA, 19 nt, Homo sapiens
  misc_RNA (1)...(19): siRNA sense strand
gaaaguuggucauguuacu

SEQ ID NO: 257971 - RNA, 19 nt, Homo sapiens
  misc_RNA (1)...(19): siRNA sense strand
gaugggauaccgagauuaa

SEQ ID NO: 257972 - RNA, 19 nt, Homo sapiens
  misc_RNA (1)...(19): siRNA sense strand
caagggauuuggaagaguu

SEQ ID NO: 257973 - RNA, 19 nt, Homo sapiens
  misc_RNA (1)...(19): siRNA sense strand
uggaacaacuuaauggauu

SEQ ID NO: 257974 - RNA, 19 nt, Homo sapiens
  misc_RNA (1)...(19): siRNA sense strand
gacagaaauucaagacguu

SEQ ID NO: 257975 - RNA, 19 nt, Homo sapiens
  misc_RNA (1)...(19): siRNA sense strand
gaagaaguuggaugggaua

SEQ ID NO: 257976 - RNA, 19 nt, Homo sapiens
  misc_RNA (1)...(19): siRNA sense strand
gggaagugcuggaccuaug

SEQ ID NO: 257977 - RNA, 19 nt, Homo sapiens
  misc_RNA (1)...(19): siRNA sense strand
gggaacaacuggucgucuu

SEQ ID NO: 257978 - RNA, 19 nt, Homo sapiens
  misc_RNA (1)...(19): siRNA sense strand
auaccgagauuaaggauga

SEQ ID NO: 257979 - RNA, 19 nt, Homo sapiens
  misc_RNA (1)...(19): siRNA sense strand
acagcaagcucuacagaug

SEQ ID NO: 257980 - RNA, 19 nt, Homo sapiens
  misc_RNA (1)...(19): siRNA sense strand
ggaauugauuugggaacaa

SEQ ID NO: 257981 - RNA, 19 nt, Homo sapiens
  misc_RNA (1)...(19): siRNA sense strand
gcaggaagaccaaugaaag

SEQ ID NO: 257982 - RNA, 19 nt, Homo sapiens
  misc_RNA (1)...(19): siRNA sense strand
caacuuaccacaaccuguu

SEQ ID NO: 257983 - RNA, 19 nt, Homo sapiens
  misc_RNA (1)...(19): siRNA sense strand
ucaaacagaagaagaaguu

SEQ ID NO: 257984 - RNA, 19 nt, Homo sapiens
  misc_RNA (1)...(19): siRNA sense strand
gaguggcucuuuggcauuu

SEQ ID NO: 257985 - RNA, 19 nt, Homo sapiens
  misc_RNA (1)...(19): siRNA sense strand
ggaagaccaaugaaaguug

SEQ ID NO: 257986 - RNA, 19 nt, Homo sapiens
  misc_RNA (1)...(19): siRNA sense strand
gaacuggaaaggacuggaa

SEQ ID NO: 257987 - RNA, 19 nt, Homo sapiens
  misc_RNA (1)...(19): siRNA sense strand
gugaagugcccaucaauug

SEQ ID NO: 257988 - RNA, 19 nt, Homo sapiens
  misc_RNA (1)...(19): siRNA sense strand
gcacagcaagcucuacaga

SEQ ID NO: 257989 - RNA, 19 nt, Homo sapiens
  misc_RNA (1)...(19): siRNA sense strand
cagcaauggcaaacaauuu

SEQ ID NO: 257990 - RNA, 19 nt, Homo sapiens
  misc_RNA (1)...(19): siRNA sense strand
gcagcuggcggcaagaauu

SEQ ID NO: 257991 - RNA, 19 nt, Homo sapiens
  misc_RNA (1)...(19): siRNA sense strand
gaacuagcaggaagaccaa

SEQ ID NO: 257992 - RNA, 19 nt, Homo sapiens
  misc_RNA (1)...(19): siRNA sense strand
ggaagugcuggaccuauga

SEQ ID NO: 257993 - RNA, 19 nt, Homo sapiens
  misc_RNA (1)...(19): siRNA sense strand
cucagugccucuagcaaua

SEQ ID NO: 257994 - RNA, 19 nt, Homo sapiens
  misc_RNA (1)...(19): siRNA sense strand
ggaaagguucgagauguga

SEQ ID NO: 257995 - RNA, 19 nt, Homo sapiens
  misc_RNA (1)...(19): siRNA sense strand
gcagcaauggcaaacaauu

SEQ ID NO: 257996 - RNA, 19 nt, Homo sapiens
  misc_RNA (1)...(19): siRNA sense strand
cgagaugugaggaugauuu

SEQ ID NO: 257997 - RNA, 19 nt, Homo sapiens
  misc_RNA (1)...(19): siRNA sense strand
uaggaaagguucgagaugu

SEQ ID NO: 257998 - RNA, 19 nt, Homo sapiens
  misc_RNA (1)...(19): siRNA sense strand
ggguacagguuugcagauu

SEQ ID NO: 257999 - RNA, 19 nt, Homo sapiens
  misc_RNA (1)...(19): siRNA sense strand
gguacagguuugcagauuc

SEQ ID NO: 258000 - RNA, 19 nt, Homo sapiens
  misc_RNA (1)...(19): siRNA sense strand
cacaaccuguuuccugauu

SEQ ID NO: 258001 - RNA, 19 nt, Homo sapiens
  misc_RNA (1)...(19): siRNA sense strand
acagaugaguggcucuuug

SEQ ID NO: 258002 - RNA, 19 nt, Homo sapiens
  misc_RNA (1)...(19): siRNA sense strand
ggaccuaugaggcuuuaug

SEQ ID NO: 258003 - RNA, 19 nt, Homo sapiens
  misc_RNA (1)...(19): siRNA sense strand
aggaugaugugauugaaga

SEQ ID NO: 258004 - RNA, 19 nt, Homo sapiens
  misc_RNA (1)...(19): siRNA sense strand
uaacauguuuaacccucaa

SEQ ID NO: 258005 - RNA, 19 nt, Homo sapiens
  misc_RNA (1)...(19): siRNA sense strand
gaacaacuuaauggauuug

SEQ ID NO: 258006 - RNA, 19 nt, Homo sapiens
  misc_RNA (1)...(19): siRNA sense strand
uaaggaugaugugauugaa

SEQ ID NO: 258007 - RNA, 19 nt, Homo sapiens
  misc_RNA (1)...(19): siRNA sense strand
uaauggauuugaacuagca

SEQ ID NO: 258008 - RNA, 19 nt, Homo sapiens
  misc_RNA (1)...(19): siRNA sense strand
aggauuaacuggccaacga

SEQ ID NO: 258009 - RNA, 19 nt, Homo sapiens
  misc_RNA (1)...(19): siRNA sense strand
gcaaacaauuuacaaaagg

SEQ ID NO: 258010 - RNA, 19 nt, Homo sapiens
  misc_RNA (1)...(19): siRNA sense strand
gcauauguaccucuuccaa

SEQ ID NO: 258011 - RNA, 19 nt, Homo sapiens
  misc_RNA (1)...(19): siRNA sense strand
gaacaacuggucgucuuca

SEQ ID NO: 258012 - RNA, 19 nt, Homo sapiens
  misc_RNA (1)...(19): siRNA sense strand
aaugauaacagcagcauau

SEQ ID NO: 258013 - RNA, 19 nt, Homo sapiens
  misc_RNA (1)...(19): siRNA sense strand
agcaauggcaaacaauuua

SEQ ID NO: 258014 - RNA, 19 nt, Homo sapiens
  misc_RNA (1)...(19): siRNA sense strand
uaugugaagugcccaucaa

SEQ ID NO: 258015 - RNA, 19 nt, Homo sapiens
  misc_RNA (1)...(19): siRNA sense strand
gauuugcaaacaagacuuu

SEQ ID NO: 258016 - RNA, 19 nt, Homo sapiens
  misc_RNA (1)...(19): siRNA sense strand
gaauugauuugggaacaac

SEQ ID NO: 258017 - RNA, 19 nt, Homo sapiens
  misc_RNA (1)...(19): siRNA sense strand
gcucagugccucuagcaau

SEQ ID NO: 258018 - RNA, 19 nt, Homo sapiens
  misc_RNA (1)...(19): siRNA sense strand
cuuaauggauuugaacuag

SEQ ID NO: 258019 - RNA, 19 nt, Homo sapiens
  misc_RNA (1)...(19): siRNA sense strand
uuaaggaugaugugauuga

SEQ ID NO: 258020 - RNA, 19 nt, Homo sapiens
  misc_RNA (1)...(19): siRNA sense strand
agaauucgaccaagggauu

SEQ ID NO: 258021 - RNA, 19 nt, Homo sapiens
  misc_RNA (1)...(19): siRNA sense strand
uggaugggauaccgagauu

SEQ ID NO: 258022 - RNA, 19 nt, Homo sapiens
  misc_RNA (1)...(19): siRNA sense strand
cugcagcaauggcaaacaa

SEQ ID NO: 258023 - RNA, 19 nt, Homo sapiens
  misc_RNA (1)...(19): siRNA sense strand
caaccuguuuccugauucu

SEQ ID NO: 258024 - RNA, 19 nt, Homo sapiens
  misc_RNA (1)...(19): siRNA sense strand
auguaccucuuccaacuua

SEQ ID NO: 258025 - RNA, 19 nt, Homo sapiens
  misc_RNA (1)...(19): siRNA sense strand
guaggaaagguucgagaug

SEQ ID NO: 258026 - RNA, 19 nt, Homo sapiens
  misc_RNA (1)...(19): siRNA sense strand
gaauucgaccaagggauuu

SEQ ID NO: 258027 - RNA, 19 nt, Homo sapiens
  misc_RNA (1)...(19): siRNA sense strand
uggaagaauugaaaguauc

SEQ ID NO: 258028 - RNA, 19 nt, Homo sapiens
  misc_RNA (1)...(19): siRNA sense strand
uaugugggcucauuacacu

SEQ ID NO: 258029 - RNA, 19 nt, Homo sapiens
  misc_RNA (1)...(19): siRNA sense strand
gccucuagcaauaggauua

SEQ ID NO: 258030 - RNA, 19 nt, Homo sapiens
  misc_RNA (1)...(19): siRNA sense strand
gcaauguguaugugaagug

SEQ ID NO: 258031 - RNA, 19 nt, Homo sapiens
  misc_RNA (1)...(19): siRNA sense strand
ugaugugauugaagaaugu

SEQ ID NO: 258032 - RNA, 19 nt, Homo sapiens
  misc_RNA (1)...(19): siRNA sense strand
gagauuaaggaugauguga

SEQ ID NO: 258033 - RNA, 19 nt, Homo sapiens
  misc_RNA (1)...(19): siRNA sense strand
cagcaagcucuacagauga

SEQ ID NO: 258034 - RNA, 19 nt, Homo sapiens
  misc_RNA (1)...(19): siRNA sense strand
ugacucagaaugugccaaa

SEQ ID NO: 258035 - RNA, 19 nt, Homo sapiens
  misc_RNA (1)...(19): siRNA sense strand
cucauuacacuucaacaua

SEQ ID NO: 258036 - RNA, 19 nt, Homo sapiens
  misc_RNA (1)...(19): siRNA sense strand
gagaugugaggaugauuuc

SEQ ID NO: 258037 - RNA, 19 nt, Homo sapiens
  misc_RNA (1)...(19): siRNA sense strand
gaugugaggaugauuucug

SEQ ID NO: 258038 - RNA, 19 nt, Homo sapiens
  misc_RNA (1)...(19): siRNA sense strand
acacaauguuuccaacucu

SEQ ID NO: 258039 - RNA, 19 nt, Homo sapiens
  misc_RNA (1)...(19): siRNA sense strand
guacagguuugcagauucc

SEQ ID NO: 258040 - RNA, 19 nt, Homo sapiens
  misc_RNA (1)...(19): siRNA sense strand
uucaagacguuccaaagga

SEQ ID NO: 258041 - RNA, 19 nt, Homo sapiens
  misc_RNA (1)...(19): siRNA sense strand
aaauucagcucagggcaau

SEQ ID NO: 258042 - RNA, 19 nt, Homo sapiens
  misc_RNA (1)...(19): siRNA sense strand
uuccaacucucuaacaugu

SEQ ID NO: 258043 - RNA, 19 nt, Homo sapiens
  misc_RNA (1)...(19): siRNA sense strand
ggaacaacuggucgucuuc

SEQ ID NO: 258044 - RNA, 19 nt, Homo sapiens
  misc_RNA (1)...(19): siRNA sense strand
gaugauggacagugaaacu

SEQ ID NO: 258045 - RNA, 19 nt, Homo sapiens
  misc_RNA (1)...(19): siRNA sense strand
ggcaggugguuugcuggua

SEQ ID NO: 258046 - RNA, 19 nt, Homo sapiens
  misc_RNA (1)...(19): siRNA sense strand
gagcugcagcaauggcaaa

SEQ ID NO: 258047 - RNA, 19 nt, Homo sapiens
  misc_RNA (1)...(19): siRNA sense strand
gaauugcuuauguggaguu

SEQ ID NO: 258048 - RNA, 19 nt, Homo sapiens
  misc_RNA (1)...(19): siRNA sense strand
caacuuaauggauuugaac

SEQ ID NO: 258049 - RNA, 19 nt, Homo sapiens
  misc_RNA (1)...(19): siRNA sense strand
cagcucagggcaaugugua

SEQ ID NO: 258050 - RNA, 19 nt, Homo sapiens
  misc_RNA (1)...(19): siRNA sense strand
caggugguuugcugguaaa

SEQ ID NO: 258051 - RNA, 19 nt, Homo sapiens
  misc_RNA (1)...(19): siRNA sense strand
gcaauggcaaacaauuuac

SEQ ID NO: 258052 - RNA, 19 nt, Homo sapiens
  misc_RNA (1)...(19): siRNA sense strand
gaagugcccaucaauugcu

SEQ ID NO: 258053 - RNA, 19 nt, Homo sapiens
  misc_RNA (1)...(19): siRNA sense strand
aaaggacuggaauugauuu

SEQ ID NO: 258054 - RNA, 19 nt, Homo sapiens
  misc_RNA (1)...(19): siRNA sense strand
gaaauucaagacguuccaa

SEQ ID NO: 258055 - RNA, 19 nt, Homo sapiens
  misc_RNA (1)...(19): siRNA sense strand
caggaagaccaaugaaagu

SEQ ID NO: 258056 - RNA, 19 nt, Homo sapiens
  misc_RNA (1)...(19): siRNA sense strand
uugcagaggguacagguuu

SEQ ID NO: 258057 - RNA, 19 nt, Homo sapiens
  misc_RNA (1)...(19): siRNA sense strand
uucgagugcuaguucauuu

SEQ ID NO: 258058 - RNA, 19 nt, Homo sapiens
  misc_RNA (1)...(19): siRNA sense strand
aaacagagcugcagcaaug

SEQ ID NO: 258059 - RNA, 19 nt, Homo sapiens
  misc_RNA (1)...(19): siRNA sense strand
gaaaguauccagcugauga

SEQ ID NO: 258060 - RNA, 19 nt, Homo sapiens
  misc_RNA (1)...(19): siRNA sense strand
ggaaaggacuggaauugau

SEQ ID NO: 258061 - RNA, 19 nt, Homo sapiens
  misc_RNA (1)...(19): siRNA sense strand
caagggauauggauuuauu

SEQ ID NO: 258062 - RNA, 19 nt, Homo sapiens
  misc_RNA (1)...(19): siRNA sense strand
gauaacagcagcauaugua

SEQ ID NO: 258063 - RNA, 19 nt, Homo sapiens
  misc_RNA (1)...(19): siRNA sense strand
gauuaaggaugaugugauu

SEQ ID NO: 258064 - RNA, 19 nt, Homo sapiens
  misc_RNA (1)...(19): siRNA sense strand
ggaacaacuuaauggauuu

SEQ ID NO: 258065 - RNA, 19 nt, Homo sapiens
  misc_RNA (1)...(19): siRNA sense strand
ccaaaggaauugcuuaugu

SEQ ID NO: 258066 - RNA, 19 nt, Homo sapiens
  misc_RNA (1)...(19): siRNA sense strand
gcaggugguuugcugguaa

SEQ ID NO: 258067 - RNA, 19 nt, Homo sapiens
  misc_RNA (1)...(19): siRNA sense strand
ccaacucucuaacauguuu

SEQ ID NO: 258068 - RNA, 19 nt, Homo sapiens
  misc_RNA (1)...(19): siRNA sense strand
gaaaggacuggaauugauu

SEQ ID NO: 258069 - RNA, 19 nt, Homo sapiens
  misc_RNA (1)...(19): siRNA sense strand
caaaggaauugcuuaugug

SEQ ID NO: 258070 - RNA, 19 nt, Homo sapiens
  misc_RNA (1)...(19): siRNA sense strand
gaaaguuggucauguuacu

SEQ ID NO: 258071 - RNA, 19 nt, Homo sapiens
  misc_RNA (1)...(19): siRNA sense strand
gaugggauaccgagauuaa

SEQ ID NO: 258072 - RNA, 19 nt, Homo sapiens
  misc_RNA (1)...(19): siRNA sense strand
caagggauuuggaagaguu

SEQ ID NO: 258073 - RNA, 19 nt, Homo sapiens
  misc_RNA (1)...(19): siRNA sense strand
uggaacaacuuaauggauu

SEQ ID NO: 258074 - RNA, 19 nt, Homo sapiens
  misc_RNA (1)...(19): siRNA sense strand
gacagaaauucaagacguu

SEQ ID NO: 258075 - RNA, 19 nt, Homo sapiens
  misc_RNA (1)...(19): siRNA sense strand
gaagaaguuggaugggaua

SEQ ID NO: 258076 - RNA, 19 nt, Homo sapiens
  misc_RNA (1)...(19): siRNA sense strand
gggaagugcuggaccuaug

SEQ ID NO: 258077 - RNA, 19 nt, Homo sapiens
  misc_RNA (1)...(19): siRNA sense strand
gggaacaacuggucgucuu

SEQ ID NO: 258078 - RNA, 19 nt, Homo sapiens
  misc_RNA (1)...(19): siRNA sense strand
auaccgagauuaaggauga

SEQ ID NO: 258079 - RNA, 19 nt, Homo sapiens
  misc_RNA (1)...(19): siRNA sense strand
acagcaagcucuacagaug

SEQ ID NO: 258080 - RNA, 19 nt, Homo sapiens
  misc_RNA (1)...(19): siRNA sense strand
ggaauugauuugggaacaa

SEQ ID NO: 258081 - RNA, 19 nt, Homo sapiens
  misc_RNA (1)...(19): siRNA sense strand
gcaggaagaccaaugaaag

SEQ ID NO: 258082 - RNA, 19 nt, Homo sapiens
  misc_RNA (1)...(19): siRNA sense strand
caacuuaccacaaccuguu

SEQ ID NO: 258083 - RNA, 19 nt, Homo sapiens
  misc_RNA (1)...(19): siRNA sense strand
ucaaacagaagaagaaguu

SEQ ID NO: 258084 - RNA, 19 nt, Homo sapiens
  misc_RNA (1)...(19): siRNA sense strand
gaguggcucuuuggcauuu

SEQ ID NO: 258085 - RNA, 19 nt, Homo sapiens
  misc_RNA (1)...(19): siRNA sense strand
ggaagaccaaugaaaguug

SEQ ID NO: 258086 - RNA, 19 nt, Homo sapiens
  misc_RNA (1)...(19): siRNA sense strand
gaacuggaaaggacuggaa

SEQ ID NO: 258087 - RNA, 19 nt, Homo sapiens
  misc_RNA (1)...(19): siRNA sense strand
gugaagugcccaucaauug

SEQ ID NO: 258088 - RNA, 19 nt, Homo sapiens
  misc_RNA (1)...(19): siRNA sense strand
gcacagcaagcucuacaga

SEQ ID NO: 258089 - RNA, 19 nt, Homo sapiens
  misc_RNA (1)...(19): siRNA sense strand
cagcaauggcaaacaauuu

SEQ ID NO: 258090 - RNA, 19 nt, Homo sapiens
  misc_RNA (1)...(19): siRNA sense strand
gcagcuggcggcaagaauu

SEQ ID NO: 258091 - RNA, 19 nt, Homo sapiens
  misc_RNA (1)...(19): siRNA sense strand
gaacuagcaggaagaccaa

SEQ ID NO: 258092 - RNA, 19 nt, Homo sapiens
  misc_RNA (1)...(19): siRNA sense strand
ggaagugcuggaccuauga

SEQ ID NO: 258093 - RNA, 19 nt, Homo sapiens
  misc_RNA (1)...(19): siRNA sense strand
cucagugccucuagcaaua

SEQ ID NO: 258094 - RNA, 19 nt, Homo sapiens
  misc_RNA (1)...(19): siRNA sense strand
ggaaagguucgagauguga

SEQ ID NO: 258095 - RNA, 19 nt, Homo sapiens
  misc_RNA (1)...(19): siRNA sense strand
gcagcaauggcaaacaauu

SEQ ID NO: 258096 - RNA, 19 nt, Homo sapiens
  misc_RNA (1)...(19): siRNA sense strand
cgagaugugaggaugauuu

SEQ ID NO: 258097 - RNA, 19 nt, Homo sapiens
  misc_RNA (1)...(19): siRNA sense strand
uaggaaagguucgagaugu

SEQ ID NO: 258098 - RNA, 19 nt, Homo sapiens
  misc_RNA (1)...(19): siRNA sense strand
ggguacagguuugcagauu

SEQ ID NO: 258099 - RNA, 19 nt, Homo sapiens
  misc_RNA (1)...(19): siRNA sense strand
gguacagguuugcagauuc

SEQ ID NO: 258100 - RNA, 19 nt, Homo sapiens
  misc_RNA (1)...(19): siRNA sense strand
cacaaccuguuuccugauu

SEQ ID NO: 258101 - RNA, 19 nt, Homo sapiens
  misc_RNA (1)...(19): siRNA sense strand
acagaugaguggcucuuug

SEQ ID NO: 258102 - RNA, 19 nt, Homo sapiens
  misc_RNA (1)...(19): siRNA sense strand
ggaccuaugaggcuuuaug

SEQ ID NO: 258103 - RNA, 19 nt, Homo sapiens
  misc_RNA (1)...(19): siRNA sense strand
aggaugaugugauugaaga

SEQ ID NO: 258104 - RNA, 19 nt, Homo sapiens
  misc_RNA (1)...(19): siRNA sense strand
uaacauguuuaacccucaa

SEQ ID NO: 258105 - RNA, 19 nt, Homo sapiens
  misc_RNA (1)...(19): siRNA sense strand
gaacaacuuaauggauuug

SEQ ID NO: 258106 - RNA, 19 nt, Homo sapiens
  misc_RNA (1)...(19): siRNA sense strand
uaaggaugaugugauugaa

SEQ ID NO: 258107 - RNA, 19 nt, Homo sapiens
  misc_RNA (1)...(19): siRNA sense strand
uaauggauuugaacuagca

SEQ ID NO: 258108 - RNA, 19 nt, Homo sapiens
  misc_RNA (1)...(19): siRNA sense strand
aggauuaacuggccaacga

SEQ ID NO: 258109 - RNA, 19 nt, Homo sapiens
  misc_RNA (1)...(19): siRNA sense strand
gcaaacaauuuacaaaagg

SEQ ID NO: 258110 - RNA, 19 nt, Homo sapiens
  misc_RNA (1)...(19): siRNA sense strand
gcauauguaccucuuccaa

SEQ ID NO: 258111 - RNA, 19 nt, Homo sapiens
  misc_RNA (1)...(19): siRNA sense strand
gaacaacuggucgucuuca

SEQ ID NO: 258112 - RNA, 19 nt, Homo sapiens
  misc_RNA (1)...(19): siRNA sense strand
aaugauaacagcagcauau

SEQ ID NO: 258113 - RNA, 19 nt, Homo sapiens
  misc_RNA (1)...(19): siRNA sense strand
agcaauggcaaacaauuua

SEQ ID NO: 258114 - RNA, 19 nt, Homo sapiens
  misc_RNA (1)...(19): siRNA sense strand
uaugugaagugcccaucaa

SEQ ID NO: 258115 - RNA, 19 nt, Homo sapiens
  misc_RNA (1)...(19): siRNA sense strand
gauuugcaaacaagacuuu

SEQ ID NO: 258116 - RNA, 19 nt, Homo sapiens
  misc_RNA (1)...(19): siRNA sense strand
gaauugauuugggaacaac

SEQ ID NO: 258117 - RNA, 19 nt, Homo sapiens
  misc_RNA (1)...(19): siRNA sense strand
gcucagugccucuagcaau

SEQ ID NO: 258118 - RNA, 19 nt, Homo sapiens
  misc_RNA (1)...(19): siRNA sense strand
cuuaauggauuugaacuag

SEQ ID NO: 258119 - RNA, 19 nt, Homo sapiens
  misc_RNA (1)...(19): siRNA sense strand
uuaaggaugaugugauuga

SEQ ID NO: 258120 - RNA, 19 nt, Homo sapiens
  misc_RNA (1)...(19): siRNA sense strand
agaauucgaccaagggauu

SEQ ID NO: 258121 - RNA, 19 nt, Homo sapiens
  misc_RNA (1)...(19): siRNA sense strand
uggaugggauaccgagauu

SEQ ID NO: 258122 - RNA, 19 nt, Homo sapiens
  misc_RNA (1)...(19): siRNA sense strand
cugcagcaauggcaaacaa

SEQ ID NO: 258123 - RNA, 19 nt, Homo sapiens
  misc_RNA (1)...(19): siRNA sense strand
caaccuguuuccugauucu

SEQ ID NO: 258124 - RNA, 19 nt, Homo sapiens
  misc_RNA (1)...(19): siRNA sense strand
auguaccucuuccaacuua

SEQ ID NO: 258125 - RNA, 19 nt, Homo sapiens
  misc_RNA (1)...(19): siRNA sense strand
guaggaaagguucgagaug

SEQ ID NO: 258126 - RNA, 19 nt, Homo sapiens
  misc_RNA (1)...(19): siRNA sense strand
gaauucgaccaagggauuu

SEQ ID NO: 258127 - RNA, 19 nt, Homo sapiens
  misc_RNA (1)...(19): siRNA sense strand
uggaagaauugaaaguauc

SEQ ID NO: 258128 - RNA, 19 nt, Homo sapiens
  misc_RNA (1)...(19): siRNA sense strand
uaugugggcucauuacacu

SEQ ID NO: 258129 - RNA, 19 nt, Homo sapiens
  misc_RNA (1)...(19): siRNA sense strand
gccucuagcaauaggauua

SEQ ID NO: 258130 - RNA, 19 nt, Homo sapiens
  misc_RNA (1)...(19): siRNA sense strand
gcaauguguaugugaagug

SEQ ID NO: 258131 - RNA, 19 nt, Homo sapiens
  misc_RNA (1)...(19): siRNA sense strand
ugaugugauugaagaaugu

SEQ ID NO: 258132 - RNA, 19 nt, Homo sapiens
  misc_RNA (1)...(19): siRNA sense strand
gagauuaaggaugauguga

SEQ ID NO: 258133 - RNA, 19 nt, Homo sapiens
  misc_RNA (1)...(19): siRNA sense strand
cagcaagcucuacagauga

SEQ ID NO: 258134 - RNA, 19 nt, Homo sapiens
  misc_RNA (1)...(19): siRNA sense strand
ugacucagaaugugccaaa

SEQ ID NO: 258135 - RNA, 19 nt, Homo sapiens
  misc_RNA (1)...(19): siRNA sense strand
cucauuacacuucaacaua

SEQ ID NO: 258136 - RNA, 19 nt, Homo sapiens
  misc_RNA (1)...(19): siRNA sense strand
gagaugugaggaugauuuc

SEQ ID NO: 258137 - RNA, 19 nt, Homo sapiens
  misc_RNA (1)...(19): siRNA sense strand
gaugugaggaugauuucug

SEQ ID NO: 258138 - RNA, 19 nt, Homo sapiens
  misc_RNA (1)...(19): siRNA sense strand
acacaauguuuccaacucu

SEQ ID NO: 258139 - RNA, 19 nt, Homo sapiens
  misc_RNA (1)...(19): siRNA sense strand
guacagguuugcagauucc

SEQ ID NO: 258140 - RNA, 19 nt, Homo sapiens
  misc_RNA (1)...(19): siRNA sense strand
uucaagacguuccaaagga

SEQ ID NO: 258141 - RNA, 19 nt, Homo sapiens
  misc_RNA (1)...(19): siRNA sense strand
aaauucagcucagggcaau

SEQ ID NO: 258142 - RNA, 19 nt, Homo sapiens
  misc_RNA (1)...(19): siRNA sense strand
uuccaacucucuaacaugu

SEQ ID NO: 258143 - RNA, 19 nt, Homo sapiens
  misc_RNA (1)...(19): siRNA sense strand
ggaacaacuggucgucuuc

SEQ ID NO: 258144 - RNA, 19 nt, Homo sapiens
  misc_RNA (1)...(19): siRNA sense strand
gaugauggacagugaaacu

SEQ ID NO: 258145 - RNA, 19 nt, Homo sapiens
  misc_RNA (1)...(19): siRNA sense strand
ggcaggugguuugcuggua

SEQ ID NO: 258146 - RNA, 19 nt, Homo sapiens
  misc_RNA (1)...(19): siRNA sense strand
gagcugcagcaauggcaaa

SEQ ID NO: 258147 - RNA, 19 nt, Homo sapiens
  misc_RNA (1)...(19): siRNA sense strand
gaauugcuuauguggaguu

SEQ ID NO: 258148 - RNA, 19 nt, Homo sapiens
  misc_RNA (1)...(19): siRNA sense strand
caacuuaauggauuugaac

SEQ ID NO: 258149 - RNA, 19 nt, Homo sapiens
  misc_RNA (1)...(19): siRNA sense strand
cagcucagggcaaugugua

SEQ ID NO: 258150 - RNA, 19 nt, Homo sapiens
  misc_RNA (1)...(19): siRNA sense strand
caggugguuugcugguaaa

SEQ ID NO: 258151 - RNA, 19 nt, Homo sapiens
  misc_RNA (1)...(19): siRNA sense strand
gcaauggcaaacaauuuac

SEQ ID NO: 258152 - RNA, 19 nt, Homo sapiens
  misc_RNA (1)...(19): siRNA sense strand
gaagugcccaucaauugcu

SEQ ID NO: 258153 - RNA, 19 nt, Homo sapiens
  misc_RNA (1)...(19): siRNA sense strand
aaaggacuggaauugauuu

SEQ ID NO: 258154 - RNA, 19 nt, Homo sapiens
  misc_RNA (1)...(19): siRNA sense strand
gaaauucaagacguuccaa

SEQ ID NO: 258155 - RNA, 19 nt, Homo sapiens
  misc_RNA (1)...(19): siRNA sense strand
caggaagaccaaugaaagu

SEQ ID NO: 258156 - RNA, 19 nt, Homo sapiens
  misc_RNA (1)...(19): siRNA sense strand
uugcagaggguacagguuu

SEQ ID NO: 258157 - RNA, 19 nt, Homo sapiens
  misc_RNA (1)...(19): siRNA sense strand
uucgagugcuaguucauuu

SEQ ID NO: 258158 - RNA, 19 nt, Homo sapiens
  misc_RNA (1)...(19): siRNA sense strand
gaacacagauuccagaaca

SEQ ID NO: 258159 - RNA, 19 nt, Homo sapiens
  misc_RNA (1)...(19): siRNA sense strand
caaggaaacugagagauuu

SEQ ID NO: 258160 - RNA, 19 nt, Homo sapiens
  misc_RNA (1)...(19): siRNA sense strand
gaacaucgacuuugcagaa

SEQ ID NO: 258161 - RNA, 19 nt, Homo sapiens
  misc_RNA (1)...(19): siRNA sense strand
cagaagaacugaacguauu

SEQ ID NO: 258162 - RNA, 19 nt, Homo sapiens
  misc_RNA (1)...(19): siRNA sense strand
ggagaacacuaaagaaugg

SEQ ID NO: 258163 - RNA, 19 nt, Homo sapiens
  misc_RNA (1)...(19): siRNA sense strand
gaagagcagugaugguuuc

SEQ ID NO: 258164 - RNA, 19 nt, Homo sapiens
  misc_RNA (1)...(19): siRNA sense strand
aaccacagcuuguuacuuu

SEQ ID NO: 258165 - RNA, 19 nt, Homo sapiens
  misc_RNA (1)...(19): siRNA sense strand
gaacugagccaccaugagu

SEQ ID NO: 258166 - RNA, 19 nt, Homo sapiens
  misc_RNA (1)...(19): siRNA sense strand
gcagugaugguuuccaaua

SEQ ID NO: 258167 - RNA, 19 nt, Homo sapiens
  misc_RNA (1)...(19): siRNA sense strand
gcauagaccugccacucuu

SEQ ID NO: 258168 - RNA, 19 nt, Homo sapiens
  misc_RNA (1)...(19): siRNA sense strand
uggaguggcugaccaagua

SEQ ID NO: 258169 - RNA, 19 nt, Homo sapiens
  misc_RNA (1)...(19): siRNA sense strand
gaacuauucuagagugaag

SEQ ID NO: 258170 - RNA, 19 nt, Homo sapiens
  misc_RNA (1)...(19): siRNA sense strand
gaaacaugaagucaagaua

SEQ ID NO: 258171 - RNA, 19 nt, Homo sapiens
  misc_RNA (1)...(19): siRNA sense strand
gcucagcaguggauuucua

SEQ ID NO: 258172 - RNA, 19 nt, Homo sapiens
  misc_RNA (1)...(19): siRNA sense strand
guacacauuuccugcagaa

SEQ ID NO: 258173 - RNA, 19 nt, Homo sapiens
  misc_RNA (1)...(19): siRNA sense strand
gcugguggcuauucauauu

SEQ ID NO: 258174 - RNA, 19 nt, Homo sapiens
  misc_RNA (1)...(19): siRNA sense strand
ggagaugaucgaaauauug

SEQ ID NO: 258175 - RNA, 19 nt, Homo sapiens
  misc_RNA (1)...(19): siRNA sense strand
gagaugaucgaaauauuga

SEQ ID NO: 258176 - RNA, 19 nt, Homo sapiens
  misc_RNA (1)...(19): siRNA sense strand
uagaaguccugaaacauga

SEQ ID NO: 258177 - RNA, 19 nt, Homo sapiens
  misc_RNA (1)...(19): siRNA sense strand
gagcagugaugguuuccaa

SEQ ID NO: 258178 - RNA, 19 nt, Homo sapiens
  misc_RNA (1)...(19): siRNA sense strand
gaacguauuccaugaacga

SEQ ID NO: 258179 - RNA, 19 nt, Homo sapiens
  misc_RNA (1)...(19): siRNA sense strand
agaagcaucucaacaggaa

SEQ ID NO: 258180 - RNA, 19 nt, Homo sapiens
  misc_RNA (1)...(19): siRNA sense strand
agacguggcugguggcuau

SEQ ID NO: 258181 - RNA, 19 nt, Homo sapiens
  misc_RNA (1)...(19): siRNA sense strand
cuaccucucugcagaagaa

SEQ ID NO: 258182 - RNA, 19 nt, Homo sapiens
  misc_RNA (1)...(19): siRNA sense strand
agaaguauauaccagaguu

SEQ ID NO: 258183 - RNA, 19 nt, Homo sapiens
  misc_RNA (1)...(19): siRNA sense strand
ucuaggagaugaucgaaau

SEQ ID NO: 258184 - RNA, 19 nt, Homo sapiens
  misc_RNA (1)...(19): siRNA sense strand
gcagaagaacugaacguau

SEQ ID NO: 258185 - RNA, 19 nt, Homo sapiens
  misc_RNA (1)...(19): siRNA sense strand
ucaaggaaacugagagauu

SEQ ID NO: 258186 - RNA, 19 nt, Homo sapiens
  misc_RNA (1)...(19): siRNA sense strand
cagacuagcuacucuugga

SEQ ID NO: 258187 - RNA, 19 nt, Homo sapiens
  misc_RNA (1)...(19): siRNA sense strand
gaaugacacuuuuccagaa

SEQ ID NO: 258188 - RNA, 19 nt, Homo sapiens
  misc_RNA (1)...(19): siRNA sense strand
gcacauucagagccauaua

SEQ ID NO: 258189 - RNA, 19 nt, Homo sapiens
  misc_RNA (1)...(19): siRNA sense strand
caucgacuuugcagaagaa

SEQ ID NO: 258190 - RNA, 19 nt, Homo sapiens
  misc_RNA (1)...(19): siRNA sense strand
gcaaucagaagagcaguga

SEQ ID NO: 258191 - RNA, 19 nt, Homo sapiens
  misc_RNA (1)...(19): siRNA sense strand
caagccgugugaaauaaga

SEQ ID NO: 258192 - RNA, 19 nt, Homo sapiens
  misc_RNA (1)...(19): siRNA sense strand
cagaaaugcuccaaaagaa

SEQ ID NO: 258193 - RNA, 19 nt, Homo sapiens
  misc_RNA (1)...(19): siRNA sense strand
gcauccgacucucccauug

SEQ ID NO: 258194 - RNA, 19 nt, Homo sapiens
  misc_RNA (1)...(19): siRNA sense strand
gaagugggcaaggaauuug

SEQ ID NO: 258195 - RNA, 19 nt, Homo sapiens
  misc_RNA (1)...(19): siRNA sense strand
gaucaaggaaacugagaga

SEQ ID NO: 258196 - RNA, 19 nt, Homo sapiens
  misc_RNA (1)...(19): siRNA sense strand
gaaacugagagauuugugu

SEQ ID NO: 258197 - RNA, 19 nt, Homo sapiens
  misc_RNA (1)...(19): siRNA sense strand
ugagagauuugugucagaa

SEQ ID NO: 258198 - RNA, 19 nt, Homo sapiens
  misc_RNA (1)...(19): siRNA sense strand
gccaaagaauggugcuuca

SEQ ID NO: 258199 - RNA, 19 nt, Homo sapiens
  misc_RNA (1)...(19): siRNA sense strand
uugcaacaauucacacuga

SEQ ID NO: 258200 - RNA, 19 nt, Homo sapiens
  misc_RNA (1)...(19): siRNA sense strand
cagaagagcagugaugguu

SEQ ID NO: 258201 - RNA, 19 nt, Homo sapiens
  misc_RNA (1)...(19): siRNA sense strand
caggagaacacuaaagaau

SEQ ID NO: 258202 - RNA, 19 nt, Homo sapiens
  misc_RNA (1)...(19): siRNA sense strand
ccugaaacaugaagucaag

SEQ ID NO: 258203 - RNA, 19 nt, Homo sapiens
  misc_RNA (1)...(19): siRNA sense strand
gcacacugucccaauucua

SEQ ID NO: 258204 - RNA, 19 nt, Homo sapiens
  misc_RNA (1)...(19): siRNA sense strand
uugccgacauuacagauaa

SEQ ID NO: 258205 - RNA, 19 nt, Homo sapiens
  misc_RNA (1)...(19): siRNA sense strand
cagugaugguuuccaauau

SEQ ID NO: 258206 - RNA, 19 nt, Homo sapiens
  misc_RNA (1)...(19): siRNA sense strand
cuagaaguccugaaacaug

SEQ ID NO: 258207 - RNA, 19 nt, Homo sapiens
  misc_RNA (1)...(19): siRNA sense strand
caaagaauggugcuucaag

SEQ ID NO: 258208 - RNA, 19 nt, Homo sapiens
  misc_RNA (1)...(19): siRNA sense strand
ggagaccacugaggaaucg

SEQ ID NO: 258209 - RNA, 19 nt, Homo sapiens
  misc_RNA (1)...(19): siRNA sense strand
ugacucaucucugcuccuu

SEQ ID NO: 258210 - RNA, 19 nt, Homo sapiens
  misc_RNA (1)...(19): siRNA sense strand
ucagagccauauaagugaa

SEQ ID NO: 258211 - RNA, 19 nt, Homo sapiens
  misc_RNA (1)...(19): siRNA sense strand
ggauuugaaugacacuuuu

SEQ ID NO: 258212 - RNA, 19 nt, Homo sapiens
  misc_RNA (1)...(19): siRNA sense strand
aaacaugaagucaagauag

SEQ ID NO: 258213 - RNA, 19 nt, Homo sapiens
  misc_RNA (1)...(19): siRNA sense strand
agauagggcuggguacaga

SEQ ID NO: 258214 - RNA, 19 nt, Homo sapiens
  misc_RNA (1)...(19): siRNA sense strand
ugaagugggcaaggaauuu

SEQ ID NO: 258215 - RNA, 19 nt, Homo sapiens
  misc_RNA (1)...(19): siRNA sense strand
caaggagaccacugaggaa

SEQ ID NO: 258216 - RNA, 19 nt, Homo sapiens
  misc_RNA (1)...(19): siRNA sense strand
aggagaugaucgaaauauu

SEQ ID NO: 258217 - RNA, 19 nt, Homo sapiens
  misc_RNA (1)...(19): siRNA sense strand
gcagaagaaguauauacca

SEQ ID NO: 258218 - RNA, 19 nt, Homo sapiens
  misc_RNA (1)...(19): siRNA sense strand
cacacugucccaauucuaa

SEQ ID NO: 258219 - RNA, 19 nt, Homo sapiens
  misc_RNA (1)...(19): siRNA sense strand
gaaguauauaccagaguug

SEQ ID NO: 258220 - RNA, 19 nt, Homo sapiens
  misc_RNA (1)...(19): siRNA sense strand
guauauaccagaguuguca

SEQ ID NO: 258221 - RNA, 19 nt, Homo sapiens
  misc_RNA (1)...(19): siRNA sense strand
cagaaguuccucuaucuag

SEQ ID NO: 258222 - RNA, 19 nt, Homo sapiens
  misc_RNA (1)...(19): siRNA sense strand
ccagaaguuccucuaucua

SEQ ID NO: 258223 - RNA, 19 nt, Homo sapiens
  misc_RNA (1)...(19): siRNA sense strand
gagccaccaugaguucuuc

SEQ ID NO: 258224 - RNA, 19 nt, Homo sapiens
  misc_RNA (1)...(19): siRNA sense strand
cacauucagagccauauaa

SEQ ID NO: 258225 - RNA, 19 nt, Homo sapiens
  misc_RNA (1)...(19): siRNA sense strand
agagugaagcccauaguga

SEQ ID NO: 258226 - RNA, 19 nt, Homo sapiens
  misc_RNA (1)...(19): siRNA sense strand
gagaacugagccaccauga

SEQ ID NO: 258227 - RNA, 19 nt, Homo sapiens
  misc_RNA (1)...(19): siRNA sense strand
gucaggagaacacuaaaga

SEQ ID NO: 258228 - RNA, 19 nt, Homo sapiens
  misc_RNA (1)...(19): siRNA sense strand
gcugaccaaguacacauuu

SEQ ID NO: 258229 - RNA, 19 nt, Homo sapiens
  misc_RNA (1)...(19): siRNA sense strand
ugucagaaaugcuccaaaa

SEQ ID NO: 258230 - RNA, 19 nt, Homo sapiens
  misc_RNA (1)...(19): siRNA sense strand
gagcgacagcggcaaaaua

SEQ ID NO: 258231 - RNA, 19 nt, Homo sapiens
  misc_RNA (1)...(19): siRNA sense strand
guugucaggagaacacuaa

SEQ ID NO: 258232 - RNA, 19 nt, Homo sapiens
  misc_RNA (1)...(19): siRNA sense strand
ugaaguugaagcugugaaa

SEQ ID NO: 258233 - RNA, 19 nt, Homo sapiens
  misc_RNA (1)...(19): siRNA sense strand
gaugaucgaaauauugaag

SEQ ID NO: 258234 - RNA, 19 nt, Homo sapiens
  misc_RNA (1)...(19): siRNA sense strand
agaagaagcaucucaacag

SEQ ID NO: 258235 - RNA, 19 nt, Homo sapiens
  misc_RNA (1)...(19): siRNA sense strand
ugacaaauaagacagugau

SEQ ID NO: 258236 - RNA, 19 nt, Homo sapiens
  misc_RNA (1)...(19): siRNA sense strand
ccacugaggaaucgaucaa

SEQ ID NO: 258237 - RNA, 19 nt, Homo sapiens
  misc_RNA (1)...(19): siRNA sense strand
cgaaauauugaagagguuu

SEQ ID NO: 258238 - RNA, 19 nt, Homo sapiens
  misc_RNA (1)...(19): siRNA sense strand
ggugagauuggaaacuuug

SEQ ID NO: 258239 - RNA, 19 nt, Homo sapiens
  misc_RNA (1)...(19): siRNA sense strand
ugaaaaucgugaugaaguu

SEQ ID NO: 258240 - RNA, 19 nt, Homo sapiens
  misc_RNA (1)...(19): siRNA sense strand
ggugaacugggcaacauug

SEQ ID NO: 258241 - RNA, 19 nt, Homo sapiens
  misc_RNA (1)...(19): siRNA sense strand
ugaggaaucgaucaaggaa

SEQ ID NO: 258242 - RNA, 19 nt, Homo sapiens
  misc_RNA (1)...(19): siRNA sense strand
cuauucauauuccaugcuu

SEQ ID NO: 258243 - RNA, 19 nt, Homo sapiens
  misc_RNA (1)...(19): siRNA sense strand
aaaucgugaugaaguugaa

SEQ ID NO: 258244 - RNA, 19 nt, Homo sapiens
  misc_RNA (1)...(19): siRNA sense strand
auucagagccauauaagug

SEQ ID NO: 258245 - RNA, 19 nt, Homo sapiens
  misc_RNA (1)...(19): siRNA sense strand
cauccaugccucucaguau

SEQ ID NO: 258246 - RNA, 19 nt, Homo sapiens
  misc_RNA (1)...(19): siRNA sense strand
uccagaaguuccucuaucu

SEQ ID NO: 258247 - RNA, 19 nt, Homo sapiens
  misc_RNA (1)...(19): siRNA sense strand
cugaggcuguuauccagaa

SEQ ID NO: 258248 - RNA, 19 nt, Homo sapiens
  misc_RNA (1)...(19): siRNA sense strand
gagauuggaaacuuugaag

SEQ ID NO: 258249 - RNA, 19 nt, Homo sapiens
  misc_RNA (1)...(19): siRNA sense strand
aggaaucgaucaaggaaac

SEQ ID NO: 258250 - RNA, 19 nt, Homo sapiens
  misc_RNA (1)...(19): siRNA sense strand
ucgaaauauugaagagguu

SEQ ID NO: 258251 - RNA, 19 nt, Homo sapiens
  misc_RNA (1)...(19): siRNA sense strand
cuucaugccugggcugguu

SEQ ID NO: 258252 - RNA, 19 nt, Homo sapiens
  misc_RNA (1)...(19): siRNA sense strand
uagaagaagcaucucaaca

SEQ ID NO: 258253 - RNA, 19 nt, Homo sapiens
  misc_RNA (1)...(19): siRNA sense strand
acacauuuccugcagaaca

SEQ ID NO: 258254 - RNA, 19 nt, Homo sapiens
  misc_RNA (1)...(19): siRNA sense strand
gaaaagccucacccucaaa

SEQ ID NO: 258255 - RNA, 19 nt, Homo sapiens
  misc_RNA (1)...(19): siRNA sense strand
agaagagcagugaugguuu

SEQ ID NO: 258256 - RNA, 19 nt, Homo sapiens
  misc_RNA (1)...(19): siRNA sense strand
gagagauuugugucagaaa

SEQ ID NO: 258257 - RNA, 19 nt, Homo sapiens
  misc_RNA (1)...(19): siRNA sense strand
uaggagaugaucgaaauau

SEQ ID NO: 258258 - RNA, 19 nt, Homo sapiens
  misc_RNA (1)...(19): siRNA sense strand
gaaacuaugugcgggauga

SEQ ID NO: 258259 - RNA, 19 nt, Homo sapiens
  misc_RNA (1)...(19): siRNA sense strand
ggagcuggaaguacaagua

SEQ ID NO: 258260 - RNA, 19 nt, Homo sapiens
  misc_RNA (1)...(19): siRNA sense strand
ugaucuaccugcacacuug

SEQ ID NO: 258261 - RNA, 19 nt, Homo sapiens
  misc_RNA (1)...(19): siRNA sense strand
ggccaccguuucugcgaua

SEQ ID NO: 258262 - RNA, 19 nt, Homo sapiens
  misc_RNA (1)...(19): siRNA sense strand
gcuggaaguacaaguauug

SEQ ID NO: 258263 - RNA, 19 nt, Homo sapiens
  misc_RNA (1)...(19): siRNA sense strand
cauccgugcugcuguugaa

SEQ ID NO: 258264 - RNA, 19 nt, Homo sapiens
  misc_RNA (1)...(19): siRNA sense strand
gagcuggaaguacaaguau

SEQ ID NO: 258265 - RNA, 19 nt, Homo sapiens
  misc_RNA (1)...(19): siRNA sense strand
gucauucccugcccuaauc

SEQ ID NO: 258266 - RNA, 19 nt, Homo sapiens
  misc_RNA (1)...(19): siRNA sense strand
ccuaaucgcugccccauga

SEQ ID NO: 258267 - RNA, 19 nt, Homo sapiens
  misc_RNA (1)...(19): siRNA sense strand
gcgggaugaugcagucuuc

SEQ ID NO: 258268 - RNA, 19 nt, Homo sapiens
  misc_RNA (1)...(19): siRNA sense strand
gaauaccugcagcuucaau

SEQ ID NO: 258269 - RNA, 19 nt, Homo sapiens
  misc_RNA (1)...(19): siRNA sense strand
acuacaaguuccuggagaa

SEQ ID NO: 258270 - RNA, 19 nt, Homo sapiens
  misc_RNA (1)...(19): siRNA sense strand
ucucugggcuuugguuauc

SEQ ID NO: 258271 - RNA, 19 nt, Homo sapiens
  misc_RNA (1)...(19): siRNA sense strand
ggacuaugccaagaucuac

SEQ ID NO: 258272 - RNA, 19 nt, Homo sapiens
  misc_RNA (1)...(19): siRNA sense strand
cuucauccgugcugcuguu

SEQ ID NO: 258273 - RNA, 19 nt, Homo sapiens
  misc_RNA (1)...(19): siRNA sense strand
acccggagcuggaaguaca

SEQ ID NO: 258274 - RNA, 19 nt, Homo sapiens
  misc_RNA (1)...(19): siRNA sense strand
ccucuggacuaugccaaga

SEQ ID NO: 258275 - RNA, 19 nt, Homo sapiens
  misc_RNA (1)...(19): siRNA sense strand
gcgccucaagugcgaguuu

SEQ ID NO: 258276 - RNA, 19 nt, Homo sapiens
  misc_RNA (1)...(19): siRNA sense strand
gccacuacgucaucuacag

SEQ ID NO: 258277 - RNA, 19 nt, Homo sapiens
  misc_RNA (1)...(19): siRNA sense strand
uggcuucgacuacaaguuc

SEQ ID NO: 258278 - RNA, 19 nt, Homo sapiens
  misc_RNA (1)...(19): siRNA sense strand
guucucugggcuuugguua

SEQ ID NO: 258279 - RNA, 19 nt, Homo sapiens
  misc_RNA (1)...(19): siRNA sense strand
gaaacuaugugcgggauga

SEQ ID NO: 258280 - RNA, 19 nt, Homo sapiens
  misc_RNA (1)...(19): siRNA sense strand
ggagcuggaaguacaagua

SEQ ID NO: 258281 - RNA, 19 nt, Homo sapiens
  misc_RNA (1)...(19): siRNA sense strand
ugaucuaccugcacacuug

SEQ ID NO: 258282 - RNA, 19 nt, Homo sapiens
  misc_RNA (1)...(19): siRNA sense strand
ggccaccguuucugcgaua

SEQ ID NO: 258283 - RNA, 19 nt, Homo sapiens
  misc_RNA (1)...(19): siRNA sense strand
gcuggaaguacaaguauug

SEQ ID NO: 258284 - RNA, 19 nt, Homo sapiens
  misc_RNA (1)...(19): siRNA sense strand
cauccgugcugcuguugaa

SEQ ID NO: 258285 - RNA, 19 nt, Homo sapiens
  misc_RNA (1)...(19): siRNA sense strand
gagcuggaaguacaaguau

SEQ ID NO: 258286 - RNA, 19 nt, Homo sapiens
  misc_RNA (1)...(19): siRNA sense strand
gucauucccugcccuaauc

SEQ ID NO: 258287 - RNA, 19 nt, Homo sapiens
  misc_RNA (1)...(19): siRNA sense strand
ccuaaucgcugccccauga

SEQ ID NO: 258288 - RNA, 19 nt, Homo sapiens
  misc_RNA (1)...(19): siRNA sense strand
gcgggaugaugcagucuuc

SEQ ID NO: 258289 - RNA, 19 nt, Homo sapiens
  misc_RNA (1)...(19): siRNA sense strand
gaauaccugcagcuucaau

SEQ ID NO: 258290 - RNA, 19 nt, Homo sapiens
  misc_RNA (1)...(19): siRNA sense strand
acuacaaguuccuggagaa

SEQ ID NO: 258291 - RNA, 19 nt, Homo sapiens
  misc_RNA (1)...(19): siRNA sense strand
ucucugggcuuugguuauc

SEQ ID NO: 258292 - RNA, 19 nt, Homo sapiens
  misc_RNA (1)...(19): siRNA sense strand
ggacuaugccaagaucuac

SEQ ID NO: 258293 - RNA, 19 nt, Homo sapiens
  misc_RNA (1)...(19): siRNA sense strand
cuucauccgugcugcuguu

SEQ ID NO: 258294 - RNA, 19 nt, Homo sapiens
  misc_RNA (1)...(19): siRNA sense strand
acccggagcuggaaguaca

SEQ ID NO: 258295 - RNA, 19 nt, Homo sapiens
  misc_RNA (1)...(19): siRNA sense strand
ccucuggacuaugccaaga

SEQ ID NO: 258296 - RNA, 19 nt, Homo sapiens
  misc_RNA (1)...(19): siRNA sense strand
gcgccucaagugcgaguuu

SEQ ID NO: 258297 - RNA, 19 nt, Homo sapiens
  misc_RNA (1)...(19): siRNA sense strand
gccacuacgucaucuacag

SEQ ID NO: 258298 - RNA, 19 nt, Homo sapiens
  misc_RNA (1)...(19): siRNA sense strand
uggcuucgacuacaaguuc

SEQ ID NO: 258299 - RNA, 19 nt, Homo sapiens
  misc_RNA (1)...(19): siRNA sense strand
guucucugggcuuugguua

SEQ ID NO: 258300 - RNA, 19 nt, Homo sapiens
  misc_RNA (1)...(19): siRNA sense strand
uaaagaagcuccaaaccua

SEQ ID NO: 258301 - RNA, 19 nt, Homo sapiens
  misc_RNA (1)...(19): siRNA sense strand
uaaaggaaaugguaacuga

SEQ ID NO: 258302 - RNA, 19 nt, Homo sapiens
  misc_RNA (1)...(19): siRNA sense strand
gaccagccauucuauauuu

SEQ ID NO: 258303 - RNA, 19 nt, Homo sapiens
  misc_RNA (1)...(19): siRNA sense strand
ggagauaaaggacaauaua

SEQ ID NO: 258304 - RNA, 19 nt, Homo sapiens
  misc_RNA (1)...(19): siRNA sense strand
ccacucguauuacuguuua

SEQ ID NO: 258305 - RNA, 19 nt, Homo sapiens
  misc_RNA (1)...(19): siRNA sense strand
caaggaauccauuguguuu

SEQ ID NO: 258306 - RNA, 19 nt, Homo sapiens
  misc_RNA (1)...(19): siRNA sense strand
ccaaugaccuacaaaucaa

SEQ ID NO: 258307 - RNA, 19 nt, Homo sapiens
  misc_RNA (1)...(19): siRNA sense strand
gaugaucccuauacacuuc

SEQ ID NO: 258308 - RNA, 19 nt, Homo sapiens
  misc_RNA (1)...(19): siRNA sense strand
ccaggcagaugucauaguu

SEQ ID NO: 258309 - RNA, 19 nt, Homo sapiens
  misc_RNA (1)...(19): siRNA sense strand
gggaguauuugaugaguau

SEQ ID NO: 258310 - RNA, 19 nt, Homo sapiens
  misc_RNA (1)...(19): siRNA sense strand
ccaaacuucuuguugacua

SEQ ID NO: 258311 - RNA, 19 nt, Homo sapiens
  misc_RNA (1)...(19): siRNA sense strand
gagcuuauuucaggaaugu

SEQ ID NO: 258312 - RNA, 19 nt, Homo sapiens
  misc_RNA (1)...(19): siRNA sense strand
caaacuucuuguugacuaa

SEQ ID NO: 258313 - RNA, 19 nt, Homo sapiens
  misc_RNA (1)...(19): siRNA sense strand
cuaauaacuuggcuaccua

SEQ ID NO: 258314 - RNA, 19 nt, Homo sapiens
  misc_RNA (1)...(19): siRNA sense strand
ccaaacaaagagcuuauuu

SEQ ID NO: 258315 - RNA, 19 nt, Homo sapiens
  misc_RNA (1)...(19): siRNA sense strand
ccuauacacuucaauaugg

SEQ ID NO: 258316 - RNA, 19 nt, Homo sapiens
  misc_RNA (1)...(19): siRNA sense strand
guacauuuaucccaaagag

SEQ ID NO: 258317 - RNA, 19 nt, Homo sapiens
  misc_RNA (1)...(19): siRNA sense strand
ggaccagccauucuauauu

SEQ ID NO: 258318 - RNA, 19 nt, Homo sapiens
  misc_RNA (1)...(19): siRNA sense strand
auacggagaugaucccuau

SEQ ID NO: 258319 - RNA, 19 nt, Homo sapiens
  misc_RNA (1)...(19): siRNA sense strand
cauaguugcugaucuuuac

SEQ ID NO: 258320 - RNA, 19 nt, Homo sapiens
  misc_RNA (1)...(19): siRNA sense strand
gccaaggaauccauugugu

SEQ ID NO: 258321 - RNA, 19 nt, Homo sapiens
  misc_RNA (1)...(19): siRNA sense strand
ucacugguaacuuugaaua

SEQ ID NO: 258322 - RNA, 19 nt, Homo sapiens
  misc_RNA (1)...(19): siRNA sense strand
gagaugaucccuauacacu

SEQ ID NO: 258323 - RNA, 19 nt, Homo sapiens
  misc_RNA (1)...(19): siRNA sense strand
ugucauaguugcugaucuu

SEQ ID NO: 258324 - RNA, 19 nt, Homo sapiens
  misc_RNA (1)...(19): siRNA sense strand
gcaauuaaucccaguguac

SEQ ID NO: 258325 - RNA, 19 nt, Homo sapiens
  misc_RNA (1)...(19): siRNA sense strand
aaacacuacugaagcaaca

SEQ ID NO: 258326 - RNA, 19 nt, Homo sapiens
  misc_RNA (1)...(19): siRNA sense strand
gccucgagguaaaguauuu

SEQ ID NO: 258327 - RNA, 19 nt, Homo sapiens
  misc_RNA (1)...(19): siRNA sense strand
acaagauguuccacucgua

SEQ ID NO: 258328 - RNA, 19 nt, Homo sapiens
  misc_RNA (1)...(19): siRNA sense strand
caaacaaagagcuuauuuc

SEQ ID NO: 258329 - RNA, 19 nt, Homo sapiens
  misc_RNA (1)...(19): siRNA sense strand
aggaauccauuguguuuau

SEQ ID NO: 258330 - RNA, 19 nt, Homo sapiens
  misc_RNA (1)...(19): siRNA sense strand
uaacugaagcaucuacuca

SEQ ID NO: 258331 - RNA, 19 nt, Homo sapiens
  misc_RNA (1)...(19): siRNA sense strand
ggaauccauuguguuuaug

SEQ ID NO: 258332 - RNA, 19 nt, Homo sapiens
  misc_RNA (1)...(19): siRNA sense strand
acuccaaacuucuuguuga

SEQ ID NO: 258333 - RNA, 19 nt, Homo sapiens
  misc_RNA (1)...(19): siRNA sense strand
uggacaauguggagauaaa

SEQ ID NO: 258334 - RNA, 19 nt, Homo sapiens
  misc_RNA (1)...(19): siRNA sense strand
uugaaaagcucacugguaa

SEQ ID NO: 258335 - RNA, 19 nt, Homo sapiens
  misc_RNA (1)...(19): siRNA sense strand
ucucucgccuguauugaaa

SEQ ID NO: 258336 - RNA, 19 nt, Homo sapiens
  misc_RNA (1)...(19): siRNA sense strand
uugcugaucuuuaccugaa

SEQ ID NO: 258337 - RNA, 19 nt, Homo sapiens
  misc_RNA (1)...(19): siRNA sense strand
gcucacugguaacuuugaa

SEQ ID NO: 258338 - RNA, 19 nt, Homo sapiens
  misc_RNA (1)...(19): siRNA sense strand
aaugguaacugaagcaucu

SEQ ID NO: 258339 - RNA, 19 nt, Homo sapiens
  misc_RNA (1)...(19): siRNA sense strand
aagaaacacuacugaagca

SEQ ID NO: 258340 - RNA, 19 nt, Homo sapiens
  misc_RNA (1)...(19): siRNA sense strand
uauggacaauguggagaua

SEQ ID NO: 258341 - RNA, 19 nt, Homo sapiens
  misc_RNA (1)...(19): siRNA sense strand
ccagaagaaacacuacuga

SEQ ID NO: 258342 - RNA, 19 nt, Homo sapiens
  misc_RNA (1)...(19): siRNA sense strand
aagaagcuccaaaccuaua

SEQ ID NO: 258343 - RNA, 19 nt, Homo sapiens
  misc_RNA (1)...(19): siRNA sense strand
uaauuccaaugaccuacaa

SEQ ID NO: 258344 - RNA, 19 nt, Homo sapiens
  misc_RNA (1)...(19): siRNA sense strand
gcuuauuucaggaauguaa

SEQ ID NO: 258345 - RNA, 19 nt, Homo sapiens
  misc_RNA (1)...(19): siRNA sense strand
ggaaaugguaacugaagca

SEQ ID NO: 258346 - RNA, 19 nt, Homo sapiens
  misc_RNA (1)...(19): siRNA sense strand
gaucccagacugccaagga

SEQ ID NO: 258347 - RNA, 19 nt, Homo sapiens
  misc_RNA (1)...(19): siRNA sense strand
caagauguuccacucguau

SEQ ID NO: 258348 - RNA, 19 nt, Homo sapiens
  misc_RNA (1)...(19): siRNA sense strand
cuuguugacuaauaacuug

SEQ ID NO: 258349 - RNA, 19 nt, Homo sapiens
  misc_RNA (1)...(19): siRNA sense strand
gcugaucuuuaccugaaau

SEQ ID NO: 258350 - RNA, 19 nt, Homo sapiens
  misc_RNA (1)...(19): siRNA sense strand
cauaugaccaggcagaugu

SEQ ID NO: 258351 - RNA, 19 nt, Homo sapiens
  misc_RNA (1)...(19): siRNA sense strand
ccaccaaacaaagagcuua

SEQ ID NO: 258352 - RNA, 19 nt, Homo sapiens
  misc_RNA (1)...(19): siRNA sense strand
ggauaugauggcauuguga

SEQ ID NO: 258353 - RNA, 19 nt, Homo sapiens
  misc_RNA (1)...(19): siRNA sense strand
cuaugggccucgagguaaa

SEQ ID NO: 258354 - RNA, 19 nt, Homo sapiens
  misc_RNA (1)...(19): siRNA sense strand
cagaagaaacacuacugaa

SEQ ID NO: 258355 - RNA, 19 nt, Homo sapiens
  misc_RNA (1)...(19): siRNA sense strand
uugcuucucucgccuguau

SEQ ID NO: 258356 - RNA, 19 nt, Homo sapiens
  misc_RNA (1)...(19): siRNA sense strand
caauaaagaagcuccaaac

SEQ ID NO: 258357 - RNA, 19 nt, Homo sapiens
  misc_RNA (1)...(19): siRNA sense strand
ccaaggaauccauuguguu

SEQ ID NO: 258358 - RNA, 19 nt, Homo sapiens
  misc_RNA (1)...(19): siRNA sense strand
guauuacuguuuacauggu

SEQ ID NO: 258359 - RNA, 19 nt, Homo sapiens
  misc_RNA (1)...(19): siRNA sense strand
ucauaguugcugaucuuua

SEQ ID NO: 258360 - RNA, 19 nt, Homo sapiens
  misc_RNA (1)...(19): siRNA sense strand
gauaugauggcauugugau

SEQ ID NO: 258361 - RNA, 19 nt, Homo sapiens
  misc_RNA (1)...(19): siRNA sense strand
uccaaugaccuacaaauca

SEQ ID NO: 258362 - RNA, 19 nt, Homo sapiens
  misc_RNA (1)...(19): siRNA sense strand
agauguuccacucguauua

SEQ ID NO: 258363 - RNA, 19 nt, Homo sapiens
  misc_RNA (1)...(19): siRNA sense strand
agaagaaacacuacugaag

SEQ ID NO: 258364 - RNA, 19 nt, Homo sapiens
  misc_RNA (1)...(19): siRNA sense strand
uccauuguguuuaugcaaa

SEQ ID NO: 258365 - RNA, 19 nt, Homo sapiens
  misc_RNA (1)...(19): siRNA sense strand
caucuacucaccuguuuca

SEQ ID NO: 258366 - RNA, 19 nt, Homo sapiens
  misc_RNA (1)...(19): siRNA sense strand
uaugauggcauugugauug

SEQ ID NO: 258367 - RNA, 19 nt, Homo sapiens
  misc_RNA (1)...(19): siRNA sense strand
cuauacacuucaauaugga

SEQ ID NO: 258368 - RNA, 19 nt, Homo sapiens
  misc_RNA (1)...(19): siRNA sense strand
ucguauuacuguuuacaug

SEQ ID NO: 258369 - RNA, 19 nt, Homo sapiens
  misc_RNA (1)...(19): siRNA sense strand
cuacugaagcaacaagaug

SEQ ID NO: 258370 - RNA, 19 nt, Homo sapiens
  misc_RNA (1)...(19): siRNA sense strand
cugguaacuuugaauaaca

SEQ ID NO: 258371 - RNA, 19 nt, Homo sapiens
  misc_RNA (1)...(19): siRNA sense strand
ccuaugggccucgagguaa

SEQ ID NO: 258372 - RNA, 19 nt, Homo sapiens
  misc_RNA (1)...(19): siRNA sense strand
ugcaauuaaucccagugua

SEQ ID NO: 258373 - RNA, 19 nt, Homo sapiens
  misc_RNA (1)...(19): siRNA sense strand
cggagaugaucccuauaca

SEQ ID NO: 258374 - RNA, 19 nt, Homo sapiens
  misc_RNA (1)...(19): siRNA sense strand
aaagaagcuccaaaccuau

SEQ ID NO: 258375 - RNA, 19 nt, Homo sapiens
  misc_RNA (1)...(19): siRNA sense strand
ccaguguaccagaagauga

SEQ ID NO: 258376 - RNA, 19 nt, Homo sapiens
  misc_RNA (1)...(19): siRNA sense strand
acauuuaucccaaagagau

SEQ ID NO: 258377 - RNA, 19 nt, Homo sapiens
  misc_RNA (1)...(19): siRNA sense strand
gaaaugguaacugaagcau

SEQ ID NO: 258378 - RNA, 19 nt, Homo sapiens
  misc_RNA (1)...(19): siRNA sense strand
caaugaccuacaaaucaaa

SEQ ID NO: 258379 - RNA, 19 nt, Homo sapiens
  misc_RNA (1)...(19): siRNA sense strand
acaauaaagaagcuccaaa

SEQ ID NO: 258380 - RNA, 19 nt, Homo sapiens
  misc_RNA (1)...(19): siRNA sense strand
gggccucgagguaaaguau

SEQ ID NO: 258381 - RNA, 19 nt, Homo sapiens
  misc_RNA (1)...(19): siRNA sense strand
ggacaauguggagauaaag

SEQ ID NO: 258382 - RNA, 19 nt, Homo sapiens
  misc_RNA (1)...(19): siRNA sense strand
cugaguacuuaaucccaaa

SEQ ID NO: 258383 - RNA, 19 nt, Homo sapiens
  misc_RNA (1)...(19): siRNA sense strand
aaagagcuuauuucaggaa

SEQ ID NO: 258384 - RNA, 19 nt, Homo sapiens
  misc_RNA (1)...(19): siRNA sense strand
caguguaccagaagaugaa

SEQ ID NO: 258385 - RNA, 19 nt, Homo sapiens
  misc_RNA (1)...(19): siRNA sense strand
uggaccagccauucuauau

SEQ ID NO: 258386 - RNA, 19 nt, Homo sapiens
  misc_RNA (1)...(19): siRNA sense strand
uuucaugccaccaaacaaa

SEQ ID NO: 258387 - RNA, 19 nt, Homo sapiens
  misc_RNA (1)...(19): siRNA sense strand
uggauaugauggcauugug

SEQ ID NO: 258388 - RNA, 19 nt, Homo sapiens
  misc_RNA (1)...(19): siRNA sense strand
acacuucaauauggacaau

SEQ ID NO: 258389 - RNA, 19 nt, Homo sapiens
  misc_RNA (1)...(19): siRNA sense strand
gugauucucuuccuauccu

SEQ ID NO: 258390 - RNA, 19 nt, Homo sapiens
  misc_RNA (1)...(19): siRNA sense strand
ugacugaauuuuguacuga

SEQ ID NO: 258391 - RNA, 19 nt, Homo sapiens
  misc_RNA (1)...(19): siRNA sense strand
guggaccagccauucuaua

SEQ ID NO: 258392 - RNA, 19 nt, Homo sapiens
  misc_RNA (1)...(19): siRNA sense strand
uaaucccaguguaccagaa

SEQ ID NO: 258393 - RNA, 19 nt, Homo sapiens
  misc_RNA (1)...(19): siRNA sense strand
guggagauaaaggacaaua

SEQ ID NO: 258394 - RNA, 19 nt, Homo sapiens
  misc_RNA (1)...(19): siRNA sense strand
gucugaaggugauucucuu

SEQ ID NO: 258395 - RNA, 19 nt, Homo sapiens
  misc_RNA (1)...(19): siRNA sense strand
guacuuaaucccaaaacaa

SEQ ID NO: 258396 - RNA, 19 nt, Homo sapiens
  misc_RNA (1)...(19): siRNA sense strand
ccugaaauacggagaugau

SEQ ID NO: 258397 - RNA, 19 nt, Homo sapiens
  misc_RNA (1)...(19): siRNA sense strand
gaucuuuaccugaaauacg

SEQ ID NO: 258398 - RNA, 19 nt, Homo sapiens
  misc_RNA (1)...(19): siRNA sense strand
acuaauaacuuggcuaccu

SEQ ID NO: 258399 - RNA, 19 nt, Homo sapiens
  misc_RNA (1)...(19): siRNA sense strand
aaaggaaaugguaacugaa

SEQ ID NO: 258400 - RNA, 19 nt, Homo sapiens
  misc_RNA (1)...(19): siRNA sense strand
gagaagagauugaaagauu

SEQ ID NO: 258401 - RNA, 19 nt, Homo sapiens
  misc_RNA (1)...(19): siRNA sense strand
gaggagaccuugccuauuu

SEQ ID NO: 258402 - RNA, 19 nt, Homo sapiens
  misc_RNA (1)...(19): siRNA sense strand
gaacaucaauucacuauca

SEQ ID NO: 258403 - RNA, 19 nt, Homo sapiens
  misc_RNA (1)...(19): siRNA sense strand
gaacagaaguuucaguaau

SEQ ID NO: 258404 - RNA, 19 nt, Homo sapiens
  misc_RNA (1)...(19): siRNA sense strand
ggaauuugcugacccauuu

SEQ ID NO: 258405 - RNA, 19 nt, Homo sapiens
  misc_RNA (1)...(19): siRNA sense strand
gaugagcucuuuaguauug

SEQ ID NO: 258406 - RNA, 19 nt, Homo sapiens
  misc_RNA (1)...(19): siRNA sense strand
gcaaacagguucuggaguu

SEQ ID NO: 258407 - RNA, 19 nt, Homo sapiens
  misc_RNA (1)...(19): siRNA sense strand
gaaagaauguuaagggaau

SEQ ID NO: 258408 - RNA, 19 nt, Homo sapiens
  misc_RNA (1)...(19): siRNA sense strand
gcacagaaauuucacuuca

SEQ ID NO: 258409 - RNA, 19 nt, Homo sapiens
  misc_RNA (1)...(19): siRNA sense strand
guacauagagcucuuuaua

SEQ ID NO: 258410 - RNA, 19 nt, Homo sapiens
  misc_RNA (1)...(19): siRNA sense strand
ggaaaagccuucaaaagua

SEQ ID NO: 258411 - RNA, 19 nt, Homo sapiens
  misc_RNA (1)...(19): siRNA sense strand
ggacucagcuaugcuaauu

SEQ ID NO: 258412 - RNA, 19 nt, Homo sapiens
  misc_RNA (1)...(19): siRNA sense strand
caaauaugcugaguaauga

SEQ ID NO: 258413 - RNA, 19 nt, Homo sapiens
  misc_RNA (1)...(19): siRNA sense strand
gaaaggagaagauuuacaa

SEQ ID NO: 258414 - RNA, 19 nt, Homo sapiens
  misc_RNA (1)...(19): siRNA sense strand
ggacauaugcaguguaauu

SEQ ID NO: 258415 - RNA, 19 nt, Homo sapiens
  misc_RNA (1)...(19): siRNA sense strand
aaacagaguucguuauaug

SEQ ID NO: 258416 - RNA, 19 nt, Homo sapiens
  misc_RNA (1)...(19): siRNA sense strand
guacauugcucgagccauu

SEQ ID NO: 258417 - RNA, 19 nt, Homo sapiens
  misc_RNA (1)...(19): siRNA sense strand
guauugcccuuuauaauug

SEQ ID NO: 258418 - RNA, 19 nt, Homo sapiens
  misc_RNA (1)...(19): siRNA sense strand
gaagaucaccaccuuuaaa

SEQ ID NO: 258419 - RNA, 19 nt, Homo sapiens
  misc_RNA (1)...(19): siRNA sense strand
gaaauuuguucuccucuca

SEQ ID NO: 258420 - RNA, 19 nt, Homo sapiens
  misc_RNA (1)...(19): siRNA sense strand
acaauaacuuccacugaua

SEQ ID NO: 258421 - RNA, 19 nt, Homo sapiens
  misc_RNA (1)...(19): siRNA sense strand
gaugacagcugguguugau

SEQ ID NO: 258422 - RNA, 19 nt, Homo sapiens
  misc_RNA (1)...(19): siRNA sense strand
gaaaggauggcuguuuaua

SEQ ID NO: 258423 - RNA, 19 nt, Homo sapiens
  misc_RNA (1)...(19): siRNA sense strand
ggaacaccgucucauggua

SEQ ID NO: 258424 - RNA, 19 nt, Homo sapiens
  misc_RNA (1)...(19): siRNA sense strand
uauggaaacuucuuuguga

SEQ ID NO: 258425 - RNA, 19 nt, Homo sapiens
  misc_RNA (1)...(19): siRNA sense strand
uggaaaggauggcuguuua

SEQ ID NO: 258426 - RNA, 19 nt, Homo sapiens
  misc_RNA (1)...(19): siRNA sense strand
ggcaagauaucauagagaa

SEQ ID NO: 258427 - RNA, 19 nt, Homo sapiens
  misc_RNA (1)...(19): siRNA sense strand
gggaaucauuaaaggaaua

SEQ ID NO: 258428 - RNA, 19 nt, Homo sapiens
  misc_RNA (1)...(19): siRNA sense strand
gcaggaauuucuagacaga

SEQ ID NO: 258429 - RNA, 19 nt, Homo sapiens
  misc_RNA (1)...(19): siRNA sense strand
uauauucucuuccuacuga

SEQ ID NO: 258430 - RNA, 19 nt, Homo sapiens
  misc_RNA (1)...(19): siRNA sense strand
gagaaagaauugagugaca

SEQ ID NO: 258431 - RNA, 19 nt, Homo sapiens
  misc_RNA (1)...(19): siRNA sense strand
ccaaauaugcugaguaaug

SEQ ID NO: 258432 - RNA, 19 nt, Homo sapiens
  misc_RNA (1)...(19): siRNA sense strand
gaacugguaaaucaaagua

SEQ ID NO: 258433 - RNA, 19 nt, Homo sapiens
  misc_RNA (1)...(19): siRNA sense strand
caacucaggccacaaauau

SEQ ID NO: 258434 - RNA, 19 nt, Homo sapiens
  misc_RNA (1)...(19): siRNA sense strand
ggaugugggcuucguaaua

SEQ ID NO: 258435 - RNA, 19 nt, Homo sapiens
  misc_RNA (1)...(19): siRNA sense strand
acauugagcuccucggaua

SEQ ID NO: 258436 - RNA, 19 nt, Homo sapiens
  misc_RNA (1)...(19): siRNA sense strand
gagaagaacagaaguuuca

SEQ ID NO: 258437 - RNA, 19 nt, Homo sapiens
  misc_RNA (1)...(19): siRNA sense strand
gagaaucccagccaaguuu

SEQ ID NO: 258438 - RNA, 19 nt, Homo sapiens
  misc_RNA (1)...(19): siRNA sense strand
gaccagagauuguguacuc

SEQ ID NO: 258439 - RNA, 19 nt, Homo sapiens
  misc_RNA (1)...(19): siRNA sense strand
aggaugagcucuuuaguau

SEQ ID NO: 258440 - RNA, 19 nt, Homo sapiens
  misc_RNA (1)...(19): siRNA sense strand
gcaaucaaguggaccuuuc

SEQ ID NO: 258441 - RNA, 19 nt, Homo sapiens
  misc_RNA (1)...(19): siRNA sense strand
caggauaucugcccacuuc

SEQ ID NO: 258442 - RNA, 19 nt, Homo sapiens
  misc_RNA (1)...(19): siRNA sense strand
uacaagaacuaaaggguuu

SEQ ID NO: 258443 - RNA, 19 nt, Homo sapiens
  misc_RNA (1)...(19): siRNA sense strand
guucuggaguucuuaauga

SEQ ID NO: 258444 - RNA, 19 nt, Homo sapiens
  misc_RNA (1)...(19): siRNA sense strand
gaacagcagguuuguacuu

SEQ ID NO: 258445 - RNA, 19 nt, Homo sapiens
  misc_RNA (1)...(19): siRNA sense strand
gcacugaugaugcaauuug

SEQ ID NO: 258446 - RNA, 19 nt, Homo sapiens
  misc_RNA (1)...(19): siRNA sense strand
gaccaucgaucguucuguu

SEQ ID NO: 258447 - RNA, 19 nt, Homo sapiens
  misc_RNA (1)...(19): siRNA sense strand
gaagaagcaggacaucauu

SEQ ID NO: 258448 - RNA, 19 nt, Homo sapiens
  misc_RNA (1)...(19): siRNA sense strand
caacugaggcaucuacuug

SEQ ID NO: 258449 - RNA, 19 nt, Homo sapiens
  misc_RNA (1)...(19): siRNA sense strand
acauagagcucuuuauagu

SEQ ID NO: 258450 - RNA, 19 nt, Homo sapiens
  misc_RNA (1)...(19): siRNA sense strand
gggacaagauggacaagga

SEQ ID NO: 258451 - RNA, 19 nt, Homo sapiens
  misc_RNA (1)...(19): siRNA sense strand
gcauuaauugcuucucuua

SEQ ID NO: 258452 - RNA, 19 nt, Homo sapiens
  misc_RNA (1)...(19): siRNA sense strand
uaaaggguuugcaggaauu

SEQ ID NO: 258453 - RNA, 19 nt, Homo sapiens
  misc_RNA (1)...(19): siRNA sense strand
agagaucacugcaauugaa

SEQ ID NO: 258454 - RNA, 19 nt, Homo sapiens
  misc_RNA (1)...(19): siRNA sense strand
ggauggcuguuuauaugaa

SEQ ID NO: 258455 - RNA, 19 nt, Homo sapiens
  misc_RNA (1)...(19): siRNA sense strand
acagguugcuucuccauuu

SEQ ID NO: 258456 - RNA, 19 nt, Homo sapiens
  misc_RNA (1)...(19): siRNA sense strand
aaggauggcuguuuauaug

SEQ ID NO: 258457 - RNA, 19 nt, Homo sapiens
  misc_RNA (1)...(19): siRNA sense strand
ucuaugagcucgucaguag

SEQ ID NO: 258458 - RNA, 19 nt, Homo sapiens
  misc_RNA (1)...(19): siRNA sense strand
gauagaaugcaugcucuua

SEQ ID NO: 258459 - RNA, 19 nt, Homo sapiens
  misc_RNA (1)...(19): siRNA sense strand
cauuugggaugcaagcuua

SEQ ID NO: 258460 - RNA, 19 nt, Homo sapiens
  misc_RNA (1)...(19): siRNA sense strand
gcacagaugagauuuccaa

SEQ ID NO: 258461 - RNA, 19 nt, Homo sapiens
  misc_RNA (1)...(19): siRNA sense strand
ccaaauagcagugauugaa

SEQ ID NO: 258462 - RNA, 19 nt, Homo sapiens
  misc_RNA (1)...(19): siRNA sense strand
gcagggugguuuagccaaa

SEQ ID NO: 258463 - RNA, 19 nt, Homo sapiens
  misc_RNA (1)...(19): siRNA sense strand
gcaacucaggccacaaaua

SEQ ID NO: 258464 - RNA, 19 nt, Homo sapiens
  misc_RNA (1)...(19): siRNA sense strand
uaagauauguugagaaucc

SEQ ID NO: 258465 - RNA, 19 nt, Homo sapiens
  misc_RNA (1)...(19): siRNA sense strand
ggucauuccugggcucuuu

SEQ ID NO: 258466 - RNA, 19 nt, Homo sapiens
  misc_RNA (1)...(19): siRNA sense strand
gauuuacucuggcgguauu

SEQ ID NO: 258467 - RNA, 19 nt, Homo sapiens
  misc_RNA (1)...(19): siRNA sense strand
gggaggagauggagaagag

SEQ ID NO: 258468 - RNA, 19 nt, Homo sapiens
  misc_RNA (1)...(19): siRNA sense strand
ugcgauagaugaauugaaa

SEQ ID NO: 258469 - RNA, 19 nt, Homo sapiens
  misc_RNA (1)...(19): siRNA sense strand
gauccuauucuucaaauug

SEQ ID NO: 258470 - RNA, 19 nt, Homo sapiens
  misc_RNA (1)...(19): siRNA sense strand
gaugugggcuucguaauac

SEQ ID NO: 258471 - RNA, 19 nt, Homo sapiens
  misc_RNA (1)...(19): siRNA sense strand
cagcagguuuguacuuuga

SEQ ID NO: 258472 - RNA, 19 nt, Homo sapiens
  misc_RNA (1)...(19): siRNA sense strand
ccacugccauuucaucaau

SEQ ID NO: 258473 - RNA, 19 nt, Homo sapiens
  misc_RNA (1)...(19): siRNA sense strand
acagagagaucacugcaau

SEQ ID NO: 258474 - RNA, 19 nt, Homo sapiens
  misc_RNA (1)...(19): siRNA sense strand
gagauuguguacucuggaa

SEQ ID NO: 258475 - RNA, 19 nt, Homo sapiens
  misc_RNA (1)...(19): siRNA sense strand
gaacaccgucucaugguau

SEQ ID NO: 258476 - RNA, 19 nt, Homo sapiens
  misc_RNA (1)...(19): siRNA sense strand
cauguuaccuccgaagaaa

SEQ ID NO: 258477 - RNA, 19 nt, Homo sapiens
  misc_RNA (1)...(19): siRNA sense strand
aaacaaggaucauauucca

SEQ ID NO: 258478 - RNA, 19 nt, Homo sapiens
  misc_RNA (1)...(19): siRNA sense strand
acaugcagguguuagguua

SEQ ID NO: 258479 - RNA, 19 nt, Homo sapiens
  misc_RNA (1)...(19): siRNA sense strand
gcaguguaauugcaugaug

SEQ ID NO: 258480 - RNA, 19 nt, Homo sapiens
  misc_RNA (1)...(19): siRNA sense strand
ugugaaaggagaagauuua

SEQ ID NO: 258481 - RNA, 19 nt, Homo sapiens
  misc_RNA (1)...(19): siRNA sense strand
caaauagcagugauugaaa

SEQ ID NO: 258482 - RNA, 19 nt, Homo sapiens
  misc_RNA (1)...(19): siRNA sense strand
ugacagugauauauucaug

SEQ ID NO: 258483 - RNA, 19 nt, Homo sapiens
  misc_RNA (1)...(19): siRNA sense strand
gaaugaaauuggaguacca

SEQ ID NO: 258484 - RNA, 19 nt, Homo sapiens
  misc_RNA (1)...(19): siRNA sense strand
gcugacccauuuaaacuug

SEQ ID NO: 258485 - RNA, 19 nt, Homo sapiens
  misc_RNA (1)...(19): siRNA sense strand
caagaacugguaaaucaaa

SEQ ID NO: 258486 - RNA, 19 nt, Homo sapiens
  misc_RNA (1)...(19): siRNA sense strand
uucaagaacugguaaauca

SEQ ID NO: 258487 - RNA, 19 nt, Homo sapiens
  misc_RNA (1)...(19): siRNA sense strand
cuucaggccuuccaagaaa

SEQ ID NO: 258488 - RNA, 19 nt, Homo sapiens
  misc_RNA (1)...(19): siRNA sense strand
gagauaaugccgcuguuga

SEQ ID NO: 258489 - RNA, 19 nt, Homo sapiens
  misc_RNA (1)...(19): siRNA sense strand
gaucaccaccuuuaaagau

SEQ ID NO: 258490 - RNA, 19 nt, Homo sapiens
  misc_RNA (1)...(19): siRNA sense strand
ggaaacauuugggaugcaa

SEQ ID NO: 258491 - RNA, 19 nt, Homo sapiens
  misc_RNA (1)...(19): siRNA sense strand
gguagucccuauccaaauc

SEQ ID NO: 258492 - RNA, 19 nt, Homo sapiens
  misc_RNA (1)...(19): siRNA sense strand
cagaugagauuuccaacca

SEQ ID NO: 258493 - RNA, 19 nt, Homo sapiens
  misc_RNA (1)...(19): siRNA sense strand
ccgcuuaccuccuggauuc

SEQ ID NO: 258494 - RNA, 19 nt, Homo sapiens
  misc_RNA (1)...(19): siRNA sense strand
ccaaagauguaggaaaaua

SEQ ID NO: 258495 - RNA, 19 nt, Homo sapiens
  misc_RNA (1)...(19): siRNA sense strand
ggaaacuucuuugugaaca

SEQ ID NO: 258496 - RNA, 19 nt, Homo sapiens
  misc_RNA (1)...(19): siRNA sense strand
ucacugcaauugaaaguag

SEQ ID NO: 258497 - RNA, 19 nt, Homo sapiens
  misc_RNA (1)...(19): siRNA sense strand
gcaggaggaccauuaggaa

SEQ ID NO: 258498 - RNA, 19 nt, Homo sapiens
  misc_RNA (1)...(19): siRNA sense strand
ugacaugcauagcacagaa

SEQ ID NO: 258499 - RNA, 19 nt, Homo sapiens
  misc_RNA (1)...(19): siRNA sense strand
ggcauuaguuuacauuuac

SEQ ID NO: 258500 - RNA, 19 nt, Homo sapiens
  misc_RNA (1)...(19): siRNA sense strand
gagaagagauugaaagauu

SEQ ID NO: 258501 - RNA, 19 nt, Homo sapiens
  misc_RNA (1)...(19): siRNA sense strand
gaggagaccuugccuauuu

SEQ ID NO: 258502 - RNA, 19 nt, Homo sapiens
  misc_RNA (1)...(19): siRNA sense strand
gaacaucaauucacuauca

SEQ ID NO: 258503 - RNA, 19 nt, Homo sapiens
  misc_RNA (1)...(19): siRNA sense strand
gaacagaaguuucaguaau

SEQ ID NO: 258504 - RNA, 19 nt, Homo sapiens
  misc_RNA (1)...(19): siRNA sense strand
ggaauuugcugacccauuu

SEQ ID NO: 258505 - RNA, 19 nt, Homo sapiens
  misc_RNA (1)...(19): siRNA sense strand
gaugagcucuuuaguauug

SEQ ID NO: 258506 - RNA, 19 nt, Homo sapiens
  misc_RNA (1)...(19): siRNA sense strand
gcaaacagguucuggaguu

SEQ ID NO: 258507 - RNA, 19 nt, Homo sapiens
  misc_RNA (1)...(19): siRNA sense strand
gaaagaauguuaagggaau

SEQ ID NO: 258508 - RNA, 19 nt, Homo sapiens
  misc_RNA (1)...(19): siRNA sense strand
gcacagaaauuucacuuca

SEQ ID NO: 258509 - RNA, 19 nt, Homo sapiens
  misc_RNA (1)...(19): siRNA sense strand
guacauagagcucuuuaua

SEQ ID NO: 258510 - RNA, 19 nt, Homo sapiens
  misc_RNA (1)...(19): siRNA sense strand
ggaaaagccuucaaaagua

SEQ ID NO: 258511 - RNA, 19 nt, Homo sapiens
  misc_RNA (1)...(19): siRNA sense strand
ggacucagcuaugcuaauu

SEQ ID NO: 258512 - RNA, 19 nt, Homo sapiens
  misc_RNA (1)...(19): siRNA sense strand
caaauaugcugaguaauga

SEQ ID NO: 258513 - RNA, 19 nt, Homo sapiens
  misc_RNA (1)...(19): siRNA sense strand
gaaaggagaagauuuacaa

SEQ ID NO: 258514 - RNA, 19 nt, Homo sapiens
  misc_RNA (1)...(19): siRNA sense strand
ggacauaugcaguguaauu

SEQ ID NO: 258515 - RNA, 19 nt, Homo sapiens
  misc_RNA (1)...(19): siRNA sense strand
aaacagaguucguuauaug

SEQ ID NO: 258516 - RNA, 19 nt, Homo sapiens
  misc_RNA (1)...(19): siRNA sense strand
guacauugcucgagccauu

SEQ ID NO: 258517 - RNA, 19 nt, Homo sapiens
  misc_RNA (1)...(19): siRNA sense strand
guauugcccuuuauaauug

SEQ ID NO: 258518 - RNA, 19 nt, Homo sapiens
  misc_RNA (1)...(19): siRNA sense strand
gaagaucaccaccuuuaaa

SEQ ID NO: 258519 - RNA, 19 nt, Homo sapiens
  misc_RNA (1)...(19): siRNA sense strand
gaaauuuguucuccucuca

SEQ ID NO: 258520 - RNA, 19 nt, Homo sapiens
  misc_RNA (1)...(19): siRNA sense strand
acaauaacuuccacugaua

SEQ ID NO: 258521 - RNA, 19 nt, Homo sapiens
  misc_RNA (1)...(19): siRNA sense strand
gaugacagcugguguugau

SEQ ID NO: 258522 - RNA, 19 nt, Homo sapiens
  misc_RNA (1)...(19): siRNA sense strand
gaaaggauggcuguuuaua

SEQ ID NO: 258523 - RNA, 19 nt, Homo sapiens
  misc_RNA (1)...(19): siRNA sense strand
ggaacaccgucucauggua

SEQ ID NO: 258524 - RNA, 19 nt, Homo sapiens
  misc_RNA (1)...(19): siRNA sense strand
uauggaaacuucuuuguga

SEQ ID NO: 258525 - RNA, 19 nt, Homo sapiens
  misc_RNA (1)...(19): siRNA sense strand
uggaaaggauggcuguuua

SEQ ID NO: 258526 - RNA, 19 nt, Homo sapiens
  misc_RNA (1)...(19): siRNA sense strand
ggcaagauaucauagagaa

SEQ ID NO: 258527 - RNA, 19 nt, Homo sapiens
  misc_RNA (1)...(19): siRNA sense strand
gggaaucauuaaaggaaua

SEQ ID NO: 258528 - RNA, 19 nt, Homo sapiens
  misc_RNA (1)...(19): siRNA sense strand
gcaggaauuucuagacaga

SEQ ID NO: 258529 - RNA, 19 nt, Homo sapiens
  misc_RNA (1)...(19): siRNA sense strand
uauauucucuuccuacuga

SEQ ID NO: 258530 - RNA, 19 nt, Homo sapiens
  misc_RNA (1)...(19): siRNA sense strand
gagaaagaauugagugaca

SEQ ID NO: 258531 - RNA, 19 nt, Homo sapiens
  misc_RNA (1)...(19): siRNA sense strand
ccaaauaugcugaguaaug

SEQ ID NO: 258532 - RNA, 19 nt, Homo sapiens
  misc_RNA (1)...(19): siRNA sense strand
gaacugguaaaucaaagua

SEQ ID NO: 258533 - RNA, 19 nt, Homo sapiens
  misc_RNA (1)...(19): siRNA sense strand
caacucaggccacaaauau

SEQ ID NO: 258534 - RNA, 19 nt, Homo sapiens
  misc_RNA (1)...(19): siRNA sense strand
ggaugugggcuucguaaua

SEQ ID NO: 258535 - RNA, 19 nt, Homo sapiens
  misc_RNA (1)...(19): siRNA sense strand
acauugagcuccucggaua

SEQ ID NO: 258536 - RNA, 19 nt, Homo sapiens
  misc_RNA (1)...(19): siRNA sense strand
gagaagaacagaaguuuca

SEQ ID NO: 258537 - RNA, 19 nt, Homo sapiens
  misc_RNA (1)...(19): siRNA sense strand
gagaaucccagccaaguuu

SEQ ID NO: 258538 - RNA, 19 nt, Homo sapiens
  misc_RNA (1)...(19): siRNA sense strand
gaccagagauuguguacuc

SEQ ID NO: 258539 - RNA, 19 nt, Homo sapiens
  misc_RNA (1)...(19): siRNA sense strand
aggaugagcucuuuaguau

SEQ ID NO: 258540 - RNA, 19 nt, Homo sapiens
  misc_RNA (1)...(19): siRNA sense strand
gcaaucaaguggaccuuuc

SEQ ID NO: 258541 - RNA, 19 nt, Homo sapiens
  misc_RNA (1)...(19): siRNA sense strand
caggauaucugcccacuuc

SEQ ID NO: 258542 - RNA, 19 nt, Homo sapiens
  misc_RNA (1)...(19): siRNA sense strand
uacaagaacuaaaggguuu

SEQ ID NO: 258543 - RNA, 19 nt, Homo sapiens
  misc_RNA (1)...(19): siRNA sense strand
guucuggaguucuuaauga

SEQ ID NO: 258544 - RNA, 19 nt, Homo sapiens
  misc_RNA (1)...(19): siRNA sense strand
gaacagcagguuuguacuu

SEQ ID NO: 258545 - RNA, 19 nt, Homo sapiens
  misc_RNA (1)...(19): siRNA sense strand
gcacugaugaugcaauuug

SEQ ID NO: 258546 - RNA, 19 nt, Homo sapiens
  misc_RNA (1)...(19): siRNA sense strand
gaccaucgaucguucuguu

SEQ ID NO: 258547 - RNA, 19 nt, Homo sapiens
  misc_RNA (1)...(19): siRNA sense strand
gaagaagcaggacaucauu

SEQ ID NO: 258548 - RNA, 19 nt, Homo sapiens
  misc_RNA (1)...(19): siRNA sense strand
caacugaggcaucuacuug

SEQ ID NO: 258549 - RNA, 19 nt, Homo sapiens
  misc_RNA (1)...(19): siRNA sense strand
acauagagcucuuuauagu

SEQ ID NO: 258550 - RNA, 19 nt, Homo sapiens
  misc_RNA (1)...(19): siRNA sense strand
gggacaagauggacaagga

SEQ ID NO: 258551 - RNA, 19 nt, Homo sapiens
  misc_RNA (1)...(19): siRNA sense strand
gcauuaauugcuucucuua

SEQ ID NO: 258552 - RNA, 19 nt, Homo sapiens
  misc_RNA (1)...(19): siRNA sense strand
uaaaggguuugcaggaauu

SEQ ID NO: 258553 - RNA, 19 nt, Homo sapiens
  misc_RNA (1)...(19): siRNA sense strand
agagaucacugcaauugaa

SEQ ID NO: 258554 - RNA, 19 nt, Homo sapiens
  misc_RNA (1)...(19): siRNA sense strand
ggauggcuguuuauaugaa

SEQ ID NO: 258555 - RNA, 19 nt, Homo sapiens
  misc_RNA (1)...(19): siRNA sense strand
acagguugcuucuccauuu

SEQ ID NO: 258556 - RNA, 19 nt, Homo sapiens
  misc_RNA (1)...(19): siRNA sense strand
aaggauggcuguuuauaug

SEQ ID NO: 258557 - RNA, 19 nt, Homo sapiens
  misc_RNA (1)...(19): siRNA sense strand
ucuaugagcucgucaguag

SEQ ID NO: 258558 - RNA, 19 nt, Homo sapiens
  misc_RNA (1)...(19): siRNA sense strand
gauagaaugcaugcucuua

SEQ ID NO: 258559 - RNA, 19 nt, Homo sapiens
  misc_RNA (1)...(19): siRNA sense strand
cauuugggaugcaagcuua

SEQ ID NO: 258560 - RNA, 19 nt, Homo sapiens
  misc_RNA (1)...(19): siRNA sense strand
gcacagaugagauuuccaa

SEQ ID NO: 258561 - RNA, 19 nt, Homo sapiens
  misc_RNA (1)...(19): siRNA sense strand
ccaaauagcagugauugaa

SEQ ID NO: 258562 - RNA, 19 nt, Homo sapiens
  misc_RNA (1)...(19): siRNA sense strand
gcagggugguuuagccaaa

SEQ ID NO: 258563 - RNA, 19 nt, Homo sapiens
  misc_RNA (1)...(19): siRNA sense strand
gcaacucaggccacaaaua

SEQ ID NO: 258564 - RNA, 19 nt, Homo sapiens
  misc_RNA (1)...(19): siRNA sense strand
uaagauauguugagaaucc

SEQ ID NO: 258565 - RNA, 19 nt, Homo sapiens
  misc_RNA (1)...(19): siRNA sense strand
ggucauuccugggcucuuu

SEQ ID NO: 258566 - RNA, 19 nt, Homo sapiens
  misc_RNA (1)...(19): siRNA sense strand
gauuuacucuggcgguauu

SEQ ID NO: 258567 - RNA, 19 nt, Homo sapiens
  misc_RNA (1)...(19): siRNA sense strand
gggaggagauggagaagag

SEQ ID NO: 258568 - RNA, 19 nt, Homo sapiens
  misc_RNA (1)...(19): siRNA sense strand
ugcgauagaugaauugaaa

SEQ ID NO: 258569 - RNA, 19 nt, Homo sapiens
  misc_RNA (1)...(19): siRNA sense strand
gauccuauucuucaaauug

SEQ ID NO: 258570 - RNA, 19 nt, Homo sapiens
  misc_RNA (1)...(19): siRNA sense strand
gaugugggcuucguaauac

SEQ ID NO: 258571 - RNA, 19 nt, Homo sapiens
  misc_RNA (1)...(19): siRNA sense strand
cagcagguuuguacuuuga

SEQ ID NO: 258572 - RNA, 19 nt, Homo sapiens
  misc_RNA (1)...(19): siRNA sense strand
ccacugccauuucaucaau

SEQ ID NO: 258573 - RNA, 19 nt, Homo sapiens
  misc_RNA (1)...(19): siRNA sense strand
gcaugucagauauggauua

SEQ ID NO: 258574 - RNA, 19 nt, Homo sapiens
  misc_RNA (1)...(19): siRNA sense strand
acagagagaucacugcaau

SEQ ID NO: 258575 - RNA, 19 nt, Homo sapiens
  misc_RNA (1)...(19): siRNA sense strand
gagauuguguacucuggaa

SEQ ID NO: 258576 - RNA, 19 nt, Homo sapiens
  misc_RNA (1)...(19): siRNA sense strand
gaacaccgucucaugguau

SEQ ID NO: 258577 - RNA, 19 nt, Homo sapiens
  misc_RNA (1)...(19): siRNA sense strand
cauguuaccuccgaagaaa

SEQ ID NO: 258578 - RNA, 19 nt, Homo sapiens
  misc_RNA (1)...(19): siRNA sense strand
aaacaaggaucauauucca

SEQ ID NO: 258579 - RNA, 19 nt, Homo sapiens
  misc_RNA (1)...(19): siRNA sense strand
acaugcagguguuagguua

SEQ ID NO: 258580 - RNA, 19 nt, Homo sapiens
  misc_RNA (1)...(19): siRNA sense strand
gcaguguaauugcaugaug

SEQ ID NO: 258581 - RNA, 19 nt, Homo sapiens
  misc_RNA (1)...(19): siRNA sense strand
ugugaaaggagaagauuua

SEQ ID NO: 258582 - RNA, 19 nt, Homo sapiens
  misc_RNA (1)...(19): siRNA sense strand
caaauagcagugauugaaa

SEQ ID NO: 258583 - RNA, 19 nt, Homo sapiens
  misc_RNA (1)...(19): siRNA sense strand
gaaugaaauuggaguacca

SEQ ID NO: 258584 - RNA, 19 nt, Homo sapiens
  misc_RNA (1)...(19): siRNA sense strand
gcugacccauuuaaacuug

SEQ ID NO: 258585 - RNA, 19 nt, Homo sapiens
  misc_RNA (1)...(19): siRNA sense strand
caagaacugguaaaucaaa

SEQ ID NO: 258586 - RNA, 19 nt, Homo sapiens
  misc_RNA (1)...(19): siRNA sense strand
uucaagaacugguaaauca

SEQ ID NO: 258587 - RNA, 19 nt, Homo sapiens
  misc_RNA (1)...(19): siRNA sense strand
cuucaggccuuccaagaaa

SEQ ID NO: 258588 - RNA, 19 nt, Homo sapiens
  misc_RNA (1)...(19): siRNA sense strand
gagauaaugccgcuguuga

SEQ ID NO: 258589 - RNA, 19 nt, Homo sapiens
  misc_RNA (1)...(19): siRNA sense strand
gaucaccaccuuuaaagau

SEQ ID NO: 258590 - RNA, 19 nt, Homo sapiens
  misc_RNA (1)...(19): siRNA sense strand
ggaaacauuugggaugcaa

SEQ ID NO: 258591 - RNA, 19 nt, Homo sapiens
  misc_RNA (1)...(19): siRNA sense strand
ugacagugauauauucaug

SEQ ID NO: 258592 - RNA, 19 nt, Homo sapiens
  misc_RNA (1)...(19): siRNA sense strand
gguagucccuauccaaauc

SEQ ID NO: 258593 - RNA, 19 nt, Homo sapiens
  misc_RNA (1)...(19): siRNA sense strand
cagaugagauuuccaacca

SEQ ID NO: 258594 - RNA, 19 nt, Homo sapiens
  misc_RNA (1)...(19): siRNA sense strand
ccgcuuaccuccuggauuc

SEQ ID NO: 258595 - RNA, 19 nt, Homo sapiens
  misc_RNA (1)...(19): siRNA sense strand
ccaaagauguaggaaaaua

SEQ ID NO: 258596 - RNA, 19 nt, Homo sapiens
  misc_RNA (1)...(19): siRNA sense strand
ggaaacuucuuugugaaca

SEQ ID NO: 258597 - RNA, 19 nt, Homo sapiens
  misc_RNA (1)...(19): siRNA sense strand
ucacugcaauugaaaguag

SEQ ID NO: 258598 - RNA, 19 nt, Homo sapiens
  misc_RNA (1)...(19): siRNA sense strand
ggcauuaguuuacauuuac

SEQ ID NO: 258599 - RNA, 19 nt, Homo sapiens
  misc_RNA (1)...(19): siRNA sense strand
ugacaugcauagcacagaa

SEQ ID NO: 258600 - RNA, 19 nt, Homo sapiens
  misc_RNA (1)...(19): siRNA sense strand
gcaaacguguggaugcuua

SEQ ID NO: 258601 - RNA, 19 nt, Homo sapiens
  misc_RNA (1)...(19): siRNA sense strand
cuacaaauaugcuuccuuu

SEQ ID NO: 258602 - RNA, 19 nt, Homo sapiens
  misc_RNA (1)...(19): siRNA sense strand
gagcugaagucacuacuga

SEQ ID NO: 258603 - RNA, 19 nt, Homo sapiens
  misc_RNA (1)...(19): siRNA sense strand
gcacagagaucccgguaca

SEQ ID NO: 258604 - RNA, 19 nt, Homo sapiens
  misc_RNA (1)...(19): siRNA sense strand
ggaaacagagacaguauuu

SEQ ID NO: 258605 - RNA, 19 nt, Homo sapiens
  misc_RNA (1)...(19): siRNA sense strand
ccaaggagauguacagaau

SEQ ID NO: 258606 - RNA, 19 nt, Homo sapiens
  misc_RNA (1)...(19): siRNA sense strand
cagggaagcucuuucuauu

SEQ ID NO: 258607 - RNA, 19 nt, Homo sapiens
  misc_RNA (1)...(19): siRNA sense strand
gggccaagcuccacuguuc

SEQ ID NO: 258608 - RNA, 19 nt, Homo sapiens
  misc_RNA (1)...(19): siRNA sense strand
acaggaagcugaucaauac

SEQ ID NO: 258609 - RNA, 19 nt, Homo sapiens
  misc_RNA (1)...(19): siRNA sense strand
caucaggacuggucuuguu

SEQ ID NO: 258610 - RNA, 19 nt, Homo sapiens
  misc_RNA (1)...(19): siRNA sense strand
ccagaagguuguuggcuuu

SEQ ID NO: 258611 - RNA, 19 nt, Homo sapiens
  misc_RNA (1)...(19): siRNA sense strand
gacaggaagcugaucaaua

SEQ ID NO: 258612 - RNA, 19 nt, Homo sapiens
  misc_RNA (1)...(19): siRNA sense strand
ggaagcugaucaauacaga

SEQ ID NO: 258613 - RNA, 19 nt, Homo sapiens
  misc_RNA (1)...(19): siRNA sense strand
guaccaggcuaucagcaaa

SEQ ID NO: 258614 - RNA, 19 nt, Homo sapiens
  misc_RNA (1)...(19): siRNA sense strand
gaagagcgucuaagcaaug

SEQ ID NO: 258615 - RNA, 19 nt, Homo sapiens
  misc_RNA (1)...(19): siRNA sense strand
guucgaggccucauugaua

SEQ ID NO: 258616 - RNA, 19 nt, Homo sapiens
  misc_RNA (1)...(19): siRNA sense strand
gcacaucugacauggcuaa

SEQ ID NO: 258617 - RNA, 19 nt, Homo sapiens
  misc_RNA (1)...(19): siRNA sense strand
gcccaaggcugcuguguag

SEQ ID NO: 258618 - RNA, 19 nt, Homo sapiens
  misc_RNA (1)...(19): siRNA sense strand
gccuuuaucuucaugauug

SEQ ID NO: 258619 - RNA, 19 nt, Homo sapiens
  misc_RNA (1)...(19): siRNA sense strand
acaauaaggugcuccacuu

SEQ ID NO: 258620 - RNA, 19 nt, Homo sapiens
  misc_RNA (1)...(19): siRNA sense strand
ugaagcuacucccaguuua

SEQ ID NO: 258621 - RNA, 19 nt, Homo sapiens
  misc_RNA (1)...(19): siRNA sense strand
gacaguauuuguaccaguu

SEQ ID NO: 258622 - RNA, 19 nt, Homo sapiens
  misc_RNA (1)...(19): siRNA sense strand
guagauuacugcaagaaca

SEQ ID NO: 258623 - RNA, 19 nt, Homo sapiens
  misc_RNA (1)...(19): siRNA sense strand
gcagggaagcucuuucuau

SEQ ID NO: 258624 - RNA, 19 nt, Homo sapiens
  misc_RNA (1)...(19): siRNA sense strand
guacagagccauuuguuac

SEQ ID NO: 258625 - RNA, 19 nt, Homo sapiens
  misc_RNA (1)...(19): siRNA sense strand
gcaguuaucaccagcuuau

SEQ ID NO: 258626 - RNA, 19 nt, Homo sapiens
  misc_RNA (1)...(19): siRNA sense strand
ucacaggccuccagcuuca

SEQ ID NO: 258627 - RNA, 19 nt, Homo sapiens
  misc_RNA (1)...(19): siRNA sense strand
gauaauccacuguccaaga

SEQ ID NO: 258628 - RNA, 19 nt, Homo sapiens
  misc_RNA (1)...(19): siRNA sense strand
caaauaugcuuccuuucag

SEQ ID NO: 258629 - RNA, 19 nt, Homo sapiens
  misc_RNA (1)...(19): siRNA sense strand
aaacagagacaguauuugu

SEQ ID NO: 258630 - RNA, 19 nt, Homo sapiens
  misc_RNA (1)...(19): siRNA sense strand
gcauacaugugucccuuca

SEQ ID NO: 258631 - RNA, 19 nt, Homo sapiens
  misc_RNA (1)...(19): siRNA sense strand
gaaacaggaagacaagaug

SEQ ID NO: 258632 - RNA, 19 nt, Homo sapiens
  misc_RNA (1)...(19): siRNA sense strand
ccucggcucuuaccuuuga

SEQ ID NO: 258633 - RNA, 19 nt, Homo sapiens
  misc_RNA (1)...(19): siRNA sense strand
cuacgcagcugucuggaau

SEQ ID NO: 258634 - RNA, 19 nt, Homo sapiens
  misc_RNA (1)...(19): siRNA sense strand
gugcuccacuucuauaaug

SEQ ID NO: 258635 - RNA, 19 nt, Homo sapiens
  misc_RNA (1)...(19): siRNA sense strand
uaauaucccuugcacaucu

SEQ ID NO: 258636 - RNA, 19 nt, Homo sapiens
  misc_RNA (1)...(19): siRNA sense strand
ccaacuuccuggugaaaga

SEQ ID NO: 258637 - RNA, 19 nt, Homo sapiens
  misc_RNA (1)...(19): siRNA sense strand
gguacagagccauuuguua

SEQ ID NO: 258638 - RNA, 19 nt, Homo sapiens
  misc_RNA (1)...(19): siRNA sense strand
gaagguuguuggcuuugau

SEQ ID NO: 258639 - RNA, 19 nt, Homo sapiens
  misc_RNA (1)...(19): siRNA sense strand
gagcucaagucacuguuag

SEQ ID NO: 258640 - RNA, 19 nt, Homo sapiens
  misc_RNA (1)...(19): siRNA sense strand
ggagcucaagucacuguua

SEQ ID NO: 258641 - RNA, 19 nt, Homo sapiens
  misc_RNA (1)...(19): siRNA sense strand
gcaauggggauauauauuu

SEQ ID NO: 258642 - RNA, 19 nt, Homo sapiens
  misc_RNA (1)...(19): siRNA sense strand
gacaaagucucccguugag

SEQ ID NO: 258643 - RNA, 19 nt, Homo sapiens
  misc_RNA (1)...(19): siRNA sense strand
guggcucugucuacaaaua

SEQ ID NO: 258644 - RNA, 19 nt, Homo sapiens
  misc_RNA (1)...(19): siRNA sense strand
agaggaggcuucaccguau

SEQ ID NO: 258645 - RNA, 19 nt, Homo sapiens
  misc_RNA (1)...(19): siRNA sense strand
caucuuauguggacuuucu

SEQ ID NO: 258646 - RNA, 19 nt, Homo sapiens
  misc_RNA (1)...(19): siRNA sense strand
agaaugggcucaaccucuu

SEQ ID NO: 258647 - RNA, 19 nt, Homo sapiens
  misc_RNA (1)...(19): siRNA sense strand
ugacaaagucucccguuga

SEQ ID NO: 258648 - RNA, 19 nt, Homo sapiens
  misc_RNA (1)...(19): siRNA sense strand
uggcugaucuauaucgaaa

SEQ ID NO: 258649 - RNA, 19 nt, Homo sapiens
  misc_RNA (1)...(19): siRNA sense strand
acaaauaugcuuccuuuca

SEQ ID NO: 258650 - RNA, 19 nt, Homo sapiens
  misc_RNA (1)...(19): siRNA sense strand
caucugacauggcuaagca

SEQ ID NO: 258651 - RNA, 19 nt, Homo sapiens
  misc_RNA (1)...(19): siRNA sense strand
ccugggcucuuaugaauuc

SEQ ID NO: 258652 - RNA, 19 nt, Homo sapiens
  misc_RNA (1)...(19): siRNA sense strand
cugacacgcucaucaacua

SEQ ID NO: 258653 - RNA, 19 nt, Homo sapiens
  misc_RNA (1)...(19): siRNA sense strand
ccagaaauguuugcagaca

SEQ ID NO: 258654 - RNA, 19 nt, Homo sapiens
  misc_RNA (1)...(19): siRNA sense strand
gaacgucaaccagucaguu

SEQ ID NO: 258655 - RNA, 19 nt, Homo sapiens
  misc_RNA (1)...(19): siRNA sense strand
gagauucggcagcuacuga

SEQ ID NO: 258656 - RNA, 19 nt, Homo sapiens
  misc_RNA (1)...(19): siRNA sense strand
auaauccacuguccaagaa

SEQ ID NO: 258657 - RNA, 19 nt, Homo sapiens
  misc_RNA (1)...(19): siRNA sense strand
ggagcuggcugggcuagau

SEQ ID NO: 258658 - RNA, 19 nt, Homo sapiens
  misc_RNA (1)...(19): siRNA sense strand
gaucagauuccagaaaugu

SEQ ID NO: 258659 - RNA, 19 nt, Homo sapiens
  misc_RNA (1)...(19): siRNA sense strand
auaaggugcuccacuucua

SEQ ID NO: 258660 - RNA, 19 nt, Homo sapiens
  misc_RNA (1)...(19): siRNA sense strand
ucugaaggcugcugagugu

SEQ ID NO: 258661 - RNA, 19 nt, Homo sapiens
  misc_RNA (1)...(19): siRNA sense strand
cuucuacccucggcucuua

SEQ ID NO: 258662 - RNA, 19 nt, Homo sapiens
  misc_RNA (1)...(19): siRNA sense strand
guguagaucucuuucucuu

SEQ ID NO: 258663 - RNA, 19 nt, Homo sapiens
  misc_RNA (1)...(19): siRNA sense strand
ugauugacgucuccuacaa

SEQ ID NO: 258664 - RNA, 19 nt, Homo sapiens
  misc_RNA (1)...(19): siRNA sense strand
uauauuuacuggagaaugg

SEQ ID NO: 258665 - RNA, 19 nt, Homo sapiens
  misc_RNA (1)...(19): siRNA sense strand
guagauuucuuuggagcuu

SEQ ID NO: 258666 - RNA, 19 nt, Homo sapiens
  misc_RNA (1)...(19): siRNA sense strand
ggugaaagaccaagggaau

SEQ ID NO: 258667 - RNA, 19 nt, Homo sapiens
  misc_RNA (1)...(19): siRNA sense strand
uaucaucaguccagcuaug

SEQ ID NO: 258668 - RNA, 19 nt, Homo sapiens
  misc_RNA (1)...(19): siRNA sense strand
ggaucagauuccagaaaug

SEQ ID NO: 258669 - RNA, 19 nt, Homo sapiens
  misc_RNA (1)...(19): siRNA sense strand
ucagauuccagaaauguuu

SEQ ID NO: 258670 - RNA, 19 nt, Homo sapiens
  misc_RNA (1)...(19): siRNA sense strand
ugaagagcgucuaagcaau

SEQ ID NO: 258671 - RNA, 19 nt, Homo sapiens
  misc_RNA (1)...(19): siRNA sense strand
cuuuggagcuuucuacaug

SEQ ID NO: 258672 - RNA, 19 nt, Homo sapiens
  misc_RNA (1)...(19): siRNA sense strand
ggaaacugaagaacagaga

SEQ ID NO: 258673 - RNA, 19 nt, Homo sapiens
  misc_RNA (1)...(19): siRNA sense strand
cagggaaacugaagaacag

SEQ ID NO: 258674 - RNA, 19 nt, Homo sapiens
  misc_RNA (1)...(19): siRNA sense strand
uauaauaucccuugcacau

SEQ ID NO: 258675 - RNA, 19 nt, Homo sapiens
  misc_RNA (1)...(19): siRNA sense strand
gcaugacgaucggcucaau

SEQ ID NO: 258676 - RNA, 19 nt, Homo sapiens
  misc_RNA (1)...(19): siRNA sense strand
gaagcucuuucuauuccau

SEQ ID NO: 258677 - RNA, 19 nt, Homo sapiens
  misc_RNA (1)...(19): siRNA sense strand
gggcucuuaugaauucuug

SEQ ID NO: 258678 - RNA, 19 nt, Homo sapiens
  misc_RNA (1)...(19): siRNA sense strand
gguaucaucaguccagcua

SEQ ID NO: 258679 - RNA, 19 nt, Homo sapiens
  misc_RNA (1)...(19): siRNA sense strand
agauggagaugcuguucaa

SEQ ID NO: 258680 - RNA, 19 nt, Homo sapiens
  misc_RNA (1)...(19): siRNA sense strand
ggaugugacugagaccaau

SEQ ID NO: 258681 - RNA, 19 nt, Homo sapiens
  misc_RNA (1)...(19): siRNA sense strand
uaccugaacuguguguuga

SEQ ID NO: 258682 - RNA, 19 nt, Homo sapiens
  misc_RNA (1)...(19): siRNA sense strand
agaaauguuugcagacaca

SEQ ID NO: 258683 - RNA, 19 nt, Homo sapiens
  misc_RNA (1)...(19): siRNA sense strand
caaugagucucgggcaguu

SEQ ID NO: 258684 - RNA, 19 nt, Homo sapiens
  misc_RNA (1)...(19): siRNA sense strand
gaggaggcuucaccguaug

SEQ ID NO: 258685 - RNA, 19 nt, Homo sapiens
  misc_RNA (1)...(19): siRNA sense strand
uauccgugcuguagauuuc

SEQ ID NO: 258686 - RNA, 19 nt, Homo sapiens
  misc_RNA (1)...(19): siRNA sense strand
gaaacagagacaguauuug

SEQ ID NO: 258687 - RNA, 19 nt, Homo sapiens
  misc_RNA (1)...(19): siRNA sense strand
gggcaguuaucaccagcuu

SEQ ID NO: 258688 - RNA, 19 nt, Homo sapiens
  misc_RNA (1)...(19): siRNA sense strand
ucucuucccuaaccaguau

SEQ ID NO: 258689 - RNA, 19 nt, Homo sapiens
  misc_RNA (1)...(19): siRNA sense strand
cugcaaagcauacaugugu

SEQ ID NO: 258690 - RNA, 19 nt, Homo sapiens
  misc_RNA (1)...(19): siRNA sense strand
gacuuucucugucauaugc

SEQ ID NO: 258691 - RNA, 19 nt, Homo sapiens
  misc_RNA (1)...(19): siRNA sense strand
ugaucuauaucgaaacugu

SEQ ID NO: 258692 - RNA, 19 nt, Homo sapiens
  misc_RNA (1)...(19): siRNA sense strand
gauuacugcaagaacaaua

SEQ ID NO: 258693 - RNA, 19 nt, Homo sapiens
  misc_RNA (1)...(19): siRNA sense strand
ucccugggcucuuaugaau

SEQ ID NO: 258694 - RNA, 19 nt, Homo sapiens
  misc_RNA (1)...(19): siRNA sense strand
gcugaucaauacagacaag

SEQ ID NO: 258695 - RNA, 19 nt, Homo sapiens
  misc_RNA (1)...(19): siRNA sense strand
gcugaagucacuacugaug

SEQ ID NO: 258696 - RNA, 19 nt, Homo sapiens
  misc_RNA (1)...(19): siRNA sense strand
gcugaucuauaucgaaacu

SEQ ID NO: 258697 - RNA, 19 nt, Homo sapiens
  misc_RNA (1)...(19): siRNA sense strand
uccauaaucuggcccugaa

SEQ ID NO: 258698 - RNA, 19 nt, Homo sapiens
  misc_RNA (1)...(19): siRNA sense strand
acgaucggcucaaugaaga

SEQ ID NO: 258699 - RNA, 19 nt, Homo sapiens
  misc_RNA (1)...(19): siRNA sense strand
gggaaacagagacaguauu

SEQ ID NO: 258700 - RNA, 19 nt, Homo sapiens
  misc_RNA (1)...(19): siRNA sense strand
gcaaacguguggaugcuua

SEQ ID NO: 258701 - RNA, 19 nt, Homo sapiens
  misc_RNA (1)...(19): siRNA sense strand
cuacaaauaugcuuccuuu

SEQ ID NO: 258702 - RNA, 19 nt, Homo sapiens
  misc_RNA (1)...(19): siRNA sense strand
gagcugaagucacuacuga

SEQ ID NO: 258703 - RNA, 19 nt, Homo sapiens
  misc_RNA (1)...(19): siRNA sense strand
gcacagagaucccgguaca

SEQ ID NO: 258704 - RNA, 19 nt, Homo sapiens
  misc_RNA (1)...(19): siRNA sense strand
ggaaacagagacaguauuu

SEQ ID NO: 258705 - RNA, 19 nt, Homo sapiens
  misc_RNA (1)...(19): siRNA sense strand
ccaaggagauguacagaau

SEQ ID NO: 258706 - RNA, 19 nt, Homo sapiens
  misc_RNA (1)...(19): siRNA sense strand
cagggaagcucuuucuauu

SEQ ID NO: 258707 - RNA, 19 nt, Homo sapiens
  misc_RNA (1)...(19): siRNA sense strand
gggccaagcuccacuguuc

SEQ ID NO: 258708 - RNA, 19 nt, Homo sapiens
  misc_RNA (1)...(19): siRNA sense strand
acaggaagcugaucaauac

SEQ ID NO: 258709 - RNA, 19 nt, Homo sapiens
  misc_RNA (1)...(19): siRNA sense strand
caucaggacuggucuuguu

SEQ ID NO: 258710 - RNA, 19 nt, Homo sapiens
  misc_RNA (1)...(19): siRNA sense strand
ccagaagguuguuggcuuu

SEQ ID NO: 258711 - RNA, 19 nt, Homo sapiens
  misc_RNA (1)...(19): siRNA sense strand
gacaggaagcugaucaaua

SEQ ID NO: 258712 - RNA, 19 nt, Homo sapiens
  misc_RNA (1)...(19): siRNA sense strand
ggaagcugaucaauacaga

SEQ ID NO: 258713 - RNA, 19 nt, Homo sapiens
  misc_RNA (1)...(19): siRNA sense strand
guaccaggcuaucagcaaa

SEQ ID NO: 258714 - RNA, 19 nt, Homo sapiens
  misc_RNA (1)...(19): siRNA sense strand
gaagagcgucuaagcaaug

SEQ ID NO: 258715 - RNA, 19 nt, Homo sapiens
  misc_RNA (1)...(19): siRNA sense strand
guucgaggccucauugaua

SEQ ID NO: 258716 - RNA, 19 nt, Homo sapiens
  misc_RNA (1)...(19): siRNA sense strand
gcacaucugacauggcuaa

SEQ ID NO: 258717 - RNA, 19 nt, Homo sapiens
  misc_RNA (1)...(19): siRNA sense strand
gcccaaggcugcuguguag

SEQ ID NO: 258718 - RNA, 19 nt, Homo sapiens
  misc_RNA (1)...(19): siRNA sense strand
gccuuuaucuucaugauug

SEQ ID NO: 258719 - RNA, 19 nt, Homo sapiens
  misc_RNA (1)...(19): siRNA sense strand
acaauaaggugcuccacuu

SEQ ID NO: 258720 - RNA, 19 nt, Homo sapiens
  misc_RNA (1)...(19): siRNA sense strand
ugaagcuacucccaguuua

SEQ ID NO: 258721 - RNA, 19 nt, Homo sapiens
  misc_RNA (1)...(19): siRNA sense strand
gacaguauuuguaccaguu

SEQ ID NO: 258722 - RNA, 19 nt, Homo sapiens
  misc_RNA (1)...(19): siRNA sense strand
guagauuacugcaagaaca

SEQ ID NO: 258723 - RNA, 19 nt, Homo sapiens
  misc_RNA (1)...(19): siRNA sense strand
gcagggaagcucuuucuau

SEQ ID NO: 258724 - RNA, 19 nt, Homo sapiens
  misc_RNA (1)...(19): siRNA sense strand
guacagagccauuuguuac

SEQ ID NO: 258725 - RNA, 19 nt, Homo sapiens
  misc_RNA (1)...(19): siRNA sense strand
gcaguuaucaccagcuuau

SEQ ID NO: 258726 - RNA, 19 nt, Homo sapiens
  misc_RNA (1)...(19): siRNA sense strand
ucacaggccuccagcuuca

SEQ ID NO: 258727 - RNA, 19 nt, Homo sapiens
  misc_RNA (1)...(19): siRNA sense strand
gauaauccacuguccaaga

SEQ ID NO: 258728 - RNA, 19 nt, Homo sapiens
  misc_RNA (1)...(19): siRNA sense strand
caaauaugcuuccuuucag

SEQ ID NO: 258729 - RNA, 19 nt, Homo sapiens
  misc_RNA (1)...(19): siRNA sense strand
aaacagagacaguauuugu

SEQ ID NO: 258730 - RNA, 19 nt, Homo sapiens
  misc_RNA (1)...(19): siRNA sense strand
gcauacaugugucccuuca

SEQ ID NO: 258731 - RNA, 19 nt, Homo sapiens
  misc_RNA (1)...(19): siRNA sense strand
gaaacaggaagacaagaug

SEQ ID NO: 258732 - RNA, 19 nt, Homo sapiens
  misc_RNA (1)...(19): siRNA sense strand
ccucggcucuuaccuuuga

SEQ ID NO: 258733 - RNA, 19 nt, Homo sapiens
  misc_RNA (1)...(19): siRNA sense strand
cuacgcagcugucuggaau

SEQ ID NO: 258734 - RNA, 19 nt, Homo sapiens
  misc_RNA (1)...(19): siRNA sense strand
gugcuccacuucuauaaug

SEQ ID NO: 258735 - RNA, 19 nt, Homo sapiens
  misc_RNA (1)...(19): siRNA sense strand
uaauaucccuugcacaucu

SEQ ID NO: 258736 - RNA, 19 nt, Homo sapiens
  misc_RNA (1)...(19): siRNA sense strand
ccaacuuccuggugaaaga

SEQ ID NO: 258737 - RNA, 19 nt, Homo sapiens
  misc_RNA (1)...(19): siRNA sense strand
gguacagagccauuuguua

SEQ ID NO: 258738 - RNA, 19 nt, Homo sapiens
  misc_RNA (1)...(19): siRNA sense strand
gaagguuguuggcuuugau

SEQ ID NO: 258739 - RNA, 19 nt, Homo sapiens
  misc_RNA (1)...(19): siRNA sense strand
gagcucaagucacuguuag

SEQ ID NO: 258740 - RNA, 19 nt, Homo sapiens
  misc_RNA (1)...(19): siRNA sense strand
ggagcucaagucacuguua

SEQ ID NO: 258741 - RNA, 19 nt, Homo sapiens
  misc_RNA (1)...(19): siRNA sense strand
gcaauggggauauauauuu

SEQ ID NO: 258742 - RNA, 19 nt, Homo sapiens
  misc_RNA (1)...(19): siRNA sense strand
gacaaagucucccguugag

SEQ ID NO: 258743 - RNA, 19 nt, Homo sapiens
  misc_RNA (1)...(19): siRNA sense strand
guggcucugucuacaaaua

SEQ ID NO: 258744 - RNA, 19 nt, Homo sapiens
  misc_RNA (1)...(19): siRNA sense strand
agaggaggcuucaccguau

SEQ ID NO: 258745 - RNA, 19 nt, Homo sapiens
  misc_RNA (1)...(19): siRNA sense strand
caucuuauguggacuuucu

SEQ ID NO: 258746 - RNA, 19 nt, Homo sapiens
  misc_RNA (1)...(19): siRNA sense strand
agaaugggcucaaccucuu

SEQ ID NO: 258747 - RNA, 19 nt, Homo sapiens
  misc_RNA (1)...(19): siRNA sense strand
ugacaaagucucccguuga

SEQ ID NO: 258748 - RNA, 19 nt, Homo sapiens
  misc_RNA (1)...(19): siRNA sense strand
uggcugaucuauaucgaaa

SEQ ID NO: 258749 - RNA, 19 nt, Homo sapiens
  misc_RNA (1)...(19): siRNA sense strand
acaaauaugcuuccuuuca

SEQ ID NO: 258750 - RNA, 19 nt, Homo sapiens
  misc_RNA (1)...(19): siRNA sense strand
caucugacauggcuaagca

SEQ ID NO: 258751 - RNA, 19 nt, Homo sapiens
  misc_RNA (1)...(19): siRNA sense strand
ccugggcucuuaugaauuc

SEQ ID NO: 258752 - RNA, 19 nt, Homo sapiens
  misc_RNA (1)...(19): siRNA sense strand
cugacacgcucaucaacua

SEQ ID NO: 258753 - RNA, 19 nt, Homo sapiens
  misc_RNA (1)...(19): siRNA sense strand
ccagaaauguuugcagaca

SEQ ID NO: 258754 - RNA, 19 nt, Homo sapiens
  misc_RNA (1)...(19): siRNA sense strand
gaacgucaaccagucaguu

SEQ ID NO: 258755 - RNA, 19 nt, Homo sapiens
  misc_RNA (1)...(19): siRNA sense strand
gagauucggcagcuacuga

SEQ ID NO: 258756 - RNA, 19 nt, Homo sapiens
  misc_RNA (1)...(19): siRNA sense strand
auaauccacuguccaagaa

SEQ ID NO: 258757 - RNA, 19 nt, Homo sapiens
  misc_RNA (1)...(19): siRNA sense strand
ggagcuggcugggcuagau

SEQ ID NO: 258758 - RNA, 19 nt, Homo sapiens
  misc_RNA (1)...(19): siRNA sense strand
gaucagauuccagaaaugu

SEQ ID NO: 258759 - RNA, 19 nt, Homo sapiens
  misc_RNA (1)...(19): siRNA sense strand
auaaggugcuccacuucua

SEQ ID NO: 258760 - RNA, 19 nt, Homo sapiens
  misc_RNA (1)...(19): siRNA sense strand
ucugaaggcugcugagugu

SEQ ID NO: 258761 - RNA, 19 nt, Homo sapiens
  misc_RNA (1)...(19): siRNA sense strand
cuucuacccucggcucuua

SEQ ID NO: 258762 - RNA, 19 nt, Homo sapiens
  misc_RNA (1)...(19): siRNA sense strand
guguagaucucuuucucuu

SEQ ID NO: 258763 - RNA, 19 nt, Homo sapiens
  misc_RNA (1)...(19): siRNA sense strand
ugauugacgucuccuacaa

SEQ ID NO: 258764 - RNA, 19 nt, Homo sapiens
  misc_RNA (1)...(19): siRNA sense strand
uauauuuacuggagaaugg

SEQ ID NO: 258765 - RNA, 19 nt, Homo sapiens
  misc_RNA (1)...(19): siRNA sense strand
guagauuucuuuggagcuu

SEQ ID NO: 258766 - RNA, 19 nt, Homo sapiens
  misc_RNA (1)...(19): siRNA sense strand
ggugaaagaccaagggaau

SEQ ID NO: 258767 - RNA, 19 nt, Homo sapiens
  misc_RNA (1)...(19): siRNA sense strand
uaucaucaguccagcuaug

SEQ ID NO: 258768 - RNA, 19 nt, Homo sapiens
  misc_RNA (1)...(19): siRNA sense strand
ggaucagauuccagaaaug

SEQ ID NO: 258769 - RNA, 19 nt, Homo sapiens
  misc_RNA (1)...(19): siRNA sense strand
ucagauuccagaaauguuu

SEQ ID NO: 258770 - RNA, 19 nt, Homo sapiens
  misc_RNA (1)...(19): siRNA sense strand
ugaagagcgucuaagcaau

SEQ ID NO: 258771 - RNA, 19 nt, Homo sapiens
  misc_RNA (1)...(19): siRNA sense strand
cuuuggagcuuucuacaug

SEQ ID NO: 258772 - RNA, 19 nt, Homo sapiens
  misc_RNA (1)...(19): siRNA sense strand
ggaaacugaagaacagaga

SEQ ID NO: 258773 - RNA, 19 nt, Homo sapiens
  misc_RNA (1)...(19): siRNA sense strand
cagggaaacugaagaacag

SEQ ID NO: 258774 - RNA, 19 nt, Homo sapiens
  misc_RNA (1)...(19): siRNA sense strand
uauaauaucccuugcacau

SEQ ID NO: 258775 - RNA, 19 nt, Homo sapiens
  misc_RNA (1)...(19): siRNA sense strand
gcaugacgaucggcucaau

SEQ ID NO: 258776 - RNA, 19 nt, Homo sapiens
  misc_RNA (1)...(19): siRNA sense strand
gaagcucuuucuauuccau

SEQ ID NO: 258777 - RNA, 19 nt, Homo sapiens
  misc_RNA (1)...(19): siRNA sense strand
gggcucuuaugaauucuug

SEQ ID NO: 258778 - RNA, 19 nt, Homo sapiens
  misc_RNA (1)...(19): siRNA sense strand
gguaucaucaguccagcua

SEQ ID NO: 258779 - RNA, 19 nt, Homo sapiens
  misc_RNA (1)...(19): siRNA sense strand
agauggagaugcuguucaa

SEQ ID NO: 258780 - RNA, 19 nt, Homo sapiens
  misc_RNA (1)...(19): siRNA sense strand
ggaugugacugagaccaau

SEQ ID NO: 258781 - RNA, 19 nt, Homo sapiens
  misc_RNA (1)...(19): siRNA sense strand
uaccugaacuguguguuga

SEQ ID NO: 258782 - RNA, 19 nt, Homo sapiens
  misc_RNA (1)...(19): siRNA sense strand
agaaauguuugcagacaca

SEQ ID NO: 258783 - RNA, 19 nt, Homo sapiens
  misc_RNA (1)...(19): siRNA sense strand
caaugagucucgggcaguu

SEQ ID NO: 258784 - RNA, 19 nt, Homo sapiens
  misc_RNA (1)...(19): siRNA sense strand
gaggaggcuucaccguaug

SEQ ID NO: 258785 - RNA, 19 nt, Homo sapiens
  misc_RNA (1)...(19): siRNA sense strand
uauccgugcuguagauuuc

SEQ ID NO: 258786 - RNA, 19 nt, Homo sapiens
  misc_RNA (1)...(19): siRNA sense strand
gaaacagagacaguauuug

SEQ ID NO: 258787 - RNA, 19 nt, Homo sapiens
  misc_RNA (1)...(19): siRNA sense strand
gggcaguuaucaccagcuu

SEQ ID NO: 258788 - RNA, 19 nt, Homo sapiens
  misc_RNA (1)...(19): siRNA sense strand
ucucuucccuaaccaguau

SEQ ID NO: 258789 - RNA, 19 nt, Homo sapiens
  misc_RNA (1)...(19): siRNA sense strand
cugcaaagcauacaugugu

SEQ ID NO: 258790 - RNA, 19 nt, Homo sapiens
  misc_RNA (1)...(19): siRNA sense strand
gacuuucucugucauaugc

SEQ ID NO: 258791 - RNA, 19 nt, Homo sapiens
  misc_RNA (1)...(19): siRNA sense strand
ugaucuauaucgaaacugu

SEQ ID NO: 258792 - RNA, 19 nt, Homo sapiens
  misc_RNA (1)...(19): siRNA sense strand
gauuacugcaagaacaaua

SEQ ID NO: 258793 - RNA, 19 nt, Homo sapiens
  misc_RNA (1)...(19): siRNA sense strand
ucccugggcucuuaugaau

SEQ ID NO: 258794 - RNA, 19 nt, Homo sapiens
  misc_RNA (1)...(19): siRNA sense strand
gcugaucaauacagacaag

SEQ ID NO: 258795 - RNA, 19 nt, Homo sapiens
  misc_RNA (1)...(19): siRNA sense strand
gcugaagucacuacugaug

SEQ ID NO: 258796 - RNA, 19 nt, Homo sapiens
  misc_RNA (1)...(19): siRNA sense strand
gcugaucuauaucgaaacu

SEQ ID NO: 258797 - RNA, 19 nt, Homo sapiens
  misc_RNA (1)...(19): siRNA sense strand
uccauaaucuggcccugaa

SEQ ID NO: 258798 - RNA, 19 nt, Homo sapiens
  misc_RNA (1)...(19): siRNA sense strand
acgaucggcucaaugaaga

SEQ ID NO: 258799 - RNA, 19 nt, Homo sapiens
  misc_RNA (1)...(19): siRNA sense strand
gggaaacagagacaguauu

SEQ ID NO: 258800 - RNA, 19 nt, Homo sapiens
  misc_RNA (1)...(19): siRNA sense strand
gcacacaaaugcuauguau

SEQ ID NO: 258801 - RNA, 19 nt, Homo sapiens
  misc_RNA (1)...(19): siRNA sense strand
gaacgaaagacacuaauga

SEQ ID NO: 258802 - RNA, 19 nt, Homo sapiens
  misc_RNA (1)...(19): siRNA sense strand
ggaaggugcuuaucacaga

SEQ ID NO: 258803 - RNA, 19 nt, Homo sapiens
  misc_RNA (1)...(19): siRNA sense strand
caacuugcaucaugauauu

SEQ ID NO: 258804 - RNA, 19 nt, Homo sapiens
  misc_RNA (1)...(19): siRNA sense strand
gaagaaagcccagaacgaa

SEQ ID NO: 258805 - RNA, 19 nt, Homo sapiens
  misc_RNA (1)...(19): siRNA sense strand
gagaagaggccgagaaaga

SEQ ID NO: 258806 - RNA, 19 nt, Homo sapiens
  misc_RNA (1)...(19): siRNA sense strand
gaaagacacuaaugagcau

SEQ ID NO: 258807 - RNA, 19 nt, Homo sapiens
  misc_RNA (1)...(19): siRNA sense strand
guagaaauccagaagcuuu

SEQ ID NO: 258808 - RNA, 19 nt, Homo sapiens
  misc_RNA (1)...(19): siRNA sense strand
gcuaugaggcccaaauuau

SEQ ID NO: 258809 - RNA, 19 nt, Homo sapiens
  misc_RNA (1)...(19): siRNA sense strand
accaaugacugcuuuagua

SEQ ID NO: 258810 - RNA, 19 nt, Homo sapiens
  misc_RNA (1)...(19): siRNA sense strand
ggugauaugccaauugaaa

SEQ ID NO: 258811 - RNA, 19 nt, Homo sapiens
  misc_RNA (1)...(19): siRNA sense strand
cuaaaccaaugacugcuuu

SEQ ID NO: 258812 - RNA, 19 nt, Homo sapiens
  misc_RNA (1)...(19): siRNA sense strand
uaaugagcaugccaaacua

SEQ ID NO: 258813 - RNA, 19 nt, Homo sapiens
  misc_RNA (1)...(19): siRNA sense strand
aaagaacacugcuccaagu

SEQ ID NO: 258814 - RNA, 19 nt, Homo sapiens
  misc_RNA (1)...(19): siRNA sense strand
uuucaggacuuccaagauu

SEQ ID NO: 258815 - RNA, 19 nt, Homo sapiens
  misc_RNA (1)...(19): siRNA sense strand
agacaauucuagaacaaga

SEQ ID NO: 258816 - RNA, 19 nt, Homo sapiens
  misc_RNA (1)...(19): siRNA sense strand
acagucagaugucccuaaa

SEQ ID NO: 258817 - RNA, 19 nt, Homo sapiens
  misc_RNA (1)...(19): siRNA sense strand
gauauugaacgguuuaaag

SEQ ID NO: 258818 - RNA, 19 nt, Homo sapiens
  misc_RNA (1)...(19): siRNA sense strand
uaaggcaugucuugguaga

SEQ ID NO: 258819 - RNA, 19 nt, Homo sapiens
  misc_RNA (1)...(19): siRNA sense strand
gggagaagaggccgagaaa

SEQ ID NO: 258820 - RNA, 19 nt, Homo sapiens
  misc_RNA (1)...(19): siRNA sense strand
cagaagcuuuccagccaaa

SEQ ID NO: 258821 - RNA, 19 nt, Homo sapiens
  misc_RNA (1)...(19): siRNA sense strand
gaaggugcuuaucacagau

SEQ ID NO: 258822 - RNA, 19 nt, Homo sapiens
  misc_RNA (1)...(19): siRNA sense strand
ccauuugguuccucaguau

SEQ ID NO: 258823 - RNA, 19 nt, Homo sapiens
  misc_RNA (1)...(19): siRNA sense strand
gaauuuggaaggugcuuau

SEQ ID NO: 258824 - RNA, 19 nt, Homo sapiens
  misc_RNA (1)...(19): siRNA sense strand
ccagaacgaaagacacuaa

SEQ ID NO: 258825 - RNA, 19 nt, Homo sapiens
  misc_RNA (1)...(19): siRNA sense strand
cacagauucuccacacuga

SEQ ID NO: 258826 - RNA, 19 nt, Homo sapiens
  misc_RNA (1)...(19): siRNA sense strand
ccaagauucagucacgaua

SEQ ID NO: 258827 - RNA, 19 nt, Homo sapiens
  misc_RNA (1)...(19): siRNA sense strand
aggcaugucuugguagaaa

SEQ ID NO: 258828 - RNA, 19 nt, Homo sapiens
  misc_RNA (1)...(19): siRNA sense strand
auuaaggcaugucuuggua

SEQ ID NO: 258829 - RNA, 19 nt, Homo sapiens
  misc_RNA (1)...(19): siRNA sense strand
gaaagcccagaacgaaaga

SEQ ID NO: 258830 - RNA, 19 nt, Homo sapiens
  misc_RNA (1)...(19): siRNA sense strand
gaacuaaaagcacuccauu

SEQ ID NO: 258831 - RNA, 19 nt, Homo sapiens
  misc_RNA (1)...(19): siRNA sense strand
cacacugaguuuaaaucua

SEQ ID NO: 258832 - RNA, 19 nt, Homo sapiens
  misc_RNA (1)...(19): siRNA sense strand
ucagaugucccuaaaccaa

SEQ ID NO: 258833 - RNA, 19 nt, Homo sapiens
  misc_RNA (1)...(19): siRNA sense strand
cuaaugagcaugccaaacu

SEQ ID NO: 258834 - RNA, 19 nt, Homo sapiens
  misc_RNA (1)...(19): siRNA sense strand
ggaauuuggaaggugcuua

SEQ ID NO: 258835 - RNA, 19 nt, Homo sapiens
  misc_RNA (1)...(19): siRNA sense strand
agaagaggccgagaaagaa

SEQ ID NO: 258836 - RNA, 19 nt, Homo sapiens
  misc_RNA (1)...(19): siRNA sense strand
caugauauugaacgguuua

SEQ ID NO: 258837 - RNA, 19 nt, Homo sapiens
  misc_RNA (1)...(19): siRNA sense strand
caugcagacuggagguuug

SEQ ID NO: 258838 - RNA, 19 nt, Homo sapiens
  misc_RNA (1)...(19): siRNA sense strand
gaacgguuuaaagccauua

SEQ ID NO: 258839 - RNA, 19 nt, Homo sapiens
  misc_RNA (1)...(19): siRNA sense strand
uaaaagcacuccauuuggu

SEQ ID NO: 258840 - RNA, 19 nt, Homo sapiens
  misc_RNA (1)...(19): siRNA sense strand
ugaagaaagcccagaacga

SEQ ID NO: 258841 - RNA, 19 nt, Homo sapiens
  misc_RNA (1)...(19): siRNA sense strand
gccauuaaggcaugucuug

SEQ ID NO: 258842 - RNA, 19 nt, Homo sapiens
  misc_RNA (1)...(19): siRNA sense strand
gaagaggccgagaaagaac

SEQ ID NO: 258843 - RNA, 19 nt, Homo sapiens
  misc_RNA (1)...(19): siRNA sense strand
uccauuugguuccucagua

SEQ ID NO: 258844 - RNA, 19 nt, Homo sapiens
  misc_RNA (1)...(19): siRNA sense strand
caacaacuugcaucaugau

SEQ ID NO: 258845 - RNA, 19 nt, Homo sapiens
  misc_RNA (1)...(19): siRNA sense strand
ccaaugacugcuuuaguag

SEQ ID NO: 258846 - RNA, 19 nt, Homo sapiens
  misc_RNA (1)...(19): siRNA sense strand
ucuccacacugaguuuaaa

SEQ ID NO: 258847 - RNA, 19 nt, Homo sapiens
  misc_RNA (1)...(19): siRNA sense strand
uaugaggcccaaauuaugu

SEQ ID NO: 258848 - RNA, 19 nt, Homo sapiens
  misc_RNA (1)...(19): siRNA sense strand
cuaugaggcccaaauuaug

SEQ ID NO: 258849 - RNA, 19 nt, Homo sapiens
  misc_RNA (1)...(19): siRNA sense strand
uggguacugugacugcuuu

SEQ ID NO: 258850 - RNA, 19 nt, Homo sapiens
  misc_RNA (1)...(19): siRNA sense strand
agaugucccuaaaccaaug

SEQ ID NO: 258851 - RNA, 19 nt, Homo sapiens
  misc_RNA (1)...(19): siRNA sense strand
gaauuacugcgagugcuau

SEQ ID NO: 258852 - RNA, 19 nt, Homo sapiens
  misc_RNA (1)...(19): siRNA sense strand
gcagacuggagguuuggaa

SEQ ID NO: 258853 - RNA, 19 nt, Homo sapiens
  misc_RNA (1)...(19): siRNA sense strand
aagaaagcccagaacgaaa

SEQ ID NO: 258854 - RNA, 19 nt, Homo sapiens
  misc_RNA (1)...(19): siRNA sense strand
agaaagaacacugcuccaa

SEQ ID NO: 258855 - RNA, 19 nt, Homo sapiens
  misc_RNA (1)...(19): siRNA sense strand
guagucaacgggucugcuu

SEQ ID NO: 258856 - RNA, 19 nt, Homo sapiens
  misc_RNA (1)...(19): siRNA sense strand
ugaacgguuuaaagccauu

SEQ ID NO: 258857 - RNA, 19 nt, Homo sapiens
  misc_RNA (1)...(19): siRNA sense strand
ucaugauauugaacgguuu

SEQ ID NO: 258858 - RNA, 19 nt, Homo sapiens
  misc_RNA (1)...(19): siRNA sense strand
acaacuugcaucaugauau

SEQ ID NO: 258859 - RNA, 19 nt, Homo sapiens
  misc_RNA (1)...(19): siRNA sense strand
caagauucagucacgauag

SEQ ID NO: 258860 - RNA, 19 nt, Homo sapiens
  misc_RNA (1)...(19): siRNA sense strand
agaauuacugcgagugcua

SEQ ID NO: 258861 - RNA, 19 nt, Homo sapiens
  misc_RNA (1)...(19): siRNA sense strand
ccacacugaguuuaaaucu

SEQ ID NO: 258862 - RNA, 19 nt, Homo sapiens
  misc_RNA (1)...(19): siRNA sense strand
agaaagcccagaacgaaag

SEQ ID NO: 258863 - RNA, 19 nt, Homo sapiens
  misc_RNA (1)...(19): siRNA sense strand
gugcuaugaggcccaaauu

SEQ ID NO: 258864 - RNA, 19 nt, Homo sapiens
  misc_RNA (1)...(19): siRNA sense strand
gcccaaauuauguguucuu

SEQ ID NO: 258865 - RNA, 19 nt, Homo sapiens
  misc_RNA (1)...(19): siRNA sense strand
ucuagaacaagagaacuaa

SEQ ID NO: 258866 - RNA, 19 nt, Homo sapiens
  misc_RNA (1)...(19): siRNA sense strand
gccagcaucaacaaaauua

SEQ ID NO: 258867 - RNA, 19 nt, Homo sapiens
  misc_RNA (1)...(19): siRNA sense strand
uauguguucuucuauuugc

SEQ ID NO: 258868 - RNA, 19 nt, Homo sapiens
  misc_RNA (1)...(19): siRNA sense strand
ggcaugucuugguagaaau

SEQ ID NO: 258869 - RNA, 19 nt, Homo sapiens
  misc_RNA (1)...(19): siRNA sense strand
ucuaagggauugaaaaugg

SEQ ID NO: 258870 - RNA, 19 nt, Homo sapiens
  misc_RNA (1)...(19): siRNA sense strand
cacaugcgccugccugcuu

SEQ ID NO: 258871 - RNA, 19 nt, Homo sapiens
  misc_RNA (1)...(19): siRNA sense strand
acaacuugagggagccuua

SEQ ID NO: 258872 - RNA, 19 nt, Homo sapiens
  misc_RNA (1)...(19): siRNA sense strand
gauucuccacacugaguuu

SEQ ID NO: 258873 - RNA, 19 nt, Homo sapiens
  misc_RNA (1)...(19): siRNA sense strand
gcaagucccuguacuauua

SEQ ID NO: 258874 - RNA, 19 nt, Homo sapiens
  misc_RNA (1)...(19): siRNA sense strand
gaagacaccugcucaguau

SEQ ID NO: 258875 - RNA, 19 nt, Homo sapiens
  misc_RNA (1)...(19): siRNA sense strand
ggacacaucuggugacuuc

SEQ ID NO: 258876 - RNA, 19 nt, Homo sapiens
  misc_RNA (1)...(19): siRNA sense strand
gaggauggcucugucauug

SEQ ID NO: 258877 - RNA, 19 nt, Homo sapiens
  misc_RNA (1)...(19): siRNA sense strand
gcacagagacaggauauug

SEQ ID NO: 258878 - RNA, 19 nt, Homo sapiens
  misc_RNA (1)...(19): siRNA sense strand
ggucugaauucaagagaaa

SEQ ID NO: 258879 - RNA, 19 nt, Homo sapiens
  misc_RNA (1)...(19): siRNA sense strand
guaugacgcuucugagcua

SEQ ID NO: 258880 - RNA, 19 nt, Homo sapiens
  misc_RNA (1)...(19): siRNA sense strand
gacgaggacucucucauug

SEQ ID NO: 258881 - RNA, 19 nt, Homo sapiens
  misc_RNA (1)...(19): siRNA sense strand
agacugaucuggagaagga

SEQ ID NO: 258882 - RNA, 19 nt, Homo sapiens
  misc_RNA (1)...(19): siRNA sense strand
gauaagguccugaucagaa

SEQ ID NO: 258883 - RNA, 19 nt, Homo sapiens
  misc_RNA (1)...(19): siRNA sense strand
uaacagagucuacaaggaa

SEQ ID NO: 258884 - RNA, 19 nt, Homo sapiens
  misc_RNA (1)...(19): siRNA sense strand
uuacagcccuuaugacaug

SEQ ID NO: 258885 - RNA, 19 nt, Homo sapiens
  misc_RNA (1)...(19): siRNA sense strand
aaacagccaucaagaccaa

SEQ ID NO: 258886 - RNA, 19 nt, Homo sapiens
  misc_RNA (1)...(19): siRNA sense strand
gagauaagguccugaucag

SEQ ID NO: 258887 - RNA, 19 nt, Homo sapiens
  misc_RNA (1)...(19): siRNA sense strand
gggaugcuuugaacauuga

SEQ ID NO: 258888 - RNA, 19 nt, Homo sapiens
  misc_RNA (1)...(19): siRNA sense strand
ggauggcucugucauugau

SEQ ID NO: 258889 - RNA, 19 nt, Homo sapiens
  misc_RNA (1)...(19): siRNA sense strand
ugaagacaccugcucagua

SEQ ID NO: 258890 - RNA, 19 nt, Homo sapiens
  misc_RNA (1)...(19): siRNA sense strand
gaaauuaacagagucuaca

SEQ ID NO: 258891 - RNA, 19 nt, Homo sapiens
  misc_RNA (1)...(19): siRNA sense strand
ggucaccauugucaacauu

SEQ ID NO: 258892 - RNA, 19 nt, Homo sapiens
  misc_RNA (1)...(19): siRNA sense strand
guggacauguugaaaauua

SEQ ID NO: 258893 - RNA, 19 nt, Homo sapiens
  misc_RNA (1)...(19): siRNA sense strand
cgacgaggacucucucauu

SEQ ID NO: 258894 - RNA, 19 nt, Homo sapiens
  misc_RNA (1)...(19): siRNA sense strand
gcauaugggucugucaaag

SEQ ID NO: 258895 - RNA, 19 nt, Homo sapiens
  misc_RNA (1)...(19): siRNA sense strand
uaagggcgacuaccagaaa

SEQ ID NO: 258896 - RNA, 19 nt, Homo sapiens
  misc_RNA (1)...(19): siRNA sense strand
ggagugaagaggaaaggaa

SEQ ID NO: 258897 - RNA, 19 nt, Homo sapiens
  misc_RNA (1)...(19): siRNA sense strand
gaacugauugaccaagaug

SEQ ID NO: 258898 - RNA, 19 nt, Homo sapiens
  misc_RNA (1)...(19): siRNA sense strand
gcgggaugcuuugaacauu

SEQ ID NO: 258899 - RNA, 19 nt, Homo sapiens
  misc_RNA (1)...(19): siRNA sense strand
acuauuauauccagcaaga

SEQ ID NO: 258900 - RNA, 19 nt, Homo sapiens
  misc_RNA (1)...(19): siRNA sense strand
gaggaaaggaacugauguu

SEQ ID NO: 258901 - RNA, 19 nt, Homo sapiens
  misc_RNA (1)...(19): siRNA sense strand
ggagggugaucacucuaca

SEQ ID NO: 258902 - RNA, 19 nt, Homo sapiens
  misc_RNA (1)...(19): siRNA sense strand
agaaagcgcugcuguaccu

SEQ ID NO: 258903 - RNA, 19 nt, Homo sapiens
  misc_RNA (1)...(19): siRNA sense strand
caggaaagagguuaaagga

SEQ ID NO: 258904 - RNA, 19 nt, Homo sapiens
  misc_RNA (1)...(19): siRNA sense strand
acaaggaaauguacaagac

SEQ ID NO: 258905 - RNA, 19 nt, Homo sapiens
  misc_RNA (1)...(19): siRNA sense strand
ccgcagcaaugcacagaga

SEQ ID NO: 258906 - RNA, 19 nt, Homo sapiens
  misc_RNA (1)...(19): siRNA sense strand
guacuauuauauccagcaa

SEQ ID NO: 258907 - RNA, 19 nt, Homo sapiens
  misc_RNA (1)...(19): siRNA sense strand
gaaauguacaagacugauc

SEQ ID NO: 258908 - RNA, 19 nt, Homo sapiens
  misc_RNA (1)...(19): siRNA sense strand
cagaaaguauuugauaggu

SEQ ID NO: 258909 - RNA, 19 nt, Homo sapiens
  misc_RNA (1)...(19): siRNA sense strand
ggacauuauuucggacaca

SEQ ID NO: 258910 - RNA, 19 nt, Homo sapiens
  misc_RNA (1)...(19): siRNA sense strand
accaggagcugcaggaaau

SEQ ID NO: 258911 - RNA, 19 nt, Homo sapiens
  misc_RNA (1)...(19): siRNA sense strand
cgagauaagguccugauca

SEQ ID NO: 258912 - RNA, 19 nt, Homo sapiens
  misc_RNA (1)...(19): siRNA sense strand
uuugauagguacaagaguu

SEQ ID NO: 258913 - RNA, 19 nt, Homo sapiens
  misc_RNA (1)...(19): siRNA sense strand
gaagaggaaaggaacugau

SEQ ID NO: 258914 - RNA, 19 nt, Homo sapiens
  misc_RNA (1)...(19): siRNA sense strand
guaccugugugguggagau

SEQ ID NO: 258915 - RNA, 19 nt, Homo sapiens
  misc_RNA (1)...(19): siRNA sense strand
gaaguggacauguugaaaa

SEQ ID NO: 258916 - RNA, 19 nt, Homo sapiens
  misc_RNA (1)...(19): siRNA sense strand
agacaccugcucaguauga

SEQ ID NO: 258917 - RNA, 19 nt, Homo sapiens
  misc_RNA (1)...(19): siRNA sense strand
gaucuggagaaggacauua

SEQ ID NO: 258918 - RNA, 19 nt, Homo sapiens
  misc_RNA (1)...(19): siRNA sense strand
cgggaugcuuugaacauug

SEQ ID NO: 258919 - RNA, 19 nt, Homo sapiens
  misc_RNA (1)...(19): siRNA sense strand
uuaacagagucuacaagga

SEQ ID NO: 258920 - RNA, 19 nt, Homo sapiens
  misc_RNA (1)...(19): siRNA sense strand
gguuaaaggagaccuggaa

SEQ ID NO: 258921 - RNA, 19 nt, Homo sapiens
  misc_RNA (1)...(19): siRNA sense strand
uggaaagcaucaggaaaga

SEQ ID NO: 258922 - RNA, 19 nt, Homo sapiens
  misc_RNA (1)...(19): siRNA sense strand
agaguuacagcccuuauga

SEQ ID NO: 258923 - RNA, 19 nt, Homo sapiens
  misc_RNA (1)...(19): siRNA sense strand
ggagaaggacauuauuucg

SEQ ID NO: 258924 - RNA, 19 nt, Homo sapiens
  misc_RNA (1)...(19): siRNA sense strand
ggaaauuaacagagucuac

SEQ ID NO: 258925 - RNA, 19 nt, Homo sapiens
  misc_RNA (1)...(19): siRNA sense strand
cuccagaaaguauuugaua

SEQ ID NO: 258926 - RNA, 19 nt, Homo sapiens
  misc_RNA (1)...(19): siRNA sense strand
cuaugacgcuggagugaag

SEQ ID NO: 258927 - RNA, 19 nt, Homo sapiens
  misc_RNA (1)...(19): siRNA sense strand
gaaccgacgaggacucucu

SEQ ID NO: 258928 - RNA, 19 nt, Homo sapiens
  misc_RNA (1)...(19): siRNA sense strand
auaagguccugaucagaau

SEQ ID NO: 258929 - RNA, 19 nt, Homo sapiens
  misc_RNA (1)...(19): siRNA sense strand
cuuaugacauguuggaaag

SEQ ID NO: 258930 - RNA, 19 nt, Homo sapiens
  misc_RNA (1)...(19): siRNA sense strand
ccaaguggaucagcaucau

SEQ ID NO: 258931 - RNA, 19 nt, Homo sapiens
  misc_RNA (1)...(19): siRNA sense strand
caggagcugcaggaaauua

SEQ ID NO: 258932 - RNA, 19 nt, Homo sapiens
  misc_RNA (1)...(19): siRNA sense strand
ugaacugauugaccaagau

SEQ ID NO: 258933 - RNA, 19 nt, Homo sapiens
  misc_RNA (1)...(19): siRNA sense strand
aacagagucuacaaggaaa

SEQ ID NO: 258934 - RNA, 19 nt, Homo sapiens
  misc_RNA (1)...(19): siRNA sense strand
ccaccuccagaaaguauuu

SEQ ID NO: 258935 - RNA, 19 nt, Homo sapiens
  misc_RNA (1)...(19): siRNA sense strand
ggcaagucccuguacuauu

SEQ ID NO: 258936 - RNA, 19 nt, Homo sapiens
  misc_RNA (1)...(19): siRNA sense strand
ccagaaagcgcugcuguac

SEQ ID NO: 258937 - RNA, 19 nt, Homo sapiens
  misc_RNA (1)...(19): siRNA sense strand
ugaaguggacauguugaaa

SEQ ID NO: 258938 - RNA, 19 nt, Homo sapiens
  misc_RNA (1)...(19): siRNA sense strand
ugcaggaaauuaacagagu

SEQ ID NO: 258939 - RNA, 19 nt, Homo sapiens
  misc_RNA (1)...(19): siRNA sense strand
ccagaaaguauuugauagg

SEQ ID NO: 258940 - RNA, 19 nt, Homo sapiens
  misc_RNA (1)...(19): siRNA sense strand
uccagaaaguauuugauag

SEQ ID NO: 258941 - RNA, 19 nt, Homo sapiens
  misc_RNA (1)...(19): siRNA sense strand
gacauuauuucggacacau

SEQ ID NO: 258942 - RNA, 19 nt, Homo sapiens
  misc_RNA (1)...(19): siRNA sense strand
uggagaaggacauuauuuc

SEQ ID NO: 258943 - RNA, 19 nt, Homo sapiens
  misc_RNA (1)...(19): siRNA sense strand
caagacugaucuggagaag

SEQ ID NO: 258944 - RNA, 19 nt, Homo sapiens
  misc_RNA (1)...(19): siRNA sense strand
auggcucugucauugauua

SEQ ID NO: 258945 - RNA, 19 nt, Homo sapiens
  misc_RNA (1)...(19): siRNA sense strand
guuaaaggagaccuggaaa

SEQ ID NO: 258946 - RNA, 19 nt, Homo sapiens
  misc_RNA (1)...(19): siRNA sense strand
gagcugcaggaaauuaaca

SEQ ID NO: 258947 - RNA, 19 nt, Homo sapiens
  misc_RNA (1)...(19): siRNA sense strand
gcaaggggacgcgagauaa

SEQ ID NO: 258948 - RNA, 19 nt, Homo sapiens
  misc_RNA (1)...(19): siRNA sense strand
uugauagguacaagaguua

SEQ ID NO: 258949 - RNA, 19 nt, Homo sapiens
  misc_RNA (1)...(19): siRNA sense strand
gauguucccaaguggauca

SEQ ID NO: 258950 - RNA, 19 nt, Homo sapiens
  misc_RNA (1)...(19): siRNA sense strand
cuggagaaggacauuauuu

SEQ ID NO: 258951 - RNA, 19 nt, Homo sapiens
  misc_RNA (1)...(19): siRNA sense strand
ggaaauguacaagacugau

SEQ ID NO: 258952 - RNA, 19 nt, Homo sapiens
  misc_RNA (1)...(19): siRNA sense strand
gcaucaggaaagagguuaa

SEQ ID NO: 258953 - RNA, 19 nt, Homo sapiens
  misc_RNA (1)...(19): siRNA sense strand
cggcaagucccuguacuau

SEQ ID NO: 258954 - RNA, 19 nt, Homo sapiens
  misc_RNA (1)...(19): siRNA sense strand
caucaggaaagagguuaaa

SEQ ID NO: 258955 - RNA, 19 nt, Homo sapiens
  misc_RNA (1)...(19): siRNA sense strand
acgcuggagugaagaggaa

SEQ ID NO: 258956 - RNA, 19 nt, Homo sapiens
  misc_RNA (1)...(19): siRNA sense strand
uaugacauguuggaaagca

SEQ ID NO: 258957 - RNA, 19 nt, Homo sapiens
  misc_RNA (1)...(19): siRNA sense strand
gcagcaaugcacagagaca

SEQ ID NO: 258958 - RNA, 19 nt, Homo sapiens
  misc_RNA (1)...(19): siRNA sense strand
caagaguuacagcccuuau

SEQ ID NO: 258959 - RNA, 19 nt, Homo sapiens
  misc_RNA (1)...(19): siRNA sense strand
uauuauauccagcaagaca

SEQ ID NO: 258960 - RNA, 19 nt, Homo sapiens
  misc_RNA (1)...(19): siRNA sense strand
gugaaguggacauguugaa

SEQ ID NO: 258961 - RNA, 19 nt, Homo sapiens
  misc_RNA (1)...(19): siRNA sense strand
augcugagcgggaugcuuu

SEQ ID NO: 258962 - RNA, 19 nt, Homo sapiens
  misc_RNA (1)...(19): siRNA sense strand
uaaaggagaccuggaaaau

SEQ ID NO: 258963 - RNA, 19 nt, Homo sapiens
  misc_RNA (1)...(19): siRNA sense strand
cagcccuuaugacauguug

SEQ ID NO: 258964 - RNA, 19 nt, Homo sapiens
  misc_RNA (1)...(19): siRNA sense strand
gugcauaugggucugucaa

SEQ ID NO: 258965 - RNA, 19 nt, Homo sapiens
  misc_RNA (1)...(19): siRNA sense strand
cugguucagugcauucaga

SEQ ID NO: 258966 - RNA, 19 nt, Homo sapiens
  misc_RNA (1)...(19): siRNA sense strand
ugagcgggaugcuuugaac

SEQ ID NO: 258967 - RNA, 19 nt, Homo sapiens
  misc_RNA (1)...(19): siRNA sense strand
gcagggaaguggagcaaug

SEQ ID NO: 258968 - RNA, 19 nt, Homo sapiens
  misc_RNA (1)...(19): siRNA sense strand
ccgaggagcugaacaagca

SEQ ID NO: 258969 - RNA, 19 nt, Homo sapiens
  misc_RNA (1)...(19): siRNA sense strand
cggagcagcugcaguccua

SEQ ID NO: 258970 - RNA, 19 nt, Homo sapiens
  misc_RNA (1)...(19): siRNA sense strand
gcaacacauuuggguacua

SEQ ID NO: 258971 - RNA, 19 nt, Homo sapiens
  misc_RNA (1)...(19): siRNA sense strand
caacacauuuggguacuag

SEQ ID NO: 258972 - RNA, 19 nt, Homo sapiens
  misc_RNA (1)...(19): siRNA sense strand
ugugagggcuccuucaaug

SEQ ID NO: 258973 - RNA, 19 nt, Homo sapiens
  misc_RNA (1)...(19): siRNA sense strand
uugaggagcuccagcagaa

SEQ ID NO: 258974 - RNA, 19 nt, Homo sapiens
  misc_RNA (1)...(19): siRNA sense strand
ucaaugcccuggagaucga

SEQ ID NO: 258975 - RNA, 19 nt, Homo sapiens
  misc_RNA (1)...(19): siRNA sense strand
agaaggagaccaugcaguu

SEQ ID NO: 258976 - RNA, 19 nt, Homo sapiens
  misc_RNA (1)...(19): siRNA sense strand
gaaaacacgcugacagaga

SEQ ID NO: 258977 - RNA, 19 nt, Homo sapiens
  misc_RNA (1)...(19): siRNA sense strand
gaggagcuccagcagaaga

SEQ ID NO: 258978 - RNA, 19 nt, Homo sapiens
  misc_RNA (1)...(19): siRNA sense strand
ggcagaaccaggaguauca

SEQ ID NO: 258979 - RNA, 19 nt, Homo sapiens
  misc_RNA (1)...(19): siRNA sense strand
gaaggagaccaugcaguuc

SEQ ID NO: 258980 - RNA, 19 nt, Homo sapiens
  misc_RNA (1)...(19): siRNA sense strand
gcagugagaaggagaccau

SEQ ID NO: 258981 - RNA, 19 nt, Homo sapiens
  misc_RNA (1)...(19): siRNA sense strand
ugaaugagaccaggaguca

SEQ ID NO: 258982 - RNA, 19 nt, Homo sapiens
  misc_RNA (1)...(19): siRNA sense strand
gcagcaagucugagaaugc

SEQ ID NO: 258983 - RNA, 19 nt, Homo sapiens
  misc_RNA (1)...(19): siRNA sense strand
uaccaguccuacuucaaga

SEQ ID NO: 258984 - RNA, 19 nt, Homo sapiens
  misc_RNA (1)...(19): siRNA sense strand
gcaggagcccuuggugugu

SEQ ID NO: 258985 - RNA, 19 nt, Homo sapiens
  misc_RNA (1)...(19): siRNA sense strand
agaccaggagucaguauga

SEQ ID NO: 258986 - RNA, 19 nt, Homo sapiens
  misc_RNA (1)...(19): siRNA sense strand
caacugcaacugguucugu

SEQ ID NO: 258987 - RNA, 19 nt, Homo sapiens
  misc_RNA (1)...(19): siRNA sense strand
ccagcuaccaguccuacuu

SEQ ID NO: 258988 - RNA, 19 nt, Homo sapiens
  misc_RNA (1)...(19): siRNA sense strand
ggagaucaucgagcugaga

SEQ ID NO: 258989 - RNA, 19 nt, Homo sapiens
  misc_RNA (1)...(19): siRNA sense strand
ugaacaagcaggugguauc

SEQ ID NO: 258990 - RNA, 19 nt, Homo sapiens
  misc_RNA (1)...(19): siRNA sense strand
gggaaguggagcaaugguu

SEQ ID NO: 258991 - RNA, 19 nt, Homo sapiens
  misc_RNA (1)...(19): siRNA sense strand
ugacuucaggaccaaauau

SEQ ID NO: 258992 - RNA, 19 nt, Homo sapiens
  misc_RNA (1)...(19): siRNA sense strand
cagaugacuucaggaccaa

SEQ ID NO: 258993 - RNA, 19 nt, Homo sapiens
  misc_RNA (1)...(19): siRNA sense strand
ccaagcuggccucagauga

SEQ ID NO: 258994 - RNA, 19 nt, Homo sapiens
  misc_RNA (1)...(19): siRNA sense strand
ugcagagacugaucaccaa

SEQ ID NO: 258995 - RNA, 19 nt, Homo sapiens
  misc_RNA (1)...(19): siRNA sense strand
gaccaggagucaguaugag

SEQ ID NO: 258996 - RNA, 19 nt, Homo sapiens
  misc_RNA (1)...(19): siRNA sense strand
gcacaaccugcgagacucu

SEQ ID NO: 258997 - RNA, 19 nt, Homo sapiens
  misc_RNA (1)...(19): siRNA sense strand
accaugagcaggagguuaa

SEQ ID NO: 258998 - RNA, 19 nt, Homo sapiens
  misc_RNA (1)...(19): siRNA sense strand
gaacaagcaggugguaucc

SEQ ID NO: 258999 - RNA, 19 nt, Homo sapiens
  misc_RNA (1)...(19): siRNA sense strand
guaugaggcccugguggaa

SEQ ID NO: 259000 - RNA, 19 nt, Homo sapiens
  misc_RNA (1)...(19): siRNA sense strand
ucaauggcagugagaagga

SEQ ID NO: 259001 - RNA, 19 nt, Homo sapiens
  misc_RNA (1)...(19): siRNA sense strand
ggucaaugcccuggagauc

SEQ ID NO: 259002 - RNA, 19 nt, Homo sapiens
  misc_RNA (1)...(19): siRNA sense strand
agaagauccugugcagcaa

SEQ ID NO: 259003 - RNA, 19 nt, Homo sapiens
  misc_RNA (1)...(19): siRNA sense strand
acugggcccuguaucucua

SEQ ID NO: 259004 - RNA, 19 nt, Homo sapiens
  misc_RNA (1)...(19): siRNA sense strand
gagaccaggagucaguaug

SEQ ID NO: 259005 - RNA, 19 nt, Homo sapiens
  misc_RNA (1)...(19): siRNA sense strand
gccucaagcagaaccauga

SEQ ID NO: 259006 - RNA, 19 nt, Homo sapiens
  misc_RNA (1)...(19): siRNA sense strand
gguggagucggacaucaau

SEQ ID NO: 259007 - RNA, 19 nt, Homo sapiens
  misc_RNA (1)...(19): siRNA sense strand
gaugacuucaggaccaaau

SEQ ID NO: 259008 - RNA, 19 nt, Homo sapiens
  misc_RNA (1)...(19): siRNA sense strand
cagcacaaccugcgagacu

SEQ ID NO: 259009 - RNA, 19 nt, Homo sapiens
  misc_RNA (1)...(19): siRNA sense strand
agaccgaggagcugaacaa

SEQ ID NO: 259010 - RNA, 19 nt, Homo sapiens
  misc_RNA (1)...(19): siRNA sense strand
acgcggagcuggagaaccu

SEQ ID NO: 259011 - RNA, 19 nt, Homo sapiens
  misc_RNA (1)...(19): siRNA sense strand
ccaaugugagcaacugcaa

SEQ ID NO: 259012 - RNA, 19 nt, Homo sapiens
  misc_RNA (1)...(19): siRNA sense strand
gcugaacaagcagguggua

SEQ ID NO: 259013 - RNA, 19 nt, Homo sapiens
  misc_RNA (1)...(19): siRNA sense strand
gaacugcccuucacccuaa

SEQ ID NO: 259014 - RNA, 19 nt, Homo sapiens
  misc_RNA (1)...(19): siRNA sense strand
ucauagaacuugacacaaa

SEQ ID NO: 259015 - RNA, 19 nt, Homo sapiens
  misc_RNA (1)...(19): siRNA sense strand
ggacuuugcucgccagaga

SEQ ID NO: 259016 - RNA, 19 nt, Homo sapiens
  misc_RNA (1)...(19): siRNA sense strand
ggaagaggcugaugacacu

SEQ ID NO: 259017 - RNA, 19 nt, Homo sapiens
  misc_RNA (1)...(19): siRNA sense strand
ggagaucuauuaccaugga

SEQ ID NO: 259018 - RNA, 19 nt, Homo sapiens
  misc_RNA (1)...(19): siRNA sense strand
gaacuugacacaaaugaug

SEQ ID NO: 259019 - RNA, 19 nt, Homo sapiens
  misc_RNA (1)...(19): siRNA sense strand
caacacagcucaguacaag

SEQ ID NO: 259020 - RNA, 19 nt, Homo sapiens
  misc_RNA (1)...(19): siRNA sense strand
cuagaagccucucuggaua

SEQ ID NO: 259021 - RNA, 19 nt, Homo sapiens
  misc_RNA (1)...(19): siRNA sense strand
ggacgcgaguguucaagaa

SEQ ID NO: 259022 - RNA, 19 nt, Homo sapiens
  misc_RNA (1)...(19): siRNA sense strand
uggauaaggagaucuauua

SEQ ID NO: 259023 - RNA, 19 nt, Homo sapiens
  misc_RNA (1)...(19): siRNA sense strand
gagcggagagucuauguga

SEQ ID NO: 259024 - RNA, 19 nt, Homo sapiens
  misc_RNA (1)...(19): siRNA sense strand
gaacgagacgccaguagau

SEQ ID NO: 259025 - RNA, 19 nt, Homo sapiens
  misc_RNA (1)...(19): siRNA sense strand
ugagaucccuccaaaccuu

SEQ ID NO: 259026 - RNA, 19 nt, Homo sapiens
  misc_RNA (1)...(19): siRNA sense strand
gcacccagcucgacguucu

SEQ ID NO: 259027 - RNA, 19 nt, Homo sapiens
  misc_RNA (1)...(19): siRNA sense strand
ccaacaagacggugaagaa

SEQ ID NO: 259028 - RNA, 19 nt, Homo sapiens
  misc_RNA (1)...(19): siRNA sense strand
cauagaacuugacacaaau

SEQ ID NO: 259029 - RNA, 19 nt, Homo sapiens
  misc_RNA (1)...(19): siRNA sense strand
acaagacggugaagaagau

SEQ ID NO: 259030 - RNA, 19 nt, Homo sapiens
  misc_RNA (1)...(19): siRNA sense strand
caagaaggccaguccaaau

SEQ ID NO: 259031 - RNA, 19 nt, Homo sapiens
  misc_RNA (1)...(19): siRNA sense strand
gcacgaagacacgaacuug

SEQ ID NO: 259032 - RNA, 19 nt, Homo sapiens
  misc_RNA (1)...(19): siRNA sense strand
cuccaaaccuuccauguuc

SEQ ID NO: 259033 - RNA, 19 nt, Homo sapiens
  misc_RNA (1)...(19): siRNA sense strand
caggaacgccucaucaaga

SEQ ID NO: 259034 - RNA, 19 nt, Homo sapiens
  misc_RNA (1)...(19): siRNA sense strand
gcaugaaggaugacaagga

SEQ ID NO: 259035 - RNA, 19 nt, Homo sapiens
  misc_RNA (1)...(19): siRNA sense strand
auaaggagaucuauuacca

SEQ ID NO: 259036 - RNA, 19 nt, Homo sapiens
  misc_RNA (1)...(19): siRNA sense strand
cgagcacgcuuacccuuuc

SEQ ID NO: 259037 - RNA, 19 nt, Homo sapiens
  misc_RNA (1)...(19): siRNA sense strand
ucaaagagcggagagucua

SEQ ID NO: 259038 - RNA, 19 nt, Homo sapiens
  misc_RNA (1)...(19): siRNA sense strand
gacacgaacuuggccucua

SEQ ID NO: 259039 - RNA, 19 nt, Homo sapiens
  misc_RNA (1)...(19): siRNA sense strand
caaagggacgcgaguguuc

SEQ ID NO: 259040 - RNA, 19 nt, Homo sapiens
  misc_RNA (1)...(19): siRNA sense strand
aggaacgccucaucaagaa

SEQ ID NO: 259041 - RNA, 19 nt, Homo sapiens
  misc_RNA (1)...(19): siRNA sense strand
auggaaagcucaccgucua

SEQ ID NO: 259042 - RNA, 19 nt, Homo sapiens
  misc_RNA (1)...(19): siRNA sense strand
gaccugcgccuuccgcuau

SEQ ID NO: 259043 - RNA, 19 nt, Homo sapiens
  misc_RNA (1)...(19): siRNA sense strand
caguacaagugcccuguug

SEQ ID NO: 259044 - RNA, 19 nt, Homo sapiens
  misc_RNA (1)...(19): siRNA sense strand
cggagaauuuggaggagaa

SEQ ID NO: 259045 - RNA, 19 nt, Homo sapiens
  misc_RNA (1)...(19): siRNA sense strand
ccugguggauccugaguau

SEQ ID NO: 259046 - RNA, 19 nt, Homo sapiens
  misc_RNA (1)...(19): siRNA sense strand
ugaugacgacauuguauuu

SEQ ID NO: 259047 - RNA, 19 nt, Homo sapiens
  misc_RNA (1)...(19): siRNA sense strand
gaaggugccaaccgugaga

SEQ ID NO: 259048 - RNA, 19 nt, Homo sapiens
  misc_RNA (1)...(19): siRNA sense strand
gcaggaacgccucaucaag

SEQ ID NO: 259049 - RNA, 19 nt, Homo sapiens
  misc_RNA (1)...(19): siRNA sense strand
ccuacaaagugaaagugaa

SEQ ID NO: 259050 - RNA, 19 nt, Homo sapiens
  misc_RNA (1)...(19): siRNA sense strand
acacgaacuuggccucuag

SEQ ID NO: 259051 - RNA, 19 nt, Homo sapiens
  misc_RNA (1)...(19): siRNA sense strand
ugcaaggucuacacacuga

SEQ ID NO: 259052 - RNA, 19 nt, Homo sapiens
  misc_RNA (1)...(19): siRNA sense strand
gaucuauuaccauggagaa

SEQ ID NO: 259053 - RNA, 19 nt, Homo sapiens
  misc_RNA (1)...(19): siRNA sense strand
cauuguauuugaggacuuu

SEQ ID NO: 259054 - RNA, 19 nt, Homo sapiens
  misc_RNA (1)...(19): siRNA sense strand
ccuagaagccucucuggau

SEQ ID NO: 259055 - RNA, 19 nt, Homo sapiens
  misc_RNA (1)...(19): siRNA sense strand
ucaagaaggccaguccaaa

SEQ ID NO: 259056 - RNA, 19 nt, Homo sapiens
  misc_RNA (1)...(19): siRNA sense strand
uagaagccucucuggauaa

SEQ ID NO: 259057 - RNA, 19 nt, Homo sapiens
  misc_RNA (1)...(19): siRNA sense strand
gcgagcacgcuuacccuuu

SEQ ID NO: 259058 - RNA, 19 nt, Homo sapiens
  misc_RNA (1)...(19): siRNA sense strand
aagccucucuggauaagga

SEQ ID NO: 259059 - RNA, 19 nt, Homo sapiens
  misc_RNA (1)...(19): siRNA sense strand
gagcacgcuuacccuuuca

SEQ ID NO: 259060 - RNA, 19 nt, Homo sapiens
  misc_RNA (1)...(19): siRNA sense strand
aaccuuccauguucuguga

SEQ ID NO: 259061 - RNA, 19 nt, Homo sapiens
  misc_RNA (1)...(19): siRNA sense strand
acacagcucaguacaagug

SEQ ID NO: 259062 - RNA, 19 nt, Homo sapiens
  misc_RNA (1)...(19): siRNA sense strand
gaucucagugcgccaguau

SEQ ID NO: 259063 - RNA, 19 nt, Homo sapiens
  misc_RNA (1)...(19): siRNA sense strand
auaccaaucucauagaacu

SEQ ID NO: 259064 - RNA, 19 nt, Homo sapiens
  misc_RNA (1)...(19): siRNA sense strand
caacaagacggugaagaag

SEQ ID NO: 259065 - RNA, 19 nt, Homo sapiens
  misc_RNA (1)...(19): siRNA sense strand
gaugacgacauuguauuug

SEQ ID NO: 259066 - RNA, 19 nt, Homo sapiens
  misc_RNA (1)...(19): siRNA sense strand
gacaaagggacgcgagugu

SEQ ID NO: 259067 - RNA, 19 nt, Homo sapiens
  misc_RNA (1)...(19): siRNA sense strand
ccaaucucauagaacuuga

SEQ ID NO: 259068 - RNA, 19 nt, Homo sapiens
  misc_RNA (1)...(19): siRNA sense strand
gcgccaguaugcagacauc

SEQ ID NO: 259069 - RNA, 19 nt, Homo sapiens
  misc_RNA (1)...(19): siRNA sense strand
augacgacauuguauuuga

SEQ ID NO: 259070 - RNA, 19 nt, Homo sapiens
  misc_RNA (1)...(19): siRNA sense strand
caaagagcggagagucuau

SEQ ID NO: 259071 - RNA, 19 nt, Homo sapiens
  misc_RNA (1)...(19): siRNA sense strand
aagaaggccaguccaaaug

SEQ ID NO: 259072 - RNA, 19 nt, Homo sapiens
  misc_RNA (1)...(19): siRNA sense strand
ccuccaaaccuuccauguu

SEQ ID NO: 259073 - RNA, 19 nt, Homo sapiens
  misc_RNA (1)...(19): siRNA sense strand
ugacgacauuguauuugag

SEQ ID NO: 259074 - RNA, 19 nt, Homo sapiens
  misc_RNA (1)...(19): siRNA sense strand
gagaacccaucagcgucaa

SEQ ID NO: 259075 - RNA, 19 nt, Homo sapiens
  misc_RNA (1)...(19): siRNA sense strand
cgcuuacccuuucaccuuu

SEQ ID NO: 259076 - RNA, 19 nt, Homo sapiens
  misc_RNA (1)...(19): siRNA sense strand
ucucauagaacuugacaca

SEQ ID NO: 259077 - RNA, 19 nt, Homo sapiens
  misc_RNA (1)...(19): siRNA sense strand
ggauaaggagaucuauuac

SEQ ID NO: 259078 - RNA, 19 nt, Homo sapiens
  misc_RNA (1)...(19): siRNA sense strand
ccaggcaguuccucauguc

SEQ ID NO: 259079 - RNA, 19 nt, Homo sapiens
  misc_RNA (1)...(19): siRNA sense strand
ccacagcucaacaacagau

SEQ ID NO: 259080 - RNA, 19 nt, Homo sapiens
  misc_RNA (1)...(19): siRNA sense strand
gaagauccacaagcggaau

SEQ ID NO: 259081 - RNA, 19 nt, Homo sapiens
  misc_RNA (1)...(19): siRNA sense strand
gaaggaugacaaggaggaa

SEQ ID NO: 259082 - RNA, 19 nt, Homo sapiens
  misc_RNA (1)...(19): siRNA sense strand
gaauuuggaggagaagauc

SEQ ID NO: 259083 - RNA, 19 nt, Homo sapiens
  misc_RNA (1)...(19): siRNA sense strand
cuccacagcucaacaacag

SEQ ID NO: 259084 - RNA, 19 nt, Homo sapiens
  misc_RNA (1)...(19): siRNA sense strand
ccauggaagaggcugauga

SEQ ID NO: 259085 - RNA, 19 nt, Homo sapiens
  misc_RNA (1)...(19): siRNA sense strand
ucaccaacaacaccaacaa

SEQ ID NO: 259086 - RNA, 19 nt, Homo sapiens
  misc_RNA (1)...(19): siRNA sense strand
gcuuacccuuucaccuuug

SEQ ID NO: 259087 - RNA, 19 nt, Homo sapiens
  misc_RNA (1)...(19): siRNA sense strand
agaacgagacgccaguaga

SEQ ID NO: 259088 - RNA, 19 nt, Homo sapiens
  misc_RNA (1)...(19): siRNA sense strand
ucaacacagcucaguacaa

SEQ ID NO: 259089 - RNA, 19 nt, Homo sapiens
  misc_RNA (1)...(19): siRNA sense strand
gcucuccacagcucaacaa

SEQ ID NO: 259090 - RNA, 19 nt, Homo sapiens
  misc_RNA (1)...(19): siRNA sense strand
gcucgacguucugcaaggu

SEQ ID NO: 259091 - RNA, 19 nt, Homo sapiens
  misc_RNA (1)...(19): siRNA sense strand
cuacaaagugaaagugaag

SEQ ID NO: 259092 - RNA, 19 nt, Homo sapiens
  misc_RNA (1)...(19): siRNA sense strand
acacaaaugaugacgacau

SEQ ID NO: 259093 - RNA, 19 nt, Homo sapiens
  misc_RNA (1)...(19): siRNA sense strand
gagaacgagacgccaguag

SEQ ID NO: 259094 - RNA, 19 nt, Homo sapiens
  misc_RNA (1)...(19): siRNA sense strand
cuugcgguguggacuauga

SEQ ID NO: 259095 - RNA, 19 nt, Homo sapiens
  misc_RNA (1)...(19): siRNA sense strand
acgcuuacccuuucaccuu

SEQ ID NO: 259096 - RNA, 19 nt, Homo sapiens
  misc_RNA (1)...(19): siRNA sense strand
uagaacuugacacaaauga

SEQ ID NO: 259097 - RNA, 19 nt, Homo sapiens
  misc_RNA (1)...(19): siRNA sense strand
ccaacaacaccaacaagac

SEQ ID NO: 259098 - RNA, 19 nt, Homo sapiens
  misc_RNA (1)...(19): siRNA sense strand
gggacgcgaguguucaaga

SEQ ID NO: 259099 - RNA, 19 nt, Homo sapiens
  misc_RNA (1)...(19): siRNA sense strand
gaacugcccuucacccuaa

SEQ ID NO: 259100 - RNA, 19 nt, Homo sapiens
  misc_RNA (1)...(19): siRNA sense strand
ucauagaacuugacacaaa

SEQ ID NO: 259101 - RNA, 19 nt, Homo sapiens
  misc_RNA (1)...(19): siRNA sense strand
ggacuuugcucgccagaga

SEQ ID NO: 259102 - RNA, 19 nt, Homo sapiens
  misc_RNA (1)...(19): siRNA sense strand
ggaagaggcugaugacacu

SEQ ID NO: 259103 - RNA, 19 nt, Homo sapiens
  misc_RNA (1)...(19): siRNA sense strand
ggagaucuauuaccaugga

SEQ ID NO: 259104 - RNA, 19 nt, Homo sapiens
  misc_RNA (1)...(19): siRNA sense strand
gaacuugacacaaaugaug

SEQ ID NO: 259105 - RNA, 19 nt, Homo sapiens
  misc_RNA (1)...(19): siRNA sense strand
caacacagcucaguacaag

SEQ ID NO: 259106 - RNA, 19 nt, Homo sapiens
  misc_RNA (1)...(19): siRNA sense strand
cuagaagccucucuggaua

SEQ ID NO: 259107 - RNA, 19 nt, Homo sapiens
  misc_RNA (1)...(19): siRNA sense strand
ggacgcgaguguucaagaa

SEQ ID NO: 259108 - RNA, 19 nt, Homo sapiens
  misc_RNA (1)...(19): siRNA sense strand
uggauaaggagaucuauua

SEQ ID NO: 259109 - RNA, 19 nt, Homo sapiens
  misc_RNA (1)...(19): siRNA sense strand
gagcggagagucuauguga

SEQ ID NO: 259110 - RNA, 19 nt, Homo sapiens
  misc_RNA (1)...(19): siRNA sense strand
gaacgagacgccaguagau

SEQ ID NO: 259111 - RNA, 19 nt, Homo sapiens
  misc_RNA (1)...(19): siRNA sense strand
ugagaucccuccaaaccuu

SEQ ID NO: 259112 - RNA, 19 nt, Homo sapiens
  misc_RNA (1)...(19): siRNA sense strand
gcacccagcucgacguucu

SEQ ID NO: 259113 - RNA, 19 nt, Homo sapiens
  misc_RNA (1)...(19): siRNA sense strand
ccaacaagacggugaagaa

SEQ ID NO: 259114 - RNA, 19 nt, Homo sapiens
  misc_RNA (1)...(19): siRNA sense strand
cauagaacuugacacaaau

SEQ ID NO: 259115 - RNA, 19 nt, Homo sapiens
  misc_RNA (1)...(19): siRNA sense strand
acaagacggugaagaagau

SEQ ID NO: 259116 - RNA, 19 nt, Homo sapiens
  misc_RNA (1)...(19): siRNA sense strand
caagaaggccaguccaaau

SEQ ID NO: 259117 - RNA, 19 nt, Homo sapiens
  misc_RNA (1)...(19): siRNA sense strand
gcacgaagacacgaacuug

SEQ ID NO: 259118 - RNA, 19 nt, Homo sapiens
  misc_RNA (1)...(19): siRNA sense strand
cuccaaaccuuccauguuc

SEQ ID NO: 259119 - RNA, 19 nt, Homo sapiens
  misc_RNA (1)...(19): siRNA sense strand
caggaacgccucaucaaga

SEQ ID NO: 259120 - RNA, 19 nt, Homo sapiens
  misc_RNA (1)...(19): siRNA sense strand
gcaugaaggaugacaagga

SEQ ID NO: 259121 - RNA, 19 nt, Homo sapiens
  misc_RNA (1)...(19): siRNA sense strand
auaaggagaucuauuacca

SEQ ID NO: 259122 - RNA, 19 nt, Homo sapiens
  misc_RNA (1)...(19): siRNA sense strand
cgagcacgcuuacccuuuc

SEQ ID NO: 259123 - RNA, 19 nt, Homo sapiens
  misc_RNA (1)...(19): siRNA sense strand
ucaaagagcggagagucua

SEQ ID NO: 259124 - RNA, 19 nt, Homo sapiens
  misc_RNA (1)...(19): siRNA sense strand
gacacgaacuuggccucua

SEQ ID NO: 259125 - RNA, 19 nt, Homo sapiens
  misc_RNA (1)...(19): siRNA sense strand
caaagggacgcgaguguuc

SEQ ID NO: 259126 - RNA, 19 nt, Homo sapiens
  misc_RNA (1)...(19): siRNA sense strand
aggaacgccucaucaagaa

SEQ ID NO: 259127 - RNA, 19 nt, Homo sapiens
  misc_RNA (1)...(19): siRNA sense strand
auggaaagcucaccgucua

SEQ ID NO: 259128 - RNA, 19 nt, Homo sapiens
  misc_RNA (1)...(19): siRNA sense strand
gaccugcgccuuccgcuau

SEQ ID NO: 259129 - RNA, 19 nt, Homo sapiens
  misc_RNA (1)...(19): siRNA sense strand
caguacaagugcccuguug

SEQ ID NO: 259130 - RNA, 19 nt, Homo sapiens
  misc_RNA (1)...(19): siRNA sense strand
cggagaauuuggaggagaa

SEQ ID NO: 259131 - RNA, 19 nt, Homo sapiens
  misc_RNA (1)...(19): siRNA sense strand
ccugguggauccugaguau

SEQ ID NO: 259132 - RNA, 19 nt, Homo sapiens
  misc_RNA (1)...(19): siRNA sense strand
ugaugacgacauuguauuu

SEQ ID NO: 259133 - RNA, 19 nt, Homo sapiens
  misc_RNA (1)...(19): siRNA sense strand
gaaggugccaaccgugaga

SEQ ID NO: 259134 - RNA, 19 nt, Homo sapiens
  misc_RNA (1)...(19): siRNA sense strand
gcaggaacgccucaucaag

SEQ ID NO: 259135 - RNA, 19 nt, Homo sapiens
  misc_RNA (1)...(19): siRNA sense strand
ccuacaaagugaaagugaa

SEQ ID NO: 259136 - RNA, 19 nt, Homo sapiens
  misc_RNA (1)...(19): siRNA sense strand
acacgaacuuggccucuag

SEQ ID NO: 259137 - RNA, 19 nt, Homo sapiens
  misc_RNA (1)...(19): siRNA sense strand
ugcaaggucuacacacuga

SEQ ID NO: 259138 - RNA, 19 nt, Homo sapiens
  misc_RNA (1)...(19): siRNA sense strand
gaucuauuaccauggagaa

SEQ ID NO: 259139 - RNA, 19 nt, Homo sapiens
  misc_RNA (1)...(19): siRNA sense strand
cauuguauuugaggacuuu

SEQ ID NO: 259140 - RNA, 19 nt, Homo sapiens
  misc_RNA (1)...(19): siRNA sense strand
ccuagaagccucucuggau

SEQ ID NO: 259141 - RNA, 19 nt, Homo sapiens
  misc_RNA (1)...(19): siRNA sense strand
ucaagaaggccaguccaaa

SEQ ID NO: 259142 - RNA, 19 nt, Homo sapiens
  misc_RNA (1)...(19): siRNA sense strand
uagaagccucucuggauaa

SEQ ID NO: 259143 - RNA, 19 nt, Homo sapiens
  misc_RNA (1)...(19): siRNA sense strand
gcgagcacgcuuacccuuu

SEQ ID NO: 259144 - RNA, 19 nt, Homo sapiens
  misc_RNA (1)...(19): siRNA sense strand
aagccucucuggauaagga

SEQ ID NO: 259145 - RNA, 19 nt, Homo sapiens
  misc_RNA (1)...(19): siRNA sense strand
gagcacgcuuacccuuuca

SEQ ID NO: 259146 - RNA, 19 nt, Homo sapiens
  misc_RNA (1)...(19): siRNA sense strand
aaccuuccauguucuguga

SEQ ID NO: 259147 - RNA, 19 nt, Homo sapiens
  misc_RNA (1)...(19): siRNA sense strand
acacagcucaguacaagug

SEQ ID NO: 259148 - RNA, 19 nt, Homo sapiens
  misc_RNA (1)...(19): siRNA sense strand
gaucucagugcgccaguau

SEQ ID NO: 259149 - RNA, 19 nt, Homo sapiens
  misc_RNA (1)...(19): siRNA sense strand
auaccaaucucauagaacu

SEQ ID NO: 259150 - RNA, 19 nt, Homo sapiens
  misc_RNA (1)...(19): siRNA sense strand
caacaagacggugaagaag

SEQ ID NO: 259151 - RNA, 19 nt, Homo sapiens
  misc_RNA (1)...(19): siRNA sense strand
gaugacgacauuguauuug

SEQ ID NO: 259152 - RNA, 19 nt, Homo sapiens
  misc_RNA (1)...(19): siRNA sense strand
gacaaagggacgcgagugu

SEQ ID NO: 259153 - RNA, 19 nt, Homo sapiens
  misc_RNA (1)...(19): siRNA sense strand
ccaaucucauagaacuuga

SEQ ID NO: 259154 - RNA, 19 nt, Homo sapiens
  misc_RNA (1)...(19): siRNA sense strand
gcgccaguaugcagacauc

SEQ ID NO: 259155 - RNA, 19 nt, Homo sapiens
  misc_RNA (1)...(19): siRNA sense strand
augacgacauuguauuuga

SEQ ID NO: 259156 - RNA, 19 nt, Homo sapiens
  misc_RNA (1)...(19): siRNA sense strand
caaagagcggagagucuau

SEQ ID NO: 259157 - RNA, 19 nt, Homo sapiens
  misc_RNA (1)...(19): siRNA sense strand
aagaaggccaguccaaaug

SEQ ID NO: 259158 - RNA, 19 nt, Homo sapiens
  misc_RNA (1)...(19): siRNA sense strand
ccuccaaaccuuccauguu

SEQ ID NO: 259159 - RNA, 19 nt, Homo sapiens
  misc_RNA (1)...(19): siRNA sense strand
ugacgacauuguauuugag

SEQ ID NO: 259160 - RNA, 19 nt, Homo sapiens
  misc_RNA (1)...(19): siRNA sense strand
gagaacccaucagcgucaa

SEQ ID NO: 259161 - RNA, 19 nt, Homo sapiens
  misc_RNA (1)...(19): siRNA sense strand
cgcuuacccuuucaccuuu

SEQ ID NO: 259162 - RNA, 19 nt, Homo sapiens
  misc_RNA (1)...(19): siRNA sense strand
ucucauagaacuugacaca

SEQ ID NO: 259163 - RNA, 19 nt, Homo sapiens
  misc_RNA (1)...(19): siRNA sense strand
ggauaaggagaucuauuac

SEQ ID NO: 259164 - RNA, 19 nt, Homo sapiens
  misc_RNA (1)...(19): siRNA sense strand
ccaggcaguuccucauguc

SEQ ID NO: 259165 - RNA, 19 nt, Homo sapiens
  misc_RNA (1)...(19): siRNA sense strand
ccacagcucaacaacagau

SEQ ID NO: 259166 - RNA, 19 nt, Homo sapiens
  misc_RNA (1)...(19): siRNA sense strand
gaagauccacaagcggaau

SEQ ID NO: 259167 - RNA, 19 nt, Homo sapiens
  misc_RNA (1)...(19): siRNA sense strand
gaaggaugacaaggaggaa

SEQ ID NO: 259168 - RNA, 19 nt, Homo sapiens
  misc_RNA (1)...(19): siRNA sense strand
gaauuuggaggagaagauc

SEQ ID NO: 259169 - RNA, 19 nt, Homo sapiens
  misc_RNA (1)...(19): siRNA sense strand
cuccacagcucaacaacag

SEQ ID NO: 259170 - RNA, 19 nt, Homo sapiens
  misc_RNA (1)...(19): siRNA sense strand
ccauggaagaggcugauga

SEQ ID NO: 259171 - RNA, 19 nt, Homo sapiens
  misc_RNA (1)...(19): siRNA sense strand
ucaccaacaacaccaacaa

SEQ ID NO: 259172 - RNA, 19 nt, Homo sapiens
  misc_RNA (1)...(19): siRNA sense strand
gcuuacccuuucaccuuug

SEQ ID NO: 259173 - RNA, 19 nt, Homo sapiens
  misc_RNA (1)...(19): siRNA sense strand
agaacgagacgccaguaga

SEQ ID NO: 259174 - RNA, 19 nt, Homo sapiens
  misc_RNA (1)...(19): siRNA sense strand
ucaacacagcucaguacaa

SEQ ID NO: 259175 - RNA, 19 nt, Homo sapiens
  misc_RNA (1)...(19): siRNA sense strand
gcucuccacagcucaacaa

SEQ ID NO: 259176 - RNA, 19 nt, Homo sapiens
  misc_RNA (1)...(19): siRNA sense strand
gcucgacguucugcaaggu

SEQ ID NO: 259177 - RNA, 19 nt, Homo sapiens
  misc_RNA (1)...(19): siRNA sense strand
cuacaaagugaaagugaag

SEQ ID NO: 259178 - RNA, 19 nt, Homo sapiens
  misc_RNA (1)...(19): siRNA sense strand
acacaaaugaugacgacau

SEQ ID NO: 259179 - RNA, 19 nt, Homo sapiens
  misc_RNA (1)...(19): siRNA sense strand
gagaacgagacgccaguag

SEQ ID NO: 259180 - RNA, 19 nt, Homo sapiens
  misc_RNA (1)...(19): siRNA sense strand
cuugcgguguggacuauga

SEQ ID NO: 259181 - RNA, 19 nt, Homo sapiens
  misc_RNA (1)...(19): siRNA sense strand
acgcuuacccuuucaccuu

SEQ ID NO: 259182 - RNA, 19 nt, Homo sapiens
  misc_RNA (1)...(19): siRNA sense strand
uagaacuugacacaaauga

SEQ ID NO: 259183 - RNA, 19 nt, Homo sapiens
  misc_RNA (1)...(19): siRNA sense strand
ccaacaacaccaacaagac

SEQ ID NO: 259184 - RNA, 19 nt, Homo sapiens
  misc_RNA (1)...(19): siRNA sense strand
gggacgcgaguguucaaga

SEQ ID NO: 259185 - RNA, 19 nt, Homo sapiens
  misc_RNA (1)...(19): siRNA sense strand
ccacgaagccaauauguua

SEQ ID NO: 259186 - RNA, 19 nt, Homo sapiens
  misc_RNA (1)...(19): siRNA sense strand
gaacuuucuuucacgguua

SEQ ID NO: 259187 - RNA, 19 nt, Homo sapiens
  misc_RNA (1)...(19): siRNA sense strand
cagcauaucucuacccauu

SEQ ID NO: 259188 - RNA, 19 nt, Homo sapiens
  misc_RNA (1)...(19): siRNA sense strand
gaaauacagacucaaguuu

SEQ ID NO: 259189 - RNA, 19 nt, Homo sapiens
  misc_RNA (1)...(19): siRNA sense strand
gggcaucgguuuccaucug

SEQ ID NO: 259190 - RNA, 19 nt, Homo sapiens
  misc_RNA (1)...(19): siRNA sense strand
gcauaucucuacccauuuu

SEQ ID NO: 259191 - RNA, 19 nt, Homo sapiens
  misc_RNA (1)...(19): siRNA sense strand
gcaauacauagaacugaaa

SEQ ID NO: 259192 - RNA, 19 nt, Homo sapiens
  misc_RNA (1)...(19): siRNA sense strand
acagaugacugcaaguuca

SEQ ID NO: 259193 - RNA, 19 nt, Homo sapiens
  misc_RNA (1)...(19): siRNA sense strand
gagcagcaguagcgcuaug

SEQ ID NO: 259194 - RNA, 19 nt, Homo sapiens
  misc_RNA (1)...(19): siRNA sense strand
agacucaaguuucgcuuug

SEQ ID NO: 259195 - RNA, 19 nt, Homo sapiens
  misc_RNA (1)...(19): siRNA sense strand
ucagugaaauacagacuca

SEQ ID NO: 259196 - RNA, 19 nt, Homo sapiens
  misc_RNA (1)...(19): siRNA sense strand
ugaaauacagacucaaguu

SEQ ID NO: 259197 - RNA, 19 nt, Homo sapiens
  misc_RNA (1)...(19): siRNA sense strand
caaguuucgcuuuggauaa

SEQ ID NO: 259198 - RNA, 19 nt, Homo sapiens
  misc_RNA (1)...(19): siRNA sense strand
gaucuacccggauggcaaa

SEQ ID NO: 259199 - RNA, 19 nt, Homo sapiens
  misc_RNA (1)...(19): siRNA sense strand
gcagagugggcaucgguuu

SEQ ID NO: 259200 - RNA, 19 nt, Homo sapiens
  misc_RNA (1)...(19): siRNA sense strand
gcaguagcgcuaugucuuc

SEQ ID NO: 259201 - RNA, 19 nt, Homo sapiens
  misc_RNA (1)...(19): siRNA sense strand
uaccuaugccucagcaaua

SEQ ID NO: 259202 - RNA, 19 nt, Homo sapiens
  misc_RNA (1)...(19): siRNA sense strand
ucaaguuucgcuuuggaua

SEQ ID NO: 259203 - RNA, 19 nt, Homo sapiens
  misc_RNA (1)...(19): siRNA sense strand
gcaaguucagggagcguuu

SEQ ID NO: 259204 - RNA, 19 nt, Homo sapiens
  misc_RNA (1)...(19): siRNA sense strand
ucacagaugacugcaaguu

SEQ ID NO: 259205 - RNA, 19 nt, Homo sapiens
  misc_RNA (1)...(19): siRNA sense strand
caacucagugaaauacaga

SEQ ID NO: 259206 - RNA, 19 nt, Homo sapiens
  misc_RNA (1)...(19): siRNA sense strand
gcuuggagcagagcaguuu

SEQ ID NO: 259207 - RNA, 19 nt, Homo sapiens
  misc_RNA (1)...(19): siRNA sense strand
aaauacagacucaaguuuc

SEQ ID NO: 259208 - RNA, 19 nt, Homo sapiens
  misc_RNA (1)...(19): siRNA sense strand
ccaacucagugaaauacag

SEQ ID NO: 259209 - RNA, 19 nt, Homo sapiens
  misc_RNA (1)...(19): siRNA sense strand
gcagacagagcagcaguag

SEQ ID NO: 259210 - RNA, 19 nt, Homo sapiens
  misc_RNA (1)...(19): siRNA sense strand
aaauaccaacucagugaaa

SEQ ID NO: 259211 - RNA, 19 nt, Homo sapiens
  misc_RNA (1)...(19): siRNA sense strand
agcaauacauagaacugaa

SEQ ID NO: 259212 - RNA, 19 nt, Homo sapiens
  misc_RNA (1)...(19): siRNA sense strand
auaccaacucagugaaaua

SEQ ID NO: 259213 - RNA, 19 nt, Homo sapiens
  misc_RNA (1)...(19): siRNA sense strand
uaaaagaggaaaagccaaa

SEQ ID NO: 259214 - RNA, 19 nt, Homo sapiens
  misc_RNA (1)...(19): siRNA sense strand
cagcaauacauagaacuga

SEQ ID NO: 259215 - RNA, 19 nt, Homo sapiens
  misc_RNA (1)...(19): siRNA sense strand
aauaccaacucagugaaau

SEQ ID NO: 259216 - RNA, 19 nt, Homo sapiens
  misc_RNA (1)...(19): siRNA sense strand
ggacccgcugccacugaua

SEQ ID NO: 259217 - RNA, 19 nt, Homo sapiens
  misc_RNA (1)...(19): siRNA sense strand
gaucccacgaagccaauau

SEQ ID NO: 259218 - RNA, 19 nt, Homo sapiens
  misc_RNA (1)...(19): siRNA sense strand
ccucagcaauacauagaac

SEQ ID NO: 259219 - RNA, 19 nt, Homo sapiens
  misc_RNA (1)...(19): siRNA sense strand
cacgaagccaauauguuaa

SEQ ID NO: 259220 - RNA, 19 nt, Homo sapiens
  misc_RNA (1)...(19): siRNA sense strand
cuacccggauggcaaaguc

SEQ ID NO: 259221 - RNA, 19 nt, Homo sapiens
  misc_RNA (1)...(19): siRNA sense strand
acucaaguuucgcuuugga

SEQ ID NO: 259222 - RNA, 19 nt, Homo sapiens
  misc_RNA (1)...(19): siRNA sense strand
aauacagacucaaguuucg

SEQ ID NO: 259223 - RNA, 19 nt, Homo sapiens
  misc_RNA (1)...(19): siRNA sense strand
cacgguuacuguuccugaa

SEQ ID NO: 259224 - RNA, 19 nt, Homo sapiens
  misc_RNA (1)...(19): siRNA sense strand
ccacgaagccaauauguua

SEQ ID NO: 259225 - RNA, 19 nt, Homo sapiens
  misc_RNA (1)...(19): siRNA sense strand
gggcaucgguuuccaucug

SEQ ID NO: 259226 - RNA, 19 nt, Homo sapiens
  misc_RNA (1)...(19): siRNA sense strand
gagcagcaguagcgcuaug

SEQ ID NO: 259227 - RNA, 19 nt, Homo sapiens
  misc_RNA (1)...(19): siRNA sense strand
gaucuacccggauggcaaa

SEQ ID NO: 259228 - RNA, 19 nt, Homo sapiens
  misc_RNA (1)...(19): siRNA sense strand
gcagagugggcaucgguuu

SEQ ID NO: 259229 - RNA, 19 nt, Homo sapiens
  misc_RNA (1)...(19): siRNA sense strand
gcaguagcgcuaugucuuc

SEQ ID NO: 259230 - RNA, 19 nt, Homo sapiens
  misc_RNA (1)...(19): siRNA sense strand
gcuuggagcagagcaguuu

SEQ ID NO: 259231 - RNA, 19 nt, Homo sapiens
  misc_RNA (1)...(19): siRNA sense strand
gcagacagagcagcaguag

SEQ ID NO: 259232 - RNA, 19 nt, Homo sapiens
  misc_RNA (1)...(19): siRNA sense strand
ggacccgcugccacugaua

SEQ ID NO: 259233 - RNA, 19 nt, Homo sapiens
  misc_RNA (1)...(19): siRNA sense strand
gaucccacgaagccaauau

SEQ ID NO: 259234 - RNA, 19 nt, Homo sapiens
  misc_RNA (1)...(19): siRNA sense strand
cacgaagccaauauguuaa

SEQ ID NO: 259235 - RNA, 19 nt, Homo sapiens
  misc_RNA (1)...(19): siRNA sense strand
cuacccggauggcaaaguc

SEQ ID NO: 259236 - RNA, 19 nt, Homo sapiens
  misc_RNA (1)...(19): siRNA sense strand
agaaguggguccagaauua

SEQ ID NO: 259237 - RNA, 19 nt, Homo sapiens
  misc_RNA (1)...(19): siRNA sense strand
gaaccaaacugggcaagga

SEQ ID NO: 259238 - RNA, 19 nt, Homo sapiens
  misc_RNA (1)...(19): siRNA sense strand
guaagaagaucuccuugca

SEQ ID NO: 259239 - RNA, 19 nt, Homo sapiens
  misc_RNA (1)...(19): siRNA sense strand
gguccagaauuauaugaaa

SEQ ID NO: 259240 - RNA, 19 nt, Homo sapiens
  misc_RNA (1)...(19): siRNA sense strand
gaucugugcugacccaaag

SEQ ID NO: 259241 - RNA, 19 nt, Homo sapiens
  misc_RNA (1)...(19): siRNA sense strand
gcacucaacgucccaucua

SEQ ID NO: 259242 - RNA, 19 nt, Homo sapiens
  misc_RNA (1)...(19): siRNA sense strand
ggaaagcucacacccugaa

SEQ ID NO: 259243 - RNA, 19 nt, Homo sapiens
  misc_RNA (1)...(19): siRNA sense strand
gcaguaagaagaucuccuu

SEQ ID NO: 259244 - RNA, 19 nt, Homo sapiens
  misc_RNA (1)...(19): siRNA sense strand
gagaaguggguccagaauu

SEQ ID NO: 259245 - RNA, 19 nt, Homo sapiens
  misc_RNA (1)...(19): siRNA sense strand
cugaagagcuaugugauca

SEQ ID NO: 259246 - RNA, 19 nt, Homo sapiens
  misc_RNA (1)...(19): siRNA sense strand
gcucacacccugaagacuu

SEQ ID NO: 259247 - RNA, 19 nt, Homo sapiens
  misc_RNA (1)...(19): siRNA sense strand
gaaguggguccagaauuau

SEQ ID NO: 259248 - RNA, 19 nt, Homo sapiens
  misc_RNA (1)...(19): siRNA sense strand
ugcagaggcugaagagcua

SEQ ID NO: 259249 - RNA, 19 nt, Homo sapiens
  misc_RNA (1)...(19): siRNA sense strand
gcugucaucuucagaacca

SEQ ID NO: 259250 - RNA, 19 nt, Homo sapiens
  misc_RNA (1)...(19): siRNA sense strand
acauuuagcaguaagaaga

SEQ ID NO: 259251 - RNA, 19 nt, Homo sapiens
  misc_RNA (1)...(19): siRNA sense strand
ggagaaguggguccagaau

SEQ ID NO: 259252 - RNA, 19 nt, Homo sapiens
  misc_RNA (1)...(19): siRNA sense strand
gcucaugacagcagcuuuc

SEQ ID NO: 259253 - RNA, 19 nt, Homo sapiens
  misc_RNA (1)...(19): siRNA sense strand
acuugcugcuucacauuua

SEQ ID NO: 259254 - RNA, 19 nt, Homo sapiens
  misc_RNA (1)...(19): siRNA sense strand
gugcugacccaaaggagaa

SEQ ID NO: 259255 - RNA, 19 nt, Homo sapiens
  misc_RNA (1)...(19): siRNA sense strand
gcugaagagcuaugugauc

SEQ ID NO: 259256 - RNA, 19 nt, Homo sapiens
  misc_RNA (1)...(19): siRNA sense strand
ggacuugcucagccagaug

SEQ ID NO: 259257 - RNA, 19 nt, Homo sapiens
  misc_RNA (1)...(19): siRNA sense strand
guccagaauuauaugaaac

SEQ ID NO: 259258 - RNA, 19 nt, Homo sapiens
  misc_RNA (1)...(19): siRNA sense strand
gcuucacauuuagcaguaa

SEQ ID NO: 259259 - RNA, 19 nt, Homo sapiens
  misc_RNA (1)...(19): siRNA sense strand
cucacacccugaagacuug

SEQ ID NO: 259260 - RNA, 19 nt, Homo sapiens
  misc_RNA (1)...(19): siRNA sense strand
caugacagcagcuuucaac

SEQ ID NO: 259261 - RNA, 19 nt, Homo sapiens
  misc_RNA (1)...(19): siRNA sense strand
gggacuugcucagccagau

SEQ ID NO: 259262 - RNA, 19 nt, Homo sapiens
  misc_RNA (1)...(19): siRNA sense strand
ccaucuacuugcugcuuca

SEQ ID NO: 259263 - RNA, 19 nt, Homo sapiens
  misc_RNA (1)...(19): siRNA sense strand
ucacauuuagcaguaagaa

SEQ ID NO: 259264 - RNA, 19 nt, Homo sapiens
  misc_RNA (1)...(19): siRNA sense strand
ucagccagaugcacucaac

SEQ ID NO: 259265 - RNA, 19 nt, Homo sapiens
  misc_RNA (1)...(19): siRNA sense strand
gggauuaucucaaugauga

SEQ ID NO: 259266 - RNA, 19 nt, Homo sapiens
  misc_RNA (1)...(19): siRNA sense strand
caacaaggguccuaaaugc

SEQ ID NO: 259267 - RNA, 19 nt, Homo sapiens
  misc_RNA (1)...(19): siRNA sense strand
ggagcuggauacucguuua

SEQ ID NO: 259268 - RNA, 19 nt, Homo sapiens
  misc_RNA (1)...(19): siRNA sense strand
gaugaggccuuauggaaca

SEQ ID NO: 259269 - RNA, 19 nt, Homo sapiens
  misc_RNA (1)...(19): siRNA sense strand
gauguucaccuccacgaua

SEQ ID NO: 259270 - RNA, 19 nt, Homo sapiens
  misc_RNA (1)...(19): siRNA sense strand
gaggaaaagugauagauga

SEQ ID NO: 259271 - RNA, 19 nt, Homo sapiens
  misc_RNA (1)...(19): siRNA sense strand
gauauuugcugugguugga

SEQ ID NO: 259272 - RNA, 19 nt, Homo sapiens
  misc_RNA (1)...(19): siRNA sense strand
ggaagcgauuugcgauguu

SEQ ID NO: 259273 - RNA, 19 nt, Homo sapiens
  misc_RNA (1)...(19): siRNA sense strand
gaagcggugucuugaugau

SEQ ID NO: 259274 - RNA, 19 nt, Homo sapiens
  misc_RNA (1)...(19): siRNA sense strand
gggaagcgauuugcgaugu

SEQ ID NO: 259275 - RNA, 19 nt, Homo sapiens
  misc_RNA (1)...(19): siRNA sense strand
gaagcgauuugcgauguuc

SEQ ID NO: 259276 - RNA, 19 nt, Homo sapiens
  misc_RNA (1)...(19): siRNA sense strand
gaaaagugauagaugacaa

SEQ ID NO: 259277 - RNA, 19 nt, Homo sapiens
  misc_RNA (1)...(19): siRNA sense strand
gaugacaacgaccaccuuu

SEQ ID NO: 259278 - RNA, 19 nt, Homo sapiens
  misc_RNA (1)...(19): siRNA sense strand
cacgauauuugcugugguu

SEQ ID NO: 259279 - RNA, 19 nt, Homo sapiens
  misc_RNA (1)...(19): siRNA sense strand
ucaacaaggguccuaaaug

SEQ ID NO: 259280 - RNA, 19 nt, Homo sapiens
  misc_RNA (1)...(19): siRNA sense strand
aggaagcggugucuugaug

SEQ ID NO: 259281 - RNA, 19 nt, Homo sapiens
  misc_RNA (1)...(19): siRNA sense strand
uuuaucaucucagccauuu

SEQ ID NO: 259282 - RNA, 19 nt, Homo sapiens
  misc_RNA (1)...(19): siRNA sense strand
ggaagcggugucuugauga

SEQ ID NO: 259283 - RNA, 19 nt, Homo sapiens
  misc_RNA (1)...(19): siRNA sense strand
gaccaccuuucccaagaga

SEQ ID NO: 259284 - RNA, 19 nt, Homo sapiens
  misc_RNA (1)...(19): siRNA sense strand
ucucagccauuucaaucaa

SEQ ID NO: 259285 - RNA, 19 nt, Homo sapiens
  misc_RNA (1)...(19): siRNA sense strand
uaucaucucagccauuuca

SEQ ID NO: 259286 - RNA, 19 nt, Homo sapiens
  misc_RNA (1)...(19): siRNA sense strand
ccuggaaucugacccucuu

SEQ ID NO: 259287 - RNA, 19 nt, Homo sapiens
  misc_RNA (1)...(19): siRNA sense strand
caucucagccauuucaauc

SEQ ID NO: 259288 - RNA, 19 nt, Homo sapiens
  misc_RNA (1)...(19): siRNA sense strand
ucaaugaugaggccuuaug

SEQ ID NO: 259289 - RNA, 19 nt, Homo sapiens
  misc_RNA (1)...(19): siRNA sense strand
gggagauggacccguuuaa

SEQ ID NO: 259290 - RNA, 19 nt, Homo sapiens
  misc_RNA (1)...(19): siRNA sense strand
cgacggggauuaucucaau

SEQ ID NO: 259291 - RNA, 19 nt, Homo sapiens
  misc_RNA (1)...(19): siRNA sense strand
guucaccuccacgauauuu

SEQ ID NO: 259292 - RNA, 19 nt, Homo sapiens
  misc_RNA (1)...(19): siRNA sense strand
gagcuggauacucguuuau

SEQ ID NO: 259293 - RNA, 19 nt, Homo sapiens
  misc_RNA (1)...(19): siRNA sense strand
ucccugcgcugguguucuu

SEQ ID NO: 259294 - RNA, 19 nt, Homo sapiens
  misc_RNA (1)...(19): siRNA sense strand
uauuugcugugguuggauu

SEQ ID NO: 259295 - RNA, 19 nt, Homo sapiens
  misc_RNA (1)...(19): siRNA sense strand
acgaccaccuuucccaaga

SEQ ID NO: 259296 - RNA, 19 nt, Homo sapiens
  misc_RNA (1)...(19): siRNA sense strand
ccucauggccaauaguaca

SEQ ID NO: 259297 - RNA, 19 nt, Homo sapiens
  misc_RNA (1)...(19): siRNA sense strand
uaggaggaauccagauggu

SEQ ID NO: 259298 - RNA, 19 nt, Homo sapiens
  misc_RNA (1)...(19): siRNA sense strand
cgaccaccuuucccaagag

SEQ ID NO: 259299 - RNA, 19 nt, Homo sapiens
  misc_RNA (1)...(19): siRNA sense strand
uuaggaagcggugucuuga

SEQ ID NO: 259300 - RNA, 19 nt, Homo sapiens
  misc_RNA (1)...(19): siRNA sense strand
aaucaacaaggguccuaaa

SEQ ID NO: 259301 - RNA, 19 nt, Homo sapiens
  misc_RNA (1)...(19): siRNA sense strand
ucagccauuucaaucaaca

SEQ ID NO: 259302 - RNA, 19 nt, Homo sapiens
  misc_RNA (1)...(19): siRNA sense strand
caacauagcuucaauuaca

SEQ ID NO: 259303 - RNA, 19 nt, Homo sapiens
  misc_RNA (1)...(19): siRNA sense strand
cagcaggacucacgcauua

SEQ ID NO: 259304 - RNA, 19 nt, Homo sapiens
  misc_RNA (1)...(19): siRNA sense strand
caaagcaaaugcauucaaa

SEQ ID NO: 259305 - RNA, 19 nt, Homo sapiens
  misc_RNA (1)...(19): siRNA sense strand
agacauaccuaacuuaaga

SEQ ID NO: 259306 - RNA, 19 nt, Homo sapiens
  misc_RNA (1)...(19): siRNA sense strand
gauaauacccaaugagaaa

SEQ ID NO: 259307 - RNA, 19 nt, Homo sapiens
  misc_RNA (1)...(19): siRNA sense strand
gugaagaaguugacauuga

SEQ ID NO: 259308 - RNA, 19 nt, Homo sapiens
  misc_RNA (1)...(19): siRNA sense strand
auaaauaccuggauggaaa

SEQ ID NO: 259309 - RNA, 19 nt, Homo sapiens
  misc_RNA (1)...(19): siRNA sense strand
ggaccgcauugaagagaua

SEQ ID NO: 259310 - RNA, 19 nt, Homo sapiens
  misc_RNA (1)...(19): siRNA sense strand
gcagacauaccuaacuuaa

SEQ ID NO: 259311 - RNA, 19 nt, Homo sapiens
  misc_RNA (1)...(19): siRNA sense strand
ggaaucagccuaucuuuac

SEQ ID NO: 259312 - RNA, 19 nt, Homo sapiens
  misc_RNA (1)...(19): siRNA sense strand
ccagaaagucuacguguaa

SEQ ID NO: 259313 - RNA, 19 nt, Homo sapiens
  misc_RNA (1)...(19): siRNA sense strand
ccacgugucugcugugugu

SEQ ID NO: 259314 - RNA, 19 nt, Homo sapiens
  misc_RNA (1)...(19): siRNA sense strand
gaaagucuacguguaauuc

SEQ ID NO: 259315 - RNA, 19 nt, Homo sapiens
  misc_RNA (1)...(19): siRNA sense strand
gaagauauagaagauggua

SEQ ID NO: 259316 - RNA, 19 nt, Homo sapiens
  misc_RNA (1)...(19): siRNA sense strand
ugaagaaguugacauugau

SEQ ID NO: 259317 - RNA, 19 nt, Homo sapiens
  misc_RNA (1)...(19): siRNA sense strand
uagcuucaauuacagauga

SEQ ID NO: 259318 - RNA, 19 nt, Homo sapiens
  misc_RNA (1)...(19): siRNA sense strand
ccucuuaauuuaccagaaa

SEQ ID NO: 259319 - RNA, 19 nt, Homo sapiens
  misc_RNA (1)...(19): siRNA sense strand
ggaaagcauccaaacaguu

SEQ ID NO: 259320 - RNA, 19 nt, Homo sapiens
  misc_RNA (1)...(19): siRNA sense strand
gggaaagcauccaaacagu

SEQ ID NO: 259321 - RNA, 19 nt, Homo sapiens
  misc_RNA (1)...(19): siRNA sense strand
caacaacauagcuucaauu

SEQ ID NO: 259322 - RNA, 19 nt, Homo sapiens
  misc_RNA (1)...(19): siRNA sense strand
ggacucacgcauuaucuau

SEQ ID NO: 259323 - RNA, 19 nt, Homo sapiens
  misc_RNA (1)...(19): siRNA sense strand
cccaagcucacuuuauuua

SEQ ID NO: 259324 - RNA, 19 nt, Homo sapiens
  misc_RNA (1)...(19): siRNA sense strand
ggaccauaaugcccuggaa

SEQ ID NO: 259325 - RNA, 19 nt, Homo sapiens
  misc_RNA (1)...(19): siRNA sense strand
accauuaccucccaagaaa

SEQ ID NO: 259326 - RNA, 19 nt, Homo sapiens
  misc_RNA (1)...(19): siRNA sense strand
gauuaccgauagggucaua

SEQ ID NO: 259327 - RNA, 19 nt, Homo sapiens
  misc_RNA (1)...(19): siRNA sense strand
uggaauccgugccucuuaa

SEQ ID NO: 259328 - RNA, 19 nt, Homo sapiens
  misc_RNA (1)...(19): siRNA sense strand
uguauacugugaagaaguu

SEQ ID NO: 259329 - RNA, 19 nt, Homo sapiens
  misc_RNA (1)...(19): siRNA sense strand
cucccaagcucacuuuauu

SEQ ID NO: 259330 - RNA, 19 nt, Homo sapiens
  misc_RNA (1)...(19): siRNA sense strand
uagccaagauuaugaggau

SEQ ID NO: 259331 - RNA, 19 nt, Homo sapiens
  misc_RNA (1)...(19): siRNA sense strand
ucaacaacauagcuucaau

SEQ ID NO: 259332 - RNA, 19 nt, Homo sapiens
  misc_RNA (1)...(19): siRNA sense strand
caucuucaguucaacaaca

SEQ ID NO: 259333 - RNA, 19 nt, Homo sapiens
  misc_RNA (1)...(19): siRNA sense strand
auccgugccucuuaauuua

SEQ ID NO: 259334 - RNA, 19 nt, Homo sapiens
  misc_RNA (1)...(19): siRNA sense strand
aaagcugacugccaaagau

SEQ ID NO: 259335 - RNA, 19 nt, Homo sapiens
  misc_RNA (1)...(19): siRNA sense strand
acucacgcauuaucuauga

SEQ ID NO: 259336 - RNA, 19 nt, Homo sapiens
  misc_RNA (1)...(19): siRNA sense strand
gauaaauaccuggauggaa

SEQ ID NO: 259337 - RNA, 19 nt, Homo sapiens
  misc_RNA (1)...(19): siRNA sense strand
aaucaaagcaaaugcauuc

SEQ ID NO: 259338 - RNA, 19 nt, Homo sapiens
  misc_RNA (1)...(19): siRNA sense strand
ugacauugaugcuguacca

SEQ ID NO: 259339 - RNA, 19 nt, Homo sapiens
  misc_RNA (1)...(19): siRNA sense strand
gcacgauucaacaaaauua

SEQ ID NO: 259340 - RNA, 19 nt, Homo sapiens
  misc_RNA (1)...(19): siRNA sense strand
aauuacagaugacacauuc

SEQ ID NO: 259341 - RNA, 19 nt, Homo sapiens
  misc_RNA (1)...(19): siRNA sense strand
gaaucaaagcaaaugcauu

SEQ ID NO: 259342 - RNA, 19 nt, Homo sapiens
  misc_RNA (1)...(19): siRNA sense strand
ccauauuuagccaagauua

SEQ ID NO: 259343 - RNA, 19 nt, Homo sapiens
  misc_RNA (1)...(19): siRNA sense strand
ugaauaaccucaccuuccu

SEQ ID NO: 259344 - RNA, 19 nt, Homo sapiens
  misc_RNA (1)...(19): siRNA sense strand
gucuacacuucuccuguua

SEQ ID NO: 259345 - RNA, 19 nt, Homo sapiens
  misc_RNA (1)...(19): siRNA sense strand
gugauaauacccaaugaga

SEQ ID NO: 259346 - RNA, 19 nt, Homo sapiens
  misc_RNA (1)...(19): siRNA sense strand
cacgcauuaucuaugauua

SEQ ID NO: 259347 - RNA, 19 nt, Homo sapiens
  misc_RNA (1)...(19): siRNA sense strand
gaagaaguugacauugaug

SEQ ID NO: 259348 - RNA, 19 nt, Homo sapiens
  misc_RNA (1)...(19): siRNA sense strand
gcuaaugacaccaguuaca

SEQ ID NO: 259349 - RNA, 19 nt, Homo sapiens
  misc_RNA (1)...(19): siRNA sense strand
aggaaucagccuaucuuua

SEQ ID NO: 259350 - RNA, 19 nt, Homo sapiens
  misc_RNA (1)...(19): siRNA sense strand
aauccgugccucuuaauuu

SEQ ID NO: 259351 - RNA, 19 nt, Homo sapiens
  misc_RNA (1)...(19): siRNA sense strand
gaauccgugccucuuaauu

SEQ ID NO: 259352 - RNA, 19 nt, Homo sapiens
  misc_RNA (1)...(19): siRNA sense strand
ccaagcucacuuuauuuaa

SEQ ID NO: 259353 - RNA, 19 nt, Homo sapiens
  misc_RNA (1)...(19): siRNA sense strand
ucugcuguguguuuguuua

SEQ ID NO: 259354 - RNA, 19 nt, Homo sapiens
  misc_RNA (1)...(19): siRNA sense strand
gauagggucauacuuuuaa

SEQ ID NO: 259355 - RNA, 19 nt, Homo sapiens
  misc_RNA (1)...(19): siRNA sense strand
uguaauucaucuucaguuc

SEQ ID NO: 259356 - RNA, 19 nt, Homo sapiens
  misc_RNA (1)...(19): siRNA sense strand
cagaaagucuacguguaau

SEQ ID NO: 259357 - RNA, 19 nt, Homo sapiens
  misc_RNA (1)...(19): siRNA sense strand
uaagaagacucgauuuuac

SEQ ID NO: 259358 - RNA, 19 nt, Homo sapiens
  misc_RNA (1)...(19): siRNA sense strand
ccaaaggaaucagccuauc

SEQ ID NO: 259359 - RNA, 19 nt, Homo sapiens
  misc_RNA (1)...(19): siRNA sense strand
gcuguguguuuguuuaagu

SEQ ID NO: 259360 - RNA, 19 nt, Homo sapiens
  misc_RNA (1)...(19): siRNA sense strand
gcaggacucacgcauuauc

SEQ ID NO: 259361 - RNA, 19 nt, Homo sapiens
  misc_RNA (1)...(19): siRNA sense strand
ggauaaauaccuggaugga

SEQ ID NO: 259362 - RNA, 19 nt, Homo sapiens
  misc_RNA (1)...(19): siRNA sense strand
uuagaagaacuuucacuug

SEQ ID NO: 259363 - RNA, 19 nt, Homo sapiens
  misc_RNA (1)...(19): siRNA sense strand
guuagaagaacuuucacuu

SEQ ID NO: 259364 - RNA, 19 nt, Homo sapiens
  misc_RNA (1)...(19): siRNA sense strand
auaccuaacuuaagaagac

SEQ ID NO: 259365 - RNA, 19 nt, Homo sapiens
  misc_RNA (1)...(19): siRNA sense strand
aaaggaaucagccuaucuu

SEQ ID NO: 259366 - RNA, 19 nt, Homo sapiens
  misc_RNA (1)...(19): siRNA sense strand
aggcuaaugacaccaguua

SEQ ID NO: 259367 - RNA, 19 nt, Homo sapiens
  misc_RNA (1)...(19): siRNA sense strand
caaaggaaucagccuaucu

SEQ ID NO: 259368 - RNA, 19 nt, Homo sapiens
  misc_RNA (1)...(19): siRNA sense strand
caauuacagaugacacauu

SEQ ID NO: 259369 - RNA, 19 nt, Homo sapiens
  misc_RNA (1)...(19): siRNA sense strand
cgcauuaucuaugauuaug

SEQ ID NO: 259370 - RNA, 19 nt, Homo sapiens
  misc_RNA (1)...(19): siRNA sense strand
guaauucaucuucaguuca

SEQ ID NO: 259371 - RNA, 19 nt, Homo sapiens
  misc_RNA (1)...(19): siRNA sense strand
ggaaucaaagcaaaugcau

SEQ ID NO: 259372 - RNA, 19 nt, Homo sapiens
  misc_RNA (1)...(19): siRNA sense strand
uugcagacauaccuaacuu

SEQ ID NO: 259373 - RNA, 19 nt, Homo sapiens
  misc_RNA (1)...(19): siRNA sense strand
agucuacacuucuccuguu

SEQ ID NO: 259374 - RNA, 19 nt, Homo sapiens
  misc_RNA (1)...(19): siRNA sense strand
accagaaagucuacgugua

SEQ ID NO: 259375 - RNA, 19 nt, Homo sapiens
  misc_RNA (1)...(19): siRNA sense strand
ucaccuuccucuacuugga

SEQ ID NO: 259376 - RNA, 19 nt, Homo sapiens
  misc_RNA (1)...(19): siRNA sense strand
caccauuaccucccaagaa

SEQ ID NO: 259377 - RNA, 19 nt, Homo sapiens
  misc_RNA (1)...(19): siRNA sense strand
ucaaagcaaaugcauucaa

SEQ ID NO: 259378 - RNA, 19 nt, Homo sapiens
  misc_RNA (1)...(19): siRNA sense strand
uuaaguggcucuguauacu

SEQ ID NO: 259379 - RNA, 19 nt, Homo sapiens
  misc_RNA (1)...(19): siRNA sense strand
gaaucagccuaucuuuacg

SEQ ID NO: 259380 - RNA, 19 nt, Homo sapiens
  misc_RNA (1)...(19): siRNA sense strand
ugauaauacccaaugagaa

SEQ ID NO: 259381 - RNA, 19 nt, Homo sapiens
  misc_RNA (1)...(19): siRNA sense strand
ggaauccgugccucuuaau

SEQ ID NO: 259382 - RNA, 19 nt, Homo sapiens
  misc_RNA (1)...(19): siRNA sense strand
uaaccucaccuuccucuac

SEQ ID NO: 259383 - RNA, 19 nt, Homo sapiens
  misc_RNA (1)...(19): siRNA sense strand
cauuaccucccaagaaaga

SEQ ID NO: 259384 - RNA, 19 nt, Homo sapiens
  misc_RNA (1)...(19): siRNA sense strand
gagaaaagucuucaauuac

SEQ ID NO: 259385 - RNA, 19 nt, Homo sapiens
  misc_RNA (1)...(19): siRNA sense strand
gcuugugccucugauaaag

SEQ ID NO: 259386 - RNA, 19 nt, Homo sapiens
  misc_RNA (1)...(19): siRNA sense strand
uaacuuaagaagacucgau

SEQ ID NO: 259387 - RNA, 19 nt, Homo sapiens
  misc_RNA (1)...(19): siRNA sense strand
ucacgcauuaucuaugauu

SEQ ID NO: 259388 - RNA, 19 nt, Homo sapiens
  misc_RNA (1)...(19): siRNA sense strand
aaguggcucuguauacugu

SEQ ID NO: 259389 - RNA, 19 nt, Homo sapiens
  misc_RNA (1)...(19): siRNA sense strand
ccgauagggucauacuuuu

SEQ ID NO: 259390 - RNA, 19 nt, Homo sapiens
  misc_RNA (1)...(19): siRNA sense strand
ugaagaauccauauuuagc

SEQ ID NO: 259391 - RNA, 19 nt, Homo sapiens
  misc_RNA (1)...(19): siRNA sense strand
guaggggaaucaaagcaaa

SEQ ID NO: 259392 - RNA, 19 nt, Homo sapiens
  misc_RNA (1)...(19): siRNA sense strand
cuacacuucuccuguuacu

SEQ ID NO: 259393 - RNA, 19 nt, Homo sapiens
  misc_RNA (1)...(19): siRNA sense strand
acucugcagucuacacuuc

SEQ ID NO: 259394 - RNA, 19 nt, Homo sapiens
  misc_RNA (1)...(19): siRNA sense strand
agaagaacuuucacuugcu

SEQ ID NO: 259395 - RNA, 19 nt, Homo sapiens
  misc_RNA (1)...(19): siRNA sense strand
ugaggcaauaacaccauua

SEQ ID NO: 259396 - RNA, 19 nt, Homo sapiens
  misc_RNA (1)...(19): siRNA sense strand
uuacgcacgauucaacaaa

SEQ ID NO: 259397 - RNA, 19 nt, Homo sapiens
  misc_RNA (1)...(19): siRNA sense strand
accgauagggucauacuuu

SEQ ID NO: 259398 - RNA, 19 nt, Homo sapiens
  misc_RNA (1)...(19): siRNA sense strand
cuacguguaauucaucuuc

SEQ ID NO: 259399 - RNA, 19 nt, Homo sapiens
  misc_RNA (1)...(19): siRNA sense strand
agaaagucuacguguaauu

SEQ ID NO: 259400 - RNA, 19 nt, Homo sapiens
  misc_RNA (1)...(19): siRNA sense strand
gaccauaaugcccuggaau

SEQ ID NO: 259401 - RNA, 19 nt, Homo sapiens
  misc_RNA (1)...(19): siRNA sense strand
ccagcaggacucacgcauu

SEQ ID NO: 259402 - RNA, 19 nt, Homo sapiens
  misc_RNA (1)...(19): siRNA sense strand
caacauagcuucaauuaca

SEQ ID NO: 259403 - RNA, 19 nt, Homo sapiens
  misc_RNA (1)...(19): siRNA sense strand
cagcaggacucacgcauua

SEQ ID NO: 259404 - RNA, 19 nt, Homo sapiens
  misc_RNA (1)...(19): siRNA sense strand
caaagcaaaugcauucaaa

SEQ ID NO: 259405 - RNA, 19 nt, Homo sapiens
  misc_RNA (1)...(19): siRNA sense strand
agacauaccuaacuuaaga

SEQ ID NO: 259406 - RNA, 19 nt, Homo sapiens
  misc_RNA (1)...(19): siRNA sense strand
gauaauacccaaugagaaa

SEQ ID NO: 259407 - RNA, 19 nt, Homo sapiens
  misc_RNA (1)...(19): siRNA sense strand
gugaagaaguugacauuga

SEQ ID NO: 259408 - RNA, 19 nt, Homo sapiens
  misc_RNA (1)...(19): siRNA sense strand
auaaauaccuggauggaaa

SEQ ID NO: 259409 - RNA, 19 nt, Homo sapiens
  misc_RNA (1)...(19): siRNA sense strand
ggaccgcauugaagagaua

SEQ ID NO: 259410 - RNA, 19 nt, Homo sapiens
  misc_RNA (1)...(19): siRNA sense strand
gcagacauaccuaacuuaa

SEQ ID NO: 259411 - RNA, 19 nt, Homo sapiens
  misc_RNA (1)...(19): siRNA sense strand
ggaaucagccuaucuuuac

SEQ ID NO: 259412 - RNA, 19 nt, Homo sapiens
  misc_RNA (1)...(19): siRNA sense strand
ccagaaagucuacguguaa

SEQ ID NO: 259413 - RNA, 19 nt, Homo sapiens
  misc_RNA (1)...(19): siRNA sense strand
ccacgugucugcugugugu

SEQ ID NO: 259414 - RNA, 19 nt, Homo sapiens
  misc_RNA (1)...(19): siRNA sense strand
gaaagucuacguguaauuc

SEQ ID NO: 259415 - RNA, 19 nt, Homo sapiens
  misc_RNA (1)...(19): siRNA sense strand
gaagauauagaagauggua

SEQ ID NO: 259416 - RNA, 19 nt, Homo sapiens
  misc_RNA (1)...(19): siRNA sense strand
ugaagaaguugacauugau

SEQ ID NO: 259417 - RNA, 19 nt, Homo sapiens
  misc_RNA (1)...(19): siRNA sense strand
uagcuucaauuacagauga

SEQ ID NO: 259418 - RNA, 19 nt, Homo sapiens
  misc_RNA (1)...(19): siRNA sense strand
ccucuuaauuuaccagaaa

SEQ ID NO: 259419 - RNA, 19 nt, Homo sapiens
  misc_RNA (1)...(19): siRNA sense strand
ggaaagcauccaaacaguu

SEQ ID NO: 259420 - RNA, 19 nt, Homo sapiens
  misc_RNA (1)...(19): siRNA sense strand
gggaaagcauccaaacagu

SEQ ID NO: 259421 - RNA, 19 nt, Homo sapiens
  misc_RNA (1)...(19): siRNA sense strand
caacaacauagcuucaauu

SEQ ID NO: 259422 - RNA, 19 nt, Homo sapiens
  misc_RNA (1)...(19): siRNA sense strand
ggacucacgcauuaucuau

SEQ ID NO: 259423 - RNA, 19 nt, Homo sapiens
  misc_RNA (1)...(19): siRNA sense strand
cccaagcucacuuuauuua

SEQ ID NO: 259424 - RNA, 19 nt, Homo sapiens
  misc_RNA (1)...(19): siRNA sense strand
ggaccauaaugcccuggaa

SEQ ID NO: 259425 - RNA, 19 nt, Homo sapiens
  misc_RNA (1)...(19): siRNA sense strand
accauuaccucccaagaaa

SEQ ID NO: 259426 - RNA, 19 nt, Homo sapiens
  misc_RNA (1)...(19): siRNA sense strand
gauuaccgauagggucaua

SEQ ID NO: 259427 - RNA, 19 nt, Homo sapiens
  misc_RNA (1)...(19): siRNA sense strand
uggaauccgugccucuuaa

SEQ ID NO: 259428 - RNA, 19 nt, Homo sapiens
  misc_RNA (1)...(19): siRNA sense strand
uguauacugugaagaaguu

SEQ ID NO: 259429 - RNA, 19 nt, Homo sapiens
  misc_RNA (1)...(19): siRNA sense strand
cucccaagcucacuuuauu

SEQ ID NO: 259430 - RNA, 19 nt, Homo sapiens
  misc_RNA (1)...(19): siRNA sense strand
uagccaagauuaugaggau

SEQ ID NO: 259431 - RNA, 19 nt, Homo sapiens
  misc_RNA (1)...(19): siRNA sense strand
ucaacaacauagcuucaau

SEQ ID NO: 259432 - RNA, 19 nt, Homo sapiens
  misc_RNA (1)...(19): siRNA sense strand
caucuucaguucaacaaca

SEQ ID NO: 259433 - RNA, 19 nt, Homo sapiens
  misc_RNA (1)...(19): siRNA sense strand
auccgugccucuuaauuua

SEQ ID NO: 259434 - RNA, 19 nt, Homo sapiens
  misc_RNA (1)...(19): siRNA sense strand
aaagcugacugccaaagau

SEQ ID NO: 259435 - RNA, 19 nt, Homo sapiens
  misc_RNA (1)...(19): siRNA sense strand
acucacgcauuaucuauga

SEQ ID NO: 259436 - RNA, 19 nt, Homo sapiens
  misc_RNA (1)...(19): siRNA sense strand
gauaaauaccuggauggaa

SEQ ID NO: 259437 - RNA, 19 nt, Homo sapiens
  misc_RNA (1)...(19): siRNA sense strand
aaucaaagcaaaugcauuc

SEQ ID NO: 259438 - RNA, 19 nt, Homo sapiens
  misc_RNA (1)...(19): siRNA sense strand
ugacauugaugcuguacca

SEQ ID NO: 259439 - RNA, 19 nt, Homo sapiens
  misc_RNA (1)...(19): siRNA sense strand
gcacgauucaacaaaauua

SEQ ID NO: 259440 - RNA, 19 nt, Homo sapiens
  misc_RNA (1)...(19): siRNA sense strand
aauuacagaugacacauuc

SEQ ID NO: 259441 - RNA, 19 nt, Homo sapiens
  misc_RNA (1)...(19): siRNA sense strand
gaaucaaagcaaaugcauu

SEQ ID NO: 259442 - RNA, 19 nt, Homo sapiens
  misc_RNA (1)...(19): siRNA sense strand
ccauauuuagccaagauua

SEQ ID NO: 259443 - RNA, 19 nt, Homo sapiens
  misc_RNA (1)...(19): siRNA sense strand
ugaauaaccucaccuuccu

SEQ ID NO: 259444 - RNA, 19 nt, Homo sapiens
  misc_RNA (1)...(19): siRNA sense strand
gucuacacuucuccuguua

SEQ ID NO: 259445 - RNA, 19 nt, Homo sapiens
  misc_RNA (1)...(19): siRNA sense strand
gugauaauacccaaugaga

SEQ ID NO: 259446 - RNA, 19 nt, Homo sapiens
  misc_RNA (1)...(19): siRNA sense strand
cacgcauuaucuaugauua

SEQ ID NO: 259447 - RNA, 19 nt, Homo sapiens
  misc_RNA (1)...(19): siRNA sense strand
gaagaaguugacauugaug

SEQ ID NO: 259448 - RNA, 19 nt, Homo sapiens
  misc_RNA (1)...(19): siRNA sense strand
gcuaaugacaccaguuaca

SEQ ID NO: 259449 - RNA, 19 nt, Homo sapiens
  misc_RNA (1)...(19): siRNA sense strand
aggaaucagccuaucuuua

SEQ ID NO: 259450 - RNA, 19 nt, Homo sapiens
  misc_RNA (1)...(19): siRNA sense strand
aauccgugccucuuaauuu

SEQ ID NO: 259451 - RNA, 19 nt, Homo sapiens
  misc_RNA (1)...(19): siRNA sense strand
gaauccgugccucuuaauu

SEQ ID NO: 259452 - RNA, 19 nt, Homo sapiens
  misc_RNA (1)...(19): siRNA sense strand
ccaagcucacuuuauuuaa

SEQ ID NO: 259453 - RNA, 19 nt, Homo sapiens
  misc_RNA (1)...(19): siRNA sense strand
ucugcuguguguuuguuua

SEQ ID NO: 259454 - RNA, 19 nt, Homo sapiens
  misc_RNA (1)...(19): siRNA sense strand
gauagggucauacuuuuaa

SEQ ID NO: 259455 - RNA, 19 nt, Homo sapiens
  misc_RNA (1)...(19): siRNA sense strand
uguaauucaucuucaguuc

SEQ ID NO: 259456 - RNA, 19 nt, Homo sapiens
  misc_RNA (1)...(19): siRNA sense strand
cagaaagucuacguguaau

SEQ ID NO: 259457 - RNA, 19 nt, Homo sapiens
  misc_RNA (1)...(19): siRNA sense strand
uaagaagacucgauuuuac

SEQ ID NO: 259458 - RNA, 19 nt, Homo sapiens
  misc_RNA (1)...(19): siRNA sense strand
ccaaaggaaucagccuauc

SEQ ID NO: 259459 - RNA, 19 nt, Homo sapiens
  misc_RNA (1)...(19): siRNA sense strand
gcuguguguuuguuuaagu

SEQ ID NO: 259460 - RNA, 19 nt, Homo sapiens
  misc_RNA (1)...(19): siRNA sense strand
gcaggacucacgcauuauc

SEQ ID NO: 259461 - RNA, 19 nt, Homo sapiens
  misc_RNA (1)...(19): siRNA sense strand
ggauaaauaccuggaugga

SEQ ID NO: 259462 - RNA, 19 nt, Homo sapiens
  misc_RNA (1)...(19): siRNA sense strand
uuagaagaacuuucacuug

SEQ ID NO: 259463 - RNA, 19 nt, Homo sapiens
  misc_RNA (1)...(19): siRNA sense strand
guuagaagaacuuucacuu

SEQ ID NO: 259464 - RNA, 19 nt, Homo sapiens
  misc_RNA (1)...(19): siRNA sense strand
auaccuaacuuaagaagac

SEQ ID NO: 259465 - RNA, 19 nt, Homo sapiens
  misc_RNA (1)...(19): siRNA sense strand
aaaggaaucagccuaucuu

SEQ ID NO: 259466 - RNA, 19 nt, Homo sapiens
  misc_RNA (1)...(19): siRNA sense strand
aggcuaaugacaccaguua

SEQ ID NO: 259467 - RNA, 19 nt, Homo sapiens
  misc_RNA (1)...(19): siRNA sense strand
caaaggaaucagccuaucu

SEQ ID NO: 259468 - RNA, 19 nt, Homo sapiens
  misc_RNA (1)...(19): siRNA sense strand
caauuacagaugacacauu

SEQ ID NO: 259469 - RNA, 19 nt, Homo sapiens
  misc_RNA (1)...(19): siRNA sense strand
cgcauuaucuaugauuaug

SEQ ID NO: 259470 - RNA, 19 nt, Homo sapiens
  misc_RNA (1)...(19): siRNA sense strand
guaauucaucuucaguuca

SEQ ID NO: 259471 - RNA, 19 nt, Homo sapiens
  misc_RNA (1)...(19): siRNA sense strand
ggaaucaaagcaaaugcau

SEQ ID NO: 259472 - RNA, 19 nt, Homo sapiens
  misc_RNA (1)...(19): siRNA sense strand
uugcagacauaccuaacuu

SEQ ID NO: 259473 - RNA, 19 nt, Homo sapiens
  misc_RNA (1)...(19): siRNA sense strand
agucuacacuucuccuguu

SEQ ID NO: 259474 - RNA, 19 nt, Homo sapiens
  misc_RNA (1)...(19): siRNA sense strand
accagaaagucuacgugua

SEQ ID NO: 259475 - RNA, 19 nt, Homo sapiens
  misc_RNA (1)...(19): siRNA sense strand
ucaccuuccucuacuugga

SEQ ID NO: 259476 - RNA, 19 nt, Homo sapiens
  misc_RNA (1)...(19): siRNA sense strand
caccauuaccucccaagaa

SEQ ID NO: 259477 - RNA, 19 nt, Homo sapiens
  misc_RNA (1)...(19): siRNA sense strand
ucaaagcaaaugcauucaa

SEQ ID NO: 259478 - RNA, 19 nt, Homo sapiens
  misc_RNA (1)...(19): siRNA sense strand
uuaaguggcucuguauacu

SEQ ID NO: 259479 - RNA, 19 nt, Homo sapiens
  misc_RNA (1)...(19): siRNA sense strand
gaaucagccuaucuuuacg

SEQ ID NO: 259480 - RNA, 19 nt, Homo sapiens
  misc_RNA (1)...(19): siRNA sense strand
ugauaauacccaaugagaa

SEQ ID NO: 259481 - RNA, 19 nt, Homo sapiens
  misc_RNA (1)...(19): siRNA sense strand
ggaauccgugccucuuaau

SEQ ID NO: 259482 - RNA, 19 nt, Homo sapiens
  misc_RNA (1)...(19): siRNA sense strand
uaaccucaccuuccucuac

SEQ ID NO: 259483 - RNA, 19 nt, Homo sapiens
  misc_RNA (1)...(19): siRNA sense strand
cauuaccucccaagaaaga

SEQ ID NO: 259484 - RNA, 19 nt, Homo sapiens
  misc_RNA (1)...(19): siRNA sense strand
gagaaaagucuucaauuac

SEQ ID NO: 259485 - RNA, 19 nt, Homo sapiens
  misc_RNA (1)...(19): siRNA sense strand
gcuugugccucugauaaag

SEQ ID NO: 259486 - RNA, 19 nt, Homo sapiens
  misc_RNA (1)...(19): siRNA sense strand
uaacuuaagaagacucgau

SEQ ID NO: 259487 - RNA, 19 nt, Homo sapiens
  misc_RNA (1)...(19): siRNA sense strand
ucacgcauuaucuaugauu

SEQ ID NO: 259488 - RNA, 19 nt, Homo sapiens
  misc_RNA (1)...(19): siRNA sense strand
aaguggcucuguauacugu

SEQ ID NO: 259489 - RNA, 19 nt, Homo sapiens
  misc_RNA (1)...(19): siRNA sense strand
ccgauagggucauacuuuu

SEQ ID NO: 259490 - RNA, 19 nt, Homo sapiens
  misc_RNA (1)...(19): siRNA sense strand
ugaagaauccauauuuagc

SEQ ID NO: 259491 - RNA, 19 nt, Homo sapiens
  misc_RNA (1)...(19): siRNA sense strand
guaggggaaucaaagcaaa

SEQ ID NO: 259492 - RNA, 19 nt, Homo sapiens
  misc_RNA (1)...(19): siRNA sense strand
cuacacuucuccuguuacu

SEQ ID NO: 259493 - RNA, 19 nt, Homo sapiens
  misc_RNA (1)...(19): siRNA sense strand
acucugcagucuacacuuc

SEQ ID NO: 259494 - RNA, 19 nt, Homo sapiens
  misc_RNA (1)...(19): siRNA sense strand
agaagaacuuucacuugcu

SEQ ID NO: 259495 - RNA, 19 nt, Homo sapiens
  misc_RNA (1)...(19): siRNA sense strand
ugaggcaauaacaccauua

SEQ ID NO: 259496 - RNA, 19 nt, Homo sapiens
  misc_RNA (1)...(19): siRNA sense strand
uuacgcacgauucaacaaa

SEQ ID NO: 259497 - RNA, 19 nt, Homo sapiens
  misc_RNA (1)...(19): siRNA sense strand
accgauagggucauacuuu

SEQ ID NO: 259498 - RNA, 19 nt, Homo sapiens
  misc_RNA (1)...(19): siRNA sense strand
cuacguguaauucaucuuc

SEQ ID NO: 259499 - RNA, 19 nt, Homo sapiens
  misc_RNA (1)...(19): siRNA sense strand
agaaagucuacguguaauu

SEQ ID NO: 259500 - RNA, 19 nt, Homo sapiens
  misc_RNA (1)...(19): siRNA sense strand
gaccauaaugcccuggaau

SEQ ID NO: 259501 - RNA, 19 nt, Homo sapiens
  misc_RNA (1)...(19): siRNA sense strand
ccagcaggacucacgcauu

SEQ ID NO: 259502 - RNA, 19 nt, Homo sapiens
  misc_RNA (1)...(19): siRNA sense strand
caacauagcuucaauuaca

SEQ ID NO: 259503 - RNA, 19 nt, Homo sapiens
  misc_RNA (1)...(19): siRNA sense strand
cagcaggacucacgcauua

SEQ ID NO: 259504 - RNA, 19 nt, Homo sapiens
  misc_RNA (1)...(19): siRNA sense strand
caaagcaaaugcauucaaa

SEQ ID NO: 259505 - RNA, 19 nt, Homo sapiens
  misc_RNA (1)...(19): siRNA sense strand
agacauaccuaacuuaaga

SEQ ID NO: 259506 - RNA, 19 nt, Homo sapiens
  misc_RNA (1)...(19): siRNA sense strand
gauaauacccaaugagaaa

SEQ ID NO: 259507 - RNA, 19 nt, Homo sapiens
  misc_RNA (1)...(19): siRNA sense strand
gugaagaaguugacauuga

SEQ ID NO: 259508 - RNA, 19 nt, Homo sapiens
  misc_RNA (1)...(19): siRNA sense strand
auaaauaccuggauggaaa

SEQ ID NO: 259509 - RNA, 19 nt, Homo sapiens
  misc_RNA (1)...(19): siRNA sense strand
ggaccgcauugaagagaua

SEQ ID NO: 259510 - RNA, 19 nt, Homo sapiens
  misc_RNA (1)...(19): siRNA sense strand
gcagacauaccuaacuuaa

SEQ ID NO: 259511 - RNA, 19 nt, Homo sapiens
  misc_RNA (1)...(19): siRNA sense strand
ggaaucagccuaucuuuac

SEQ ID NO: 259512 - RNA, 19 nt, Homo sapiens
  misc_RNA (1)...(19): siRNA sense strand
ccagaaagucuacguguaa

SEQ ID NO: 259513 - RNA, 19 nt, Homo sapiens
  misc_RNA (1)...(19): siRNA sense strand
ccacgugucugcugugugu

SEQ ID NO: 259514 - RNA, 19 nt, Homo sapiens
  misc_RNA (1)...(19): siRNA sense strand
gaaagucuacguguaauuc

SEQ ID NO: 259515 - RNA, 19 nt, Homo sapiens
  misc_RNA (1)...(19): siRNA sense strand
gaagauauagaagauggua

SEQ ID NO: 259516 - RNA, 19 nt, Homo sapiens
  misc_RNA (1)...(19): siRNA sense strand
ugaagaaguugacauugau

SEQ ID NO: 259517 - RNA, 19 nt, Homo sapiens
  misc_RNA (1)...(19): siRNA sense strand
uagcuucaauuacagauga

SEQ ID NO: 259518 - RNA, 19 nt, Homo sapiens
  misc_RNA (1)...(19): siRNA sense strand
ccucuuaauuuaccagaaa

SEQ ID NO: 259519 - RNA, 19 nt, Homo sapiens
  misc_RNA (1)...(19): siRNA sense strand
ggaaagcauccaaacaguu

SEQ ID NO: 259520 - RNA, 19 nt, Homo sapiens
  misc_RNA (1)...(19): siRNA sense strand
gggaaagcauccaaacagu

SEQ ID NO: 259521 - RNA, 19 nt, Homo sapiens
  misc_RNA (1)...(19): siRNA sense strand
caacaacauagcuucaauu

SEQ ID NO: 259522 - RNA, 19 nt, Homo sapiens
  misc_RNA (1)...(19): siRNA sense strand
ggacucacgcauuaucuau

SEQ ID NO: 259523 - RNA, 19 nt, Homo sapiens
  misc_RNA (1)...(19): siRNA sense strand
cccaagcucacuuuauuua

SEQ ID NO: 259524 - RNA, 19 nt, Homo sapiens
  misc_RNA (1)...(19): siRNA sense strand
ggaccauaaugcccuggaa

SEQ ID NO: 259525 - RNA, 19 nt, Homo sapiens
  misc_RNA (1)...(19): siRNA sense strand
accauuaccucccaagaaa

SEQ ID NO: 259526 - RNA, 19 nt, Homo sapiens
  misc_RNA (1)...(19): siRNA sense strand
gauuaccgauagggucaua

SEQ ID NO: 259527 - RNA, 19 nt, Homo sapiens
  misc_RNA (1)...(19): siRNA sense strand
uggaauccgugccucuuaa

SEQ ID NO: 259528 - RNA, 19 nt, Homo sapiens
  misc_RNA (1)...(19): siRNA sense strand
uguauacugugaagaaguu

SEQ ID NO: 259529 - RNA, 19 nt, Homo sapiens
  misc_RNA (1)...(19): siRNA sense strand
cucccaagcucacuuuauu

SEQ ID NO: 259530 - RNA, 19 nt, Homo sapiens
  misc_RNA (1)...(19): siRNA sense strand
uagccaagauuaugaggau

SEQ ID NO: 259531 - RNA, 19 nt, Homo sapiens
  misc_RNA (1)...(19): siRNA sense strand
ucaacaacauagcuucaau

SEQ ID NO: 259532 - RNA, 19 nt, Homo sapiens
  misc_RNA (1)...(19): siRNA sense strand
caucuucaguucaacaaca

SEQ ID NO: 259533 - RNA, 19 nt, Homo sapiens
  misc_RNA (1)...(19): siRNA sense strand
auccgugccucuuaauuua

SEQ ID NO: 259534 - RNA, 19 nt, Homo sapiens
  misc_RNA (1)...(19): siRNA sense strand
aaagcugacugccaaagau

SEQ ID NO: 259535 - RNA, 19 nt, Homo sapiens
  misc_RNA (1)...(19): siRNA sense strand
acucacgcauuaucuauga

SEQ ID NO: 259536 - RNA, 19 nt, Homo sapiens
  misc_RNA (1)...(19): siRNA sense strand
gauaaauaccuggauggaa

SEQ ID NO: 259537 - RNA, 19 nt, Homo sapiens
  misc_RNA (1)...(19): siRNA sense strand
aaucaaagcaaaugcauuc

SEQ ID NO: 259538 - RNA, 19 nt, Homo sapiens
  misc_RNA (1)...(19): siRNA sense strand
ugacauugaugcuguacca

SEQ ID NO: 259539 - RNA, 19 nt, Homo sapiens
  misc_RNA (1)...(19): siRNA sense strand
gcacgauucaacaaaauua

SEQ ID NO: 259540 - RNA, 19 nt, Homo sapiens
  misc_RNA (1)...(19): siRNA sense strand
aauuacagaugacacauuc

SEQ ID NO: 259541 - RNA, 19 nt, Homo sapiens
  misc_RNA (1)...(19): siRNA sense strand
gaaucaaagcaaaugcauu

SEQ ID NO: 259542 - RNA, 19 nt, Homo sapiens
  misc_RNA (1)...(19): siRNA sense strand
ccauauuuagccaagauua

SEQ ID NO: 259543 - RNA, 19 nt, Homo sapiens
  misc_RNA (1)...(19): siRNA sense strand
ugaauaaccucaccuuccu

SEQ ID NO: 259544 - RNA, 19 nt, Homo sapiens
  misc_RNA (1)...(19): siRNA sense strand
gucuacacuucuccuguua

SEQ ID NO: 259545 - RNA, 19 nt, Homo sapiens
  misc_RNA (1)...(19): siRNA sense strand
gugauaauacccaaugaga

SEQ ID NO: 259546 - RNA, 19 nt, Homo sapiens
  misc_RNA (1)...(19): siRNA sense strand
cacgcauuaucuaugauua

SEQ ID NO: 259547 - RNA, 19 nt, Homo sapiens
  misc_RNA (1)...(19): siRNA sense strand
gaagaaguugacauugaug

SEQ ID NO: 259548 - RNA, 19 nt, Homo sapiens
  misc_RNA (1)...(19): siRNA sense strand
gcuaaugacaccaguuaca

SEQ ID NO: 259549 - RNA, 19 nt, Homo sapiens
  misc_RNA (1)...(19): siRNA sense strand
aggaaucagccuaucuuua

SEQ ID NO: 259550 - RNA, 19 nt, Homo sapiens
  misc_RNA (1)...(19): siRNA sense strand
aauccgugccucuuaauuu

SEQ ID NO: 259551 - RNA, 19 nt, Homo sapiens
  misc_RNA (1)...(19): siRNA sense strand
gaauccgugccucuuaauu

SEQ ID NO: 259552 - RNA, 19 nt, Homo sapiens
  misc_RNA (1)...(19): siRNA sense strand
ccaagcucacuuuauuuaa

SEQ ID NO: 259553 - RNA, 19 nt, Homo sapiens
  misc_RNA (1)...(19): siRNA sense strand
ucugcuguguguuuguuua

SEQ ID NO: 259554 - RNA, 19 nt, Homo sapiens
  misc_RNA (1)...(19): siRNA sense strand
gauagggucauacuuuuaa

SEQ ID NO: 259555 - RNA, 19 nt, Homo sapiens
  misc_RNA (1)...(19): siRNA sense strand
uguaauucaucuucaguuc

SEQ ID NO: 259556 - RNA, 19 nt, Homo sapiens
  misc_RNA (1)...(19): siRNA sense strand
cagaaagucuacguguaau

SEQ ID NO: 259557 - RNA, 19 nt, Homo sapiens
  misc_RNA (1)...(19): siRNA sense strand
uaagaagacucgauuuuac

SEQ ID NO: 259558 - RNA, 19 nt, Homo sapiens
  misc_RNA (1)...(19): siRNA sense strand
ccaaaggaaucagccuauc

SEQ ID NO: 259559 - RNA, 19 nt, Homo sapiens
  misc_RNA (1)...(19): siRNA sense strand
gcuguguguuuguuuaagu

SEQ ID NO: 259560 - RNA, 19 nt, Homo sapiens
  misc_RNA (1)...(19): siRNA sense strand
gcaggacucacgcauuauc

SEQ ID NO: 259561 - RNA, 19 nt, Homo sapiens
  misc_RNA (1)...(19): siRNA sense strand
ggauaaauaccuggaugga

SEQ ID NO: 259562 - RNA, 19 nt, Homo sapiens
  misc_RNA (1)...(19): siRNA sense strand
uuagaagaacuuucacuug

SEQ ID NO: 259563 - RNA, 19 nt, Homo sapiens
  misc_RNA (1)...(19): siRNA sense strand
guuagaagaacuuucacuu

SEQ ID NO: 259564 - RNA, 19 nt, Homo sapiens
  misc_RNA (1)...(19): siRNA sense strand
auaccuaacuuaagaagac

SEQ ID NO: 259565 - RNA, 19 nt, Homo sapiens
  misc_RNA (1)...(19): siRNA sense strand
aaaggaaucagccuaucuu

SEQ ID NO: 259566 - RNA, 19 nt, Homo sapiens
  misc_RNA (1)...(19): siRNA sense strand
aggcuaaugacaccaguua

SEQ ID NO: 259567 - RNA, 19 nt, Homo sapiens
  misc_RNA (1)...(19): siRNA sense strand
caaaggaaucagccuaucu

SEQ ID NO: 259568 - RNA, 19 nt, Homo sapiens
  misc_RNA (1)...(19): siRNA sense strand
caauuacagaugacacauu

SEQ ID NO: 259569 - RNA, 19 nt, Homo sapiens
  misc_RNA (1)...(19): siRNA sense strand
cgcauuaucuaugauuaug

SEQ ID NO: 259570 - RNA, 19 nt, Homo sapiens
  misc_RNA (1)...(19): siRNA sense strand
guaauucaucuucaguuca

SEQ ID NO: 259571 - RNA, 19 nt, Homo sapiens
  misc_RNA (1)...(19): siRNA sense strand
ggaaucaaagcaaaugcau

SEQ ID NO: 259572 - RNA, 19 nt, Homo sapiens
  misc_RNA (1)...(19): siRNA sense strand
uugcagacauaccuaacuu

SEQ ID NO: 259573 - RNA, 19 nt, Homo sapiens
  misc_RNA (1)...(19): siRNA sense strand
agucuacacuucuccuguu

SEQ ID NO: 259574 - RNA, 19 nt, Homo sapiens
  misc_RNA (1)...(19): siRNA sense strand
accagaaagucuacgugua

SEQ ID NO: 259575 - RNA, 19 nt, Homo sapiens
  misc_RNA (1)...(19): siRNA sense strand
ucaccuuccucuacuugga

SEQ ID NO: 259576 - RNA, 19 nt, Homo sapiens
  misc_RNA (1)...(19): siRNA sense strand
caccauuaccucccaagaa

SEQ ID NO: 259577 - RNA, 19 nt, Homo sapiens
  misc_RNA (1)...(19): siRNA sense strand
ucaaagcaaaugcauucaa

SEQ ID NO: 259578 - RNA, 19 nt, Homo sapiens
  misc_RNA (1)...(19): siRNA sense strand
uuaaguggcucuguauacu

SEQ ID NO: 259579 - RNA, 19 nt, Homo sapiens
  misc_RNA (1)...(19): siRNA sense strand
gaaucagccuaucuuuacg

SEQ ID NO: 259580 - RNA, 19 nt, Homo sapiens
  misc_RNA (1)...(19): siRNA sense strand
ugauaauacccaaugagaa

SEQ ID NO: 259581 - RNA, 19 nt, Homo sapiens
  misc_RNA (1)...(19): siRNA sense strand
ggaauccgugccucuuaau

SEQ ID NO: 259582 - RNA, 19 nt, Homo sapiens
  misc_RNA (1)...(19): siRNA sense strand
uaaccucaccuuccucuac

SEQ ID NO: 259583 - RNA, 19 nt, Homo sapiens
  misc_RNA (1)...(19): siRNA sense strand
cauuaccucccaagaaaga

SEQ ID NO: 259584 - RNA, 19 nt, Homo sapiens
  misc_RNA (1)...(19): siRNA sense strand
gagaaaagucuucaauuac

SEQ ID NO: 259585 - RNA, 19 nt, Homo sapiens
  misc_RNA (1)...(19): siRNA sense strand
gcuugugccucugauaaag

SEQ ID NO: 259586 - RNA, 19 nt, Homo sapiens
  misc_RNA (1)...(19): siRNA sense strand
uaacuuaagaagacucgau

SEQ ID NO: 259587 - RNA, 19 nt, Homo sapiens
  misc_RNA (1)...(19): siRNA sense strand
ucacgcauuaucuaugauu

SEQ ID NO: 259588 - RNA, 19 nt, Homo sapiens
  misc_RNA (1)...(19): siRNA sense strand
aaguggcucuguauacugu

SEQ ID NO: 259589 - RNA, 19 nt, Homo sapiens
  misc_RNA (1)...(19): siRNA sense strand
ccgauagggucauacuuuu

SEQ ID NO: 259590 - RNA, 19 nt, Homo sapiens
  misc_RNA (1)...(19): siRNA sense strand
ugaagaauccauauuuagc

SEQ ID NO: 259591 - RNA, 19 nt, Homo sapiens
  misc_RNA (1)...(19): siRNA sense strand
guaggggaaucaaagcaaa

SEQ ID NO: 259592 - RNA, 19 nt, Homo sapiens
  misc_RNA (1)...(19): siRNA sense strand
cuacacuucuccuguuacu

SEQ ID NO: 259593 - RNA, 19 nt, Homo sapiens
  misc_RNA (1)...(19): siRNA sense strand
acucugcagucuacacuuc

SEQ ID NO: 259594 - RNA, 19 nt, Homo sapiens
  misc_RNA (1)...(19): siRNA sense strand
agaagaacuuucacuugcu

SEQ ID NO: 259595 - RNA, 19 nt, Homo sapiens
  misc_RNA (1)...(19): siRNA sense strand
ugaggcaauaacaccauua

SEQ ID NO: 259596 - RNA, 19 nt, Homo sapiens
  misc_RNA (1)...(19): siRNA sense strand
uuacgcacgauucaacaaa

SEQ ID NO: 259597 - RNA, 19 nt, Homo sapiens
  misc_RNA (1)...(19): siRNA sense strand
accgauagggucauacuuu

SEQ ID NO: 259598 - RNA, 19 nt, Homo sapiens
  misc_RNA (1)...(19): siRNA sense strand
cuacguguaauucaucuuc

SEQ ID NO: 259599 - RNA, 19 nt, Homo sapiens
  misc_RNA (1)...(19): siRNA sense strand
agaaagucuacguguaauu

SEQ ID NO: 259600 - RNA, 19 nt, Homo sapiens
  misc_RNA (1)...(19): siRNA sense strand
gaccauaaugcccuggaau

SEQ ID NO: 259601 - RNA, 19 nt, Homo sapiens
  misc_RNA (1)...(19): siRNA sense strand
ccagcaggacucacgcauu

SEQ ID NO: 259602 - RNA, 19 nt, Homo sapiens
  misc_RNA (1)...(19): siRNA sense strand
gaaauugacucgcucauug

SEQ ID NO: 259603 - RNA, 19 nt, Homo sapiens
  misc_RNA (1)...(19): siRNA sense strand
acacggagaugaaguacua

SEQ ID NO: 259604 - RNA, 19 nt, Homo sapiens
  misc_RNA (1)...(19): siRNA sense strand
gagaugaaguacuauauag

SEQ ID NO: 259605 - RNA, 19 nt, Homo sapiens
  misc_RNA (1)...(19): siRNA sense strand
cgaaagaacucaggaagga

SEQ ID NO: 259606 - RNA, 19 nt, Homo sapiens
  misc_RNA (1)...(19): siRNA sense strand
cagaggaucuaccaguaua

SEQ ID NO: 259607 - RNA, 19 nt, Homo sapiens
  misc_RNA (1)...(19): siRNA sense strand
ggagaugaaguacuauaua

SEQ ID NO: 259608 - RNA, 19 nt, Homo sapiens
  misc_RNA (1)...(19): siRNA sense strand
gcacaucaaugagguauac

SEQ ID NO: 259609 - RNA, 19 nt, Homo sapiens
  misc_RNA (1)...(19): siRNA sense strand
gcacggcacugcucuuucu

SEQ ID NO: 259610 - RNA, 19 nt, Homo sapiens
  misc_RNA (1)...(19): siRNA sense strand
gcaacaagaaggagaagaa

SEQ ID NO: 259611 - RNA, 19 nt, Homo sapiens
  misc_RNA (1)...(19): siRNA sense strand
ccaaugaggucgaccagau

SEQ ID NO: 259612 - RNA, 19 nt, Homo sapiens
  misc_RNA (1)...(19): siRNA sense strand
ccaucaagaucaucaagaa

SEQ ID NO: 259613 - RNA, 19 nt, Homo sapiens
  misc_RNA (1)...(19): siRNA sense strand
gccagaggaucuaccagua

SEQ ID NO: 259614 - RNA, 19 nt, Homo sapiens
  misc_RNA (1)...(19): siRNA sense strand
uauuugagcugcuguccua

SEQ ID NO: 259615 - RNA, 19 nt, Homo sapiens
  misc_RNA (1)...(19): siRNA sense strand
cgacaaccaugacuacauc

SEQ ID NO: 259616 - RNA, 19 nt, Homo sapiens
  misc_RNA (1)...(19): siRNA sense strand
ucaaugagguauacuaugc

SEQ ID NO: 259617 - RNA, 19 nt, Homo sapiens
  misc_RNA (1)...(19): siRNA sense strand
gcccaaggcucgcaaguac

SEQ ID NO: 259618 - RNA, 19 nt, Homo sapiens
  misc_RNA (1)...(19): siRNA sense strand
ccuacgaccuggccauuga

SEQ ID NO: 259619 - RNA, 19 nt, Homo sapiens
  misc_RNA (1)...(19): siRNA sense strand
ggugaaagccuaugaucau

SEQ ID NO: 259620 - RNA, 19 nt, Homo sapiens
  misc_RNA (1)...(19): siRNA sense strand
ccuacaagcacaucaauga

SEQ ID NO: 259621 - RNA, 19 nt, Homo sapiens
  misc_RNA (1)...(19): siRNA sense strand
agaagaagguccugaacca

SEQ ID NO: 259622 - RNA, 19 nt, Homo sapiens
  misc_RNA (1)...(19): siRNA sense strand
ucaagaucaucaagaacaa

SEQ ID NO: 259623 - RNA, 19 nt, Homo sapiens
  misc_RNA (1)...(19): siRNA sense strand
gcagcgccaucaagauugu

SEQ ID NO: 259624 - RNA, 19 nt, Homo sapiens
  misc_RNA (1)...(19): siRNA sense strand
ggacgaaagaacucaggaa

SEQ ID NO: 259625 - RNA, 19 nt, Homo sapiens
  misc_RNA (1)...(19): siRNA sense strand
ccaucaagauuguggacuu

SEQ ID NO: 259626 - RNA, 19 nt, Homo sapiens
  misc_RNA (1)...(19): siRNA sense strand
ggaccuaccgcuacagcaa

SEQ ID NO: 259627 - RNA, 19 nt, Homo sapiens
  misc_RNA (1)...(19): siRNA sense strand
cgaaauugacucgcucauu

SEQ ID NO: 259628 - RNA, 19 nt, Homo sapiens
  misc_RNA (1)...(19): siRNA sense strand
caucaaugagguauacuau

SEQ ID NO: 259629 - RNA, 19 nt, Homo sapiens
  misc_RNA (1)...(19): siRNA sense strand
ccaaggcucgcaaguacuu

SEQ ID NO: 259630 - RNA, 19 nt, Homo sapiens
  misc_RNA (1)...(19): siRNA sense strand
uauacuaugcgaagaagaa

SEQ ID NO: 259631 - RNA, 19 nt, Homo sapiens
  misc_RNA (1)...(19): siRNA sense strand
gcuggagcgcuacgaaauu

SEQ ID NO: 259632 - RNA, 19 nt, Homo sapiens
  misc_RNA (1)...(19): siRNA sense strand
gaccagaugaaccgcauug

SEQ ID NO: 259633 - RNA, 19 nt, Homo sapiens
  misc_RNA (1)...(19): siRNA sense strand
gagcucagcaucauucacu

SEQ ID NO: 259634 - RNA, 19 nt, Homo sapiens
  misc_RNA (1)...(19): siRNA sense strand
caucaagauuguggacuuc

SEQ ID NO: 259635 - RNA, 19 nt, Homo sapiens
  misc_RNA (1)...(19): siRNA sense strand
cuggagcgcuacgaaauug

SEQ ID NO: 259636 - RNA, 19 nt, Homo sapiens
  misc_RNA (1)...(19): siRNA sense strand
cuacagcaaccgauauugu

SEQ ID NO: 259637 - RNA, 19 nt, Homo sapiens
  misc_RNA (1)...(19): siRNA sense strand
gaaccaggcccagauugag

SEQ ID NO: 259638 - RNA, 19 nt, Homo sapiens
  misc_RNA (1)...(19): siRNA sense strand
ugaaccaggcccagauuga

SEQ ID NO: 259639 - RNA, 19 nt, Homo sapiens
  misc_RNA (1)...(19): siRNA sense strand
gugaaagccuaugaucauc

SEQ ID NO: 259640 - RNA, 19 nt, Homo sapiens
  misc_RNA (1)...(19): siRNA sense strand
gagguauacuaugcgaaga

SEQ ID NO: 259641 - RNA, 19 nt, Homo sapiens
  misc_RNA (1)...(19): siRNA sense strand
ccagcuccaucuccaguuc

SEQ ID NO: 259642 - RNA, 19 nt, Homo sapiens
  misc_RNA (1)...(19): siRNA sense strand
gguauacuaugcgaagaag

SEQ ID NO: 259643 - RNA, 19 nt, Homo sapiens
  misc_RNA (1)...(19): siRNA sense strand
ccagaggaucuaccaguau

SEQ ID NO: 259644 - RNA, 19 nt, Homo sapiens
  misc_RNA (1)...(19): siRNA sense strand
cgaccuggccauugacaug

SEQ ID NO: 259645 - RNA, 19 nt, Homo sapiens
  misc_RNA (1)...(19): siRNA sense strand
ggagcacacgcagguauug

SEQ ID NO: 259646 - RNA, 19 nt, Homo sapiens
  misc_RNA (1)...(19): siRNA sense strand
gaagaagguccugaaccau

SEQ ID NO: 259647 - RNA, 19 nt, Homo sapiens
  misc_RNA (1)...(19): siRNA sense strand
ccaccugugccugguauuu

SEQ ID NO: 259648 - RNA, 19 nt, Homo sapiens
  misc_RNA (1)...(19): siRNA sense strand
caagaucaucaagaacaaa

SEQ ID NO: 259649 - RNA, 19 nt, Homo sapiens
  misc_RNA (1)...(19): siRNA sense strand
cagcaugacacggagauga

SEQ ID NO: 259650 - RNA, 19 nt, Homo sapiens
  misc_RNA (1)...(19): siRNA sense strand
acaagaaggagaagaaggu

SEQ ID NO: 259651 - RNA, 19 nt, Homo sapiens
  misc_RNA (1)...(19): siRNA sense strand
ccagaugaaccgcauugug

SEQ ID NO: 259652 - RNA, 19 nt, Homo sapiens
  misc_RNA (1)...(19): siRNA sense strand
gcucgcaaguacuuugaac

SEQ ID NO: 259653 - RNA, 19 nt, Homo sapiens
  misc_RNA (1)...(19): siRNA sense strand
ccucuucaguggcuccaau

SEQ ID NO: 259654 - RNA, 19 nt, Homo sapiens
  misc_RNA (1)...(19): siRNA sense strand
caacaagaaggagaagaag

SEQ ID NO: 259655 - RNA, 19 nt, Homo sapiens
  misc_RNA (1)...(19): siRNA sense strand
caaugaggucgaccagaug

SEQ ID NO: 259656 - RNA, 19 nt, Homo sapiens
  misc_RNA (1)...(19): siRNA sense strand
ggagaagaagguccugaac

SEQ ID NO: 259657 - RNA, 19 nt, Homo sapiens
  misc_RNA (1)...(19): siRNA sense strand
gaggaucuaccaguauauc

SEQ ID NO: 259658 - RNA, 19 nt, Homo sapiens
  misc_RNA (1)...(19): siRNA sense strand
gaccuacaagcacaucaau

SEQ ID NO: 259659 - RNA, 19 nt, Homo sapiens
  misc_RNA (1)...(19): siRNA sense strand
cggagaugaaguacuauau

SEQ ID NO: 259660 - RNA, 19 nt, Homo sapiens
  misc_RNA (1)...(19): siRNA sense strand
ugcgcaugcuggaguauga

SEQ ID NO: 259661 - RNA, 19 nt, Homo sapiens
  misc_RNA (1)...(19): siRNA sense strand
caagcacaucaaugaggua

SEQ ID NO: 259662 - RNA, 19 nt, Homo sapiens
  misc_RNA (1)...(19): siRNA sense strand
gcugcauccuuguggagau

SEQ ID NO: 259663 - RNA, 19 nt, Homo sapiens
  misc_RNA (1)...(19): siRNA sense strand
cgagcaacaagaaggagaa

SEQ ID NO: 259664 - RNA, 19 nt, Homo sapiens
  misc_RNA (1)...(19): siRNA sense strand
ugacgacaaccaugacuac

SEQ ID NO: 259665 - RNA, 19 nt, Homo sapiens
  misc_RNA (1)...(19): siRNA sense strand
caggagcacacgcagguau

SEQ ID NO: 259666 - RNA, 19 nt, Homo sapiens
  misc_RNA (1)...(19): siRNA sense strand
gaaauugacucgcucauug

SEQ ID NO: 259667 - RNA, 19 nt, Homo sapiens
  misc_RNA (1)...(19): siRNA sense strand
acacggagaugaaguacua

SEQ ID NO: 259668 - RNA, 19 nt, Homo sapiens
  misc_RNA (1)...(19): siRNA sense strand
gagaugaaguacuauauag

SEQ ID NO: 259669 - RNA, 19 nt, Homo sapiens
  misc_RNA (1)...(19): siRNA sense strand
cgaaagaacucaggaagga

SEQ ID NO: 259670 - RNA, 19 nt, Homo sapiens
  misc_RNA (1)...(19): siRNA sense strand
cagaggaucuaccaguaua

SEQ ID NO: 259671 - RNA, 19 nt, Homo sapiens
  misc_RNA (1)...(19): siRNA sense strand
ggagaugaaguacuauaua

SEQ ID NO: 259672 - RNA, 19 nt, Homo sapiens
  misc_RNA (1)...(19): siRNA sense strand
gcacaucaaugagguauac

SEQ ID NO: 259673 - RNA, 19 nt, Homo sapiens
  misc_RNA (1)...(19): siRNA sense strand
gcacggcacugcucuuucu

SEQ ID NO: 259674 - RNA, 19 nt, Homo sapiens
  misc_RNA (1)...(19): siRNA sense strand
gcaacaagaaggagaagaa

SEQ ID NO: 259675 - RNA, 19 nt, Homo sapiens
  misc_RNA (1)...(19): siRNA sense strand
ccaaugaggucgaccagau

SEQ ID NO: 259676 - RNA, 19 nt, Homo sapiens
  misc_RNA (1)...(19): siRNA sense strand
ccaucaagaucaucaagaa

SEQ ID NO: 259677 - RNA, 19 nt, Homo sapiens
  misc_RNA (1)...(19): siRNA sense strand
gccagaggaucuaccagua

SEQ ID NO: 259678 - RNA, 19 nt, Homo sapiens
  misc_RNA (1)...(19): siRNA sense strand
uauuugagcugcuguccua

SEQ ID NO: 259679 - RNA, 19 nt, Homo sapiens
  misc_RNA (1)...(19): siRNA sense strand
cgacaaccaugacuacauc

SEQ ID NO: 259680 - RNA, 19 nt, Homo sapiens
  misc_RNA (1)...(19): siRNA sense strand
ucaaugagguauacuaugc

SEQ ID NO: 259681 - RNA, 19 nt, Homo sapiens
  misc_RNA (1)...(19): siRNA sense strand
gcccaaggcucgcaaguac

SEQ ID NO: 259682 - RNA, 19 nt, Homo sapiens
  misc_RNA (1)...(19): siRNA sense strand
ccuacgaccuggccauuga

SEQ ID NO: 259683 - RNA, 19 nt, Homo sapiens
  misc_RNA (1)...(19): siRNA sense strand
ggugaaagccuaugaucau

SEQ ID NO: 259684 - RNA, 19 nt, Homo sapiens
  misc_RNA (1)...(19): siRNA sense strand
ccuacaagcacaucaauga

SEQ ID NO: 259685 - RNA, 19 nt, Homo sapiens
  misc_RNA (1)...(19): siRNA sense strand
agaagaagguccugaacca

SEQ ID NO: 259686 - RNA, 19 nt, Homo sapiens
  misc_RNA (1)...(19): siRNA sense strand
ucaagaucaucaagaacaa

SEQ ID NO: 259687 - RNA, 19 nt, Homo sapiens
  misc_RNA (1)...(19): siRNA sense strand
gcagcgccaucaagauugu

SEQ ID NO: 259688 - RNA, 19 nt, Homo sapiens
  misc_RNA (1)...(19): siRNA sense strand
ggacgaaagaacucaggaa

SEQ ID NO: 259689 - RNA, 19 nt, Homo sapiens
  misc_RNA (1)...(19): siRNA sense strand
ccaucaagauuguggacuu

SEQ ID NO: 259690 - RNA, 19 nt, Homo sapiens
  misc_RNA (1)...(19): siRNA sense strand
ggaccuaccgcuacagcaa

SEQ ID NO: 259691 - RNA, 19 nt, Homo sapiens
  misc_RNA (1)...(19): siRNA sense strand
cgaaauugacucgcucauu

SEQ ID NO: 259692 - RNA, 19 nt, Homo sapiens
  misc_RNA (1)...(19): siRNA sense strand
caucaaugagguauacuau

SEQ ID NO: 259693 - RNA, 19 nt, Homo sapiens
  misc_RNA (1)...(19): siRNA sense strand
ccaaggcucgcaaguacuu

SEQ ID NO: 259694 - RNA, 19 nt, Homo sapiens
  misc_RNA (1)...(19): siRNA sense strand
uauacuaugcgaagaagaa

SEQ ID NO: 259695 - RNA, 19 nt, Homo sapiens
  misc_RNA (1)...(19): siRNA sense strand
gcuggagcgcuacgaaauu

SEQ ID NO: 259696 - RNA, 19 nt, Homo sapiens
  misc_RNA (1)...(19): siRNA sense strand
gaccagaugaaccgcauug

SEQ ID NO: 259697 - RNA, 19 nt, Homo sapiens
  misc_RNA (1)...(19): siRNA sense strand
gagcucagcaucauucacu

SEQ ID NO: 259698 - RNA, 19 nt, Homo sapiens
  misc_RNA (1)...(19): siRNA sense strand
caucaagauuguggacuuc

SEQ ID NO: 259699 - RNA, 19 nt, Homo sapiens
  misc_RNA (1)...(19): siRNA sense strand
cuggagcgcuacgaaauug

SEQ ID NO: 259700 - RNA, 19 nt, Homo sapiens
  misc_RNA (1)...(19): siRNA sense strand
cuacagcaaccgauauugu

SEQ ID NO: 259701 - RNA, 19 nt, Homo sapiens
  misc_RNA (1)...(19): siRNA sense strand
gaaccaggcccagauugag

SEQ ID NO: 259702 - RNA, 19 nt, Homo sapiens
  misc_RNA (1)...(19): siRNA sense strand
ugaaccaggcccagauuga

SEQ ID NO: 259703 - RNA, 19 nt, Homo sapiens
  misc_RNA (1)...(19): siRNA sense strand
gugaaagccuaugaucauc

SEQ ID NO: 259704 - RNA, 19 nt, Homo sapiens
  misc_RNA (1)...(19): siRNA sense strand
gagguauacuaugcgaaga

SEQ ID NO: 259705 - RNA, 19 nt, Homo sapiens
  misc_RNA (1)...(19): siRNA sense strand
ccagcuccaucuccaguuc

SEQ ID NO: 259706 - RNA, 19 nt, Homo sapiens
  misc_RNA (1)...(19): siRNA sense strand
gguauacuaugcgaagaag

SEQ ID NO: 259707 - RNA, 19 nt, Homo sapiens
  misc_RNA (1)...(19): siRNA sense strand
ccagaggaucuaccaguau

SEQ ID NO: 259708 - RNA, 19 nt, Homo sapiens
  misc_RNA (1)...(19): siRNA sense strand
cgaccuggccauugacaug

SEQ ID NO: 259709 - RNA, 19 nt, Homo sapiens
  misc_RNA (1)...(19): siRNA sense strand
ggagcacacgcagguauug

SEQ ID NO: 259710 - RNA, 19 nt, Homo sapiens
  misc_RNA (1)...(19): siRNA sense strand
gaagaagguccugaaccau

SEQ ID NO: 259711 - RNA, 19 nt, Homo sapiens
  misc_RNA (1)...(19): siRNA sense strand
ccaccugugccugguauuu

SEQ ID NO: 259712 - RNA, 19 nt, Homo sapiens
  misc_RNA (1)...(19): siRNA sense strand
caagaucaucaagaacaaa

SEQ ID NO: 259713 - RNA, 19 nt, Homo sapiens
  misc_RNA (1)...(19): siRNA sense strand
cagcaugacacggagauga

SEQ ID NO: 259714 - RNA, 19 nt, Homo sapiens
  misc_RNA (1)...(19): siRNA sense strand
acaagaaggagaagaaggu

SEQ ID NO: 259715 - RNA, 19 nt, Homo sapiens
  misc_RNA (1)...(19): siRNA sense strand
ccagaugaaccgcauugug

SEQ ID NO: 259716 - RNA, 19 nt, Homo sapiens
  misc_RNA (1)...(19): siRNA sense strand
gcucgcaaguacuuugaac

SEQ ID NO: 259717 - RNA, 19 nt, Homo sapiens
  misc_RNA (1)...(19): siRNA sense strand
ccucuucaguggcuccaau

SEQ ID NO: 259718 - RNA, 19 nt, Homo sapiens
  misc_RNA (1)...(19): siRNA sense strand
caacaagaaggagaagaag

SEQ ID NO: 259719 - RNA, 19 nt, Homo sapiens
  misc_RNA (1)...(19): siRNA sense strand
caaugaggucgaccagaug

SEQ ID NO: 259720 - RNA, 19 nt, Homo sapiens
  misc_RNA (1)...(19): siRNA sense strand
ggagaagaagguccugaac

SEQ ID NO: 259721 - RNA, 19 nt, Homo sapiens
  misc_RNA (1)...(19): siRNA sense strand
gaggaucuaccaguauauc

SEQ ID NO: 259722 - RNA, 19 nt, Homo sapiens
  misc_RNA (1)...(19): siRNA sense strand
gaccuacaagcacaucaau

SEQ ID NO: 259723 - RNA, 19 nt, Homo sapiens
  misc_RNA (1)...(19): siRNA sense strand
cggagaugaaguacuauau

SEQ ID NO: 259724 - RNA, 19 nt, Homo sapiens
  misc_RNA (1)...(19): siRNA sense strand
ugcgcaugcuggaguauga

SEQ ID NO: 259725 - RNA, 19 nt, Homo sapiens
  misc_RNA (1)...(19): siRNA sense strand
caagcacaucaaugaggua

SEQ ID NO: 259726 - RNA, 19 nt, Homo sapiens
  misc_RNA (1)...(19): siRNA sense strand
gcugcauccuuguggagau

SEQ ID NO: 259727 - RNA, 19 nt, Homo sapiens
  misc_RNA (1)...(19): siRNA sense strand
cgagcaacaagaaggagaa

SEQ ID NO: 259728 - RNA, 19 nt, Homo sapiens
  misc_RNA (1)...(19): siRNA sense strand
ugacgacaaccaugacuac

SEQ ID NO: 259729 - RNA, 19 nt, Homo sapiens
  misc_RNA (1)...(19): siRNA sense strand
caggagcacacgcagguau

SEQ ID NO: 259730 - RNA, 19 nt, Homo sapiens
  misc_RNA (1)...(19): siRNA sense strand
gaaauugacucgcucauug

SEQ ID NO: 259731 - RNA, 19 nt, Homo sapiens
  misc_RNA (1)...(19): siRNA sense strand
acacggagaugaaguacua

SEQ ID NO: 259732 - RNA, 19 nt, Homo sapiens
  misc_RNA (1)...(19): siRNA sense strand
gagaugaaguacuauauag

SEQ ID NO: 259733 - RNA, 19 nt, Homo sapiens
  misc_RNA (1)...(19): siRNA sense strand
cgaaagaacucaggaagga

SEQ ID NO: 259734 - RNA, 19 nt, Homo sapiens
  misc_RNA (1)...(19): siRNA sense strand
cagaggaucuaccaguaua

SEQ ID NO: 259735 - RNA, 19 nt, Homo sapiens
  misc_RNA (1)...(19): siRNA sense strand
ggagaugaaguacuauaua

SEQ ID NO: 259736 - RNA, 19 nt, Homo sapiens
  misc_RNA (1)...(19): siRNA sense strand
gcacaucaaugagguauac

SEQ ID NO: 259737 - RNA, 19 nt, Homo sapiens
  misc_RNA (1)...(19): siRNA sense strand
gcacggcacugcucuuucu

SEQ ID NO: 259738 - RNA, 19 nt, Homo sapiens
  misc_RNA (1)...(19): siRNA sense strand
gcaacaagaaggagaagaa

SEQ ID NO: 259739 - RNA, 19 nt, Homo sapiens
  misc_RNA (1)...(19): siRNA sense strand
ccaaugaggucgaccagau

SEQ ID NO: 259740 - RNA, 19 nt, Homo sapiens
  misc_RNA (1)...(19): siRNA sense strand
ccaucaagaucaucaagaa

SEQ ID NO: 259741 - RNA, 19 nt, Homo sapiens
  misc_RNA (1)...(19): siRNA sense strand
gccagaggaucuaccagua

SEQ ID NO: 259742 - RNA, 19 nt, Homo sapiens
  misc_RNA (1)...(19): siRNA sense strand
uauuugagcugcuguccua

SEQ ID NO: 259743 - RNA, 19 nt, Homo sapiens
  misc_RNA (1)...(19): siRNA sense strand
cgacaaccaugacuacauc

SEQ ID NO: 259744 - RNA, 19 nt, Homo sapiens
  misc_RNA (1)...(19): siRNA sense strand
ucaaugagguauacuaugc

SEQ ID NO: 259745 - RNA, 19 nt, Homo sapiens
  misc_RNA (1)...(19): siRNA sense strand
gcccaaggcucgcaaguac

SEQ ID NO: 259746 - RNA, 19 nt, Homo sapiens
  misc_RNA (1)...(19): siRNA sense strand
ccuacgaccuggccauuga

SEQ ID NO: 259747 - RNA, 19 nt, Homo sapiens
  misc_RNA (1)...(19): siRNA sense strand
ggugaaagccuaugaucau

SEQ ID NO: 259748 - RNA, 19 nt, Homo sapiens
  misc_RNA (1)...(19): siRNA sense strand
ccuacaagcacaucaauga

SEQ ID NO: 259749 - RNA, 19 nt, Homo sapiens
  misc_RNA (1)...(19): siRNA sense strand
agaagaagguccugaacca

SEQ ID NO: 259750 - RNA, 19 nt, Homo sapiens
  misc_RNA (1)...(19): siRNA sense strand
ucaagaucaucaagaacaa

SEQ ID NO: 259751 - RNA, 19 nt, Homo sapiens
  misc_RNA (1)...(19): siRNA sense strand
gcagcgccaucaagauugu

SEQ ID NO: 259752 - RNA, 19 nt, Homo sapiens
  misc_RNA (1)...(19): siRNA sense strand
ggacgaaagaacucaggaa

SEQ ID NO: 259753 - RNA, 19 nt, Homo sapiens
  misc_RNA (1)...(19): siRNA sense strand
ccaucaagauuguggacuu

SEQ ID NO: 259754 - RNA, 19 nt, Homo sapiens
  misc_RNA (1)...(19): siRNA sense strand
ggaccuaccgcuacagcaa

SEQ ID NO: 259755 - RNA, 19 nt, Homo sapiens
  misc_RNA (1)...(19): siRNA sense strand
cgaaauugacucgcucauu

SEQ ID NO: 259756 - RNA, 19 nt, Homo sapiens
  misc_RNA (1)...(19): siRNA sense strand
caucaaugagguauacuau

SEQ ID NO: 259757 - RNA, 19 nt, Homo sapiens
  misc_RNA (1)...(19): siRNA sense strand
ccaaggcucgcaaguacuu

SEQ ID NO: 259758 - RNA, 19 nt, Homo sapiens
  misc_RNA (1)...(19): siRNA sense strand
uauacuaugcgaagaagaa

SEQ ID NO: 259759 - RNA, 19 nt, Homo sapiens
  misc_RNA (1)...(19): siRNA sense strand
gcuggagcgcuacgaaauu

SEQ ID NO: 259760 - RNA, 19 nt, Homo sapiens
  misc_RNA (1)...(19): siRNA sense strand
gaccagaugaaccgcauug

SEQ ID NO: 259761 - RNA, 19 nt, Homo sapiens
  misc_RNA (1)...(19): siRNA sense strand
gagcucagcaucauucacu

SEQ ID NO: 259762 - RNA, 19 nt, Homo sapiens
  misc_RNA (1)...(19): siRNA sense strand
caucaagauuguggacuuc

SEQ ID NO: 259763 - RNA, 19 nt, Homo sapiens
  misc_RNA (1)...(19): siRNA sense strand
cuggagcgcuacgaaauug

SEQ ID NO: 259764 - RNA, 19 nt, Homo sapiens
  misc_RNA (1)...(19): siRNA sense strand
cuacagcaaccgauauugu

SEQ ID NO: 259765 - RNA, 19 nt, Homo sapiens
  misc_RNA (1)...(19): siRNA sense strand
gaaccaggcccagauugag

SEQ ID NO: 259766 - RNA, 19 nt, Homo sapiens
  misc_RNA (1)...(19): siRNA sense strand
ugaaccaggcccagauuga

SEQ ID NO: 259767 - RNA, 19 nt, Homo sapiens
  misc_RNA (1)...(19): siRNA sense strand
gugaaagccuaugaucauc

SEQ ID NO: 259768 - RNA, 19 nt, Homo sapiens
  misc_RNA (1)...(19): siRNA sense strand
gagguauacuaugcgaaga

SEQ ID NO: 259769 - RNA, 19 nt, Homo sapiens
  misc_RNA (1)...(19): siRNA sense strand
ccagcuccaucuccaguuc

SEQ ID NO: 259770 - RNA, 19 nt, Homo sapiens
  misc_RNA (1)...(19): siRNA sense strand
gguauacuaugcgaagaag

SEQ ID NO: 259771 - RNA, 19 nt, Homo sapiens
  misc_RNA (1)...(19): siRNA sense strand
ccagaggaucuaccaguau

SEQ ID NO: 259772 - RNA, 19 nt, Homo sapiens
  misc_RNA (1)...(19): siRNA sense strand
cgaccuggccauugacaug

SEQ ID NO: 259773 - RNA, 19 nt, Homo sapiens
  misc_RNA (1)...(19): siRNA sense strand
ggagcacacgcagguauug

SEQ ID NO: 259774 - RNA, 19 nt, Homo sapiens
  misc_RNA (1)...(19): siRNA sense strand
gaagaagguccugaaccau

SEQ ID NO: 259775 - RNA, 19 nt, Homo sapiens
  misc_RNA (1)...(19): siRNA sense strand
ccaccugugccugguauuu

SEQ ID NO: 259776 - RNA, 19 nt, Homo sapiens
  misc_RNA (1)...(19): siRNA sense strand
caagaucaucaagaacaaa

SEQ ID NO: 259777 - RNA, 19 nt, Homo sapiens
  misc_RNA (1)...(19): siRNA sense strand
cagcaugacacggagauga

SEQ ID NO: 259778 - RNA, 19 nt, Homo sapiens
  misc_RNA (1)...(19): siRNA sense strand
acaagaaggagaagaaggu

SEQ ID NO: 259779 - RNA, 19 nt, Homo sapiens
  misc_RNA (1)...(19): siRNA sense strand
ccagaugaaccgcauugug

SEQ ID NO: 259780 - RNA, 19 nt, Homo sapiens
  misc_RNA (1)...(19): siRNA sense strand
gcucgcaaguacuuugaac

SEQ ID NO: 259781 - RNA, 19 nt, Homo sapiens
  misc_RNA (1)...(19): siRNA sense strand
ccucuucaguggcuccaau

SEQ ID NO: 259782 - RNA, 19 nt, Homo sapiens
  misc_RNA (1)...(19): siRNA sense strand
caacaagaaggagaagaag

SEQ ID NO: 259783 - RNA, 19 nt, Homo sapiens
  misc_RNA (1)...(19): siRNA sense strand
caaugaggucgaccagaug

SEQ ID NO: 259784 - RNA, 19 nt, Homo sapiens
  misc_RNA (1)...(19): siRNA sense strand
ggagaagaagguccugaac

SEQ ID NO: 259785 - RNA, 19 nt, Homo sapiens
  misc_RNA (1)...(19): siRNA sense strand
gaggaucuaccaguauauc

SEQ ID NO: 259786 - RNA, 19 nt, Homo sapiens
  misc_RNA (1)...(19): siRNA sense strand
gaccuacaagcacaucaau

SEQ ID NO: 259787 - RNA, 19 nt, Homo sapiens
  misc_RNA (1)...(19): siRNA sense strand
cggagaugaaguacuauau

SEQ ID NO: 259788 - RNA, 19 nt, Homo sapiens
  misc_RNA (1)...(19): siRNA sense strand
ugcgcaugcuggaguauga

SEQ ID NO: 259789 - RNA, 19 nt, Homo sapiens
  misc_RNA (1)...(19): siRNA sense strand
caagcacaucaaugaggua

SEQ ID NO: 259790 - RNA, 19 nt, Homo sapiens
  misc_RNA (1)...(19): siRNA sense strand
gcugcauccuuguggagau

SEQ ID NO: 259791 - RNA, 19 nt, Homo sapiens
  misc_RNA (1)...(19): siRNA sense strand
cgagcaacaagaaggagaa

SEQ ID NO: 259792 - RNA, 19 nt, Homo sapiens
  misc_RNA (1)...(19): siRNA sense strand
ugacgacaaccaugacuac

SEQ ID NO: 259793 - RNA, 19 nt, Homo sapiens
  misc_RNA (1)...(19): siRNA sense strand
caggagcacacgcagguau

SEQ ID NO: 259794 - RNA, 19 nt, Homo sapiens
  misc_RNA (1)...(19): siRNA sense strand
gaaugcagcuuacuuucuu

SEQ ID NO: 259795 - RNA, 19 nt, Homo sapiens
  misc_RNA (1)...(19): siRNA sense strand
ucgauuaccugaagaguuu

SEQ ID NO: 259796 - RNA, 19 nt, Homo sapiens
  misc_RNA (1)...(19): siRNA sense strand
gcacacacauaucacauca

SEQ ID NO: 259797 - RNA, 19 nt, Homo sapiens
  misc_RNA (1)...(19): siRNA sense strand
ccugaagaguuuagaaaua

SEQ ID NO: 259798 - RNA, 19 nt, Homo sapiens
  misc_RNA (1)...(19): siRNA sense strand
gcugaugaccugaggauua

SEQ ID NO: 259799 - RNA, 19 nt, Homo sapiens
  misc_RNA (1)...(19): siRNA sense strand
caaccacacgggagaauua

SEQ ID NO: 259800 - RNA, 19 nt, Homo sapiens
  misc_RNA (1)...(19): siRNA sense strand
gcagaaugcagcuuacuuu

SEQ ID NO: 259801 - RNA, 19 nt, Homo sapiens
  misc_RNA (1)...(19): siRNA sense strand
caucgagacuuaccagguu

SEQ ID NO: 259802 - RNA, 19 nt, Homo sapiens
  misc_RNA (1)...(19): siRNA sense strand
gcaguggcggcuacaaaua

SEQ ID NO: 259803 - RNA, 19 nt, Homo sapiens
  misc_RNA (1)...(19): siRNA sense strand
ggauuaaccuauggaacuu

SEQ ID NO: 259804 - RNA, 19 nt, Homo sapiens
  misc_RNA (1)...(19): siRNA sense strand
gaucacagcagccgaguuc

SEQ ID NO: 259805 - RNA, 19 nt, Homo sapiens
  misc_RNA (1)...(19): siRNA sense strand
ggacaauccggcuguguga

SEQ ID NO: 259806 - RNA, 19 nt, Homo sapiens
  misc_RNA (1)...(19): siRNA sense strand
gcagcuuacuuucuucugu

SEQ ID NO: 259807 - RNA, 19 nt, Homo sapiens
  misc_RNA (1)...(19): siRNA sense strand
ccuauggaacuuugaaaua

SEQ ID NO: 259808 - RNA, 19 nt, Homo sapiens
  misc_RNA (1)...(19): siRNA sense strand
cugaugaccugaggauuaa

SEQ ID NO: 259809 - RNA, 19 nt, Homo sapiens
  misc_RNA (1)...(19): siRNA sense strand
ucucugaaauuaucucuuc

SEQ ID NO: 259810 - RNA, 19 nt, Homo sapiens
  misc_RNA (1)...(19): siRNA sense strand
ugacaggcacaccaaauuu

SEQ ID NO: 259811 - RNA, 19 nt, Homo sapiens
  misc_RNA (1)...(19): siRNA sense strand
gugaagcuguggaaaguca

SEQ ID NO: 259812 - RNA, 19 nt, Homo sapiens
  misc_RNA (1)...(19): siRNA sense strand
caagcuguguucccucuau

SEQ ID NO: 259813 - RNA, 19 nt, Homo sapiens
  misc_RNA (1)...(19): siRNA sense strand
cgaguucgauuaccugaag

SEQ ID NO: 259814 - RNA, 19 nt, Homo sapiens
  misc_RNA (1)...(19): siRNA sense strand
agacuuaccagguucauga

SEQ ID NO: 259815 - RNA, 19 nt, Homo sapiens
  misc_RNA (1)...(19): siRNA sense strand
gggucggguuguaauauuu

SEQ ID NO: 259816 - RNA, 19 nt, Homo sapiens
  misc_RNA (1)...(19): siRNA sense strand
ccacacgggagaauuacua

SEQ ID NO: 259817 - RNA, 19 nt, Homo sapiens
  misc_RNA (1)...(19): siRNA sense strand
gaagauccaagcaacagau

SEQ ID NO: 259818 - RNA, 19 nt, Homo sapiens
  misc_RNA (1)...(19): siRNA sense strand
cugaagaguuuagaaauag

SEQ ID NO: 259819 - RNA, 19 nt, Homo sapiens
  misc_RNA (1)...(19): siRNA sense strand
cgagaucagugucgacagu

SEQ ID NO: 259820 - RNA, 19 nt, Homo sapiens
  misc_RNA (1)...(19): siRNA sense strand
aaagucagcgagcgugaua

SEQ ID NO: 259821 - RNA, 19 nt, Homo sapiens
  misc_RNA (1)...(19): siRNA sense strand
gaccugaggauuaaccuau

SEQ ID NO: 259822 - RNA, 19 nt, Homo sapiens
  misc_RNA (1)...(19): siRNA sense strand
gcacauuccagagccauga

SEQ ID NO: 259823 - RNA, 19 nt, Homo sapiens
  misc_RNA (1)...(19): siRNA sense strand
ggcuacaaauaaccuauau

SEQ ID NO: 259824 - RNA, 19 nt, Homo sapiens
  misc_RNA (1)...(19): siRNA sense strand
acacacauaucacaucaac

SEQ ID NO: 259825 - RNA, 19 nt, Homo sapiens
  misc_RNA (1)...(19): siRNA sense strand
ucucuucgauuucggaugu

SEQ ID NO: 259826 - RNA, 19 nt, Homo sapiens
  misc_RNA (1)...(19): siRNA sense strand
aacgagagcaggagaguaa

SEQ ID NO: 259827 - RNA, 19 nt, Homo sapiens
  misc_RNA (1)...(19): siRNA sense strand
gaaaagacgagaucagugu

SEQ ID NO: 259828 - RNA, 19 nt, Homo sapiens
  misc_RNA (1)...(19): siRNA sense strand
ucaggauguucgacagaaa

SEQ ID NO: 259829 - RNA, 19 nt, Homo sapiens
  misc_RNA (1)...(19): siRNA sense strand
ucacaucaacuccauaucu

SEQ ID NO: 259830 - RNA, 19 nt, Homo sapiens
  misc_RNA (1)...(19): siRNA sense strand
caguggcggcuacaaauaa

SEQ ID NO: 259831 - RNA, 19 nt, Homo sapiens
  misc_RNA (1)...(19): siRNA sense strand
ucugggaucucaacaugga

SEQ ID NO: 259832 - RNA, 19 nt, Homo sapiens
  misc_RNA (1)...(19): siRNA sense strand
agugggagguauaucauga

SEQ ID NO: 259833 - RNA, 19 nt, Homo sapiens
  misc_RNA (1)...(19): siRNA sense strand
acacauaucacaucaacuc

SEQ ID NO: 259834 - RNA, 19 nt, Homo sapiens
  misc_RNA (1)...(19): siRNA sense strand
cagcuuggcauccuucaga

SEQ ID NO: 259835 - RNA, 19 nt, Homo sapiens
  misc_RNA (1)...(19): siRNA sense strand
ggaaugggucagacagugu

SEQ ID NO: 259836 - RNA, 19 nt, Homo sapiens
  misc_RNA (1)...(19): siRNA sense strand
gucaaagucugggaucuca

SEQ ID NO: 259837 - RNA, 19 nt, Homo sapiens
  misc_RNA (1)...(19): siRNA sense strand
gugacaggcacaccaaauu

SEQ ID NO: 259838 - RNA, 19 nt, Homo sapiens
  misc_RNA (1)...(19): siRNA sense strand
caacagcgacuaugaaacc

SEQ ID NO: 259839 - RNA, 19 nt, Homo sapiens
  misc_RNA (1)...(19): siRNA sense strand
cacaucaacuccauaucug

SEQ ID NO: 259840 - RNA, 19 nt, Homo sapiens
  misc_RNA (1)...(19): siRNA sense strand
uuucuucugucuacuaaug

SEQ ID NO: 259841 - RNA, 19 nt, Homo sapiens
  misc_RNA (1)...(19): siRNA sense strand
cauaucacaucaacuccau

SEQ ID NO: 259842 - RNA, 19 nt, Homo sapiens
  misc_RNA (1)...(19): siRNA sense strand
ccaacgcacacacauauca

SEQ ID NO: 259843 - RNA, 19 nt, Homo sapiens
  misc_RNA (1)...(19): siRNA sense strand
agucugggaucucaacaug

SEQ ID NO: 259844 - RNA, 19 nt, Homo sapiens
  misc_RNA (1)...(19): siRNA sense strand
gucaacagcgacuaugaaa

SEQ ID NO: 259845 - RNA, 19 nt, Homo sapiens
  misc_RNA (1)...(19): siRNA sense strand
cuuaccagguucaugacua

SEQ ID NO: 259846 - RNA, 19 nt, Homo sapiens
  misc_RNA (1)...(19): siRNA sense strand
ggaagauccaagcaacaga

SEQ ID NO: 259847 - RNA, 19 nt, Homo sapiens
  misc_RNA (1)...(19): siRNA sense strand
uaucacaucaacuccauau

SEQ ID NO: 259848 - RNA, 19 nt, Homo sapiens
  misc_RNA (1)...(19): siRNA sense strand
gauuucggaugugaaguuc

SEQ ID NO: 259849 - RNA, 19 nt, Homo sapiens
  misc_RNA (1)...(19): siRNA sense strand
gcauacagcuuggcauccu

SEQ ID NO: 259850 - RNA, 19 nt, Homo sapiens
  misc_RNA (1)...(19): siRNA sense strand
acaacaacuucuucaggau

SEQ ID NO: 259851 - RNA, 19 nt, Homo sapiens
  misc_RNA (1)...(19): siRNA sense strand
caacgagagcaggagagua

SEQ ID NO: 259852 - RNA, 19 nt, Homo sapiens
  misc_RNA (1)...(19): siRNA sense strand
ugacaggcuccuacaacaa

SEQ ID NO: 259853 - RNA, 19 nt, Homo sapiens
  misc_RNA (1)...(19): siRNA sense strand
uaaccuauggaacuuugaa

SEQ ID NO: 259854 - RNA, 19 nt, Homo sapiens
  misc_RNA (1)...(19): siRNA sense strand
cgauuucggaugugaaguu

SEQ ID NO: 259855 - RNA, 19 nt, Homo sapiens
  misc_RNA (1)...(19): siRNA sense strand
agaaggcuacaaucugaaa

SEQ ID NO: 259856 - RNA, 19 nt, Homo sapiens
  misc_RNA (1)...(19): siRNA sense strand
uaccugaagaguuuagaaa

SEQ ID NO: 259857 - RNA, 19 nt, Homo sapiens
  misc_RNA (1)...(19): siRNA sense strand
ccaagcaacagaucauuuu

SEQ ID NO: 259858 - RNA, 19 nt, Homo sapiens
  misc_RNA (1)...(19): siRNA sense strand
gaaagucagcgagcgugau

SEQ ID NO: 259859 - RNA, 19 nt, Homo sapiens
  misc_RNA (1)...(19): siRNA sense strand
cggcuacaaauaaccuaua

SEQ ID NO: 259860 - RNA, 19 nt, Homo sapiens
  misc_RNA (1)...(19): siRNA sense strand
ggccagaaggcuacaaucu

SEQ ID NO: 259861 - RNA, 19 nt, Homo sapiens
  misc_RNA (1)...(19): siRNA sense strand
gcuguguucccucuaugaa

SEQ ID NO: 259862 - RNA, 19 nt, Homo sapiens
  misc_RNA (1)...(19): siRNA sense strand
gauccugccaccaucacaa

SEQ ID NO: 259863 - RNA, 19 nt, Homo sapiens
  misc_RNA (1)...(19): siRNA sense strand
aaacugugaagcuguggaa

SEQ ID NO: 259864 - RNA, 19 nt, Homo sapiens
  misc_RNA (1)...(19): siRNA sense strand
gaaacaccaagcgugaugu

SEQ ID NO: 259865 - RNA, 19 nt, Homo sapiens
  misc_RNA (1)...(19): siRNA sense strand
agaaacaccaagcgugaug

SEQ ID NO: 259866 - RNA, 19 nt, Homo sapiens
  misc_RNA (1)...(19): siRNA sense strand
cccagcagaaugcagcuua

SEQ ID NO: 259867 - RNA, 19 nt, Homo sapiens
  misc_RNA (1)...(19): siRNA sense strand
gugaauacaauguuuacag

SEQ ID NO: 259868 - RNA, 19 nt, Homo sapiens
  misc_RNA (1)...(19): siRNA sense strand
ugccaacgcacacacauau

SEQ ID NO: 259869 - RNA, 19 nt, Homo sapiens
  misc_RNA (1)...(19): siRNA sense strand
ugucaacagcgacuaugaa

SEQ ID NO: 259870 - RNA, 19 nt, Homo sapiens
  misc_RNA (1)...(19): siRNA sense strand
aacaacuucuucaggaugu

SEQ ID NO: 259871 - RNA, 19 nt, Homo sapiens
  misc_RNA (1)...(19): siRNA sense strand
gacaggcuccuacaacaac

SEQ ID NO: 259872 - RNA, 19 nt, Homo sapiens
  misc_RNA (1)...(19): siRNA sense strand
cagaaugcagcuuacuuuc

SEQ ID NO: 259873 - RNA, 19 nt, Homo sapiens
  misc_RNA (1)...(19): siRNA sense strand
ucaacuccauaucugucaa

SEQ ID NO: 259874 - RNA, 19 nt, Homo sapiens
  misc_RNA (1)...(19): siRNA sense strand
cacagugggagguauauca

SEQ ID NO: 259875 - RNA, 19 nt, Homo sapiens
  misc_RNA (1)...(19): siRNA sense strand
cugaaauuaucucuucgau

SEQ ID NO: 259876 - RNA, 19 nt, Homo sapiens
  misc_RNA (1)...(19): siRNA sense strand
gauuaaccuauggaacuuu

SEQ ID NO: 259877 - RNA, 19 nt, Homo sapiens
  misc_RNA (1)...(19): siRNA sense strand
ucagcgagcgugauaagag

SEQ ID NO: 259878 - RNA, 19 nt, Homo sapiens
  misc_RNA (1)...(19): siRNA sense strand
uuaccagguucaugacuac

SEQ ID NO: 259879 - RNA, 19 nt, Homo sapiens
  misc_RNA (1)...(19): siRNA sense strand
cugugaagcuguggaaagu

SEQ ID NO: 259880 - RNA, 19 nt, Homo sapiens
  misc_RNA (1)...(19): siRNA sense strand
gcaucugcccugugugaca

SEQ ID NO: 259881 - RNA, 19 nt, Homo sapiens
  misc_RNA (1)...(19): siRNA sense strand
auuaaccuauggaacuuug

SEQ ID NO: 259882 - RNA, 19 nt, Homo sapiens
  misc_RNA (1)...(19): siRNA sense strand
gacauuaagccagccaaca

SEQ ID NO: 259883 - RNA, 19 nt, Homo sapiens
  misc_RNA (1)...(19): siRNA sense strand
cauacagcuuggcauccuu

SEQ ID NO: 259884 - RNA, 19 nt, Homo sapiens
  misc_RNA (1)...(19): siRNA sense strand
gcuccuacaacaacuucuu

SEQ ID NO: 259885 - RNA, 19 nt, Homo sapiens
  misc_RNA (1)...(19): siRNA sense strand
caaagucugggaucucaac

SEQ ID NO: 259886 - RNA, 19 nt, Homo sapiens
  misc_RNA (1)...(19): siRNA sense strand
gaaugcagcuuacuuucuu

SEQ ID NO: 259887 - RNA, 19 nt, Homo sapiens
  misc_RNA (1)...(19): siRNA sense strand
ucgauuaccugaagaguuu

SEQ ID NO: 259888 - RNA, 19 nt, Homo sapiens
  misc_RNA (1)...(19): siRNA sense strand
gcacacacauaucacauca

SEQ ID NO: 259889 - RNA, 19 nt, Homo sapiens
  misc_RNA (1)...(19): siRNA sense strand
ccugaagaguuuagaaaua

SEQ ID NO: 259890 - RNA, 19 nt, Homo sapiens
  misc_RNA (1)...(19): siRNA sense strand
gcugaugaccugaggauua

SEQ ID NO: 259891 - RNA, 19 nt, Homo sapiens
  misc_RNA (1)...(19): siRNA sense strand
caaccacacgggagaauua

SEQ ID NO: 259892 - RNA, 19 nt, Homo sapiens
  misc_RNA (1)...(19): siRNA sense strand
gcagaaugcagcuuacuuu

SEQ ID NO: 259893 - RNA, 19 nt, Homo sapiens
  misc_RNA (1)...(19): siRNA sense strand
caucgagacuuaccagguu

SEQ ID NO: 259894 - RNA, 19 nt, Homo sapiens
  misc_RNA (1)...(19): siRNA sense strand
gcaguggcggcuacaaaua

SEQ ID NO: 259895 - RNA, 19 nt, Homo sapiens
  misc_RNA (1)...(19): siRNA sense strand
ggauuaaccuauggaacuu

SEQ ID NO: 259896 - RNA, 19 nt, Homo sapiens
  misc_RNA (1)...(19): siRNA sense strand
gaucacagcagccgaguuc

SEQ ID NO: 259897 - RNA, 19 nt, Homo sapiens
  misc_RNA (1)...(19): siRNA sense strand
ggacaauccggcuguguga

SEQ ID NO: 259898 - RNA, 19 nt, Homo sapiens
  misc_RNA (1)...(19): siRNA sense strand
gcagcuuacuuucuucugu

SEQ ID NO: 259899 - RNA, 19 nt, Homo sapiens
  misc_RNA (1)...(19): siRNA sense strand
ccuauggaacuuugaaaua

SEQ ID NO: 259900 - RNA, 19 nt, Homo sapiens
  misc_RNA (1)...(19): siRNA sense strand
cugaugaccugaggauuaa

SEQ ID NO: 259901 - RNA, 19 nt, Homo sapiens
  misc_RNA (1)...(19): siRNA sense strand
ucucugaaauuaucucuuc

SEQ ID NO: 259902 - RNA, 19 nt, Homo sapiens
  misc_RNA (1)...(19): siRNA sense strand
ugacaggcacaccaaauuu

SEQ ID NO: 259903 - RNA, 19 nt, Homo sapiens
  misc_RNA (1)...(19): siRNA sense strand
gugaagcuguggaaaguca

SEQ ID NO: 259904 - RNA, 19 nt, Homo sapiens
  misc_RNA (1)...(19): siRNA sense strand
caagcuguguucccucuau

SEQ ID NO: 259905 - RNA, 19 nt, Homo sapiens
  misc_RNA (1)...(19): siRNA sense strand
cgaguucgauuaccugaag

SEQ ID NO: 259906 - RNA, 19 nt, Homo sapiens
  misc_RNA (1)...(19): siRNA sense strand
agacuuaccagguucauga

SEQ ID NO: 259907 - RNA, 19 nt, Homo sapiens
  misc_RNA (1)...(19): siRNA sense strand
gggucggguuguaauauuu

SEQ ID NO: 259908 - RNA, 19 nt, Homo sapiens
  misc_RNA (1)...(19): siRNA sense strand
ccacacgggagaauuacua

SEQ ID NO: 259909 - RNA, 19 nt, Homo sapiens
  misc_RNA (1)...(19): siRNA sense strand
gaagauccaagcaacagau

SEQ ID NO: 259910 - RNA, 19 nt, Homo sapiens
  misc_RNA (1)...(19): siRNA sense strand
cugaagaguuuagaaauag

SEQ ID NO: 259911 - RNA, 19 nt, Homo sapiens
  misc_RNA (1)...(19): siRNA sense strand
cgagaucagugucgacagu

SEQ ID NO: 259912 - RNA, 19 nt, Homo sapiens
  misc_RNA (1)...(19): siRNA sense strand
aaagucagcgagcgugaua

SEQ ID NO: 259913 - RNA, 19 nt, Homo sapiens
  misc_RNA (1)...(19): siRNA sense strand
gaccugaggauuaaccuau

SEQ ID NO: 259914 - RNA, 19 nt, Homo sapiens
  misc_RNA (1)...(19): siRNA sense strand
gcacauuccagagccauga

SEQ ID NO: 259915 - RNA, 19 nt, Homo sapiens
  misc_RNA (1)...(19): siRNA sense strand
ggcuacaaauaaccuauau

SEQ ID NO: 259916 - RNA, 19 nt, Homo sapiens
  misc_RNA (1)...(19): siRNA sense strand
acacacauaucacaucaac

SEQ ID NO: 259917 - RNA, 19 nt, Homo sapiens
  misc_RNA (1)...(19): siRNA sense strand
ucucuucgauuucggaugu

SEQ ID NO: 259918 - RNA, 19 nt, Homo sapiens
  misc_RNA (1)...(19): siRNA sense strand
aacgagagcaggagaguaa

SEQ ID NO: 259919 - RNA, 19 nt, Homo sapiens
  misc_RNA (1)...(19): siRNA sense strand
gaaaagacgagaucagugu

SEQ ID NO: 259920 - RNA, 19 nt, Homo sapiens
  misc_RNA (1)...(19): siRNA sense strand
ucaggauguucgacagaaa

SEQ ID NO: 259921 - RNA, 19 nt, Homo sapiens
  misc_RNA (1)...(19): siRNA sense strand
ucacaucaacuccauaucu

SEQ ID NO: 259922 - RNA, 19 nt, Homo sapiens
  misc_RNA (1)...(19): siRNA sense strand
caguggcggcuacaaauaa

SEQ ID NO: 259923 - RNA, 19 nt, Homo sapiens
  misc_RNA (1)...(19): siRNA sense strand
ucugggaucucaacaugga

SEQ ID NO: 259924 - RNA, 19 nt, Homo sapiens
  misc_RNA (1)...(19): siRNA sense strand
agugggagguauaucauga

SEQ ID NO: 259925 - RNA, 19 nt, Homo sapiens
  misc_RNA (1)...(19): siRNA sense strand
acacauaucacaucaacuc

SEQ ID NO: 259926 - RNA, 19 nt, Homo sapiens
  misc_RNA (1)...(19): siRNA sense strand
cagcuuggcauccuucaga

SEQ ID NO: 259927 - RNA, 19 nt, Homo sapiens
  misc_RNA (1)...(19): siRNA sense strand
ggaaugggucagacagugu

SEQ ID NO: 259928 - RNA, 19 nt, Homo sapiens
  misc_RNA (1)...(19): siRNA sense strand
gucaaagucugggaucuca

SEQ ID NO: 259929 - RNA, 19 nt, Homo sapiens
  misc_RNA (1)...(19): siRNA sense strand
gugacaggcacaccaaauu

SEQ ID NO: 259930 - RNA, 19 nt, Homo sapiens
  misc_RNA (1)...(19): siRNA sense strand
caacagcgacuaugaaacc

SEQ ID NO: 259931 - RNA, 19 nt, Homo sapiens
  misc_RNA (1)...(19): siRNA sense strand
cacaucaacuccauaucug

SEQ ID NO: 259932 - RNA, 19 nt, Homo sapiens
  misc_RNA (1)...(19): siRNA sense strand
uuucuucugucuacuaaug

SEQ ID NO: 259933 - RNA, 19 nt, Homo sapiens
  misc_RNA (1)...(19): siRNA sense strand
cauaucacaucaacuccau

SEQ ID NO: 259934 - RNA, 19 nt, Homo sapiens
  misc_RNA (1)...(19): siRNA sense strand
ccaacgcacacacauauca

SEQ ID NO: 259935 - RNA, 19 nt, Homo sapiens
  misc_RNA (1)...(19): siRNA sense strand
agucugggaucucaacaug

SEQ ID NO: 259936 - RNA, 19 nt, Homo sapiens
  misc_RNA (1)...(19): siRNA sense strand
gucaacagcgacuaugaaa

SEQ ID NO: 259937 - RNA, 19 nt, Homo sapiens
  misc_RNA (1)...(19): siRNA sense strand
cuuaccagguucaugacua

SEQ ID NO: 259938 - RNA, 19 nt, Homo sapiens
  misc_RNA (1)...(19): siRNA sense strand
ggaagauccaagcaacaga

SEQ ID NO: 259939 - RNA, 19 nt, Homo sapiens
  misc_RNA (1)...(19): siRNA sense strand
uaucacaucaacuccauau

SEQ ID NO: 259940 - RNA, 19 nt, Homo sapiens
  misc_RNA (1)...(19): siRNA sense strand
gauuucggaugugaaguuc

SEQ ID NO: 259941 - RNA, 19 nt, Homo sapiens
  misc_RNA (1)...(19): siRNA sense strand
gcauacagcuuggcauccu

SEQ ID NO: 259942 - RNA, 19 nt, Homo sapiens
  misc_RNA (1)...(19): siRNA sense strand
acaacaacuucuucaggau

SEQ ID NO: 259943 - RNA, 19 nt, Homo sapiens
  misc_RNA (1)...(19): siRNA sense strand
caacgagagcaggagagua

SEQ ID NO: 259944 - RNA, 19 nt, Homo sapiens
  misc_RNA (1)...(19): siRNA sense strand
ugacaggcuccuacaacaa

SEQ ID NO: 259945 - RNA, 19 nt, Homo sapiens
  misc_RNA (1)...(19): siRNA sense strand
uaaccuauggaacuuugaa

SEQ ID NO: 259946 - RNA, 19 nt, Homo sapiens
  misc_RNA (1)...(19): siRNA sense strand
cgauuucggaugugaaguu

SEQ ID NO: 259947 - RNA, 19 nt, Homo sapiens
  misc_RNA (1)...(19): siRNA sense strand
agaaggcuacaaucugaaa

SEQ ID NO: 259948 - RNA, 19 nt, Homo sapiens
  misc_RNA (1)...(19): siRNA sense strand
uaccugaagaguuuagaaa

SEQ ID NO: 259949 - RNA, 19 nt, Homo sapiens
  misc_RNA (1)...(19): siRNA sense strand
ccaagcaacagaucauuuu

SEQ ID NO: 259950 - RNA, 19 nt, Homo sapiens
  misc_RNA (1)...(19): siRNA sense strand
gaaagucagcgagcgugau

SEQ ID NO: 259951 - RNA, 19 nt, Homo sapiens
  misc_RNA (1)...(19): siRNA sense strand
cggcuacaaauaaccuaua

SEQ ID NO: 259952 - RNA, 19 nt, Homo sapiens
  misc_RNA (1)...(19): siRNA sense strand
ggccagaaggcuacaaucu

SEQ ID NO: 259953 - RNA, 19 nt, Homo sapiens
  misc_RNA (1)...(19): siRNA sense strand
gcuguguucccucuaugaa

SEQ ID NO: 259954 - RNA, 19 nt, Homo sapiens
  misc_RNA (1)...(19): siRNA sense strand
gauccugccaccaucacaa

SEQ ID NO: 259955 - RNA, 19 nt, Homo sapiens
  misc_RNA (1)...(19): siRNA sense strand
aaacugugaagcuguggaa

SEQ ID NO: 259956 - RNA, 19 nt, Homo sapiens
  misc_RNA (1)...(19): siRNA sense strand
gaaacaccaagcgugaugu

SEQ ID NO: 259957 - RNA, 19 nt, Homo sapiens
  misc_RNA (1)...(19): siRNA sense strand
agaaacaccaagcgugaug

SEQ ID NO: 259958 - RNA, 19 nt, Homo sapiens
  misc_RNA (1)...(19): siRNA sense strand
cccagcagaaugcagcuua

SEQ ID NO: 259959 - RNA, 19 nt, Homo sapiens
  misc_RNA (1)...(19): siRNA sense strand
gugaauacaauguuuacag

SEQ ID NO: 259960 - RNA, 19 nt, Homo sapiens
  misc_RNA (1)...(19): siRNA sense strand
ugccaacgcacacacauau

SEQ ID NO: 259961 - RNA, 19 nt, Homo sapiens
  misc_RNA (1)...(19): siRNA sense strand
ugucaacagcgacuaugaa

SEQ ID NO: 259962 - RNA, 19 nt, Homo sapiens
  misc_RNA (1)...(19): siRNA sense strand
aacaacuucuucaggaugu

SEQ ID NO: 259963 - RNA, 19 nt, Homo sapiens
  misc_RNA (1)...(19): siRNA sense strand
gacaggcuccuacaacaac

SEQ ID NO: 259964 - RNA, 19 nt, Homo sapiens
  misc_RNA (1)...(19): siRNA sense strand
cagaaugcagcuuacuuuc

SEQ ID NO: 259965 - RNA, 19 nt, Homo sapiens
  misc_RNA (1)...(19): siRNA sense strand
ucaacuccauaucugucaa

SEQ ID NO: 259966 - RNA, 19 nt, Homo sapiens
  misc_RNA (1)...(19): siRNA sense strand
cacagugggagguauauca

SEQ ID NO: 259967 - RNA, 19 nt, Homo sapiens
  misc_RNA (1)...(19): siRNA sense strand
cugaaauuaucucuucgau

SEQ ID NO: 259968 - RNA, 19 nt, Homo sapiens
  misc_RNA (1)...(19): siRNA sense strand
gauuaaccuauggaacuuu

SEQ ID NO: 259969 - RNA, 19 nt, Homo sapiens
  misc_RNA (1)...(19): siRNA sense strand
ucagcgagcgugauaagag

SEQ ID NO: 259970 - RNA, 19 nt, Homo sapiens
  misc_RNA (1)...(19): siRNA sense strand
uuaccagguucaugacuac

SEQ ID NO: 259971 - RNA, 19 nt, Homo sapiens
  misc_RNA (1)...(19): siRNA sense strand
cugugaagcuguggaaagu

SEQ ID NO: 259972 - RNA, 19 nt, Homo sapiens
  misc_RNA (1)...(19): siRNA sense strand
gcaucugcccugugugaca

SEQ ID NO: 259973 - RNA, 19 nt, Homo sapiens
  misc_RNA (1)...(19): siRNA sense strand
auuaaccuauggaacuuug

SEQ ID NO: 259974 - RNA, 19 nt, Homo sapiens
  misc_RNA (1)...(19): siRNA sense strand
gacauuaagccagccaaca

SEQ ID NO: 259975 - RNA, 19 nt, Homo sapiens
  misc_RNA (1)...(19): siRNA sense strand
cauacagcuuggcauccuu

SEQ ID NO: 259976 - RNA, 19 nt, Homo sapiens
  misc_RNA (1)...(19): siRNA sense strand
gcuccuacaacaacuucuu

SEQ ID NO: 259977 - RNA, 19 nt, Homo sapiens
  misc_RNA (1)...(19): siRNA sense strand
caaagucugggaucucaac

SEQ ID NO: 259978 - RNA, 19 nt, Homo sapiens
  misc_RNA (1)...(19): siRNA sense strand
gaaugcagcuuacuuucuu

SEQ ID NO: 259979 - RNA, 19 nt, Homo sapiens
  misc_RNA (1)...(19): siRNA sense strand
ucgauuaccugaagaguuu

SEQ ID NO: 259980 - RNA, 19 nt, Homo sapiens
  misc_RNA (1)...(19): siRNA sense strand
gcacacacauaucacauca

SEQ ID NO: 259981 - RNA, 19 nt, Homo sapiens
  misc_RNA (1)...(19): siRNA sense strand
ccugaagaguuuagaaaua

SEQ ID NO: 259982 - RNA, 19 nt, Homo sapiens
  misc_RNA (1)...(19): siRNA sense strand
gcugaugaccugaggauua

SEQ ID NO: 259983 - RNA, 19 nt, Homo sapiens
  misc_RNA (1)...(19): siRNA sense strand
caaccacacgggagaauua

SEQ ID NO: 259984 - RNA, 19 nt, Homo sapiens
  misc_RNA (1)...(19): siRNA sense strand
gcagaaugcagcuuacuuu

SEQ ID NO: 259985 - RNA, 19 nt, Homo sapiens
  misc_RNA (1)...(19): siRNA sense strand
caucgagacuuaccagguu

SEQ ID NO: 259986 - RNA, 19 nt, Homo sapiens
  misc_RNA (1)...(19): siRNA sense strand
gcaguggcggcuacaaaua

SEQ ID NO: 259987 - RNA, 19 nt, Homo sapiens
  misc_RNA (1)...(19): siRNA sense strand
ggauuaaccuauggaacuu

SEQ ID NO: 259988 - RNA, 19 nt, Homo sapiens
  misc_RNA (1)...(19): siRNA sense strand
gaucacagcagccgaguuc

SEQ ID NO: 259989 - RNA, 19 nt, Homo sapiens
  misc_RNA (1)...(19): siRNA sense strand
ggacaauccggcuguguga

SEQ ID NO: 259990 - RNA, 19 nt, Homo sapiens
  misc_RNA (1)...(19): siRNA sense strand
gcagcuuacuuucuucugu

SEQ ID NO: 259991 - RNA, 19 nt, Homo sapiens
  misc_RNA (1)...(19): siRNA sense strand
ccuauggaacuuugaaaua

SEQ ID NO: 259992 - RNA, 19 nt, Homo sapiens
  misc_RNA (1)...(19): siRNA sense strand
cugaugaccugaggauuaa

SEQ ID NO: 259993 - RNA, 19 nt, Homo sapiens
  misc_RNA (1)...(19): siRNA sense strand
ucucugaaauuaucucuuc

SEQ ID NO: 259994 - RNA, 19 nt, Homo sapiens
  misc_RNA (1)...(19): siRNA sense strand
ugacaggcacaccaaauuu

SEQ ID NO: 259995 - RNA, 19 nt, Homo sapiens
  misc_RNA (1)...(19): siRNA sense strand
gugaagcuguggaaaguca

SEQ ID NO: 259996 - RNA, 19 nt, Homo sapiens
  misc_RNA (1)...(19): siRNA sense strand
caagcuguguucccucuau

SEQ ID NO: 259997 - RNA, 19 nt, Homo sapiens
  misc_RNA (1)...(19): siRNA sense strand
cgaguucgauuaccugaag

SEQ ID NO: 259998 - RNA, 19 nt, Homo sapiens
  misc_RNA (1)...(19): siRNA sense strand
agacuuaccagguucauga

SEQ ID NO: 259999 - RNA, 19 nt, Homo sapiens
  misc_RNA (1)...(19): siRNA sense strand
gggucggguuguaauauuu

SEQ ID NO: 260000 - RNA, 19 nt, Homo sapiens
  misc_RNA (1)...(19): siRNA sense strand
ccacacgggagaauuacua

SEQ ID NO: 260001 - RNA, 19 nt, Homo sapiens
  misc_RNA (1)...(19): siRNA sense strand
gaagauccaagcaacagau

SEQ ID NO: 260002 - RNA, 19 nt, Homo sapiens
  misc_RNA (1)...(19): siRNA sense strand
cugaagaguuuagaaauag

SEQ ID NO: 260003 - RNA, 19 nt, Homo sapiens
  misc_RNA (1)...(19): siRNA sense strand
cgagaucagugucgacagu

SEQ ID NO: 260004 - RNA, 19 nt, Homo sapiens
  misc_RNA (1)...(19): siRNA sense strand
aaagucagcgagcgugaua

SEQ ID NO: 260005 - RNA, 19 nt, Homo sapiens
  misc_RNA (1)...(19): siRNA sense strand
gaccugaggauuaaccuau

SEQ ID NO: 260006 - RNA, 19 nt, Homo sapiens
  misc_RNA (1)...(19): siRNA sense strand
gcacauuccagagccauga

SEQ ID NO: 260007 - RNA, 19 nt, Homo sapiens
  misc_RNA (1)...(19): siRNA sense strand
ggcuacaaauaaccuauau

SEQ ID NO: 260008 - RNA, 19 nt, Homo sapiens
  misc_RNA (1)...(19): siRNA sense strand
acacacauaucacaucaac

SEQ ID NO: 260009 - RNA, 19 nt, Homo sapiens
  misc_RNA (1)...(19): siRNA sense strand
ucucuucgauuucggaugu

SEQ ID NO: 260010 - RNA, 19 nt, Homo sapiens
  misc_RNA (1)...(19): siRNA sense strand
aacgagagcaggagaguaa

SEQ ID NO: 260011 - RNA, 19 nt, Homo sapiens
  misc_RNA (1)...(19): siRNA sense strand
gaaaagacgagaucagugu

SEQ ID NO: 260012 - RNA, 19 nt, Homo sapiens
  misc_RNA (1)...(19): siRNA sense strand
ucaggauguucgacagaaa

SEQ ID NO: 260013 - RNA, 19 nt, Homo sapiens
  misc_RNA (1)...(19): siRNA sense strand
ucacaucaacuccauaucu

SEQ ID NO: 260014 - RNA, 19 nt, Homo sapiens
  misc_RNA (1)...(19): siRNA sense strand
caguggcggcuacaaauaa

SEQ ID NO: 260015 - RNA, 19 nt, Homo sapiens
  misc_RNA (1)...(19): siRNA sense strand
ucugggaucucaacaugga

SEQ ID NO: 260016 - RNA, 19 nt, Homo sapiens
  misc_RNA (1)...(19): siRNA sense strand
agugggagguauaucauga

SEQ ID NO: 260017 - RNA, 19 nt, Homo sapiens
  misc_RNA (1)...(19): siRNA sense strand
acacauaucacaucaacuc

SEQ ID NO: 260018 - RNA, 19 nt, Homo sapiens
  misc_RNA (1)...(19): siRNA sense strand
cagcuuggcauccuucaga

SEQ ID NO: 260019 - RNA, 19 nt, Homo sapiens
  misc_RNA (1)...(19): siRNA sense strand
ggaaugggucagacagugu

SEQ ID NO: 260020 - RNA, 19 nt, Homo sapiens
  misc_RNA (1)...(19): siRNA sense strand
gucaaagucugggaucuca

SEQ ID NO: 260021 - RNA, 19 nt, Homo sapiens
  misc_RNA (1)...(19): siRNA sense strand
gugacaggcacaccaaauu

SEQ ID NO: 260022 - RNA, 19 nt, Homo sapiens
  misc_RNA (1)...(19): siRNA sense strand
caacagcgacuaugaaacc

SEQ ID NO: 260023 - RNA, 19 nt, Homo sapiens
  misc_RNA (1)...(19): siRNA sense strand
cacaucaacuccauaucug

SEQ ID NO: 260024 - RNA, 19 nt, Homo sapiens
  misc_RNA (1)...(19): siRNA sense strand
uuucuucugucuacuaaug

SEQ ID NO: 260025 - RNA, 19 nt, Homo sapiens
  misc_RNA (1)...(19): siRNA sense strand
cauaucacaucaacuccau

SEQ ID NO: 260026 - RNA, 19 nt, Homo sapiens
  misc_RNA (1)...(19): siRNA sense strand
ccaacgcacacacauauca

SEQ ID NO: 260027 - RNA, 19 nt, Homo sapiens
  misc_RNA (1)...(19): siRNA sense strand
agucugggaucucaacaug

SEQ ID NO: 260028 - RNA, 19 nt, Homo sapiens
  misc_RNA (1)...(19): siRNA sense strand
gucaacagcgacuaugaaa

SEQ ID NO: 260029 - RNA, 19 nt, Homo sapiens
  misc_RNA (1)...(19): siRNA sense strand
cuuaccagguucaugacua

SEQ ID NO: 260030 - RNA, 19 nt, Homo sapiens
  misc_RNA (1)...(19): siRNA sense strand
ggaagauccaagcaacaga

SEQ ID NO: 260031 - RNA, 19 nt, Homo sapiens
  misc_RNA (1)...(19): siRNA sense strand
uaucacaucaacuccauau

SEQ ID NO: 260032 - RNA, 19 nt, Homo sapiens
  misc_RNA (1)...(19): siRNA sense strand
gauuucggaugugaaguuc

SEQ ID NO: 260033 - RNA, 19 nt, Homo sapiens
  misc_RNA (1)...(19): siRNA sense strand
gcauacagcuuggcauccu

SEQ ID NO: 260034 - RNA, 19 nt, Homo sapiens
  misc_RNA (1)...(19): siRNA sense strand
acaacaacuucuucaggau

SEQ ID NO: 260035 - RNA, 19 nt, Homo sapiens
  misc_RNA (1)...(19): siRNA sense strand
caacgagagcaggagagua

SEQ ID NO: 260036 - RNA, 19 nt, Homo sapiens
  misc_RNA (1)...(19): siRNA sense strand
ugacaggcuccuacaacaa

SEQ ID NO: 260037 - RNA, 19 nt, Homo sapiens
  misc_RNA (1)...(19): siRNA sense strand
uaaccuauggaacuuugaa

SEQ ID NO: 260038 - RNA, 19 nt, Homo sapiens
  misc_RNA (1)...(19): siRNA sense strand
cgauuucggaugugaaguu

SEQ ID NO: 260039 - RNA, 19 nt, Homo sapiens
  misc_RNA (1)...(19): siRNA sense strand
agaaggcuacaaucugaaa

SEQ ID NO: 260040 - RNA, 19 nt, Homo sapiens
  misc_RNA (1)...(19): siRNA sense strand
uaccugaagaguuuagaaa

SEQ ID NO: 260041 - RNA, 19 nt, Homo sapiens
  misc_RNA (1)...(19): siRNA sense strand
ccaagcaacagaucauuuu

SEQ ID NO: 260042 - RNA, 19 nt, Homo sapiens
  misc_RNA (1)...(19): siRNA sense strand
gaaagucagcgagcgugau

SEQ ID NO: 260043 - RNA, 19 nt, Homo sapiens
  misc_RNA (1)...(19): siRNA sense strand
cggcuacaaauaaccuaua

SEQ ID NO: 260044 - RNA, 19 nt, Homo sapiens
  misc_RNA (1)...(19): siRNA sense strand
ggccagaaggcuacaaucu

SEQ ID NO: 260045 - RNA, 19 nt, Homo sapiens
  misc_RNA (1)...(19): siRNA sense strand
gcuguguucccucuaugaa

SEQ ID NO: 260046 - RNA, 19 nt, Homo sapiens
  misc_RNA (1)...(19): siRNA sense strand
gauccugccaccaucacaa

SEQ ID NO: 260047 - RNA, 19 nt, Homo sapiens
  misc_RNA (1)...(19): siRNA sense strand
aaacugugaagcuguggaa

SEQ ID NO: 260048 - RNA, 19 nt, Homo sapiens
  misc_RNA (1)...(19): siRNA sense strand
gaaacaccaagcgugaugu

SEQ ID NO: 260049 - RNA, 19 nt, Homo sapiens
  misc_RNA (1)...(19): siRNA sense strand
agaaacaccaagcgugaug

SEQ ID NO: 260050 - RNA, 19 nt, Homo sapiens
  misc_RNA (1)...(19): siRNA sense strand
cccagcagaaugcagcuua

SEQ ID NO: 260051 - RNA, 19 nt, Homo sapiens
  misc_RNA (1)...(19): siRNA sense strand
gugaauacaauguuuacag

SEQ ID NO: 260052 - RNA, 19 nt, Homo sapiens
  misc_RNA (1)...(19): siRNA sense strand
ugccaacgcacacacauau

SEQ ID NO: 260053 - RNA, 19 nt, Homo sapiens
  misc_RNA (1)...(19): siRNA sense strand
ugucaacagcgacuaugaa

SEQ ID NO: 260054 - RNA, 19 nt, Homo sapiens
  misc_RNA (1)...(19): siRNA sense strand
aacaacuucuucaggaugu

SEQ ID NO: 260055 - RNA, 19 nt, Homo sapiens
  misc_RNA (1)...(19): siRNA sense strand
gacaggcuccuacaacaac

SEQ ID NO: 260056 - RNA, 19 nt, Homo sapiens
  misc_RNA (1)...(19): siRNA sense strand
cagaaugcagcuuacuuuc

SEQ ID NO: 260057 - RNA, 19 nt, Homo sapiens
  misc_RNA (1)...(19): siRNA sense strand
ucaacuccauaucugucaa

SEQ ID NO: 260058 - RNA, 19 nt, Homo sapiens
  misc_RNA (1)...(19): siRNA sense strand
cacagugggagguauauca

SEQ ID NO: 260059 - RNA, 19 nt, Homo sapiens
  misc_RNA (1)...(19): siRNA sense strand
cugaaauuaucucuucgau

SEQ ID NO: 260060 - RNA, 19 nt, Homo sapiens
  misc_RNA (1)...(19): siRNA sense strand
gauuaaccuauggaacuuu

SEQ ID NO: 260061 - RNA, 19 nt, Homo sapiens
  misc_RNA (1)...(19): siRNA sense strand
ucagcgagcgugauaagag

SEQ ID NO: 260062 - RNA, 19 nt, Homo sapiens
  misc_RNA (1)...(19): siRNA sense strand
uuaccagguucaugacuac

SEQ ID NO: 260063 - RNA, 19 nt, Homo sapiens
  misc_RNA (1)...(19): siRNA sense strand
cugugaagcuguggaaagu

SEQ ID NO: 260064 - RNA, 19 nt, Homo sapiens
  misc_RNA (1)...(19): siRNA sense strand
gcaucugcccugugugaca

SEQ ID NO: 260065 - RNA, 19 nt, Homo sapiens
  misc_RNA (1)...(19): siRNA sense strand
auuaaccuauggaacuuug

SEQ ID NO: 260066 - RNA, 19 nt, Homo sapiens
  misc_RNA (1)...(19): siRNA sense strand
gacauuaagccagccaaca

SEQ ID NO: 260067 - RNA, 19 nt, Homo sapiens
  misc_RNA (1)...(19): siRNA sense strand
cauacagcuuggcauccuu

SEQ ID NO: 260068 - RNA, 19 nt, Homo sapiens
  misc_RNA (1)...(19): siRNA sense strand
gcuccuacaacaacuucuu

SEQ ID NO: 260069 - RNA, 19 nt, Homo sapiens
  misc_RNA (1)...(19): siRNA sense strand
caaagucugggaucucaac

SEQ ID NO: 260070 - RNA, 19 nt, Homo sapiens
  misc_RNA (1)...(19): siRNA sense strand
gaaugcagcuuacuuucuu

SEQ ID NO: 260071 - RNA, 19 nt, Homo sapiens
  misc_RNA (1)...(19): siRNA sense strand
ucgauuaccugaagaguuu

SEQ ID NO: 260072 - RNA, 19 nt, Homo sapiens
  misc_RNA (1)...(19): siRNA sense strand
gcacacacauaucacauca

SEQ ID NO: 260073 - RNA, 19 nt, Homo sapiens
  misc_RNA (1)...(19): siRNA sense strand
ccugaagaguuuagaaaua

SEQ ID NO: 260074 - RNA, 19 nt, Homo sapiens
  misc_RNA (1)...(19): siRNA sense strand
gcugaugaccugaggauua

SEQ ID NO: 260075 - RNA, 19 nt, Homo sapiens
  misc_RNA (1)...(19): siRNA sense strand
caaccacacgggagaauua

SEQ ID NO: 260076 - RNA, 19 nt, Homo sapiens
  misc_RNA (1)...(19): siRNA sense strand
gcagaaugcagcuuacuuu

SEQ ID NO: 260077 - RNA, 19 nt, Homo sapiens
  misc_RNA (1)...(19): siRNA sense strand
caucgagacuuaccagguu

SEQ ID NO: 260078 - RNA, 19 nt, Homo sapiens
  misc_RNA (1)...(19): siRNA sense strand
gcaguggcggcuacaaaua

SEQ ID NO: 260079 - RNA, 19 nt, Homo sapiens
  misc_RNA (1)...(19): siRNA sense strand
ggauuaaccuauggaacuu

SEQ ID NO: 260080 - RNA, 19 nt, Homo sapiens
  misc_RNA (1)...(19): siRNA sense strand
gaucacagcagccgaguuc

SEQ ID NO: 260081 - RNA, 19 nt, Homo sapiens
  misc_RNA (1)...(19): siRNA sense strand
ggacaauccggcuguguga

SEQ ID NO: 260082 - RNA, 19 nt, Homo sapiens
  misc_RNA (1)...(19): siRNA sense strand
gcagcuuacuuucuucugu

SEQ ID NO: 260083 - RNA, 19 nt, Homo sapiens
  misc_RNA (1)...(19): siRNA sense strand
ccuauggaacuuugaaaua

SEQ ID NO: 260084 - RNA, 19 nt, Homo sapiens
  misc_RNA (1)...(19): siRNA sense strand
cugaugaccugaggauuaa

SEQ ID NO: 260085 - RNA, 19 nt, Homo sapiens
  misc_RNA (1)...(19): siRNA sense strand
ucucugaaauuaucucuuc

SEQ ID NO: 260086 - RNA, 19 nt, Homo sapiens
  misc_RNA (1)...(19): siRNA sense strand
ugacaggcacaccaaauuu

SEQ ID NO: 260087 - RNA, 19 nt, Homo sapiens
  misc_RNA (1)...(19): siRNA sense strand
gugaagcuguggaaaguca

SEQ ID NO: 260088 - RNA, 19 nt, Homo sapiens
  misc_RNA (1)...(19): siRNA sense strand
caagcuguguucccucuau

SEQ ID NO: 260089 - RNA, 19 nt, Homo sapiens
  misc_RNA (1)...(19): siRNA sense strand
cgaguucgauuaccugaag

SEQ ID NO: 260090 - RNA, 19 nt, Homo sapiens
  misc_RNA (1)...(19): siRNA sense strand
agacuuaccagguucauga

SEQ ID NO: 260091 - RNA, 19 nt, Homo sapiens
  misc_RNA (1)...(19): siRNA sense strand
gggucggguuguaauauuu

SEQ ID NO: 260092 - RNA, 19 nt, Homo sapiens
  misc_RNA (1)...(19): siRNA sense strand
ccacacgggagaauuacua

SEQ ID NO: 260093 - RNA, 19 nt, Homo sapiens
  misc_RNA (1)...(19): siRNA sense strand
gaagauccaagcaacagau

SEQ ID NO: 260094 - RNA, 19 nt, Homo sapiens
  misc_RNA (1)...(19): siRNA sense strand
cugaagaguuuagaaauag

SEQ ID NO: 260095 - RNA, 19 nt, Homo sapiens
  misc_RNA (1)...(19): siRNA sense strand
cgagaucagugucgacagu

SEQ ID NO: 260096 - RNA, 19 nt, Homo sapiens
  misc_RNA (1)...(19): siRNA sense strand
aaagucagcgagcgugaua

SEQ ID NO: 260097 - RNA, 19 nt, Homo sapiens
  misc_RNA (1)...(19): siRNA sense strand
gaccugaggauuaaccuau

SEQ ID NO: 260098 - RNA, 19 nt, Homo sapiens
  misc_RNA (1)...(19): siRNA sense strand
gcacauuccagagccauga

SEQ ID NO: 260099 - RNA, 19 nt, Homo sapiens
  misc_RNA (1)...(19): siRNA sense strand
ggcuacaaauaaccuauau

SEQ ID NO: 260100 - RNA, 19 nt, Homo sapiens
  misc_RNA (1)...(19): siRNA sense strand
acacacauaucacaucaac

SEQ ID NO: 260101 - RNA, 19 nt, Homo sapiens
  misc_RNA (1)...(19): siRNA sense strand
ucucuucgauuucggaugu

SEQ ID NO: 260102 - RNA, 19 nt, Homo sapiens
  misc_RNA (1)...(19): siRNA sense strand
aacgagagcaggagaguaa

SEQ ID NO: 260103 - RNA, 19 nt, Homo sapiens
  misc_RNA (1)...(19): siRNA sense strand
gaaaagacgagaucagugu

SEQ ID NO: 260104 - RNA, 19 nt, Homo sapiens
  misc_RNA (1)...(19): siRNA sense strand
ucaggauguucgacagaaa

SEQ ID NO: 260105 - RNA, 19 nt, Homo sapiens
  misc_RNA (1)...(19): siRNA sense strand
ucacaucaacuccauaucu

SEQ ID NO: 260106 - RNA, 19 nt, Homo sapiens
  misc_RNA (1)...(19): siRNA sense strand
caguggcggcuacaaauaa

SEQ ID NO: 260107 - RNA, 19 nt, Homo sapiens
  misc_RNA (1)...(19): siRNA sense strand
ucugggaucucaacaugga

SEQ ID NO: 260108 - RNA, 19 nt, Homo sapiens
  misc_RNA (1)...(19): siRNA sense strand
agugggagguauaucauga

SEQ ID NO: 260109 - RNA, 19 nt, Homo sapiens
  misc_RNA (1)...(19): siRNA sense strand
acacauaucacaucaacuc

SEQ ID NO: 260110 - RNA, 19 nt, Homo sapiens
  misc_RNA (1)...(19): siRNA sense strand
cagcuuggcauccuucaga

SEQ ID NO: 260111 - RNA, 19 nt, Homo sapiens
  misc_RNA (1)...(19): siRNA sense strand
ggaaugggucagacagugu

SEQ ID NO: 260112 - RNA, 19 nt, Homo sapiens
  misc_RNA (1)...(19): siRNA sense strand
gucaaagucugggaucuca

SEQ ID NO: 260113 - RNA, 19 nt, Homo sapiens
  misc_RNA (1)...(19): siRNA sense strand
gugacaggcacaccaaauu

SEQ ID NO: 260114 - RNA, 19 nt, Homo sapiens
  misc_RNA (1)...(19): siRNA sense strand
caacagcgacuaugaaacc

SEQ ID NO: 260115 - RNA, 19 nt, Homo sapiens
  misc_RNA (1)...(19): siRNA sense strand
cacaucaacuccauaucug

SEQ ID NO: 260116 - RNA, 19 nt, Homo sapiens
  misc_RNA (1)...(19): siRNA sense strand
uuucuucugucuacuaaug

SEQ ID NO: 260117 - RNA, 19 nt, Homo sapiens
  misc_RNA (1)...(19): siRNA sense strand
cauaucacaucaacuccau

SEQ ID NO: 260118 - RNA, 19 nt, Homo sapiens
  misc_RNA (1)...(19): siRNA sense strand
ccaacgcacacacauauca

SEQ ID NO: 260119 - RNA, 19 nt, Homo sapiens
  misc_RNA (1)...(19): siRNA sense strand
agucugggaucucaacaug

SEQ ID NO: 260120 - RNA, 19 nt, Homo sapiens
  misc_RNA (1)...(19): siRNA sense strand
gucaacagcgacuaugaaa

SEQ ID NO: 260121 - RNA, 19 nt, Homo sapiens
  misc_RNA (1)...(19): siRNA sense strand
cuuaccagguucaugacua

SEQ ID NO: 260122 - RNA, 19 nt, Homo sapiens
  misc_RNA (1)...(19): siRNA sense strand
ggaagauccaagcaacaga

SEQ ID NO: 260123 - RNA, 19 nt, Homo sapiens
  misc_RNA (1)...(19): siRNA sense strand
uaucacaucaacuccauau

SEQ ID NO: 260124 - RNA, 19 nt, Homo sapiens
  misc_RNA (1)...(19): siRNA sense strand
gauuucggaugugaaguuc

SEQ ID NO: 260125 - RNA, 19 nt, Homo sapiens
  misc_RNA (1)...(19): siRNA sense strand
gcauacagcuuggcauccu

SEQ ID NO: 260126 - RNA, 19 nt, Homo sapiens
  misc_RNA (1)...(19): siRNA sense strand
acaacaacuucuucaggau

SEQ ID NO: 260127 - RNA, 19 nt, Homo sapiens
  misc_RNA (1)...(19): siRNA sense strand
caacgagagcaggagagua

SEQ ID NO: 260128 - RNA, 19 nt, Homo sapiens
  misc_RNA (1)...(19): siRNA sense strand
ugacaggcuccuacaacaa

SEQ ID NO: 260129 - RNA, 19 nt, Homo sapiens
  misc_RNA (1)...(19): siRNA sense strand
uaaccuauggaacuuugaa

SEQ ID NO: 260130 - RNA, 19 nt, Homo sapiens
  misc_RNA (1)...(19): siRNA sense strand
cgauuucggaugugaaguu

SEQ ID NO: 260131 - RNA, 19 nt, Homo sapiens
  misc_RNA (1)...(19): siRNA sense strand
agaaggcuacaaucugaaa

SEQ ID NO: 260132 - RNA, 19 nt, Homo sapiens
  misc_RNA (1)...(19): siRNA sense strand
uaccugaagaguuuagaaa

SEQ ID NO: 260133 - RNA, 19 nt, Homo sapiens
  misc_RNA (1)...(19): siRNA sense strand
ccaagcaacagaucauuuu

SEQ ID NO: 260134 - RNA, 19 nt, Homo sapiens
  misc_RNA (1)...(19): siRNA sense strand
gaaagucagcgagcgugau

SEQ ID NO: 260135 - RNA, 19 nt, Homo sapiens
  misc_RNA (1)...(19): siRNA sense strand
cggcuacaaauaaccuaua

SEQ ID NO: 260136 - RNA, 19 nt, Homo sapiens
  misc_RNA (1)...(19): siRNA sense strand
ggccagaaggcuacaaucu

SEQ ID NO: 260137 - RNA, 19 nt, Homo sapiens
  misc_RNA (1)...(19): siRNA sense strand
gcuguguucccucuaugaa

SEQ ID NO: 260138 - RNA, 19 nt, Homo sapiens
  misc_RNA (1)...(19): siRNA sense strand
gauccugccaccaucacaa

SEQ ID NO: 260139 - RNA, 19 nt, Homo sapiens
  misc_RNA (1)...(19): siRNA sense strand
aaacugugaagcuguggaa

SEQ ID NO: 260140 - RNA, 19 nt, Homo sapiens
  misc_RNA (1)...(19): siRNA sense strand
gaaacaccaagcgugaugu

SEQ ID NO: 260141 - RNA, 19 nt, Homo sapiens
  misc_RNA (1)...(19): siRNA sense strand
agaaacaccaagcgugaug

SEQ ID NO: 260142 - RNA, 19 nt, Homo sapiens
  misc_RNA (1)...(19): siRNA sense strand
cccagcagaaugcagcuua

SEQ ID NO: 260143 - RNA, 19 nt, Homo sapiens
  misc_RNA (1)...(19): siRNA sense strand
gugaauacaauguuuacag

SEQ ID NO: 260144 - RNA, 19 nt, Homo sapiens
  misc_RNA (1)...(19): siRNA sense strand
ugccaacgcacacacauau

SEQ ID NO: 260145 - RNA, 19 nt, Homo sapiens
  misc_RNA (1)...(19): siRNA sense strand
ugucaacagcgacuaugaa

SEQ ID NO: 260146 - RNA, 19 nt, Homo sapiens
  misc_RNA (1)...(19): siRNA sense strand
aacaacuucuucaggaugu

SEQ ID NO: 260147 - RNA, 19 nt, Homo sapiens
  misc_RNA (1)...(19): siRNA sense strand
gacaggcuccuacaacaac

SEQ ID NO: 260148 - RNA, 19 nt, Homo sapiens
  misc_RNA (1)...(19): siRNA sense strand
cagaaugcagcuuacuuuc

SEQ ID NO: 260149 - RNA, 19 nt, Homo sapiens
  misc_RNA (1)...(19): siRNA sense strand
ucaacuccauaucugucaa

SEQ ID NO: 260150 - RNA, 19 nt, Homo sapiens
  misc_RNA (1)...(19): siRNA sense strand
cacagugggagguauauca

SEQ ID NO: 260151 - RNA, 19 nt, Homo sapiens
  misc_RNA (1)...(19): siRNA sense strand
cugaaauuaucucuucgau

SEQ ID NO: 260152 - RNA, 19 nt, Homo sapiens
  misc_RNA (1)...(19): siRNA sense strand
gauuaaccuauggaacuuu

SEQ ID NO: 260153 - RNA, 19 nt, Homo sapiens
  misc_RNA (1)...(19): siRNA sense strand
ucagcgagcgugauaagag

SEQ ID NO: 260154 - RNA, 19 nt, Homo sapiens
  misc_RNA (1)...(19): siRNA sense strand
uuaccagguucaugacuac

SEQ ID NO: 260155 - RNA, 19 nt, Homo sapiens
  misc_RNA (1)...(19): siRNA sense strand
cugugaagcuguggaaagu

SEQ ID NO: 260156 - RNA, 19 nt, Homo sapiens
  misc_RNA (1)...(19): siRNA sense strand
gcaucugcccugugugaca

SEQ ID NO: 260157 - RNA, 19 nt, Homo sapiens
  misc_RNA (1)...(19): siRNA sense strand
auuaaccuauggaacuuug

SEQ ID NO: 260158 - RNA, 19 nt, Homo sapiens
  misc_RNA (1)...(19): siRNA sense strand
gacauuaagccagccaaca

SEQ ID NO: 260159 - RNA, 19 nt, Homo sapiens
  misc_RNA (1)...(19): siRNA sense strand
cauacagcuuggcauccuu

SEQ ID NO: 260160 - RNA, 19 nt, Homo sapiens
  misc_RNA (1)...(19): siRNA sense strand
gcuccuacaacaacuucuu

SEQ ID NO: 260161 - RNA, 19 nt, Homo sapiens
  misc_RNA (1)...(19): siRNA sense strand
caaagucugggaucucaac

SEQ ID NO: 260162 - RNA, 19 nt, Homo sapiens
  misc_RNA (1)...(19): siRNA sense strand
gaaugcagcuuacuuucuu

SEQ ID NO: 260163 - RNA, 19 nt, Homo sapiens
  misc_RNA (1)...(19): siRNA sense strand
ucgauuaccugaagaguuu

SEQ ID NO: 260164 - RNA, 19 nt, Homo sapiens
  misc_RNA (1)...(19): siRNA sense strand
gcacacacauaucacauca

SEQ ID NO: 260165 - RNA, 19 nt, Homo sapiens
  misc_RNA (1)...(19): siRNA sense strand
ccugaagaguuuagaaaua

SEQ ID NO: 260166 - RNA, 19 nt, Homo sapiens
  misc_RNA (1)...(19): siRNA sense strand
gcugaugaccugaggauua

SEQ ID NO: 260167 - RNA, 19 nt, Homo sapiens
  misc_RNA (1)...(19): siRNA sense strand
caaccacacgggagaauua

SEQ ID NO: 260168 - RNA, 19 nt, Homo sapiens
  misc_RNA (1)...(19): siRNA sense strand
gcagaaugcagcuuacuuu

SEQ ID NO: 260169 - RNA, 19 nt, Homo sapiens
  misc_RNA (1)...(19): siRNA sense strand
caucgagacuuaccagguu

SEQ ID NO: 260170 - RNA, 19 nt, Homo sapiens
  misc_RNA (1)...(19): siRNA sense strand
gcaguggcggcuacaaaua

SEQ ID NO: 260171 - RNA, 19 nt, Homo sapiens
  misc_RNA (1)...(19): siRNA sense strand
ggauuaaccuauggaacuu

SEQ ID NO: 260172 - RNA, 19 nt, Homo sapiens
  misc_RNA (1)...(19): siRNA sense strand
gaucacagcagccgaguuc

SEQ ID NO: 260173 - RNA, 19 nt, Homo sapiens
  misc_RNA (1)...(19): siRNA sense strand
ggacaauccggcuguguga

SEQ ID NO: 260174 - RNA, 19 nt, Homo sapiens
  misc_RNA (1)...(19): siRNA sense strand
gcagcuuacuuucuucugu

SEQ ID NO: 260175 - RNA, 19 nt, Homo sapiens
  misc_RNA (1)...(19): siRNA sense strand
ccuauggaacuuugaaaua

SEQ ID NO: 260176 - RNA, 19 nt, Homo sapiens
  misc_RNA (1)...(19): siRNA sense strand
cugaugaccugaggauuaa

SEQ ID NO: 260177 - RNA, 19 nt, Homo sapiens
  misc_RNA (1)...(19): siRNA sense strand
ucucugaaauuaucucuuc

SEQ ID NO: 260178 - RNA, 19 nt, Homo sapiens
  misc_RNA (1)...(19): siRNA sense strand
ugacaggcacaccaaauuu

SEQ ID NO: 260179 - RNA, 19 nt, Homo sapiens
  misc_RNA (1)...(19): siRNA sense strand
gugaagcuguggaaaguca

SEQ ID NO: 260180 - RNA, 19 nt, Homo sapiens
  misc_RNA (1)...(19): siRNA sense strand
caagcuguguucccucuau

SEQ ID NO: 260181 - RNA, 19 nt, Homo sapiens
  misc_RNA (1)...(19): siRNA sense strand
cgaguucgauuaccugaag

SEQ ID NO: 260182 - RNA, 19 nt, Homo sapiens
  misc_RNA (1)...(19): siRNA sense strand
agacuuaccagguucauga

SEQ ID NO: 260183 - RNA, 19 nt, Homo sapiens
  misc_RNA (1)...(19): siRNA sense strand
gggucggguuguaauauuu

SEQ ID NO: 260184 - RNA, 19 nt, Homo sapiens
  misc_RNA (1)...(19): siRNA sense strand
ccacacgggagaauuacua

SEQ ID NO: 260185 - RNA, 19 nt, Homo sapiens
  misc_RNA (1)...(19): siRNA sense strand
gaagauccaagcaacagau

SEQ ID NO: 260186 - RNA, 19 nt, Homo sapiens
  misc_RNA (1)...(19): siRNA sense strand
cugaagaguuuagaaauag

SEQ ID NO: 260187 - RNA, 19 nt, Homo sapiens
  misc_RNA (1)...(19): siRNA sense strand
cgagaucagugucgacagu

SEQ ID NO: 260188 - RNA, 19 nt, Homo sapiens
  misc_RNA (1)...(19): siRNA sense strand
aaagucagcgagcgugaua

SEQ ID NO: 260189 - RNA, 19 nt, Homo sapiens
  misc_RNA (1)...(19): siRNA sense strand
gaccugaggauuaaccuau

SEQ ID NO: 260190 - RNA, 19 nt, Homo sapiens
  misc_RNA (1)...(19): siRNA sense strand
gcacauuccagagccauga

SEQ ID NO: 260191 - RNA, 19 nt, Homo sapiens
  misc_RNA (1)...(19): siRNA sense strand
ggcuacaaauaaccuauau

SEQ ID NO: 260192 - RNA, 19 nt, Homo sapiens
  misc_RNA (1)...(19): siRNA sense strand
acacacauaucacaucaac

SEQ ID NO: 260193 - RNA, 19 nt, Homo sapiens
  misc_RNA (1)...(19): siRNA sense strand
ucucuucgauuucggaugu

SEQ ID NO: 260194 - RNA, 19 nt, Homo sapiens
  misc_RNA (1)...(19): siRNA sense strand
aacgagagcaggagaguaa

SEQ ID NO: 260195 - RNA, 19 nt, Homo sapiens
  misc_RNA (1)...(19): siRNA sense strand
gaaaagacgagaucagugu

SEQ ID NO: 260196 - RNA, 19 nt, Homo sapiens
  misc_RNA (1)...(19): siRNA sense strand
ucaggauguucgacagaaa

SEQ ID NO: 260197 - RNA, 19 nt, Homo sapiens
  misc_RNA (1)...(19): siRNA sense strand
ucacaucaacuccauaucu

SEQ ID NO: 260198 - RNA, 19 nt, Homo sapiens
  misc_RNA (1)...(19): siRNA sense strand
caguggcggcuacaaauaa

SEQ ID NO: 260199 - RNA, 19 nt, Homo sapiens
  misc_RNA (1)...(19): siRNA sense strand
ucugggaucucaacaugga

SEQ ID NO: 260200 - RNA, 19 nt, Homo sapiens
  misc_RNA (1)...(19): siRNA sense strand
agugggagguauaucauga

SEQ ID NO: 260201 - RNA, 19 nt, Homo sapiens
  misc_RNA (1)...(19): siRNA sense strand
acacauaucacaucaacuc

SEQ ID NO: 260202 - RNA, 19 nt, Homo sapiens
  misc_RNA (1)...(19): siRNA sense strand
cagcuuggcauccuucaga

SEQ ID NO: 260203 - RNA, 19 nt, Homo sapiens
  misc_RNA (1)...(19): siRNA sense strand
ggaaugggucagacagugu

SEQ ID NO: 260204 - RNA, 19 nt, Homo sapiens
  misc_RNA (1)...(19): siRNA sense strand
gucaaagucugggaucuca

SEQ ID NO: 260205 - RNA, 19 nt, Homo sapiens
  misc_RNA (1)...(19): siRNA sense strand
gugacaggcacaccaaauu

SEQ ID NO: 260206 - RNA, 19 nt, Homo sapiens
  misc_RNA (1)...(19): siRNA sense strand
caacagcgacuaugaaacc

SEQ ID NO: 260207 - RNA, 19 nt, Homo sapiens
  misc_RNA (1)...(19): siRNA sense strand
cacaucaacuccauaucug

SEQ ID NO: 260208 - RNA, 19 nt, Homo sapiens
  misc_RNA (1)...(19): siRNA sense strand
uuucuucugucuacuaaug

SEQ ID NO: 260209 - RNA, 19 nt, Homo sapiens
  misc_RNA (1)...(19): siRNA sense strand
cauaucacaucaacuccau

SEQ ID NO: 260210 - RNA, 19 nt, Homo sapiens
  misc_RNA (1)...(19): siRNA sense strand
ccaacgcacacacauauca

SEQ ID NO: 260211 - RNA, 19 nt, Homo sapiens
  misc_RNA (1)...(19): siRNA sense strand
agucugggaucucaacaug

SEQ ID NO: 260212 - RNA, 19 nt, Homo sapiens
  misc_RNA (1)...(19): siRNA sense strand
gucaacagcgacuaugaaa

SEQ ID NO: 260213 - RNA, 19 nt, Homo sapiens
  misc_RNA (1)...(19): siRNA sense strand
cuuaccagguucaugacua

SEQ ID NO: 260214 - RNA, 19 nt, Homo sapiens
  misc_RNA (1)...(19): siRNA sense strand
ggaagauccaagcaacaga

SEQ ID NO: 260215 - RNA, 19 nt, Homo sapiens
  misc_RNA (1)...(19): siRNA sense strand
uaucacaucaacuccauau

SEQ ID NO: 260216 - RNA, 19 nt, Homo sapiens
  misc_RNA (1)...(19): siRNA sense strand
gauuucggaugugaaguuc

SEQ ID NO: 260217 - RNA, 19 nt, Homo sapiens
  misc_RNA (1)...(19): siRNA sense strand
gcauacagcuuggcauccu

SEQ ID NO: 260218 - RNA, 19 nt, Homo sapiens
  misc_RNA (1)...(19): siRNA sense strand
acaacaacuucuucaggau

SEQ ID NO: 260219 - RNA, 19 nt, Homo sapiens
  misc_RNA (1)...(19): siRNA sense strand
caacgagagcaggagagua

SEQ ID NO: 260220 - RNA, 19 nt, Homo sapiens
  misc_RNA (1)...(19): siRNA sense strand
ugacaggcuccuacaacaa

SEQ ID NO: 260221 - RNA, 19 nt, Homo sapiens
  misc_RNA (1)...(19): siRNA sense strand
uaaccuauggaacuuugaa

SEQ ID NO: 260222 - RNA, 19 nt, Homo sapiens
  misc_RNA (1)...(19): siRNA sense strand
cgauuucggaugugaaguu

SEQ ID NO: 260223 - RNA, 19 nt, Homo sapiens
  misc_RNA (1)...(19): siRNA sense strand
agaaggcuacaaucugaaa

SEQ ID NO: 260224 - RNA, 19 nt, Homo sapiens
  misc_RNA (1)...(19): siRNA sense strand
uaccugaagaguuuagaaa

SEQ ID NO: 260225 - RNA, 19 nt, Homo sapiens
  misc_RNA (1)...(19): siRNA sense strand
ccaagcaacagaucauuuu

SEQ ID NO: 260226 - RNA, 19 nt, Homo sapiens
  misc_RNA (1)...(19): siRNA sense strand
gaaagucagcgagcgugau

SEQ ID NO: 260227 - RNA, 19 nt, Homo sapiens
  misc_RNA (1)...(19): siRNA sense strand
cggcuacaaauaaccuaua

SEQ ID NO: 260228 - RNA, 19 nt, Homo sapiens
  misc_RNA (1)...(19): siRNA sense strand
ggccagaaggcuacaaucu

SEQ ID NO: 260229 - RNA, 19 nt, Homo sapiens
  misc_RNA (1)...(19): siRNA sense strand
gcuguguucccucuaugaa

SEQ ID NO: 260230 - RNA, 19 nt, Homo sapiens
  misc_RNA (1)...(19): siRNA sense strand
gauccugccaccaucacaa

SEQ ID NO: 260231 - RNA, 19 nt, Homo sapiens
  misc_RNA (1)...(19): siRNA sense strand
aaacugugaagcuguggaa

SEQ ID NO: 260232 - RNA, 19 nt, Homo sapiens
  misc_RNA (1)...(19): siRNA sense strand
gaaacaccaagcgugaugu

SEQ ID NO: 260233 - RNA, 19 nt, Homo sapiens
  misc_RNA (1)...(19): siRNA sense strand
agaaacaccaagcgugaug

SEQ ID NO: 260234 - RNA, 19 nt, Homo sapiens
  misc_RNA (1)...(19): siRNA sense strand
cccagcagaaugcagcuua

SEQ ID NO: 260235 - RNA, 19 nt, Homo sapiens
  misc_RNA (1)...(19): siRNA sense strand
gugaauacaauguuuacag

SEQ ID NO: 260236 - RNA, 19 nt, Homo sapiens
  misc_RNA (1)...(19): siRNA sense strand
ugccaacgcacacacauau

SEQ ID NO: 260237 - RNA, 19 nt, Homo sapiens
  misc_RNA (1)...(19): siRNA sense strand
ugucaacagcgacuaugaa

SEQ ID NO: 260238 - RNA, 19 nt, Homo sapiens
  misc_RNA (1)...(19): siRNA sense strand
aacaacuucuucaggaugu

SEQ ID NO: 260239 - RNA, 19 nt, Homo sapiens
  misc_RNA (1)...(19): siRNA sense strand
gacaggcuccuacaacaac

SEQ ID NO: 260240 - RNA, 19 nt, Homo sapiens
  misc_RNA (1)...(19): siRNA sense strand
cagaaugcagcuuacuuuc

SEQ ID NO: 260241 - RNA, 19 nt, Homo sapiens
  misc_RNA (1)...(19): siRNA sense strand
ucaacuccauaucugucaa

SEQ ID NO: 260242 - RNA, 19 nt, Homo sapiens
  misc_RNA (1)...(19): siRNA sense strand
cacagugggagguauauca

SEQ ID NO: 260243 - RNA, 19 nt, Homo sapiens
  misc_RNA (1)...(19): siRNA sense strand
cugaaauuaucucuucgau

SEQ ID NO: 260244 - RNA, 19 nt, Homo sapiens
  misc_RNA (1)...(19): siRNA sense strand
gauuaaccuauggaacuuu

SEQ ID NO: 260245 - RNA, 19 nt, Homo sapiens
  misc_RNA (1)...(19): siRNA sense strand
ucagcgagcgugauaagag

SEQ ID NO: 260246 - RNA, 19 nt, Homo sapiens
  misc_RNA (1)...(19): siRNA sense strand
uuaccagguucaugacuac

SEQ ID NO: 260247 - RNA, 19 nt, Homo sapiens
  misc_RNA (1)...(19): siRNA sense strand
cugugaagcuguggaaagu

SEQ ID NO: 260248 - RNA, 19 nt, Homo sapiens
  misc_RNA (1)...(19): siRNA sense strand
gcaucugcccugugugaca

SEQ ID NO: 260249 - RNA, 19 nt, Homo sapiens
  misc_RNA (1)...(19): siRNA sense strand
auuaaccuauggaacuuug

SEQ ID NO: 260250 - RNA, 19 nt, Homo sapiens
  misc_RNA (1)...(19): siRNA sense strand
gacauuaagccagccaaca

SEQ ID NO: 260251 - RNA, 19 nt, Homo sapiens
  misc_RNA (1)...(19): siRNA sense strand
cauacagcuuggcauccuu

SEQ ID NO: 260252 - RNA, 19 nt, Homo sapiens
  misc_RNA (1)...(19): siRNA sense strand
gcuccuacaacaacuucuu

SEQ ID NO: 260253 - RNA, 19 nt, Homo sapiens
  misc_RNA (1)...(19): siRNA sense strand
caaagucugggaucucaac

SEQ ID NO: 260254 - RNA, 19 nt, Homo sapiens
  misc_RNA (1)...(19): siRNA sense strand
gaaugcagcuuacuuucuu

SEQ ID NO: 260255 - RNA, 19 nt, Homo sapiens
  misc_RNA (1)...(19): siRNA sense strand
ucgauuaccugaagaguuu

SEQ ID NO: 260256 - RNA, 19 nt, Homo sapiens
  misc_RNA (1)...(19): siRNA sense strand
gcacacacauaucacauca

SEQ ID NO: 260257 - RNA, 19 nt, Homo sapiens
  misc_RNA (1)...(19): siRNA sense strand
ccugaagaguuuagaaaua

SEQ ID NO: 260258 - RNA, 19 nt, Homo sapiens
  misc_RNA (1)...(19): siRNA sense strand
gcugaugaccugaggauua

SEQ ID NO: 260259 - RNA, 19 nt, Homo sapiens
  misc_RNA (1)...(19): siRNA sense strand
caaccacacgggagaauua

SEQ ID NO: 260260 - RNA, 19 nt, Homo sapiens
  misc_RNA (1)...(19): siRNA sense strand
gcagaaugcagcuuacuuu

SEQ ID NO: 260261 - RNA, 19 nt, Homo sapiens
  misc_RNA (1)...(19): siRNA sense strand
caucgagacuuaccagguu

SEQ ID NO: 260262 - RNA, 19 nt, Homo sapiens
  misc_RNA (1)...(19): siRNA sense strand
gcaguggcggcuacaaaua

SEQ ID NO: 260263 - RNA, 19 nt, Homo sapiens
  misc_RNA (1)...(19): siRNA sense strand
ggauuaaccuauggaacuu

SEQ ID NO: 260264 - RNA, 19 nt, Homo sapiens
  misc_RNA (1)...(19): siRNA sense strand
gaucacagcagccgaguuc

SEQ ID NO: 260265 - RNA, 19 nt, Homo sapiens
  misc_RNA (1)...(19): siRNA sense strand
ggacaauccggcuguguga

SEQ ID NO: 260266 - RNA, 19 nt, Homo sapiens
  misc_RNA (1)...(19): siRNA sense strand
gcagcuuacuuucuucugu

SEQ ID NO: 260267 - RNA, 19 nt, Homo sapiens
  misc_RNA (1)...(19): siRNA sense strand
ccuauggaacuuugaaaua

SEQ ID NO: 260268 - RNA, 19 nt, Homo sapiens
  misc_RNA (1)...(19): siRNA sense strand
cugaugaccugaggauuaa

SEQ ID NO: 260269 - RNA, 19 nt, Homo sapiens
  misc_RNA (1)...(19): siRNA sense strand
ucucugaaauuaucucuuc

SEQ ID NO: 260270 - RNA, 19 nt, Homo sapiens
  misc_RNA (1)...(19): siRNA sense strand
ugacaggcacaccaaauuu

SEQ ID NO: 260271 - RNA, 19 nt, Homo sapiens
  misc_RNA (1)...(19): siRNA sense strand
gugaagcuguggaaaguca

SEQ ID NO: 260272 - RNA, 19 nt, Homo sapiens
  misc_RNA (1)...(19): siRNA sense strand
caagcuguguucccucuau

SEQ ID NO: 260273 - RNA, 19 nt, Homo sapiens
  misc_RNA (1)...(19): siRNA sense strand
cgaguucgauuaccugaag

SEQ ID NO: 260274 - RNA, 19 nt, Homo sapiens
  misc_RNA (1)...(19): siRNA sense strand
agacuuaccagguucauga

SEQ ID NO: 260275 - RNA, 19 nt, Homo sapiens
  misc_RNA (1)...(19): siRNA sense strand
gggucggguuguaauauuu

SEQ ID NO: 260276 - RNA, 19 nt, Homo sapiens
  misc_RNA (1)...(19): siRNA sense strand
ccacacgggagaauuacua

SEQ ID NO: 260277 - RNA, 19 nt, Homo sapiens
  misc_RNA (1)...(19): siRNA sense strand
gaagauccaagcaacagau

SEQ ID NO: 260278 - RNA, 19 nt, Homo sapiens
  misc_RNA (1)...(19): siRNA sense strand
cugaagaguuuagaaauag

SEQ ID NO: 260279 - RNA, 19 nt, Homo sapiens
  misc_RNA (1)...(19): siRNA sense strand
cgagaucagugucgacagu

SEQ ID NO: 260280 - RNA, 19 nt, Homo sapiens
  misc_RNA (1)...(19): siRNA sense strand
aaagucagcgagcgugaua

SEQ ID NO: 260281 - RNA, 19 nt, Homo sapiens
  misc_RNA (1)...(19): siRNA sense strand
gaccugaggauuaaccuau

SEQ ID NO: 260282 - RNA, 19 nt, Homo sapiens
  misc_RNA (1)...(19): siRNA sense strand
gcacauuccagagccauga

SEQ ID NO: 260283 - RNA, 19 nt, Homo sapiens
  misc_RNA (1)...(19): siRNA sense strand
ggcuacaaauaaccuauau

SEQ ID NO: 260284 - RNA, 19 nt, Homo sapiens
  misc_RNA (1)...(19): siRNA sense strand
acacacauaucacaucaac

SEQ ID NO: 260285 - RNA, 19 nt, Homo sapiens
  misc_RNA (1)...(19): siRNA sense strand
ucucuucgauuucggaugu

SEQ ID NO: 260286 - RNA, 19 nt, Homo sapiens
  misc_RNA (1)...(19): siRNA sense strand
aacgagagcaggagaguaa

SEQ ID NO: 260287 - RNA, 19 nt, Homo sapiens
  misc_RNA (1)...(19): siRNA sense strand
gaaaagacgagaucagugu

SEQ ID NO: 260288 - RNA, 19 nt, Homo sapiens
  misc_RNA (1)...(19): siRNA sense strand
ucaggauguucgacagaaa

SEQ ID NO: 260289 - RNA, 19 nt, Homo sapiens
  misc_RNA (1)...(19): siRNA sense strand
ucacaucaacuccauaucu

SEQ ID NO: 260290 - RNA, 19 nt, Homo sapiens
  misc_RNA (1)...(19): siRNA sense strand
caguggcggcuacaaauaa

SEQ ID NO: 260291 - RNA, 19 nt, Homo sapiens
  misc_RNA (1)...(19): siRNA sense strand
ucugggaucucaacaugga

SEQ ID NO: 260292 - RNA, 19 nt, Homo sapiens
  misc_RNA (1)...(19): siRNA sense strand
agugggagguauaucauga

SEQ ID NO: 260293 - RNA, 19 nt, Homo sapiens
  misc_RNA (1)...(19): siRNA sense strand
acacauaucacaucaacuc

SEQ ID NO: 260294 - RNA, 19 nt, Homo sapiens
  misc_RNA (1)...(19): siRNA sense strand
cagcuuggcauccuucaga

SEQ ID NO: 260295 - RNA, 19 nt, Homo sapiens
  misc_RNA (1)...(19): siRNA sense strand
ggaaugggucagacagugu

SEQ ID NO: 260296 - RNA, 19 nt, Homo sapiens
  misc_RNA (1)...(19): siRNA sense strand
gucaaagucugggaucuca

SEQ ID NO: 260297 - RNA, 19 nt, Homo sapiens
  misc_RNA (1)...(19): siRNA sense strand
gugacaggcacaccaaauu

SEQ ID NO: 260298 - RNA, 19 nt, Homo sapiens
  misc_RNA (1)...(19): siRNA sense strand
caacagcgacuaugaaacc

SEQ ID NO: 260299 - RNA, 19 nt, Homo sapiens
  misc_RNA (1)...(19): siRNA sense strand
cacaucaacuccauaucug

SEQ ID NO: 260300 - RNA, 19 nt, Homo sapiens
  misc_RNA (1)...(19): siRNA sense strand
uuucuucugucuacuaaug

SEQ ID NO: 260301 - RNA, 19 nt, Homo sapiens
  misc_RNA (1)...(19): siRNA sense strand
cauaucacaucaacuccau

SEQ ID NO: 260302 - RNA, 19 nt, Homo sapiens
  misc_RNA (1)...(19): siRNA sense strand
ccaacgcacacacauauca

SEQ ID NO: 260303 - RNA, 19 nt, Homo sapiens
  misc_RNA (1)...(19): siRNA sense strand
agucugggaucucaacaug

SEQ ID NO: 260304 - RNA, 19 nt, Homo sapiens
  misc_RNA (1)...(19): siRNA sense strand
gucaacagcgacuaugaaa

SEQ ID NO: 260305 - RNA, 19 nt, Homo sapiens
  misc_RNA (1)...(19): siRNA sense strand
cuuaccagguucaugacua

SEQ ID NO: 260306 - RNA, 19 nt, Homo sapiens
  misc_RNA (1)...(19): siRNA sense strand
ggaagauccaagcaacaga

SEQ ID NO: 260307 - RNA, 19 nt, Homo sapiens
  misc_RNA (1)...(19): siRNA sense strand
uaucacaucaacuccauau

SEQ ID NO: 260308 - RNA, 19 nt, Homo sapiens
  misc_RNA (1)...(19): siRNA sense strand
gauuucggaugugaaguuc

SEQ ID NO: 260309 - RNA, 19 nt, Homo sapiens
  misc_RNA (1)...(19): siRNA sense strand
gcauacagcuuggcauccu

SEQ ID NO: 260310 - RNA, 19 nt, Homo sapiens
  misc_RNA (1)...(19): siRNA sense strand
acaacaacuucuucaggau

SEQ ID NO: 260311 - RNA, 19 nt, Homo sapiens
  misc_RNA (1)...(19): siRNA sense strand
caacgagagcaggagagua

SEQ ID NO: 260312 - RNA, 19 nt, Homo sapiens
  misc_RNA (1)...(19): siRNA sense strand
ugacaggcuccuacaacaa

SEQ ID NO: 260313 - RNA, 19 nt, Homo sapiens
  misc_RNA (1)...(19): siRNA sense strand
uaaccuauggaacuuugaa

SEQ ID NO: 260314 - RNA, 19 nt, Homo sapiens
  misc_RNA (1)...(19): siRNA sense strand
cgauuucggaugugaaguu

SEQ ID NO: 260315 - RNA, 19 nt, Homo sapiens
  misc_RNA (1)...(19): siRNA sense strand
agaaggcuacaaucugaaa

SEQ ID NO: 260316 - RNA, 19 nt, Homo sapiens
  misc_RNA (1)...(19): siRNA sense strand
uaccugaagaguuuagaaa

SEQ ID NO: 260317 - RNA, 19 nt, Homo sapiens
  misc_RNA (1)...(19): siRNA sense strand
ccaagcaacagaucauuuu

SEQ ID NO: 260318 - RNA, 19 nt, Homo sapiens
  misc_RNA (1)...(19): siRNA sense strand
gaaagucagcgagcgugau

SEQ ID NO: 260319 - RNA, 19 nt, Homo sapiens
  misc_RNA (1)...(19): siRNA sense strand
cggcuacaaauaaccuaua

SEQ ID NO: 260320 - RNA, 19 nt, Homo sapiens
  misc_RNA (1)...(19): siRNA sense strand
ggccagaaggcuacaaucu

SEQ ID NO: 260321 - RNA, 19 nt, Homo sapiens
  misc_RNA (1)...(19): siRNA sense strand
gcuguguucccucuaugaa

SEQ ID NO: 260322 - RNA, 19 nt, Homo sapiens
  misc_RNA (1)...(19): siRNA sense strand
gauccugccaccaucacaa

SEQ ID NO: 260323 - RNA, 19 nt, Homo sapiens
  misc_RNA (1)...(19): siRNA sense strand
aaacugugaagcuguggaa

SEQ ID NO: 260324 - RNA, 19 nt, Homo sapiens
  misc_RNA (1)...(19): siRNA sense strand
gaaacaccaagcgugaugu

SEQ ID NO: 260325 - RNA, 19 nt, Homo sapiens
  misc_RNA (1)...(19): siRNA sense strand
agaaacaccaagcgugaug

SEQ ID NO: 260326 - RNA, 19 nt, Homo sapiens
  misc_RNA (1)...(19): siRNA sense strand
cccagcagaaugcagcuua

SEQ ID NO: 260327 - RNA, 19 nt, Homo sapiens
  misc_RNA (1)...(19): siRNA sense strand
gugaauacaauguuuacag

SEQ ID NO: 260328 - RNA, 19 nt, Homo sapiens
  misc_RNA (1)...(19): siRNA sense strand
ugccaacgcacacacauau

SEQ ID NO: 260329 - RNA, 19 nt, Homo sapiens
  misc_RNA (1)...(19): siRNA sense strand
ugucaacagcgacuaugaa

SEQ ID NO: 260330 - RNA, 19 nt, Homo sapiens
  misc_RNA (1)...(19): siRNA sense strand
aacaacuucuucaggaugu

SEQ ID NO: 260331 - RNA, 19 nt, Homo sapiens
  misc_RNA (1)...(19): siRNA sense strand
gacaggcuccuacaacaac

SEQ ID NO: 260332 - RNA, 19 nt, Homo sapiens
  misc_RNA (1)...(19): siRNA sense strand
cagaaugcagcuuacuuuc

SEQ ID NO: 260333 - RNA, 19 nt, Homo sapiens
  misc_RNA (1)...(19): siRNA sense strand
ucaacuccauaucugucaa

SEQ ID NO: 260334 - RNA, 19 nt, Homo sapiens
  misc_RNA (1)...(19): siRNA sense strand
cacagugggagguauauca

SEQ ID NO: 260335 - RNA, 19 nt, Homo sapiens
  misc_RNA (1)...(19): siRNA sense strand
cugaaauuaucucuucgau

SEQ ID NO: 260336 - RNA, 19 nt, Homo sapiens
  misc_RNA (1)...(19): siRNA sense strand
gauuaaccuauggaacuuu

SEQ ID NO: 260337 - RNA, 19 nt, Homo sapiens
  misc_RNA (1)...(19): siRNA sense strand
ucagcgagcgugauaagag

SEQ ID NO: 260338 - RNA, 19 nt, Homo sapiens
  misc_RNA (1)...(19): siRNA sense strand
uuaccagguucaugacuac

SEQ ID NO: 260339 - RNA, 19 nt, Homo sapiens
  misc_RNA (1)...(19): siRNA sense strand
cugugaagcuguggaaagu

SEQ ID NO: 260340 - RNA, 19 nt, Homo sapiens
  misc_RNA (1)...(19): siRNA sense strand
gcaucugcccugugugaca

SEQ ID NO: 260341 - RNA, 19 nt, Homo sapiens
  misc_RNA (1)...(19): siRNA sense strand
auuaaccuauggaacuuug

SEQ ID NO: 260342 - RNA, 19 nt, Homo sapiens
  misc_RNA (1)...(19): siRNA sense strand
gacauuaagccagccaaca

SEQ ID NO: 260343 - RNA, 19 nt, Homo sapiens
  misc_RNA (1)...(19): siRNA sense strand
cauacagcuuggcauccuu

SEQ ID NO: 260344 - RNA, 19 nt, Homo sapiens
  misc_RNA (1)...(19): siRNA sense strand
gcuccuacaacaacuucuu

SEQ ID NO: 260345 - RNA, 19 nt, Homo sapiens
  misc_RNA (1)...(19): siRNA sense strand
caaagucugggaucucaac

SEQ ID NO: 260346 - RNA, 19 nt, Homo sapiens
  misc_RNA (1)...(19): siRNA sense strand
gaacaagccucucuucuuu

SEQ ID NO: 260347 - RNA, 19 nt, Homo sapiens
  misc_RNA (1)...(19): siRNA sense strand
gggaauucauugagaaaua

SEQ ID NO: 260348 - RNA, 19 nt, Homo sapiens
  misc_RNA (1)...(19): siRNA sense strand
ggaccucauugcugauuua

SEQ ID NO: 260349 - RNA, 19 nt, Homo sapiens
  misc_RNA (1)...(19): siRNA sense strand
uaucagaugugggaacuua

SEQ ID NO: 260350 - RNA, 19 nt, Homo sapiens
  misc_RNA (1)...(19): siRNA sense strand
gaagacacaaucaucgaua

SEQ ID NO: 260351 - RNA, 19 nt, Homo sapiens
  misc_RNA (1)...(19): siRNA sense strand
ggagggaauucauugagaa

SEQ ID NO: 260352 - RNA, 19 nt, Homo sapiens
  misc_RNA (1)...(19): siRNA sense strand
ggaggaggaugacguagug

SEQ ID NO: 260353 - RNA, 19 nt, Homo sapiens
  misc_RNA (1)...(19): siRNA sense strand
ugacaagucucuccaccaa

SEQ ID NO: 260354 - RNA, 19 nt, Homo sapiens
  misc_RNA (1)...(19): siRNA sense strand
gcgaggaccugguacaaca

SEQ ID NO: 260355 - RNA, 19 nt, Homo sapiens
  misc_RNA (1)...(19): siRNA sense strand
gaacagaugaagcccaguu

SEQ ID NO: 260356 - RNA, 19 nt, Homo sapiens
  misc_RNA (1)...(19): siRNA sense strand
agacacaucuggccacuuc

SEQ ID NO: 260357 - RNA, 19 nt, Homo sapiens
  misc_RNA (1)...(19): siRNA sense strand
gcagguggccuaucagaug

SEQ ID NO: 260358 - RNA, 19 nt, Homo sapiens
  misc_RNA (1)...(19): siRNA sense strand
ccucauugcugauuuaaag

SEQ ID NO: 260359 - RNA, 19 nt, Homo sapiens
  misc_RNA (1)...(19): siRNA sense strand
ugagaaauaugacaagucu

SEQ ID NO: 260360 - RNA, 19 nt, Homo sapiens
  misc_RNA (1)...(19): siRNA sense strand
ugaaaaggcucuuauugaa

SEQ ID NO: 260361 - RNA, 19 nt, Homo sapiens
  misc_RNA (1)...(19): siRNA sense strand
cgacaccucuggccacuuc

SEQ ID NO: 260362 - RNA, 19 nt, Homo sapiens
  misc_RNA (1)...(19): siRNA sense strand
ccgacaaacuuuacaaauc

SEQ ID NO: 260363 - RNA, 19 nt, Homo sapiens
  misc_RNA (1)...(19): siRNA sense strand
ucaaugaggccuauaagga

SEQ ID NO: 260364 - RNA, 19 nt, Homo sapiens
  misc_RNA (1)...(19): siRNA sense strand
gaaccagggaggaggauga

SEQ ID NO: 260365 - RNA, 19 nt, Homo sapiens
  misc_RNA (1)...(19): siRNA sense strand
cgacaaacuuuacaaaucc

SEQ ID NO: 260366 - RNA, 19 nt, Homo sapiens
  misc_RNA (1)...(19): siRNA sense strand
ccaguucauuuacaucuug

SEQ ID NO: 260367 - RNA, 19 nt, Homo sapiens
  misc_RNA (1)...(19): siRNA sense strand
ucauuuacaucuugggaaa

SEQ ID NO: 260368 - RNA, 19 nt, Homo sapiens
  misc_RNA (1)...(19): siRNA sense strand
cagcgcagguggccuauca

SEQ ID NO: 260369 - RNA, 19 nt, Homo sapiens
  misc_RNA (1)...(19): siRNA sense strand
caagaagacucugcugaag

SEQ ID NO: 260370 - RNA, 19 nt, Homo sapiens
  misc_RNA (1)...(19): siRNA sense strand
ugaauugacgggcaaguuu

SEQ ID NO: 260371 - RNA, 19 nt, Homo sapiens
  misc_RNA (1)...(19): siRNA sense strand
gcacagaugagaagacucu

SEQ ID NO: 260372 - RNA, 19 nt, Homo sapiens
  misc_RNA (1)...(19): siRNA sense strand
ugaagggacucgggacuga

SEQ ID NO: 260373 - RNA, 19 nt, Homo sapiens
  misc_RNA (1)...(19): siRNA sense strand
ggagagucuuccaggaguu

SEQ ID NO: 260374 - RNA, 19 nt, Homo sapiens
  misc_RNA (1)...(19): siRNA sense strand
ucaagaugaccaacuauga

SEQ ID NO: 260375 - RNA, 19 nt, Homo sapiens
  misc_RNA (1)...(19): siRNA sense strand
gaagcccaguucauuuaca

SEQ ID NO: 260376 - RNA, 19 nt, Homo sapiens
  misc_RNA (1)...(19): siRNA sense strand
gaaaaggcucuuauugaaa

SEQ ID NO: 260377 - RNA, 19 nt, Homo sapiens
  misc_RNA (1)...(19): siRNA sense strand
gaauugacgggcaaguuug

SEQ ID NO: 260378 - RNA, 19 nt, Homo sapiens
  misc_RNA (1)...(19): siRNA sense strand
agaagacucugaccaggau

SEQ ID NO: 260379 - RNA, 19 nt, Homo sapiens
  misc_RNA (1)...(19): siRNA sense strand
ccaaagcgcugcggaaagc

SEQ ID NO: 260380 - RNA, 19 nt, Homo sapiens
  misc_RNA (1)...(19): siRNA sense strand
ccaccugccuauugugaug

SEQ ID NO: 260381 - RNA, 19 nt, Homo sapiens
  misc_RNA (1)...(19): siRNA sense strand
acagcaugaucaagaauga

SEQ ID NO: 260382 - RNA, 19 nt, Homo sapiens
  misc_RNA (1)...(19): siRNA sense strand
ugacaccucuggcgaguac

SEQ ID NO: 260383 - RNA, 19 nt, Homo sapiens
  misc_RNA (1)...(19): siRNA sense strand
ugucagggaugcauuugug

SEQ ID NO: 260384 - RNA, 19 nt, Homo sapiens
  misc_RNA (1)...(19): siRNA sense strand
acaagaagacucugcugaa

SEQ ID NO: 260385 - RNA, 19 nt, Homo sapiens
  misc_RNA (1)...(19): siRNA sense strand
ccacagggaagccgaugaa

SEQ ID NO: 260386 - RNA, 19 nt, Homo sapiens
  misc_RNA (1)...(19): siRNA sense strand
cggagggaauucauugaga

SEQ ID NO: 260387 - RNA, 19 nt, Homo sapiens
  misc_RNA (1)...(19): siRNA sense strand
ggaugucagggaugcauuu

SEQ ID NO: 260388 - RNA, 19 nt, Homo sapiens
  misc_RNA (1)...(19): siRNA sense strand
cuuaaugacugaccugaag

SEQ ID NO: 260389 - RNA, 19 nt, Homo sapiens
  misc_RNA (1)...(19): siRNA sense strand
ggacugacgaagacacaau

SEQ ID NO: 260390 - RNA, 19 nt, Homo sapiens
  misc_RNA (1)...(19): siRNA sense strand
gagggaauucauugagaaa

SEQ ID NO: 260391 - RNA, 19 nt, Homo sapiens
  misc_RNA (1)...(19): siRNA sense strand
cuauugugaugccaaagaa

SEQ ID NO: 260392 - RNA, 19 nt, Homo sapiens
  misc_RNA (1)...(19): siRNA sense strand
ccuauaaggaggacuauca

SEQ ID NO: 260393 - RNA, 19 nt, Homo sapiens
  misc_RNA (1)...(19): siRNA sense strand
agaagucccucuacagcau

SEQ ID NO: 260394 - RNA, 19 nt, Homo sapiens
  misc_RNA (1)...(19): siRNA sense strand
uaugagaagucccucuaca

SEQ ID NO: 260395 - RNA, 19 nt, Homo sapiens
  misc_RNA (1)...(19): siRNA sense strand
ccuggaggcugacaucauc

SEQ ID NO: 260396 - RNA, 19 nt, Homo sapiens
  misc_RNA (1)...(19): siRNA sense strand
guagugaguuggacaugcu

SEQ ID NO: 260397 - RNA, 19 nt, Homo sapiens
  misc_RNA (1)...(19): siRNA sense strand
ggaccaaguaugagaaguc

SEQ ID NO: 260398 - RNA, 19 nt, Homo sapiens
  misc_RNA (1)...(19): siRNA sense strand
gcauuggcacugaugagaa

SEQ ID NO: 260399 - RNA, 19 nt, Homo sapiens
  misc_RNA (1)...(19): siRNA sense strand
gaccugaagucugagaucu

SEQ ID NO: 260400 - RNA, 19 nt, Homo sapiens
  misc_RNA (1)...(19): siRNA sense strand
aagacacaaucaucgauau

SEQ ID NO: 260401 - RNA, 19 nt, Homo sapiens
  misc_RNA (1)...(19): siRNA sense strand
ugacgaagacacaaucauc

SEQ ID NO: 260402 - RNA, 19 nt, Homo sapiens
  misc_RNA (1)...(19): siRNA sense strand
agaagacucugcugaagcu

SEQ ID NO: 260403 - RNA, 19 nt, Homo sapiens
  misc_RNA (1)...(19): siRNA sense strand
gguugguguucgaugagua

SEQ ID NO: 260404 - RNA, 19 nt, Homo sapiens
  misc_RNA (1)...(19): siRNA sense strand
ucuacagcaugaucaagaa

SEQ ID NO: 260405 - RNA, 19 nt, Homo sapiens
  misc_RNA (1)...(19): siRNA sense strand
ggucucccguagugaguug

SEQ ID NO: 260406 - RNA, 19 nt, Homo sapiens
  misc_RNA (1)...(19): siRNA sense strand
gguggcagcauacaaagau

SEQ ID NO: 260407 - RNA, 19 nt, Homo sapiens
  misc_RNA (1)...(19): siRNA sense strand
ugacaccuccggagacuuc

SEQ ID NO: 260408 - RNA, 19 nt, Homo sapiens
  misc_RNA (1)...(19): siRNA sense strand
ccaucaaugaggccuauaa

SEQ ID NO: 260409 - RNA, 19 nt, Homo sapiens
  misc_RNA (1)...(19): siRNA sense strand
gaugaaaaggcucuuauug

SEQ ID NO: 260410 - RNA, 19 nt, Homo sapiens
  misc_RNA (1)...(19): siRNA sense strand
cuucaacccugacgcagau

SEQ ID NO: 260411 - RNA, 19 nt, Homo sapiens
  misc_RNA (1)...(19): siRNA sense strand
cagguggccuaucagaugu

SEQ ID NO: 260412 - RNA, 19 nt, Homo sapiens
  misc_RNA (1)...(19): siRNA sense strand
gccaaagaaauuaaagaug

SEQ ID NO: 260413 - RNA, 19 nt, Homo sapiens
  misc_RNA (1)...(19): siRNA sense strand
uaaggaggacuaucacaag

SEQ ID NO: 260414 - RNA, 19 nt, Homo sapiens
  misc_RNA (1)...(19): siRNA sense strand
gagcgaggaccugguacaa

SEQ ID NO: 260415 - RNA, 19 nt, Homo sapiens
  misc_RNA (1)...(19): siRNA sense strand
gccgggacuuaaugacuga

SEQ ID NO: 260416 - RNA, 19 nt, Homo sapiens
  misc_RNA (1)...(19): siRNA sense strand
gacacaaucaucgauauca

SEQ ID NO: 260417 - RNA, 19 nt, Homo sapiens
  misc_RNA (1)...(19): siRNA sense strand
ugaagggcuuuggcaguga

SEQ ID NO: 260418 - RNA, 19 nt, Homo sapiens
  misc_RNA (1)...(19): siRNA sense strand
ggagcaccccggaauauuu

SEQ ID NO: 260419 - RNA, 19 nt, Homo sapiens
  misc_RNA (1)...(19): siRNA sense strand
acacaaucaucgauaucau

SEQ ID NO: 260420 - RNA, 19 nt, Homo sapiens
  misc_RNA (1)...(19): siRNA sense strand
agaaauaugacaagucucu

SEQ ID NO: 260421 - RNA, 19 nt, Homo sapiens
  misc_RNA (1)...(19): siRNA sense strand
ggaugcauuuguggccauu

SEQ ID NO: 260422 - RNA, 19 nt, Homo sapiens
  misc_RNA (1)...(19): siRNA sense strand
uccaggaguucaucaagau

SEQ ID NO: 260423 - RNA, 19 nt, Homo sapiens
  misc_RNA (1)...(19): siRNA sense strand
ucaugacgauccuguguac

SEQ ID NO: 260424 - RNA, 19 nt, Homo sapiens
  misc_RNA (1)...(19): siRNA sense strand
cauuggcacugaugagaag

SEQ ID NO: 260425 - RNA, 19 nt, Homo sapiens
  misc_RNA (1)...(19): siRNA sense strand
ugugaugccaaagaaauua

SEQ ID NO: 260426 - RNA, 19 nt, Homo sapiens
  misc_RNA (1)...(19): siRNA sense strand
gaacugaaauggggaacag

SEQ ID NO: 260427 - RNA, 19 nt, Homo sapiens
  misc_RNA (1)...(19): siRNA sense strand
ggaccuggaggcugacauc

SEQ ID NO: 260428 - RNA, 19 nt, Homo sapiens
  misc_RNA (1)...(19): siRNA sense strand
gacaaacuuuacaaaucca

SEQ ID NO: 260429 - RNA, 19 nt, Homo sapiens
  misc_RNA (1)...(19): siRNA sense strand
acaagccucucuucuuugc

SEQ ID NO: 260430 - RNA, 19 nt, Homo sapiens
  misc_RNA (1)...(19): siRNA sense strand
uucaaagugucaagaacaa

SEQ ID NO: 260431 - RNA, 19 nt, Homo sapiens
  misc_RNA (1)...(19): siRNA sense strand
aaggaggacuaucacaagu

SEQ ID NO: 260432 - RNA, 19 nt, Homo sapiens
  misc_RNA (1)...(19): siRNA sense strand
gaucuuccggaccaaguau

SEQ ID NO: 260433 - RNA, 19 nt, Homo sapiens
  misc_RNA (1)...(19): siRNA sense strand
ggagcugucuggggacuuu

SEQ ID NO: 260434 - RNA, 19 nt, Homo sapiens
  misc_RNA (1)...(19): siRNA sense strand
gguguucgaugaguaucug

SEQ ID NO: 260435 - RNA, 19 nt, Homo sapiens
  misc_RNA (1)...(19): siRNA sense strand
gccgacaaacuuuacaaau

SEQ ID NO: 260436 - RNA, 19 nt, Homo sapiens
  misc_RNA (1)...(19): siRNA sense strand
gcauuuguggccauuguuc

SEQ ID NO: 260437 - RNA, 19 nt, Homo sapiens
  misc_RNA (1)...(19): siRNA sense strand
ggaccaggcacgggaagau

SEQ ID NO: 260438 - RNA, 19 nt, Homo sapiens
  misc_RNA (1)...(19): siRNA sense strand
gcgcagguggccuaucaga

SEQ ID NO: 260439 - RNA, 19 nt, Homo sapiens
  misc_RNA (1)...(19): siRNA sense strand
gugaugccaaagaaauuaa

SEQ ID NO: 260440 - RNA, 19 nt, Homo sapiens
  misc_RNA (1)...(19): siRNA sense strand
ggacuuugagaagcuaaug

SEQ ID NO: 260441 - RNA, 19 nt, Homo sapiens
  misc_RNA (1)...(19): siRNA sense strand
gagcaccccggaauauuuu

SEQ ID NO: 260442 - RNA, 19 nt, Homo sapiens
  misc_RNA (1)...(19): siRNA sense strand
caagaugaccaacuaugac

SEQ ID NO: 260443 - RNA, 19 nt, Homo sapiens
  misc_RNA (1)...(19): siRNA sense strand
agacacguuucaugacgau

SEQ ID NO: 260444 - RNA, 19 nt, Homo sapiens
  misc_RNA (1)...(19): siRNA sense strand
acaaucaucgauaucauca

SEQ ID NO: 260445 - RNA, 19 nt, Homo sapiens
  misc_RNA (1)...(19): siRNA sense strand
gcgcccagccaaugacuuc

SEQ ID NO: 260446 - RNA, 19 nt, Homo sapiens
  misc_RNA (1)...(19): siRNA sense strand
gaacaagccucucuucuuu

SEQ ID NO: 260447 - RNA, 19 nt, Homo sapiens
  misc_RNA (1)...(19): siRNA sense strand
gggaauucauugagaaaua

SEQ ID NO: 260448 - RNA, 19 nt, Homo sapiens
  misc_RNA (1)...(19): siRNA sense strand
ggaccucauugcugauuua

SEQ ID NO: 260449 - RNA, 19 nt, Homo sapiens
  misc_RNA (1)...(19): siRNA sense strand
uaucagaugugggaacuua

SEQ ID NO: 260450 - RNA, 19 nt, Homo sapiens
  misc_RNA (1)...(19): siRNA sense strand
gaagacacaaucaucgaua

SEQ ID NO: 260451 - RNA, 19 nt, Homo sapiens
  misc_RNA (1)...(19): siRNA sense strand
ggagggaauucauugagaa

SEQ ID NO: 260452 - RNA, 19 nt, Homo sapiens
  misc_RNA (1)...(19): siRNA sense strand
ggaggaggaugacguagug

SEQ ID NO: 260453 - RNA, 19 nt, Homo sapiens
  misc_RNA (1)...(19): siRNA sense strand
ugacaagucucuccaccaa

SEQ ID NO: 260454 - RNA, 19 nt, Homo sapiens
  misc_RNA (1)...(19): siRNA sense strand
gcgaggaccugguacaaca

SEQ ID NO: 260455 - RNA, 19 nt, Homo sapiens
  misc_RNA (1)...(19): siRNA sense strand
gaacagaugaagcccaguu

SEQ ID NO: 260456 - RNA, 19 nt, Homo sapiens
  misc_RNA (1)...(19): siRNA sense strand
agacacaucuggccacuuc

SEQ ID NO: 260457 - RNA, 19 nt, Homo sapiens
  misc_RNA (1)...(19): siRNA sense strand
gcagguggccuaucagaug

SEQ ID NO: 260458 - RNA, 19 nt, Homo sapiens
  misc_RNA (1)...(19): siRNA sense strand
ccucauugcugauuuaaag

SEQ ID NO: 260459 - RNA, 19 nt, Homo sapiens
  misc_RNA (1)...(19): siRNA sense strand
ugagaaauaugacaagucu

SEQ ID NO: 260460 - RNA, 19 nt, Homo sapiens
  misc_RNA (1)...(19): siRNA sense strand
ugaaaaggcucuuauugaa

SEQ ID NO: 260461 - RNA, 19 nt, Homo sapiens
  misc_RNA (1)...(19): siRNA sense strand
cgacaccucuggccacuuc

SEQ ID NO: 260462 - RNA, 19 nt, Homo sapiens
  misc_RNA (1)...(19): siRNA sense strand
ccgacaaacuuuacaaauc

SEQ ID NO: 260463 - RNA, 19 nt, Homo sapiens
  misc_RNA (1)...(19): siRNA sense strand
ucaaugaggccuauaagga

SEQ ID NO: 260464 - RNA, 19 nt, Homo sapiens
  misc_RNA (1)...(19): siRNA sense strand
gaaccagggaggaggauga

SEQ ID NO: 260465 - RNA, 19 nt, Homo sapiens
  misc_RNA (1)...(19): siRNA sense strand
cgacaaacuuuacaaaucc

SEQ ID NO: 260466 - RNA, 19 nt, Homo sapiens
  misc_RNA (1)...(19): siRNA sense strand
ccaguucauuuacaucuug

SEQ ID NO: 260467 - RNA, 19 nt, Homo sapiens
  misc_RNA (1)...(19): siRNA sense strand
ucauuuacaucuugggaaa

SEQ ID NO: 260468 - RNA, 19 nt, Homo sapiens
  misc_RNA (1)...(19): siRNA sense strand
cagcgcagguggccuauca

SEQ ID NO: 260469 - RNA, 19 nt, Homo sapiens
  misc_RNA (1)...(19): siRNA sense strand
caagaagacucugcugaag

SEQ ID NO: 260470 - RNA, 19 nt, Homo sapiens
  misc_RNA (1)...(19): siRNA sense strand
ugaauugacgggcaaguuu

SEQ ID NO: 260471 - RNA, 19 nt, Homo sapiens
  misc_RNA (1)...(19): siRNA sense strand
gcacagaugagaagacucu

SEQ ID NO: 260472 - RNA, 19 nt, Homo sapiens
  misc_RNA (1)...(19): siRNA sense strand
gaaauagcagacacaccua

SEQ ID NO: 260473 - RNA, 19 nt, Homo sapiens
  misc_RNA (1)...(19): siRNA sense strand
ugaagggacucgggacuga

SEQ ID NO: 260474 - RNA, 19 nt, Homo sapiens
  misc_RNA (1)...(19): siRNA sense strand
ggagagucuuccaggaguu

SEQ ID NO: 260475 - RNA, 19 nt, Homo sapiens
  misc_RNA (1)...(19): siRNA sense strand
ucaagaugaccaacuauga

SEQ ID NO: 260476 - RNA, 19 nt, Homo sapiens
  misc_RNA (1)...(19): siRNA sense strand
gaagcccaguucauuuaca

SEQ ID NO: 260477 - RNA, 19 nt, Homo sapiens
  misc_RNA (1)...(19): siRNA sense strand
gaaaaggcucuuauugaaa

SEQ ID NO: 260478 - RNA, 19 nt, Homo sapiens
  misc_RNA (1)...(19): siRNA sense strand
gaauugacgggcaaguuug

SEQ ID NO: 260479 - RNA, 19 nt, Homo sapiens
  misc_RNA (1)...(19): siRNA sense strand
agaagacucugaccaggau

SEQ ID NO: 260480 - RNA, 19 nt, Homo sapiens
  misc_RNA (1)...(19): siRNA sense strand
ccaaagcgcugcggaaagc

SEQ ID NO: 260481 - RNA, 19 nt, Homo sapiens
  misc_RNA (1)...(19): siRNA sense strand
ccaccugccuauugugaug

SEQ ID NO: 260482 - RNA, 19 nt, Homo sapiens
  misc_RNA (1)...(19): siRNA sense strand
acagcaugaucaagaauga

SEQ ID NO: 260483 - RNA, 19 nt, Homo sapiens
  misc_RNA (1)...(19): siRNA sense strand
ugacaccucuggcgaguac

SEQ ID NO: 260484 - RNA, 19 nt, Homo sapiens
  misc_RNA (1)...(19): siRNA sense strand
ugucagggaugcauuugug

SEQ ID NO: 260485 - RNA, 19 nt, Homo sapiens
  misc_RNA (1)...(19): siRNA sense strand
acaagaagacucugcugaa

SEQ ID NO: 260486 - RNA, 19 nt, Homo sapiens
  misc_RNA (1)...(19): siRNA sense strand
ccacagggaagccgaugaa

SEQ ID NO: 260487 - RNA, 19 nt, Homo sapiens
  misc_RNA (1)...(19): siRNA sense strand
cggagggaauucauugaga

SEQ ID NO: 260488 - RNA, 19 nt, Homo sapiens
  misc_RNA (1)...(19): siRNA sense strand
ggaugucagggaugcauuu

SEQ ID NO: 260489 - RNA, 19 nt, Homo sapiens
  misc_RNA (1)...(19): siRNA sense strand
cuuaaugacugaccugaag

SEQ ID NO: 260490 - RNA, 19 nt, Homo sapiens
  misc_RNA (1)...(19): siRNA sense strand
ggacugacgaagacacaau

SEQ ID NO: 260491 - RNA, 19 nt, Homo sapiens
  misc_RNA (1)...(19): siRNA sense strand
gagggaauucauugagaaa

SEQ ID NO: 260492 - RNA, 19 nt, Homo sapiens
  misc_RNA (1)...(19): siRNA sense strand
cuauugugaugccaaagaa

SEQ ID NO: 260493 - RNA, 19 nt, Homo sapiens
  misc_RNA (1)...(19): siRNA sense strand
ccuauaaggaggacuauca

SEQ ID NO: 260494 - RNA, 19 nt, Homo sapiens
  misc_RNA (1)...(19): siRNA sense strand
agaagucccucuacagcau

SEQ ID NO: 260495 - RNA, 19 nt, Homo sapiens
  misc_RNA (1)...(19): siRNA sense strand
uaugagaagucccucuaca

SEQ ID NO: 260496 - RNA, 19 nt, Homo sapiens
  misc_RNA (1)...(19): siRNA sense strand
ccuggaggcugacaucauc

SEQ ID NO: 260497 - RNA, 19 nt, Homo sapiens
  misc_RNA (1)...(19): siRNA sense strand
guagugaguuggacaugcu

SEQ ID NO: 260498 - RNA, 19 nt, Homo sapiens
  misc_RNA (1)...(19): siRNA sense strand
ggaccaaguaugagaaguc

SEQ ID NO: 260499 - RNA, 19 nt, Homo sapiens
  misc_RNA (1)...(19): siRNA sense strand
gcauuggcacugaugagaa

SEQ ID NO: 260500 - RNA, 19 nt, Homo sapiens
  misc_RNA (1)...(19): siRNA sense strand
gaccugaagucugagaucu

SEQ ID NO: 260501 - RNA, 19 nt, Homo sapiens
  misc_RNA (1)...(19): siRNA sense strand
aagacacaaucaucgauau

SEQ ID NO: 260502 - RNA, 19 nt, Homo sapiens
  misc_RNA (1)...(19): siRNA sense strand
ugacgaagacacaaucauc

SEQ ID NO: 260503 - RNA, 19 nt, Homo sapiens
  misc_RNA (1)...(19): siRNA sense strand
agaagacucugcugaagcu

SEQ ID NO: 260504 - RNA, 19 nt, Homo sapiens
  misc_RNA (1)...(19): siRNA sense strand
gguugguguucgaugagua

SEQ ID NO: 260505 - RNA, 19 nt, Homo sapiens
  misc_RNA (1)...(19): siRNA sense strand
ucuacagcaugaucaagaa

SEQ ID NO: 260506 - RNA, 19 nt, Homo sapiens
  misc_RNA (1)...(19): siRNA sense strand
ggucucccguagugaguug

SEQ ID NO: 260507 - RNA, 19 nt, Homo sapiens
  misc_RNA (1)...(19): siRNA sense strand
gguggcagcauacaaagau

SEQ ID NO: 260508 - RNA, 19 nt, Homo sapiens
  misc_RNA (1)...(19): siRNA sense strand
ugacaccuccggagacuuc

SEQ ID NO: 260509 - RNA, 19 nt, Homo sapiens
  misc_RNA (1)...(19): siRNA sense strand
ccaucaaugaggccuauaa

SEQ ID NO: 260510 - RNA, 19 nt, Homo sapiens
  misc_RNA (1)...(19): siRNA sense strand
gaugaaaaggcucuuauug

SEQ ID NO: 260511 - RNA, 19 nt, Homo sapiens
  misc_RNA (1)...(19): siRNA sense strand
cuucaacccugacgcagau

SEQ ID NO: 260512 - RNA, 19 nt, Homo sapiens
  misc_RNA (1)...(19): siRNA sense strand
cagguggccuaucagaugu

SEQ ID NO: 260513 - RNA, 19 nt, Homo sapiens
  misc_RNA (1)...(19): siRNA sense strand
gccaaagaaauuaaagaug

SEQ ID NO: 260514 - RNA, 19 nt, Homo sapiens
  misc_RNA (1)...(19): siRNA sense strand
uaaggaggacuaucacaag

SEQ ID NO: 260515 - RNA, 19 nt, Homo sapiens
  misc_RNA (1)...(19): siRNA sense strand
gagcgaggaccugguacaa

SEQ ID NO: 260516 - RNA, 19 nt, Homo sapiens
  misc_RNA (1)...(19): siRNA sense strand
gccgggacuuaaugacuga

SEQ ID NO: 260517 - RNA, 19 nt, Homo sapiens
  misc_RNA (1)...(19): siRNA sense strand
gacacaaucaucgauauca

SEQ ID NO: 260518 - RNA, 19 nt, Homo sapiens
  misc_RNA (1)...(19): siRNA sense strand
ugaagggcuuuggcaguga

SEQ ID NO: 260519 - RNA, 19 nt, Homo sapiens
  misc_RNA (1)...(19): siRNA sense strand
ggagcaccccggaauauuu

SEQ ID NO: 260520 - RNA, 19 nt, Homo sapiens
  misc_RNA (1)...(19): siRNA sense strand
acacaaucaucgauaucau

SEQ ID NO: 260521 - RNA, 19 nt, Homo sapiens
  misc_RNA (1)...(19): siRNA sense strand
agaaauaugacaagucucu

SEQ ID NO: 260522 - RNA, 19 nt, Homo sapiens
  misc_RNA (1)...(19): siRNA sense strand
ggaugcauuuguggccauu

SEQ ID NO: 260523 - RNA, 19 nt, Homo sapiens
  misc_RNA (1)...(19): siRNA sense strand
uccaggaguucaucaagau

SEQ ID NO: 260524 - RNA, 19 nt, Homo sapiens
  misc_RNA (1)...(19): siRNA sense strand
ucaugacgauccuguguac

SEQ ID NO: 260525 - RNA, 19 nt, Homo sapiens
  misc_RNA (1)...(19): siRNA sense strand
cauuggcacugaugagaag

SEQ ID NO: 260526 - RNA, 19 nt, Homo sapiens
  misc_RNA (1)...(19): siRNA sense strand
ugugaugccaaagaaauua

SEQ ID NO: 260527 - RNA, 19 nt, Homo sapiens
  misc_RNA (1)...(19): siRNA sense strand
gaacugaaauggggaacag

SEQ ID NO: 260528 - RNA, 19 nt, Homo sapiens
  misc_RNA (1)...(19): siRNA sense strand
ggaccuggaggcugacauc

SEQ ID NO: 260529 - RNA, 19 nt, Homo sapiens
  misc_RNA (1)...(19): siRNA sense strand
gacaaacuuuacaaaucca

SEQ ID NO: 260530 - RNA, 19 nt, Homo sapiens
  misc_RNA (1)...(19): siRNA sense strand
acaagccucucuucuuugc

SEQ ID NO: 260531 - RNA, 19 nt, Homo sapiens
  misc_RNA (1)...(19): siRNA sense strand
uucaaagugucaagaacaa

SEQ ID NO: 260532 - RNA, 19 nt, Homo sapiens
  misc_RNA (1)...(19): siRNA sense strand
aaggaggacuaucacaagu

SEQ ID NO: 260533 - RNA, 19 nt, Homo sapiens
  misc_RNA (1)...(19): siRNA sense strand
gaucuuccggaccaaguau

SEQ ID NO: 260534 - RNA, 19 nt, Homo sapiens
  misc_RNA (1)...(19): siRNA sense strand
ggagcugucuggggacuuu

SEQ ID NO: 260535 - RNA, 19 nt, Homo sapiens
  misc_RNA (1)...(19): siRNA sense strand
gguguucgaugaguaucug

SEQ ID NO: 260536 - RNA, 19 nt, Homo sapiens
  misc_RNA (1)...(19): siRNA sense strand
gccgacaaacuuuacaaau

SEQ ID NO: 260537 - RNA, 19 nt, Homo sapiens
  misc_RNA (1)...(19): siRNA sense strand
gcauuuguggccauuguuc

SEQ ID NO: 260538 - RNA, 19 nt, Homo sapiens
  misc_RNA (1)...(19): siRNA sense strand
ggaccaggcacgggaagau

SEQ ID NO: 260539 - RNA, 19 nt, Homo sapiens
  misc_RNA (1)...(19): siRNA sense strand
gcgcagguggccuaucaga

SEQ ID NO: 260540 - RNA, 19 nt, Homo sapiens
  misc_RNA (1)...(19): siRNA sense strand
gugaugccaaagaaauuaa

SEQ ID NO: 260541 - RNA, 19 nt, Homo sapiens
  misc_RNA (1)...(19): siRNA sense strand
ggacuuugagaagcuaaug

SEQ ID NO: 260542 - RNA, 19 nt, Homo sapiens
  misc_RNA (1)...(19): siRNA sense strand
gcgcccagccaaugacuuc

SEQ ID NO: 260543 - RNA, 19 nt, Homo sapiens
  misc_RNA (1)...(19): siRNA sense strand
caagaugaccaacuaugac

SEQ ID NO: 260544 - RNA, 19 nt, Homo sapiens
  misc_RNA (1)...(19): siRNA sense strand
agacacguuucaugacgau

SEQ ID NO: 260545 - RNA, 19 nt, Homo sapiens
  misc_RNA (1)...(19): siRNA sense strand
acaaucaucgauaucauca

SEQ ID NO: 260546 - RNA, 19 nt, Homo sapiens
  misc_RNA (1)...(19): siRNA sense strand
ucaaagaucucaaaucaga

SEQ ID NO: 260547 - RNA, 19 nt, Homo sapiens
  misc_RNA (1)...(19): siRNA sense strand
gaaccgcccugccuucuuu

SEQ ID NO: 260548 - RNA, 19 nt, Homo sapiens
  misc_RNA (1)...(19): siRNA sense strand
gaacguguauugauugaga

SEQ ID NO: 260549 - RNA, 19 nt, Homo sapiens
  misc_RNA (1)...(19): siRNA sense strand
gaagugagauugaccuugu

SEQ ID NO: 260550 - RNA, 19 nt, Homo sapiens
  misc_RNA (1)...(19): siRNA sense strand
gaugagaaccagaguauaa

SEQ ID NO: 260551 - RNA, 19 nt, Homo sapiens
  misc_RNA (1)...(19): siRNA sense strand
gagaaauugucagauguua

SEQ ID NO: 260552 - RNA, 19 nt, Homo sapiens
  misc_RNA (1)...(19): siRNA sense strand
gagcuaccauggaggcuua

SEQ ID NO: 260553 - RNA, 19 nt, Homo sapiens
  misc_RNA (1)...(19): siRNA sense strand
gaaucuugcuuuaacauga

SEQ ID NO: 260554 - RNA, 19 nt, Homo sapiens
  misc_RNA (1)...(19): siRNA sense strand
guaaggcaaugaaggguuu

SEQ ID NO: 260555 - RNA, 19 nt, Homo sapiens
  misc_RNA (1)...(19): siRNA sense strand
gaggacagaugccuucuca

SEQ ID NO: 260556 - RNA, 19 nt, Homo sapiens
  misc_RNA (1)...(19): siRNA sense strand
gcucuacuaugcuaugaaa

SEQ ID NO: 260557 - RNA, 19 nt, Homo sapiens
  misc_RNA (1)...(19): siRNA sense strand
ccaaauggcucaggaagau

SEQ ID NO: 260558 - RNA, 19 nt, Homo sapiens
  misc_RNA (1)...(19): siRNA sense strand
gauguucgcucagauguau

SEQ ID NO: 260559 - RNA, 19 nt, Homo sapiens
  misc_RNA (1)...(19): siRNA sense strand
gcucagauguaucagaaga

SEQ ID NO: 260560 - RNA, 19 nt, Homo sapiens
  misc_RNA (1)...(19): siRNA sense strand
gaucucaaaucagaguuaa

SEQ ID NO: 260561 - RNA, 19 nt, Homo sapiens
  misc_RNA (1)...(19): siRNA sense strand
gaguggagauuaccgaaga

SEQ ID NO: 260562 - RNA, 19 nt, Homo sapiens
  misc_RNA (1)...(19): siRNA sense strand
gaaauugucagauguuauc

SEQ ID NO: 260563 - RNA, 19 nt, Homo sapiens
  misc_RNA (1)...(19): siRNA sense strand
ucaggaacguguauugauu

SEQ ID NO: 260564 - RNA, 19 nt, Homo sapiens
  misc_RNA (1)...(19): siRNA sense strand
gauguuaucagucagaauu

SEQ ID NO: 260565 - RNA, 19 nt, Homo sapiens
  misc_RNA (1)...(19): siRNA sense strand
acagaugccuucucaguau

SEQ ID NO: 260566 - RNA, 19 nt, Homo sapiens
  misc_RNA (1)...(19): siRNA sense strand
ggacagaugccuucucagu

SEQ ID NO: 260567 - RNA, 19 nt, Homo sapiens
  misc_RNA (1)...(19): siRNA sense strand
ucagauacaucaggacauu

SEQ ID NO: 260568 - RNA, 19 nt, Homo sapiens
  misc_RNA (1)...(19): siRNA sense strand
ugucagauguuaucaguca

SEQ ID NO: 260569 - RNA, 19 nt, Homo sapiens
  misc_RNA (1)...(19): siRNA sense strand
gaguauaaaccaccaaaug

SEQ ID NO: 260570 - RNA, 19 nt, Homo sapiens
  misc_RNA (1)...(19): siRNA sense strand
agaguuaaguggaaauaug

SEQ ID NO: 260571 - RNA, 19 nt, Homo sapiens
  misc_RNA (1)...(19): siRNA sense strand
ggaaauauggaagaacuga

SEQ ID NO: 260572 - RNA, 19 nt, Homo sapiens
  misc_RNA (1)...(19): siRNA sense strand
gacagaugccuucucagua

SEQ ID NO: 260573 - RNA, 19 nt, Homo sapiens
  misc_RNA (1)...(19): siRNA sense strand
gacauuaggucagauacau

SEQ ID NO: 260574 - RNA, 19 nt, Homo sapiens
  misc_RNA (1)...(19): siRNA sense strand
caggaaauccgagaaauug

SEQ ID NO: 260575 - RNA, 19 nt, Homo sapiens
  misc_RNA (1)...(19): siRNA sense strand
guagaaagugguuugaaga

SEQ ID NO: 260576 - RNA, 19 nt, Homo sapiens
  misc_RNA (1)...(19): siRNA sense strand
ccuaguggcuuuccuccaa

SEQ ID NO: 260577 - RNA, 19 nt, Homo sapiens
  misc_RNA (1)...(19): siRNA sense strand
ggacagaugagcaggcaau

SEQ ID NO: 260578 - RNA, 19 nt, Homo sapiens
  misc_RNA (1)...(19): siRNA sense strand
cgaugaaucuugcuuuaac

SEQ ID NO: 260579 - RNA, 19 nt, Homo sapiens
  misc_RNA (1)...(19): siRNA sense strand
gaugaaucuugcuuuaaca

SEQ ID NO: 260580 - RNA, 19 nt, Homo sapiens
  misc_RNA (1)...(19): siRNA sense strand
gauccuggcccucuucaug

SEQ ID NO: 260581 - RNA, 19 nt, Homo sapiens
  misc_RNA (1)...(19): siRNA sense strand
gcuaaucgagacuuguuaa

SEQ ID NO: 260582 - RNA, 19 nt, Homo sapiens
  misc_RNA (1)...(19): siRNA sense strand
gaaauccgagaaauuguca

SEQ ID NO: 260583 - RNA, 19 nt, Homo sapiens
  misc_RNA (1)...(19): siRNA sense strand
ucaugccuccuacguauua

SEQ ID NO: 260584 - RNA, 19 nt, Homo sapiens
  misc_RNA (1)...(19): siRNA sense strand
ggaggugccuacccacaag

SEQ ID NO: 260585 - RNA, 19 nt, Homo sapiens
  misc_RNA (1)...(19): siRNA sense strand
cagaugagcaggcaauugu

SEQ ID NO: 260586 - RNA, 19 nt, Homo sapiens
  misc_RNA (1)...(19): siRNA sense strand
ucgcucagauguaucagaa

SEQ ID NO: 260587 - RNA, 19 nt, Homo sapiens
  misc_RNA (1)...(19): siRNA sense strand
ccaacaggcuacccaccuu

SEQ ID NO: 260588 - RNA, 19 nt, Homo sapiens
  misc_RNA (1)...(19): siRNA sense strand
cuucaugccuccuacguau

SEQ ID NO: 260589 - RNA, 19 nt, Homo sapiens
  misc_RNA (1)...(19): siRNA sense strand
ccacaagugccaaguagug

SEQ ID NO: 260590 - RNA, 19 nt, Homo sapiens
  misc_RNA (1)...(19): siRNA sense strand
aaucgagacuuguuaagca

SEQ ID NO: 260591 - RNA, 19 nt, Homo sapiens
  misc_RNA (1)...(19): siRNA sense strand
caagaacaaaucaggaaau

SEQ ID NO: 260592 - RNA, 19 nt, Homo sapiens
  misc_RNA (1)...(19): siRNA sense strand
ucaggaaauccgagaaauu

SEQ ID NO: 260593 - RNA, 19 nt, Homo sapiens
  misc_RNA (1)...(19): siRNA sense strand
ggaaauccgagaaauuguc

SEQ ID NO: 260594 - RNA, 19 nt, Homo sapiens
  misc_RNA (1)...(19): siRNA sense strand
ccgaccagcugccaacuuc

SEQ ID NO: 260595 - RNA, 19 nt, Homo sapiens
  misc_RNA (1)...(19): siRNA sense strand
caacaggcuacccaccuuu

SEQ ID NO: 260596 - RNA, 19 nt, Homo sapiens
  misc_RNA (1)...(19): siRNA sense strand
gugaugagaaccagaguau

SEQ ID NO: 260597 - RNA, 19 nt, Homo sapiens
  misc_RNA (1)...(19): siRNA sense strand
ccgagaaauugucagaugu

SEQ ID NO: 260598 - RNA, 19 nt, Homo sapiens
  misc_RNA (1)...(19): siRNA sense strand
gccuggagcuuacggaaag

SEQ ID NO: 260599 - RNA, 19 nt, Homo sapiens
  misc_RNA (1)...(19): siRNA sense strand
guggaaauauggaagaacu

SEQ ID NO: 260600 - RNA, 19 nt, Homo sapiens
  misc_RNA (1)...(19): siRNA sense strand
caaccuacuuacccuaguc

SEQ ID NO: 260601 - RNA, 19 nt, Homo sapiens
  misc_RNA (1)...(19): siRNA sense strand
gauggcuaaucgagacuug

SEQ ID NO: 260602 - RNA, 19 nt, Homo sapiens
  misc_RNA (1)...(19): siRNA sense strand
accgaugaaucuugcuuua

SEQ ID NO: 260603 - RNA, 19 nt, Homo sapiens
  misc_RNA (1)...(19): siRNA sense strand
ccagggaaaucgugaugag

SEQ ID NO: 260604 - RNA, 19 nt, Homo sapiens
  misc_RNA (1)...(19): siRNA sense strand
gaacucaggaacguguauu

SEQ ID NO: 260605 - RNA, 19 nt, Homo sapiens
  misc_RNA (1)...(19): siRNA sense strand
ggccaaccguuccaaugau

SEQ ID NO: 260606 - RNA, 19 nt, Homo sapiens
  misc_RNA (1)...(19): siRNA sense strand
uguagaaagugguuugaag

SEQ ID NO: 260607 - RNA, 19 nt, Homo sapiens
  misc_RNA (1)...(19): siRNA sense strand
aaucagaguuaaguggaaa

SEQ ID NO: 260608 - RNA, 19 nt, Homo sapiens
  misc_RNA (1)...(19): siRNA sense strand
agaagacucugggcacaau

SEQ ID NO: 260609 - RNA, 19 nt, Homo sapiens
  misc_RNA (1)...(19): siRNA sense strand
ugacacgaguggagauuac

SEQ ID NO: 260610 - RNA, 19 nt, Homo sapiens
  misc_RNA (1)...(19): siRNA sense strand
aagaacaaaucaggaaauc

SEQ ID NO: 260611 - RNA, 19 nt, Homo sapiens
  misc_RNA (1)...(19): siRNA sense strand
ccauggaggcuuauucuag

SEQ ID NO: 260612 - RNA, 19 nt, Homo sapiens
  misc_RNA (1)...(19): siRNA sense strand
cgagaaauugucagauguu

SEQ ID NO: 260613 - RNA, 19 nt, Homo sapiens
  misc_RNA (1)...(19): siRNA sense strand
gcuauaagagaugcagaaa

SEQ ID NO: 260614 - RNA, 19 nt, Homo sapiens
  misc_RNA (1)...(19): siRNA sense strand
ggacauuaggucagauaca

SEQ ID NO: 260615 - RNA, 19 nt, Homo sapiens
  misc_RNA (1)...(19): siRNA sense strand
uccgagaaauugucagaug

SEQ ID NO: 260616 - RNA, 19 nt, Homo sapiens
  misc_RNA (1)...(19): siRNA sense strand
cacaagaacaaaucaggaa

SEQ ID NO: 260617 - RNA, 19 nt, Homo sapiens
  misc_RNA (1)...(19): siRNA sense strand
ucaggucacucaaggaacu

SEQ ID NO: 260618 - RNA, 19 nt, Homo sapiens
  misc_RNA (1)...(19): siRNA sense strand
aaaucagaguuaaguggaa

SEQ ID NO: 260619 - RNA, 19 nt, Homo sapiens
  misc_RNA (1)...(19): siRNA sense strand
gggaaaucgugaugagaac

SEQ ID NO: 260620 - RNA, 19 nt, Homo sapiens
  misc_RNA (1)...(19): siRNA sense strand
caggucaggagucaucuuu

SEQ ID NO: 260621 - RNA, 19 nt, Homo sapiens
  misc_RNA (1)...(19): siRNA sense strand
gccaaccguuccaaugauc

SEQ ID NO: 260622 - RNA, 19 nt, Homo sapiens
  misc_RNA (1)...(19): siRNA sense strand
cuucuggucaguauccuua

SEQ ID NO: 260623 - RNA, 19 nt, Homo sapiens
  misc_RNA (1)...(19): siRNA sense strand
uuacgaugccuggagcuua

SEQ ID NO: 260624 - RNA, 19 nt, Homo sapiens
  misc_RNA (1)...(19): siRNA sense strand
uaaguggaaauauggaaga

SEQ ID NO: 260625 - RNA, 19 nt, Homo sapiens
  misc_RNA (1)...(19): siRNA sense strand
gcauuuaagaccuccuaug

SEQ ID NO: 260626 - RNA, 19 nt, Homo sapiens
  misc_RNA (1)...(19): siRNA sense strand
gcaggcaauuguggaugug

SEQ ID NO: 260627 - RNA, 19 nt, Homo sapiens
  misc_RNA (1)...(19): siRNA sense strand
ggauauguagaaagugguu

SEQ ID NO: 260628 - RNA, 19 nt, Homo sapiens
  misc_RNA (1)...(19): siRNA sense strand
gaccgaugaaucuugcuuu

SEQ ID NO: 260629 - RNA, 19 nt, Homo sapiens
  misc_RNA (1)...(19): siRNA sense strand
gagacuagggaccgaugaa

SEQ ID NO: 260630 - RNA, 19 nt, Homo sapiens
  misc_RNA (1)...(19): siRNA sense strand
ggucaggagucaucuuuuc

SEQ ID NO: 260631 - RNA, 19 nt, Homo sapiens
  misc_RNA (1)...(19): siRNA sense strand
gaaauauggaagaacugau

SEQ ID NO: 260632 - RNA, 19 nt, Homo sapiens
  misc_RNA (1)...(19): siRNA sense strand
gaguuaaguggaaauaugg

SEQ ID NO: 260633 - RNA, 19 nt, Homo sapiens
  misc_RNA (1)...(19): siRNA sense strand
gcucagcgucucuaucaag

SEQ ID NO: 260634 - RNA, 19 nt, Homo sapiens
  misc_RNA (1)...(19): siRNA sense strand
gaaaucgugaugagaacca

SEQ ID NO: 260635 - RNA, 19 nt, Homo sapiens
  misc_RNA (1)...(19): siRNA sense strand
ucaguauccuuauccuagu

SEQ ID NO: 260636 - RNA, 19 nt, Homo sapiens
  misc_RNA (1)...(19): siRNA sense strand
ccacagccaccuucacagu

SEQ ID NO: 260637 - RNA, 19 nt, Homo sapiens
  misc_RNA (1)...(19): siRNA sense strand
caggaacguguauugauug

SEQ ID NO: 260638 - RNA, 19 nt, Homo sapiens
  misc_RNA (1)...(19): siRNA sense strand
cauuuaagaccuccuaugg

SEQ ID NO: 260639 - RNA, 19 nt, Homo sapiens
  misc_RNA (1)...(19): siRNA sense strand
ggucaguauccuuauccua

SEQ ID NO: 260640 - RNA, 19 nt, Homo sapiens
  misc_RNA (1)...(19): siRNA sense strand
ucagaguuaaguggaaaua

SEQ ID NO: 260641 - RNA, 19 nt, Homo sapiens
  misc_RNA (1)...(19): siRNA sense strand
cagauguuaucagucagaa

SEQ ID NO: 260642 - RNA, 19 nt, Homo sapiens
  misc_RNA (1)...(19): siRNA sense strand
ggaacucaggaacguguau

SEQ ID NO: 260643 - RNA, 19 nt, Homo sapiens
  misc_RNA (1)...(19): siRNA sense strand
uuugaacguuuacuugugu

SEQ ID NO: 260644 - RNA, 19 nt, Homo sapiens
  misc_RNA (1)...(19): siRNA sense strand
ggaccgaugaaucuugcuu

SEQ ID NO: 260645 - RNA, 19 nt, Homo sapiens
  misc_RNA (1)...(19): siRNA sense strand
gaagaugcucagcgucucu

SEQ ID NO: 260646 - RNA, 19 nt, Homo sapiens
  misc_RNA (1)...(19): siRNA sense strand
ucaaagaucucaaaucaga

SEQ ID NO: 260647 - RNA, 19 nt, Homo sapiens
  misc_RNA (1)...(19): siRNA sense strand
gaaccgcccugccuucuuu

SEQ ID NO: 260648 - RNA, 19 nt, Homo sapiens
  misc_RNA (1)...(19): siRNA sense strand
gaacguguauugauugaga

SEQ ID NO: 260649 - RNA, 19 nt, Homo sapiens
  misc_RNA (1)...(19): siRNA sense strand
gaagugagauugaccuugu

SEQ ID NO: 260650 - RNA, 19 nt, Homo sapiens
  misc_RNA (1)...(19): siRNA sense strand
gaugagaaccagaguauaa

SEQ ID NO: 260651 - RNA, 19 nt, Homo sapiens
  misc_RNA (1)...(19): siRNA sense strand
gagaaauugucagauguua

SEQ ID NO: 260652 - RNA, 19 nt, Homo sapiens
  misc_RNA (1)...(19): siRNA sense strand
gagcuaccauggaggcuua

SEQ ID NO: 260653 - RNA, 19 nt, Homo sapiens
  misc_RNA (1)...(19): siRNA sense strand
gaaucuugcuuuaacauga

SEQ ID NO: 260654 - RNA, 19 nt, Homo sapiens
  misc_RNA (1)...(19): siRNA sense strand
guaaggcaaugaaggguuu

SEQ ID NO: 260655 - RNA, 19 nt, Homo sapiens
  misc_RNA (1)...(19): siRNA sense strand
gaggacagaugccuucuca

SEQ ID NO: 260656 - RNA, 19 nt, Homo sapiens
  misc_RNA (1)...(19): siRNA sense strand
gcucuacuaugcuaugaaa

SEQ ID NO: 260657 - RNA, 19 nt, Homo sapiens
  misc_RNA (1)...(19): siRNA sense strand
ccaaauggcucaggaagau

SEQ ID NO: 260658 - RNA, 19 nt, Homo sapiens
  misc_RNA (1)...(19): siRNA sense strand
gauguucgcucagauguau

SEQ ID NO: 260659 - RNA, 19 nt, Homo sapiens
  misc_RNA (1)...(19): siRNA sense strand
gcucagauguaucagaaga

SEQ ID NO: 260660 - RNA, 19 nt, Homo sapiens
  misc_RNA (1)...(19): siRNA sense strand
gaucucaaaucagaguuaa

SEQ ID NO: 260661 - RNA, 19 nt, Homo sapiens
  misc_RNA (1)...(19): siRNA sense strand
gaguggagauuaccgaaga

SEQ ID NO: 260662 - RNA, 19 nt, Homo sapiens
  misc_RNA (1)...(19): siRNA sense strand
gaaauugucagauguuauc

SEQ ID NO: 260663 - RNA, 19 nt, Homo sapiens
  misc_RNA (1)...(19): siRNA sense strand
ucaggaacguguauugauu

SEQ ID NO: 260664 - RNA, 19 nt, Homo sapiens
  misc_RNA (1)...(19): siRNA sense strand
gauguuaucagucagaauu

SEQ ID NO: 260665 - RNA, 19 nt, Homo sapiens
  misc_RNA (1)...(19): siRNA sense strand
acagaugccuucucaguau

SEQ ID NO: 260666 - RNA, 19 nt, Homo sapiens
  misc_RNA (1)...(19): siRNA sense strand
ggacagaugccuucucagu

SEQ ID NO: 260667 - RNA, 19 nt, Homo sapiens
  misc_RNA (1)...(19): siRNA sense strand
ucagauacaucaggacauu

SEQ ID NO: 260668 - RNA, 19 nt, Homo sapiens
  misc_RNA (1)...(19): siRNA sense strand
ugucagauguuaucaguca

SEQ ID NO: 260669 - RNA, 19 nt, Homo sapiens
  misc_RNA (1)...(19): siRNA sense strand
gaguauaaaccaccaaaug

SEQ ID NO: 260670 - RNA, 19 nt, Homo sapiens
  misc_RNA (1)...(19): siRNA sense strand
agaguuaaguggaaauaug

SEQ ID NO: 260671 - RNA, 19 nt, Homo sapiens
  misc_RNA (1)...(19): siRNA sense strand
ggaaauauggaagaacuga

SEQ ID NO: 260672 - RNA, 19 nt, Homo sapiens
  misc_RNA (1)...(19): siRNA sense strand
gacagaugccuucucagua

SEQ ID NO: 260673 - RNA, 19 nt, Homo sapiens
  misc_RNA (1)...(19): siRNA sense strand
gacauuaggucagauacau

SEQ ID NO: 260674 - RNA, 19 nt, Homo sapiens
  misc_RNA (1)...(19): siRNA sense strand
caggaaauccgagaaauug

SEQ ID NO: 260675 - RNA, 19 nt, Homo sapiens
  misc_RNA (1)...(19): siRNA sense strand
guagaaagugguuugaaga

SEQ ID NO: 260676 - RNA, 19 nt, Homo sapiens
  misc_RNA (1)...(19): siRNA sense strand
ccuaguggcuuuccuccaa

SEQ ID NO: 260677 - RNA, 19 nt, Homo sapiens
  misc_RNA (1)...(19): siRNA sense strand
ggacagaugagcaggcaau

SEQ ID NO: 260678 - RNA, 19 nt, Homo sapiens
  misc_RNA (1)...(19): siRNA sense strand
cgaugaaucuugcuuuaac

SEQ ID NO: 260679 - RNA, 19 nt, Homo sapiens
  misc_RNA (1)...(19): siRNA sense strand
gaugaaucuugcuuuaaca

SEQ ID NO: 260680 - RNA, 19 nt, Homo sapiens
  misc_RNA (1)...(19): siRNA sense strand
gauccuggcccucuucaug

SEQ ID NO: 260681 - RNA, 19 nt, Homo sapiens
  misc_RNA (1)...(19): siRNA sense strand
gcuaaucgagacuuguuaa

SEQ ID NO: 260682 - RNA, 19 nt, Homo sapiens
  misc_RNA (1)...(19): siRNA sense strand
gaaauccgagaaauuguca

SEQ ID NO: 260683 - RNA, 19 nt, Homo sapiens
  misc_RNA (1)...(19): siRNA sense strand
ucaugccuccuacguauua

SEQ ID NO: 260684 - RNA, 19 nt, Homo sapiens
  misc_RNA (1)...(19): siRNA sense strand
ggaggugccuacccacaag

SEQ ID NO: 260685 - RNA, 19 nt, Homo sapiens
  misc_RNA (1)...(19): siRNA sense strand
cagaugagcaggcaauugu

SEQ ID NO: 260686 - RNA, 19 nt, Homo sapiens
  misc_RNA (1)...(19): siRNA sense strand
ucgcucagauguaucagaa

SEQ ID NO: 260687 - RNA, 19 nt, Homo sapiens
  misc_RNA (1)...(19): siRNA sense strand
ccaacaggcuacccaccuu

SEQ ID NO: 260688 - RNA, 19 nt, Homo sapiens
  misc_RNA (1)...(19): siRNA sense strand
cuucaugccuccuacguau

SEQ ID NO: 260689 - RNA, 19 nt, Homo sapiens
  misc_RNA (1)...(19): siRNA sense strand
ccacaagugccaaguagug

SEQ ID NO: 260690 - RNA, 19 nt, Homo sapiens
  misc_RNA (1)...(19): siRNA sense strand
aaucgagacuuguuaagca

SEQ ID NO: 260691 - RNA, 19 nt, Homo sapiens
  misc_RNA (1)...(19): siRNA sense strand
caagaacaaaucaggaaau

SEQ ID NO: 260692 - RNA, 19 nt, Homo sapiens
  misc_RNA (1)...(19): siRNA sense strand
ucaggaaauccgagaaauu

SEQ ID NO: 260693 - RNA, 19 nt, Homo sapiens
  misc_RNA (1)...(19): siRNA sense strand
ggaaauccgagaaauuguc

SEQ ID NO: 260694 - RNA, 19 nt, Homo sapiens
  misc_RNA (1)...(19): siRNA sense strand
ccgaccagcugccaacuuc

SEQ ID NO: 260695 - RNA, 19 nt, Homo sapiens
  misc_RNA (1)...(19): siRNA sense strand
caacaggcuacccaccuuu

SEQ ID NO: 260696 - RNA, 19 nt, Homo sapiens
  misc_RNA (1)...(19): siRNA sense strand
gugaugagaaccagaguau

SEQ ID NO: 260697 - RNA, 19 nt, Homo sapiens
  misc_RNA (1)...(19): siRNA sense strand
ccgagaaauugucagaugu

SEQ ID NO: 260698 - RNA, 19 nt, Homo sapiens
  misc_RNA (1)...(19): siRNA sense strand
gccuggagcuuacggaaag

SEQ ID NO: 260699 - RNA, 19 nt, Homo sapiens
  misc_RNA (1)...(19): siRNA sense strand
guggaaauauggaagaacu

SEQ ID NO: 260700 - RNA, 19 nt, Homo sapiens
  misc_RNA (1)...(19): siRNA sense strand
caaccuacuuacccuaguc

SEQ ID NO: 260701 - RNA, 19 nt, Homo sapiens
  misc_RNA (1)...(19): siRNA sense strand
gauggcuaaucgagacuug

SEQ ID NO: 260702 - RNA, 19 nt, Homo sapiens
  misc_RNA (1)...(19): siRNA sense strand
accgaugaaucuugcuuua

SEQ ID NO: 260703 - RNA, 19 nt, Homo sapiens
  misc_RNA (1)...(19): siRNA sense strand
ccagggaaaucgugaugag

SEQ ID NO: 260704 - RNA, 19 nt, Homo sapiens
  misc_RNA (1)...(19): siRNA sense strand
gaacucaggaacguguauu

SEQ ID NO: 260705 - RNA, 19 nt, Homo sapiens
  misc_RNA (1)...(19): siRNA sense strand
ggccaaccguuccaaugau

SEQ ID NO: 260706 - RNA, 19 nt, Homo sapiens
  misc_RNA (1)...(19): siRNA sense strand
uguagaaagugguuugaag

SEQ ID NO: 260707 - RNA, 19 nt, Homo sapiens
  misc_RNA (1)...(19): siRNA sense strand
aaucagaguuaaguggaaa

SEQ ID NO: 260708 - RNA, 19 nt, Homo sapiens
  misc_RNA (1)...(19): siRNA sense strand
agaagacucugggcacaau

SEQ ID NO: 260709 - RNA, 19 nt, Homo sapiens
  misc_RNA (1)...(19): siRNA sense strand
ugacacgaguggagauuac

SEQ ID NO: 260710 - RNA, 19 nt, Homo sapiens
  misc_RNA (1)...(19): siRNA sense strand
aagaacaaaucaggaaauc

SEQ ID NO: 260711 - RNA, 19 nt, Homo sapiens
  misc_RNA (1)...(19): siRNA sense strand
ccauggaggcuuauucuag

SEQ ID NO: 260712 - RNA, 19 nt, Homo sapiens
  misc_RNA (1)...(19): siRNA sense strand
cgagaaauugucagauguu

SEQ ID NO: 260713 - RNA, 19 nt, Homo sapiens
  misc_RNA (1)...(19): siRNA sense strand
gcuauaagagaugcagaaa

SEQ ID NO: 260714 - RNA, 19 nt, Homo sapiens
  misc_RNA (1)...(19): siRNA sense strand
ggacauuaggucagauaca

SEQ ID NO: 260715 - RNA, 19 nt, Homo sapiens
  misc_RNA (1)...(19): siRNA sense strand
uccgagaaauugucagaug

SEQ ID NO: 260716 - RNA, 19 nt, Homo sapiens
  misc_RNA (1)...(19): siRNA sense strand
cacaagaacaaaucaggaa

SEQ ID NO: 260717 - RNA, 19 nt, Homo sapiens
  misc_RNA (1)...(19): siRNA sense strand
ucaggucacucaaggaacu

SEQ ID NO: 260718 - RNA, 19 nt, Homo sapiens
  misc_RNA (1)...(19): siRNA sense strand
aaaucagaguuaaguggaa

SEQ ID NO: 260719 - RNA, 19 nt, Homo sapiens
  misc_RNA (1)...(19): siRNA sense strand
gggaaaucgugaugagaac

SEQ ID NO: 260720 - RNA, 19 nt, Homo sapiens
  misc_RNA (1)...(19): siRNA sense strand
caggucaggagucaucuuu

SEQ ID NO: 260721 - RNA, 19 nt, Homo sapiens
  misc_RNA (1)...(19): siRNA sense strand
gccaaccguuccaaugauc

SEQ ID NO: 260722 - RNA, 19 nt, Homo sapiens
  misc_RNA (1)...(19): siRNA sense strand
cuucuggucaguauccuua

SEQ ID NO: 260723 - RNA, 19 nt, Homo sapiens
  misc_RNA (1)...(19): siRNA sense strand
uuacgaugccuggagcuua

SEQ ID NO: 260724 - RNA, 19 nt, Homo sapiens
  misc_RNA (1)...(19): siRNA sense strand
uaaguggaaauauggaaga

SEQ ID NO: 260725 - RNA, 19 nt, Homo sapiens
  misc_RNA (1)...(19): siRNA sense strand
gcauuuaagaccuccuaug

SEQ ID NO: 260726 - RNA, 19 nt, Homo sapiens
  misc_RNA (1)...(19): siRNA sense strand
gcaggcaauuguggaugug

SEQ ID NO: 260727 - RNA, 19 nt, Homo sapiens
  misc_RNA (1)...(19): siRNA sense strand
ggauauguagaaagugguu

SEQ ID NO: 260728 - RNA, 19 nt, Homo sapiens
  misc_RNA (1)...(19): siRNA sense strand
gaccgaugaaucuugcuuu

SEQ ID NO: 260729 - RNA, 19 nt, Homo sapiens
  misc_RNA (1)...(19): siRNA sense strand
gagacuagggaccgaugaa

SEQ ID NO: 260730 - RNA, 19 nt, Homo sapiens
  misc_RNA (1)...(19): siRNA sense strand
ggucaggagucaucuuuuc

SEQ ID NO: 260731 - RNA, 19 nt, Homo sapiens
  misc_RNA (1)...(19): siRNA sense strand
gaaauauggaagaacugau

SEQ ID NO: 260732 - RNA, 19 nt, Homo sapiens
  misc_RNA (1)...(19): siRNA sense strand
gaguuaaguggaaauaugg

SEQ ID NO: 260733 - RNA, 19 nt, Homo sapiens
  misc_RNA (1)...(19): siRNA sense strand
gcucagcgucucuaucaag

SEQ ID NO: 260734 - RNA, 19 nt, Homo sapiens
  misc_RNA (1)...(19): siRNA sense strand
gaaaucgugaugagaacca

SEQ ID NO: 260735 - RNA, 19 nt, Homo sapiens
  misc_RNA (1)...(19): siRNA sense strand
ucaguauccuuauccuagu

SEQ ID NO: 260736 - RNA, 19 nt, Homo sapiens
  misc_RNA (1)...(19): siRNA sense strand
ccacagccaccuucacagu

SEQ ID NO: 260737 - RNA, 19 nt, Homo sapiens
  misc_RNA (1)...(19): siRNA sense strand
caggaacguguauugauug

SEQ ID NO: 260738 - RNA, 19 nt, Homo sapiens
  misc_RNA (1)...(19): siRNA sense strand
cauuuaagaccuccuaugg

SEQ ID NO: 260739 - RNA, 19 nt, Homo sapiens
  misc_RNA (1)...(19): siRNA sense strand
ggucaguauccuuauccua

SEQ ID NO: 260740 - RNA, 19 nt, Homo sapiens
  misc_RNA (1)...(19): siRNA sense strand
ucagaguuaaguggaaaua

SEQ ID NO: 260741 - RNA, 19 nt, Homo sapiens
  misc_RNA (1)...(19): siRNA sense strand
cagauguuaucagucagaa

SEQ ID NO: 260742 - RNA, 19 nt, Homo sapiens
  misc_RNA (1)...(19): siRNA sense strand
ggaacucaggaacguguau

SEQ ID NO: 260743 - RNA, 19 nt, Homo sapiens
  misc_RNA (1)...(19): siRNA sense strand
uuugaacguuuacuugugu

SEQ ID NO: 260744 - RNA, 19 nt, Homo sapiens
  misc_RNA (1)...(19): siRNA sense strand
ggaccgaugaaucuugcuu

SEQ ID NO: 260745 - RNA, 19 nt, Homo sapiens
  misc_RNA (1)...(19): siRNA sense strand
gaagaugcucagcgucucu

SEQ ID NO: 260746 - RNA, 19 nt, Homo sapiens
  misc_RNA (1)...(19): siRNA sense strand
ccacgaggauggaauaauu

SEQ ID NO: 260747 - RNA, 19 nt, Homo sapiens
  misc_RNA (1)...(19): siRNA sense strand
ccaggaaucaucuuuacua

SEQ ID NO: 260748 - RNA, 19 nt, Homo sapiens
  misc_RNA (1)...(19): siRNA sense strand
caucaucuaugccuucguu

SEQ ID NO: 260749 - RNA, 19 nt, Homo sapiens
  misc_RNA (1)...(19): siRNA sense strand
caggaaucaucuuuacuaa

SEQ ID NO: 260750 - RNA, 19 nt, Homo sapiens
  misc_RNA (1)...(19): siRNA sense strand
ggcggaaucuucuucauca

SEQ ID NO: 260751 - RNA, 19 nt, Homo sapiens
  misc_RNA (1)...(19): siRNA sense strand
caagugugaucaccugguu

SEQ ID NO: 260752 - RNA, 19 nt, Homo sapiens
  misc_RNA (1)...(19): siRNA sense strand
ucaccaucaugauuguuua

SEQ ID NO: 260753 - RNA, 19 nt, Homo sapiens
  misc_RNA (1)...(19): siRNA sense strand
cgagagcggugaagaaguc

SEQ ID NO: 260754 - RNA, 19 nt, Homo sapiens
  misc_RNA (1)...(19): siRNA sense strand
ggccaucucugaucugcuu

SEQ ID NO: 260755 - RNA, 19 nt, Homo sapiens
  misc_RNA (1)...(19): siRNA sense strand
gcaucaaucccaucaucua

SEQ ID NO: 260756 - RNA, 19 nt, Homo sapiens
  misc_RNA (1)...(19): siRNA sense strand
caacgagagcggugaagaa

SEQ ID NO: 260757 - RNA, 19 nt, Homo sapiens
  misc_RNA (1)...(19): siRNA sense strand
ggugcucccugucauaaau

SEQ ID NO: 260758 - RNA, 19 nt, Homo sapiens
  misc_RNA (1)...(19): siRNA sense strand
agagucaucuucaccauca

SEQ ID NO: 260759 - RNA, 19 nt, Homo sapiens
  misc_RNA (1)...(19): siRNA sense strand
gcaaugugcaaauuauuca

SEQ ID NO: 260760 - RNA, 19 nt, Homo sapiens
  misc_RNA (1)...(19): siRNA sense strand
gcagugagagucaucuuca

SEQ ID NO: 260761 - RNA, 19 nt, Homo sapiens
  misc_RNA (1)...(19): siRNA sense strand
gugcuugacugacauuuac

SEQ ID NO: 260762 - RNA, 19 nt, Homo sapiens
  misc_RNA (1)...(19): siRNA sense strand
uguaucacaucgguuauuu

SEQ ID NO: 260763 - RNA, 19 nt, Homo sapiens
  misc_RNA (1)...(19): siRNA sense strand
cuaaaugccagaaagaaga

SEQ ID NO: 260764 - RNA, 19 nt, Homo sapiens
  misc_RNA (1)...(19): siRNA sense strand
gaagaagucaccaccuuuu

SEQ ID NO: 260765 - RNA, 19 nt, Homo sapiens
  misc_RNA (1)...(19): siRNA sense strand
ugaagaagucaccaccuuu

SEQ ID NO: 260766 - RNA, 19 nt, Homo sapiens
  misc_RNA (1)...(19): siRNA sense strand
caucuucaccaucaugauu

SEQ ID NO: 260767 - RNA, 19 nt, Homo sapiens
  misc_RNA (1)...(19): siRNA sense strand
uauuguccaugcuguguuu

SEQ ID NO: 260768 - RNA, 19 nt, Homo sapiens
  misc_RNA (1)...(19): siRNA sense strand
ucauaaauuugacgugaag

SEQ ID NO: 260769 - RNA, 19 nt, Homo sapiens
  misc_RNA (1)...(19): siRNA sense strand
ccaggacggucaccuuugg

SEQ ID NO: 260770 - RNA, 19 nt, Homo sapiens
  misc_RNA (1)...(19): siRNA sense strand
gagugggucuuugggaaug

SEQ ID NO: 260771 - RNA, 19 nt, Homo sapiens
  misc_RNA (1)...(19): siRNA sense strand
ggcuguaucacaucgguua

SEQ ID NO: 260772 - RNA, 19 nt, Homo sapiens
  misc_RNA (1)...(19): siRNA sense strand
cugaagugcuugacugaca

SEQ ID NO: 260773 - RNA, 19 nt, Homo sapiens
  misc_RNA (1)...(19): siRNA sense strand
acaucucguucucgguuua

SEQ ID NO: 260774 - RNA, 19 nt, Homo sapiens
  misc_RNA (1)...(19): siRNA sense strand
gaagugcuugacugacauu

SEQ ID NO: 260775 - RNA, 19 nt, Homo sapiens
  misc_RNA (1)...(19): siRNA sense strand
gaauucuucggccugagua

SEQ ID NO: 260776 - RNA, 19 nt, Homo sapiens
  misc_RNA (1)...(19): siRNA sense strand
ucuuauuacucucccauug

SEQ ID NO: 260777 - RNA, 19 nt, Homo sapiens
  misc_RNA (1)...(19): siRNA sense strand
caucaaucccaucaucuau

SEQ ID NO: 260778 - RNA, 19 nt, Homo sapiens
  misc_RNA (1)...(19): siRNA sense strand
ccaucaugauuguuuacuu

SEQ ID NO: 260779 - RNA, 19 nt, Homo sapiens
  misc_RNA (1)...(19): siRNA sense strand
caugcuguguuugcuuuaa

SEQ ID NO: 260780 - RNA, 19 nt, Homo sapiens
  misc_RNA (1)...(19): siRNA sense strand
ucaaucccaucaucuaugc

SEQ ID NO: 260781 - RNA, 19 nt, Homo sapiens
  misc_RNA (1)...(19): siRNA sense strand
uccaugcuguguuugcuuu

SEQ ID NO: 260782 - RNA, 19 nt, Homo sapiens
  misc_RNA (1)...(19): siRNA sense strand
uuauuacucucccauugug

SEQ ID NO: 260783 - RNA, 19 nt, Homo sapiens
  misc_RNA (1)...(19): siRNA sense strand
ggaauucuucggccugagu

SEQ ID NO: 260784 - RNA, 19 nt, Homo sapiens
  misc_RNA (1)...(19): siRNA sense strand
ucacucugcugcaaaugag

SEQ ID NO: 260785 - RNA, 19 nt, Homo sapiens
  misc_RNA (1)...(19): siRNA sense strand
cugaguaacugugaaagca

SEQ ID NO: 260786 - RNA, 19 nt, Homo sapiens
  misc_RNA (1)...(19): siRNA sense strand
uuacuaaaugccagaaaga

SEQ ID NO: 260787 - RNA, 19 nt, Homo sapiens
  misc_RNA (1)...(19): siRNA sense strand
cugcaucaaucccaucauc

SEQ ID NO: 260788 - RNA, 19 nt, Homo sapiens
  misc_RNA (1)...(19): siRNA sense strand
gaagauucuguuuaugucu

SEQ ID NO: 260789 - RNA, 19 nt, Homo sapiens
  misc_RNA (1)...(19): siRNA sense strand
ugaagugcuugacugacau

SEQ ID NO: 260790 - RNA, 19 nt, Homo sapiens
  misc_RNA (1)...(19): siRNA sense strand
uccugacaaucgauagaua

SEQ ID NO: 260791 - RNA, 19 nt, Homo sapiens
  misc_RNA (1)...(19): siRNA sense strand
caaccuggccaucucugau

SEQ ID NO: 260792 - RNA, 19 nt, Homo sapiens
  misc_RNA (1)...(19): siRNA sense strand
ucaucauggucaucugcua

SEQ ID NO: 260793 - RNA, 19 nt, Homo sapiens
  misc_RNA (1)...(19): siRNA sense strand
cacgaggauggaauaauuu

SEQ ID NO: 260794 - RNA, 19 nt, Homo sapiens
  misc_RNA (1)...(19): siRNA sense strand
uaaaugccagaaagaagau

SEQ ID NO: 260795 - RNA, 19 nt, Homo sapiens
  misc_RNA (1)...(19): siRNA sense strand
uaaauuugacgugaagcaa

SEQ ID NO: 260796 - RNA, 19 nt, Homo sapiens
  misc_RNA (1)...(19): siRNA sense strand
acucacugcugcaucaauc

SEQ ID NO: 260797 - RNA, 19 nt, Homo sapiens
  misc_RNA (1)...(19): siRNA sense strand
acauuuaccugcucaaccu

SEQ ID NO: 260798 - RNA, 19 nt, Homo sapiens
  misc_RNA (1)...(19): siRNA sense strand
ugagagucaucuucaccau

SEQ ID NO: 260799 - RNA, 19 nt, Homo sapiens
  misc_RNA (1)...(19): siRNA sense strand
acacaauaaugaggaacau

SEQ ID NO: 260800 - RNA, 19 nt, Homo sapiens
  misc_RNA (1)...(19): siRNA sense strand
gucccaggaaucaucuuua

SEQ ID NO: 260801 - RNA, 19 nt, Homo sapiens
  misc_RNA (1)...(19): siRNA sense strand
caugauuguuuacuuucuc

SEQ ID NO: 260802 - RNA, 19 nt, Homo sapiens
  misc_RNA (1)...(19): siRNA sense strand
ggccugaguaacugugaaa

SEQ ID NO: 260803 - RNA, 19 nt, Homo sapiens
  misc_RNA (1)...(19): siRNA sense strand
ucccaggaaucaucuuuac

SEQ ID NO: 260804 - RNA, 19 nt, Homo sapiens
  misc_RNA (1)...(19): siRNA sense strand
gauuguuuacuuucucuuc

SEQ ID NO: 260805 - RNA, 19 nt, Homo sapiens
  misc_RNA (1)...(19): siRNA sense strand
cacaucucguucucgguuu

SEQ ID NO: 260806 - RNA, 19 nt, Homo sapiens
  misc_RNA (1)...(19): siRNA sense strand
gggcucacucugcugcaaa

SEQ ID NO: 260807 - RNA, 19 nt, Homo sapiens
  misc_RNA (1)...(19): siRNA sense strand
ccacgaggauggaauaauu

SEQ ID NO: 260808 - RNA, 19 nt, Homo sapiens
  misc_RNA (1)...(19): siRNA sense strand
ccaggaaucaucuuuacua

SEQ ID NO: 260809 - RNA, 19 nt, Homo sapiens
  misc_RNA (1)...(19): siRNA sense strand
caucaucuaugccuucguu

SEQ ID NO: 260810 - RNA, 19 nt, Homo sapiens
  misc_RNA (1)...(19): siRNA sense strand
caggaaucaucuuuacuaa

SEQ ID NO: 260811 - RNA, 19 nt, Homo sapiens
  misc_RNA (1)...(19): siRNA sense strand
ggcggaaucuucuucauca

SEQ ID NO: 260812 - RNA, 19 nt, Homo sapiens
  misc_RNA (1)...(19): siRNA sense strand
caagugugaucaccugguu

SEQ ID NO: 260813 - RNA, 19 nt, Homo sapiens
  misc_RNA (1)...(19): siRNA sense strand
ucaccaucaugauuguuua

SEQ ID NO: 260814 - RNA, 19 nt, Homo sapiens
  misc_RNA (1)...(19): siRNA sense strand
cgagagcggugaagaaguc

SEQ ID NO: 260815 - RNA, 19 nt, Homo sapiens
  misc_RNA (1)...(19): siRNA sense strand
ggccaucucugaucugcuu

SEQ ID NO: 260816 - RNA, 19 nt, Homo sapiens
  misc_RNA (1)...(19): siRNA sense strand
gcaucaaucccaucaucua

SEQ ID NO: 260817 - RNA, 19 nt, Homo sapiens
  misc_RNA (1)...(19): siRNA sense strand
caacgagagcggugaagaa

SEQ ID NO: 260818 - RNA, 19 nt, Homo sapiens
  misc_RNA (1)...(19): siRNA sense strand
ggugcucccugucauaaau

SEQ ID NO: 260819 - RNA, 19 nt, Homo sapiens
  misc_RNA (1)...(19): siRNA sense strand
agagucaucuucaccauca

SEQ ID NO: 260820 - RNA, 19 nt, Homo sapiens
  misc_RNA (1)...(19): siRNA sense strand
gcaaugugcaaauuauuca

SEQ ID NO: 260821 - RNA, 19 nt, Homo sapiens
  misc_RNA (1)...(19): siRNA sense strand
gcagugagagucaucuuca

SEQ ID NO: 260822 - RNA, 19 nt, Homo sapiens
  misc_RNA (1)...(19): siRNA sense strand
gugcuugacugacauuuac

SEQ ID NO: 260823 - RNA, 19 nt, Homo sapiens
  misc_RNA (1)...(19): siRNA sense strand
uguaucacaucgguuauuu

SEQ ID NO: 260824 - RNA, 19 nt, Homo sapiens
  misc_RNA (1)...(19): siRNA sense strand
cuaaaugccagaaagaaga

SEQ ID NO: 260825 - RNA, 19 nt, Homo sapiens
  misc_RNA (1)...(19): siRNA sense strand
gaagaagucaccaccuuuu

SEQ ID NO: 260826 - RNA, 19 nt, Homo sapiens
  misc_RNA (1)...(19): siRNA sense strand
ugaagaagucaccaccuuu

SEQ ID NO: 260827 - RNA, 19 nt, Homo sapiens
  misc_RNA (1)...(19): siRNA sense strand
caucuucaccaucaugauu

SEQ ID NO: 260828 - RNA, 19 nt, Homo sapiens
  misc_RNA (1)...(19): siRNA sense strand
uauuguccaugcuguguuu

SEQ ID NO: 260829 - RNA, 19 nt, Homo sapiens
  misc_RNA (1)...(19): siRNA sense strand
ucauaaauuugacgugaag

SEQ ID NO: 260830 - RNA, 19 nt, Homo sapiens
  misc_RNA (1)...(19): siRNA sense strand
ccaggacggucaccuuugg

SEQ ID NO: 260831 - RNA, 19 nt, Homo sapiens
  misc_RNA (1)...(19): siRNA sense strand
gagugggucuuugggaaug

SEQ ID NO: 260832 - RNA, 19 nt, Homo sapiens
  misc_RNA (1)...(19): siRNA sense strand
ggcuguaucacaucgguua

SEQ ID NO: 260833 - RNA, 19 nt, Homo sapiens
  misc_RNA (1)...(19): siRNA sense strand
cugaagugcuugacugaca

SEQ ID NO: 260834 - RNA, 19 nt, Homo sapiens
  misc_RNA (1)...(19): siRNA sense strand
acaucucguucucgguuua

SEQ ID NO: 260835 - RNA, 19 nt, Homo sapiens
  misc_RNA (1)...(19): siRNA sense strand
gaagugcuugacugacauu

SEQ ID NO: 260836 - RNA, 19 nt, Homo sapiens
  misc_RNA (1)...(19): siRNA sense strand
gaauucuucggccugagua

SEQ ID NO: 260837 - RNA, 19 nt, Homo sapiens
  misc_RNA (1)...(19): siRNA sense strand
ucuuauuacucucccauug

SEQ ID NO: 260838 - RNA, 19 nt, Homo sapiens
  misc_RNA (1)...(19): siRNA sense strand
caucaaucccaucaucuau

SEQ ID NO: 260839 - RNA, 19 nt, Homo sapiens
  misc_RNA (1)...(19): siRNA sense strand
ccaucaugauuguuuacuu

SEQ ID NO: 260840 - RNA, 19 nt, Homo sapiens
  misc_RNA (1)...(19): siRNA sense strand
caugcuguguuugcuuuaa

SEQ ID NO: 260841 - RNA, 19 nt, Homo sapiens
  misc_RNA (1)...(19): siRNA sense strand
ucaaucccaucaucuaugc

SEQ ID NO: 260842 - RNA, 19 nt, Homo sapiens
  misc_RNA (1)...(19): siRNA sense strand
uccaugcuguguuugcuuu

SEQ ID NO: 260843 - RNA, 19 nt, Homo sapiens
  misc_RNA (1)...(19): siRNA sense strand
uuauuacucucccauugug

SEQ ID NO: 260844 - RNA, 19 nt, Homo sapiens
  misc_RNA (1)...(19): siRNA sense strand
ggaauucuucggccugagu

SEQ ID NO: 260845 - RNA, 19 nt, Homo sapiens
  misc_RNA (1)...(19): siRNA sense strand
ucacucugcugcaaaugag

SEQ ID NO: 260846 - RNA, 19 nt, Homo sapiens
  misc_RNA (1)...(19): siRNA sense strand
cugaguaacugugaaagca

SEQ ID NO: 260847 - RNA, 19 nt, Homo sapiens
  misc_RNA (1)...(19): siRNA sense strand
uuacuaaaugccagaaaga

SEQ ID NO: 260848 - RNA, 19 nt, Homo sapiens
  misc_RNA (1)...(19): siRNA sense strand
cugcaucaaucccaucauc

SEQ ID NO: 260849 - RNA, 19 nt, Homo sapiens
  misc_RNA (1)...(19): siRNA sense strand
gaagauucuguuuaugucu

SEQ ID NO: 260850 - RNA, 19 nt, Homo sapiens
  misc_RNA (1)...(19): siRNA sense strand
ugaagugcuugacugacau

SEQ ID NO: 260851 - RNA, 19 nt, Homo sapiens
  misc_RNA (1)...(19): siRNA sense strand
uccugacaaucgauagaua

SEQ ID NO: 260852 - RNA, 19 nt, Homo sapiens
  misc_RNA (1)...(19): siRNA sense strand
caaccuggccaucucugau

SEQ ID NO: 260853 - RNA, 19 nt, Homo sapiens
  misc_RNA (1)...(19): siRNA sense strand
ucaucauggucaucugcua

SEQ ID NO: 260854 - RNA, 19 nt, Homo sapiens
  misc_RNA (1)...(19): siRNA sense strand
cacgaggauggaauaauuu

SEQ ID NO: 260855 - RNA, 19 nt, Homo sapiens
  misc_RNA (1)...(19): siRNA sense strand
uaaaugccagaaagaagau

SEQ ID NO: 260856 - RNA, 19 nt, Homo sapiens
  misc_RNA (1)...(19): siRNA sense strand
uaaauuugacgugaagcaa

SEQ ID NO: 260857 - RNA, 19 nt, Homo sapiens
  misc_RNA (1)...(19): siRNA sense strand
acucacugcugcaucaauc

SEQ ID NO: 260858 - RNA, 19 nt, Homo sapiens
  misc_RNA (1)...(19): siRNA sense strand
acauuuaccugcucaaccu

SEQ ID NO: 260859 - RNA, 19 nt, Homo sapiens
  misc_RNA (1)...(19): siRNA sense strand
ugagagucaucuucaccau

SEQ ID NO: 260860 - RNA, 19 nt, Homo sapiens
  misc_RNA (1)...(19): siRNA sense strand
acacaauaaugaggaacau

SEQ ID NO: 260861 - RNA, 19 nt, Homo sapiens
  misc_RNA (1)...(19): siRNA sense strand
gucccaggaaucaucuuua

SEQ ID NO: 260862 - RNA, 19 nt, Homo sapiens
  misc_RNA (1)...(19): siRNA sense strand
caugauuguuuacuuucuc

SEQ ID NO: 260863 - RNA, 19 nt, Homo sapiens
  misc_RNA (1)...(19): siRNA sense strand
ggccugaguaacugugaaa

SEQ ID NO: 260864 - RNA, 19 nt, Homo sapiens
  misc_RNA (1)...(19): siRNA sense strand
ucccaggaaucaucuuuac

SEQ ID NO: 260865 - RNA, 19 nt, Homo sapiens
  misc_RNA (1)...(19): siRNA sense strand
gauuguuuacuuucucuuc

SEQ ID NO: 260866 - RNA, 19 nt, Homo sapiens
  misc_RNA (1)...(19): siRNA sense strand
cacaucucguucucgguuu

SEQ ID NO: 260867 - RNA, 19 nt, Homo sapiens
  misc_RNA (1)...(19): siRNA sense strand
gggcucacucugcugcaaa

SEQ ID NO: 260868 - RNA, 19 nt, Homo sapiens
  misc_RNA (1)...(19): siRNA sense strand
ccaaggagcuggcagaaau

SEQ ID NO: 260869 - RNA, 19 nt, Homo sapiens
  misc_RNA (1)...(19): siRNA sense strand
uacaacaccuuccaugaua

SEQ ID NO: 260870 - RNA, 19 nt, Homo sapiens
  misc_RNA (1)...(19): siRNA sense strand
gagaagcugugccucaugu

SEQ ID NO: 260871 - RNA, 19 nt, Homo sapiens
  misc_RNA (1)...(19): siRNA sense strand
gggccaagcucaucaaguc

SEQ ID NO: 260872 - RNA, 19 nt, Homo sapiens
  misc_RNA (1)...(19): siRNA sense strand
ggaagaguuugaaguugug

SEQ ID NO: 260873 - RNA, 19 nt, Homo sapiens
  misc_RNA (1)...(19): siRNA sense strand
ggguauggcuuccgaguca

SEQ ID NO: 260874 - RNA, 19 nt, Homo sapiens
  misc_RNA (1)...(19): siRNA sense strand
gagcggagacccucauguu

SEQ ID NO: 260875 - RNA, 19 nt, Homo sapiens
  misc_RNA (1)...(19): siRNA sense strand
gcuccuacauggauacaga

SEQ ID NO: 260876 - RNA, 19 nt, Homo sapiens
  misc_RNA (1)...(19): siRNA sense strand
uuugguggcucauugcuua

SEQ ID NO: 260877 - RNA, 19 nt, Homo sapiens
  misc_RNA (1)...(19): siRNA sense strand
ucuaugagguggacuacaa

SEQ ID NO: 260878 - RNA, 19 nt, Homo sapiens
  misc_RNA (1)...(19): siRNA sense strand
gaccaagaguggauuccuu

SEQ ID NO: 260879 - RNA, 19 nt, Homo sapiens
  misc_RNA (1)...(19): siRNA sense strand
ccaagaagauuccaaaaca

SEQ ID NO: 260880 - RNA, 19 nt, Homo sapiens
  misc_RNA (1)...(19): siRNA sense strand
guaccugagugaccucuuc

SEQ ID NO: 260881 - RNA, 19 nt, Homo sapiens
  misc_RNA (1)...(19): siRNA sense strand
cgaaacaaccauuggguau

SEQ ID NO: 260882 - RNA, 19 nt, Homo sapiens
  misc_RNA (1)...(19): siRNA sense strand
caucgucaaugccuucaug

SEQ ID NO: 260883 - RNA, 19 nt, Homo sapiens
  misc_RNA (1)...(19): siRNA sense strand
ucaggaagaguuugaaguu

SEQ ID NO: 260884 - RNA, 19 nt, Homo sapiens
  misc_RNA (1)...(19): siRNA sense strand
guggauuccuuguguugaa

SEQ ID NO: 260885 - RNA, 19 nt, Homo sapiens
  misc_RNA (1)...(19): siRNA sense strand
gaaguuguggucauucuag

SEQ ID NO: 260886 - RNA, 19 nt, Homo sapiens
  misc_RNA (1)...(19): siRNA sense strand
gaaacaaccauuggguaug

SEQ ID NO: 260887 - RNA, 19 nt, Homo sapiens
  misc_RNA (1)...(19): siRNA sense strand
aagaguggauuccuugugu

SEQ ID NO: 260888 - RNA, 19 nt, Homo sapiens
  misc_RNA (1)...(19): siRNA sense strand
caggaagaguuugaaguug

SEQ ID NO: 260889 - RNA, 19 nt, Homo sapiens
  misc_RNA (1)...(19): siRNA sense strand
gaaccaggacauggagauu

SEQ ID NO: 260890 - RNA, 19 nt, Homo sapiens
  misc_RNA (1)...(19): siRNA sense strand
gaagcugugccucauguuc

SEQ ID NO: 260891 - RNA, 19 nt, Homo sapiens
  misc_RNA (1)...(19): siRNA sense strand
aggaagaguuugaaguugu

SEQ ID NO: 260892 - RNA, 19 nt, Homo sapiens
  misc_RNA (1)...(19): siRNA sense strand
ggauuauacuccucuuggu

SEQ ID NO: 260893 - RNA, 19 nt, Homo sapiens
  misc_RNA (1)...(19): siRNA sense strand
gaccucaaguggcgcuuca

SEQ ID NO: 260894 - RNA, 19 nt, Homo sapiens
  misc_RNA (1)...(19): siRNA sense strand
cuacaacaccuuccaugau

SEQ ID NO: 260895 - RNA, 19 nt, Homo sapiens
  misc_RNA (1)...(19): siRNA sense strand
ucacaccaguccucaccuu

SEQ ID NO: 260896 - RNA, 19 nt, Homo sapiens
  misc_RNA (1)...(19): siRNA sense strand
gugcauguuugucaagauc

SEQ ID NO: 260897 - RNA, 19 nt, Homo sapiens
  misc_RNA (1)...(19): siRNA sense strand
ucaccaugguuuacacugu

SEQ ID NO: 260898 - RNA, 19 nt, Homo sapiens
  misc_RNA (1)...(19): siRNA sense strand
caccuuccaugauaccuau

SEQ ID NO: 260899 - RNA, 19 nt, Homo sapiens
  misc_RNA (1)...(19): siRNA sense strand
gguggcucauugcuuauau

SEQ ID NO: 260900 - RNA, 19 nt, Homo sapiens
  misc_RNA (1)...(19): siRNA sense strand
gaaccagacagacaucaac

SEQ ID NO: 260901 - RNA, 19 nt, Homo sapiens
  misc_RNA (1)...(19): siRNA sense strand
cguguccgcuuuccuguuc

SEQ ID NO: 260902 - RNA, 19 nt, Homo sapiens
  misc_RNA (1)...(19): siRNA sense strand
ugagcagaaugaagaagau

SEQ ID NO: 260903 - RNA, 19 nt, Homo sapiens
  misc_RNA (1)...(19): siRNA sense strand
gaguggauuccuuguguug

SEQ ID NO: 260904 - RNA, 19 nt, Homo sapiens
  misc_RNA (1)...(19): siRNA sense strand
ggagcuggcagaaaugaag

SEQ ID NO: 260905 - RNA, 19 nt, Homo sapiens
  misc_RNA (1)...(19): siRNA sense strand
guuugaaguuguggucauu

SEQ ID NO: 260906 - RNA, 19 nt, Homo sapiens
  misc_RNA (1)...(19): siRNA sense strand
gcuuuccuguucuccauug

SEQ ID NO: 260907 - RNA, 19 nt, Homo sapiens
  misc_RNA (1)...(19): siRNA sense strand
caccaguccucaccuugga

SEQ ID NO: 260908 - RNA, 19 nt, Homo sapiens
  misc_RNA (1)...(19): siRNA sense strand
gcaacguccaggagaccua

SEQ ID NO: 260909 - RNA, 19 nt, Homo sapiens
  misc_RNA (1)...(19): siRNA sense strand
cagaggcugagcagaauga

SEQ ID NO: 260910 - RNA, 19 nt, Homo sapiens
  misc_RNA (1)...(19): siRNA sense strand
gcggagacccucauguuuu

SEQ ID NO: 260911 - RNA, 19 nt, Homo sapiens
  misc_RNA (1)...(19): siRNA sense strand
aggcugagcagaaugaaga

SEQ ID NO: 260912 - RNA, 19 nt, Homo sapiens
  misc_RNA (1)...(19): siRNA sense strand
gaucagccagcccaagaag

SEQ ID NO: 260913 - RNA, 19 nt, Homo sapiens
  misc_RNA (1)...(19): siRNA sense strand
gcagaaugaagaagaugag

SEQ ID NO: 260914 - RNA, 19 nt, Homo sapiens
  misc_RNA (1)...(19): siRNA sense strand
agacaucaacgugggcuuu

SEQ ID NO: 260915 - RNA, 19 nt, Homo sapiens
  misc_RNA (1)...(19): siRNA sense strand
gagcuggcagaaaugaaga

SEQ ID NO: 260916 - RNA, 19 nt, Homo sapiens
  misc_RNA (1)...(19): siRNA sense strand
ggacuacaacaccuuccau

SEQ ID NO: 260917 - RNA, 19 nt, Homo sapiens
  misc_RNA (1)...(19): siRNA sense strand
cggagcuccuacauggaua

SEQ ID NO: 260918 - RNA, 19 nt, Homo sapiens
  misc_RNA (1)...(19): siRNA sense strand
ggggugaccuggaccaugu

SEQ ID NO: 260919 - RNA, 19 nt, Homo sapiens
  misc_RNA (1)...(19): siRNA sense strand
gcuguucuucggcuucauu

SEQ ID NO: 260920 - RNA, 19 nt, Homo sapiens
  misc_RNA (1)...(19): siRNA sense strand
caaggagcuggcagaaaug

SEQ ID NO: 260921 - RNA, 19 nt, Homo sapiens
  misc_RNA (1)...(19): siRNA sense strand
guucuucggcuucauuugg

SEQ ID NO: 260922 - RNA, 19 nt, Homo sapiens
  misc_RNA (1)...(19): siRNA sense strand
gagcagaaugaagaagaug

SEQ ID NO: 260923 - RNA, 19 nt, Homo sapiens
  misc_RNA (1)...(19): siRNA sense strand
ggaaaagggcuucuaugag

SEQ ID NO: 260924 - RNA, 19 nt, Homo sapiens
  misc_RNA (1)...(19): siRNA sense strand
aagaucagccagcccaaga

SEQ ID NO: 260925 - RNA, 19 nt, Homo sapiens
  misc_RNA (1)...(19): siRNA sense strand
ggugcauguuugucaagau

SEQ ID NO: 260926 - RNA, 19 nt, Homo sapiens
  misc_RNA (1)...(19): siRNA sense strand
gggugcauguuugucaaga

SEQ ID NO: 260927 - RNA, 19 nt, Homo sapiens
  misc_RNA (1)...(19): siRNA sense strand
agaguggauuccuuguguu

SEQ ID NO: 260928 - RNA, 19 nt, Homo sapiens
  misc_RNA (1)...(19): siRNA sense strand
uggauuccuuguguugaaa

SEQ ID NO: 260929 - RNA, 19 nt, Homo sapiens
  misc_RNA (1)...(19): siRNA sense strand
ucaagucccggcagaccaa

SEQ ID NO: 260930 - RNA, 19 nt, Homo sapiens
  misc_RNA (1)...(19): siRNA sense strand
ccauugagaccgaaacaac

SEQ ID NO: 260931 - RNA, 19 nt, Homo sapiens
  misc_RNA (1)...(19): siRNA sense strand
gagaccgaaacaaccauug

SEQ ID NO: 260932 - RNA, 19 nt, Homo sapiens
  misc_RNA (1)...(19): siRNA sense strand
ugcagaggcugagcagaau

SEQ ID NO: 260933 - RNA, 19 nt, Homo sapiens
  misc_RNA (1)...(19): siRNA sense strand
augcagaggcugagcagaa

SEQ ID NO: 260934 - RNA, 19 nt, Homo sapiens
  misc_RNA (1)...(19): siRNA sense strand
gcauguuugucaagaucag

SEQ ID NO: 260935 - RNA, 19 nt, Homo sapiens
  misc_RNA (1)...(19): siRNA sense strand
gaagagagugugccgguua

SEQ ID NO: 260936 - RNA, 19 nt, Homo sapiens
  misc_RNA (1)...(19): siRNA sense strand
gcuaaaaucucccucagua

SEQ ID NO: 260937 - RNA, 19 nt, Homo sapiens
  misc_RNA (1)...(19): siRNA sense strand
gcaagccgguucauucuca

SEQ ID NO: 260938 - RNA, 19 nt, Homo sapiens
  misc_RNA (1)...(19): siRNA sense strand
acauaaaggugcaaaccaa

SEQ ID NO: 260939 - RNA, 19 nt, Homo sapiens
  misc_RNA (1)...(19): siRNA sense strand
gaugcaagccgguucauuc

SEQ ID NO: 260940 - RNA, 19 nt, Homo sapiens
  misc_RNA (1)...(19): siRNA sense strand
ggagaagauagcuguguuu

SEQ ID NO: 260941 - RNA, 19 nt, Homo sapiens
  misc_RNA (1)...(19): siRNA sense strand
ucaguaacaugcgcaucua

SEQ ID NO: 260942 - RNA, 19 nt, Homo sapiens
  misc_RNA (1)...(19): siRNA sense strand
ggcaucuacuucugcauga

SEQ ID NO: 260943 - RNA, 19 nt, Homo sapiens
  misc_RNA (1)...(19): siRNA sense strand
gaaguccacccucaagaag

SEQ ID NO: 260944 - RNA, 19 nt, Homo sapiens
  misc_RNA (1)...(19): siRNA sense strand
ccaacaagauggugaugcu

SEQ ID NO: 260945 - RNA, 19 nt, Homo sapiens
  misc_RNA (1)...(19): siRNA sense strand
gagugugguugauuuccuu

SEQ ID NO: 260946 - RNA, 19 nt, Homo sapiens
  misc_RNA (1)...(19): siRNA sense strand
gagaagauagcuguguuuc

SEQ ID NO: 260947 - RNA, 19 nt, Homo sapiens
  misc_RNA (1)...(19): siRNA sense strand
uaaaggugcaaaccaacaa

SEQ ID NO: 260948 - RNA, 19 nt, Homo sapiens
  misc_RNA (1)...(19): siRNA sense strand
caagaaguccacccucaag

SEQ ID NO: 260949 - RNA, 19 nt, Homo sapiens
  misc_RNA (1)...(19): siRNA sense strand
gguggaacaggagaagaua

SEQ ID NO: 260950 - RNA, 19 nt, Homo sapiens
  misc_RNA (1)...(19): siRNA sense strand
agaaguccacccucaagaa

SEQ ID NO: 260951 - RNA, 19 nt, Homo sapiens
  misc_RNA (1)...(19): siRNA sense strand
ccaagaaguccacccucaa

SEQ ID NO: 260952 - RNA, 19 nt, Homo sapiens
  misc_RNA (1)...(19): siRNA sense strand
aggagaagauagcuguguu

SEQ ID NO: 260953 - RNA, 19 nt, Homo sapiens
  misc_RNA (1)...(19): siRNA sense strand
ccgcgcagcugacaguucu

SEQ ID NO: 260954 - RNA, 19 nt, Homo sapiens
  misc_RNA (1)...(19): siRNA sense strand
ggugcaaaccaacaagaug

SEQ ID NO: 260955 - RNA, 19 nt, Homo sapiens
  misc_RNA (1)...(19): siRNA sense strand
ggacuauccacggugaaga

SEQ ID NO: 260956 - RNA, 19 nt, Homo sapiens
  misc_RNA (1)...(19): siRNA sense strand
guaacaugcgcaucuacug

SEQ ID NO: 260957 - RNA, 19 nt, Homo sapiens
  misc_RNA (1)...(19): siRNA sense strand
gacaguggcaucuacuucu

SEQ ID NO: 260958 - RNA, 19 nt, Homo sapiens
  misc_RNA (1)...(19): siRNA sense strand
gcgcaucuacuggcugaga

SEQ ID NO: 260959 - RNA, 19 nt, Homo sapiens
  misc_RNA (1)...(19): siRNA sense strand
caagccgguucauucucaa

SEQ ID NO: 260960 - RNA, 19 nt, Homo sapiens
  misc_RNA (1)...(19): siRNA sense strand
ggaugcaagccgguucauu

SEQ ID NO: 260961 - RNA, 19 nt, Homo sapiens
  misc_RNA (1)...(19): siRNA sense strand
gcaucuacuucugcaugau

SEQ ID NO: 260962 - RNA, 19 nt, Homo sapiens
  misc_RNA (1)...(19): siRNA sense strand
ccucugggauuccgcaaaa

SEQ ID NO: 260963 - RNA, 19 nt, Homo sapiens
  misc_RNA (1)...(19): siRNA sense strand
cagcugagugugguugauu

SEQ ID NO: 260964 - RNA, 19 nt, Homo sapiens
  misc_RNA (1)...(19): siRNA sense strand
acaguggcaucuacuucug

SEQ ID NO: 260965 - RNA, 19 nt, Homo sapiens
  misc_RNA (1)...(19): siRNA sense strand
gaagagagugugccgguua

SEQ ID NO: 260966 - RNA, 19 nt, Homo sapiens
  misc_RNA (1)...(19): siRNA sense strand
gcuaaaaucucccucagua

SEQ ID NO: 260967 - RNA, 19 nt, Homo sapiens
  misc_RNA (1)...(19): siRNA sense strand
gcaagccgguucauucuca

SEQ ID NO: 260968 - RNA, 19 nt, Homo sapiens
  misc_RNA (1)...(19): siRNA sense strand
acauaaaggugcaaaccaa

SEQ ID NO: 260969 - RNA, 19 nt, Homo sapiens
  misc_RNA (1)...(19): siRNA sense strand
gaugcaagccgguucauuc

SEQ ID NO: 260970 - RNA, 19 nt, Homo sapiens
  misc_RNA (1)...(19): siRNA sense strand
ggagaagauagcuguguuu

SEQ ID NO: 260971 - RNA, 19 nt, Homo sapiens
  misc_RNA (1)...(19): siRNA sense strand
ucaguaacaugcgcaucua

SEQ ID NO: 260972 - RNA, 19 nt, Homo sapiens
  misc_RNA (1)...(19): siRNA sense strand
ggcaucuacuucugcauga

SEQ ID NO: 260973 - RNA, 19 nt, Homo sapiens
  misc_RNA (1)...(19): siRNA sense strand
gaaguccacccucaagaag

SEQ ID NO: 260974 - RNA, 19 nt, Homo sapiens
  misc_RNA (1)...(19): siRNA sense strand
ccaacaagauggugaugcu

SEQ ID NO: 260975 - RNA, 19 nt, Homo sapiens
  misc_RNA (1)...(19): siRNA sense strand
gagugugguugauuuccuu

SEQ ID NO: 260976 - RNA, 19 nt, Homo sapiens
  misc_RNA (1)...(19): siRNA sense strand
gagaagauagcuguguuuc

SEQ ID NO: 260977 - RNA, 19 nt, Homo sapiens
  misc_RNA (1)...(19): siRNA sense strand
uaaaggugcaaaccaacaa

SEQ ID NO: 260978 - RNA, 19 nt, Homo sapiens
  misc_RNA (1)...(19): siRNA sense strand
caagaaguccacccucaag

SEQ ID NO: 260979 - RNA, 19 nt, Homo sapiens
  misc_RNA (1)...(19): siRNA sense strand
gguggaacaggagaagaua

SEQ ID NO: 260980 - RNA, 19 nt, Homo sapiens
  misc_RNA (1)...(19): siRNA sense strand
agaaguccacccucaagaa

SEQ ID NO: 260981 - RNA, 19 nt, Homo sapiens
  misc_RNA (1)...(19): siRNA sense strand
ccaagaaguccacccucaa

SEQ ID NO: 260982 - RNA, 19 nt, Homo sapiens
  misc_RNA (1)...(19): siRNA sense strand
aggagaagauagcuguguu

SEQ ID NO: 260983 - RNA, 19 nt, Homo sapiens
  misc_RNA (1)...(19): siRNA sense strand
ccgcgcagcugacaguucu

SEQ ID NO: 260984 - RNA, 19 nt, Homo sapiens
  misc_RNA (1)...(19): siRNA sense strand
ggugcaaaccaacaagaug

SEQ ID NO: 260985 - RNA, 19 nt, Homo sapiens
  misc_RNA (1)...(19): siRNA sense strand
ggacuauccacggugaaga

SEQ ID NO: 260986 - RNA, 19 nt, Homo sapiens
  misc_RNA (1)...(19): siRNA sense strand
guaacaugcgcaucuacug

SEQ ID NO: 260987 - RNA, 19 nt, Homo sapiens
  misc_RNA (1)...(19): siRNA sense strand
gacaguggcaucuacuucu

SEQ ID NO: 260988 - RNA, 19 nt, Homo sapiens
  misc_RNA (1)...(19): siRNA sense strand
gcgcaucuacuggcugaga

SEQ ID NO: 260989 - RNA, 19 nt, Homo sapiens
  misc_RNA (1)...(19): siRNA sense strand
caagccgguucauucucaa

SEQ ID NO: 260990 - RNA, 19 nt, Homo sapiens
  misc_RNA (1)...(19): siRNA sense strand
ggaugcaagccgguucauu

SEQ ID NO: 260991 - RNA, 19 nt, Homo sapiens
  misc_RNA (1)...(19): siRNA sense strand
gcaucuacuucugcaugau

SEQ ID NO: 260992 - RNA, 19 nt, Homo sapiens
  misc_RNA (1)...(19): siRNA sense strand
ccucugggauuccgcaaaa

SEQ ID NO: 260993 - RNA, 19 nt, Homo sapiens
  misc_RNA (1)...(19): siRNA sense strand
cagcugagugugguugauu

SEQ ID NO: 260994 - RNA, 19 nt, Homo sapiens
  misc_RNA (1)...(19): siRNA sense strand
acaguggcaucuacuucug

SEQ ID NO: 260995 - RNA, 19 nt, Homo sapiens
  misc_RNA (1)...(19): siRNA sense strand
gaagagagugugccgguua

SEQ ID NO: 260996 - RNA, 19 nt, Homo sapiens
  misc_RNA (1)...(19): siRNA sense strand
gcuaaaaucucccucagua

SEQ ID NO: 260997 - RNA, 19 nt, Homo sapiens
  misc_RNA (1)...(19): siRNA sense strand
gcaagccgguucauucuca

SEQ ID NO: 260998 - RNA, 19 nt, Homo sapiens
  misc_RNA (1)...(19): siRNA sense strand
acauaaaggugcaaaccaa

SEQ ID NO: 260999 - RNA, 19 nt, Homo sapiens
  misc_RNA (1)...(19): siRNA sense strand
gaugcaagccgguucauuc

SEQ ID NO: 261000 - RNA, 19 nt, Homo sapiens
  misc_RNA (1)...(19): siRNA sense strand
ggagaagauagcuguguuu

SEQ ID NO: 261001 - RNA, 19 nt, Homo sapiens
  misc_RNA (1)...(19): siRNA sense strand
ucaguaacaugcgcaucua

SEQ ID NO: 261002 - RNA, 19 nt, Homo sapiens
  misc_RNA (1)...(19): siRNA sense strand
ggcaucuacuucugcauga

SEQ ID NO: 261003 - RNA, 19 nt, Homo sapiens
  misc_RNA (1)...(19): siRNA sense strand
gaaguccacccucaagaag

SEQ ID NO: 261004 - RNA, 19 nt, Homo sapiens
  misc_RNA (1)...(19): siRNA sense strand
ccaacaagauggugaugcu

SEQ ID NO: 261005 - RNA, 19 nt, Homo sapiens
  misc_RNA (1)...(19): siRNA sense strand
gagugugguugauuuccuu

SEQ ID NO: 261006 - RNA, 19 nt, Homo sapiens
  misc_RNA (1)...(19): siRNA sense strand
gagaagauagcuguguuuc

SEQ ID NO: 261007 - RNA, 19 nt, Homo sapiens
  misc_RNA (1)...(19): siRNA sense strand
uaaaggugcaaaccaacaa

SEQ ID NO: 261008 - RNA, 19 nt, Homo sapiens
  misc_RNA (1)...(19): siRNA sense strand
caagaaguccacccucaag

SEQ ID NO: 261009 - RNA, 19 nt, Homo sapiens
  misc_RNA (1)...(19): siRNA sense strand
gguggaacaggagaagaua

SEQ ID NO: 261010 - RNA, 19 nt, Homo sapiens
  misc_RNA (1)...(19): siRNA sense strand
agaaguccacccucaagaa

SEQ ID NO: 261011 - RNA, 19 nt, Homo sapiens
  misc_RNA (1)...(19): siRNA sense strand
ccaagaaguccacccucaa

SEQ ID NO: 261012 - RNA, 19 nt, Homo sapiens
  misc_RNA (1)...(19): siRNA sense strand
aggagaagauagcuguguu

SEQ ID NO: 261013 - RNA, 19 nt, Homo sapiens
  misc_RNA (1)...(19): siRNA sense strand
ccgcgcagcugacaguucu

SEQ ID NO: 261014 - RNA, 19 nt, Homo sapiens
  misc_RNA (1)...(19): siRNA sense strand
ggugcaaaccaacaagaug

SEQ ID NO: 261015 - RNA, 19 nt, Homo sapiens
  misc_RNA (1)...(19): siRNA sense strand
ggacuauccacggugaaga

SEQ ID NO: 261016 - RNA, 19 nt, Homo sapiens
  misc_RNA (1)...(19): siRNA sense strand
guaacaugcgcaucuacug

SEQ ID NO: 261017 - RNA, 19 nt, Homo sapiens
  misc_RNA (1)...(19): siRNA sense strand
gacaguggcaucuacuucu

SEQ ID NO: 261018 - RNA, 19 nt, Homo sapiens
  misc_RNA (1)...(19): siRNA sense strand
gcgcaucuacuggcugaga

SEQ ID NO: 261019 - RNA, 19 nt, Homo sapiens
  misc_RNA (1)...(19): siRNA sense strand
caagccgguucauucucaa

SEQ ID NO: 261020 - RNA, 19 nt, Homo sapiens
  misc_RNA (1)...(19): siRNA sense strand
ggaugcaagccgguucauu

SEQ ID NO: 261021 - RNA, 19 nt, Homo sapiens
  misc_RNA (1)...(19): siRNA sense strand
gcaucuacuucugcaugau

SEQ ID NO: 261022 - RNA, 19 nt, Homo sapiens
  misc_RNA (1)...(19): siRNA sense strand
ccucugggauuccgcaaaa

SEQ ID NO: 261023 - RNA, 19 nt, Homo sapiens
  misc_RNA (1)...(19): siRNA sense strand
cagcugagugugguugauu

SEQ ID NO: 261024 - RNA, 19 nt, Homo sapiens
  misc_RNA (1)...(19): siRNA sense strand
acaguggcaucuacuucug

SEQ ID NO: 261025 - RNA, 19 nt, Homo sapiens
  misc_RNA (1)...(19): siRNA sense strand
gaagagagugugccgguua

SEQ ID NO: 261026 - RNA, 19 nt, Homo sapiens
  misc_RNA (1)...(19): siRNA sense strand
gcuaaaaucucccucagua

SEQ ID NO: 261027 - RNA, 19 nt, Homo sapiens
  misc_RNA (1)...(19): siRNA sense strand
gcaagccgguucauucuca

SEQ ID NO: 261028 - RNA, 19 nt, Homo sapiens
  misc_RNA (1)...(19): siRNA sense strand
acauaaaggugcaaaccaa

SEQ ID NO: 261029 - RNA, 19 nt, Homo sapiens
  misc_RNA (1)...(19): siRNA sense strand
gaugcaagccgguucauuc

SEQ ID NO: 261030 - RNA, 19 nt, Homo sapiens
  misc_RNA (1)...(19): siRNA sense strand
ggagaagauagcuguguuu

SEQ ID NO: 261031 - RNA, 19 nt, Homo sapiens
  misc_RNA (1)...(19): siRNA sense strand
ucaguaacaugcgcaucua

SEQ ID NO: 261032 - RNA, 19 nt, Homo sapiens
  misc_RNA (1)...(19): siRNA sense strand
ggcaucuacuucugcauga

SEQ ID NO: 261033 - RNA, 19 nt, Homo sapiens
  misc_RNA (1)...(19): siRNA sense strand
gaaguccacccucaagaag

SEQ ID NO: 261034 - RNA, 19 nt, Homo sapiens
  misc_RNA (1)...(19): siRNA sense strand
ccaacaagauggugaugcu

SEQ ID NO: 261035 - RNA, 19 nt, Homo sapiens
  misc_RNA (1)...(19): siRNA sense strand
gagugugguugauuuccuu

SEQ ID NO: 261036 - RNA, 19 nt, Homo sapiens
  misc_RNA (1)...(19): siRNA sense strand
gagaagauagcuguguuuc

SEQ ID NO: 261037 - RNA, 19 nt, Homo sapiens
  misc_RNA (1)...(19): siRNA sense strand
uaaaggugcaaaccaacaa

SEQ ID NO: 261038 - RNA, 19 nt, Homo sapiens
  misc_RNA (1)...(19): siRNA sense strand
caagaaguccacccucaag

SEQ ID NO: 261039 - RNA, 19 nt, Homo sapiens
  misc_RNA (1)...(19): siRNA sense strand
gguggaacaggagaagaua

SEQ ID NO: 261040 - RNA, 19 nt, Homo sapiens
  misc_RNA (1)...(19): siRNA sense strand
agaaguccacccucaagaa

SEQ ID NO: 261041 - RNA, 19 nt, Homo sapiens
  misc_RNA (1)...(19): siRNA sense strand
ccaagaaguccacccucaa

SEQ ID NO: 261042 - RNA, 19 nt, Homo sapiens
  misc_RNA (1)...(19): siRNA sense strand
aggagaagauagcuguguu

SEQ ID NO: 261043 - RNA, 19 nt, Homo sapiens
  misc_RNA (1)...(19): siRNA sense strand
ccgcgcagcugacaguucu

SEQ ID NO: 261044 - RNA, 19 nt, Homo sapiens
  misc_RNA (1)...(19): siRNA sense strand
ggugcaaaccaacaagaug

SEQ ID NO: 261045 - RNA, 19 nt, Homo sapiens
  misc_RNA (1)...(19): siRNA sense strand
ggacuauccacggugaaga

SEQ ID NO: 261046 - RNA, 19 nt, Homo sapiens
  misc_RNA (1)...(19): siRNA sense strand
guaacaugcgcaucuacug

SEQ ID NO: 261047 - RNA, 19 nt, Homo sapiens
  misc_RNA (1)...(19): siRNA sense strand
gacaguggcaucuacuucu

SEQ ID NO: 261048 - RNA, 19 nt, Homo sapiens
  misc_RNA (1)...(19): siRNA sense strand
gcgcaucuacuggcugaga

SEQ ID NO: 261049 - RNA, 19 nt, Homo sapiens
  misc_RNA (1)...(19): siRNA sense strand
caagccgguucauucucaa

SEQ ID NO: 261050 - RNA, 19 nt, Homo sapiens
  misc_RNA (1)...(19): siRNA sense strand
ggaugcaagccgguucauu

SEQ ID NO: 261051 - RNA, 19 nt, Homo sapiens
  misc_RNA (1)...(19): siRNA sense strand
gcaucuacuucugcaugau

SEQ ID NO: 261052 - RNA, 19 nt, Homo sapiens
  misc_RNA (1)...(19): siRNA sense strand
ccucugggauuccgcaaaa

SEQ ID NO: 261053 - RNA, 19 nt, Homo sapiens
  misc_RNA (1)...(19): siRNA sense strand
cagcugagugugguugauu

SEQ ID NO: 261054 - RNA, 19 nt, Homo sapiens
  misc_RNA (1)...(19): siRNA sense strand
acaguggcaucuacuucug

SEQ ID NO: 261055 - RNA, 19 nt, Homo sapiens
  misc_RNA (1)...(19): siRNA sense strand
gaagagagugugccgguua

SEQ ID NO: 261056 - RNA, 19 nt, Homo sapiens
  misc_RNA (1)...(19): siRNA sense strand
gcuaaaaucucccucagua

SEQ ID NO: 261057 - RNA, 19 nt, Homo sapiens
  misc_RNA (1)...(19): siRNA sense strand
gcaagccgguucauucuca

SEQ ID NO: 261058 - RNA, 19 nt, Homo sapiens
  misc_RNA (1)...(19): siRNA sense strand
acauaaaggugcaaaccaa

SEQ ID NO: 261059 - RNA, 19 nt, Homo sapiens
  misc_RNA (1)...(19): siRNA sense strand
gaugcaagccgguucauuc

SEQ ID NO: 261060 - RNA, 19 nt, Homo sapiens
  misc_RNA (1)...(19): siRNA sense strand
ggagaagauagcuguguuu

SEQ ID NO: 261061 - RNA, 19 nt, Homo sapiens
  misc_RNA (1)...(19): siRNA sense strand
ucaguaacaugcgcaucua

SEQ ID NO: 261062 - RNA, 19 nt, Homo sapiens
  misc_RNA (1)...(19): siRNA sense strand
ggcaucuacuucugcauga

SEQ ID NO: 261063 - RNA, 19 nt, Homo sapiens
  misc_RNA (1)...(19): siRNA sense strand
gaaguccacccucaagaag

SEQ ID NO: 261064 - RNA, 19 nt, Homo sapiens
  misc_RNA (1)...(19): siRNA sense strand
ccaacaagauggugaugcu

SEQ ID NO: 261065 - RNA, 19 nt, Homo sapiens
  misc_RNA (1)...(19): siRNA sense strand
gagugugguugauuuccuu

SEQ ID NO: 261066 - RNA, 19 nt, Homo sapiens
  misc_RNA (1)...(19): siRNA sense strand
gagaagauagcuguguuuc

SEQ ID NO: 261067 - RNA, 19 nt, Homo sapiens
  misc_RNA (1)...(19): siRNA sense strand
uaaaggugcaaaccaacaa

SEQ ID NO: 261068 - RNA, 19 nt, Homo sapiens
  misc_RNA (1)...(19): siRNA sense strand
caagaaguccacccucaag

SEQ ID NO: 261069 - RNA, 19 nt, Homo sapiens
  misc_RNA (1)...(19): siRNA sense strand
gguggaacaggagaagaua

SEQ ID NO: 261070 - RNA, 19 nt, Homo sapiens
  misc_RNA (1)...(19): siRNA sense strand
agaaguccacccucaagaa

SEQ ID NO: 261071 - RNA, 19 nt, Homo sapiens
  misc_RNA (1)...(19): siRNA sense strand
ccaagaaguccacccucaa

SEQ ID NO: 261072 - RNA, 19 nt, Homo sapiens
  misc_RNA (1)...(19): siRNA sense strand
aggagaagauagcuguguu

SEQ ID NO: 261073 - RNA, 19 nt, Homo sapiens
  misc_RNA (1)...(19): siRNA sense strand
ccgcgcagcugacaguucu

SEQ ID NO: 261074 - RNA, 19 nt, Homo sapiens
  misc_RNA (1)...(19): siRNA sense strand
ggugcaaaccaacaagaug

SEQ ID NO: 261075 - RNA, 19 nt, Homo sapiens
  misc_RNA (1)...(19): siRNA sense strand
ggacuauccacggugaaga

SEQ ID NO: 261076 - RNA, 19 nt, Homo sapiens
  misc_RNA (1)...(19): siRNA sense strand
guaacaugcgcaucuacug

SEQ ID NO: 261077 - RNA, 19 nt, Homo sapiens
  misc_RNA (1)...(19): siRNA sense strand
gacaguggcaucuacuucu

SEQ ID NO: 261078 - RNA, 19 nt, Homo sapiens
  misc_RNA (1)...(19): siRNA sense strand
gcgcaucuacuggcugaga

SEQ ID NO: 261079 - RNA, 19 nt, Homo sapiens
  misc_RNA (1)...(19): siRNA sense strand
caagccgguucauucucaa

SEQ ID NO: 261080 - RNA, 19 nt, Homo sapiens
  misc_RNA (1)...(19): siRNA sense strand
ggaugcaagccgguucauu

SEQ ID NO: 261081 - RNA, 19 nt, Homo sapiens
  misc_RNA (1)...(19): siRNA sense strand
gcaucuacuucugcaugau

SEQ ID NO: 261082 - RNA, 19 nt, Homo sapiens
  misc_RNA (1)...(19): siRNA sense strand
ccucugggauuccgcaaaa

SEQ ID NO: 261083 - RNA, 19 nt, Homo sapiens
  misc_RNA (1)...(19): siRNA sense strand
cagcugagugugguugauu

SEQ ID NO: 261084 - RNA, 19 nt, Homo sapiens
  misc_RNA (1)...(19): siRNA sense strand
acaguggcaucuacuucug

SEQ ID NO: 261085 - RNA, 19 nt, Homo sapiens
  misc_RNA (1)...(19): siRNA sense strand
gaagagagugugccgguua

SEQ ID NO: 261086 - RNA, 19 nt, Homo sapiens
  misc_RNA (1)...(19): siRNA sense strand
gcuaaaaucucccucagua

SEQ ID NO: 261087 - RNA, 19 nt, Homo sapiens
  misc_RNA (1)...(19): siRNA sense strand
gcaagccgguucauucuca

SEQ ID NO: 261088 - RNA, 19 nt, Homo sapiens
  misc_RNA (1)...(19): siRNA sense strand
acauaaaggugcaaaccaa

SEQ ID NO: 261089 - RNA, 19 nt, Homo sapiens
  misc_RNA (1)...(19): siRNA sense strand
gaugcaagccgguucauuc

SEQ ID NO: 261090 - RNA, 19 nt, Homo sapiens
  misc_RNA (1)...(19): siRNA sense strand
ggagaagauagcuguguuu

SEQ ID NO: 261091 - RNA, 19 nt, Homo sapiens
  misc_RNA (1)...(19): siRNA sense strand
ucaguaacaugcgcaucua

SEQ ID NO: 261092 - RNA, 19 nt, Homo sapiens
  misc_RNA (1)...(19): siRNA sense strand
ggcaucuacuucugcauga

SEQ ID NO: 261093 - RNA, 19 nt, Homo sapiens
  misc_RNA (1)...(19): siRNA sense strand
gaaguccacccucaagaag

SEQ ID NO: 261094 - RNA, 19 nt, Homo sapiens
  misc_RNA (1)...(19): siRNA sense strand
ccaacaagauggugaugcu

SEQ ID NO: 261095 - RNA, 19 nt, Homo sapiens
  misc_RNA (1)...(19): siRNA sense strand
gagugugguugauuuccuu

SEQ ID NO: 261096 - RNA, 19 nt, Homo sapiens
  misc_RNA (1)...(19): siRNA sense strand
gagaagauagcuguguuuc

SEQ ID NO: 261097 - RNA, 19 nt, Homo sapiens
  misc_RNA (1)...(19): siRNA sense strand
uaaaggugcaaaccaacaa

SEQ ID NO: 261098 - RNA, 19 nt, Homo sapiens
  misc_RNA (1)...(19): siRNA sense strand
caagaaguccacccucaag

SEQ ID NO: 261099 - RNA, 19 nt, Homo sapiens
  misc_RNA (1)...(19): siRNA sense strand
gguggaacaggagaagaua

SEQ ID NO: 261100 - RNA, 19 nt, Homo sapiens
  misc_RNA (1)...(19): siRNA sense strand
agaaguccacccucaagaa

SEQ ID NO: 261101 - RNA, 19 nt, Homo sapiens
  misc_RNA (1)...(19): siRNA sense strand
ccaagaaguccacccucaa

SEQ ID NO: 261102 - RNA, 19 nt, Homo sapiens
  misc_RNA (1)...(19): siRNA sense strand
aggagaagauagcuguguu

SEQ ID NO: 261103 - RNA, 19 nt, Homo sapiens
  misc_RNA (1)...(19): siRNA sense strand
ccgcgcagcugacaguucu

SEQ ID NO: 261104 - RNA, 19 nt, Homo sapiens
  misc_RNA (1)...(19): siRNA sense strand
ggugcaaaccaacaagaug

SEQ ID NO: 261105 - RNA, 19 nt, Homo sapiens
  misc_RNA (1)...(19): siRNA sense strand
ggacuauccacggugaaga

SEQ ID NO: 261106 - RNA, 19 nt, Homo sapiens
  misc_RNA (1)...(19): siRNA sense strand
guaacaugcgcaucuacug

SEQ ID NO: 261107 - RNA, 19 nt, Homo sapiens
  misc_RNA (1)...(19): siRNA sense strand
gacaguggcaucuacuucu

SEQ ID NO: 261108 - RNA, 19 nt, Homo sapiens
  misc_RNA (1)...(19): siRNA sense strand
gcgcaucuacuggcugaga

SEQ ID NO: 261109 - RNA, 19 nt, Homo sapiens
  misc_RNA (1)...(19): siRNA sense strand
caagccgguucauucucaa

SEQ ID NO: 261110 - RNA, 19 nt, Homo sapiens
  misc_RNA (1)...(19): siRNA sense strand
ggaugcaagccgguucauu

SEQ ID NO: 261111 - RNA, 19 nt, Homo sapiens
  misc_RNA (1)...(19): siRNA sense strand
gcaucuacuucugcaugau

SEQ ID NO: 261112 - RNA, 19 nt, Homo sapiens
  misc_RNA (1)...(19): siRNA sense strand
ccucugggauuccgcaaaa

SEQ ID NO: 261113 - RNA, 19 nt, Homo sapiens
  misc_RNA (1)...(19): siRNA sense strand
cagcugagugugguugauu

SEQ ID NO: 261114 - RNA, 19 nt, Homo sapiens
  misc_RNA (1)...(19): siRNA sense strand
acaguggcaucuacuucug

SEQ ID NO: 261115 - RNA, 19 nt, Homo sapiens
  misc_RNA (1)...(19): siRNA sense strand
uaagaaagcuauccagauu

SEQ ID NO: 261116 - RNA, 19 nt, Homo sapiens
  misc_RNA (1)...(19): siRNA sense strand
gggaagaaguaccaaauuu

SEQ ID NO: 261117 - RNA, 19 nt, Homo sapiens
  misc_RNA (1)...(19): siRNA sense strand
ggccauagcuagccucaua

SEQ ID NO: 261118 - RNA, 19 nt, Homo sapiens
  misc_RNA (1)...(19): siRNA sense strand
ccaaggagcuccagcacua

SEQ ID NO: 261119 - RNA, 19 nt, Homo sapiens
  misc_RNA (1)...(19): siRNA sense strand
gaaauggguugaugaacuu

SEQ ID NO: 261120 - RNA, 19 nt, Homo sapiens
  misc_RNA (1)...(19): siRNA sense strand
gagaagaaauggaagaaau

SEQ ID NO: 261121 - RNA, 19 nt, Homo sapiens
  misc_RNA (1)...(19): siRNA sense strand
gaggaaagguggcaucuug

SEQ ID NO: 261122 - RNA, 19 nt, Homo sapiens
  misc_RNA (1)...(19): siRNA sense strand
ccaaagugcugcaguacua

SEQ ID NO: 261123 - RNA, 19 nt, Homo sapiens
  misc_RNA (1)...(19): siRNA sense strand
caaaggacuucgcccauaa

SEQ ID NO: 261124 - RNA, 19 nt, Homo sapiens
  misc_RNA (1)...(19): siRNA sense strand
gagcaugccgucaauaaua

SEQ ID NO: 261125 - RNA, 19 nt, Homo sapiens
  misc_RNA (1)...(19): siRNA sense strand
ggucugaacugaaugaaga

SEQ ID NO: 261126 - RNA, 19 nt, Homo sapiens
  misc_RNA (1)...(19): siRNA sense strand
aaacuuggcugaauucaug

SEQ ID NO: 261127 - RNA, 19 nt, Homo sapiens
  misc_RNA (1)...(19): siRNA sense strand
ggaagauccugcacauuga

SEQ ID NO: 261128 - RNA, 19 nt, Homo sapiens
  misc_RNA (1)...(19): siRNA sense strand
gaaugaagaucaacaggau

SEQ ID NO: 261129 - RNA, 19 nt, Homo sapiens
  misc_RNA (1)...(19): siRNA sense strand
gaaccuggcucaaguaugc

SEQ ID NO: 261130 - RNA, 19 nt, Homo sapiens
  misc_RNA (1)...(19): siRNA sense strand
caacugaaccaucacauuu

SEQ ID NO: 261131 - RNA, 19 nt, Homo sapiens
  misc_RNA (1)...(19): siRNA sense strand
gagagaaguuuccagagaa

SEQ ID NO: 261132 - RNA, 19 nt, Homo sapiens
  misc_RNA (1)...(19): siRNA sense strand
gaagaggcaucucguuugu

SEQ ID NO: 261133 - RNA, 19 nt, Homo sapiens
  misc_RNA (1)...(19): siRNA sense strand
gaaauagucacccucauga

SEQ ID NO: 261134 - RNA, 19 nt, Homo sapiens
  misc_RNA (1)...(19): siRNA sense strand
gauacacacuugcugauga

SEQ ID NO: 261135 - RNA, 19 nt, Homo sapiens
  misc_RNA (1)...(19): siRNA sense strand
gcagaauugucaagggaua

SEQ ID NO: 261136 - RNA, 19 nt, Homo sapiens
  misc_RNA (1)...(19): siRNA sense strand
gugcugaaaugcaggaaua

SEQ ID NO: 261137 - RNA, 19 nt, Homo sapiens
  misc_RNA (1)...(19): siRNA sense strand
ggaaauggguugaugaacu

SEQ ID NO: 261138 - RNA, 19 nt, Homo sapiens
  misc_RNA (1)...(19): siRNA sense strand
caucagaccuuauauggau

SEQ ID NO: 261139 - RNA, 19 nt, Homo sapiens
  misc_RNA (1)...(19): siRNA sense strand
ccaaaggacuucgcccaua

SEQ ID NO: 261140 - RNA, 19 nt, Homo sapiens
  misc_RNA (1)...(19): siRNA sense strand
gcaacaaccuccaggauac

SEQ ID NO: 261141 - RNA, 19 nt, Homo sapiens
  misc_RNA (1)...(19): siRNA sense strand
gagaagggauuugaugaga

SEQ ID NO: 261142 - RNA, 19 nt, Homo sapiens
  misc_RNA (1)...(19): siRNA sense strand
guuagaauaugccaugaaa

SEQ ID NO: 261143 - RNA, 19 nt, Homo sapiens
  misc_RNA (1)...(19): siRNA sense strand
ccaaagcacuacacuacaa

SEQ ID NO: 261144 - RNA, 19 nt, Homo sapiens
  misc_RNA (1)...(19): siRNA sense strand
gcugugaggucugaguuua

SEQ ID NO: 261145 - RNA, 19 nt, Homo sapiens
  misc_RNA (1)...(19): siRNA sense strand
cagagaagauuccauuuag

SEQ ID NO: 261146 - RNA, 19 nt, Homo sapiens
  misc_RNA (1)...(19): siRNA sense strand
ccagagaagauuccauuua

SEQ ID NO: 261147 - RNA, 19 nt, Homo sapiens
  misc_RNA (1)...(19): siRNA sense strand
cgagagaaguuuccagaga

SEQ ID NO: 261148 - RNA, 19 nt, Homo sapiens
  misc_RNA (1)...(19): siRNA sense strand
gggaagauccugcacauug

SEQ ID NO: 261149 - RNA, 19 nt, Homo sapiens
  misc_RNA (1)...(19): siRNA sense strand
gaacgugaaaggcauguuu

SEQ ID NO: 261150 - RNA, 19 nt, Homo sapiens
  misc_RNA (1)...(19): siRNA sense strand
ugaaagccauccagauuga

SEQ ID NO: 261151 - RNA, 19 nt, Homo sapiens
  misc_RNA (1)...(19): siRNA sense strand
gaaacuugccucuggauga

SEQ ID NO: 261152 - RNA, 19 nt, Homo sapiens
  misc_RNA (1)...(19): siRNA sense strand
gugcucaucugcagaauug

SEQ ID NO: 261153 - RNA, 19 nt, Homo sapiens
  misc_RNA (1)...(19): siRNA sense strand
gaccuuauauggaugaaau

SEQ ID NO: 261154 - RNA, 19 nt, Homo sapiens
  misc_RNA (1)...(19): siRNA sense strand
gcacacauuugaagaagca

SEQ ID NO: 261155 - RNA, 19 nt, Homo sapiens
  misc_RNA (1)...(19): siRNA sense strand
gaacuugcaggccuuguuu

SEQ ID NO: 261156 - RNA, 19 nt, Homo sapiens
  misc_RNA (1)...(19): siRNA sense strand
gaaucucucaucagcauua

SEQ ID NO: 261157 - RNA, 19 nt, Homo sapiens
  misc_RNA (1)...(19): siRNA sense strand
gaccgaagaaccaauuaua

SEQ ID NO: 261158 - RNA, 19 nt, Homo sapiens
  misc_RNA (1)...(19): siRNA sense strand
ccuuagagcugcaauaugu

SEQ ID NO: 261159 - RNA, 19 nt, Homo sapiens
  misc_RNA (1)...(19): siRNA sense strand
gaacuucgaagcugugcua

SEQ ID NO: 261160 - RNA, 19 nt, Homo sapiens
  misc_RNA (1)...(19): siRNA sense strand
ggucugaguuuaaggucua

SEQ ID NO: 261161 - RNA, 19 nt, Homo sapiens
  misc_RNA (1)...(19): siRNA sense strand
caagcgacaucccaugaaa

SEQ ID NO: 261162 - RNA, 19 nt, Homo sapiens
  misc_RNA (1)...(19): siRNA sense strand
gaagauuccauuuagacua

SEQ ID NO: 261163 - RNA, 19 nt, Homo sapiens
  misc_RNA (1)...(19): siRNA sense strand
ggccuauggucgagauuua

SEQ ID NO: 261164 - RNA, 19 nt, Homo sapiens
  misc_RNA (1)...(19): siRNA sense strand
agacaucgcugaagucaca

SEQ ID NO: 261165 - RNA, 19 nt, Homo sapiens
  misc_RNA (1)...(19): siRNA sense strand
cauugucucuaucaaguua

SEQ ID NO: 261166 - RNA, 19 nt, Homo sapiens
  misc_RNA (1)...(19): siRNA sense strand
agaaagcuauccagauuau

SEQ ID NO: 261167 - RNA, 19 nt, Homo sapiens
  misc_RNA (1)...(19): siRNA sense strand
gauggcaacuacagaauca

SEQ ID NO: 261168 - RNA, 19 nt, Homo sapiens
  misc_RNA (1)...(19): siRNA sense strand
caacggacaugaguuuguu

SEQ ID NO: 261169 - RNA, 19 nt, Homo sapiens
  misc_RNA (1)...(19): siRNA sense strand
gcgccaaccuggaugacua

SEQ ID NO: 261170 - RNA, 19 nt, Homo sapiens
  misc_RNA (1)...(19): siRNA sense strand
aaacaggacccaugaagaa

SEQ ID NO: 261171 - RNA, 19 nt, Homo sapiens
  misc_RNA (1)...(19): siRNA sense strand
gaaacaggacccaugaaga

SEQ ID NO: 261172 - RNA, 19 nt, Homo sapiens
  misc_RNA (1)...(19): siRNA sense strand
ggaagaggcaucucguuug

SEQ ID NO: 261173 - RNA, 19 nt, Homo sapiens
  misc_RNA (1)...(19): siRNA sense strand
ggugaaagccauccagauu

SEQ ID NO: 261174 - RNA, 19 nt, Homo sapiens
  misc_RNA (1)...(19): siRNA sense strand
gggacagcauggaagaaua

SEQ ID NO: 261175 - RNA, 19 nt, Homo sapiens
  misc_RNA (1)...(19): siRNA sense strand
ccugcuggaugcugaauua

SEQ ID NO: 261176 - RNA, 19 nt, Homo sapiens
  misc_RNA (1)...(19): siRNA sense strand
gcuggaagccuuugucuau

SEQ ID NO: 261177 - RNA, 19 nt, Homo sapiens
  misc_RNA (1)...(19): siRNA sense strand
acaagaauguugaccaaug

SEQ ID NO: 261178 - RNA, 19 nt, Homo sapiens
  misc_RNA (1)...(19): siRNA sense strand
gacaguggcuucuaagucu

SEQ ID NO: 261179 - RNA, 19 nt, Homo sapiens
  misc_RNA (1)...(19): siRNA sense strand
gguuauaccucagcucauu

SEQ ID NO: 261180 - RNA, 19 nt, Homo sapiens
  misc_RNA (1)...(19): siRNA sense strand
uaaagaaggacauucaaga

SEQ ID NO: 261181 - RNA, 19 nt, Homo sapiens
  misc_RNA (1)...(19): siRNA sense strand
ggucgggacuucucucaug

SEQ ID NO: 261182 - RNA, 19 nt, Homo sapiens
  misc_RNA (1)...(19): siRNA sense strand
gauacgcugucaucccuuu

SEQ ID NO: 261183 - RNA, 19 nt, Homo sapiens
  misc_RNA (1)...(19): siRNA sense strand
gcacuacacuacaaagaac

SEQ ID NO: 261184 - RNA, 19 nt, Homo sapiens
  misc_RNA (1)...(19): siRNA sense strand
gaauguugguguccuuugu

SEQ ID NO: 261185 - RNA, 19 nt, Homo sapiens
  misc_RNA (1)...(19): siRNA sense strand
uaacaggguucgagauaag

SEQ ID NO: 261186 - RNA, 19 nt, Homo sapiens
  misc_RNA (1)...(19): siRNA sense strand
cagaggcccuaaauaagaa

SEQ ID NO: 261187 - RNA, 19 nt, Homo sapiens
  misc_RNA (1)...(19): siRNA sense strand
ggaccucuauuaucaugug

SEQ ID NO: 261188 - RNA, 19 nt, Homo sapiens
  misc_RNA (1)...(19): siRNA sense strand
caucgccgcugcagaagaa

SEQ ID NO: 261189 - RNA, 19 nt, Homo sapiens
  misc_RNA (1)...(19): siRNA sense strand
gcaagugcaacccuucuuu

SEQ ID NO: 261190 - RNA, 19 nt, Homo sapiens
  misc_RNA (1)...(19): siRNA sense strand
ccugggaccucuauuauca

SEQ ID NO: 261191 - RNA, 19 nt, Homo sapiens
  misc_RNA (1)...(19): siRNA sense strand
guucucaccuuaugguuug

SEQ ID NO: 261192 - RNA, 19 nt, Homo sapiens
  misc_RNA (1)...(19): siRNA sense strand
ggacccugguuaaugauga

SEQ ID NO: 261193 - RNA, 19 nt, Homo sapiens
  misc_RNA (1)...(19): siRNA sense strand
ucacacagacccucuuaaa

SEQ ID NO: 261194 - RNA, 19 nt, Homo sapiens
  misc_RNA (1)...(19): siRNA sense strand
ccagggaucucuucaaugc

SEQ ID NO: 261195 - RNA, 19 nt, Homo sapiens
  misc_RNA (1)...(19): siRNA sense strand
gaugagaccuuggccaaag

SEQ ID NO: 261196 - RNA, 19 nt, Homo sapiens
  misc_RNA (1)...(19): siRNA sense strand
ccagaggcccuaaauaaga

SEQ ID NO: 261197 - RNA, 19 nt, Homo sapiens
  misc_RNA (1)...(19): siRNA sense strand
ccaaaacccuccugaugua

SEQ ID NO: 261198 - RNA, 19 nt, Homo sapiens
  misc_RNA (1)...(19): siRNA sense strand
gaagagugcccgcaagauc

SEQ ID NO: 261199 - RNA, 19 nt, Homo sapiens
  misc_RNA (1)...(19): siRNA sense strand
aaagaugacuggcuggaau

SEQ ID NO: 261200 - RNA, 19 nt, Homo sapiens
  misc_RNA (1)...(19): siRNA sense strand
gcagagaagggauuugaug

SEQ ID NO: 261201 - RNA, 19 nt, Homo sapiens
  misc_RNA (1)...(19): siRNA sense strand
aaccagaggcccuaaauaa

SEQ ID NO: 261202 - RNA, 19 nt, Homo sapiens
  misc_RNA (1)...(19): siRNA sense strand
ggaggcugauggacacaaa

SEQ ID NO: 261203 - RNA, 19 nt, Homo sapiens
  misc_RNA (1)...(19): siRNA sense strand
gacaaguacugcaaagauc

SEQ ID NO: 261204 - RNA, 19 nt, Homo sapiens
  misc_RNA (1)...(19): siRNA sense strand
gugcaacccuucuuugaca

SEQ ID NO: 261205 - RNA, 19 nt, Homo sapiens
  misc_RNA (1)...(19): siRNA sense strand
gaaaccagaggcccuaaau

SEQ ID NO: 261206 - RNA, 19 nt, Homo sapiens
  misc_RNA (1)...(19): siRNA sense strand
ggauggcuccggacuauga

SEQ ID NO: 261207 - RNA, 19 nt, Homo sapiens
  misc_RNA (1)...(19): siRNA sense strand
ggaaacauccuuuaaucag

SEQ ID NO: 261208 - RNA, 19 nt, Homo sapiens
  misc_RNA (1)...(19): siRNA sense strand
ggccagggaucucuucaau

SEQ ID NO: 261209 - RNA, 19 nt, Homo sapiens
  misc_RNA (1)...(19): siRNA sense strand
gaagaaauggaagaaauca

SEQ ID NO: 261210 - RNA, 19 nt, Homo sapiens
  misc_RNA (1)...(19): siRNA sense strand
caauuauacccguucuuua

SEQ ID NO: 261211 - RNA, 19 nt, Homo sapiens
  misc_RNA (1)...(19): siRNA sense strand
ccaauuauacccguucuuu

SEQ ID NO: 261212 - RNA, 19 nt, Homo sapiens
  misc_RNA (1)...(19): siRNA sense strand
ugaaugaccagguguuuga

SEQ ID NO: 261213 - RNA, 19 nt, Homo sapiens
  misc_RNA (1)...(19): siRNA sense strand
agaacucgcugauccaaau

SEQ ID NO: 261214 - RNA, 19 nt, Homo sapiens
  misc_RNA (1)...(19): siRNA sense strand
gccagugggugcugaaaug

SEQ ID NO: 261215 - RNA, 19 nt, Homo sapiens
  misc_RNA (1)...(19): siRNA sense strand
gcaaagaccgcaggaagaa

SEQ ID NO: 261216 - RNA, 19 nt, Homo sapiens
  misc_RNA (1)...(19): siRNA sense strand
cagugacgcugcagagaua

SEQ ID NO: 261217 - RNA, 19 nt, Homo sapiens
  misc_RNA (1)...(19): siRNA sense strand
caaccugacuuccaugcaa

SEQ ID NO: 261218 - RNA, 19 nt, Homo sapiens
  misc_RNA (1)...(19): siRNA sense strand
ccagagcccugcuguguuc

SEQ ID NO: 261219 - RNA, 19 nt, Homo sapiens
  misc_RNA (1)...(19): siRNA sense strand
ggaaugugguucugaaggu

SEQ ID NO: 261220 - RNA, 19 nt, Homo sapiens
  misc_RNA (1)...(19): siRNA sense strand
gacaucggcuggaaugaau

SEQ ID NO: 261221 - RNA, 19 nt, Homo sapiens
  misc_RNA (1)...(19): siRNA sense strand
uggauaaucucaccgaaau

SEQ ID NO: 261222 - RNA, 19 nt, Homo sapiens
  misc_RNA (1)...(19): siRNA sense strand
ggaggaagcagugggauga

SEQ ID NO: 261223 - RNA, 19 nt, Homo sapiens
  misc_RNA (1)...(19): siRNA sense strand
gcagacaucggcuggaaug

SEQ ID NO: 261224 - RNA, 19 nt, Homo sapiens
  misc_RNA (1)...(19): siRNA sense strand
cggcuggaaugaauggaua

SEQ ID NO: 261225 - RNA, 19 nt, Homo sapiens
  misc_RNA (1)...(19): siRNA sense strand
gcaagacucggaaaugauc

SEQ ID NO: 261226 - RNA, 19 nt, Homo sapiens
  misc_RNA (1)...(19): siRNA sense strand
ccgcccagcuggauucuga

SEQ ID NO: 261227 - RNA, 19 nt, Homo sapiens
  misc_RNA (1)...(19): siRNA sense strand
uaaucucaccgaaaucuuu

SEQ ID NO: 261228 - RNA, 19 nt, Homo sapiens
  misc_RNA (1)...(19): siRNA sense strand
uggaaugaauggauaaucu

SEQ ID NO: 261229 - RNA, 19 nt, Homo sapiens
  misc_RNA (1)...(19): siRNA sense strand
gaaugaauggauaaucuca

SEQ ID NO: 261230 - RNA, 19 nt, Homo sapiens
  misc_RNA (1)...(19): siRNA sense strand
gagaagacgaugcagaaag

SEQ ID NO: 261231 - RNA, 19 nt, Homo sapiens
  misc_RNA (1)...(19): siRNA sense strand
gcaacacgguccgcagcuu

SEQ ID NO: 261232 - RNA, 19 nt, Homo sapiens
  misc_RNA (1)...(19): siRNA sense strand
ccaacgaucuggccaucuc

SEQ ID NO: 261233 - RNA, 19 nt, Homo sapiens
  misc_RNA (1)...(19): siRNA sense strand
ccagaaggccguguauuuc

SEQ ID NO: 261234 - RNA, 19 nt, Homo sapiens
  misc_RNA (1)...(19): siRNA sense strand
gcacaggcucuaugagaag

SEQ ID NO: 261235 - RNA, 19 nt, Homo sapiens
  misc_RNA (1)...(19): siRNA sense strand
gauaaucucaccgaaaucu

SEQ ID NO: 261236 - RNA, 19 nt, Homo sapiens
  misc_RNA (1)...(19): siRNA sense strand
cgcaggugcuggacuuuga

SEQ ID NO: 261237 - RNA, 19 nt, Homo sapiens
  misc_RNA (1)...(19): siRNA sense strand
augcaagacucggaaauga

SEQ ID NO: 261238 - RNA, 19 nt, Homo sapiens
  misc_RNA (1)...(19): siRNA sense strand
agaagacgaugcagaaagc

SEQ ID NO: 261239 - RNA, 19 nt, Homo sapiens
  misc_RNA (1)...(19): siRNA sense strand
accagaaggccguguauuu

SEQ ID NO: 261240 - RNA, 19 nt, Homo sapiens
  misc_RNA (1)...(19): siRNA sense strand
ugcacaggcucuaugagaa

SEQ ID NO: 261241 - RNA, 19 nt, Homo sapiens
  misc_RNA (1)...(19): siRNA sense strand
ggaugagaaucggaaugug

SEQ ID NO: 261242 - RNA, 19 nt, Homo sapiens
  misc_RNA (1)...(19): siRNA sense strand
ccucgcaggugcuggacuu

SEQ ID NO: 261243 - RNA, 19 nt, Homo sapiens
  misc_RNA (1)...(19): siRNA sense strand
ccugcuguguucccgauaa

SEQ ID NO: 261244 - RNA, 19 nt, Homo sapiens
  misc_RNA (1)...(19): siRNA sense strand
ucgcagacaucggcuggaa

SEQ ID NO: 261245 - RNA, 19 nt, Homo sapiens
  misc_RNA (1)...(19): siRNA sense strand
ggaaugaauggauaaucuc

SEQ ID NO: 261246 - RNA, 19 nt, Homo sapiens
  misc_RNA (1)...(19): siRNA sense strand
ccuagucuaugccaacgau

SEQ ID NO: 261247 - RNA, 19 nt, Homo sapiens
  misc_RNA (1)...(19): siRNA sense strand
agacaucggcuggaaugaa

SEQ ID NO: 261248 - RNA, 19 nt, Homo sapiens
  misc_RNA (1)...(19): siRNA sense strand
ggccguguauuucuucaac

SEQ ID NO: 261249 - RNA, 19 nt, Homo sapiens
  misc_RNA (1)...(19): siRNA sense strand
acgagaagacgaugcagaa

SEQ ID NO: 261250 - RNA, 19 nt, Homo sapiens
  misc_RNA (1)...(19): siRNA sense strand
ucaccgaaaucuuuugaug

SEQ ID NO: 261251 - RNA, 19 nt, Homo sapiens
  misc_RNA (1)...(19): siRNA sense strand
gaccagaaggccguguauu

SEQ ID NO: 261252 - RNA, 19 nt, Homo sapiens
  misc_RNA (1)...(19): siRNA sense strand
cgcaaagaccgcaggaaga

SEQ ID NO: 261253 - RNA, 19 nt, Homo sapiens
  misc_RNA (1)...(19): siRNA sense strand
gaaucggaaugugguucug

SEQ ID NO: 261254 - RNA, 19 nt, Homo sapiens
  misc_RNA (1)...(19): siRNA sense strand
ccuaagaucguucguccau

SEQ ID NO: 261255 - RNA, 19 nt, Homo sapiens
  misc_RNA (1)...(19): siRNA sense strand
cgagaagacgaugcagaaa

SEQ ID NO: 261256 - RNA, 19 nt, Homo sapiens
  misc_RNA (1)...(19): siRNA sense strand
gcuggacuuugacgagaag

SEQ ID NO: 261257 - RNA, 19 nt, Homo sapiens
  misc_RNA (1)...(19): siRNA sense strand
cgcccuacauccuagucua

SEQ ID NO: 261258 - RNA, 19 nt, Homo sapiens
  misc_RNA (1)...(19): siRNA sense strand
acucggaaaugauccuuac

SEQ ID NO: 261259 - RNA, 19 nt, Homo sapiens
  misc_RNA (1)...(19): siRNA sense strand
gcuguguucccgauaagau

SEQ ID NO: 261260 - RNA, 19 nt, Homo sapiens
  misc_RNA (1)...(19): siRNA sense strand
ccacaugcacaggcucuau

SEQ ID NO: 261261 - RNA, 19 nt, Homo sapiens
  misc_RNA (1)...(19): siRNA sense strand
gaagggccaggagguguuc

SEQ ID NO: 261262 - RNA, 19 nt, Homo sapiens
  misc_RNA (1)...(19): siRNA sense strand
caugcaagacucggaaaug

SEQ ID NO: 261263 - RNA, 19 nt, Homo sapiens
  misc_RNA (1)...(19): siRNA sense strand
gacaagagcuacugaaauu

SEQ ID NO: 261264 - RNA, 19 nt, Homo sapiens
  misc_RNA (1)...(19): siRNA sense strand
ucaaagggcuggguuaaua

SEQ ID NO: 261265 - RNA, 19 nt, Homo sapiens
  misc_RNA (1)...(19): siRNA sense strand
acacugagguugcauauuu

SEQ ID NO: 261266 - RNA, 19 nt, Homo sapiens
  misc_RNA (1)...(19): siRNA sense strand
gaacaaagaaauacccuaa

SEQ ID NO: 261267 - RNA, 19 nt, Homo sapiens
  misc_RNA (1)...(19): siRNA sense strand
gaaaucaucucccagcaau

SEQ ID NO: 261268 - RNA, 19 nt, Homo sapiens
  misc_RNA (1)...(19): siRNA sense strand
gaaguuacgugcagaagga

SEQ ID NO: 261269 - RNA, 19 nt, Homo sapiens
  misc_RNA (1)...(19): siRNA sense strand
caaagcaccucagagaaua

SEQ ID NO: 261270 - RNA, 19 nt, Homo sapiens
  misc_RNA (1)...(19): siRNA sense strand
caaggaagauaucaucaaa

SEQ ID NO: 261271 - RNA, 19 nt, Homo sapiens
  misc_RNA (1)...(19): siRNA sense strand
gcucacagcggaauauuua

SEQ ID NO: 261272 - RNA, 19 nt, Homo sapiens
  misc_RNA (1)...(19): siRNA sense strand
gaagcuaucugcugagugu

SEQ ID NO: 261273 - RNA, 19 nt, Homo sapiens
  misc_RNA (1)...(19): siRNA sense strand
gaaaucacauuaccaaguc

SEQ ID NO: 261274 - RNA, 19 nt, Homo sapiens
  misc_RNA (1)...(19): siRNA sense strand
guggagagcauaccaauua

SEQ ID NO: 261275 - RNA, 19 nt, Homo sapiens
  misc_RNA (1)...(19): siRNA sense strand
agaagaaugugaugaauga

SEQ ID NO: 261276 - RNA, 19 nt, Homo sapiens
  misc_RNA (1)...(19): siRNA sense strand
gacagaggaugguuuguuu

SEQ ID NO: 261277 - RNA, 19 nt, Homo sapiens
  misc_RNA (1)...(19): siRNA sense strand
gaggaaggauuauuacaug

SEQ ID NO: 261278 - RNA, 19 nt, Homo sapiens
  misc_RNA (1)...(19): siRNA sense strand
ugacuaaucuggugguaaa

SEQ ID NO: 261279 - RNA, 19 nt, Homo sapiens
  misc_RNA (1)...(19): siRNA sense strand
gaaggauuauuacauguug

SEQ ID NO: 261280 - RNA, 19 nt, Homo sapiens
  misc_RNA (1)...(19): siRNA sense strand
uaaagacacuuaccaagga

SEQ ID NO: 261281 - RNA, 19 nt, Homo sapiens
  misc_RNA (1)...(19): siRNA sense strand
gaaguggccuggacuaaag

SEQ ID NO: 261282 - RNA, 19 nt, Homo sapiens
  misc_RNA (1)...(19): siRNA sense strand
ucaaaugccuuuacuagug

SEQ ID NO: 261283 - RNA, 19 nt, Homo sapiens
  misc_RNA (1)...(19): siRNA sense strand
gaggaugguuuguuuauca

SEQ ID NO: 261284 - RNA, 19 nt, Homo sapiens
  misc_RNA (1)...(19): siRNA sense strand
gaacaugaccgaauucaag

SEQ ID NO: 261285 - RNA, 19 nt, Homo sapiens
  misc_RNA (1)...(19): siRNA sense strand
guggaagcuuucuuaauua

SEQ ID NO: 261286 - RNA, 19 nt, Homo sapiens
  misc_RNA (1)...(19): siRNA sense strand
gaugaaaguugcaaagaca

SEQ ID NO: 261287 - RNA, 19 nt, Homo sapiens
  misc_RNA (1)...(19): siRNA sense strand
guacaaacaagaagcuaua

SEQ ID NO: 261288 - RNA, 19 nt, Homo sapiens
  misc_RNA (1)...(19): siRNA sense strand
gaaauuccauucugcuuac

SEQ ID NO: 261289 - RNA, 19 nt, Homo sapiens
  misc_RNA (1)...(19): siRNA sense strand
gaaaccacauauuaacuuc

SEQ ID NO: 261290 - RNA, 19 nt, Homo sapiens
  misc_RNA (1)...(19): siRNA sense strand
aguggaagcuuucuuaauu

SEQ ID NO: 261291 - RNA, 19 nt, Homo sapiens
  misc_RNA (1)...(19): siRNA sense strand
ggacuaaagaugaguuaaa

SEQ ID NO: 261292 - RNA, 19 nt, Homo sapiens
  misc_RNA (1)...(19): siRNA sense strand
gcaaagcaccucagagaau

SEQ ID NO: 261293 - RNA, 19 nt, Homo sapiens
  misc_RNA (1)...(19): siRNA sense strand
gagaauaggaaaucacauu

SEQ ID NO: 261294 - RNA, 19 nt, Homo sapiens
  misc_RNA (1)...(19): siRNA sense strand
ccagggaaauggauucuug

SEQ ID NO: 261295 - RNA, 19 nt, Homo sapiens
  misc_RNA (1)...(19): siRNA sense strand
gaaggcuugucucaacuuu

SEQ ID NO: 261296 - RNA, 19 nt, Homo sapiens
  misc_RNA (1)...(19): siRNA sense strand
gauaaacucagaccagaaa

SEQ ID NO: 261297 - RNA, 19 nt, Homo sapiens
  misc_RNA (1)...(19): siRNA sense strand
gaccgaggaaggauuauua

SEQ ID NO: 261298 - RNA, 19 nt, Homo sapiens
  misc_RNA (1)...(19): siRNA sense strand
caaaguacuucuuaugagu

SEQ ID NO: 261299 - RNA, 19 nt, Homo sapiens
  misc_RNA (1)...(19): siRNA sense strand
gaauuuagaccugacuuaa

SEQ ID NO: 261300 - RNA, 19 nt, Homo sapiens
  misc_RNA (1)...(19): siRNA sense strand
gaauacagccaguuucuca

SEQ ID NO: 261301 - RNA, 19 nt, Homo sapiens
  misc_RNA (1)...(19): siRNA sense strand
uaacauggccuauuuguac

SEQ ID NO: 261302 - RNA, 19 nt, Homo sapiens
  misc_RNA (1)...(19): siRNA sense strand
aaucaaauccuggucauua

SEQ ID NO: 261303 - RNA, 19 nt, Homo sapiens
  misc_RNA (1)...(19): siRNA sense strand
caagaaggcauugauguaa

SEQ ID NO: 261304 - RNA, 19 nt, Homo sapiens
  misc_RNA (1)...(19): siRNA sense strand
agaaggaccucaagaaugg

SEQ ID NO: 261305 - RNA, 19 nt, Homo sapiens
  misc_RNA (1)...(19): siRNA sense strand
gagcauaccaauuacuauu

SEQ ID NO: 261306 - RNA, 19 nt, Homo sapiens
  misc_RNA (1)...(19): siRNA sense strand
gccacaaccugaagugauu

SEQ ID NO: 261307 - RNA, 19 nt, Homo sapiens
  misc_RNA (1)...(19): siRNA sense strand
ugcgaucucuuaacaauuu

SEQ ID NO: 261308 - RNA, 19 nt, Homo sapiens
  misc_RNA (1)...(19): siRNA sense strand
ugaacacccuuuccaagaa

SEQ ID NO: 261309 - RNA, 19 nt, Homo sapiens
  misc_RNA (1)...(19): siRNA sense strand
gguaucaaaguacuucuua

SEQ ID NO: 261310 - RNA, 19 nt, Homo sapiens
  misc_RNA (1)...(19): siRNA sense strand
gagguugcauauuuaaaga

SEQ ID NO: 261311 - RNA, 19 nt, Homo sapiens
  misc_RNA (1)...(19): siRNA sense strand
uaagauugcaggaauauug

SEQ ID NO: 261312 - RNA, 19 nt, Homo sapiens
  misc_RNA (1)...(19): siRNA sense strand
gcaugaagguccuggaagu

SEQ ID NO: 261313 - RNA, 19 nt, Homo sapiens
  misc_RNA (1)...(19): siRNA sense strand
ccaagaaggcauugaugua

SEQ ID NO: 261314 - RNA, 19 nt, Homo sapiens
  misc_RNA (1)...(19): siRNA sense strand
ggccaaugguaucaaagua

SEQ ID NO: 261315 - RNA, 19 nt, Homo sapiens
  misc_RNA (1)...(19): siRNA sense strand
ggagaguucccaugucaaa

SEQ ID NO: 261316 - RNA, 19 nt, Homo sapiens
  misc_RNA (1)...(19): siRNA sense strand
gaacacccuuuccaagaag

SEQ ID NO: 261317 - RNA, 19 nt, Homo sapiens
  misc_RNA (1)...(19): siRNA sense strand
agacagguuugcacaguuu

SEQ ID NO: 261318 - RNA, 19 nt, Homo sapiens
  misc_RNA (1)...(19): siRNA sense strand
gagagcauaccaauuacua

SEQ ID NO: 261319 - RNA, 19 nt, Homo sapiens
  misc_RNA (1)...(19): siRNA sense strand
ggaaaucacauuaccaagu

SEQ ID NO: 261320 - RNA, 19 nt, Homo sapiens
  misc_RNA (1)...(19): siRNA sense strand
gcagaaggaccucaagaau

SEQ ID NO: 261321 - RNA, 19 nt, Homo sapiens
  misc_RNA (1)...(19): siRNA sense strand
gaagugauucagaacauga

SEQ ID NO: 261322 - RNA, 19 nt, Homo sapiens
  misc_RNA (1)...(19): siRNA sense strand
acaaagaaauacccuaaag

SEQ ID NO: 261323 - RNA, 19 nt, Homo sapiens
  misc_RNA (1)...(19): siRNA sense strand
gcaaaaugcugaccugaau

SEQ ID NO: 261324 - RNA, 19 nt, Homo sapiens
  misc_RNA (1)...(19): siRNA sense strand
ugaaauuccauucugcuua

SEQ ID NO: 261325 - RNA, 19 nt, Homo sapiens
  misc_RNA (1)...(19): siRNA sense strand
uauaugcgaucucuuaaca

SEQ ID NO: 261326 - RNA, 19 nt, Homo sapiens
  misc_RNA (1)...(19): siRNA sense strand
aaauauugcuggcuuaagu

SEQ ID NO: 261327 - RNA, 19 nt, Homo sapiens
  misc_RNA (1)...(19): siRNA sense strand
gaagcuuucuuaauuacca

SEQ ID NO: 261328 - RNA, 19 nt, Homo sapiens
  misc_RNA (1)...(19): siRNA sense strand
cagaguggaagcuuucuua

SEQ ID NO: 261329 - RNA, 19 nt, Homo sapiens
  misc_RNA (1)...(19): siRNA sense strand
ccaccucacuaccuagaaa

SEQ ID NO: 261330 - RNA, 19 nt, Homo sapiens
  misc_RNA (1)...(19): siRNA sense strand
ugaacaugcucauaccaaa

SEQ ID NO: 261331 - RNA, 19 nt, Homo sapiens
  misc_RNA (1)...(19): siRNA sense strand
gaagacacccucauugaac

SEQ ID NO: 261332 - RNA, 19 nt, Homo sapiens
  misc_RNA (1)...(19): siRNA sense strand
gaccugaaugggaaauuua

SEQ ID NO: 261333 - RNA, 19 nt, Homo sapiens
  misc_RNA (1)...(19): siRNA sense strand
cuuaauggcuguuuguguu

SEQ ID NO: 261334 - RNA, 19 nt, Homo sapiens
  misc_RNA (1)...(19): siRNA sense strand
caaagaaauacccuaaaga

SEQ ID NO: 261335 - RNA, 19 nt, Homo sapiens
  misc_RNA (1)...(19): siRNA sense strand
uaagguauccguccauguu

SEQ ID NO: 261336 - RNA, 19 nt, Homo sapiens
  misc_RNA (1)...(19): siRNA sense strand
uagaggacaugacagaaga

SEQ ID NO: 261337 - RNA, 19 nt, Homo sapiens
  misc_RNA (1)...(19): siRNA sense strand
ugucacggcugcacauuga

SEQ ID NO: 261338 - RNA, 19 nt, Homo sapiens
  misc_RNA (1)...(19): siRNA sense strand
gaaaauggcuaccuuugag

SEQ ID NO: 261339 - RNA, 19 nt, Homo sapiens
  misc_RNA (1)...(19): siRNA sense strand
ggacagguaacaaauauac

SEQ ID NO: 261340 - RNA, 19 nt, Homo sapiens
  misc_RNA (1)...(19): siRNA sense strand
ggaaggagcccgagguuuu

SEQ ID NO: 261341 - RNA, 19 nt, Homo sapiens
  misc_RNA (1)...(19): siRNA sense strand
aagaagcucuggaugaugu

SEQ ID NO: 261342 - RNA, 19 nt, Homo sapiens
  misc_RNA (1)...(19): siRNA sense strand
acuguaacauggccuauuu

SEQ ID NO: 261343 - RNA, 19 nt, Homo sapiens
  misc_RNA (1)...(19): siRNA sense strand
ggaaggauuauuacauguu

SEQ ID NO: 261344 - RNA, 19 nt, Homo sapiens
  misc_RNA (1)...(19): siRNA sense strand
agaccugacuuaauagaga

SEQ ID NO: 261345 - RNA, 19 nt, Homo sapiens
  misc_RNA (1)...(19): siRNA sense strand
ggcuagagcuggccaaugg

SEQ ID NO: 261346 - RNA, 19 nt, Homo sapiens
  misc_RNA (1)...(19): siRNA sense strand
cgagauauacuaccaaaca

SEQ ID NO: 261347 - RNA, 19 nt, Homo sapiens
  misc_RNA (1)...(19): siRNA sense strand
ccuggagacucuuucaauu

SEQ ID NO: 261348 - RNA, 19 nt, Homo sapiens
  misc_RNA (1)...(19): siRNA sense strand
ugaccugaaugggaaauuu

SEQ ID NO: 261349 - RNA, 19 nt, Homo sapiens
  misc_RNA (1)...(19): siRNA sense strand
gagaagaaugugaugaaug

SEQ ID NO: 261350 - RNA, 19 nt, Homo sapiens
  misc_RNA (1)...(19): siRNA sense strand
aaacugaucgcacagaaga

SEQ ID NO: 261351 - RNA, 19 nt, Homo sapiens
  misc_RNA (1)...(19): siRNA sense strand
gagacucuuucaauuggaa

SEQ ID NO: 261352 - RNA, 19 nt, Homo sapiens
  misc_RNA (1)...(19): siRNA sense strand
ucaaaguacuucuuaugag

SEQ ID NO: 261353 - RNA, 19 nt, Homo sapiens
  misc_RNA (1)...(19): siRNA sense strand
aaagccaccucacuaccua

SEQ ID NO: 261354 - RNA, 19 nt, Homo sapiens
  misc_RNA (1)...(19): siRNA sense strand
gaauuaugcagaugguuga

SEQ ID NO: 261355 - RNA, 19 nt, Homo sapiens
  misc_RNA (1)...(19): siRNA sense strand
aauauacucuggagacuag

SEQ ID NO: 261356 - RNA, 19 nt, Homo sapiens
  misc_RNA (1)...(19): siRNA sense strand
cacugagguugcauauuua

SEQ ID NO: 261357 - RNA, 19 nt, Homo sapiens
  misc_RNA (1)...(19): siRNA sense strand
caggcugcauuaggaauua

SEQ ID NO: 261358 - RNA, 19 nt, Homo sapiens
  misc_RNA (1)...(19): siRNA sense strand
uaugcgaucucuuaacaau

SEQ ID NO: 261359 - RNA, 19 nt, Homo sapiens
  misc_RNA (1)...(19): siRNA sense strand
acagaagagugguauggaa

SEQ ID NO: 261360 - RNA, 19 nt, Homo sapiens
  misc_RNA (1)...(19): siRNA sense strand
cuacugaaauuccauucug

SEQ ID NO: 261361 - RNA, 19 nt, Homo sapiens
  misc_RNA (1)...(19): siRNA sense strand
agaaggcauugauguaaga

SEQ ID NO: 261362 - RNA, 19 nt, Homo sapiens
  misc_RNA (1)...(19): siRNA sense strand
gcaccagccuugccacaac

SEQ ID NO: 261363 - RNA, 19 nt, Homo sapiens
  misc_RNA (1)...(19): siRNA sense strand
cagaguaccugaacuauga

SEQ ID NO: 261364 - RNA, 19 nt, Homo sapiens
  misc_RNA (1)...(19): siRNA sense strand
gaagggcugucaccaauga

SEQ ID NO: 261365 - RNA, 19 nt, Homo sapiens
  misc_RNA (1)...(19): siRNA sense strand
ggacggaccugcugcugaa

SEQ ID NO: 261366 - RNA, 19 nt, Homo sapiens
  misc_RNA (1)...(19): siRNA sense strand
gaugggaaauucucuaaga

SEQ ID NO: 261367 - RNA, 19 nt, Homo sapiens
  misc_RNA (1)...(19): siRNA sense strand
gcgaaacucuuggaucuaa

SEQ ID NO: 261368 - RNA, 19 nt, Homo sapiens
  misc_RNA (1)...(19): siRNA sense strand
uuaagaagccucaguguaa

SEQ ID NO: 261369 - RNA, 19 nt, Homo sapiens
  misc_RNA (1)...(19): siRNA sense strand
gguauucuaugucugguuu

SEQ ID NO: 261370 - RNA, 19 nt, Homo sapiens
  misc_RNA (1)...(19): siRNA sense strand
gggaagggcugucaccaau

SEQ ID NO: 261371 - RNA, 19 nt, Homo sapiens
  misc_RNA (1)...(19): siRNA sense strand
uacaagcgcugauggauga

SEQ ID NO: 261372 - RNA, 19 nt, Homo sapiens
  misc_RNA (1)...(19): siRNA sense strand
cgacauggcaaccaauaua

SEQ ID NO: 261373 - RNA, 19 nt, Homo sapiens
  misc_RNA (1)...(19): siRNA sense strand
gagaagggccuagaaaguu

SEQ ID NO: 261374 - RNA, 19 nt, Homo sapiens
  misc_RNA (1)...(19): siRNA sense strand
gguuuaacauuucguuuga

SEQ ID NO: 261375 - RNA, 19 nt, Homo sapiens
  misc_RNA (1)...(19): siRNA sense strand
agaagggccuagaaaguuu

SEQ ID NO: 261376 - RNA, 19 nt, Homo sapiens
  misc_RNA (1)...(19): siRNA sense strand
uaagaagccucaguguaaa

SEQ ID NO: 261377 - RNA, 19 nt, Homo sapiens
  misc_RNA (1)...(19): siRNA sense strand
gcucagugccgaugucuuu

SEQ ID NO: 261378 - RNA, 19 nt, Homo sapiens
  misc_RNA (1)...(19): siRNA sense strand
ggagagcccugacucacau

SEQ ID NO: 261379 - RNA, 19 nt, Homo sapiens
  misc_RNA (1)...(19): siRNA sense strand
ucaaugcugucgagcuuaa

SEQ ID NO: 261380 - RNA, 19 nt, Homo sapiens
  misc_RNA (1)...(19): siRNA sense strand
cugcugcccuguacuauuu

SEQ ID NO: 261381 - RNA, 19 nt, Homo sapiens
  misc_RNA (1)...(19): siRNA sense strand
ugaccagauugaaaguuua

SEQ ID NO: 261382 - RNA, 19 nt, Homo sapiens
  misc_RNA (1)...(19): siRNA sense strand
gaaaggaaugugcucauca

SEQ ID NO: 261383 - RNA, 19 nt, Homo sapiens
  misc_RNA (1)...(19): siRNA sense strand
gaaaaugaccagauugaaa

SEQ ID NO: 261384 - RNA, 19 nt, Homo sapiens
  misc_RNA (1)...(19): siRNA sense strand
caucaaugcugucgagcuu

SEQ ID NO: 261385 - RNA, 19 nt, Homo sapiens
  misc_RNA (1)...(19): siRNA sense strand
ggagaagggccuagaaagu

SEQ ID NO: 261386 - RNA, 19 nt, Homo sapiens
  misc_RNA (1)...(19): siRNA sense strand
gcugauggaugaagugaca

SEQ ID NO: 261387 - RNA, 19 nt, Homo sapiens
  misc_RNA (1)...(19): siRNA sense strand
gcaguauccucaccauauc

SEQ ID NO: 261388 - RNA, 19 nt, Homo sapiens
  misc_RNA (1)...(19): siRNA sense strand
gaacuaugaggaugggaaa

SEQ ID NO: 261389 - RNA, 19 nt, Homo sapiens
  misc_RNA (1)...(19): siRNA sense strand
ggauguuugugucuaaguu

SEQ ID NO: 261390 - RNA, 19 nt, Homo sapiens
  misc_RNA (1)...(19): siRNA sense strand
ggagcuggcuacccuaucu

SEQ ID NO: 261391 - RNA, 19 nt, Homo sapiens
  misc_RNA (1)...(19): siRNA sense strand
ugacaaacuuccuguguac

SEQ ID NO: 261392 - RNA, 19 nt, Homo sapiens
  misc_RNA (1)...(19): siRNA sense strand
cgggaugccuugcgcagua

SEQ ID NO: 261393 - RNA, 19 nt, Homo sapiens
  misc_RNA (1)...(19): siRNA sense strand
gagcugaggauaacuauac

SEQ ID NO: 261394 - RNA, 19 nt, Homo sapiens
  misc_RNA (1)...(19): siRNA sense strand
gaagacaagguauucuaug

SEQ ID NO: 261395 - RNA, 19 nt, Homo sapiens
  misc_RNA (1)...(19): siRNA sense strand
ggagcaagaugaccucacu

SEQ ID NO: 261396 - RNA, 19 nt, Homo sapiens
  misc_RNA (1)...(19): siRNA sense strand
auucugagcugcuuaacaa

SEQ ID NO: 261397 - RNA, 19 nt, Homo sapiens
  misc_RNA (1)...(19): siRNA sense strand
ggaagaacccagagcaagu

SEQ ID NO: 261398 - RNA, 19 nt, Homo sapiens
  misc_RNA (1)...(19): siRNA sense strand
gcaagauacuguggagcaa

SEQ ID NO: 261399 - RNA, 19 nt, Homo sapiens
  misc_RNA (1)...(19): siRNA sense strand
gaccugcugcugaagaaua

SEQ ID NO: 261400 - RNA, 19 nt, Homo sapiens
  misc_RNA (1)...(19): siRNA sense strand
ggagauugcuauggcuguu

SEQ ID NO: 261401 - RNA, 19 nt, Homo sapiens
  misc_RNA (1)...(19): siRNA sense strand
cuacagaguaccugaacua

SEQ ID NO: 261402 - RNA, 19 nt, Homo sapiens
  misc_RNA (1)...(19): siRNA sense strand
gacaauguuccuuuccaua

SEQ ID NO: 261403 - RNA, 19 nt, Homo sapiens
  misc_RNA (1)...(19): siRNA sense strand
ugggagagaugguggaaga

SEQ ID NO: 261404 - RNA, 19 nt, Homo sapiens
  misc_RNA (1)...(19): siRNA sense strand
caucauccaugcugacauc

SEQ ID NO: 261405 - RNA, 19 nt, Homo sapiens
  misc_RNA (1)...(19): siRNA sense strand
ggagguggcgaaacucuug

SEQ ID NO: 261406 - RNA, 19 nt, Homo sapiens
  misc_RNA (1)...(19): siRNA sense strand
ggaccuguaucaguucaug

SEQ ID NO: 261407 - RNA, 19 nt, Homo sapiens
  misc_RNA (1)...(19): siRNA sense strand
cagagcaaguggaccugua

SEQ ID NO: 261408 - RNA, 19 nt, Homo sapiens
  misc_RNA (1)...(19): siRNA sense strand
ugacaucuaccgcugguuu

SEQ ID NO: 261409 - RNA, 19 nt, Homo sapiens
  misc_RNA (1)...(19): siRNA sense strand
gaccagauugaaaguuuaa

SEQ ID NO: 261410 - RNA, 19 nt, Homo sapiens
  misc_RNA (1)...(19): siRNA sense strand
cugacaaacuuccugugua

SEQ ID NO: 261411 - RNA, 19 nt, Homo sapiens
  misc_RNA (1)...(19): siRNA sense strand
gaagaacccagagcaagug

SEQ ID NO: 261412 - RNA, 19 nt, Homo sapiens
  misc_RNA (1)...(19): siRNA sense strand
gggaaccccuguacccuua

SEQ ID NO: 261413 - RNA, 19 nt, Homo sapiens
  misc_RNA (1)...(19): siRNA sense strand
gucagucccuuguuccaaa

SEQ ID NO: 261414 - RNA, 19 nt, Homo sapiens
  misc_RNA (1)...(19): siRNA sense strand
aagacaagguauucuaugu

SEQ ID NO: 261415 - RNA, 19 nt, Homo sapiens
  misc_RNA (1)...(19): siRNA sense strand
ugcagagacuguacugaaa

SEQ ID NO: 261416 - RNA, 19 nt, Homo sapiens
  misc_RNA (1)...(19): siRNA sense strand
ggccuaaggucccugucuu

SEQ ID NO: 261417 - RNA, 19 nt, Homo sapiens
  misc_RNA (1)...(19): siRNA sense strand
aagaugaccucacuaacca

SEQ ID NO: 261418 - RNA, 19 nt, Homo sapiens
  misc_RNA (1)...(19): siRNA sense strand
ccagcagaauccaguguug

SEQ ID NO: 261419 - RNA, 19 nt, Homo sapiens
  misc_RNA (1)...(19): siRNA sense strand
gggcgugugucccuucugu

SEQ ID NO: 261420 - RNA, 19 nt, Homo sapiens
  misc_RNA (1)...(19): siRNA sense strand
gacacccaaugcccaguuu

SEQ ID NO: 261421 - RNA, 19 nt, Homo sapiens
  misc_RNA (1)...(19): siRNA sense strand
guggcaagcucaucaaugc

SEQ ID NO: 261422 - RNA, 19 nt, Homo sapiens
  misc_RNA (1)...(19): siRNA sense strand
caggagaucugcgacaagu

SEQ ID NO: 261423 - RNA, 19 nt, Homo sapiens
  misc_RNA (1)...(19): siRNA sense strand
uggcgaaacucuuggaucu

SEQ ID NO: 261424 - RNA, 19 nt, Homo sapiens
  misc_RNA (1)...(19): siRNA sense strand
gaagccagcaguuguagag

SEQ ID NO: 261425 - RNA, 19 nt, Homo sapiens
  misc_RNA (1)...(19): siRNA sense strand
guucauggccaaagacaau

SEQ ID NO: 261426 - RNA, 19 nt, Homo sapiens
  misc_RNA (1)...(19): siRNA sense strand
ggagaucugcgacaaguac

SEQ ID NO: 261427 - RNA, 19 nt, Homo sapiens
  misc_RNA (1)...(19): siRNA sense strand
cgaaacucuuggaucuaaa

SEQ ID NO: 261428 - RNA, 19 nt, Homo sapiens
  misc_RNA (1)...(19): siRNA sense strand
aaacuuccuguguaccuua

SEQ ID NO: 261429 - RNA, 19 nt, Homo sapiens
  misc_RNA (1)...(19): siRNA sense strand
caacgggcaggaacaguga

SEQ ID NO: 261430 - RNA, 19 nt, Homo sapiens
  misc_RNA (1)...(19): siRNA sense strand
ccagcacuaucaccagcua

SEQ ID NO: 261431 - RNA, 19 nt, Homo sapiens
  misc_RNA (1)...(19): siRNA sense strand
gcugacaucuggcgcuucu

SEQ ID NO: 261432 - RNA, 19 nt, Homo sapiens
  misc_RNA (1)...(19): siRNA sense strand
aaguggaccuguaucaguu

SEQ ID NO: 261433 - RNA, 19 nt, Homo sapiens
  misc_RNA (1)...(19): siRNA sense strand
cgucagaacuguccuuucc

SEQ ID NO: 261434 - RNA, 19 nt, Homo sapiens
  misc_RNA (1)...(19): siRNA sense strand
gacauggcaaccaauauau

SEQ ID NO: 261435 - RNA, 19 nt, Homo sapiens
  misc_RNA (1)...(19): siRNA sense strand
gcugggauguuugugucua

SEQ ID NO: 261436 - RNA, 19 nt, Homo sapiens
  misc_RNA (1)...(19): siRNA sense strand
gcuucuaucugcuguacau

SEQ ID NO: 261437 - RNA, 19 nt, Homo sapiens
  misc_RNA (1)...(19): siRNA sense strand
caaguggaccuguaucagu

SEQ ID NO: 261438 - RNA, 19 nt, Homo sapiens
  misc_RNA (1)...(19): siRNA sense strand
gacaucuaccgcugguuua

SEQ ID NO: 261439 - RNA, 19 nt, Homo sapiens
  misc_RNA (1)...(19): siRNA sense strand
cgacaaguaccacaucauc

SEQ ID NO: 261440 - RNA, 19 nt, Homo sapiens
  misc_RNA (1)...(19): siRNA sense strand
cagaaucucuagccgacau

SEQ ID NO: 261441 - RNA, 19 nt, Homo sapiens
  misc_RNA (1)...(19): siRNA sense strand
cagagacuguacugaaaca

SEQ ID NO: 261442 - RNA, 19 nt, Homo sapiens
  misc_RNA (1)...(19): siRNA sense strand
uuaacaaccugggcaacuu

SEQ ID NO: 261443 - RNA, 19 nt, Homo sapiens
  misc_RNA (1)...(19): siRNA sense strand
caucacagccaacuacaca

SEQ ID NO: 261444 - RNA, 19 nt, Homo sapiens
  misc_RNA (1)...(19): siRNA sense strand
ucccuuacgucaacaaugu

SEQ ID NO: 261445 - RNA, 19 nt, Homo sapiens
  misc_RNA (1)...(19): siRNA sense strand
gagauugcuauggcuguua

SEQ ID NO: 261446 - RNA, 19 nt, Homo sapiens
  misc_RNA (1)...(19): siRNA sense strand
agugcaaucugccgauauu

SEQ ID NO: 261447 - RNA, 19 nt, Homo sapiens
  misc_RNA (1)...(19): siRNA sense strand
gcagauacaagcgcugaug

SEQ ID NO: 261448 - RNA, 19 nt, Homo sapiens
  misc_RNA (1)...(19): siRNA sense strand
gcacagucagucccuuguu

SEQ ID NO: 261449 - RNA, 19 nt, Homo sapiens
  misc_RNA (1)...(19): siRNA sense strand
ugaccagugugacaagugu

SEQ ID NO: 261450 - RNA, 19 nt, Homo sapiens
  misc_RNA (1)...(19): siRNA sense strand
ggaacaucauugguugugu

SEQ ID NO: 261451 - RNA, 19 nt, Homo sapiens
  misc_RNA (1)...(19): siRNA sense strand
gaaacucuuggaucuaaag

SEQ ID NO: 261452 - RNA, 19 nt, Homo sapiens
  misc_RNA (1)...(19): siRNA sense strand
augaccagauugaaaguuu

SEQ ID NO: 261453 - RNA, 19 nt, Homo sapiens
  misc_RNA (1)...(19): siRNA sense strand
caaacuuccuguguaccuu

SEQ ID NO: 261454 - RNA, 19 nt, Homo sapiens
  misc_RNA (1)...(19): siRNA sense strand
ggacacccaaugcccaguu

SEQ ID NO: 261455 - RNA, 19 nt, Homo sapiens
  misc_RNA (1)...(19): siRNA sense strand
uguaaagucugccgaucau

SEQ ID NO: 261456 - RNA, 19 nt, Homo sapiens
  misc_RNA (1)...(19): siRNA sense strand
uaccgcugguuuaacauuu

SEQ ID NO: 261457 - RNA, 19 nt, Homo sapiens
  misc_RNA (1)...(19): siRNA sense strand
gaagggccuagaaaguuug

SEQ ID NO: 261458 - RNA, 19 nt, Homo sapiens
  misc_RNA (1)...(19): siRNA sense strand
ccucauugcuacagaguac

SEQ ID NO: 261459 - RNA, 19 nt, Homo sapiens
  misc_RNA (1)...(19): siRNA sense strand
cuagugcaaucugccgaua

SEQ ID NO: 261460 - RNA, 19 nt, Homo sapiens
  misc_RNA (1)...(19): siRNA sense strand
ugaagacaagguauucuau

SEQ ID NO: 261461 - RNA, 19 nt, Homo sapiens
  misc_RNA (1)...(19): siRNA sense strand
ccucaagccacgcugcaua

SEQ ID NO: 261462 - RNA, 19 nt, Homo sapiens
  misc_RNA (1)...(19): siRNA sense strand
cauccaugcugacaucuac

SEQ ID NO: 261463 - RNA, 19 nt, Homo sapiens
  misc_RNA (1)...(19): siRNA sense strand
gaacaaauacuggaaauuc

SEQ ID NO: 261464 - RNA, 19 nt, Homo sapiens
  misc_RNA (1)...(19): siRNA sense strand
gaauggaaaugacaucuuc

SEQ ID NO: 261465 - RNA, 19 nt, Homo sapiens
  misc_RNA (1)...(19): siRNA sense strand
gaggaaggauggcaaauuc

SEQ ID NO: 261466 - RNA, 19 nt, Homo sapiens
  misc_RNA (1)...(19): siRNA sense strand
ggucucaaauggcaacaua

SEQ ID NO: 261467 - RNA, 19 nt, Homo sapiens
  misc_RNA (1)...(19): siRNA sense strand
gcaaauucgucuucuucaa

SEQ ID NO: 261468 - RNA, 19 nt, Homo sapiens
  misc_RNA (1)...(19): siRNA sense strand
ggauggacacggagaauuu

SEQ ID NO: 261469 - RNA, 19 nt, Homo sapiens
  misc_RNA (1)...(19): siRNA sense strand
ucaaauggcaacauaauga

SEQ ID NO: 261470 - RNA, 19 nt, Homo sapiens
  misc_RNA (1)...(19): siRNA sense strand
caaauucgucuucuucaaa

SEQ ID NO: 261471 - RNA, 19 nt, Homo sapiens
  misc_RNA (1)...(19): siRNA sense strand
ggaaugaggaucugaaugg

SEQ ID NO: 261472 - RNA, 19 nt, Homo sapiens
  misc_RNA (1)...(19): siRNA sense strand
ggccuucuguuccugauaa

SEQ ID NO: 261473 - RNA, 19 nt, Homo sapiens
  misc_RNA (1)...(19): siRNA sense strand
gaagcaggccgacaucaug

SEQ ID NO: 261474 - RNA, 19 nt, Homo sapiens
  misc_RNA (1)...(19): siRNA sense strand
gaggagacacccacuuuga

SEQ ID NO: 261475 - RNA, 19 nt, Homo sapiens
  misc_RNA (1)...(19): siRNA sense strand
ggagauguuugucuucaag

SEQ ID NO: 261476 - RNA, 19 nt, Homo sapiens
  misc_RNA (1)...(19): siRNA sense strand
gaaugaggaucugaaugga

SEQ ID NO: 261477 - RNA, 19 nt, Homo sapiens
  misc_RNA (1)...(19): siRNA sense strand
gggaacaaauacuggaaau

SEQ ID NO: 261478 - RNA, 19 nt, Homo sapiens
  misc_RNA (1)...(19): siRNA sense strand
agacaagcauuggguguuu

SEQ ID NO: 261479 - RNA, 19 nt, Homo sapiens
  misc_RNA (1)...(19): siRNA sense strand
ggaauaaccaagugaugga

SEQ ID NO: 261480 - RNA, 19 nt, Homo sapiens
  misc_RNA (1)...(19): siRNA sense strand
gauugaugcugcucucuuc

SEQ ID NO: 261481 - RNA, 19 nt, Homo sapiens
  misc_RNA (1)...(19): siRNA sense strand
gaugugguguuccagacaa

SEQ ID NO: 261482 - RNA, 19 nt, Homo sapiens
  misc_RNA (1)...(19): siRNA sense strand
ggaccuacguacccacaca

SEQ ID NO: 261483 - RNA, 19 nt, Homo sapiens
  misc_RNA (1)...(19): siRNA sense strand
gaucaaggccaauguucga

SEQ ID NO: 261484 - RNA, 19 nt, Homo sapiens
  misc_RNA (1)...(19): siRNA sense strand
ggaaauucaacaaccagaa

SEQ ID NO: 261485 - RNA, 19 nt, Homo sapiens
  misc_RNA (1)...(19): siRNA sense strand
gaaauucaacaaccagaag

SEQ ID NO: 261486 - RNA, 19 nt, Homo sapiens
  misc_RNA (1)...(19): siRNA sense strand
caaauggcaacauaaugaa

SEQ ID NO: 261487 - RNA, 19 nt, Homo sapiens
  misc_RNA (1)...(19): siRNA sense strand
gcaaguaacaggcaaagcu

SEQ ID NO: 261488 - RNA, 19 nt, Homo sapiens
  misc_RNA (1)...(19): siRNA sense strand
ggugaggaauaaccaagug

SEQ ID NO: 261489 - RNA, 19 nt, Homo sapiens
  misc_RNA (1)...(19): siRNA sense strand
augaggaucugaauggaaa

SEQ ID NO: 261490 - RNA, 19 nt, Homo sapiens
  misc_RNA (1)...(19): siRNA sense strand
ggaacaaauacuggaaauu

SEQ ID NO: 261491 - RNA, 19 nt, Homo sapiens
  misc_RNA (1)...(19): siRNA sense strand
ggaggagacacccacuuug

SEQ ID NO: 261492 - RNA, 19 nt, Homo sapiens
  misc_RNA (1)...(19): siRNA sense strand
cauccagggucucaaaugg

SEQ ID NO: 261493 - RNA, 19 nt, Homo sapiens
  misc_RNA (1)...(19): siRNA sense strand
accagaagcugaagguaga

SEQ ID NO: 261494 - RNA, 19 nt, Homo sapiens
  misc_RNA (1)...(19): siRNA sense strand
ucaaaggagacaagcauug

SEQ ID NO: 261495 - RNA, 19 nt, Homo sapiens
  misc_RNA (1)...(19): siRNA sense strand
gcaacauaaugaaaucacu

SEQ ID NO: 261496 - RNA, 19 nt, Homo sapiens
  misc_RNA (1)...(19): siRNA sense strand
cgacaucaugaucuucuuu

SEQ ID NO: 261497 - RNA, 19 nt, Homo sapiens
  misc_RNA (1)...(19): siRNA sense strand
gggagauguuugucuucaa

SEQ ID NO: 261498 - RNA, 19 nt, Homo sapiens
  misc_RNA (1)...(19): siRNA sense strand
gggcauccagcaacuuuau

SEQ ID NO: 261499 - RNA, 19 nt, Homo sapiens
  misc_RNA (1)...(19): siRNA sense strand
gacaagcauuggguguuug

SEQ ID NO: 261500 - RNA, 19 nt, Homo sapiens
  misc_RNA (1)...(19): siRNA sense strand
agcauuggguguuugauga

SEQ ID NO: 261501 - RNA, 19 nt, Homo sapiens
  misc_RNA (1)...(19): siRNA sense strand
gagaucaaggccaauguuc

SEQ ID NO: 261502 - RNA, 19 nt, Homo sapiens
  misc_RNA (1)...(19): siRNA sense strand
gagcucagggcaguggaua

SEQ ID NO: 261503 - RNA, 19 nt, Homo sapiens
  misc_RNA (1)...(19): siRNA sense strand
accaagugauggauggaua

SEQ ID NO: 261504 - RNA, 19 nt, Homo sapiens
  misc_RNA (1)...(19): siRNA sense strand
gaucugaauggaaaugaca

SEQ ID NO: 261505 - RNA, 19 nt, Homo sapiens
  misc_RNA (1)...(19): siRNA sense strand
ccaggcgacugcucuacug

SEQ ID NO: 261506 - RNA, 19 nt, Homo sapiens
  misc_RNA (1)...(19): siRNA sense strand
aaauucgucuucuucaaag

SEQ ID NO: 261507 - RNA, 19 nt, Homo sapiens
  misc_RNA (1)...(19): siRNA sense strand
gaggaauaaccaagugaug

SEQ ID NO: 261508 - RNA, 19 nt, Homo sapiens
  misc_RNA (1)...(19): siRNA sense strand
gagacaagcauuggguguu

SEQ ID NO: 261509 - RNA, 19 nt, Homo sapiens
  misc_RNA (1)...(19): siRNA sense strand
agucuucacuuacuucuac

SEQ ID NO: 261510 - RNA, 19 nt, Homo sapiens
  misc_RNA (1)...(19): siRNA sense strand
uggaggagacacccacuuu

SEQ ID NO: 261511 - RNA, 19 nt, Homo sapiens
  misc_RNA (1)...(19): siRNA sense strand
ggagacacccacuuugacu

SEQ ID NO: 261512 - RNA, 19 nt, Homo sapiens
  misc_RNA (1)...(19): siRNA sense strand
ggaaggauggcaaauucgu

SEQ ID NO: 261513 - RNA, 19 nt, Homo sapiens
  misc_RNA (1)...(19): siRNA sense strand
gaaccgggcuaccccaagu

SEQ ID NO: 261514 - RNA, 19 nt, Homo sapiens
  misc_RNA (1)...(19): siRNA sense strand
ccaauggaaagaccuacuu

SEQ ID NO: 261515 - RNA, 19 nt, Homo sapiens
  misc_RNA (1)...(19): siRNA sense strand
caaaggagacaagcauugg

SEQ ID NO: 261516 - RNA, 19 nt, Homo sapiens
  misc_RNA (1)...(19): siRNA sense strand
gacaucaugaucuucuuug

SEQ ID NO: 261517 - RNA, 19 nt, Homo sapiens
  misc_RNA (1)...(19): siRNA sense strand
ucaacaaccagaagcugaa

SEQ ID NO: 261518 - RNA, 19 nt, Homo sapiens
  misc_RNA (1)...(19): siRNA sense strand
cgacagcacgcccuucgau

SEQ ID NO: 261519 - RNA, 19 nt, Homo sapiens
  misc_RNA (1)...(19): siRNA sense strand
gaggggagauguuugucuu

SEQ ID NO: 261520 - RNA, 19 nt, Homo sapiens
  misc_RNA (1)...(19): siRNA sense strand
cgagaggaaggauggcaaa

SEQ ID NO: 261521 - RNA, 19 nt, Homo sapiens
  misc_RNA (1)...(19): siRNA sense strand
ggugggccuugcagucuuc

SEQ ID NO: 261522 - RNA, 19 nt, Homo sapiens
  misc_RNA (1)...(19): siRNA sense strand
agaggaaggauggcaaauu

SEQ ID NO: 261523 - RNA, 19 nt, Homo sapiens
  misc_RNA (1)...(19): siRNA sense strand
ucucaaauggcaacauaau

SEQ ID NO: 261524 - RNA, 19 nt, Homo sapiens
  misc_RNA (1)...(19): siRNA sense strand
ggcaguggauagcgaguac

SEQ ID NO: 261525 - RNA, 19 nt, Homo sapiens
  misc_RNA (1)...(19): siRNA sense strand
ucuggcgggugaggaauaa

SEQ ID NO: 261526 - RNA, 19 nt, Homo sapiens
  misc_RNA (1)...(19): siRNA sense strand
ggauggcaaauucgucuuc

SEQ ID NO: 261527 - RNA, 19 nt, Homo sapiens
  misc_RNA (1)...(19): siRNA sense strand
gccgagccuuggacuguca

SEQ ID NO: 261528 - RNA, 19 nt, Homo sapiens
  misc_RNA (1)...(19): siRNA sense strand
caaccagaagcugaaggua

SEQ ID NO: 261529 - RNA, 19 nt, Homo sapiens
  misc_RNA (1)...(19): siRNA sense strand
aacaaguacuaccguuuca

SEQ ID NO: 261530 - RNA, 19 nt, Homo sapiens
  misc_RNA (1)...(19): siRNA sense strand
uggcaaauucgucuucuuc

SEQ ID NO: 261531 - RNA, 19 nt, Homo sapiens
  misc_RNA (1)...(19): siRNA sense strand
ugagaucaaggccaauguu

SEQ ID NO: 261532 - RNA, 19 nt, Homo sapiens
  misc_RNA (1)...(19): siRNA sense strand
gccuuggacugucaggaau

SEQ ID NO: 261533 - RNA, 19 nt, Homo sapiens
  misc_RNA (1)...(19): siRNA sense strand
caaguacuaccguuucaac

SEQ ID NO: 261534 - RNA, 19 nt, Homo sapiens
  misc_RNA (1)...(19): siRNA sense strand
gauggcaaauucgucuucu

SEQ ID NO: 261535 - RNA, 19 nt, Homo sapiens
  misc_RNA (1)...(19): siRNA sense strand
gaauaaccaagugauggau

SEQ ID NO: 261536 - RNA, 19 nt, Homo sapiens
  misc_RNA (1)...(19): siRNA sense strand
caucugugacgggaacuuu

SEQ ID NO: 261537 - RNA, 19 nt, Homo sapiens
  misc_RNA (1)...(19): siRNA sense strand
ggaucugaauggaaaugac

SEQ ID NO: 261538 - RNA, 19 nt, Homo sapiens
  misc_RNA (1)...(19): siRNA sense strand
caauggaaagaccuacuuc

SEQ ID NO: 261539 - RNA, 19 nt, Homo sapiens
  misc_RNA (1)...(19): siRNA sense strand
gauggauggauacccaaug

SEQ ID NO: 261540 - RNA, 19 nt, Homo sapiens
  misc_RNA (1)...(19): siRNA sense strand
gcauccagcaacuuuaugg

SEQ ID NO: 261541 - RNA, 19 nt, Homo sapiens
  misc_RNA (1)...(19): siRNA sense strand
ugaauggaaaugacaucuu

SEQ ID NO: 261542 - RNA, 19 nt, Homo sapiens
  misc_RNA (1)...(19): siRNA sense strand
gagaagcaggccgacauca

SEQ ID NO: 261543 - RNA, 19 nt, Homo sapiens
  misc_RNA (1)...(19): siRNA sense strand
gggcaguggauagcgagua

SEQ ID NO: 261544 - RNA, 19 nt, Homo sapiens
  misc_RNA (1)...(19): siRNA sense strand
gcugaugcagacaccauga

SEQ ID NO: 261545 - RNA, 19 nt, Homo sapiens
  misc_RNA (1)...(19): siRNA sense strand
ccacauacgaggccauucg

SEQ ID NO: 261546 - RNA, 19 nt, Homo sapiens
  misc_RNA (1)...(19): siRNA sense strand
aagcaggccgacaucauga

SEQ ID NO: 261547 - RNA, 19 nt, Homo sapiens
  misc_RNA (1)...(19): siRNA sense strand
cccaagaacaucaaagucu

SEQ ID NO: 261548 - RNA, 19 nt, Homo sapiens
  misc_RNA (1)...(19): siRNA sense strand
agauguuugucuucaagga

SEQ ID NO: 261549 - RNA, 19 nt, Homo sapiens
  misc_RNA (1)...(19): siRNA sense strand
gcaggccgacaucaugauc

SEQ ID NO: 261550 - RNA, 19 nt, Homo sapiens
  misc_RNA (1)...(19): siRNA sense strand
caagugaacucaacaaaga

SEQ ID NO: 261551 - RNA, 19 nt, Homo sapiens
  misc_RNA (1)...(19): siRNA sense strand
gcaaggaggugguuucuuc

SEQ ID NO: 261552 - RNA, 19 nt, Homo sapiens
  misc_RNA (1)...(19): siRNA sense strand
gcaagcaucuuuacuagga

SEQ ID NO: 261553 - RNA, 19 nt, Homo sapiens
  misc_RNA (1)...(19): siRNA sense strand
gagcaaggcuaaagagcua

SEQ ID NO: 261554 - RNA, 19 nt, Homo sapiens
  misc_RNA (1)...(19): siRNA sense strand
caaauucucuucugauuca

SEQ ID NO: 261555 - RNA, 19 nt, Homo sapiens
  misc_RNA (1)...(19): siRNA sense strand
gagagcaacuucauguaaa

SEQ ID NO: 261556 - RNA, 19 nt, Homo sapiens
  misc_RNA (1)...(19): siRNA sense strand
gaaauuuacuccgcugauu

SEQ ID NO: 261557 - RNA, 19 nt, Homo sapiens
  misc_RNA (1)...(19): siRNA sense strand
gagaauguccugugucaaa

SEQ ID NO: 261558 - RNA, 19 nt, Homo sapiens
  misc_RNA (1)...(19): siRNA sense strand
uggcagauccuauaaauaa

SEQ ID NO: 261559 - RNA, 19 nt, Homo sapiens
  misc_RNA (1)...(19): siRNA sense strand
caagaagccucccuaaugg

SEQ ID NO: 261560 - RNA, 19 nt, Homo sapiens
  misc_RNA (1)...(19): siRNA sense strand
ggagagcaacuucauguaa

SEQ ID NO: 261561 - RNA, 19 nt, Homo sapiens
  misc_RNA (1)...(19): siRNA sense strand
gaucacagcugccuucacu

SEQ ID NO: 261562 - RNA, 19 nt, Homo sapiens
  misc_RNA (1)...(19): siRNA sense strand
ggacacaccgaaucuauga

SEQ ID NO: 261563 - RNA, 19 nt, Homo sapiens
  misc_RNA (1)...(19): siRNA sense strand
caucauguauggcaaauuc

SEQ ID NO: 261564 - RNA, 19 nt, Homo sapiens
  misc_RNA (1)...(19): siRNA sense strand
gcaacuucauguaaagauu

SEQ ID NO: 261565 - RNA, 19 nt, Homo sapiens
  misc_RNA (1)...(19): siRNA sense strand
ugauugagauggugagaaa

SEQ ID NO: 261566 - RNA, 19 nt, Homo sapiens
  misc_RNA (1)...(19): siRNA sense strand
gaaauccuguacauacuag

SEQ ID NO: 261567 - RNA, 19 nt, Homo sapiens
  misc_RNA (1)...(19): siRNA sense strand
ggcaaauucucuucugauu

SEQ ID NO: 261568 - RNA, 19 nt, Homo sapiens
  misc_RNA (1)...(19): siRNA sense strand
uggaauaccugucuaguca

SEQ ID NO: 261569 - RNA, 19 nt, Homo sapiens
  misc_RNA (1)...(19): siRNA sense strand
caaccugugugcaugcuuu

SEQ ID NO: 261570 - RNA, 19 nt, Homo sapiens
  misc_RNA (1)...(19): siRNA sense strand
ccacacaugucaauuccaa

SEQ ID NO: 261571 - RNA, 19 nt, Homo sapiens
  misc_RNA (1)...(19): siRNA sense strand
gauugcagcuggcauggaa

SEQ ID NO: 261572 - RNA, 19 nt, Homo sapiens
  misc_RNA (1)...(19): siRNA sense strand
gcacauugcaauucagauu

SEQ ID NO: 261573 - RNA, 19 nt, Homo sapiens
  misc_RNA (1)...(19): siRNA sense strand
ggaauaaccagaagucauc

SEQ ID NO: 261574 - RNA, 19 nt, Homo sapiens
  misc_RNA (1)...(19): siRNA sense strand
gcaaauauuccuuuacuac

SEQ ID NO: 261575 - RNA, 19 nt, Homo sapiens
  misc_RNA (1)...(19): siRNA sense strand
cccaauaccuccuggauau

SEQ ID NO: 261576 - RNA, 19 nt, Homo sapiens
  misc_RNA (1)...(19): siRNA sense strand
ggaaaugccaccacacaga

SEQ ID NO: 261577 - RNA, 19 nt, Homo sapiens
  misc_RNA (1)...(19): siRNA sense strand
ucuaggagaccaagauuua

SEQ ID NO: 261578 - RNA, 19 nt, Homo sapiens
  misc_RNA (1)...(19): siRNA sense strand
acaagaagccucccuaaug

SEQ ID NO: 261579 - RNA, 19 nt, Homo sapiens
  misc_RNA (1)...(19): siRNA sense strand
ggaaauccuguacauacua

SEQ ID NO: 261580 - RNA, 19 nt, Homo sapiens
  misc_RNA (1)...(19): siRNA sense strand
cauggaacaucucaaguga

SEQ ID NO: 261581 - RNA, 19 nt, Homo sapiens
  misc_RNA (1)...(19): siRNA sense strand
ggccauugcuuuacucuuc

SEQ ID NO: 261582 - RNA, 19 nt, Homo sapiens
  misc_RNA (1)...(19): siRNA sense strand
ccagauauccuaauuacau

SEQ ID NO: 261583 - RNA, 19 nt, Homo sapiens
  misc_RNA (1)...(19): siRNA sense strand
gugaaauccuggagaaugu

SEQ ID NO: 261584 - RNA, 19 nt, Homo sapiens
  misc_RNA (1)...(19): siRNA sense strand
cauggcagauccuauaaau

SEQ ID NO: 261585 - RNA, 19 nt, Homo sapiens
  misc_RNA (1)...(19): siRNA sense strand
caacaagaagccucccuaa

SEQ ID NO: 261586 - RNA, 19 nt, Homo sapiens
  misc_RNA (1)...(19): siRNA sense strand
gaagacugcccacccagaa

SEQ ID NO: 261587 - RNA, 19 nt, Homo sapiens
  misc_RNA (1)...(19): siRNA sense strand
ccacuggagucuuguuugu

SEQ ID NO: 261588 - RNA, 19 nt, Homo sapiens
  misc_RNA (1)...(19): siRNA sense strand
acagagugcuggaaugaga

SEQ ID NO: 261589 - RNA, 19 nt, Homo sapiens
  misc_RNA (1)...(19): siRNA sense strand
caucccagcuugcgauuca

SEQ ID NO: 261590 - RNA, 19 nt, Homo sapiens
  misc_RNA (1)...(19): siRNA sense strand
acagcugccuucacuauga

SEQ ID NO: 261591 - RNA, 19 nt, Homo sapiens
  misc_RNA (1)...(19): siRNA sense strand
ggaauggguaucaccguuu

SEQ ID NO: 261592 - RNA, 19 nt, Homo sapiens
  misc_RNA (1)...(19): siRNA sense strand
caaaggauuccaaggagaa

SEQ ID NO: 261593 - RNA, 19 nt, Homo sapiens
  misc_RNA (1)...(19): siRNA sense strand
gaaccaaugaauaacauca

SEQ ID NO: 261594 - RNA, 19 nt, Homo sapiens
  misc_RNA (1)...(19): siRNA sense strand
gaacaucucaagugaacuc

SEQ ID NO: 261595 - RNA, 19 nt, Homo sapiens
  misc_RNA (1)...(19): siRNA sense strand
ugacuugugucgcgaugaa

SEQ ID NO: 261596 - RNA, 19 nt, Homo sapiens
  misc_RNA (1)...(19): siRNA sense strand
cauauaaacccaagagcaa

SEQ ID NO: 261597 - RNA, 19 nt, Homo sapiens
  misc_RNA (1)...(19): siRNA sense strand
gauccaaucaggaagcaaa

SEQ ID NO: 261598 - RNA, 19 nt, Homo sapiens
  misc_RNA (1)...(19): siRNA sense strand
caacagguccucccagagu

SEQ ID NO: 261599 - RNA, 19 nt, Homo sapiens
  misc_RNA (1)...(19): siRNA sense strand
aaauuuacuccgcugauua

SEQ ID NO: 261600 - RNA, 19 nt, Homo sapiens
  misc_RNA (1)...(19): siRNA sense strand
ggcagauccuauaaauaaa

SEQ ID NO: 261601 - RNA, 19 nt, Homo sapiens
  misc_RNA (1)...(19): siRNA sense strand
aauauugucugccuucuag

SEQ ID NO: 261602 - RNA, 19 nt, Homo sapiens
  misc_RNA (1)...(19): siRNA sense strand
gccauggaauucccaguau

SEQ ID NO: 261603 - RNA, 19 nt, Homo sapiens
  misc_RNA (1)...(19): siRNA sense strand
caucaauggauacccaaua

SEQ ID NO: 261604 - RNA, 19 nt, Homo sapiens
  misc_RNA (1)...(19): siRNA sense strand
uguaaagauuucagacuug

SEQ ID NO: 261605 - RNA, 19 nt, Homo sapiens
  misc_RNA (1)...(19): siRNA sense strand
ugauaaguguucucaguuc

SEQ ID NO: 261606 - RNA, 19 nt, Homo sapiens
  misc_RNA (1)...(19): siRNA sense strand
gcacuggccaugugacuag

SEQ ID NO: 261607 - RNA, 19 nt, Homo sapiens
  misc_RNA (1)...(19): siRNA sense strand
gcaaauucucuucugauuc

SEQ ID NO: 261608 - RNA, 19 nt, Homo sapiens
  misc_RNA (1)...(19): siRNA sense strand
gaagaugggacugugaaau

SEQ ID NO: 261609 - RNA, 19 nt, Homo sapiens
  misc_RNA (1)...(19): siRNA sense strand
gaacugcaccaccccaaua

SEQ ID NO: 261610 - RNA, 19 nt, Homo sapiens
  misc_RNA (1)...(19): siRNA sense strand
gcaugugcaagauuuauug

SEQ ID NO: 261611 - RNA, 19 nt, Homo sapiens
  misc_RNA (1)...(19): siRNA sense strand
aagcaagcaucuuuacuag

SEQ ID NO: 261612 - RNA, 19 nt, Homo sapiens
  misc_RNA (1)...(19): siRNA sense strand
cagauauccuaauuacaug

SEQ ID NO: 261613 - RNA, 19 nt, Homo sapiens
  misc_RNA (1)...(19): siRNA sense strand
gugccuaccucaucaugga

SEQ ID NO: 261614 - RNA, 19 nt, Homo sapiens
  misc_RNA (1)...(19): siRNA sense strand
cuauaaaggccaucucuau

SEQ ID NO: 261615 - RNA, 19 nt, Homo sapiens
  misc_RNA (1)...(19): siRNA sense strand
gcuuuacucuucuucuuca

SEQ ID NO: 261616 - RNA, 19 nt, Homo sapiens
  misc_RNA (1)...(19): siRNA sense strand
gaauaccugucuagucacu

SEQ ID NO: 261617 - RNA, 19 nt, Homo sapiens
  misc_RNA (1)...(19): siRNA sense strand
gcgauucauucccaucaau

SEQ ID NO: 261618 - RNA, 19 nt, Homo sapiens
  misc_RNA (1)...(19): siRNA sense strand
caaccgcaccgucuauaug

SEQ ID NO: 261619 - RNA, 19 nt, Homo sapiens
  misc_RNA (1)...(19): siRNA sense strand
ccaaucaggaagcaaauau

SEQ ID NO: 261620 - RNA, 19 nt, Homo sapiens
  misc_RNA (1)...(19): siRNA sense strand
cacacaagcucuacuacuc

SEQ ID NO: 261621 - RNA, 19 nt, Homo sapiens
  misc_RNA (1)...(19): siRNA sense strand
ggaagaauugggugagugu

SEQ ID NO: 261622 - RNA, 19 nt, Homo sapiens
  misc_RNA (1)...(19): siRNA sense strand
aaugugaaauccuggagaa

SEQ ID NO: 261623 - RNA, 19 nt, Homo sapiens
  misc_RNA (1)...(19): siRNA sense strand
ucacagcugccuucacuau

SEQ ID NO: 261624 - RNA, 19 nt, Homo sapiens
  misc_RNA (1)...(19): siRNA sense strand
uuacuccgcugauuacuac

SEQ ID NO: 261625 - RNA, 19 nt, Homo sapiens
  misc_RNA (1)...(19): siRNA sense strand
aaauggaaauccuguacau

SEQ ID NO: 261626 - RNA, 19 nt, Homo sapiens
  misc_RNA (1)...(19): siRNA sense strand
ggagaagaauaaaauggaa

SEQ ID NO: 261627 - RNA, 19 nt, Homo sapiens
  misc_RNA (1)...(19): siRNA sense strand
uggagaauguccuguguca

SEQ ID NO: 261628 - RNA, 19 nt, Homo sapiens
  misc_RNA (1)...(19): siRNA sense strand
gaauggguaucaccguuuu

SEQ ID NO: 261629 - RNA, 19 nt, Homo sapiens
  misc_RNA (1)...(19): siRNA sense strand
ugacagagugcuggaauga

SEQ ID NO: 261630 - RNA, 19 nt, Homo sapiens
  misc_RNA (1)...(19): siRNA sense strand
gcucuuaccaugcucugaa

SEQ ID NO: 261631 - RNA, 19 nt, Homo sapiens
  misc_RNA (1)...(19): siRNA sense strand
gaugaaccaaugaauaaca

SEQ ID NO: 261632 - RNA, 19 nt, Homo sapiens
  misc_RNA (1)...(19): siRNA sense strand
auucuuaccugacccuuga

SEQ ID NO: 261633 - RNA, 19 nt, Homo sapiens
  misc_RNA (1)...(19): siRNA sense strand
acaugucaauuccaaauca

SEQ ID NO: 261634 - RNA, 19 nt, Homo sapiens
  misc_RNA (1)...(19): siRNA sense strand
gacuagcacuggccaugug

SEQ ID NO: 261635 - RNA, 19 nt, Homo sapiens
  misc_RNA (1)...(19): siRNA sense strand
uaaaggccaucucuaucuc

SEQ ID NO: 261636 - RNA, 19 nt, Homo sapiens
  misc_RNA (1)...(19): siRNA sense strand
caaagucucugggaaucca

SEQ ID NO: 261637 - RNA, 19 nt, Homo sapiens
  misc_RNA (1)...(19): siRNA sense strand
gaaacugccaaacugugaa

SEQ ID NO: 261638 - RNA, 19 nt, Homo sapiens
  misc_RNA (1)...(19): siRNA sense strand
guaugaagaagauggauuc

SEQ ID NO: 261639 - RNA, 19 nt, Homo sapiens
  misc_RNA (1)...(19): siRNA sense strand
gcaaccgcaccgucuauau

SEQ ID NO: 261640 - RNA, 19 nt, Homo sapiens
  misc_RNA (1)...(19): siRNA sense strand
gacccuugaugaaccaaug

SEQ ID NO: 261641 - RNA, 19 nt, Homo sapiens
  misc_RNA (1)...(19): siRNA sense strand
acuacaggguccagaguaa

SEQ ID NO: 261642 - RNA, 19 nt, Homo sapiens
  misc_RNA (1)...(19): siRNA sense strand
cagaagcugcgaacuguau

SEQ ID NO: 261643 - RNA, 19 nt, Homo sapiens
  misc_RNA (1)...(19): siRNA sense strand
ccacugcaaguccaggaua

SEQ ID NO: 261644 - RNA, 19 nt, Homo sapiens
  misc_RNA (1)...(19): siRNA sense strand
ggagaccaagauuuaaaga

SEQ ID NO: 261645 - RNA, 19 nt, Homo sapiens
  misc_RNA (1)...(19): siRNA sense strand
uaggagaccaagauuuaaa

SEQ ID NO: 261646 - RNA, 19 nt, Homo sapiens
  misc_RNA (1)...(19): siRNA sense strand
ugaaacugccaaacuguga

SEQ ID NO: 261647 - RNA, 19 nt, Homo sapiens
  misc_RNA (1)...(19): siRNA sense strand
gcacuuccagucacuuauc

SEQ ID NO: 261648 - RNA, 19 nt, Homo sapiens
  misc_RNA (1)...(19): siRNA sense strand
uggaacaucucaagugaac

SEQ ID NO: 261649 - RNA, 19 nt, Homo sapiens
  misc_RNA (1)...(19): siRNA sense strand
ggcugaaacugccaaacug

SEQ ID NO: 261650 - RNA, 19 nt, Homo sapiens
  misc_RNA (1)...(19): siRNA sense strand
ggcagaaaguccaaaggaa

SEQ ID NO: 261651 - RNA, 19 nt, Homo sapiens
  misc_RNA (1)...(19): siRNA sense strand
gaagaugccggugcaaguu

SEQ ID NO: 261652 - RNA, 19 nt, Homo sapiens
  misc_RNA (1)...(19): siRNA sense strand
gaucggaggccucgucauc

SEQ ID NO: 261653 - RNA, 19 nt, Homo sapiens
  misc_RNA (1)...(19): siRNA sense strand
aacacgacccguucacuua

SEQ ID NO: 261654 - RNA, 19 nt, Homo sapiens
  misc_RNA (1)...(19): siRNA sense strand
cagaaaguccaaaggaaca

SEQ ID NO: 261655 - RNA, 19 nt, Homo sapiens
  misc_RNA (1)...(19): siRNA sense strand
ugaagaggagggaacuuuc

SEQ ID NO: 261656 - RNA, 19 nt, Homo sapiens
  misc_RNA (1)...(19): siRNA sense strand
ggcagaaaguccaaaggaa

SEQ ID NO: 261657 - RNA, 19 nt, Homo sapiens
  misc_RNA (1)...(19): siRNA sense strand
gaagaugccggugcaaguu

SEQ ID NO: 261658 - RNA, 19 nt, Homo sapiens
  misc_RNA (1)...(19): siRNA sense strand
gaucggaggccucgucauc

SEQ ID NO: 261659 - RNA, 19 nt, Homo sapiens
  misc_RNA (1)...(19): siRNA sense strand
aacacgacccguucacuua

SEQ ID NO: 261660 - RNA, 19 nt, Homo sapiens
  misc_RNA (1)...(19): siRNA sense strand
cagaaaguccaaaggaaca

SEQ ID NO: 261661 - RNA, 19 nt, Homo sapiens
  misc_RNA (1)...(19): siRNA sense strand
ugaagaggagggaacuuuc

SEQ ID NO: 261662 - RNA, 19 nt, Homo sapiens
  misc_RNA (1)...(19): siRNA sense strand
gaaagaaccuuccguaacu

SEQ ID NO: 261663 - RNA, 19 nt, Homo sapiens
  misc_RNA (1)...(19): siRNA sense strand
gaagagagcugagaguaug

SEQ ID NO: 261664 - RNA, 19 nt, Homo sapiens
  misc_RNA (1)...(19): siRNA sense strand
gcaaagcaaucaacaggaa

SEQ ID NO: 261665 - RNA, 19 nt, Homo sapiens
  misc_RNA (1)...(19): siRNA sense strand
gaaauugucuccagaagag

SEQ ID NO: 261666 - RNA, 19 nt, Homo sapiens
  misc_RNA (1)...(19): siRNA sense strand
gaacauuggugcagaagau

SEQ ID NO: 261667 - RNA, 19 nt, Homo sapiens
  misc_RNA (1)...(19): siRNA sense strand
uggcuaaccuguuuaauaa

SEQ ID NO: 261668 - RNA, 19 nt, Homo sapiens
  misc_RNA (1)...(19): siRNA sense strand
gaauuaaaguuccuguuga

SEQ ID NO: 261669 - RNA, 19 nt, Homo sapiens
  misc_RNA (1)...(19): siRNA sense strand
gauauugacuggacucuau

SEQ ID NO: 261670 - RNA, 19 nt, Homo sapiens
  misc_RNA (1)...(19): siRNA sense strand
gaagauauacccucaaugu

SEQ ID NO: 261671 - RNA, 19 nt, Homo sapiens
  misc_RNA (1)...(19): siRNA sense strand
gaacucugcuucugccauu

SEQ ID NO: 261672 - RNA, 19 nt, Homo sapiens
  misc_RNA (1)...(19): siRNA sense strand
gaaccaaacccugacuuua

SEQ ID NO: 261673 - RNA, 19 nt, Homo sapiens
  misc_RNA (1)...(19): siRNA sense strand
gcacaauaaugccaaguau

SEQ ID NO: 261674 - RNA, 19 nt, Homo sapiens
  misc_RNA (1)...(19): siRNA sense strand
ccacucagauuuccaaaga

SEQ ID NO: 261675 - RNA, 19 nt, Homo sapiens
  misc_RNA (1)...(19): siRNA sense strand
gaagaugacaagcacaaua

SEQ ID NO: 261676 - RNA, 19 nt, Homo sapiens
  misc_RNA (1)...(19): siRNA sense strand
uggaggaacuuaugaaauu

SEQ ID NO: 261677 - RNA, 19 nt, Homo sapiens
  misc_RNA (1)...(19): siRNA sense strand
gaaccacggauagauauua

SEQ ID NO: 261678 - RNA, 19 nt, Homo sapiens
  misc_RNA (1)...(19): siRNA sense strand
gagaagauauacccucaau

SEQ ID NO: 261679 - RNA, 19 nt, Homo sapiens
  misc_RNA (1)...(19): siRNA sense strand
gaacacagcauucuuacuc

SEQ ID NO: 261680 - RNA, 19 nt, Homo sapiens
  misc_RNA (1)...(19): siRNA sense strand
aaagagcaaucaacaagaa

SEQ ID NO: 261681 - RNA, 19 nt, Homo sapiens
  misc_RNA (1)...(19): siRNA sense strand
guucaaagcuguuggugau

SEQ ID NO: 261682 - RNA, 19 nt, Homo sapiens
  misc_RNA (1)...(19): siRNA sense strand
ggauagauauuaacauguc

SEQ ID NO: 261683 - RNA, 19 nt, Homo sapiens
  misc_RNA (1)...(19): siRNA sense strand
ugaaacagaugauuugaag

SEQ ID NO: 261684 - RNA, 19 nt, Homo sapiens
  misc_RNA (1)...(19): siRNA sense strand
gaacagaacguugagugaa

SEQ ID NO: 261685 - RNA, 19 nt, Homo sapiens
  misc_RNA (1)...(19): siRNA sense strand
gcaacggauucauuuguga

SEQ ID NO: 261686 - RNA, 19 nt, Homo sapiens
  misc_RNA (1)...(19): siRNA sense strand
gauauuaacaugucagguu

SEQ ID NO: 261687 - RNA, 19 nt, Homo sapiens
  misc_RNA (1)...(19): siRNA sense strand
caacagcaacggauucauu

SEQ ID NO: 261688 - RNA, 19 nt, Homo sapiens
  misc_RNA (1)...(19): siRNA sense strand
gaaagccaaugacgacauc

SEQ ID NO: 261689 - RNA, 19 nt, Homo sapiens
  misc_RNA (1)...(19): siRNA sense strand
gcacugaacucugcuucug

SEQ ID NO: 261690 - RNA, 19 nt, Homo sapiens
  misc_RNA (1)...(19): siRNA sense strand
ggauauaaagugagagaaa

SEQ ID NO: 261691 - RNA, 19 nt, Homo sapiens
  misc_RNA (1)...(19): siRNA sense strand
guagacauguuauaccaau

SEQ ID NO: 261692 - RNA, 19 nt, Homo sapiens
  misc_RNA (1)...(19): siRNA sense strand
ggaggaacuuaugaaauug

SEQ ID NO: 261693 - RNA, 19 nt, Homo sapiens
  misc_RNA (1)...(19): siRNA sense strand
gaauuaagcaggaaugaag

SEQ ID NO: 261694 - RNA, 19 nt, Homo sapiens
  misc_RNA (1)...(19): siRNA sense strand
gaaagagcaaucaacaaga

SEQ ID NO: 261695 - RNA, 19 nt, Homo sapiens
  misc_RNA (1)...(19): siRNA sense strand
gcagauaaauuagguugca

SEQ ID NO: 261696 - RNA, 19 nt, Homo sapiens
  misc_RNA (1)...(19): siRNA sense strand
ccaaagaugagcuugauga

SEQ ID NO: 261697 - RNA, 19 nt, Homo sapiens
  misc_RNA (1)...(19): siRNA sense strand
gccaagaccuuccgcaaag

SEQ ID NO: 261698 - RNA, 19 nt, Homo sapiens
  misc_RNA (1)...(19): siRNA sense strand
ugacuguguuugcauguuu

SEQ ID NO: 261699 - RNA, 19 nt, Homo sapiens
  misc_RNA (1)...(19): siRNA sense strand
aggagaaacucgugaagaa

SEQ ID NO: 261700 - RNA, 19 nt, Homo sapiens
  misc_RNA (1)...(19): siRNA sense strand
ucaaucaaaucgcaccaaa

SEQ ID NO: 261701 - RNA, 19 nt, Homo sapiens
  misc_RNA (1)...(19): siRNA sense strand
gccauugggugucauguug

SEQ ID NO: 261702 - RNA, 19 nt, Homo sapiens
  misc_RNA (1)...(19): siRNA sense strand
guggcuaaccuguuuaaua

SEQ ID NO: 261703 - RNA, 19 nt, Homo sapiens
  misc_RNA (1)...(19): siRNA sense strand
ggaaccaaacccugacuuu

SEQ ID NO: 261704 - RNA, 19 nt, Homo sapiens
  misc_RNA (1)...(19): siRNA sense strand
caaugaaacagaugauuug

SEQ ID NO: 261705 - RNA, 19 nt, Homo sapiens
  misc_RNA (1)...(19): siRNA sense strand
ggaaguaaagcccaagaug

SEQ ID NO: 261706 - RNA, 19 nt, Homo sapiens
  misc_RNA (1)...(19): siRNA sense strand
uaacaugucagguuucaau

SEQ ID NO: 261707 - RNA, 19 nt, Homo sapiens
  misc_RNA (1)...(19): siRNA sense strand
gugcugacaucaaggauuc

SEQ ID NO: 261708 - RNA, 19 nt, Homo sapiens
  misc_RNA (1)...(19): siRNA sense strand
cgaauuaaaguuccuguug

SEQ ID NO: 261709 - RNA, 19 nt, Homo sapiens
  misc_RNA (1)...(19): siRNA sense strand
caaagccuauuuccaucuu

SEQ ID NO: 261710 - RNA, 19 nt, Homo sapiens
  misc_RNA (1)...(19): siRNA sense strand
gaugaaagagcaaucaaca

SEQ ID NO: 261711 - RNA, 19 nt, Homo sapiens
  misc_RNA (1)...(19): siRNA sense strand
gagugaagcuggaaaauca

SEQ ID NO: 261712 - RNA, 19 nt, Homo sapiens
  misc_RNA (1)...(19): siRNA sense strand
uaauaaauacccagcacua

SEQ ID NO: 261713 - RNA, 19 nt, Homo sapiens
  misc_RNA (1)...(19): siRNA sense strand
ggugaaccacggauagaua

SEQ ID NO: 261714 - RNA, 19 nt, Homo sapiens
  misc_RNA (1)...(19): siRNA sense strand
guaacuggaugaacucucu

SEQ ID NO: 261715 - RNA, 19 nt, Homo sapiens
  misc_RNA (1)...(19): siRNA sense strand
ccaagauggucaugacugu

SEQ ID NO: 261716 - RNA, 19 nt, Homo sapiens
  misc_RNA (1)...(19): siRNA sense strand
gugaagaguggcaaucuaa

SEQ ID NO: 261717 - RNA, 19 nt, Homo sapiens
  misc_RNA (1)...(19): siRNA sense strand
aagaugagcuugaugaacu

SEQ ID NO: 261718 - RNA, 19 nt, Homo sapiens
  misc_RNA (1)...(19): siRNA sense strand
cagcugaugagaagauaua

SEQ ID NO: 261719 - RNA, 19 nt, Homo sapiens
  misc_RNA (1)...(19): siRNA sense strand
gggcaagaccugaaugaug

SEQ ID NO: 261720 - RNA, 19 nt, Homo sapiens
  misc_RNA (1)...(19): siRNA sense strand
caacaggaaagaagguauu

SEQ ID NO: 261721 - RNA, 19 nt, Homo sapiens
  misc_RNA (1)...(19): siRNA sense strand
uauaaacuaugaccuugug

SEQ ID NO: 261722 - RNA, 19 nt, Homo sapiens
  misc_RNA (1)...(19): siRNA sense strand
ucacguaaaccaucucuau

SEQ ID NO: 261723 - RNA, 19 nt, Homo sapiens
  misc_RNA (1)...(19): siRNA sense strand
ggagaaacucgugaagaaa

SEQ ID NO: 261724 - RNA, 19 nt, Homo sapiens
  misc_RNA (1)...(19): siRNA sense strand
cagagaaccaggauauuga

SEQ ID NO: 261725 - RNA, 19 nt, Homo sapiens
  misc_RNA (1)...(19): siRNA sense strand
guagugauauugccaagac

SEQ ID NO: 261726 - RNA, 19 nt, Homo sapiens
  misc_RNA (1)...(19): siRNA sense strand
gaagaguggcaaucuaaca

SEQ ID NO: 261727 - RNA, 19 nt, Homo sapiens
  misc_RNA (1)...(19): siRNA sense strand
gccauuaccaggauauaaa

SEQ ID NO: 261728 - RNA, 19 nt, Homo sapiens
  misc_RNA (1)...(19): siRNA sense strand
ggaaggugaaccacggaua

SEQ ID NO: 261729 - RNA, 19 nt, Homo sapiens
  misc_RNA (1)...(19): siRNA sense strand
caacuuuagugcugacauc

SEQ ID NO: 261730 - RNA, 19 nt, Homo sapiens
  misc_RNA (1)...(19): siRNA sense strand
ggaaaaugauccugauugu

SEQ ID NO: 261731 - RNA, 19 nt, Homo sapiens
  misc_RNA (1)...(19): siRNA sense strand
gcaaucaacaggaaagaag

SEQ ID NO: 261732 - RNA, 19 nt, Homo sapiens
  misc_RNA (1)...(19): siRNA sense strand
gaguggcaaucuaacagaa

SEQ ID NO: 261733 - RNA, 19 nt, Homo sapiens
  misc_RNA (1)...(19): siRNA sense strand
aacccugacuuuagcuuua

SEQ ID NO: 261734 - RNA, 19 nt, Homo sapiens
  misc_RNA (1)...(19): siRNA sense strand
gaaacugggagccaacaug

SEQ ID NO: 261735 - RNA, 19 nt, Homo sapiens
  misc_RNA (1)...(19): siRNA sense strand
gaacucucuuggugucaau

SEQ ID NO: 261736 - RNA, 19 nt, Homo sapiens
  misc_RNA (1)...(19): siRNA sense strand
ccagagaaccaggauauug

SEQ ID NO: 261737 - RNA, 19 nt, Homo sapiens
  misc_RNA (1)...(19): siRNA sense strand
aaacuuacacccuucauca

SEQ ID NO: 261738 - RNA, 19 nt, Homo sapiens
  misc_RNA (1)...(19): siRNA sense strand
gaaggaacacagcauucuu

SEQ ID NO: 261739 - RNA, 19 nt, Homo sapiens
  misc_RNA (1)...(19): siRNA sense strand
aaggaacacagcauucuua

SEQ ID NO: 261740 - RNA, 19 nt, Homo sapiens
  misc_RNA (1)...(19): siRNA sense strand
ugaagaccuuguggaagua

SEQ ID NO: 261741 - RNA, 19 nt, Homo sapiens
  misc_RNA (1)...(19): siRNA sense strand
cugaagaccuuguggaagu

SEQ ID NO: 261742 - RNA, 19 nt, Homo sapiens
  misc_RNA (1)...(19): siRNA sense strand
gucaauggcuagaagaauc

SEQ ID NO: 261743 - RNA, 19 nt, Homo sapiens
  misc_RNA (1)...(19): siRNA sense strand
gagaaacucgugaagaaag

SEQ ID NO: 261744 - RNA, 19 nt, Homo sapiens
  misc_RNA (1)...(19): siRNA sense strand
uaacuaagccagagaacca

SEQ ID NO: 261745 - RNA, 19 nt, Homo sapiens
  misc_RNA (1)...(19): siRNA sense strand
uuucguggcuaaccuguuu

SEQ ID NO: 261746 - RNA, 19 nt, Homo sapiens
  misc_RNA (1)...(19): siRNA sense strand
gaaggugaaccacggauag

SEQ ID NO: 261747 - RNA, 19 nt, Homo sapiens
  misc_RNA (1)...(19): siRNA sense strand
gauccugauuguagacaug

SEQ ID NO: 261748 - RNA, 19 nt, Homo sapiens
  misc_RNA (1)...(19): siRNA sense strand
uaacagaagaugacaagca

SEQ ID NO: 261749 - RNA, 19 nt, Homo sapiens
  misc_RNA (1)...(19): siRNA sense strand
gcaguuguggauuuaauug

SEQ ID NO: 261750 - RNA, 19 nt, Homo sapiens
  misc_RNA (1)...(19): siRNA sense strand
gaaaaucaacuuccauuca

SEQ ID NO: 261751 - RNA, 19 nt, Homo sapiens
  misc_RNA (1)...(19): siRNA sense strand
gagaguaugcuucaacaag

SEQ ID NO: 261752 - RNA, 19 nt, Homo sapiens
  misc_RNA (1)...(19): siRNA sense strand
gagcugagaguaugcuuca

SEQ ID NO: 261753 - RNA, 19 nt, Homo sapiens
  misc_RNA (1)...(19): siRNA sense strand
gaacuuggcacugaacucu

SEQ ID NO: 261754 - RNA, 19 nt, Homo sapiens
  misc_RNA (1)...(19): siRNA sense strand
ugaaagagcaaucaacaag

SEQ ID NO: 261755 - RNA, 19 nt, Homo sapiens
  misc_RNA (1)...(19): siRNA sense strand
gugauggaauugugcuuug

SEQ ID NO: 261756 - RNA, 19 nt, Homo sapiens
  misc_RNA (1)...(19): siRNA sense strand
gaugggcaaacuuucauuu

SEQ ID NO: 261757 - RNA, 19 nt, Homo sapiens
  misc_RNA (1)...(19): siRNA sense strand
gaugacaagcacaauaaug

SEQ ID NO: 261758 - RNA, 19 nt, Homo sapiens
  misc_RNA (1)...(19): siRNA sense strand
aagaugacaagcacaauaa

SEQ ID NO: 261759 - RNA, 19 nt, Homo sapiens
  misc_RNA (1)...(19): siRNA sense strand
ccugcaagaugcccuggua

SEQ ID NO: 261760 - RNA, 19 nt, Homo sapiens
  misc_RNA (1)...(19): siRNA sense strand
uuaccaggauauaaaguga

SEQ ID NO: 261761 - RNA, 19 nt, Homo sapiens
  misc_RNA (1)...(19): siRNA sense strand
uucaugagcucuucaagga

SEQ ID NO: 261762 - RNA, 19 nt, Homo sapiens
  misc_RNA (1)...(19): siRNA sense strand
gaauguggauacagaauaa

SEQ ID NO: 261763 - RNA, 19 nt, Homo sapiens
  misc_RNA (1)...(19): siRNA sense strand
gaaaaggacuaaaagauug

SEQ ID NO: 261764 - RNA, 19 nt, Homo sapiens
  misc_RNA (1)...(19): siRNA sense strand
ccaaucagaugcagagaau

SEQ ID NO: 261765 - RNA, 19 nt, Homo sapiens
  misc_RNA (1)...(19): siRNA sense strand
cagagaauguggauacaga

SEQ ID NO: 261766 - RNA, 19 nt, Homo sapiens
  misc_RNA (1)...(19): siRNA sense strand
cagcaaccaaugauauaua

SEQ ID NO: 261767 - RNA, 19 nt, Homo sapiens
  misc_RNA (1)...(19): siRNA sense strand
ccaaagcagcaaccaauga

SEQ ID NO: 261768 - RNA, 19 nt, Homo sapiens
  misc_RNA (1)...(19): siRNA sense strand
caaagcagcaaccaaugau

SEQ ID NO: 261769 - RNA, 19 nt, Homo sapiens
  misc_RNA (1)...(19): siRNA sense strand
agaauguggauacagaaua

SEQ ID NO: 261770 - RNA, 19 nt, Homo sapiens
  misc_RNA (1)...(19): siRNA sense strand
gcagcaaccaaugauauau

SEQ ID NO: 261771 - RNA, 19 nt, Homo sapiens
  misc_RNA (1)...(19): siRNA sense strand
gagaauguggauacagaau

SEQ ID NO: 261772 - RNA, 19 nt, Homo sapiens
  misc_RNA (1)...(19): siRNA sense strand
aagcagcaaccaaugauau

SEQ ID NO: 261773 - RNA, 19 nt, Homo sapiens
  misc_RNA (1)...(19): siRNA sense strand
aaucagaugcagagaaugu

SEQ ID NO: 261774 - RNA, 19 nt, Homo sapiens
  misc_RNA (1)...(19): siRNA sense strand
cuagggauccaaucagaug

SEQ ID NO: 261775 - RNA, 19 nt, Homo sapiens
  misc_RNA (1)...(19): siRNA sense strand
aaagcagcaaccaaugaua

SEQ ID NO: 261776 - RNA, 19 nt, Homo sapiens
  misc_RNA (1)...(19): siRNA sense strand
auauauaucuguggagagu

SEQ ID NO: 261777 - RNA, 19 nt, Homo sapiens
  misc_RNA (1)...(19): siRNA sense strand
auauaucuguggagagugu

SEQ ID NO: 261778 - RNA, 19 nt, Homo sapiens
  misc_RNA (1)...(19): siRNA sense strand
acuaaaagauuggucguuu

SEQ ID NO: 261779 - RNA, 19 nt, Homo sapiens
  misc_RNA (1)...(19): siRNA sense strand
caagaaaaggacuaaaaga

SEQ ID NO: 261780 - RNA, 19 nt, Homo sapiens
  misc_RNA (1)...(19): siRNA sense strand
gauugaagcuuaucuauga

SEQ ID NO: 261781 - RNA, 19 nt, Homo sapiens
  misc_RNA (1)...(19): siRNA sense strand
agacucagcucuacaauaa

SEQ ID NO: 261782 - RNA, 19 nt, Homo sapiens
  misc_RNA (1)...(19): siRNA sense strand
ccaaguaacucuccucaaa

SEQ ID NO: 261783 - RNA, 19 nt, Homo sapiens
  misc_RNA (1)...(19): siRNA sense strand
agauaaagcuucuggauuu

SEQ ID NO: 261784 - RNA, 19 nt, Homo sapiens
  misc_RNA (1)...(19): siRNA sense strand
gacaugaauuccuuaauga

SEQ ID NO: 261785 - RNA, 19 nt, Homo sapiens
  misc_RNA (1)...(19): siRNA sense strand
gaaguucaaugcacuggaa

SEQ ID NO: 261786 - RNA, 19 nt, Homo sapiens
  misc_RNA (1)...(19): siRNA sense strand
guaccaaagugcaaucaaa

SEQ ID NO: 261787 - RNA, 19 nt, Homo sapiens
  misc_RNA (1)...(19): siRNA sense strand
ugacaugaauuccuuaaug

SEQ ID NO: 261788 - RNA, 19 nt, Homo sapiens
  misc_RNA (1)...(19): siRNA sense strand
aaguaacucuccucaaaua

SEQ ID NO: 261789 - RNA, 19 nt, Homo sapiens
  misc_RNA (1)...(19): siRNA sense strand
ucaaugcacuggaauuaga

SEQ ID NO: 261790 - RNA, 19 nt, Homo sapiens
  misc_RNA (1)...(19): siRNA sense strand
gcauuucuacuccacauua

SEQ ID NO: 261791 - RNA, 19 nt, Homo sapiens
  misc_RNA (1)...(19): siRNA sense strand
gacauuccauucacaagaa

SEQ ID NO: 261792 - RNA, 19 nt, Homo sapiens
  misc_RNA (1)...(19): siRNA sense strand
uuacaaguaugaccugaaa

SEQ ID NO: 261793 - RNA, 19 nt, Homo sapiens
  misc_RNA (1)...(19): siRNA sense strand
ggccaaggcuucaugacaa

SEQ ID NO: 261794 - RNA, 19 nt, Homo sapiens
  misc_RNA (1)...(19): siRNA sense strand
gcaauugaaugucgugucu

SEQ ID NO: 261795 - RNA, 19 nt, Homo sapiens
  misc_RNA (1)...(19): siRNA sense strand
acaauaagccucaugaaga

SEQ ID NO: 261796 - RNA, 19 nt, Homo sapiens
  misc_RNA (1)...(19): siRNA sense strand
caagggaguuucuaaagag

SEQ ID NO: 261797 - RNA, 19 nt, Homo sapiens
  misc_RNA (1)...(19): siRNA sense strand
caauaagccucaugaagag

SEQ ID NO: 261798 - RNA, 19 nt, Homo sapiens
  misc_RNA (1)...(19): siRNA sense strand
gagauaaagcuucuggauu

SEQ ID NO: 261799 - RNA, 19 nt, Homo sapiens
  misc_RNA (1)...(19): siRNA sense strand
acaagggaguuucuaaaga

SEQ ID NO: 261800 - RNA, 19 nt, Homo sapiens
  misc_RNA (1)...(19): siRNA sense strand
gaaauaaaugucaguacug

SEQ ID NO: 261801 - RNA, 19 nt, Homo sapiens
  misc_RNA (1)...(19): siRNA sense strand
gaucacagaguaugccaaa

SEQ ID NO: 261802 - RNA, 19 nt, Homo sapiens
  misc_RNA (1)...(19): siRNA sense strand
gaaagacaacagacaaauc

SEQ ID NO: 261803 - RNA, 19 nt, Homo sapiens
  misc_RNA (1)...(19): siRNA sense strand
ugacagaccucagacagau

SEQ ID NO: 261804 - RNA, 19 nt, Homo sapiens
  misc_RNA (1)...(19): siRNA sense strand
aagaacagauccagugguu

SEQ ID NO: 261805 - RNA, 19 nt, Homo sapiens
  misc_RNA (1)...(19): siRNA sense strand
gguugcagauuacaaguau

SEQ ID NO: 261806 - RNA, 19 nt, Homo sapiens
  misc_RNA (1)...(19): siRNA sense strand
gacaaaucaccauucguua

SEQ ID NO: 261807 - RNA, 19 nt, Homo sapiens
  misc_RNA (1)...(19): siRNA sense strand
gcacuggaauuagaugaca

SEQ ID NO: 261808 - RNA, 19 nt, Homo sapiens
  misc_RNA (1)...(19): siRNA sense strand
guucaaugcacuggaauua

SEQ ID NO: 261809 - RNA, 19 nt, Homo sapiens
  misc_RNA (1)...(19): siRNA sense strand
caccauucguuaucuauga

SEQ ID NO: 261810 - RNA, 19 nt, Homo sapiens
  misc_RNA (1)...(19): siRNA sense strand
gaagacauuccauucacaa

SEQ ID NO: 261811 - RNA, 19 nt, Homo sapiens
  misc_RNA (1)...(19): siRNA sense strand
gaagcccauugaagacauu

SEQ ID NO: 261812 - RNA, 19 nt, Homo sapiens
  misc_RNA (1)...(19): siRNA sense strand
ugcaggagaucacagagua

SEQ ID NO: 261813 - RNA, 19 nt, Homo sapiens
  misc_RNA (1)...(19): siRNA sense strand
gauaaagcuucuggauuuc

SEQ ID NO: 261814 - RNA, 19 nt, Homo sapiens
  misc_RNA (1)...(19): siRNA sense strand
caacagacaaaucaccauu

SEQ ID NO: 261815 - RNA, 19 nt, Homo sapiens
  misc_RNA (1)...(19): siRNA sense strand
ucaagaagacggagacaga

SEQ ID NO: 261816 - RNA, 19 nt, Homo sapiens
  misc_RNA (1)...(19): siRNA sense strand
ugacagcgacuuggcaaua

SEQ ID NO: 261817 - RNA, 19 nt, Homo sapiens
  misc_RNA (1)...(19): siRNA sense strand
agacaaaucaccauucguu

SEQ ID NO: 261818 - RNA, 19 nt, Homo sapiens
  misc_RNA (1)...(19): siRNA sense strand
ggaaagacaacagacaaau

SEQ ID NO: 261819 - RNA, 19 nt, Homo sapiens
  misc_RNA (1)...(19): siRNA sense strand
gauaucaagcccuucacua

SEQ ID NO: 261820 - RNA, 19 nt, Homo sapiens
  misc_RNA (1)...(19): siRNA sense strand
acacaaugcuggccuccuu

SEQ ID NO: 261821 - RNA, 19 nt, Homo sapiens
  misc_RNA (1)...(19): siRNA sense strand
uaacucuccucaaauaugg

SEQ ID NO: 261822 - RNA, 19 nt, Homo sapiens
  misc_RNA (1)...(19): siRNA sense strand
aaagacaacagacaaauca

SEQ ID NO: 261823 - RNA, 19 nt, Homo sapiens
  misc_RNA (1)...(19): siRNA sense strand
ggagauaaagcuucuggau

SEQ ID NO: 261824 - RNA, 19 nt, Homo sapiens
  misc_RNA (1)...(19): siRNA sense strand
gacagcgacuuggcaauau

SEQ ID NO: 261825 - RNA, 19 nt, Homo sapiens
  misc_RNA (1)...(19): siRNA sense strand
guugacuucuccagcauuu

SEQ ID NO: 261826 - RNA, 19 nt, Homo sapiens
  misc_RNA (1)...(19): siRNA sense strand
guaacucuccucaaauaug

SEQ ID NO: 261827 - RNA, 19 nt, Homo sapiens
  misc_RNA (1)...(19): siRNA sense strand
caagacaaccugcuacaag

SEQ ID NO: 261828 - RNA, 19 nt, Homo sapiens
  misc_RNA (1)...(19): siRNA sense strand
ugucgugucuguggagaua

SEQ ID NO: 261829 - RNA, 19 nt, Homo sapiens
  misc_RNA (1)...(19): siRNA sense strand
caaaucaccauucguuauc

SEQ ID NO: 261830 - RNA, 19 nt, Homo sapiens
  misc_RNA (1)...(19): siRNA sense strand
ccaacucccucauggcaau

SEQ ID NO: 261831 - RNA, 19 nt, Homo sapiens
  misc_RNA (1)...(19): siRNA sense strand
gaaaaugacagaccucaga

SEQ ID NO: 261832 - RNA, 19 nt, Homo sapiens
  misc_RNA (1)...(19): siRNA sense strand
cuaaagagccugcgaaagc

SEQ ID NO: 261833 - RNA, 19 nt, Homo sapiens
  misc_RNA (1)...(19): siRNA sense strand
ugacaagggaguuucuaaa

SEQ ID NO: 261834 - RNA, 19 nt, Homo sapiens
  misc_RNA (1)...(19): siRNA sense strand
ccaaaagcauuccugguuu

SEQ ID NO: 261835 - RNA, 19 nt, Homo sapiens
  misc_RNA (1)...(19): siRNA sense strand
ggauuucacuauggaguuc

SEQ ID NO: 261836 - RNA, 19 nt, Homo sapiens
  misc_RNA (1)...(19): siRNA sense strand
cagguuugcugaaugugaa

SEQ ID NO: 261837 - RNA, 19 nt, Homo sapiens
  misc_RNA (1)...(19): siRNA sense strand
ucuaugacaugaauuccuu

SEQ ID NO: 261838 - RNA, 19 nt, Homo sapiens
  misc_RNA (1)...(19): siRNA sense strand
cgaagacauuccauucaca

SEQ ID NO: 261839 - RNA, 19 nt, Homo sapiens
  misc_RNA (1)...(19): siRNA sense strand
gcccagguuugcugaaugu

SEQ ID NO: 261840 - RNA, 19 nt, Homo sapiens
  misc_RNA (1)...(19): siRNA sense strand
uuauggagcccaaguuuga

SEQ ID NO: 261841 - RNA, 19 nt, Homo sapiens
  misc_RNA (1)...(19): siRNA sense strand
ugcaggagaucuacaagga

SEQ ID NO: 261842 - RNA, 19 nt, Homo sapiens
  misc_RNA (1)...(19): siRNA sense strand
cauaaugccaucagguuug

SEQ ID NO: 261843 - RNA, 19 nt, Homo sapiens
  misc_RNA (1)...(19): siRNA sense strand
gacaagggaguuucuaaag

SEQ ID NO: 261844 - RNA, 19 nt, Homo sapiens
  misc_RNA (1)...(19): siRNA sense strand
ggaguccacgagaucauuu

SEQ ID NO: 261845 - RNA, 19 nt, Homo sapiens
  misc_RNA (1)...(19): siRNA sense strand
caaguaacucuccucaaau

SEQ ID NO: 261846 - RNA, 19 nt, Homo sapiens
  misc_RNA (1)...(19): siRNA sense strand
acaaaucaccauucguuau

SEQ ID NO: 261847 - RNA, 19 nt, Homo sapiens
  misc_RNA (1)...(19): siRNA sense strand
gaagacggagacagacaug

SEQ ID NO: 261848 - RNA, 19 nt, Homo sapiens
  misc_RNA (1)...(19): siRNA sense strand
uugccaagcugcuccagaa

SEQ ID NO: 261849 - RNA, 19 nt, Homo sapiens
  misc_RNA (1)...(19): siRNA sense strand
ugaguuugcugugaaguuc

SEQ ID NO: 261850 - RNA, 19 nt, Homo sapiens
  misc_RNA (1)...(19): siRNA sense strand
ccuccuugaugaauaaaga

SEQ ID NO: 261851 - RNA, 19 nt, Homo sapiens
  misc_RNA (1)...(19): siRNA sense strand
uuucagggcugccaguuuc

SEQ ID NO: 261852 - RNA, 19 nt, Homo sapiens
  misc_RNA (1)...(19): siRNA sense strand
ccaaagugcaaucaaagug

SEQ ID NO: 261853 - RNA, 19 nt, Homo sapiens
  misc_RNA (1)...(19): siRNA sense strand
gagcccaaguuugaguuug

SEQ ID NO: 261854 - RNA, 19 nt, Homo sapiens
  misc_RNA (1)...(19): siRNA sense strand
auccagugguugcagauua

SEQ ID NO: 261855 - RNA, 19 nt, Homo sapiens
  misc_RNA (1)...(19): siRNA sense strand
ggaucucuccguaauggaa

SEQ ID NO: 261856 - RNA, 19 nt, Homo sapiens
  misc_RNA (1)...(19): siRNA sense strand
acucauacauaaaguccuu

SEQ ID NO: 261857 - RNA, 19 nt, Homo sapiens
  misc_RNA (1)...(19): siRNA sense strand
uggccuccuugaugaauaa

SEQ ID NO: 261858 - RNA, 19 nt, Homo sapiens
  misc_RNA (1)...(19): siRNA sense strand
caugaauuccuuaaugaug

SEQ ID NO: 261859 - RNA, 19 nt, Homo sapiens
  misc_RNA (1)...(19): siRNA sense strand
ccucauggcaauugaaugu

SEQ ID NO: 261860 - RNA, 19 nt, Homo sapiens
  misc_RNA (1)...(19): siRNA sense strand
guggagaccgcccagguuu

SEQ ID NO: 261861 - RNA, 19 nt, Homo sapiens
  misc_RNA (1)...(19): siRNA sense strand
acagcgacuuggcaauauu

SEQ ID NO: 261862 - RNA, 19 nt, Homo sapiens
  misc_RNA (1)...(19): siRNA sense strand
uuacgaagacauuccauuc

SEQ ID NO: 261863 - RNA, 19 nt, Homo sapiens
  misc_RNA (1)...(19): siRNA sense strand
aaucaccauucguuaucua

SEQ ID NO: 261864 - RNA, 19 nt, Homo sapiens
  misc_RNA (1)...(19): siRNA sense strand
ugacaggaaagacaacaga

SEQ ID NO: 261865 - RNA, 19 nt, Homo sapiens
  misc_RNA (1)...(19): siRNA sense strand
guggaucucuccguaaugg

SEQ ID NO: 261866 - RNA, 19 nt, Homo sapiens
  misc_RNA (1)...(19): siRNA sense strand
uuaaugaugggagaagaua

SEQ ID NO: 261867 - RNA, 19 nt, Homo sapiens
  misc_RNA (1)...(19): siRNA sense strand
cguuaucuaugacaugaau

SEQ ID NO: 261868 - RNA, 19 nt, Homo sapiens
  misc_RNA (1)...(19): siRNA sense strand
caggaaagacaacagacaa

SEQ ID NO: 261869 - RNA, 19 nt, Homo sapiens
  misc_RNA (1)...(19): siRNA sense strand
caaaggcgagggcgaucuu

SEQ ID NO: 261870 - RNA, 19 nt, Homo sapiens
  misc_RNA (1)...(19): siRNA sense strand
cagcgacuuggcaauauuu

SEQ ID NO: 261871 - RNA, 19 nt, Homo sapiens
  misc_RNA (1)...(19): siRNA sense strand
caagaguaccaaagugcaa

SEQ ID NO: 261872 - RNA, 19 nt, Homo sapiens
  misc_RNA (1)...(19): siRNA sense strand
gaguccacgagaucauuua

SEQ ID NO: 261873 - RNA, 19 nt, Homo sapiens
  misc_RNA (1)...(19): siRNA sense strand
ucacuacuguugacuucuc

SEQ ID NO: 261874 - RNA, 19 nt, Homo sapiens
  misc_RNA (1)...(19): siRNA sense strand
ucauaaugccaucagguuu

SEQ ID NO: 261875 - RNA, 19 nt, Homo sapiens
  misc_RNA (1)...(19): siRNA sense strand
ugucaguacugucgguuuc

SEQ ID NO: 261876 - RNA, 19 nt, Homo sapiens
  misc_RNA (1)...(19): siRNA sense strand
caaaguggagccugcaucu

SEQ ID NO: 261877 - RNA, 19 nt, Homo sapiens
  misc_RNA (1)...(19): siRNA sense strand
cuauggaguucaugcuugu

SEQ ID NO: 261878 - RNA, 19 nt, Homo sapiens
  misc_RNA (1)...(19): siRNA sense strand
augcuggccuccuugauga

SEQ ID NO: 261879 - RNA, 19 nt, Homo sapiens
  misc_RNA (1)...(19): siRNA sense strand
gggcgaucuugacaggaaa

SEQ ID NO: 261880 - RNA, 19 nt, Homo sapiens
  misc_RNA (1)...(19): siRNA sense strand
gauugaagcuuaucuauga

SEQ ID NO: 261881 - RNA, 19 nt, Homo sapiens
  misc_RNA (1)...(19): siRNA sense strand
agacucagcucuacaauaa

SEQ ID NO: 261882 - RNA, 19 nt, Homo sapiens
  misc_RNA (1)...(19): siRNA sense strand
ccaaguaacucuccucaaa

SEQ ID NO: 261883 - RNA, 19 nt, Homo sapiens
  misc_RNA (1)...(19): siRNA sense strand
agauaaagcuucuggauuu

SEQ ID NO: 261884 - RNA, 19 nt, Homo sapiens
  misc_RNA (1)...(19): siRNA sense strand
gacaugaauuccuuaauga

SEQ ID NO: 261885 - RNA, 19 nt, Homo sapiens
  misc_RNA (1)...(19): siRNA sense strand
gaaguucaaugcacuggaa

SEQ ID NO: 261886 - RNA, 19 nt, Homo sapiens
  misc_RNA (1)...(19): siRNA sense strand
guaccaaagugcaaucaaa

SEQ ID NO: 261887 - RNA, 19 nt, Homo sapiens
  misc_RNA (1)...(19): siRNA sense strand
ugacaugaauuccuuaaug

SEQ ID NO: 261888 - RNA, 19 nt, Homo sapiens
  misc_RNA (1)...(19): siRNA sense strand
aaguaacucuccucaaaua

SEQ ID NO: 261889 - RNA, 19 nt, Homo sapiens
  misc_RNA (1)...(19): siRNA sense strand
ucaaugcacuggaauuaga

SEQ ID NO: 261890 - RNA, 19 nt, Homo sapiens
  misc_RNA (1)...(19): siRNA sense strand
gcauuucuacuccacauua

SEQ ID NO: 261891 - RNA, 19 nt, Homo sapiens
  misc_RNA (1)...(19): siRNA sense strand
gacauuccauucacaagaa

SEQ ID NO: 261892 - RNA, 19 nt, Homo sapiens
  misc_RNA (1)...(19): siRNA sense strand
uuacaaguaugaccugaaa

SEQ ID NO: 261893 - RNA, 19 nt, Homo sapiens
  misc_RNA (1)...(19): siRNA sense strand
ggccaaggcuucaugacaa

SEQ ID NO: 261894 - RNA, 19 nt, Homo sapiens
  misc_RNA (1)...(19): siRNA sense strand
gcaauugaaugucgugucu

SEQ ID NO: 261895 - RNA, 19 nt, Homo sapiens
  misc_RNA (1)...(19): siRNA sense strand
acaauaagccucaugaaga

SEQ ID NO: 261896 - RNA, 19 nt, Homo sapiens
  misc_RNA (1)...(19): siRNA sense strand
caagggaguuucuaaagag

SEQ ID NO: 261897 - RNA, 19 nt, Homo sapiens
  misc_RNA (1)...(19): siRNA sense strand
caauaagccucaugaagag

SEQ ID NO: 261898 - RNA, 19 nt, Homo sapiens
  misc_RNA (1)...(19): siRNA sense strand
gagauaaagcuucuggauu

SEQ ID NO: 261899 - RNA, 19 nt, Homo sapiens
  misc_RNA (1)...(19): siRNA sense strand
acaagggaguuucuaaaga

SEQ ID NO: 261900 - RNA, 19 nt, Homo sapiens
  misc_RNA (1)...(19): siRNA sense strand
gaaauaaaugucaguacug

SEQ ID NO: 261901 - RNA, 19 nt, Homo sapiens
  misc_RNA (1)...(19): siRNA sense strand
gaucacagaguaugccaaa

SEQ ID NO: 261902 - RNA, 19 nt, Homo sapiens
  misc_RNA (1)...(19): siRNA sense strand
gaaagacaacagacaaauc

SEQ ID NO: 261903 - RNA, 19 nt, Homo sapiens
  misc_RNA (1)...(19): siRNA sense strand
ugacagaccucagacagau

SEQ ID NO: 261904 - RNA, 19 nt, Homo sapiens
  misc_RNA (1)...(19): siRNA sense strand
aagaacagauccagugguu

SEQ ID NO: 261905 - RNA, 19 nt, Homo sapiens
  misc_RNA (1)...(19): siRNA sense strand
gaaaugaccaugguugaca

SEQ ID NO: 261906 - RNA, 19 nt, Homo sapiens
  misc_RNA (1)...(19): siRNA sense strand
gguugcagauuacaaguau

SEQ ID NO: 261907 - RNA, 19 nt, Homo sapiens
  misc_RNA (1)...(19): siRNA sense strand
gacaaaucaccauucguua

SEQ ID NO: 261908 - RNA, 19 nt, Homo sapiens
  misc_RNA (1)...(19): siRNA sense strand
gcacuggaauuagaugaca

SEQ ID NO: 261909 - RNA, 19 nt, Homo sapiens
  misc_RNA (1)...(19): siRNA sense strand
guucaaugcacuggaauua

SEQ ID NO: 261910 - RNA, 19 nt, Homo sapiens
  misc_RNA (1)...(19): siRNA sense strand
caccauucguuaucuauga

SEQ ID NO: 261911 - RNA, 19 nt, Homo sapiens
  misc_RNA (1)...(19): siRNA sense strand
gaagacauuccauucacaa

SEQ ID NO: 261912 - RNA, 19 nt, Homo sapiens
  misc_RNA (1)...(19): siRNA sense strand
gaagcccauugaagacauu

SEQ ID NO: 261913 - RNA, 19 nt, Homo sapiens
  misc_RNA (1)...(19): siRNA sense strand
ugcaggagaucacagagua

SEQ ID NO: 261914 - RNA, 19 nt, Homo sapiens
  misc_RNA (1)...(19): siRNA sense strand
gauaaagcuucuggauuuc

SEQ ID NO: 261915 - RNA, 19 nt, Homo sapiens
  misc_RNA (1)...(19): siRNA sense strand
caacagacaaaucaccauu

SEQ ID NO: 261916 - RNA, 19 nt, Homo sapiens
  misc_RNA (1)...(19): siRNA sense strand
ucaagaagacggagacaga

SEQ ID NO: 261917 - RNA, 19 nt, Homo sapiens
  misc_RNA (1)...(19): siRNA sense strand
ugacagcgacuuggcaaua

SEQ ID NO: 261918 - RNA, 19 nt, Homo sapiens
  misc_RNA (1)...(19): siRNA sense strand
agacaaaucaccauucguu

SEQ ID NO: 261919 - RNA, 19 nt, Homo sapiens
  misc_RNA (1)...(19): siRNA sense strand
ggaaagacaacagacaaau

SEQ ID NO: 261920 - RNA, 19 nt, Homo sapiens
  misc_RNA (1)...(19): siRNA sense strand
acacaaugcuggccuccuu

SEQ ID NO: 261921 - RNA, 19 nt, Homo sapiens
  misc_RNA (1)...(19): siRNA sense strand
uaacucuccucaaauaugg

SEQ ID NO: 261922 - RNA, 19 nt, Homo sapiens
  misc_RNA (1)...(19): siRNA sense strand
gauaucaagcccuucacua

SEQ ID NO: 261923 - RNA, 19 nt, Homo sapiens
  misc_RNA (1)...(19): siRNA sense strand
aaagacaacagacaaauca

SEQ ID NO: 261924 - RNA, 19 nt, Homo sapiens
  misc_RNA (1)...(19): siRNA sense strand
ggagauaaagcuucuggau

SEQ ID NO: 261925 - RNA, 19 nt, Homo sapiens
  misc_RNA (1)...(19): siRNA sense strand
gacagcgacuuggcaauau

SEQ ID NO: 261926 - RNA, 19 nt, Homo sapiens
  misc_RNA (1)...(19): siRNA sense strand
guaacucuccucaaauaug

SEQ ID NO: 261927 - RNA, 19 nt, Homo sapiens
  misc_RNA (1)...(19): siRNA sense strand
guugacuucuccagcauuu

SEQ ID NO: 261928 - RNA, 19 nt, Homo sapiens
  misc_RNA (1)...(19): siRNA sense strand
caagacaaccugcuacaag

SEQ ID NO: 261929 - RNA, 19 nt, Homo sapiens
  misc_RNA (1)...(19): siRNA sense strand
ugucgugucuguggagaua

SEQ ID NO: 261930 - RNA, 19 nt, Homo sapiens
  misc_RNA (1)...(19): siRNA sense strand
caaaucaccauucguuauc

SEQ ID NO: 261931 - RNA, 19 nt, Homo sapiens
  misc_RNA (1)...(19): siRNA sense strand
ccaacucccucauggcaau

SEQ ID NO: 261932 - RNA, 19 nt, Homo sapiens
  misc_RNA (1)...(19): siRNA sense strand
gaaaaugacagaccucaga

SEQ ID NO: 261933 - RNA, 19 nt, Homo sapiens
  misc_RNA (1)...(19): siRNA sense strand
cuaaagagccugcgaaagc

SEQ ID NO: 261934 - RNA, 19 nt, Homo sapiens
  misc_RNA (1)...(19): siRNA sense strand
ugacaagggaguuucuaaa

SEQ ID NO: 261935 - RNA, 19 nt, Homo sapiens
  misc_RNA (1)...(19): siRNA sense strand
ccaaaagcauuccugguuu

SEQ ID NO: 261936 - RNA, 19 nt, Homo sapiens
  misc_RNA (1)...(19): siRNA sense strand
ggauuucacuauggaguuc

SEQ ID NO: 261937 - RNA, 19 nt, Homo sapiens
  misc_RNA (1)...(19): siRNA sense strand
cagguuugcugaaugugaa

SEQ ID NO: 261938 - RNA, 19 nt, Homo sapiens
  misc_RNA (1)...(19): siRNA sense strand
ucuaugacaugaauuccuu

SEQ ID NO: 261939 - RNA, 19 nt, Homo sapiens
  misc_RNA (1)...(19): siRNA sense strand
cgaagacauuccauucaca

SEQ ID NO: 261940 - RNA, 19 nt, Homo sapiens
  misc_RNA (1)...(19): siRNA sense strand
gcccagguuugcugaaugu

SEQ ID NO: 261941 - RNA, 19 nt, Homo sapiens
  misc_RNA (1)...(19): siRNA sense strand
uuauggagcccaaguuuga

SEQ ID NO: 261942 - RNA, 19 nt, Homo sapiens
  misc_RNA (1)...(19): siRNA sense strand
ugcaggagaucuacaagga

SEQ ID NO: 261943 - RNA, 19 nt, Homo sapiens
  misc_RNA (1)...(19): siRNA sense strand
cauaaugccaucagguuug

SEQ ID NO: 261944 - RNA, 19 nt, Homo sapiens
  misc_RNA (1)...(19): siRNA sense strand
gacaagggaguuucuaaag

SEQ ID NO: 261945 - RNA, 19 nt, Homo sapiens
  misc_RNA (1)...(19): siRNA sense strand
ggaguccacgagaucauuu

SEQ ID NO: 261946 - RNA, 19 nt, Homo sapiens
  misc_RNA (1)...(19): siRNA sense strand
caaguaacucuccucaaau

SEQ ID NO: 261947 - RNA, 19 nt, Homo sapiens
  misc_RNA (1)...(19): siRNA sense strand
acaaaucaccauucguuau

SEQ ID NO: 261948 - RNA, 19 nt, Homo sapiens
  misc_RNA (1)...(19): siRNA sense strand
gaagacggagacagacaug

SEQ ID NO: 261949 - RNA, 19 nt, Homo sapiens
  misc_RNA (1)...(19): siRNA sense strand
uugccaagcugcuccagaa

SEQ ID NO: 261950 - RNA, 19 nt, Homo sapiens
  misc_RNA (1)...(19): siRNA sense strand
ugaguuugcugugaaguuc

SEQ ID NO: 261951 - RNA, 19 nt, Homo sapiens
  misc_RNA (1)...(19): siRNA sense strand
ccuccuugaugaauaaaga

SEQ ID NO: 261952 - RNA, 19 nt, Homo sapiens
  misc_RNA (1)...(19): siRNA sense strand
uuucagggcugccaguuuc

SEQ ID NO: 261953 - RNA, 19 nt, Homo sapiens
  misc_RNA (1)...(19): siRNA sense strand
ccaaagugcaaucaaagug

SEQ ID NO: 261954 - RNA, 19 nt, Homo sapiens
  misc_RNA (1)...(19): siRNA sense strand
gagcccaaguuugaguuug

SEQ ID NO: 261955 - RNA, 19 nt, Homo sapiens
  misc_RNA (1)...(19): siRNA sense strand
ugaccaugguugacacaga

SEQ ID NO: 261956 - RNA, 19 nt, Homo sapiens
  misc_RNA (1)...(19): siRNA sense strand
auccagugguugcagauua

SEQ ID NO: 261957 - RNA, 19 nt, Homo sapiens
  misc_RNA (1)...(19): siRNA sense strand
ggaucucuccguaauggaa

SEQ ID NO: 261958 - RNA, 19 nt, Homo sapiens
  misc_RNA (1)...(19): siRNA sense strand
acucauacauaaaguccuu

SEQ ID NO: 261959 - RNA, 19 nt, Homo sapiens
  misc_RNA (1)...(19): siRNA sense strand
uggccuccuugaugaauaa

SEQ ID NO: 261960 - RNA, 19 nt, Homo sapiens
  misc_RNA (1)...(19): siRNA sense strand
caugaauuccuuaaugaug

SEQ ID NO: 261961 - RNA, 19 nt, Homo sapiens
  misc_RNA (1)...(19): siRNA sense strand
ccucauggcaauugaaugu

SEQ ID NO: 261962 - RNA, 19 nt, Homo sapiens
  misc_RNA (1)...(19): siRNA sense strand
guggagaccgcccagguuu

SEQ ID NO: 261963 - RNA, 19 nt, Homo sapiens
  misc_RNA (1)...(19): siRNA sense strand
acagcgacuuggcaauauu

SEQ ID NO: 261964 - RNA, 19 nt, Homo sapiens
  misc_RNA (1)...(19): siRNA sense strand
uuacgaagacauuccauuc

SEQ ID NO: 261965 - RNA, 19 nt, Homo sapiens
  misc_RNA (1)...(19): siRNA sense strand
aaucaccauucguuaucua

SEQ ID NO: 261966 - RNA, 19 nt, Homo sapiens
  misc_RNA (1)...(19): siRNA sense strand
guggaucucuccguaaugg

SEQ ID NO: 261967 - RNA, 19 nt, Homo sapiens
  misc_RNA (1)...(19): siRNA sense strand
uuaaugaugggagaagaua

SEQ ID NO: 261968 - RNA, 19 nt, Homo sapiens
  misc_RNA (1)...(19): siRNA sense strand
cguuaucuaugacaugaau

SEQ ID NO: 261969 - RNA, 19 nt, Homo sapiens
  misc_RNA (1)...(19): siRNA sense strand
caggaaagacaacagacaa

SEQ ID NO: 261970 - RNA, 19 nt, Homo sapiens
  misc_RNA (1)...(19): siRNA sense strand
ugacaggaaagacaacaga

SEQ ID NO: 261971 - RNA, 19 nt, Homo sapiens
  misc_RNA (1)...(19): siRNA sense strand
caaaggcgagggcgaucuu

SEQ ID NO: 261972 - RNA, 19 nt, Homo sapiens
  misc_RNA (1)...(19): siRNA sense strand
cagcgacuuggcaauauuu

SEQ ID NO: 261973 - RNA, 19 nt, Homo sapiens
  misc_RNA (1)...(19): siRNA sense strand
caagaguaccaaagugcaa

SEQ ID NO: 261974 - RNA, 19 nt, Homo sapiens
  misc_RNA (1)...(19): siRNA sense strand
gaguccacgagaucauuua

SEQ ID NO: 261975 - RNA, 19 nt, Homo sapiens
  misc_RNA (1)...(19): siRNA sense strand
ucacuacuguugacuucuc

SEQ ID NO: 261976 - RNA, 19 nt, Homo sapiens
  misc_RNA (1)...(19): siRNA sense strand
ucauaaugccaucagguuu

SEQ ID NO: 261977 - RNA, 19 nt, Homo sapiens
  misc_RNA (1)...(19): siRNA sense strand
ugucaguacugucgguuuc

SEQ ID NO: 261978 - RNA, 19 nt, Homo sapiens
  misc_RNA (1)...(19): siRNA sense strand
caaaguggagccugcaucu

SEQ ID NO: 261979 - RNA, 19 nt, Homo sapiens
  misc_RNA (1)...(19): siRNA sense strand
augcuggccuccuugauga

SEQ ID NO: 261980 - RNA, 19 nt, Homo sapiens
  misc_RNA (1)...(19): siRNA sense strand
gauugaagcuuaucuauga

SEQ ID NO: 261981 - RNA, 19 nt, Homo sapiens
  misc_RNA (1)...(19): siRNA sense strand
agacucagcucuacaauaa

SEQ ID NO: 261982 - RNA, 19 nt, Homo sapiens
  misc_RNA (1)...(19): siRNA sense strand
ccaaguaacucuccucaaa

SEQ ID NO: 261983 - RNA, 19 nt, Homo sapiens
  misc_RNA (1)...(19): siRNA sense strand
agauaaagcuucuggauuu

SEQ ID NO: 261984 - RNA, 19 nt, Homo sapiens
  misc_RNA (1)...(19): siRNA sense strand
gacaugaauuccuuaauga

SEQ ID NO: 261985 - RNA, 19 nt, Homo sapiens
  misc_RNA (1)...(19): siRNA sense strand
gaaguucaaugcacuggaa

SEQ ID NO: 261986 - RNA, 19 nt, Homo sapiens
  misc_RNA (1)...(19): siRNA sense strand
guaccaaagugcaaucaaa

SEQ ID NO: 261987 - RNA, 19 nt, Homo sapiens
  misc_RNA (1)...(19): siRNA sense strand
ugacaugaauuccuuaaug

SEQ ID NO: 261988 - RNA, 19 nt, Homo sapiens
  misc_RNA (1)...(19): siRNA sense strand
aaguaacucuccucaaaua

SEQ ID NO: 261989 - RNA, 19 nt, Homo sapiens
  misc_RNA (1)...(19): siRNA sense strand
ucaaugcacuggaauuaga

SEQ ID NO: 261990 - RNA, 19 nt, Homo sapiens
  misc_RNA (1)...(19): siRNA sense strand
gcauuucuacuccacauua

SEQ ID NO: 261991 - RNA, 19 nt, Homo sapiens
  misc_RNA (1)...(19): siRNA sense strand
gacauuccauucacaagaa

SEQ ID NO: 261992 - RNA, 19 nt, Homo sapiens
  misc_RNA (1)...(19): siRNA sense strand
uuacaaguaugaccugaaa

SEQ ID NO: 261993 - RNA, 19 nt, Homo sapiens
  misc_RNA (1)...(19): siRNA sense strand
ggccaaggcuucaugacaa

SEQ ID NO: 261994 - RNA, 19 nt, Homo sapiens
  misc_RNA (1)...(19): siRNA sense strand
gcaauugaaugucgugucu

SEQ ID NO: 261995 - RNA, 19 nt, Homo sapiens
  misc_RNA (1)...(19): siRNA sense strand
acaauaagccucaugaaga

SEQ ID NO: 261996 - RNA, 19 nt, Homo sapiens
  misc_RNA (1)...(19): siRNA sense strand
caagggaguuucuaaagag

SEQ ID NO: 261997 - RNA, 19 nt, Homo sapiens
  misc_RNA (1)...(19): siRNA sense strand
caauaagccucaugaagag

SEQ ID NO: 261998 - RNA, 19 nt, Homo sapiens
  misc_RNA (1)...(19): siRNA sense strand
gagauaaagcuucuggauu

SEQ ID NO: 261999 - RNA, 19 nt, Homo sapiens
  misc_RNA (1)...(19): siRNA sense strand
acaagggaguuucuaaaga

SEQ ID NO: 262000 - RNA, 19 nt, Homo sapiens
  misc_RNA (1)...(19): siRNA sense strand
gaaauaaaugucaguacug

SEQ ID NO: 262001 - RNA, 19 nt, Homo sapiens
  misc_RNA (1)...(19): siRNA sense strand
gaucacagaguaugccaaa

SEQ ID NO: 262002 - RNA, 19 nt, Homo sapiens
  misc_RNA (1)...(19): siRNA sense strand
gaaagacaacagacaaauc

SEQ ID NO: 262003 - RNA, 19 nt, Homo sapiens
  misc_RNA (1)...(19): siRNA sense strand
ugacagaccucagacagau

SEQ ID NO: 262004 - RNA, 19 nt, Homo sapiens
  misc_RNA (1)...(19): siRNA sense strand
aagaacagauccagugguu

SEQ ID NO: 262005 - RNA, 19 nt, Homo sapiens
  misc_RNA (1)...(19): siRNA sense strand
gguugcagauuacaaguau

SEQ ID NO: 262006 - RNA, 19 nt, Homo sapiens
  misc_RNA (1)...(19): siRNA sense strand
gacaaaucaccauucguua

SEQ ID NO: 262007 - RNA, 19 nt, Homo sapiens
  misc_RNA (1)...(19): siRNA sense strand
gcacuggaauuagaugaca

SEQ ID NO: 262008 - RNA, 19 nt, Homo sapiens
  misc_RNA (1)...(19): siRNA sense strand
guucaaugcacuggaauua

SEQ ID NO: 262009 - RNA, 19 nt, Homo sapiens
  misc_RNA (1)...(19): siRNA sense strand
caccauucguuaucuauga

SEQ ID NO: 262010 - RNA, 19 nt, Homo sapiens
  misc_RNA (1)...(19): siRNA sense strand
gaagacauuccauucacaa

SEQ ID NO: 262011 - RNA, 19 nt, Homo sapiens
  misc_RNA (1)...(19): siRNA sense strand
gaagcccauugaagacauu

SEQ ID NO: 262012 - RNA, 19 nt, Homo sapiens
  misc_RNA (1)...(19): siRNA sense strand
ugcaggagaucacagagua

SEQ ID NO: 262013 - RNA, 19 nt, Homo sapiens
  misc_RNA (1)...(19): siRNA sense strand
gauaaagcuucuggauuuc

SEQ ID NO: 262014 - RNA, 19 nt, Homo sapiens
  misc_RNA (1)...(19): siRNA sense strand
caacagacaaaucaccauu

SEQ ID NO: 262015 - RNA, 19 nt, Homo sapiens
  misc_RNA (1)...(19): siRNA sense strand
ucaagaagacggagacaga

SEQ ID NO: 262016 - RNA, 19 nt, Homo sapiens
  misc_RNA (1)...(19): siRNA sense strand
ugacagcgacuuggcaaua

SEQ ID NO: 262017 - RNA, 19 nt, Homo sapiens
  misc_RNA (1)...(19): siRNA sense strand
agacaaaucaccauucguu

SEQ ID NO: 262018 - RNA, 19 nt, Homo sapiens
  misc_RNA (1)...(19): siRNA sense strand
ggaaagacaacagacaaau

SEQ ID NO: 262019 - RNA, 19 nt, Homo sapiens
  misc_RNA (1)...(19): siRNA sense strand
gauaucaagcccuucacua

SEQ ID NO: 262020 - RNA, 19 nt, Homo sapiens
  misc_RNA (1)...(19): siRNA sense strand
acacaaugcuggccuccuu

SEQ ID NO: 262021 - RNA, 19 nt, Homo sapiens
  misc_RNA (1)...(19): siRNA sense strand
uaacucuccucaaauaugg

SEQ ID NO: 262022 - RNA, 19 nt, Homo sapiens
  misc_RNA (1)...(19): siRNA sense strand
aaagacaacagacaaauca

SEQ ID NO: 262023 - RNA, 19 nt, Homo sapiens
  misc_RNA (1)...(19): siRNA sense strand
ggagauaaagcuucuggau

SEQ ID NO: 262024 - RNA, 19 nt, Homo sapiens
  misc_RNA (1)...(19): siRNA sense strand
gacagcgacuuggcaauau

SEQ ID NO: 262025 - RNA, 19 nt, Homo sapiens
  misc_RNA (1)...(19): siRNA sense strand
guugacuucuccagcauuu

SEQ ID NO: 262026 - RNA, 19 nt, Homo sapiens
  misc_RNA (1)...(19): siRNA sense strand
guaacucuccucaaauaug

SEQ ID NO: 262027 - RNA, 19 nt, Homo sapiens
  misc_RNA (1)...(19): siRNA sense strand
caagacaaccugcuacaag

SEQ ID NO: 262028 - RNA, 19 nt, Homo sapiens
  misc_RNA (1)...(19): siRNA sense strand
ugucgugucuguggagaua

SEQ ID NO: 262029 - RNA, 19 nt, Homo sapiens
  misc_RNA (1)...(19): siRNA sense strand
caaaucaccauucguuauc

SEQ ID NO: 262030 - RNA, 19 nt, Homo sapiens
  misc_RNA (1)...(19): siRNA sense strand
ccaacucccucauggcaau

SEQ ID NO: 262031 - RNA, 19 nt, Homo sapiens
  misc_RNA (1)...(19): siRNA sense strand
gaaaaugacagaccucaga

SEQ ID NO: 262032 - RNA, 19 nt, Homo sapiens
  misc_RNA (1)...(19): siRNA sense strand
cuaaagagccugcgaaagc

SEQ ID NO: 262033 - RNA, 19 nt, Homo sapiens
  misc_RNA (1)...(19): siRNA sense strand
ugacaagggaguuucuaaa

SEQ ID NO: 262034 - RNA, 19 nt, Homo sapiens
  misc_RNA (1)...(19): siRNA sense strand
ccaaaagcauuccugguuu

SEQ ID NO: 262035 - RNA, 19 nt, Homo sapiens
  misc_RNA (1)...(19): siRNA sense strand
ggauuucacuauggaguuc

SEQ ID NO: 262036 - RNA, 19 nt, Homo sapiens
  misc_RNA (1)...(19): siRNA sense strand
cagguuugcugaaugugaa

SEQ ID NO: 262037 - RNA, 19 nt, Homo sapiens
  misc_RNA (1)...(19): siRNA sense strand
ucuaugacaugaauuccuu

SEQ ID NO: 262038 - RNA, 19 nt, Homo sapiens
  misc_RNA (1)...(19): siRNA sense strand
cgaagacauuccauucaca

SEQ ID NO: 262039 - RNA, 19 nt, Homo sapiens
  misc_RNA (1)...(19): siRNA sense strand
gcccagguuugcugaaugu

SEQ ID NO: 262040 - RNA, 19 nt, Homo sapiens
  misc_RNA (1)...(19): siRNA sense strand
uuauggagcccaaguuuga

SEQ ID NO: 262041 - RNA, 19 nt, Homo sapiens
  misc_RNA (1)...(19): siRNA sense strand
ugcaggagaucuacaagga

SEQ ID NO: 262042 - RNA, 19 nt, Homo sapiens
  misc_RNA (1)...(19): siRNA sense strand
cauaaugccaucagguuug

SEQ ID NO: 262043 - RNA, 19 nt, Homo sapiens
  misc_RNA (1)...(19): siRNA sense strand
gacaagggaguuucuaaag

SEQ ID NO: 262044 - RNA, 19 nt, Homo sapiens
  misc_RNA (1)...(19): siRNA sense strand
ggaguccacgagaucauuu

SEQ ID NO: 262045 - RNA, 19 nt, Homo sapiens
  misc_RNA (1)...(19): siRNA sense strand
caaguaacucuccucaaau

SEQ ID NO: 262046 - RNA, 19 nt, Homo sapiens
  misc_RNA (1)...(19): siRNA sense strand
acaaaucaccauucguuau

SEQ ID NO: 262047 - RNA, 19 nt, Homo sapiens
  misc_RNA (1)...(19): siRNA sense strand
gaagacggagacagacaug

SEQ ID NO: 262048 - RNA, 19 nt, Homo sapiens
  misc_RNA (1)...(19): siRNA sense strand
uugccaagcugcuccagaa

SEQ ID NO: 262049 - RNA, 19 nt, Homo sapiens
  misc_RNA (1)...(19): siRNA sense strand
ugaguuugcugugaaguuc

SEQ ID NO: 262050 - RNA, 19 nt, Homo sapiens
  misc_RNA (1)...(19): siRNA sense strand
ccuccuugaugaauaaaga

SEQ ID NO: 262051 - RNA, 19 nt, Homo sapiens
  misc_RNA (1)...(19): siRNA sense strand
uuucagggcugccaguuuc

SEQ ID NO: 262052 - RNA, 19 nt, Homo sapiens
  misc_RNA (1)...(19): siRNA sense strand
ccaaagugcaaucaaagug

SEQ ID NO: 262053 - RNA, 19 nt, Homo sapiens
  misc_RNA (1)...(19): siRNA sense strand
gagcccaaguuugaguuug

SEQ ID NO: 262054 - RNA, 19 nt, Homo sapiens
  misc_RNA (1)...(19): siRNA sense strand
auccagugguugcagauua

SEQ ID NO: 262055 - RNA, 19 nt, Homo sapiens
  misc_RNA (1)...(19): siRNA sense strand
ggaucucuccguaauggaa

SEQ ID NO: 262056 - RNA, 19 nt, Homo sapiens
  misc_RNA (1)...(19): siRNA sense strand
acucauacauaaaguccuu

SEQ ID NO: 262057 - RNA, 19 nt, Homo sapiens
  misc_RNA (1)...(19): siRNA sense strand
uggccuccuugaugaauaa

SEQ ID NO: 262058 - RNA, 19 nt, Homo sapiens
  misc_RNA (1)...(19): siRNA sense strand
caugaauuccuuaaugaug

SEQ ID NO: 262059 - RNA, 19 nt, Homo sapiens
  misc_RNA (1)...(19): siRNA sense strand
ccucauggcaauugaaugu

SEQ ID NO: 262060 - RNA, 19 nt, Homo sapiens
  misc_RNA (1)...(19): siRNA sense strand
guggagaccgcccagguuu

SEQ ID NO: 262061 - RNA, 19 nt, Homo sapiens
  misc_RNA (1)...(19): siRNA sense strand
acagcgacuuggcaauauu

SEQ ID NO: 262062 - RNA, 19 nt, Homo sapiens
  misc_RNA (1)...(19): siRNA sense strand
uuacgaagacauuccauuc

SEQ ID NO: 262063 - RNA, 19 nt, Homo sapiens
  misc_RNA (1)...(19): siRNA sense strand
aaucaccauucguuaucua

SEQ ID NO: 262064 - RNA, 19 nt, Homo sapiens
  misc_RNA (1)...(19): siRNA sense strand
ugacaggaaagacaacaga

SEQ ID NO: 262065 - RNA, 19 nt, Homo sapiens
  misc_RNA (1)...(19): siRNA sense strand
guggaucucuccguaaugg

SEQ ID NO: 262066 - RNA, 19 nt, Homo sapiens
  misc_RNA (1)...(19): siRNA sense strand
uuaaugaugggagaagaua

SEQ ID NO: 262067 - RNA, 19 nt, Homo sapiens
  misc_RNA (1)...(19): siRNA sense strand
cguuaucuaugacaugaau

SEQ ID NO: 262068 - RNA, 19 nt, Homo sapiens
  misc_RNA (1)...(19): siRNA sense strand
caggaaagacaacagacaa

SEQ ID NO: 262069 - RNA, 19 nt, Homo sapiens
  misc_RNA (1)...(19): siRNA sense strand
caaaggcgagggcgaucuu

SEQ ID NO: 262070 - RNA, 19 nt, Homo sapiens
  misc_RNA (1)...(19): siRNA sense strand
cagcgacuuggcaauauuu

SEQ ID NO: 262071 - RNA, 19 nt, Homo sapiens
  misc_RNA (1)...(19): siRNA sense strand
caagaguaccaaagugcaa

SEQ ID NO: 262072 - RNA, 19 nt, Homo sapiens
  misc_RNA (1)...(19): siRNA sense strand
gaguccacgagaucauuua

SEQ ID NO: 262073 - RNA, 19 nt, Homo sapiens
  misc_RNA (1)...(19): siRNA sense strand
ucacuacuguugacuucuc

SEQ ID NO: 262074 - RNA, 19 nt, Homo sapiens
  misc_RNA (1)...(19): siRNA sense strand
ucauaaugccaucagguuu

SEQ ID NO: 262075 - RNA, 19 nt, Homo sapiens
  misc_RNA (1)...(19): siRNA sense strand
ugucaguacugucgguuuc

SEQ ID NO: 262076 - RNA, 19 nt, Homo sapiens
  misc_RNA (1)...(19): siRNA sense strand
caaaguggagccugcaucu

SEQ ID NO: 262077 - RNA, 19 nt, Homo sapiens
  misc_RNA (1)...(19): siRNA sense strand
cuauggaguucaugcuugu

SEQ ID NO: 262078 - RNA, 19 nt, Homo sapiens
  misc_RNA (1)...(19): siRNA sense strand
augcuggccuccuugauga

SEQ ID NO: 262079 - RNA, 19 nt, Homo sapiens
  misc_RNA (1)...(19): siRNA sense strand
gggcgaucuugacaggaaa

SEQ ID NO: 262080 - RNA, 19 nt, Homo sapiens
  misc_RNA (1)...(19): siRNA sense strand
gauugaagcuuaucuauga

SEQ ID NO: 262081 - RNA, 19 nt, Homo sapiens
  misc_RNA (1)...(19): siRNA sense strand
agacucagcucuacaauaa

SEQ ID NO: 262082 - RNA, 19 nt, Homo sapiens
  misc_RNA (1)...(19): siRNA sense strand
ccaaguaacucuccucaaa

SEQ ID NO: 262083 - RNA, 19 nt, Homo sapiens
  misc_RNA (1)...(19): siRNA sense strand
agauaaagcuucuggauuu

SEQ ID NO: 262084 - RNA, 19 nt, Homo sapiens
  misc_RNA (1)...(19): siRNA sense strand
gacaugaauuccuuaauga

SEQ ID NO: 262085 - RNA, 19 nt, Homo sapiens
  misc_RNA (1)...(19): siRNA sense strand
gaaguucaaugcacuggaa

SEQ ID NO: 262086 - RNA, 19 nt, Homo sapiens
  misc_RNA (1)...(19): siRNA sense strand
guaccaaagugcaaucaaa

SEQ ID NO: 262087 - RNA, 19 nt, Homo sapiens
  misc_RNA (1)...(19): siRNA sense strand
ugacaugaauuccuuaaug

SEQ ID NO: 262088 - RNA, 19 nt, Homo sapiens
  misc_RNA (1)...(19): siRNA sense strand
aaguaacucuccucaaaua

SEQ ID NO: 262089 - RNA, 19 nt, Homo sapiens
  misc_RNA (1)...(19): siRNA sense strand
ucaaugcacuggaauuaga

SEQ ID NO: 262090 - RNA, 19 nt, Homo sapiens
  misc_RNA (1)...(19): siRNA sense strand
gcauuucuacuccacauua

SEQ ID NO: 262091 - RNA, 19 nt, Homo sapiens
  misc_RNA (1)...(19): siRNA sense strand
gacauuccauucacaagaa

SEQ ID NO: 262092 - RNA, 19 nt, Homo sapiens
  misc_RNA (1)...(19): siRNA sense strand
uuacaaguaugaccugaaa

SEQ ID NO: 262093 - RNA, 19 nt, Homo sapiens
  misc_RNA (1)...(19): siRNA sense strand
ggccaaggcuucaugacaa

SEQ ID NO: 262094 - RNA, 19 nt, Homo sapiens
  misc_RNA (1)...(19): siRNA sense strand
gcaauugaaugucgugucu

SEQ ID NO: 262095 - RNA, 19 nt, Homo sapiens
  misc_RNA (1)...(19): siRNA sense strand
acaauaagccucaugaaga

SEQ ID NO: 262096 - RNA, 19 nt, Homo sapiens
  misc_RNA (1)...(19): siRNA sense strand
caagggaguuucuaaagag

SEQ ID NO: 262097 - RNA, 19 nt, Homo sapiens
  misc_RNA (1)...(19): siRNA sense strand
caauaagccucaugaagag

SEQ ID NO: 262098 - RNA, 19 nt, Homo sapiens
  misc_RNA (1)...(19): siRNA sense strand
gagauaaagcuucuggauu

SEQ ID NO: 262099 - RNA, 19 nt, Homo sapiens
  misc_RNA (1)...(19): siRNA sense strand
acaagggaguuucuaaaga

SEQ ID NO: 262100 - RNA, 19 nt, Homo sapiens
  misc_RNA (1)...(19): siRNA sense strand
gaaauaaaugucaguacug

SEQ ID NO: 262101 - RNA, 19 nt, Homo sapiens
  misc_RNA (1)...(19): siRNA sense strand
gaucacagaguaugccaaa

SEQ ID NO: 262102 - RNA, 19 nt, Homo sapiens
  misc_RNA (1)...(19): siRNA sense strand
gaaagacaacagacaaauc

SEQ ID NO: 262103 - RNA, 19 nt, Homo sapiens
  misc_RNA (1)...(19): siRNA sense strand
ugacagaccucagacagau

SEQ ID NO: 262104 - RNA, 19 nt, Homo sapiens
  misc_RNA (1)...(19): siRNA sense strand
aagaacagauccagugguu

SEQ ID NO: 262105 - RNA, 19 nt, Homo sapiens
  misc_RNA (1)...(19): siRNA sense strand
gguugcagauuacaaguau

SEQ ID NO: 262106 - RNA, 19 nt, Homo sapiens
  misc_RNA (1)...(19): siRNA sense strand
gacaaaucaccauucguua

SEQ ID NO: 262107 - RNA, 19 nt, Homo sapiens
  misc_RNA (1)...(19): siRNA sense strand
gcacuggaauuagaugaca

SEQ ID NO: 262108 - RNA, 19 nt, Homo sapiens
  misc_RNA (1)...(19): siRNA sense strand
guucaaugcacuggaauua

SEQ ID NO: 262109 - RNA, 19 nt, Homo sapiens
  misc_RNA (1)...(19): siRNA sense strand
caccauucguuaucuauga

SEQ ID NO: 262110 - RNA, 19 nt, Homo sapiens
  misc_RNA (1)...(19): siRNA sense strand
gaagacauuccauucacaa

SEQ ID NO: 262111 - RNA, 19 nt, Homo sapiens
  misc_RNA (1)...(19): siRNA sense strand
gaagcccauugaagacauu

SEQ ID NO: 262112 - RNA, 19 nt, Homo sapiens
  misc_RNA (1)...(19): siRNA sense strand
ugcaggagaucacagagua

SEQ ID NO: 262113 - RNA, 19 nt, Homo sapiens
  misc_RNA (1)...(19): siRNA sense strand
gauaaagcuucuggauuuc

SEQ ID NO: 262114 - RNA, 19 nt, Homo sapiens
  misc_RNA (1)...(19): siRNA sense strand
caacagacaaaucaccauu

SEQ ID NO: 262115 - RNA, 19 nt, Homo sapiens
  misc_RNA (1)...(19): siRNA sense strand
ucaagaagacggagacaga

SEQ ID NO: 262116 - RNA, 19 nt, Homo sapiens
  misc_RNA (1)...(19): siRNA sense strand
ugacagcgacuuggcaaua

SEQ ID NO: 262117 - RNA, 19 nt, Homo sapiens
  misc_RNA (1)...(19): siRNA sense strand
agacaaaucaccauucguu

SEQ ID NO: 262118 - RNA, 19 nt, Homo sapiens
  misc_RNA (1)...(19): siRNA sense strand
ggaaagacaacagacaaau

SEQ ID NO: 262119 - RNA, 19 nt, Homo sapiens
  misc_RNA (1)...(19): siRNA sense strand
gauaucaagcccuucacua

SEQ ID NO: 262120 - RNA, 19 nt, Homo sapiens
  misc_RNA (1)...(19): siRNA sense strand
acacaaugcuggccuccuu

SEQ ID NO: 262121 - RNA, 19 nt, Homo sapiens
  misc_RNA (1)...(19): siRNA sense strand
uaacucuccucaaauaugg

SEQ ID NO: 262122 - RNA, 19 nt, Homo sapiens
  misc_RNA (1)...(19): siRNA sense strand
aaagacaacagacaaauca

SEQ ID NO: 262123 - RNA, 19 nt, Homo sapiens
  misc_RNA (1)...(19): siRNA sense strand
ggagauaaagcuucuggau

SEQ ID NO: 262124 - RNA, 19 nt, Homo sapiens
  misc_RNA (1)...(19): siRNA sense strand
gacagcgacuuggcaauau

SEQ ID NO: 262125 - RNA, 19 nt, Homo sapiens
  misc_RNA (1)...(19): siRNA sense strand
guugacuucuccagcauuu

SEQ ID NO: 262126 - RNA, 19 nt, Homo sapiens
  misc_RNA (1)...(19): siRNA sense strand
guaacucuccucaaauaug

SEQ ID NO: 262127 - RNA, 19 nt, Homo sapiens
  misc_RNA (1)...(19): siRNA sense strand
caagacaaccugcuacaag

SEQ ID NO: 262128 - RNA, 19 nt, Homo sapiens
  misc_RNA (1)...(19): siRNA sense strand
ugucgugucuguggagaua

SEQ ID NO: 262129 - RNA, 19 nt, Homo sapiens
  misc_RNA (1)...(19): siRNA sense strand
caaaucaccauucguuauc

SEQ ID NO: 262130 - RNA, 19 nt, Homo sapiens
  misc_RNA (1)...(19): siRNA sense strand
ccaacucccucauggcaau

SEQ ID NO: 262131 - RNA, 19 nt, Homo sapiens
  misc_RNA (1)...(19): siRNA sense strand
gaaaaugacagaccucaga

SEQ ID NO: 262132 - RNA, 19 nt, Homo sapiens
  misc_RNA (1)...(19): siRNA sense strand
cuaaagagccugcgaaagc

SEQ ID NO: 262133 - RNA, 19 nt, Homo sapiens
  misc_RNA (1)...(19): siRNA sense strand
ugacaagggaguuucuaaa

SEQ ID NO: 262134 - RNA, 19 nt, Homo sapiens
  misc_RNA (1)...(19): siRNA sense strand
ccaaaagcauuccugguuu

SEQ ID NO: 262135 - RNA, 19 nt, Homo sapiens
  misc_RNA (1)...(19): siRNA sense strand
ggauuucacuauggaguuc

SEQ ID NO: 262136 - RNA, 19 nt, Homo sapiens
  misc_RNA (1)...(19): siRNA sense strand
cagguuugcugaaugugaa

SEQ ID NO: 262137 - RNA, 19 nt, Homo sapiens
  misc_RNA (1)...(19): siRNA sense strand
ucuaugacaugaauuccuu

SEQ ID NO: 262138 - RNA, 19 nt, Homo sapiens
  misc_RNA (1)...(19): siRNA sense strand
cgaagacauuccauucaca

SEQ ID NO: 262139 - RNA, 19 nt, Homo sapiens
  misc_RNA (1)...(19): siRNA sense strand
gcccagguuugcugaaugu

SEQ ID NO: 262140 - RNA, 19 nt, Homo sapiens
  misc_RNA (1)...(19): siRNA sense strand
uuauggagcccaaguuuga

SEQ ID NO: 262141 - RNA, 19 nt, Homo sapiens
  misc_RNA (1)...(19): siRNA sense strand
ugcaggagaucuacaagga

SEQ ID NO: 262142 - RNA, 19 nt, Homo sapiens
  misc_RNA (1)...(19): siRNA sense strand
cauaaugccaucagguuug

SEQ ID NO: 262143 - RNA, 19 nt, Homo sapiens
  misc_RNA (1)...(19): siRNA sense strand
gacaagggaguuucuaaag

SEQ ID NO: 262144 - RNA, 19 nt, Homo sapiens
  misc_RNA (1)...(19): siRNA sense strand
ggaguccacgagaucauuu

SEQ ID NO: 262145 - RNA, 19 nt, Homo sapiens
  misc_RNA (1)...(19): siRNA sense strand
caaguaacucuccucaaau

SEQ ID NO: 262146 - RNA, 19 nt, Homo sapiens
  misc_RNA (1)...(19): siRNA sense strand
acaaaucaccauucguuau

SEQ ID NO: 262147 - RNA, 19 nt, Homo sapiens
  misc_RNA (1)...(19): siRNA sense strand
gaagacggagacagacaug

SEQ ID NO: 262148 - RNA, 19 nt, Homo sapiens
  misc_RNA (1)...(19): siRNA sense strand
uugccaagcugcuccagaa

SEQ ID NO: 262149 - RNA, 19 nt, Homo sapiens
  misc_RNA (1)...(19): siRNA sense strand
ugaguuugcugugaaguuc

SEQ ID NO: 262150 - RNA, 19 nt, Homo sapiens
  misc_RNA (1)...(19): siRNA sense strand
ccuccuugaugaauaaaga

SEQ ID NO: 262151 - RNA, 19 nt, Homo sapiens
  misc_RNA (1)...(19): siRNA sense strand
uuucagggcugccaguuuc

SEQ ID NO: 262152 - RNA, 19 nt, Homo sapiens
  misc_RNA (1)...(19): siRNA sense strand
ccaaagugcaaucaaagug

SEQ ID NO: 262153 - RNA, 19 nt, Homo sapiens
  misc_RNA (1)...(19): siRNA sense strand
gagcccaaguuugaguuug

SEQ ID NO: 262154 - RNA, 19 nt, Homo sapiens
  misc_RNA (1)...(19): siRNA sense strand
auccagugguugcagauua

SEQ ID NO: 262155 - RNA, 19 nt, Homo sapiens
  misc_RNA (1)...(19): siRNA sense strand
ggaucucuccguaauggaa

SEQ ID NO: 262156 - RNA, 19 nt, Homo sapiens
  misc_RNA (1)...(19): siRNA sense strand
acucauacauaaaguccuu

SEQ ID NO: 262157 - RNA, 19 nt, Homo sapiens
  misc_RNA (1)...(19): siRNA sense strand
uggccuccuugaugaauaa

SEQ ID NO: 262158 - RNA, 19 nt, Homo sapiens
  misc_RNA (1)...(19): siRNA sense strand
caugaauuccuuaaugaug

SEQ ID NO: 262159 - RNA, 19 nt, Homo sapiens
  misc_RNA (1)...(19): siRNA sense strand
ccucauggcaauugaaugu

SEQ ID NO: 262160 - RNA, 19 nt, Homo sapiens
  misc_RNA (1)...(19): siRNA sense strand
guggagaccgcccagguuu

SEQ ID NO: 262161 - RNA, 19 nt, Homo sapiens
  misc_RNA (1)...(19): siRNA sense strand
acagcgacuuggcaauauu

SEQ ID NO: 262162 - RNA, 19 nt, Homo sapiens
  misc_RNA (1)...(19): siRNA sense strand
uuacgaagacauuccauuc

SEQ ID NO: 262163 - RNA, 19 nt, Homo sapiens
  misc_RNA (1)...(19): siRNA sense strand
aaucaccauucguuaucua

SEQ ID NO: 262164 - RNA, 19 nt, Homo sapiens
  misc_RNA (1)...(19): siRNA sense strand
ugacaggaaagacaacaga

SEQ ID NO: 262165 - RNA, 19 nt, Homo sapiens
  misc_RNA (1)...(19): siRNA sense strand
guggaucucuccguaaugg

SEQ ID NO: 262166 - RNA, 19 nt, Homo sapiens
  misc_RNA (1)...(19): siRNA sense strand
uuaaugaugggagaagaua

SEQ ID NO: 262167 - RNA, 19 nt, Homo sapiens
  misc_RNA (1)...(19): siRNA sense strand
cguuaucuaugacaugaau

SEQ ID NO: 262168 - RNA, 19 nt, Homo sapiens
  misc_RNA (1)...(19): siRNA sense strand
caggaaagacaacagacaa

SEQ ID NO: 262169 - RNA, 19 nt, Homo sapiens
  misc_RNA (1)...(19): siRNA sense strand
caaaggcgagggcgaucuu

SEQ ID NO: 262170 - RNA, 19 nt, Homo sapiens
  misc_RNA (1)...(19): siRNA sense strand
cagcgacuuggcaauauuu

SEQ ID NO: 262171 - RNA, 19 nt, Homo sapiens
  misc_RNA (1)...(19): siRNA sense strand
caagaguaccaaagugcaa

SEQ ID NO: 262172 - RNA, 19 nt, Homo sapiens
  misc_RNA (1)...(19): siRNA sense strand
gaguccacgagaucauuua

SEQ ID NO: 262173 - RNA, 19 nt, Homo sapiens
  misc_RNA (1)...(19): siRNA sense strand
ucacuacuguugacuucuc

SEQ ID NO: 262174 - RNA, 19 nt, Homo sapiens
  misc_RNA (1)...(19): siRNA sense strand
ucauaaugccaucagguuu

SEQ ID NO: 262175 - RNA, 19 nt, Homo sapiens
  misc_RNA (1)...(19): siRNA sense strand
ugucaguacugucgguuuc

SEQ ID NO: 262176 - RNA, 19 nt, Homo sapiens
  misc_RNA (1)...(19): siRNA sense strand
caaaguggagccugcaucu

SEQ ID NO: 262177 - RNA, 19 nt, Homo sapiens
  misc_RNA (1)...(19): siRNA sense strand
cuauggaguucaugcuugu

SEQ ID NO: 262178 - RNA, 19 nt, Homo sapiens
  misc_RNA (1)...(19): siRNA sense strand
augcuggccuccuugauga

SEQ ID NO: 262179 - RNA, 19 nt, Homo sapiens
  misc_RNA (1)...(19): siRNA sense strand
gggcgaucuugacaggaaa

SEQ ID NO: 262180 - RNA, 19 nt, Homo sapiens
  misc_RNA (1)...(19): siRNA sense strand
gaacagagccugaccaaga

SEQ ID NO: 262181 - RNA, 19 nt, Homo sapiens
  misc_RNA (1)...(19): siRNA sense strand
ugaagaaggucuccaaaga

SEQ ID NO: 262182 - RNA, 19 nt, Homo sapiens
  misc_RNA (1)...(19): siRNA sense strand
gaccgcagcugcacaagaa

SEQ ID NO: 262183 - RNA, 19 nt, Homo sapiens
  misc_RNA (1)...(19): siRNA sense strand
caaggaagauaaaggaaga

SEQ ID NO: 262184 - RNA, 19 nt, Homo sapiens
  misc_RNA (1)...(19): siRNA sense strand
caaacuaacugucauguac

SEQ ID NO: 262185 - RNA, 19 nt, Homo sapiens
  misc_RNA (1)...(19): siRNA sense strand
caacaagaauacacggaaa

SEQ ID NO: 262186 - RNA, 19 nt, Homo sapiens
  misc_RNA (1)...(19): siRNA sense strand
caacaccgcccacaacaaa

SEQ ID NO: 262187 - RNA, 19 nt, Homo sapiens
  misc_RNA (1)...(19): siRNA sense strand
caacaaagccagucuacau

SEQ ID NO: 262188 - RNA, 19 nt, Homo sapiens
  misc_RNA (1)...(19): siRNA sense strand
gcggaugacugcaaacaga

SEQ ID NO: 262189 - RNA, 19 nt, Homo sapiens
  misc_RNA (1)...(19): siRNA sense strand
ccagcaagcuucccacguu

SEQ ID NO: 262190 - RNA, 19 nt, Homo sapiens
  misc_RNA (1)...(19): siRNA sense strand
cgagagcacuggaugaugu

SEQ ID NO: 262191 - RNA, 19 nt, Homo sapiens
  misc_RNA (1)...(19): siRNA sense strand
gcaaguuugacaccauuua

SEQ ID NO: 262192 - RNA, 19 nt, Homo sapiens
  misc_RNA (1)...(19): siRNA sense strand
ggaaaugaaggcucucuug

SEQ ID NO: 262193 - RNA, 19 nt, Homo sapiens
  misc_RNA (1)...(19): siRNA sense strand
gaaaagaaauccaagaaac

SEQ ID NO: 262194 - RNA, 19 nt, Homo sapiens
  misc_RNA (1)...(19): siRNA sense strand
gagaccaccucgacaagga

SEQ ID NO: 262195 - RNA, 19 nt, Homo sapiens
  misc_RNA (1)...(19): siRNA sense strand
gaacaguuaguggauuuaa

SEQ ID NO: 262196 - RNA, 19 nt, Homo sapiens
  misc_RNA (1)...(19): siRNA sense strand
ggacuuuacugaggcuuug

SEQ ID NO: 262197 - RNA, 19 nt, Homo sapiens
  misc_RNA (1)...(19): siRNA sense strand
gaaacaggcagcaggaugu

SEQ ID NO: 262198 - RNA, 19 nt, Homo sapiens
  misc_RNA (1)...(19): siRNA sense strand
gaacucaacaucucucaag

SEQ ID NO: 262199 - RNA, 19 nt, Homo sapiens
  misc_RNA (1)...(19): siRNA sense strand
gaaggucuccaaagaggaa

SEQ ID NO: 262200 - RNA, 19 nt, Homo sapiens
  misc_RNA (1)...(19): siRNA sense strand
caacaaaguggcucuguca

SEQ ID NO: 262201 - RNA, 19 nt, Homo sapiens
  misc_RNA (1)...(19): siRNA sense strand
ugacaccauuuaucagauu

SEQ ID NO: 262202 - RNA, 19 nt, Homo sapiens
  misc_RNA (1)...(19): siRNA sense strand
gcaacgugguggagcaguu

SEQ ID NO: 262203 - RNA, 19 nt, Homo sapiens
  misc_RNA (1)...(19): siRNA sense strand
cggaacaguuaguggauuu

SEQ ID NO: 262204 - RNA, 19 nt, Homo sapiens
  misc_RNA (1)...(19): siRNA sense strand
cgaggaaucucaacaaagc

SEQ ID NO: 262205 - RNA, 19 nt, Homo sapiens
  misc_RNA (1)...(19): siRNA sense strand
gggaugaguucgaguuucu

SEQ ID NO: 262206 - RNA, 19 nt, Homo sapiens
  misc_RNA (1)...(19): siRNA sense strand
gaagaaggucuccaaagag

SEQ ID NO: 262207 - RNA, 19 nt, Homo sapiens
  misc_RNA (1)...(19): siRNA sense strand
cgacaaggaagauaaagga

SEQ ID NO: 262208 - RNA, 19 nt, Homo sapiens
  misc_RNA (1)...(19): siRNA sense strand
ggccugcacugcuacaaga

SEQ ID NO: 262209 - RNA, 19 nt, Homo sapiens
  misc_RNA (1)...(19): siRNA sense strand
cagcaagcuucccacguuu

SEQ ID NO: 262210 - RNA, 19 nt, Homo sapiens
  misc_RNA (1)...(19): siRNA sense strand
cagcaaguuugacaccauu

SEQ ID NO: 262211 - RNA, 19 nt, Homo sapiens
  misc_RNA (1)...(19): siRNA sense strand
agagugagauccagaccuu

SEQ ID NO: 262212 - RNA, 19 nt, Homo sapiens
  misc_RNA (1)...(19): siRNA sense strand
ucagagugcuauacaguag

SEQ ID NO: 262213 - RNA, 19 nt, Homo sapiens
  misc_RNA (1)...(19): siRNA sense strand
agaagagggucaacagcaa

SEQ ID NO: 262214 - RNA, 19 nt, Homo sapiens
  misc_RNA (1)...(19): siRNA sense strand
caacugugaccacggcuuu

SEQ ID NO: 262215 - RNA, 19 nt, Homo sapiens
  misc_RNA (1)...(19): siRNA sense strand
gcaaauguucccagcacaa

SEQ ID NO: 262216 - RNA, 19 nt, Homo sapiens
  misc_RNA (1)...(19): siRNA sense strand
ccuggaguauuacauuaaa

SEQ ID NO: 262217 - RNA, 19 nt, Homo sapiens
  misc_RNA (1)...(19): siRNA sense strand
gcacaaacuaacugucaug

SEQ ID NO: 262218 - RNA, 19 nt, Homo sapiens
  misc_RNA (1)...(19): siRNA sense strand
gcacaauaacguggagaaa

SEQ ID NO: 262219 - RNA, 19 nt, Homo sapiens
  misc_RNA (1)...(19): siRNA sense strand
ccacggcuuugucaucuuc

SEQ ID NO: 262220 - RNA, 19 nt, Homo sapiens
  misc_RNA (1)...(19): siRNA sense strand
acaaucggcugcgggaauu

SEQ ID NO: 262221 - RNA, 19 nt, Homo sapiens
  misc_RNA (1)...(19): siRNA sense strand
gugcauggccuccuucugu

SEQ ID NO: 262222 - RNA, 19 nt, Homo sapiens
  misc_RNA (1)...(19): siRNA sense strand
uggagcagcuacaacaaga

SEQ ID NO: 262223 - RNA, 19 nt, Homo sapiens
  misc_RNA (1)...(19): siRNA sense strand
caagaauacacggaaauga

SEQ ID NO: 262224 - RNA, 19 nt, Homo sapiens
  misc_RNA (1)...(19): siRNA sense strand
agguggagcugcagaagaa

SEQ ID NO: 262225 - RNA, 19 nt, Homo sapiens
  misc_RNA (1)...(19): siRNA sense strand
aagaauacacggaaaugaa

SEQ ID NO: 262226 - RNA, 19 nt, Homo sapiens
  misc_RNA (1)...(19): siRNA sense strand
gaccacggcuuugucaucu

SEQ ID NO: 262227 - RNA, 19 nt, Homo sapiens
  misc_RNA (1)...(19): siRNA sense strand
gagugcaucugccacaucu

SEQ ID NO: 262228 - RNA, 19 nt, Homo sapiens
  misc_RNA (1)...(19): siRNA sense strand
ggaacaguuaguggauuua

SEQ ID NO: 262229 - RNA, 19 nt, Homo sapiens
  misc_RNA (1)...(19): siRNA sense strand
ggagaaagcaucaaaacug

SEQ ID NO: 262230 - RNA, 19 nt, Homo sapiens
  misc_RNA (1)...(19): siRNA sense strand
gagcagcuacaacaagaau

SEQ ID NO: 262231 - RNA, 19 nt, Homo sapiens
  misc_RNA (1)...(19): siRNA sense strand
gagggucaacagcaaguuu

SEQ ID NO: 262232 - RNA, 19 nt, Homo sapiens
  misc_RNA (1)...(19): siRNA sense strand
ggaaaagaaauccaagaaa

SEQ ID NO: 262233 - RNA, 19 nt, Homo sapiens
  misc_RNA (1)...(19): siRNA sense strand
uaucagauucuccucaaga

SEQ ID NO: 262234 - RNA, 19 nt, Homo sapiens
  misc_RNA (1)...(19): siRNA sense strand
cauccgaacucaacaucuc

SEQ ID NO: 262235 - RNA, 19 nt, Homo sapiens
  misc_RNA (1)...(19): siRNA sense strand
gagggaugaguucgaguuu

SEQ ID NO: 262236 - RNA, 19 nt, Homo sapiens
  misc_RNA (1)...(19): siRNA sense strand
caaguuugacaccauuuau

SEQ ID NO: 262237 - RNA, 19 nt, Homo sapiens
  misc_RNA (1)...(19): siRNA sense strand
gggcgugcuucucaacugu

SEQ ID NO: 262238 - RNA, 19 nt, Homo sapiens
  misc_RNA (1)...(19): siRNA sense strand
ugaaggaggagauugaaca

SEQ ID NO: 262239 - RNA, 19 nt, Homo sapiens
  misc_RNA (1)...(19): siRNA sense strand
ggaugacugcaaacagaaa

SEQ ID NO: 262240 - RNA, 19 nt, Homo sapiens
  misc_RNA (1)...(19): siRNA sense strand
caccugauguauaaguuca

SEQ ID NO: 262241 - RNA, 19 nt, Homo sapiens
  misc_RNA (1)...(19): siRNA sense strand
gcagcuacaacaagaauac

SEQ ID NO: 262242 - RNA, 19 nt, Homo sapiens
  misc_RNA (1)...(19): siRNA sense strand
ucagagaccaccucgacaa

SEQ ID NO: 262243 - RNA, 19 nt, Homo sapiens
  misc_RNA (1)...(19): siRNA sense strand
gcucacauccgaacucaac

SEQ ID NO: 262244 - RNA, 19 nt, Homo sapiens
  misc_RNA (1)...(19): siRNA sense strand
agaacacggugcugugcaa

SEQ ID NO: 262245 - RNA, 19 nt, Homo sapiens
  misc_RNA (1)...(19): siRNA sense strand
uaaaggaagaggagaagag

SEQ ID NO: 262246 - RNA, 19 nt, Homo sapiens
  misc_RNA (1)...(19): siRNA sense strand
ugaccaagagggaugaguu

SEQ ID NO: 262247 - RNA, 19 nt, Homo sapiens
  misc_RNA (1)...(19): siRNA sense strand
ugcgaggaaucucaacaaa

SEQ ID NO: 262248 - RNA, 19 nt, Homo sapiens
  misc_RNA (1)...(19): siRNA sense strand
gaaagguggagcagcuaca

SEQ ID NO: 262249 - RNA, 19 nt, Homo sapiens
  misc_RNA (1)...(19): siRNA sense strand
aaaugaaggcucucuugga

SEQ ID NO: 262250 - RNA, 19 nt, Homo sapiens
  misc_RNA (1)...(19): siRNA sense strand
caaauguucccagcacaau

SEQ ID NO: 262251 - RNA, 19 nt, Homo sapiens
  misc_RNA (1)...(19): siRNA sense strand
gcgugcuucucaacuguga

SEQ ID NO: 262252 - RNA, 19 nt, Homo sapiens
  misc_RNA (1)...(19): siRNA sense strand
gagguggagcugcagaaga

SEQ ID NO: 262253 - RNA, 19 nt, Homo sapiens
  misc_RNA (1)...(19): siRNA sense strand
uagcuucuguggcugagau

SEQ ID NO: 262254 - RNA, 19 nt, Homo sapiens
  misc_RNA (1)...(19): siRNA sense strand
gagcaccauagaccucaaa

SEQ ID NO: 262255 - RNA, 19 nt, Homo sapiens
  misc_RNA (1)...(19): siRNA sense strand
gaccaagagggaugaguuc

SEQ ID NO: 262256 - RNA, 19 nt, Homo sapiens
  misc_RNA (1)...(19): siRNA sense strand
gauaaaggaagaggagaag

SEQ ID NO: 262257 - RNA, 19 nt, Homo sapiens
  misc_RNA (1)...(19): siRNA sense strand
acaaacuaacugucaugua

SEQ ID NO: 262258 - RNA, 19 nt, Homo sapiens
  misc_RNA (1)...(19): siRNA sense strand
gacaaggaagauaaaggaa

SEQ ID NO: 262259 - RNA, 19 nt, Homo sapiens
  misc_RNA (1)...(19): siRNA sense strand
gacaccauuuaucagauuc

SEQ ID NO: 262260 - RNA, 19 nt, Homo sapiens
  misc_RNA (1)...(19): siRNA sense strand
cagcucacauccgaacuca

SEQ ID NO: 262261 - RNA, 19 nt, Homo sapiens
  misc_RNA (1)...(19): siRNA sense strand
gucagagugcuauacagua

SEQ ID NO: 262262 - RNA, 19 nt, Homo sapiens
  misc_RNA (1)...(19): siRNA sense strand
gaaggaggagauugaacag

SEQ ID NO: 262263 - RNA, 19 nt, Homo sapiens
  misc_RNA (1)...(19): siRNA sense strand
gaugugcggaugacugcaa

SEQ ID NO: 262264 - RNA, 19 nt, Homo sapiens
  misc_RNA (1)...(19): siRNA sense strand
gcaagcuucccacguuugg

SEQ ID NO: 262265 - RNA, 19 nt, Homo sapiens
  misc_RNA (1)...(19): siRNA sense strand
gcgaggaaucucaacaaag

SEQ ID NO: 262266 - RNA, 19 nt, Homo sapiens
  misc_RNA (1)...(19): siRNA sense strand
uuuaucagauucuccucaa

SEQ ID NO: 262267 - RNA, 19 nt, Homo sapiens
  misc_RNA (1)...(19): siRNA sense strand
caucaaaacugcgaggaau

SEQ ID NO: 262268 - RNA, 19 nt, Homo sapiens
  misc_RNA (1)...(19): siRNA sense strand
ggaguauuacauuaaaguc

SEQ ID NO: 262269 - RNA, 19 nt, Homo sapiens
  misc_RNA (1)...(19): siRNA sense strand
ccggaacaguuaguggauu

SEQ ID NO: 262270 - RNA, 19 nt, Homo sapiens
  misc_RNA (1)...(19): siRNA sense strand
gacccagcguccacacaca

SEQ ID NO: 262271 - RNA, 19 nt, Homo sapiens
  misc_RNA (1)...(19): siRNA sense strand
ggagcagcuacaacaagaa

SEQ ID NO: 262272 - RNA, 19 nt, Homo sapiens
  misc_RNA (1)...(19): siRNA sense strand
gugccacacucuccaucug

SEQ ID NO: 262273 - RNA, 19 nt, Homo sapiens
  misc_RNA (1)...(19): siRNA sense strand
ggcacaaacuaacugucau

SEQ ID NO: 262274 - RNA, 19 nt, Homo sapiens
  misc_RNA (1)...(19): siRNA sense strand
gcgggucgugccugaauga

SEQ ID NO: 262275 - RNA, 19 nt, Homo sapiens
  misc_RNA (1)...(19): siRNA sense strand
gugaagaaggucuccaaag

SEQ ID NO: 262276 - RNA, 19 nt, Homo sapiens
  misc_RNA (1)...(19): siRNA sense strand
ugaaccacaagcugauaaa

SEQ ID NO: 262277 - RNA, 19 nt, Homo sapiens
  misc_RNA (1)...(19): siRNA sense strand
aaacugcgaggaaucucaa

SEQ ID NO: 262278 - RNA, 19 nt, Homo sapiens
  misc_RNA (1)...(19): siRNA sense strand
caagaagaagagugagauc

SEQ ID NO: 262279 - RNA, 19 nt, Homo sapiens
  misc_RNA (1)...(19): siRNA sense strand
agaauacacggaaaugaag

SEQ ID NO: 262280 - RNA, 19 nt, Homo sapiens
  misc_RNA (1)...(19): siRNA sense strand
gaaauuugcuguccaagau

SEQ ID NO: 262281 - RNA, 19 nt, Homo sapiens
  misc_RNA (1)...(19): siRNA sense strand
ggacaucaguggaaagauu

SEQ ID NO: 262282 - RNA, 19 nt, Homo sapiens
  misc_RNA (1)...(19): siRNA sense strand
gcacaaugcuugccacgaa

SEQ ID NO: 262283 - RNA, 19 nt, Homo sapiens
  misc_RNA (1)...(19): siRNA sense strand
ucaaauaccucuaaccuau

SEQ ID NO: 262284 - RNA, 19 nt, Homo sapiens
  misc_RNA (1)...(19): siRNA sense strand
gaaugucccucaaguggua

SEQ ID NO: 262285 - RNA, 19 nt, Homo sapiens
  misc_RNA (1)...(19): siRNA sense strand
gaaaguaugugcaacucuu

SEQ ID NO: 262286 - RNA, 19 nt, Homo sapiens
  misc_RNA (1)...(19): siRNA sense strand
cagcaagccuuucucauuu

SEQ ID NO: 262287 - RNA, 19 nt, Homo sapiens
  misc_RNA (1)...(19): siRNA sense strand
cauagaaucucacaccaaa

SEQ ID NO: 262288 - RNA, 19 nt, Homo sapiens
  misc_RNA (1)...(19): siRNA sense strand
caagacauuugguggauuu

SEQ ID NO: 262289 - RNA, 19 nt, Homo sapiens
  misc_RNA (1)...(19): siRNA sense strand
gugcaggaauugaagaaua

SEQ ID NO: 262290 - RNA, 19 nt, Homo sapiens
  misc_RNA (1)...(19): siRNA sense strand
gaacuucaguggcuacauc

SEQ ID NO: 262291 - RNA, 19 nt, Homo sapiens
  misc_RNA (1)...(19): siRNA sense strand
gcacggacguccuguaaag

SEQ ID NO: 262292 - RNA, 19 nt, Homo sapiens
  misc_RNA (1)...(19): siRNA sense strand
ggaaacgucuccagaugug

SEQ ID NO: 262293 - RNA, 19 nt, Homo sapiens
  misc_RNA (1)...(19): siRNA sense strand
gagcuucuguuuccaaguu

SEQ ID NO: 262294 - RNA, 19 nt, Homo sapiens
  misc_RNA (1)...(19): siRNA sense strand
caacaccgucuucuaauuu

SEQ ID NO: 262295 - RNA, 19 nt, Homo sapiens
  misc_RNA (1)...(19): siRNA sense strand
cgacaaagugaucagauua

SEQ ID NO: 262296 - RNA, 19 nt, Homo sapiens
  misc_RNA (1)...(19): siRNA sense strand
gaagucagcucaacgucau

SEQ ID NO: 262297 - RNA, 19 nt, Homo sapiens
  misc_RNA (1)...(19): siRNA sense strand
ggaggagauugcacacuuu

SEQ ID NO: 262298 - RNA, 19 nt, Homo sapiens
  misc_RNA (1)...(19): siRNA sense strand
gguuaagucucucaucaaa

SEQ ID NO: 262299 - RNA, 19 nt, Homo sapiens
  misc_RNA (1)...(19): siRNA sense strand
guuaucaucuggugacaaa

SEQ ID NO: 262300 - RNA, 19 nt, Homo sapiens
  misc_RNA (1)...(19): siRNA sense strand
gagauauuaugaagacuug

SEQ ID NO: 262301 - RNA, 19 nt, Homo sapiens
  misc_RNA (1)...(19): siRNA sense strand
gcaacacccuccacuaaag

SEQ ID NO: 262302 - RNA, 19 nt, Homo sapiens
  misc_RNA (1)...(19): siRNA sense strand
gaugugcuguggauuggua

SEQ ID NO: 262303 - RNA, 19 nt, Homo sapiens
  misc_RNA (1)...(19): siRNA sense strand
gcaaacuucugacucuguu

SEQ ID NO: 262304 - RNA, 19 nt, Homo sapiens
  misc_RNA (1)...(19): siRNA sense strand
guaaacacuuugacugaau

SEQ ID NO: 262305 - RNA, 19 nt, Homo sapiens
  misc_RNA (1)...(19): siRNA sense strand
gggaggagauugcacacuu

SEQ ID NO: 262306 - RNA, 19 nt, Homo sapiens
  misc_RNA (1)...(19): siRNA sense strand
gaaacaggcacaacugaga

SEQ ID NO: 262307 - RNA, 19 nt, Homo sapiens
  misc_RNA (1)...(19): siRNA sense strand
gaaugauguucuagacuug

SEQ ID NO: 262308 - RNA, 19 nt, Homo sapiens
  misc_RNA (1)...(19): siRNA sense strand
gaaaucgugacucugguua

SEQ ID NO: 262309 - RNA, 19 nt, Homo sapiens
  misc_RNA (1)...(19): siRNA sense strand
gaaggaguuggaagaguua

SEQ ID NO: 262310 - RNA, 19 nt, Homo sapiens
  misc_RNA (1)...(19): siRNA sense strand
ugaaagaaaucgugacucu

SEQ ID NO: 262311 - RNA, 19 nt, Homo sapiens
  misc_RNA (1)...(19): siRNA sense strand
gggcaacacccuccacuaa

SEQ ID NO: 262312 - RNA, 19 nt, Homo sapiens
  misc_RNA (1)...(19): siRNA sense strand
ccaacaccgucuucuaauu

SEQ ID NO: 262313 - RNA, 19 nt, Homo sapiens
  misc_RNA (1)...(19): siRNA sense strand
ugaaugauguucuagacuu

SEQ ID NO: 262314 - RNA, 19 nt, Homo sapiens
  misc_RNA (1)...(19): siRNA sense strand
gaaagauucagauccugua

SEQ ID NO: 262315 - RNA, 19 nt, Homo sapiens
  misc_RNA (1)...(19): siRNA sense strand
gaaaacaacuuuacuugag

SEQ ID NO: 262316 - RNA, 19 nt, Homo sapiens
  misc_RNA (1)...(19): siRNA sense strand
gaaaucaucaaccaacaga

SEQ ID NO: 262317 - RNA, 19 nt, Homo sapiens
  misc_RNA (1)...(19): siRNA sense strand
ucaaccagcucaccaacaa

SEQ ID NO: 262318 - RNA, 19 nt, Homo sapiens
  misc_RNA (1)...(19): siRNA sense strand
gaucagccuuucugucuca

SEQ ID NO: 262319 - RNA, 19 nt, Homo sapiens
  misc_RNA (1)...(19): siRNA sense strand
gaacagaaucagaugacuu

SEQ ID NO: 262320 - RNA, 19 nt, Homo sapiens
  misc_RNA (1)...(19): siRNA sense strand
gcagaguccuggcuuugga

SEQ ID NO: 262321 - RNA, 19 nt, Homo sapiens
  misc_RNA (1)...(19): siRNA sense strand
gcagggacaucaguggaaa

SEQ ID NO: 262322 - RNA, 19 nt, Homo sapiens
  misc_RNA (1)...(19): siRNA sense strand
gugcaaugcuuuguugaaa

SEQ ID NO: 262323 - RNA, 19 nt, Homo sapiens
  misc_RNA (1)...(19): siRNA sense strand
gaacuuccaaagccuguuu

SEQ ID NO: 262324 - RNA, 19 nt, Homo sapiens
  misc_RNA (1)...(19): siRNA sense strand
gcauggugauugauaugaa

SEQ ID NO: 262325 - RNA, 19 nt, Homo sapiens
  misc_RNA (1)...(19): siRNA sense strand
ccucuaaccuauuuggaaa

SEQ ID NO: 262326 - RNA, 19 nt, Homo sapiens
  misc_RNA (1)...(19): siRNA sense strand
uaauacugguucuguguuu

SEQ ID NO: 262327 - RNA, 19 nt, Homo sapiens
  misc_RNA (1)...(19): siRNA sense strand
agaaggaguuggaagaguu

SEQ ID NO: 262328 - RNA, 19 nt, Homo sapiens
  misc_RNA (1)...(19): siRNA sense strand
caacagauggugugcuuug

SEQ ID NO: 262329 - RNA, 19 nt, Homo sapiens
  misc_RNA (1)...(19): siRNA sense strand
ccacaagccuaacuaguac

SEQ ID NO: 262330 - RNA, 19 nt, Homo sapiens
  misc_RNA (1)...(19): siRNA sense strand
caaagccuguuuccaagug

SEQ ID NO: 262331 - RNA, 19 nt, Homo sapiens
  misc_RNA (1)...(19): siRNA sense strand
ggaggcauggugauugaua

SEQ ID NO: 262332 - RNA, 19 nt, Homo sapiens
  misc_RNA (1)...(19): siRNA sense strand
ccaagcagaugauucuaca

SEQ ID NO: 262333 - RNA, 19 nt, Homo sapiens
  misc_RNA (1)...(19): siRNA sense strand
gacaaagugaucagauuaa

SEQ ID NO: 262334 - RNA, 19 nt, Homo sapiens
  misc_RNA (1)...(19): siRNA sense strand
ugaagaaugucccucaagu

SEQ ID NO: 262335 - RNA, 19 nt, Homo sapiens
  misc_RNA (1)...(19): siRNA sense strand
gcaggaggauucggguuug

SEQ ID NO: 262336 - RNA, 19 nt, Homo sapiens
  misc_RNA (1)...(19): siRNA sense strand
gucagcagcucaggguuua

SEQ ID NO: 262337 - RNA, 19 nt, Homo sapiens
  misc_RNA (1)...(19): siRNA sense strand
ggugggacaucucuaagug

SEQ ID NO: 262338 - RNA, 19 nt, Homo sapiens
  misc_RNA (1)...(19): siRNA sense strand
agaaacagcugugacuuca

SEQ ID NO: 262339 - RNA, 19 nt, Homo sapiens
  misc_RNA (1)...(19): siRNA sense strand
ugauugauaugaaguggaa

SEQ ID NO: 262340 - RNA, 19 nt, Homo sapiens
  misc_RNA (1)...(19): siRNA sense strand
aagcaaaccuucuuaugag

SEQ ID NO: 262341 - RNA, 19 nt, Homo sapiens
  misc_RNA (1)...(19): siRNA sense strand
ucagcaagccuuucucauu

SEQ ID NO: 262342 - RNA, 19 nt, Homo sapiens
  misc_RNA (1)...(19): siRNA sense strand
ugcaggaauugaagaauaa

SEQ ID NO: 262343 - RNA, 19 nt, Homo sapiens
  misc_RNA (1)...(19): siRNA sense strand
ucagagauauuaugaagac

SEQ ID NO: 262344 - RNA, 19 nt, Homo sapiens
  misc_RNA (1)...(19): siRNA sense strand
ccaaauccuugcccaaagu

SEQ ID NO: 262345 - RNA, 19 nt, Homo sapiens
  misc_RNA (1)...(19): siRNA sense strand
aaagucaaccuuagugaaa

SEQ ID NO: 262346 - RNA, 19 nt, Homo sapiens
  misc_RNA (1)...(19): siRNA sense strand
agagacagcaucauuacua

SEQ ID NO: 262347 - RNA, 19 nt, Homo sapiens
  misc_RNA (1)...(19): siRNA sense strand
ggaaacagugaaaguaugu

SEQ ID NO: 262348 - RNA, 19 nt, Homo sapiens
  misc_RNA (1)...(19): siRNA sense strand
caggaggcauggugauuga

SEQ ID NO: 262349 - RNA, 19 nt, Homo sapiens
  misc_RNA (1)...(19): siRNA sense strand
ggaaucacauccgcaucaa

SEQ ID NO: 262350 - RNA, 19 nt, Homo sapiens
  misc_RNA (1)...(19): siRNA sense strand
uaauuucacugcugcacaa

SEQ ID NO: 262351 - RNA, 19 nt, Homo sapiens
  misc_RNA (1)...(19): siRNA sense strand
caccaacaccgucuucuaa

SEQ ID NO: 262352 - RNA, 19 nt, Homo sapiens
  misc_RNA (1)...(19): siRNA sense strand
caccagcuguaaacacuuu

SEQ ID NO: 262353 - RNA, 19 nt, Homo sapiens
  misc_RNA (1)...(19): siRNA sense strand
caaaguaccagccaaacug

SEQ ID NO: 262354 - RNA, 19 nt, Homo sapiens
  misc_RNA (1)...(19): siRNA sense strand
caaauauggucuggucuuc

SEQ ID NO: 262355 - RNA, 19 nt, Homo sapiens
  misc_RNA (1)...(19): siRNA sense strand
gagcgagagacacuguuua

SEQ ID NO: 262356 - RNA, 19 nt, Homo sapiens
  misc_RNA (1)...(19): siRNA sense strand
acagaaaucacccaggaua

SEQ ID NO: 262357 - RNA, 19 nt, Homo sapiens
  misc_RNA (1)...(19): siRNA sense strand
cagagcgacuuucauuaga

SEQ ID NO: 262358 - RNA, 19 nt, Homo sapiens
  misc_RNA (1)...(19): siRNA sense strand
ccaguucucauguuacuuu

SEQ ID NO: 262359 - RNA, 19 nt, Homo sapiens
  misc_RNA (1)...(19): siRNA sense strand
caucauuacuaccucaguu

SEQ ID NO: 262360 - RNA, 19 nt, Homo sapiens
  misc_RNA (1)...(19): siRNA sense strand
gggcaggccucagucuuug

SEQ ID NO: 262361 - RNA, 19 nt, Homo sapiens
  misc_RNA (1)...(19): siRNA sense strand
ggaagccaacagaccaaua

SEQ ID NO: 262362 - RNA, 19 nt, Homo sapiens
  misc_RNA (1)...(19): siRNA sense strand
gcaggggucucuaauaaau

SEQ ID NO: 262363 - RNA, 19 nt, Homo sapiens
  misc_RNA (1)...(19): siRNA sense strand
gaaacauggugcaccuagu

SEQ ID NO: 262364 - RNA, 19 nt, Homo sapiens
  misc_RNA (1)...(19): siRNA sense strand
agauauaaguagccugaaa

SEQ ID NO: 262365 - RNA, 19 nt, Homo sapiens
  misc_RNA (1)...(19): siRNA sense strand
gaagaaugucccucaagug

SEQ ID NO: 262366 - RNA, 19 nt, Homo sapiens
  misc_RNA (1)...(19): siRNA sense strand
gcagaugggacccuggaaa

SEQ ID NO: 262367 - RNA, 19 nt, Homo sapiens
  misc_RNA (1)...(19): siRNA sense strand
uaaccuauuuggaaacagu

SEQ ID NO: 262368 - RNA, 19 nt, Homo sapiens
  misc_RNA (1)...(19): siRNA sense strand
ggacagucuucucccaaca

SEQ ID NO: 262369 - RNA, 19 nt, Homo sapiens
  misc_RNA (1)...(19): siRNA sense strand
gcaagugucuuuuccuuca

SEQ ID NO: 262370 - RNA, 19 nt, Homo sapiens
  misc_RNA (1)...(19): siRNA sense strand
gaagccaacagaccaauag

SEQ ID NO: 262371 - RNA, 19 nt, Homo sapiens
  misc_RNA (1)...(19): siRNA sense strand
gcugggagagcuucuguuu

SEQ ID NO: 262372 - RNA, 19 nt, Homo sapiens
  misc_RNA (1)...(19): siRNA sense strand
gaggcauggugauugauau

SEQ ID NO: 262373 - RNA, 19 nt, Homo sapiens
  misc_RNA (1)...(19): siRNA sense strand
uaaaugugcaggaauugaa

SEQ ID NO: 262374 - RNA, 19 nt, Homo sapiens
  misc_RNA (1)...(19): siRNA sense strand
agauucagauccuguaaug

SEQ ID NO: 262375 - RNA, 19 nt, Homo sapiens
  misc_RNA (1)...(19): siRNA sense strand
ggaguugucguagacuaua

SEQ ID NO: 262376 - RNA, 19 nt, Homo sapiens
  misc_RNA (1)...(19): siRNA sense strand
gcacggagagacagcauca

SEQ ID NO: 262377 - RNA, 19 nt, Homo sapiens
  misc_RNA (1)...(19): siRNA sense strand
gcccaucaaccuucucuuu

SEQ ID NO: 262378 - RNA, 19 nt, Homo sapiens
  misc_RNA (1)...(19): siRNA sense strand
aaacagcugugacuucaac

SEQ ID NO: 262379 - RNA, 19 nt, Homo sapiens
  misc_RNA (1)...(19): siRNA sense strand
caaagucaaccuuagugaa

SEQ ID NO: 262380 - RNA, 19 nt, Homo sapiens
  misc_RNA (1)...(19): siRNA sense strand
gcaaauggcaucuucugaa

SEQ ID NO: 262381 - RNA, 19 nt, Homo sapiens
  misc_RNA (1)...(19): siRNA sense strand
ucaaggagcucagagauca

SEQ ID NO: 262382 - RNA, 19 nt, Homo sapiens
  misc_RNA (1)...(19): siRNA sense strand
gauacaaacucuaacaaac

SEQ ID NO: 262383 - RNA, 19 nt, Homo sapiens
  misc_RNA (1)...(19): siRNA sense strand
gaaccuccuugcgugaaua

SEQ ID NO: 262384 - RNA, 19 nt, Homo sapiens
  misc_RNA (1)...(19): siRNA sense strand
ucaguuggcuaaucuuuau

SEQ ID NO: 262385 - RNA, 19 nt, Homo sapiens
  misc_RNA (1)...(19): siRNA sense strand
acaaugauguagcuccuuu

SEQ ID NO: 262386 - RNA, 19 nt, Homo sapiens
  misc_RNA (1)...(19): siRNA sense strand
ccaaguggcucccaaugca

SEQ ID NO: 262387 - RNA, 19 nt, Homo sapiens
  misc_RNA (1)...(19): siRNA sense strand
gacaugauacaaacucuaa

SEQ ID NO: 262388 - RNA, 19 nt, Homo sapiens
  misc_RNA (1)...(19): siRNA sense strand
acaaagacaugauacaaac

SEQ ID NO: 262389 - RNA, 19 nt, Homo sapiens
  misc_RNA (1)...(19): siRNA sense strand
aggagggacuuaugaauug

SEQ ID NO: 262390 - RNA, 19 nt, Homo sapiens
  misc_RNA (1)...(19): siRNA sense strand
ggacaccauagacuugaua

SEQ ID NO: 262391 - RNA, 19 nt, Homo sapiens
  misc_RNA (1)...(19): siRNA sense strand
ggcuaaguuuggaccauua

SEQ ID NO: 262392 - RNA, 19 nt, Homo sapiens
  misc_RNA (1)...(19): siRNA sense strand
caaauggcaucuucugaac

SEQ ID NO: 262393 - RNA, 19 nt, Homo sapiens
  misc_RNA (1)...(19): siRNA sense strand
ccaaugcaaacuacaauga

SEQ ID NO: 262394 - RNA, 19 nt, Homo sapiens
  misc_RNA (1)...(19): siRNA sense strand
ggacuuaugaauugcaugu

SEQ ID NO: 262395 - RNA, 19 nt, Homo sapiens
  misc_RNA (1)...(19): siRNA sense strand
caccauagacuugauauuc

SEQ ID NO: 262396 - RNA, 19 nt, Homo sapiens
  misc_RNA (1)...(19): siRNA sense strand
uaggagggacuuaugaauu

SEQ ID NO: 262397 - RNA, 19 nt, Homo sapiens
  misc_RNA (1)...(19): siRNA sense strand
aaugcaaacuacaaugaug

SEQ ID NO: 262398 - RNA, 19 nt, Homo sapiens
  misc_RNA (1)...(19): siRNA sense strand
ccuuuaagccauucaagaa

SEQ ID NO: 262399 - RNA, 19 nt, Homo sapiens
  misc_RNA (1)...(19): siRNA sense strand
uuucuuugcuccuucaguu

SEQ ID NO: 262400 - RNA, 19 nt, Homo sapiens
  misc_RNA (1)...(19): siRNA sense strand
gcuaaggagcccuguaugg

SEQ ID NO: 262401 - RNA, 19 nt, Homo sapiens
  misc_RNA (1)...(19): siRNA sense strand
accauagacuugauauuca

SEQ ID NO: 262402 - RNA, 19 nt, Homo sapiens
  misc_RNA (1)...(19): siRNA sense strand
aauaugccuuuaagccauu

SEQ ID NO: 262403 - RNA, 19 nt, Homo sapiens
  misc_RNA (1)...(19): siRNA sense strand
guaggagggacuuaugaau

SEQ ID NO: 262404 - RNA, 19 nt, Homo sapiens
  misc_RNA (1)...(19): siRNA sense strand
acuuaugaauugcauguug

SEQ ID NO: 262405 - RNA, 19 nt, Homo sapiens
  misc_RNA (1)...(19): siRNA sense strand
gauauucaacucugagcau

SEQ ID NO: 262406 - RNA, 19 nt, Homo sapiens
  misc_RNA (1)...(19): siRNA sense strand
uggcuaaguuuggaccauu

SEQ ID NO: 262407 - RNA, 19 nt, Homo sapiens
  misc_RNA (1)...(19): siRNA sense strand
uggagauacuucagaaugg

SEQ ID NO: 262408 - RNA, 19 nt, Homo sapiens
  misc_RNA (1)...(19): siRNA sense strand
gcucaauaguuauguugcu

SEQ ID NO: 262409 - RNA, 19 nt, Homo sapiens
  misc_RNA (1)...(19): siRNA sense strand
aauggcaaauggcaucuuc

SEQ ID NO: 262410 - RNA, 19 nt, Homo sapiens
  misc_RNA (1)...(19): siRNA sense strand
ggcaaauggcaucuucuga

SEQ ID NO: 262411 - RNA, 19 nt, Homo sapiens
  misc_RNA (1)...(19): siRNA sense strand
acuggaagcuggagauacu

SEQ ID NO: 262412 - RNA, 19 nt, Homo sapiens
  misc_RNA (1)...(19): siRNA sense strand
ccuggaagcuguggcucuu

SEQ ID NO: 262413 - RNA, 19 nt, Homo sapiens
  misc_RNA (1)...(19): siRNA sense strand
gaggugcggcuguauaaaa

SEQ ID NO: 262414 - RNA, 19 nt, Homo sapiens
  misc_RNA (1)...(19): siRNA sense strand
gauacuucagaauggcuua

SEQ ID NO: 262415 - RNA, 19 nt, Homo sapiens
  misc_RNA (1)...(19): siRNA sense strand
gcgugaauaaggugucuga

SEQ ID NO: 262416 - RNA, 19 nt, Homo sapiens
  misc_RNA (1)...(19): siRNA sense strand
caugauacaaacucuaaca

SEQ ID NO: 262417 - RNA, 19 nt, Homo sapiens
  misc_RNA (1)...(19): siRNA sense strand
caaugcaaacuacaaugau

SEQ ID NO: 262418 - RNA, 19 nt, Homo sapiens
  misc_RNA (1)...(19): siRNA sense strand
uuuaauuuauggccaagug

SEQ ID NO: 262419 - RNA, 19 nt, Homo sapiens
  misc_RNA (1)...(19): siRNA sense strand
ugacuggaagcuggagaua

SEQ ID NO: 262420 - RNA, 19 nt, Homo sapiens
  misc_RNA (1)...(19): siRNA sense strand
cucaauaguuauguugcua

SEQ ID NO: 262421 - RNA, 19 nt, Homo sapiens
  misc_RNA (1)...(19): siRNA sense strand
ugaaccuccuugcgugaau

SEQ ID NO: 262422 - RNA, 19 nt, Homo sapiens
  misc_RNA (1)...(19): siRNA sense strand
cuucagaauggcuuauauu

SEQ ID NO: 262423 - RNA, 19 nt, Homo sapiens
  misc_RNA (1)...(19): siRNA sense strand
ggagggacuuaugaauugc

SEQ ID NO: 262424 - RNA, 19 nt, Homo sapiens
  misc_RNA (1)...(19): siRNA sense strand
gggacaccauagacuugau

SEQ ID NO: 262425 - RNA, 19 nt, Homo sapiens
  misc_RNA (1)...(19): siRNA sense strand
gcaaauccccaauucaucu

SEQ ID NO: 262426 - RNA, 19 nt, Homo sapiens
  misc_RNA (1)...(19): siRNA sense strand
cuggagauacuucagaaug

SEQ ID NO: 262427 - RNA, 19 nt, Homo sapiens
  misc_RNA (1)...(19): siRNA sense strand
uugaggugcggcuguauaa

SEQ ID NO: 262428 - RNA, 19 nt, Homo sapiens
  misc_RNA (1)...(19): siRNA sense strand
gccuuuaagccauucaaga

SEQ ID NO: 262429 - RNA, 19 nt, Homo sapiens
  misc_RNA (1)...(19): siRNA sense strand
agacaugauacaaacucua

SEQ ID NO: 262430 - RNA, 19 nt, Homo sapiens
  misc_RNA (1)...(19): siRNA sense strand
gaacaaagcaacacaauua

SEQ ID NO: 262431 - RNA, 19 nt, Homo sapiens
  misc_RNA (1)...(19): siRNA sense strand
gaaaagaccuuccggaauu

SEQ ID NO: 262432 - RNA, 19 nt, Homo sapiens
  misc_RNA (1)...(19): siRNA sense strand
gaaacucagcucuauguua

SEQ ID NO: 262433 - RNA, 19 nt, Homo sapiens
  misc_RNA (1)...(19): siRNA sense strand
aaacucagcucuauguuau

SEQ ID NO: 262434 - RNA, 19 nt, Homo sapiens
  misc_RNA (1)...(19): siRNA sense strand
uaacugggaugcagagaaa

SEQ ID NO: 262435 - RNA, 19 nt, Homo sapiens
  misc_RNA (1)...(19): siRNA sense strand
ggaagugauuacuccuuua

SEQ ID NO: 262436 - RNA, 19 nt, Homo sapiens
  misc_RNA (1)...(19): siRNA sense strand
ggauuucgauugcaucauu

SEQ ID NO: 262437 - RNA, 19 nt, Homo sapiens
  misc_RNA (1)...(19): siRNA sense strand
gcaacacaauuauucacua

SEQ ID NO: 262438 - RNA, 19 nt, Homo sapiens
  misc_RNA (1)...(19): siRNA sense strand
gaaaacaacugguacuuug

SEQ ID NO: 262439 - RNA, 19 nt, Homo sapiens
  misc_RNA (1)...(19): siRNA sense strand
cagaacgccucauuuaauu

SEQ ID NO: 262440 - RNA, 19 nt, Homo sapiens
  misc_RNA (1)...(19): siRNA sense strand
ugaaauggcuaguggaaug

SEQ ID NO: 262441 - RNA, 19 nt, Homo sapiens
  misc_RNA (1)...(19): siRNA sense strand
guuccagccucuucaaaua

SEQ ID NO: 262442 - RNA, 19 nt, Homo sapiens
  misc_RNA (1)...(19): siRNA sense strand
ucaauagucucuccucgaa

SEQ ID NO: 262443 - RNA, 19 nt, Homo sapiens
  misc_RNA (1)...(19): siRNA sense strand
uaagggaaauacacagauu

SEQ ID NO: 262444 - RNA, 19 nt, Homo sapiens
  misc_RNA (1)...(19): siRNA sense strand
ggacacugauguggaauau

SEQ ID NO: 262445 - RNA, 19 nt, Homo sapiens
  misc_RNA (1)...(19): siRNA sense strand
gcagagaaagccaaauuug

SEQ ID NO: 262446 - RNA, 19 nt, Homo sapiens
  misc_RNA (1)...(19): siRNA sense strand
caaagcaacacaauuauuc

SEQ ID NO: 262447 - RNA, 19 nt, Homo sapiens
  misc_RNA (1)...(19): siRNA sense strand
gcaagccuauagucauuga

SEQ ID NO: 262448 - RNA, 19 nt, Homo sapiens
  misc_RNA (1)...(19): siRNA sense strand
acaaacaugucauaguuga

SEQ ID NO: 262449 - RNA, 19 nt, Homo sapiens
  misc_RNA (1)...(19): siRNA sense strand
gaacggaaacggauucuac

SEQ ID NO: 262450 - RNA, 19 nt, Homo sapiens
  misc_RNA (1)...(19): siRNA sense strand
gauguggaauaucuagaaa

SEQ ID NO: 262451 - RNA, 19 nt, Homo sapiens
  misc_RNA (1)...(19): siRNA sense strand
aaacugacauuccuaacau

SEQ ID NO: 262452 - RNA, 19 nt, Homo sapiens
  misc_RNA (1)...(19): siRNA sense strand
caagaucauucacacaugu

SEQ ID NO: 262453 - RNA, 19 nt, Homo sapiens
  misc_RNA (1)...(19): siRNA sense strand
aaacaacaaucuccagaca

SEQ ID NO: 262454 - RNA, 19 nt, Homo sapiens
  misc_RNA (1)...(19): siRNA sense strand
gaaagccaaauuugugaaa

SEQ ID NO: 262455 - RNA, 19 nt, Homo sapiens
  misc_RNA (1)...(19): siRNA sense strand
gauuucgauugcaucauua

SEQ ID NO: 262456 - RNA, 19 nt, Homo sapiens
  misc_RNA (1)...(19): siRNA sense strand
gaacuccuuugaugugauc

SEQ ID NO: 262457 - RNA, 19 nt, Homo sapiens
  misc_RNA (1)...(19): siRNA sense strand
gagaaagccaaauuuguga

SEQ ID NO: 262458 - RNA, 19 nt, Homo sapiens
  misc_RNA (1)...(19): siRNA sense strand
cuacucccaucaauccuua

SEQ ID NO: 262459 - RNA, 19 nt, Homo sapiens
  misc_RNA (1)...(19): siRNA sense strand
ggaacaaagcaacacaauu

SEQ ID NO: 262460 - RNA, 19 nt, Homo sapiens
  misc_RNA (1)...(19): siRNA sense strand
gcacauccacuguaguaug

SEQ ID NO: 262461 - RNA, 19 nt, Homo sapiens
  misc_RNA (1)...(19): siRNA sense strand
acucagaacgccucauuua

SEQ ID NO: 262462 - RNA, 19 nt, Homo sapiens
  misc_RNA (1)...(19): siRNA sense strand
acacugauguggaauaucu

SEQ ID NO: 262463 - RNA, 19 nt, Homo sapiens
  misc_RNA (1)...(19): siRNA sense strand
caacaucaagucaauuuca

SEQ ID NO: 262464 - RNA, 19 nt, Homo sapiens
  misc_RNA (1)...(19): siRNA sense strand
agaccugccuuaucaauca

SEQ ID NO: 262465 - RNA, 19 nt, Homo sapiens
  misc_RNA (1)...(19): siRNA sense strand
cucaagaccugccuuauca

SEQ ID NO: 262466 - RNA, 19 nt, Homo sapiens
  misc_RNA (1)...(19): siRNA sense strand
acacagauuuacaaacaug

SEQ ID NO: 262467 - RNA, 19 nt, Homo sapiens
  misc_RNA (1)...(19): siRNA sense strand
ucagaacgccucauuuaau

SEQ ID NO: 262468 - RNA, 19 nt, Homo sapiens
  misc_RNA (1)...(19): siRNA sense strand
ggaauuaugacaacauuac

SEQ ID NO: 262469 - RNA, 19 nt, Homo sapiens
  misc_RNA (1)...(19): siRNA sense strand
gauguuaucucauuauccu

SEQ ID NO: 262470 - RNA, 19 nt, Homo sapiens
  misc_RNA (1)...(19): siRNA sense strand
ucaagucaauuucaagaca

SEQ ID NO: 262471 - RNA, 19 nt, Homo sapiens
  misc_RNA (1)...(19): siRNA sense strand
uuacagaauuugcaaaguc

SEQ ID NO: 262472 - RNA, 19 nt, Homo sapiens
  misc_RNA (1)...(19): siRNA sense strand
uggaagugauuacuccuuu

SEQ ID NO: 262473 - RNA, 19 nt, Homo sapiens
  misc_RNA (1)...(19): siRNA sense strand
ggaaucagaaagaagcaaa

SEQ ID NO: 262474 - RNA, 19 nt, Homo sapiens
  misc_RNA (1)...(19): siRNA sense strand
ucacaucgaacuccuuuga

SEQ ID NO: 262475 - RNA, 19 nt, Homo sapiens
  misc_RNA (1)...(19): siRNA sense strand
acaacaacaucaagucaau

SEQ ID NO: 262476 - RNA, 19 nt, Homo sapiens
  misc_RNA (1)...(19): siRNA sense strand
cugcagcucuuguuauuca

SEQ ID NO: 262477 - RNA, 19 nt, Homo sapiens
  misc_RNA (1)...(19): siRNA sense strand
ccaagaucauucacacaug

SEQ ID NO: 262478 - RNA, 19 nt, Homo sapiens
  misc_RNA (1)...(19): siRNA sense strand
gcaauucuuggaagugauu

SEQ ID NO: 262479 - RNA, 19 nt, Homo sapiens
  misc_RNA (1)...(19): siRNA sense strand
cagggacacugauguggaa

SEQ ID NO: 262480 - RNA, 19 nt, Homo sapiens
  misc_RNA (1)...(19): siRNA sense strand
ccacaccaaugcaacuguu

SEQ ID NO: 262481 - RNA, 19 nt, Homo sapiens
  misc_RNA (1)...(19): siRNA sense strand
uuccacaucuagaguauuu

SEQ ID NO: 262482 - RNA, 19 nt, Homo sapiens
  misc_RNA (1)...(19): siRNA sense strand
gaacgccucauuuaauucu

SEQ ID NO: 262483 - RNA, 19 nt, Homo sapiens
  misc_RNA (1)...(19): siRNA sense strand
cauugaaacucagcucuau

SEQ ID NO: 262484 - RNA, 19 nt, Homo sapiens
  misc_RNA (1)...(19): siRNA sense strand
caagauucauuggugauuc

SEQ ID NO: 262485 - RNA, 19 nt, Homo sapiens
  misc_RNA (1)...(19): siRNA sense strand
aauugugacuguaaacuga

SEQ ID NO: 262486 - RNA, 19 nt, Homo sapiens
  misc_RNA (1)...(19): siRNA sense strand
agagaaagccaaauuugug

SEQ ID NO: 262487 - RNA, 19 nt, Homo sapiens
  misc_RNA (1)...(19): siRNA sense strand
ucuauaagcgagacaguuu

SEQ ID NO: 262488 - RNA, 19 nt, Homo sapiens
  misc_RNA (1)...(19): siRNA sense strand
ccagcguccuguaauuuau

SEQ ID NO: 262489 - RNA, 19 nt, Homo sapiens
  misc_RNA (1)...(19): siRNA sense strand
gaggauguguacgcaguga

SEQ ID NO: 262490 - RNA, 19 nt, Homo sapiens
  misc_RNA (1)...(19): siRNA sense strand
cgagacaguuuugcaaaua

SEQ ID NO: 262491 - RNA, 19 nt, Homo sapiens
  misc_RNA (1)...(19): siRNA sense strand
caaacugacauuccuaaca

SEQ ID NO: 262492 - RNA, 19 nt, Homo sapiens
  misc_RNA (1)...(19): siRNA sense strand
uaaccaaacugacauuccu

SEQ ID NO: 262493 - RNA, 19 nt, Homo sapiens
  misc_RNA (1)...(19): siRNA sense strand
ggauucuacucccaucaau

SEQ ID NO: 262494 - RNA, 19 nt, Homo sapiens
  misc_RNA (1)...(19): siRNA sense strand
gagacaguuuugcaaauaa

SEQ ID NO: 262495 - RNA, 19 nt, Homo sapiens
  misc_RNA (1)...(19): siRNA sense strand
uuacucaaguguauaacug

SEQ ID NO: 262496 - RNA, 19 nt, Homo sapiens
  misc_RNA (1)...(19): siRNA sense strand
cuccugauguuaucucauu

SEQ ID NO: 262497 - RNA, 19 nt, Homo sapiens
  misc_RNA (1)...(19): siRNA sense strand
cagagaaagccaaauuugu

SEQ ID NO: 262498 - RNA, 19 nt, Homo sapiens
  misc_RNA (1)...(19): siRNA sense strand
gaagugauuacuccuuuac

SEQ ID NO: 262499 - RNA, 19 nt, Homo sapiens
  misc_RNA (1)...(19): siRNA sense strand
acucagcucuauguuauug

SEQ ID NO: 262500 - RNA, 19 nt, Homo sapiens
  misc_RNA (1)...(19): siRNA sense strand
caagucaauuucaagacau

SEQ ID NO: 262501 - RNA, 19 nt, Homo sapiens
  misc_RNA (1)...(19): siRNA sense strand
ccacaucuagaguauuuau

SEQ ID NO: 262502 - RNA, 19 nt, Homo sapiens
  misc_RNA (1)...(19): siRNA sense strand
guacagggacacugaugug

SEQ ID NO: 262503 - RNA, 19 nt, Homo sapiens
  misc_RNA (1)...(19): siRNA sense strand
ccggaauuaugacaacauu

SEQ ID NO: 262504 - RNA, 19 nt, Homo sapiens
  misc_RNA (1)...(19): siRNA sense strand
ucgauugcaucauuacaga

SEQ ID NO: 262505 - RNA, 19 nt, Homo sapiens
  misc_RNA (1)...(19): siRNA sense strand
acaacaaucuccagacacu

SEQ ID NO: 262506 - RNA, 19 nt, Homo sapiens
  misc_RNA (1)...(19): siRNA sense strand
aaacaacaacaucaaguca

SEQ ID NO: 262507 - RNA, 19 nt, Homo sapiens
  misc_RNA (1)...(19): siRNA sense strand
caucaagucaauuucaaga

SEQ ID NO: 262508 - RNA, 19 nt, Homo sapiens
  misc_RNA (1)...(19): siRNA sense strand
ggccuggauucuuuaacaa

SEQ ID NO: 262509 - RNA, 19 nt, Homo sapiens
  misc_RNA (1)...(19): siRNA sense strand
gaggauccaugguguucca

SEQ ID NO: 262510 - RNA, 19 nt, Homo sapiens
  misc_RNA (1)...(19): siRNA sense strand
gauuacuccuuuacucaag

SEQ ID NO: 262511 - RNA, 19 nt, Homo sapiens
  misc_RNA (1)...(19): siRNA sense strand
caauaugcaauucuuggaa

SEQ ID NO: 262512 - RNA, 19 nt, Homo sapiens
  misc_RNA (1)...(19): siRNA sense strand
cgcugcagcucuuguuauu

SEQ ID NO: 262513 - RNA, 19 nt, Homo sapiens
  misc_RNA (1)...(19): siRNA sense strand
augcaagccuauagucauu

SEQ ID NO: 262514 - RNA, 19 nt, Homo sapiens
  misc_RNA (1)...(19): siRNA sense strand
caacaacaucaagucaauu

SEQ ID NO: 262515 - RNA, 19 nt, Homo sapiens
  misc_RNA (1)...(19): siRNA sense strand
ccuggauucuuuaacaaau

SEQ ID NO: 262516 - RNA, 19 nt, Homo sapiens
  misc_RNA (1)...(19): siRNA sense strand
cacauguguccauuaauaa

SEQ ID NO: 262517 - RNA, 19 nt, Homo sapiens
  misc_RNA (1)...(19): siRNA sense strand
uccagccucuucaaauaaa

SEQ ID NO: 262518 - RNA, 19 nt, Homo sapiens
  misc_RNA (1)...(19): siRNA sense strand
gcaaaaggaugggaaaugc

SEQ ID NO: 262519 - RNA, 19 nt, Homo sapiens
  misc_RNA (1)...(19): siRNA sense strand
aaaagaccuuccggaauua

SEQ ID NO: 262520 - RNA, 19 nt, Homo sapiens
  misc_RNA (1)...(19): siRNA sense strand
caagaccugccuuaucaau

SEQ ID NO: 262521 - RNA, 19 nt, Homo sapiens
  misc_RNA (1)...(19): siRNA sense strand
cgccaucgcugcagcucuu

SEQ ID NO: 262522 - RNA, 19 nt, Homo sapiens
  misc_RNA (1)...(19): siRNA sense strand
cccagcguccuguaauuua

SEQ ID NO: 262523 - RNA, 19 nt, Homo sapiens
  misc_RNA (1)...(19): siRNA sense strand
aggcacauccacuguagua

SEQ ID NO: 262524 - RNA, 19 nt, Homo sapiens
  misc_RNA (1)...(19): siRNA sense strand
gcaccguuccuccugaugu

SEQ ID NO: 262525 - RNA, 19 nt, Homo sapiens
  misc_RNA (1)...(19): siRNA sense strand
gggacacugauguggaaua

SEQ ID NO: 262526 - RNA, 19 nt, Homo sapiens
  misc_RNA (1)...(19): siRNA sense strand
gauugcaucauuacagaau

SEQ ID NO: 262527 - RNA, 19 nt, Homo sapiens
  misc_RNA (1)...(19): siRNA sense strand
gaaaggggacguguacauu

SEQ ID NO: 262528 - RNA, 19 nt, Homo sapiens
  misc_RNA (1)...(19): siRNA sense strand
caccguuccuccugauguu

SEQ ID NO: 262529 - RNA, 19 nt, Homo sapiens
  misc_RNA (1)...(19): siRNA sense strand
cuauagucauugaaacuca

SEQ ID NO: 262530 - RNA, 19 nt, Homo sapiens
  misc_RNA (1)...(19): siRNA sense strand
agaaagggcucaucgcuua

SEQ ID NO: 262531 - RNA, 19 nt, Homo sapiens
  misc_RNA (1)...(19): siRNA sense strand
cagaagagauugagauuga

SEQ ID NO: 262532 - RNA, 19 nt, Homo sapiens
  misc_RNA (1)...(19): siRNA sense strand
gaagagagcaggcccauga

SEQ ID NO: 262533 - RNA, 19 nt, Homo sapiens
  misc_RNA (1)...(19): siRNA sense strand
ggaguuugcugcugaugua

SEQ ID NO: 262534 - RNA, 19 nt, Homo sapiens
  misc_RNA (1)...(19): siRNA sense strand
gaaaagauauuccuacaga

SEQ ID NO: 262535 - RNA, 19 nt, Homo sapiens
  misc_RNA (1)...(19): siRNA sense strand
ggaacuggcuuuggagaaa

SEQ ID NO: 262536 - RNA, 19 nt, Homo sapiens
  misc_RNA (1)...(19): siRNA sense strand
ggacauggguacuauuaag

SEQ ID NO: 262537 - RNA, 19 nt, Homo sapiens
  misc_RNA (1)...(19): siRNA sense strand
caagaaagcgaaugagaaa

SEQ ID NO: 262538 - RNA, 19 nt, Homo sapiens
  misc_RNA (1)...(19): siRNA sense strand
gaaaagcgguuacaagaug

SEQ ID NO: 262539 - RNA, 19 nt, Homo sapiens
  misc_RNA (1)...(19): siRNA sense strand
gaugaaggcucuguggaaa

SEQ ID NO: 262540 - RNA, 19 nt, Homo sapiens
  misc_RNA (1)...(19): siRNA sense strand
cggaagcccuacaccauua

SEQ ID NO: 262541 - RNA, 19 nt, Homo sapiens
  misc_RNA (1)...(19): siRNA sense strand
cagaguguaugcaagauuu

SEQ ID NO: 262542 - RNA, 19 nt, Homo sapiens
  misc_RNA (1)...(19): siRNA sense strand
ggacagcucaauucuacua

SEQ ID NO: 262543 - RNA, 19 nt, Homo sapiens
  misc_RNA (1)...(19): siRNA sense strand
caccagagcucuaagaaag

SEQ ID NO: 262544 - RNA, 19 nt, Homo sapiens
  misc_RNA (1)...(19): siRNA sense strand
gaacaagagcugguaguga

SEQ ID NO: 262545 - RNA, 19 nt, Homo sapiens
  misc_RNA (1)...(19): siRNA sense strand
gcggacagcucaauucuac

SEQ ID NO: 262546 - RNA, 19 nt, Homo sapiens
  misc_RNA (1)...(19): siRNA sense strand
gaagagauugagauugauu

SEQ ID NO: 262547 - RNA, 19 nt, Homo sapiens
  misc_RNA (1)...(19): siRNA sense strand
uaagaagcaugcugccuau

SEQ ID NO: 262548 - RNA, 19 nt, Homo sapiens
  misc_RNA (1)...(19): siRNA sense strand
guagcagugucacgccuua

SEQ ID NO: 262549 - RNA, 19 nt, Homo sapiens
  misc_RNA (1)...(19): siRNA sense strand
gaugccagaugaaccacua

SEQ ID NO: 262550 - RNA, 19 nt, Homo sapiens
  misc_RNA (1)...(19): siRNA sense strand
caagcccacugaugauauu

SEQ ID NO: 262551 - RNA, 19 nt, Homo sapiens
  misc_RNA (1)...(19): siRNA sense strand
cacgaaagcuacaggaugu

SEQ ID NO: 262552 - RNA, 19 nt, Homo sapiens
  misc_RNA (1)...(19): siRNA sense strand
uuaagaagccugugggaaa

SEQ ID NO: 262553 - RNA, 19 nt, Homo sapiens
  misc_RNA (1)...(19): siRNA sense strand
uagcagaacuacaggaaca

SEQ ID NO: 262554 - RNA, 19 nt, Homo sapiens
  misc_RNA (1)...(19): siRNA sense strand
acaacaagcccacugauga

SEQ ID NO: 262555 - RNA, 19 nt, Homo sapiens
  misc_RNA (1)...(19): siRNA sense strand
gggccgaguugugcauaua

SEQ ID NO: 262556 - RNA, 19 nt, Homo sapiens
  misc_RNA (1)...(19): siRNA sense strand
guagugaccaucccuaaga

SEQ ID NO: 262557 - RNA, 19 nt, Homo sapiens
  misc_RNA (1)...(19): siRNA sense strand
caacaacaccagagcucua

SEQ ID NO: 262558 - RNA, 19 nt, Homo sapiens
  misc_RNA (1)...(19): siRNA sense strand
ccaagaaagcgaaugagaa

SEQ ID NO: 262559 - RNA, 19 nt, Homo sapiens
  misc_RNA (1)...(19): siRNA sense strand
uacagaagguugcaucaau

SEQ ID NO: 262560 - RNA, 19 nt, Homo sapiens
  misc_RNA (1)...(19): siRNA sense strand
gccuggacaucaacaaauu

SEQ ID NO: 262561 - RNA, 19 nt, Homo sapiens
  misc_RNA (1)...(19): siRNA sense strand
ccuaagaaguccaagaaag

SEQ ID NO: 262562 - RNA, 19 nt, Homo sapiens
  misc_RNA (1)...(19): siRNA sense strand
cucaagccauccacacuua

SEQ ID NO: 262563 - RNA, 19 nt, Homo sapiens
  misc_RNA (1)...(19): siRNA sense strand
gugccugcuuugcaacuua

SEQ ID NO: 262564 - RNA, 19 nt, Homo sapiens
  misc_RNA (1)...(19): siRNA sense strand
agagcaggcccaugaguua

SEQ ID NO: 262565 - RNA, 19 nt, Homo sapiens
  misc_RNA (1)...(19): siRNA sense strand
gcucaucgcuuagcagaac

SEQ ID NO: 262566 - RNA, 19 nt, Homo sapiens
  misc_RNA (1)...(19): siRNA sense strand
guauuugaguuccguuaug

SEQ ID NO: 262567 - RNA, 19 nt, Homo sapiens
  misc_RNA (1)...(19): siRNA sense strand
gcacuuggccugcaugacu

SEQ ID NO: 262568 - RNA, 19 nt, Homo sapiens
  misc_RNA (1)...(19): siRNA sense strand
acagaagguugcaucaaug

SEQ ID NO: 262569 - RNA, 19 nt, Homo sapiens
  misc_RNA (1)...(19): siRNA sense strand
ucaccaacuguuacauuua

SEQ ID NO: 262570 - RNA, 19 nt, Homo sapiens
  misc_RNA (1)...(19): siRNA sense strand
gagagcaggcccaugaguu

SEQ ID NO: 262571 - RNA, 19 nt, Homo sapiens
  misc_RNA (1)...(19): siRNA sense strand
caacugcuauaaguacaau

SEQ ID NO: 262572 - RNA, 19 nt, Homo sapiens
  misc_RNA (1)...(19): siRNA sense strand
guaaagcggaaagcagaua

SEQ ID NO: 262573 - RNA, 19 nt, Homo sapiens
  misc_RNA (1)...(19): siRNA sense strand
ugaaggcucuguggaaaca

SEQ ID NO: 262574 - RNA, 19 nt, Homo sapiens
  misc_RNA (1)...(19): siRNA sense strand
uaagaagccugugggaaag

SEQ ID NO: 262575 - RNA, 19 nt, Homo sapiens
  misc_RNA (1)...(19): siRNA sense strand
gaggaaaguagcagugaga

SEQ ID NO: 262576 - RNA, 19 nt, Homo sapiens
  misc_RNA (1)...(19): siRNA sense strand
ggcaauggcacgaaagcua

SEQ ID NO: 262577 - RNA, 19 nt, Homo sapiens
  misc_RNA (1)...(19): siRNA sense strand
ccagagcucuaagaaagga

SEQ ID NO: 262578 - RNA, 19 nt, Homo sapiens
  misc_RNA (1)...(19): siRNA sense strand
caucuuggcuccugguucu

SEQ ID NO: 262579 - RNA, 19 nt, Homo sapiens
  misc_RNA (1)...(19): siRNA sense strand
caacaagcccacugaugau

SEQ ID NO: 262580 - RNA, 19 nt, Homo sapiens
  misc_RNA (1)...(19): siRNA sense strand
gccuacagguuaugauuca

SEQ ID NO: 262581 - RNA, 19 nt, Homo sapiens
  misc_RNA (1)...(19): siRNA sense strand
ggaacagcuucgggcagua

SEQ ID NO: 262582 - RNA, 19 nt, Homo sapiens
  misc_RNA (1)...(19): siRNA sense strand
ggagguguccaaucccaaa

SEQ ID NO: 262583 - RNA, 19 nt, Homo sapiens
  misc_RNA (1)...(19): siRNA sense strand
uuaccaaccagcugcaaua

SEQ ID NO: 262584 - RNA, 19 nt, Homo sapiens
  misc_RNA (1)...(19): siRNA sense strand
aacccucucucuuguauga

SEQ ID NO: 262585 - RNA, 19 nt, Homo sapiens
  misc_RNA (1)...(19): siRNA sense strand
augcuuggccuuucuauaa

SEQ ID NO: 262586 - RNA, 19 nt, Homo sapiens
  misc_RNA (1)...(19): siRNA sense strand
caacaccagagcucuaaga

SEQ ID NO: 262587 - RNA, 19 nt, Homo sapiens
  misc_RNA (1)...(19): siRNA sense strand
uuaauaccauguucaccaa

SEQ ID NO: 262588 - RNA, 19 nt, Homo sapiens
  misc_RNA (1)...(19): siRNA sense strand
ccuaagaacagccacaaga

SEQ ID NO: 262589 - RNA, 19 nt, Homo sapiens
  misc_RNA (1)...(19): siRNA sense strand
caccagugauucagacuca

SEQ ID NO: 262590 - RNA, 19 nt, Homo sapiens
  misc_RNA (1)...(19): siRNA sense strand
gagaagcugggccgaguug

SEQ ID NO: 262591 - RNA, 19 nt, Homo sapiens
  misc_RNA (1)...(19): siRNA sense strand
gaacaacuggcugcucugu

SEQ ID NO: 262592 - RNA, 19 nt, Homo sapiens
  misc_RNA (1)...(19): siRNA sense strand
caccaacuguuacauuuac

SEQ ID NO: 262593 - RNA, 19 nt, Homo sapiens
  misc_RNA (1)...(19): siRNA sense strand
guccuuuccugccuacgua

SEQ ID NO: 262594 - RNA, 19 nt, Homo sapiens
  misc_RNA (1)...(19): siRNA sense strand
gccuguggaugcugucaaa

SEQ ID NO: 262595 - RNA, 19 nt, Homo sapiens
  misc_RNA (1)...(19): siRNA sense strand
gagccuggacaucaacaaa

SEQ ID NO: 262596 - RNA, 19 nt, Homo sapiens
  misc_RNA (1)...(19): siRNA sense strand
uuuaggcccuucuggcuuu

SEQ ID NO: 262597 - RNA, 19 nt, Homo sapiens
  misc_RNA (1)...(19): siRNA sense strand
cuaagaacagccacaagaa

SEQ ID NO: 262598 - RNA, 19 nt, Homo sapiens
  misc_RNA (1)...(19): siRNA sense strand
caucaaugccacaagaaga

SEQ ID NO: 262599 - RNA, 19 nt, Homo sapiens
  misc_RNA (1)...(19): siRNA sense strand
aggaggaacuggcuuugga

SEQ ID NO: 262600 - RNA, 19 nt, Homo sapiens
  misc_RNA (1)...(19): siRNA sense strand
ggaagcccuacaccauuaa

SEQ ID NO: 262601 - RNA, 19 nt, Homo sapiens
  misc_RNA (1)...(19): siRNA sense strand
ccaaccagcugcaauaccu

SEQ ID NO: 262602 - RNA, 19 nt, Homo sapiens
  misc_RNA (1)...(19): siRNA sense strand
ggacgaggaggaagaagag

SEQ ID NO: 262603 - RNA, 19 nt, Homo sapiens
  misc_RNA (1)...(19): siRNA sense strand
gcugauguacggcuuaugu

SEQ ID NO: 262604 - RNA, 19 nt, Homo sapiens
  misc_RNA (1)...(19): siRNA sense strand
aaagcuuucagaacaguua

SEQ ID NO: 262605 - RNA, 19 nt, Homo sapiens
  misc_RNA (1)...(19): siRNA sense strand
gacauggguacuauuaaga

SEQ ID NO: 262606 - RNA, 19 nt, Homo sapiens
  misc_RNA (1)...(19): siRNA sense strand
gauuccagcuccuccucuu

SEQ ID NO: 262607 - RNA, 19 nt, Homo sapiens
  misc_RNA (1)...(19): siRNA sense strand
gaacuggcuuuggagaaaa

SEQ ID NO: 262608 - RNA, 19 nt, Homo sapiens
  misc_RNA (1)...(19): siRNA sense strand
cagcugagccuggacauca

SEQ ID NO: 262609 - RNA, 19 nt, Homo sapiens
  misc_RNA (1)...(19): siRNA sense strand
ggaagaagagagugaaagc

SEQ ID NO: 262610 - RNA, 19 nt, Homo sapiens
  misc_RNA (1)...(19): siRNA sense strand
ccauggaccucagcacugu

SEQ ID NO: 262611 - RNA, 19 nt, Homo sapiens
  misc_RNA (1)...(19): siRNA sense strand
cugggagucuugagccuaa

SEQ ID NO: 262612 - RNA, 19 nt, Homo sapiens
  misc_RNA (1)...(19): siRNA sense strand
cgaaaacccucucucuugu

SEQ ID NO: 262613 - RNA, 19 nt, Homo sapiens
  misc_RNA (1)...(19): siRNA sense strand
gaaagacaaaggaggaacu

SEQ ID NO: 262614 - RNA, 19 nt, Homo sapiens
  misc_RNA (1)...(19): siRNA sense strand
gaagcugggccgaguugug

SEQ ID NO: 262615 - RNA, 19 nt, Homo sapiens
  misc_RNA (1)...(19): siRNA sense strand
gaggagacuugaaaacaau

SEQ ID NO: 262616 - RNA, 19 nt, Homo sapiens
  misc_RNA (1)...(19): siRNA sense strand
acagcucaauucuacuaaa

SEQ ID NO: 262617 - RNA, 19 nt, Homo sapiens
  misc_RNA (1)...(19): siRNA sense strand
ggagcccucuuuacgugau

SEQ ID NO: 262618 - RNA, 19 nt, Homo sapiens
  misc_RNA (1)...(19): siRNA sense strand
gaggaagaagagagugaaa

SEQ ID NO: 262619 - RNA, 19 nt, Homo sapiens
  misc_RNA (1)...(19): siRNA sense strand
ggaggaagaagagagugaa

SEQ ID NO: 262620 - RNA, 19 nt, Homo sapiens
  misc_RNA (1)...(19): siRNA sense strand
gaagauggagaaccgugau

SEQ ID NO: 262621 - RNA, 19 nt, Homo sapiens
  misc_RNA (1)...(19): siRNA sense strand
uacacaagguagugaugaa

SEQ ID NO: 262622 - RNA, 19 nt, Homo sapiens
  misc_RNA (1)...(19): siRNA sense strand
ccauguucaccaacuguua

SEQ ID NO: 262623 - RNA, 19 nt, Homo sapiens
  misc_RNA (1)...(19): siRNA sense strand
ucuaccggauuaucacaaa

SEQ ID NO: 262624 - RNA, 19 nt, Homo sapiens
  misc_RNA (1)...(19): siRNA sense strand
cacaaacgcuggaaaagau

SEQ ID NO: 262625 - RNA, 19 nt, Homo sapiens
  misc_RNA (1)...(19): siRNA sense strand
gcacaaacgcuggaaaaga

SEQ ID NO: 262626 - RNA, 19 nt, Homo sapiens
  misc_RNA (1)...(19): siRNA sense strand
uucaccaacuguuacauuu

SEQ ID NO: 262627 - RNA, 19 nt, Homo sapiens
  misc_RNA (1)...(19): siRNA sense strand
guucaccaacuguuacauu

SEQ ID NO: 262628 - RNA, 19 nt, Homo sapiens
  misc_RNA (1)...(19): siRNA sense strand
gcacagcaaguagcagugu

SEQ ID NO: 262629 - RNA, 19 nt, Homo sapiens
  misc_RNA (1)...(19): siRNA sense strand
ugauucagacucaggcuaa

SEQ ID NO: 262630 - RNA, 19 nt, Homo sapiens
  misc_RNA (1)...(19): siRNA sense strand
gguauacucuaguugaaua

SEQ ID NO: 262631 - RNA, 19 nt, Homo sapiens
  misc_RNA (1)...(19): siRNA sense strand
gaggagagguggccgaaga

SEQ ID NO: 262632 - RNA, 19 nt, Homo sapiens
  misc_RNA (1)...(19): siRNA sense strand
ggagcaggauggcgaugaa

SEQ ID NO: 262633 - RNA, 19 nt, Homo sapiens
  misc_RNA (1)...(19): siRNA sense strand
agacauacacgacaaauuc

SEQ ID NO: 262634 - RNA, 19 nt, Homo sapiens
  misc_RNA (1)...(19): siRNA sense strand
guugaaggcuggauucucu

SEQ ID NO: 262635 - RNA, 19 nt, Homo sapiens
  misc_RNA (1)...(19): siRNA sense strand
ggacgagagcauucacaaa

SEQ ID NO: 262636 - RNA, 19 nt, Homo sapiens
  misc_RNA (1)...(19): siRNA sense strand
ugaggaagccaccgaagaa

SEQ ID NO: 262637 - RNA, 19 nt, Homo sapiens
  misc_RNA (1)...(19): siRNA sense strand
aagaagacauacacgacaa

SEQ ID NO: 262638 - RNA, 19 nt, Homo sapiens
  misc_RNA (1)...(19): siRNA sense strand
cgagagcauucacaaacug

SEQ ID NO: 262639 - RNA, 19 nt, Homo sapiens
  misc_RNA (1)...(19): siRNA sense strand
gaagggguauacucuaguu

SEQ ID NO: 262640 - RNA, 19 nt, Homo sapiens
  misc_RNA (1)...(19): siRNA sense strand
gcggaugcgugaggauuau

SEQ ID NO: 262641 - RNA, 19 nt, Homo sapiens
  misc_RNA (1)...(19): siRNA sense strand
gaagacauacacgacaaau

SEQ ID NO: 262642 - RNA, 19 nt, Homo sapiens
  misc_RNA (1)...(19): siRNA sense strand
gacgagagcauucacaaac

SEQ ID NO: 262643 - RNA, 19 nt, Homo sapiens
  misc_RNA (1)...(19): siRNA sense strand
ggccgaagacgcagcagaa

SEQ ID NO: 262644 - RNA, 19 nt, Homo sapiens
  misc_RNA (1)...(19): siRNA sense strand
cgaagacgcagcagaaguc

SEQ ID NO: 262645 - RNA, 19 nt, Homo sapiens
  misc_RNA (1)...(19): siRNA sense strand
gagagcauucacaaacuga

SEQ ID NO: 262646 - RNA, 19 nt, Homo sapiens
  misc_RNA (1)...(19): siRNA sense strand
gcgaacaggauaucugaag

SEQ ID NO: 262647 - RNA, 19 nt, Homo sapiens
  misc_RNA (1)...(19): siRNA sense strand
ggacucaauggccaggauu

SEQ ID NO: 262648 - RNA, 19 nt, Homo sapiens
  misc_RNA (1)...(19): siRNA sense strand
gaaggcuggauucucuuug

SEQ ID NO: 262649 - RNA, 19 nt, Homo sapiens
  misc_RNA (1)...(19): siRNA sense strand
ggaagccaccgaagaagac

SEQ ID NO: 262650 - RNA, 19 nt, Homo sapiens
  misc_RNA (1)...(19): siRNA sense strand
ggaugcgugaggauuauga

SEQ ID NO: 262651 - RNA, 19 nt, Homo sapiens
  misc_RNA (1)...(19): siRNA sense strand
cagaauauggggaaauuaa

SEQ ID NO: 262652 - RNA, 19 nt, Homo sapiens
  misc_RNA (1)...(19): siRNA sense strand
aggcuggauucucuuugua

SEQ ID NO: 262653 - RNA, 19 nt, Homo sapiens
  misc_RNA (1)...(19): siRNA sense strand
cgaugaacccggaccacaa

SEQ ID NO: 262654 - RNA, 19 nt, Homo sapiens
  misc_RNA (1)...(19): siRNA sense strand
ugaaggcuggauucucuuu

SEQ ID NO: 262655 - RNA, 19 nt, Homo sapiens
  misc_RNA (1)...(19): siRNA sense strand
uggauucucuuuguaacug

SEQ ID NO: 262656 - RNA, 19 nt, Homo sapiens
  misc_RNA (1)...(19): siRNA sense strand
gggacucaauggccaggau

SEQ ID NO: 262657 - RNA, 19 nt, Homo sapiens
  misc_RNA (1)...(19): siRNA sense strand
cgacaggcgaacaggauau

SEQ ID NO: 262658 - RNA, 19 nt, Homo sapiens
  misc_RNA (1)...(19): siRNA sense strand
gggacgagagcauucacaa

SEQ ID NO: 262659 - RNA, 19 nt, Homo sapiens
  misc_RNA (1)...(19): siRNA sense strand
ggcuggauucucuuuguaa

SEQ ID NO: 262660 - RNA, 19 nt, Homo sapiens
  misc_RNA (1)...(19): siRNA sense strand
aaggcuggauucucuuugu

SEQ ID NO: 262661 - RNA, 19 nt, Homo sapiens
  misc_RNA (1)...(19): siRNA sense strand
gcuauggagggacucaaug

SEQ ID NO: 262662 - RNA, 19 nt, Homo sapiens
  misc_RNA (1)...(19): siRNA sense strand
gcuggauucucuuuguaac

SEQ ID NO: 262663 - RNA, 19 nt, Homo sapiens
  misc_RNA (1)...(19): siRNA sense strand
gaugaacccggaccacaac

SEQ ID NO: 262664 - RNA, 19 nt, Homo sapiens
  misc_RNA (1)...(19): siRNA sense strand
gacagcccaucagcguuga

SEQ ID NO: 262665 - RNA, 19 nt, Homo sapiens
  misc_RNA (1)...(19): siRNA sense strand
gcgcggaugcgugaggauu

SEQ ID NO: 262666 - RNA, 19 nt, Homo sapiens
  misc_RNA (1)...(19): siRNA sense strand
ggaagaagcuugcugaguu

SEQ ID NO: 262667 - RNA, 19 nt, Homo sapiens
  misc_RNA (1)...(19): siRNA sense strand
agaaagagcugaacaagaa

SEQ ID NO: 262668 - RNA, 19 nt, Homo sapiens
  misc_RNA (1)...(19): siRNA sense strand
ggaagcagcugauuauuag

SEQ ID NO: 262669 - RNA, 19 nt, Homo sapiens
  misc_RNA (1)...(19): siRNA sense strand
gaagauuacuacaccgaua

SEQ ID NO: 262670 - RNA, 19 nt, Homo sapiens
  misc_RNA (1)...(19): siRNA sense strand
gcaagucacccaucagaua

SEQ ID NO: 262671 - RNA, 19 nt, Homo sapiens
  misc_RNA (1)...(19): siRNA sense strand
gcaauaggguggcacagaa

SEQ ID NO: 262672 - RNA, 19 nt, Homo sapiens
  misc_RNA (1)...(19): siRNA sense strand
cuacagagaucccacacua

SEQ ID NO: 262673 - RNA, 19 nt, Homo sapiens
  misc_RNA (1)...(19): siRNA sense strand
gaagaaggcuuuuaagaug

SEQ ID NO: 262674 - RNA, 19 nt, Homo sapiens
  misc_RNA (1)...(19): siRNA sense strand
gagcuugugugcccugaua

SEQ ID NO: 262675 - RNA, 19 nt, Homo sapiens
  misc_RNA (1)...(19): siRNA sense strand
ggagcuaccuuccugugua

SEQ ID NO: 262676 - RNA, 19 nt, Homo sapiens
  misc_RNA (1)...(19): siRNA sense strand
ggaaugaccugccaguaca

SEQ ID NO: 262677 - RNA, 19 nt, Homo sapiens
  misc_RNA (1)...(19): siRNA sense strand
gaagugagcgcaagcuuga

SEQ ID NO: 262678 - RNA, 19 nt, Homo sapiens
  misc_RNA (1)...(19): siRNA sense strand
gaagauucaugcaggaaga

SEQ ID NO: 262679 - RNA, 19 nt, Homo sapiens
  misc_RNA (1)...(19): siRNA sense strand
gaagaagcuugcugaguuc

SEQ ID NO: 262680 - RNA, 19 nt, Homo sapiens
  misc_RNA (1)...(19): siRNA sense strand
ccacacuacuuccggcuua

SEQ ID NO: 262681 - RNA, 19 nt, Homo sapiens
  misc_RNA (1)...(19): siRNA sense strand
gaacuacauugggauaaau

SEQ ID NO: 262682 - RNA, 19 nt, Homo sapiens
  misc_RNA (1)...(19): siRNA sense strand
ugaaauugguccaguuuau

SEQ ID NO: 262683 - RNA, 19 nt, Homo sapiens
  misc_RNA (1)...(19): siRNA sense strand
ggccaaggcuccuaugaug

SEQ ID NO: 262684 - RNA, 19 nt, Homo sapiens
  misc_RNA (1)...(19): siRNA sense strand
gagaugguguuuacucaga

SEQ ID NO: 262685 - RNA, 19 nt, Homo sapiens
  misc_RNA (1)...(19): siRNA sense strand
ggaaaggccugaggaugug

SEQ ID NO: 262686 - RNA, 19 nt, Homo sapiens
  misc_RNA (1)...(19): siRNA sense strand
ggagaccuauguuccagaa

SEQ ID NO: 262687 - RNA, 19 nt, Homo sapiens
  misc_RNA (1)...(19): siRNA sense strand
cccgggacaugcuauauua

SEQ ID NO: 262688 - RNA, 19 nt, Homo sapiens
  misc_RNA (1)...(19): siRNA sense strand
gagagaugguguuuacuca

SEQ ID NO: 262689 - RNA, 19 nt, Homo sapiens
  misc_RNA (1)...(19): siRNA sense strand
ggugaaaggcucaguagaa

SEQ ID NO: 262690 - RNA, 19 nt, Homo sapiens
  misc_RNA (1)...(19): siRNA sense strand
gcuaggaagcagcugauua

SEQ ID NO: 262691 - RNA, 19 nt, Homo sapiens
  misc_RNA (1)...(19): siRNA sense strand
ggaugaguuugaaauguug

SEQ ID NO: 262692 - RNA, 19 nt, Homo sapiens
  misc_RNA (1)...(19): siRNA sense strand
gaagacaaccaucacacuu

SEQ ID NO: 262693 - RNA, 19 nt, Homo sapiens
  misc_RNA (1)...(19): siRNA sense strand
gaagcuugcugaguucgaa

SEQ ID NO: 262694 - RNA, 19 nt, Homo sapiens
  misc_RNA (1)...(19): siRNA sense strand
cacagaagcucaucucagu

SEQ ID NO: 262695 - RNA, 19 nt, Homo sapiens
  misc_RNA (1)...(19): siRNA sense strand
gagagcagcuggauuuuau

SEQ ID NO: 262696 - RNA, 19 nt, Homo sapiens
  misc_RNA (1)...(19): siRNA sense strand
ggagaacuacauugggaua

SEQ ID NO: 262697 - RNA, 19 nt, Homo sapiens
  misc_RNA (1)...(19): siRNA sense strand
ccaguacauuguccaguuu

SEQ ID NO: 262698 - RNA, 19 nt, Homo sapiens
  misc_RNA (1)...(19): siRNA sense strand
gagcuaccuuccuguguau

SEQ ID NO: 262699 - RNA, 19 nt, Homo sapiens
  misc_RNA (1)...(19): siRNA sense strand
ggaauugggcagcugauug

SEQ ID NO: 262700 - RNA, 19 nt, Homo sapiens
  misc_RNA (1)...(19): siRNA sense strand
agagagagaugguguuuac

SEQ ID NO: 262701 - RNA, 19 nt, Homo sapiens
  misc_RNA (1)...(19): siRNA sense strand
gccaguacauuguccaguu

SEQ ID NO: 262702 - RNA, 19 nt, Homo sapiens
  misc_RNA (1)...(19): siRNA sense strand
gaccaacacuacagagauc

SEQ ID NO: 262703 - RNA, 19 nt, Homo sapiens
  misc_RNA (1)...(19): siRNA sense strand
caaaacagccugagcaaaa

SEQ ID NO: 262704 - RNA, 19 nt, Homo sapiens
  misc_RNA (1)...(19): siRNA sense strand
agacaaccaucacacuuau

SEQ ID NO: 262705 - RNA, 19 nt, Homo sapiens
  misc_RNA (1)...(19): siRNA sense strand
ugaguucgaagaugaguua

SEQ ID NO: 262706 - RNA, 19 nt, Homo sapiens
  misc_RNA (1)...(19): siRNA sense strand
gaaauugguccaguuuaug

SEQ ID NO: 262707 - RNA, 19 nt, Homo sapiens
  misc_RNA (1)...(19): siRNA sense strand
gaacccuucgccugaauaa

SEQ ID NO: 262708 - RNA, 19 nt, Homo sapiens
  misc_RNA (1)...(19): siRNA sense strand
ggacugcaaguggccauua

SEQ ID NO: 262709 - RNA, 19 nt, Homo sapiens
  misc_RNA (1)...(19): siRNA sense strand
gaagaaagagcugaacaag

SEQ ID NO: 262710 - RNA, 19 nt, Homo sapiens
  misc_RNA (1)...(19): siRNA sense strand
gcccugagauccugcacaa

SEQ ID NO: 262711 - RNA, 19 nt, Homo sapiens
  misc_RNA (1)...(19): siRNA sense strand
aggaagcagcugauuauua

SEQ ID NO: 262712 - RNA, 19 nt, Homo sapiens
  misc_RNA (1)...(19): siRNA sense strand
uggaugaguuugaaauguu

SEQ ID NO: 262713 - RNA, 19 nt, Homo sapiens
  misc_RNA (1)...(19): siRNA sense strand
cgucucagcccuucaguuu

SEQ ID NO: 262714 - RNA, 19 nt, Homo sapiens
  misc_RNA (1)...(19): siRNA sense strand
gcccagcacuucauacgau

SEQ ID NO: 262715 - RNA, 19 nt, Homo sapiens
  misc_RNA (1)...(19): siRNA sense strand
ggaaguccuccuuguauuc

SEQ ID NO: 262716 - RNA, 19 nt, Homo sapiens
  misc_RNA (1)...(19): siRNA sense strand
ugaagagugucuccagaug

SEQ ID NO: 262717 - RNA, 19 nt, Homo sapiens
  misc_RNA (1)...(19): siRNA sense strand
ccaaagaaaggaccagaga

SEQ ID NO: 262718 - RNA, 19 nt, Homo sapiens
  misc_RNA (1)...(19): siRNA sense strand
aggaagagcugacccaucu

SEQ ID NO: 262719 - RNA, 19 nt, Homo sapiens
  misc_RNA (1)...(19): siRNA sense strand
cuggagagcucacagacuu

SEQ ID NO: 262720 - RNA, 19 nt, Homo sapiens
  misc_RNA (1)...(19): siRNA sense strand
gccagaagcaggaguguga

SEQ ID NO: 262721 - RNA, 19 nt, Homo sapiens
  misc_RNA (1)...(19): siRNA sense strand
agaccuauguuccagaaga

SEQ ID NO: 262722 - RNA, 19 nt, Homo sapiens
  misc_RNA (1)...(19): siRNA sense strand
ggagagcucacagacuuaa

SEQ ID NO: 262723 - RNA, 19 nt, Homo sapiens
  misc_RNA (1)...(19): siRNA sense strand
guucaaaacugacauuuag

SEQ ID NO: 262724 - RNA, 19 nt, Homo sapiens
  misc_RNA (1)...(19): siRNA sense strand
gcucccagcugaccagaca

SEQ ID NO: 262725 - RNA, 19 nt, Homo sapiens
  misc_RNA (1)...(19): siRNA sense strand
ccacugaggacccguguga

SEQ ID NO: 262726 - RNA, 19 nt, Homo sapiens
  misc_RNA (1)...(19): siRNA sense strand
aagacaaccaucacacuua

SEQ ID NO: 262727 - RNA, 19 nt, Homo sapiens
  misc_RNA (1)...(19): siRNA sense strand
gaucagcgacugccacauc

SEQ ID NO: 262728 - RNA, 19 nt, Homo sapiens
  misc_RNA (1)...(19): siRNA sense strand
cauggaauuuaacuccuaa

SEQ ID NO: 262729 - RNA, 19 nt, Homo sapiens
  misc_RNA (1)...(19): siRNA sense strand
aaagaagccagcaccgaua

SEQ ID NO: 262730 - RNA, 19 nt, Homo sapiens
  misc_RNA (1)...(19): siRNA sense strand
gcuccuaugaugagagaua

SEQ ID NO: 262731 - RNA, 19 nt, Homo sapiens
  misc_RNA (1)...(19): siRNA sense strand
gauaggagaauuccagagu

SEQ ID NO: 262732 - RNA, 19 nt, Homo sapiens
  misc_RNA (1)...(19): siRNA sense strand
agccugacauggaauuuaa

SEQ ID NO: 262733 - RNA, 19 nt, Homo sapiens
  misc_RNA (1)...(19): siRNA sense strand
cgugaggccugcacagcua

SEQ ID NO: 262734 - RNA, 19 nt, Homo sapiens
  misc_RNA (1)...(19): siRNA sense strand
gaccagccuucccaacaug

SEQ ID NO: 262735 - RNA, 19 nt, Homo sapiens
  misc_RNA (1)...(19): siRNA sense strand
cuaaggagagcucugauug

SEQ ID NO: 262736 - RNA, 19 nt, Homo sapiens
  misc_RNA (1)...(19): siRNA sense strand
acauugaggcugucuuuaa

SEQ ID NO: 262737 - RNA, 19 nt, Homo sapiens
  misc_RNA (1)...(19): siRNA sense strand
agaacuacauugggauaaa

SEQ ID NO: 262738 - RNA, 19 nt, Homo sapiens
  misc_RNA (1)...(19): siRNA sense strand
cuaggaagcagcugauuau

SEQ ID NO: 262739 - RNA, 19 nt, Homo sapiens
  misc_RNA (1)...(19): siRNA sense strand
gggacaugcuauauuagug

SEQ ID NO: 262740 - RNA, 19 nt, Homo sapiens
  misc_RNA (1)...(19): siRNA sense strand
agagagagcuagacagacu

SEQ ID NO: 262741 - RNA, 19 nt, Homo sapiens
  misc_RNA (1)...(19): siRNA sense strand
gaucuauauuucuggugaa

SEQ ID NO: 262742 - RNA, 19 nt, Homo sapiens
  misc_RNA (1)...(19): siRNA sense strand
gcagccagguggagguuag

SEQ ID NO: 262743 - RNA, 19 nt, Homo sapiens
  misc_RNA (1)...(19): siRNA sense strand
aaugguggcuccuggaaug

SEQ ID NO: 262744 - RNA, 19 nt, Homo sapiens
  misc_RNA (1)...(19): siRNA sense strand
ugccgaagcuacuggacua

SEQ ID NO: 262745 - RNA, 19 nt, Homo sapiens
  misc_RNA (1)...(19): siRNA sense strand
gcaguaccaucuacaucuc

SEQ ID NO: 262746 - RNA, 19 nt, Homo sapiens
  misc_RNA (1)...(19): siRNA sense strand
ggucaucggcgacgaagug

SEQ ID NO: 262747 - RNA, 19 nt, Homo sapiens
  misc_RNA (1)...(19): siRNA sense strand
ccauuaccaucucuaagga

SEQ ID NO: 262748 - RNA, 19 nt, Homo sapiens
  misc_RNA (1)...(19): siRNA sense strand
uaaaugugaagaaggcuuu

SEQ ID NO: 262749 - RNA, 19 nt, Homo sapiens
  misc_RNA (1)...(19): siRNA sense strand
uugcugaguucgaagauga

SEQ ID NO: 262750 - RNA, 19 nt, Homo sapiens
  misc_RNA (1)...(19): siRNA sense strand
uuugggaccugcuuuguga

SEQ ID NO: 262751 - RNA, 19 nt, Homo sapiens
  misc_RNA (1)...(19): siRNA sense strand
caucggaauucagccauga

SEQ ID NO: 262752 - RNA, 19 nt, Homo sapiens
  misc_RNA (1)...(19): siRNA sense strand
ggccugcccucaucaucaa

SEQ ID NO: 262753 - RNA, 19 nt, Homo sapiens
  misc_RNA (1)...(19): siRNA sense strand
aaauguggguuucaguguu

SEQ ID NO: 262754 - RNA, 19 nt, Homo sapiens
  misc_RNA (1)...(19): siRNA sense strand
auaggagaauuccagagua

SEQ ID NO: 262755 - RNA, 19 nt, Homo sapiens
  misc_RNA (1)...(19): siRNA sense strand
caaagaaaggaccagagaa

SEQ ID NO: 262756 - RNA, 19 nt, Homo sapiens
  misc_RNA (1)...(19): siRNA sense strand
cauugaggcugucuuuaag

SEQ ID NO: 262757 - RNA, 19 nt, Homo sapiens
  misc_RNA (1)...(19): siRNA sense strand
uggaaguccuccuuguauu

SEQ ID NO: 262758 - RNA, 19 nt, Homo sapiens
  misc_RNA (1)...(19): siRNA sense strand
gaccaccuccuacacuauu

SEQ ID NO: 262759 - RNA, 19 nt, Homo sapiens
  misc_RNA (1)...(19): siRNA sense strand
uugggcagcugauugcuuu

SEQ ID NO: 262760 - RNA, 19 nt, Homo sapiens
  misc_RNA (1)...(19): siRNA sense strand
gagagagagaugguguuua

SEQ ID NO: 262761 - RNA, 19 nt, Homo sapiens
  misc_RNA (1)...(19): siRNA sense strand
cccaagauaucucgcacuu

SEQ ID NO: 262762 - RNA, 19 nt, Homo sapiens
  misc_RNA (1)...(19): siRNA sense strand
uuuaagauguggaacaaca

SEQ ID NO: 262763 - RNA, 19 nt, Homo sapiens
  misc_RNA (1)...(19): siRNA sense strand
gugaaaggcucaguagaac

SEQ ID NO: 262764 - RNA, 19 nt, Homo sapiens
  misc_RNA (1)...(19): siRNA sense strand
gcagcugauuauuagaaau

SEQ ID NO: 262765 - RNA, 19 nt, Homo sapiens
  misc_RNA (1)...(19): siRNA sense strand
ucgagagccuugucagguu

SEQ ID NO: 262766 - RNA, 19 nt, Homo sapiens
  misc_RNA (1)...(19): siRNA sense strand
ggaagaagcuugcugaguu

SEQ ID NO: 262767 - RNA, 19 nt, Homo sapiens
  misc_RNA (1)...(19): siRNA sense strand
agaaagagcugaacaagaa

SEQ ID NO: 262768 - RNA, 19 nt, Homo sapiens
  misc_RNA (1)...(19): siRNA sense strand
gaagauuacuacaccgaua

SEQ ID NO: 262769 - RNA, 19 nt, Homo sapiens
  misc_RNA (1)...(19): siRNA sense strand
ggaaugaccugccaguaca

SEQ ID NO: 262770 - RNA, 19 nt, Homo sapiens
  misc_RNA (1)...(19): siRNA sense strand
gaagugagcgcaagcuuga

SEQ ID NO: 262771 - RNA, 19 nt, Homo sapiens
  misc_RNA (1)...(19): siRNA sense strand
gaagauucaugcaggaaga

SEQ ID NO: 262772 - RNA, 19 nt, Homo sapiens
  misc_RNA (1)...(19): siRNA sense strand
gaagaagcuugcugaguuc

SEQ ID NO: 262773 - RNA, 19 nt, Homo sapiens
  misc_RNA (1)...(19): siRNA sense strand
ugaaauugguccaguuuau

SEQ ID NO: 262774 - RNA, 19 nt, Homo sapiens
  misc_RNA (1)...(19): siRNA sense strand
cccgggacaugcuauauua

SEQ ID NO: 262775 - RNA, 19 nt, Homo sapiens
  misc_RNA (1)...(19): siRNA sense strand
ggaugaguuugaaauguug

SEQ ID NO: 262776 - RNA, 19 nt, Homo sapiens
  misc_RNA (1)...(19): siRNA sense strand
gaagcuugcugaguucgaa

SEQ ID NO: 262777 - RNA, 19 nt, Homo sapiens
  misc_RNA (1)...(19): siRNA sense strand
ccaguacauuguccaguuu

SEQ ID NO: 262778 - RNA, 19 nt, Homo sapiens
  misc_RNA (1)...(19): siRNA sense strand
gccaguacauuguccaguu

SEQ ID NO: 262779 - RNA, 19 nt, Homo sapiens
  misc_RNA (1)...(19): siRNA sense strand
ugaguucgaagaugaguua

SEQ ID NO: 262780 - RNA, 19 nt, Homo sapiens
  misc_RNA (1)...(19): siRNA sense strand
gaaauugguccaguuuaug

SEQ ID NO: 262781 - RNA, 19 nt, Homo sapiens
  misc_RNA (1)...(19): siRNA sense strand
gaagaaagagcugaacaag

SEQ ID NO: 262782 - RNA, 19 nt, Homo sapiens
  misc_RNA (1)...(19): siRNA sense strand
ggaaguccuccuuguauuc

SEQ ID NO: 262783 - RNA, 19 nt, Homo sapiens
  misc_RNA (1)...(19): siRNA sense strand
ugaagagugucuccagaug

SEQ ID NO: 262784 - RNA, 19 nt, Homo sapiens
  misc_RNA (1)...(19): siRNA sense strand
uggaugaguuugaaauguu

SEQ ID NO: 262785 - RNA, 19 nt, Homo sapiens
  misc_RNA (1)...(19): siRNA sense strand
ccaaagaaaggaccagaga

SEQ ID NO: 262786 - RNA, 19 nt, Homo sapiens
  misc_RNA (1)...(19): siRNA sense strand
guucaaaacugacauuuag

SEQ ID NO: 262787 - RNA, 19 nt, Homo sapiens
  misc_RNA (1)...(19): siRNA sense strand
cauggaauuuaacuccuaa

SEQ ID NO: 262788 - RNA, 19 nt, Homo sapiens
  misc_RNA (1)...(19): siRNA sense strand
aaagaagccagcaccgaua

SEQ ID NO: 262789 - RNA, 19 nt, Homo sapiens
  misc_RNA (1)...(19): siRNA sense strand
gauaggagaauuccagagu

SEQ ID NO: 262790 - RNA, 19 nt, Homo sapiens
  misc_RNA (1)...(19): siRNA sense strand
agccugacauggaauuuaa

SEQ ID NO: 262791 - RNA, 19 nt, Homo sapiens
  misc_RNA (1)...(19): siRNA sense strand
gggacaugcuauauuagug

SEQ ID NO: 262792 - RNA, 19 nt, Homo sapiens
  misc_RNA (1)...(19): siRNA sense strand
agagagagcuagacagacu

SEQ ID NO: 262793 - RNA, 19 nt, Homo sapiens
  misc_RNA (1)...(19): siRNA sense strand
ggucaucggcgacgaagug

SEQ ID NO: 262794 - RNA, 19 nt, Homo sapiens
  misc_RNA (1)...(19): siRNA sense strand
aaugguggcuccuggaaug

SEQ ID NO: 262795 - RNA, 19 nt, Homo sapiens
  misc_RNA (1)...(19): siRNA sense strand
uugcugaguucgaagauga

SEQ ID NO: 262796 - RNA, 19 nt, Homo sapiens
  misc_RNA (1)...(19): siRNA sense strand
aaauguggguuucaguguu

SEQ ID NO: 262797 - RNA, 19 nt, Homo sapiens
  misc_RNA (1)...(19): siRNA sense strand
auaggagaauuccagagua

SEQ ID NO: 262798 - RNA, 19 nt, Homo sapiens
  misc_RNA (1)...(19): siRNA sense strand
caaagaaaggaccagagaa

SEQ ID NO: 262799 - RNA, 19 nt, Homo sapiens
  misc_RNA (1)...(19): siRNA sense strand
uggaaguccuccuuguauu

SEQ ID NO: 262800 - RNA, 19 nt, Homo sapiens
  misc_RNA (1)...(19): siRNA sense strand
ucgagagccuugucagguu

SEQ ID NO: 262801 - RNA, 19 nt, Homo sapiens
  misc_RNA (1)...(19): siRNA sense strand
ggaaugguggcuccuggaa

SEQ ID NO: 262802 - RNA, 19 nt, Homo sapiens
  misc_RNA (1)...(19): siRNA sense strand
gaaccucucaagaaagcaa

SEQ ID NO: 262803 - RNA, 19 nt, Homo sapiens
  misc_RNA (1)...(19): siRNA sense strand
acauggaauuuaacuccua

SEQ ID NO: 262804 - RNA, 19 nt, Homo sapiens
  misc_RNA (1)...(19): siRNA sense strand
cuacggaaacaucauuuga

SEQ ID NO: 262805 - RNA, 19 nt, Homo sapiens
  misc_RNA (1)...(19): siRNA sense strand
cccaagauaucucgcacuu

SEQ ID NO: 262806 - RNA, 19 nt, Homo sapiens
  misc_RNA (1)...(19): siRNA sense strand
aaauugguccaguuuauga

SEQ ID NO: 262807 - RNA, 19 nt, Homo sapiens
  misc_RNA (1)...(19): siRNA sense strand
acagagagagcuagacaga

SEQ ID NO: 262808 - RNA, 19 nt, Homo sapiens
  misc_RNA (1)...(19): siRNA sense strand
ccagucagcccacacacuu

SEQ ID NO: 262809 - RNA, 19 nt, Homo sapiens
  misc_RNA (1)...(19): siRNA sense strand
ccacagagagagcuagaca

SEQ ID NO: 262810 - RNA, 19 nt, Homo sapiens
  misc_RNA (1)...(19): siRNA sense strand
aauguggguuucaguguug

SEQ ID NO: 262811 - RNA, 19 nt, Homo sapiens
  misc_RNA (1)...(19): siRNA sense strand
uaauugcgcugcagaacac

SEQ ID NO: 262812 - RNA, 19 nt, Homo sapiens
  misc_RNA (1)...(19): siRNA sense strand
uaugaaauugguccaguuu

SEQ ID NO: 262813 - RNA, 19 nt, Homo sapiens
  misc_RNA (1)...(19): siRNA sense strand
cagcaccgauaggagaauu

SEQ ID NO: 262814 - RNA, 19 nt, Homo sapiens
  misc_RNA (1)...(19): siRNA sense strand
guacucagccgaggucauc

SEQ ID NO: 262815 - RNA, 19 nt, Homo sapiens
  misc_RNA (1)...(19): siRNA sense strand
gaagccagcaccgauagga

SEQ ID NO: 262816 - RNA, 19 nt, Homo sapiens
  misc_RNA (1)...(19): siRNA sense strand
ucgcugcgcacccaagaua

SEQ ID NO: 262817 - RNA, 19 nt, Homo sapiens
  misc_RNA (1)...(19): siRNA sense strand
cagguugccuccagugaag

SEQ ID NO: 262818 - RNA, 19 nt, Homo sapiens
  misc_RNA (1)...(19): siRNA sense strand
aauccugccuucgguguuu

SEQ ID NO: 262819 - RNA, 19 nt, Homo sapiens
  misc_RNA (1)...(19): siRNA sense strand
gaacaaccuccuuuuggaa

SEQ ID NO: 262820 - RNA, 19 nt, Homo sapiens
  misc_RNA (1)...(19): siRNA sense strand
guaauugcgcugcagaaca

SEQ ID NO: 262821 - RNA, 19 nt, Homo sapiens
  misc_RNA (1)...(19): siRNA sense strand
uaggagaauuccagaguac

SEQ ID NO: 262822 - RNA, 19 nt, Homo sapiens
  misc_RNA (1)...(19): siRNA sense strand
gcgaguugcuacggaaaca

SEQ ID NO: 262823 - RNA, 19 nt, Homo sapiens
  misc_RNA (1)...(19): siRNA sense strand
agaagaaagagcugaacaa

SEQ ID NO: 262824 - RNA, 19 nt, Homo sapiens
  misc_RNA (1)...(19): siRNA sense strand
uuuaugagaugguaauugc

SEQ ID NO: 262825 - RNA, 19 nt, Homo sapiens
  misc_RNA (1)...(19): siRNA sense strand
cuagcuaagccaccaauug

SEQ ID NO: 262826 - RNA, 19 nt, Homo sapiens
  misc_RNA (1)...(19): siRNA sense strand
cagccugacauggaauuua

SEQ ID NO: 262827 - RNA, 19 nt, Homo sapiens
  misc_RNA (1)...(19): siRNA sense strand
guggacagccugacaugga

SEQ ID NO: 262828 - RNA, 19 nt, Homo sapiens
  misc_RNA (1)...(19): siRNA sense strand
uggacagccugacauggaa

SEQ ID NO: 262829 - RNA, 19 nt, Homo sapiens
  misc_RNA (1)...(19): siRNA sense strand
uuaugaaauugguccaguu

SEQ ID NO: 262830 - RNA, 19 nt, Homo sapiens
  misc_RNA (1)...(19): siRNA sense strand
uagcuaagccaccaauugg

SEQ ID NO: 262831 - RNA, 19 nt, Homo sapiens
  misc_RNA (1)...(19): siRNA sense strand
gagaauuccagaguacaga

SEQ ID NO: 262832 - RNA, 19 nt, Homo sapiens
  misc_RNA (1)...(19): siRNA sense strand
guguauagacagcgaguug

SEQ ID NO: 262833 - RNA, 19 nt, Homo sapiens
  misc_RNA (1)...(19): siRNA sense strand
ugugguuacugccucauug

SEQ ID NO: 262834 - RNA, 19 nt, Homo sapiens
  misc_RNA (1)...(19): siRNA sense strand
ucacagauuaugaaauugg

SEQ ID NO: 262835 - RNA, 19 nt, Homo sapiens
  misc_RNA (1)...(19): siRNA sense strand
uaacuccuaaggccaaaga

SEQ ID NO: 262836 - RNA, 19 nt, Homo sapiens
  misc_RNA (1)...(19): siRNA sense strand
aagaaagagcugaacaaga

SEQ ID NO: 262837 - RNA, 19 nt, Homo sapiens
  misc_RNA (1)...(19): siRNA sense strand
ccuggaaguccuccuugua

SEQ ID NO: 262838 - RNA, 19 nt, Homo sapiens
  misc_RNA (1)...(19): siRNA sense strand
cagauucgggagcucuaua

SEQ ID NO: 262839 - RNA, 19 nt, Homo sapiens
  misc_RNA (1)...(19): siRNA sense strand
aaagaaaggaccagagaac

SEQ ID NO: 262840 - RNA, 19 nt, Homo sapiens
  misc_RNA (1)...(19): siRNA sense strand
aagagugucuccagauggu

SEQ ID NO: 262841 - RNA, 19 nt, Homo sapiens
  misc_RNA (1)...(19): siRNA sense strand
ugaacaaccuccuuuugga

SEQ ID NO: 262842 - RNA, 19 nt, Homo sapiens
  misc_RNA (1)...(19): siRNA sense strand
gcuggccaccacuaaguuu

SEQ ID NO: 262843 - RNA, 19 nt, Homo sapiens
  misc_RNA (1)...(19): siRNA sense strand
gcggcuggaugaguuugaa

SEQ ID NO: 262844 - RNA, 19 nt, Homo sapiens
  misc_RNA (1)...(19): siRNA sense strand
gaaagagcugaacaagaag

SEQ ID NO: 262845 - RNA, 19 nt, Homo sapiens
  misc_RNA (1)...(19): siRNA sense strand
gaaugguggcuccuggaau

SEQ ID NO: 262846 - RNA, 19 nt, Homo sapiens
  misc_RNA (1)...(19): siRNA sense strand
gugcugauacuccaguguu

SEQ ID NO: 262847 - RNA, 19 nt, Homo sapiens
  misc_RNA (1)...(19): siRNA sense strand
acucugaggccuuccacua

SEQ ID NO: 262848 - RNA, 19 nt, Homo sapiens
  misc_RNA (1)...(19): siRNA sense strand
gaagcguuccguccagaag

SEQ ID NO: 262849 - RNA, 19 nt, Homo sapiens
  misc_RNA (1)...(19): siRNA sense strand
gcuacggaaacaucauuug

SEQ ID NO: 262850 - RNA, 19 nt, Homo sapiens
  misc_RNA (1)...(19): siRNA sense strand
cauugcaaccgucggcuuu

SEQ ID NO: 262851 - RNA, 19 nt, Homo sapiens
  misc_RNA (1)...(19): siRNA sense strand
uucgggagcucuauaagca

SEQ ID NO: 262852 - RNA, 19 nt, Homo sapiens
  misc_RNA (1)...(19): siRNA sense strand
cuccaguguuucuagcuaa

SEQ ID NO: 262853 - RNA, 19 nt, Homo sapiens
  misc_RNA (1)...(19): siRNA sense strand
gauacuccaguguuucuag

SEQ ID NO: 262854 - RNA, 19 nt, Homo sapiens
  misc_RNA (1)...(19): siRNA sense strand
ggagaauuccagaguacag

SEQ ID NO: 262855 - RNA, 19 nt, Homo sapiens
  misc_RNA (1)...(19): siRNA sense strand
ucugaggccuuccacuaca

SEQ ID NO: 262856 - RNA, 19 nt, Homo sapiens
  misc_RNA (1)...(19): siRNA sense strand
gcuggaugaguuugaaaug

SEQ ID NO: 262857 - RNA, 19 nt, Homo sapiens
  misc_RNA (1)...(19): siRNA sense strand
gugaagagugucuccagau

SEQ ID NO: 262858 - RNA, 19 nt, Homo sapiens
  misc_RNA (1)...(19): siRNA sense strand
ccaaaacgcggaggucuuu

SEQ ID NO: 262859 - RNA, 19 nt, Homo sapiens
  misc_RNA (1)...(19): siRNA sense strand
cuggaaguccuccuuguau

SEQ ID NO: 262860 - RNA, 19 nt, Homo sapiens
  misc_RNA (1)...(19): siRNA sense strand
acaagcuggccaccacuaa

SEQ ID NO: 262861 - RNA, 19 nt, Homo sapiens
  misc_RNA (1)...(19): siRNA sense strand
uaagccaccaauuggguuu

SEQ ID NO: 262862 - RNA, 19 nt, Homo sapiens
  misc_RNA (1)...(19): siRNA sense strand
acuccaguguuucuagcua

SEQ ID NO: 262863 - RNA, 19 nt, Homo sapiens
  misc_RNA (1)...(19): siRNA sense strand
gauauggaggcaagucucu

SEQ ID NO: 262864 - RNA, 19 nt, Homo sapiens
  misc_RNA (1)...(19): siRNA sense strand
cagaagaaagagcugaaca

SEQ ID NO: 262865 - RNA, 19 nt, Homo sapiens
  misc_RNA (1)...(19): siRNA sense strand
cuggaugaguuugaaaugu

SEQ ID NO: 262866 - RNA, 19 nt, Homo sapiens
  misc_RNA (1)...(19): siRNA sense strand
ggaagaagcuugcugaguu

SEQ ID NO: 262867 - RNA, 19 nt, Homo sapiens
  misc_RNA (1)...(19): siRNA sense strand
agaaagagcugaacaagaa

SEQ ID NO: 262868 - RNA, 19 nt, Homo sapiens
  misc_RNA (1)...(19): siRNA sense strand
ggaagcagcugauuauuag

SEQ ID NO: 262869 - RNA, 19 nt, Homo sapiens
  misc_RNA (1)...(19): siRNA sense strand
gaagauuacuacaccgaua

SEQ ID NO: 262870 - RNA, 19 nt, Homo sapiens
  misc_RNA (1)...(19): siRNA sense strand
ggaaugaccugccaguaca

SEQ ID NO: 262871 - RNA, 19 nt, Homo sapiens
  misc_RNA (1)...(19): siRNA sense strand
gaagugagcgcaagcuuga

SEQ ID NO: 262872 - RNA, 19 nt, Homo sapiens
  misc_RNA (1)...(19): siRNA sense strand
gaagauucaugcaggaaga

SEQ ID NO: 262873 - RNA, 19 nt, Homo sapiens
  misc_RNA (1)...(19): siRNA sense strand
gaagaagcuugcugaguuc

SEQ ID NO: 262874 - RNA, 19 nt, Homo sapiens
  misc_RNA (1)...(19): siRNA sense strand
ugaaauugguccaguuuau

SEQ ID NO: 262875 - RNA, 19 nt, Homo sapiens
  misc_RNA (1)...(19): siRNA sense strand
cccgggacaugcuauauua

SEQ ID NO: 262876 - RNA, 19 nt, Homo sapiens
  misc_RNA (1)...(19): siRNA sense strand
gcuaggaagcagcugauua

SEQ ID NO: 262877 - RNA, 19 nt, Homo sapiens
  misc_RNA (1)...(19): siRNA sense strand
ggaugaguuugaaauguug

SEQ ID NO: 262878 - RNA, 19 nt, Homo sapiens
  misc_RNA (1)...(19): siRNA sense strand
gaagcuugcugaguucgaa

SEQ ID NO: 262879 - RNA, 19 nt, Homo sapiens
  misc_RNA (1)...(19): siRNA sense strand
ccaguacauuguccaguuu

SEQ ID NO: 262880 - RNA, 19 nt, Homo sapiens
  misc_RNA (1)...(19): siRNA sense strand
ggaauugggcagcugauug

SEQ ID NO: 262881 - RNA, 19 nt, Homo sapiens
  misc_RNA (1)...(19): siRNA sense strand
gccaguacauuguccaguu

SEQ ID NO: 262882 - RNA, 19 nt, Homo sapiens
  misc_RNA (1)...(19): siRNA sense strand
ugaguucgaagaugaguua

SEQ ID NO: 262883 - RNA, 19 nt, Homo sapiens
  misc_RNA (1)...(19): siRNA sense strand
gaaauugguccaguuuaug

SEQ ID NO: 262884 - RNA, 19 nt, Homo sapiens
  misc_RNA (1)...(19): siRNA sense strand
gaagaaagagcugaacaag

SEQ ID NO: 262885 - RNA, 19 nt, Homo sapiens
  misc_RNA (1)...(19): siRNA sense strand
aggaagcagcugauuauua

SEQ ID NO: 262886 - RNA, 19 nt, Homo sapiens
  misc_RNA (1)...(19): siRNA sense strand
uggaugaguuugaaauguu

SEQ ID NO: 262887 - RNA, 19 nt, Homo sapiens
  misc_RNA (1)...(19): siRNA sense strand
ggaaguccuccuuguauuc

SEQ ID NO: 262888 - RNA, 19 nt, Homo sapiens
  misc_RNA (1)...(19): siRNA sense strand
gcccagcacuucauacgau

SEQ ID NO: 262889 - RNA, 19 nt, Homo sapiens
  misc_RNA (1)...(19): siRNA sense strand
ugaagagugucuccagaug

SEQ ID NO: 262890 - RNA, 19 nt, Homo sapiens
  misc_RNA (1)...(19): siRNA sense strand
ccaaagaaaggaccagaga

SEQ ID NO: 262891 - RNA, 19 nt, Homo sapiens
  misc_RNA (1)...(19): siRNA sense strand
cuggagagcucacagacuu

SEQ ID NO: 262892 - RNA, 19 nt, Homo sapiens
  misc_RNA (1)...(19): siRNA sense strand
ggagagcucacagacuuaa

SEQ ID NO: 262893 - RNA, 19 nt, Homo sapiens
  misc_RNA (1)...(19): siRNA sense strand
guucaaaacugacauuuag

SEQ ID NO: 262894 - RNA, 19 nt, Homo sapiens
  misc_RNA (1)...(19): siRNA sense strand
cauggaauuuaacuccuaa

SEQ ID NO: 262895 - RNA, 19 nt, Homo sapiens
  misc_RNA (1)...(19): siRNA sense strand
aaagaagccagcaccgaua

SEQ ID NO: 262896 - RNA, 19 nt, Homo sapiens
  misc_RNA (1)...(19): siRNA sense strand
gauaggagaauuccagagu

SEQ ID NO: 262897 - RNA, 19 nt, Homo sapiens
  misc_RNA (1)...(19): siRNA sense strand
agccugacauggaauuuaa

SEQ ID NO: 262898 - RNA, 19 nt, Homo sapiens
  misc_RNA (1)...(19): siRNA sense strand
cuaggaagcagcugauuau

SEQ ID NO: 262899 - RNA, 19 nt, Homo sapiens
  misc_RNA (1)...(19): siRNA sense strand
gggacaugcuauauuagug

SEQ ID NO: 262900 - RNA, 19 nt, Homo sapiens
  misc_RNA (1)...(19): siRNA sense strand
agagagagcuagacagacu

SEQ ID NO: 262901 - RNA, 19 nt, Homo sapiens
  misc_RNA (1)...(19): siRNA sense strand
gaucuauauuucuggugaa

SEQ ID NO: 262902 - RNA, 19 nt, Homo sapiens
  misc_RNA (1)...(19): siRNA sense strand
ggucaucggcgacgaagug

SEQ ID NO: 262903 - RNA, 19 nt, Homo sapiens
  misc_RNA (1)...(19): siRNA sense strand
aaugguggcuccuggaaug

SEQ ID NO: 262904 - RNA, 19 nt, Homo sapiens
  misc_RNA (1)...(19): siRNA sense strand
uugcugaguucgaagauga

SEQ ID NO: 262905 - RNA, 19 nt, Homo sapiens
  misc_RNA (1)...(19): siRNA sense strand
aaauguggguuucaguguu

SEQ ID NO: 262906 - RNA, 19 nt, Homo sapiens
  misc_RNA (1)...(19): siRNA sense strand
auaggagaauuccagagua

SEQ ID NO: 262907 - RNA, 19 nt, Homo sapiens
  misc_RNA (1)...(19): siRNA sense strand
caaagaaaggaccagagaa

SEQ ID NO: 262908 - RNA, 19 nt, Homo sapiens
  misc_RNA (1)...(19): siRNA sense strand
uggaaguccuccuuguauu

SEQ ID NO: 262909 - RNA, 19 nt, Homo sapiens
  misc_RNA (1)...(19): siRNA sense strand
cccaagauaucucgcacuu

SEQ ID NO: 262910 - RNA, 19 nt, Homo sapiens
  misc_RNA (1)...(19): siRNA sense strand
gcagcugauuauuagaaau

SEQ ID NO: 262911 - RNA, 19 nt, Homo sapiens
  misc_RNA (1)...(19): siRNA sense strand
uugggcagcugauugcuuu

SEQ ID NO: 262912 - RNA, 19 nt, Homo sapiens
  misc_RNA (1)...(19): siRNA sense strand
ggaaugguggcuccuggaa

SEQ ID NO: 262913 - RNA, 19 nt, Homo sapiens
  misc_RNA (1)...(19): siRNA sense strand
gaaccucucaagaaagcaa

SEQ ID NO: 262914 - RNA, 19 nt, Homo sapiens
  misc_RNA (1)...(19): siRNA sense strand
acauggaauuuaacuccua

SEQ ID NO: 262915 - RNA, 19 nt, Homo sapiens
  misc_RNA (1)...(19): siRNA sense strand
cuacggaaacaucauuuga

SEQ ID NO: 262916 - RNA, 19 nt, Homo sapiens
  misc_RNA (1)...(19): siRNA sense strand
ucgagagccuugucagguu

SEQ ID NO: 262917 - RNA, 19 nt, Homo sapiens
  misc_RNA (1)...(19): siRNA sense strand
aaauugguccaguuuauga

SEQ ID NO: 262918 - RNA, 19 nt, Homo sapiens
  misc_RNA (1)...(19): siRNA sense strand
acagagagagcuagacaga

SEQ ID NO: 262919 - RNA, 19 nt, Homo sapiens
  misc_RNA (1)...(19): siRNA sense strand
ccagucagcccacacacuu

SEQ ID NO: 262920 - RNA, 19 nt, Homo sapiens
  misc_RNA (1)...(19): siRNA sense strand
ccacagagagagcuagaca

SEQ ID NO: 262921 - RNA, 19 nt, Homo sapiens
  misc_RNA (1)...(19): siRNA sense strand
aauguggguuucaguguug

SEQ ID NO: 262922 - RNA, 19 nt, Homo sapiens
  misc_RNA (1)...(19): siRNA sense strand
uaauugcgcugcagaacac

SEQ ID NO: 262923 - RNA, 19 nt, Homo sapiens
  misc_RNA (1)...(19): siRNA sense strand
uaugaaauugguccaguuu

SEQ ID NO: 262924 - RNA, 19 nt, Homo sapiens
  misc_RNA (1)...(19): siRNA sense strand
cagcaccgauaggagaauu

SEQ ID NO: 262925 - RNA, 19 nt, Homo sapiens
  misc_RNA (1)...(19): siRNA sense strand
gaagccagcaccgauagga

SEQ ID NO: 262926 - RNA, 19 nt, Homo sapiens
  misc_RNA (1)...(19): siRNA sense strand
cagcugauuauuagaaaug

SEQ ID NO: 262927 - RNA, 19 nt, Homo sapiens
  misc_RNA (1)...(19): siRNA sense strand
gcagcugauugcuuuggau

SEQ ID NO: 262928 - RNA, 19 nt, Homo sapiens
  misc_RNA (1)...(19): siRNA sense strand
ucgcugcgcacccaagaua

SEQ ID NO: 262929 - RNA, 19 nt, Homo sapiens
  misc_RNA (1)...(19): siRNA sense strand
guacucagccgaggucauc

SEQ ID NO: 262930 - RNA, 19 nt, Homo sapiens
  misc_RNA (1)...(19): siRNA sense strand
cagguugccuccagugaag

SEQ ID NO: 262931 - RNA, 19 nt, Homo sapiens
  misc_RNA (1)...(19): siRNA sense strand
gcugauugcuuuggaucug

SEQ ID NO: 262932 - RNA, 19 nt, Homo sapiens
  misc_RNA (1)...(19): siRNA sense strand
gaauugggcagcugauugc

SEQ ID NO: 262933 - RNA, 19 nt, Homo sapiens
  misc_RNA (1)...(19): siRNA sense strand
aauccugccuucgguguuu

SEQ ID NO: 262934 - RNA, 19 nt, Homo sapiens
  misc_RNA (1)...(19): siRNA sense strand
gaacaaccuccuuuuggaa

SEQ ID NO: 262935 - RNA, 19 nt, Homo sapiens
  misc_RNA (1)...(19): siRNA sense strand
guaauugcgcugcagaaca

SEQ ID NO: 262936 - RNA, 19 nt, Homo sapiens
  misc_RNA (1)...(19): siRNA sense strand
uaggagaauuccagaguac

SEQ ID NO: 262937 - RNA, 19 nt, Homo sapiens
  misc_RNA (1)...(19): siRNA sense strand
gcgaguugcuacggaaaca

SEQ ID NO: 262938 - RNA, 19 nt, Homo sapiens
  misc_RNA (1)...(19): siRNA sense strand
agaagaaagagcugaacaa

SEQ ID NO: 262939 - RNA, 19 nt, Homo sapiens
  misc_RNA (1)...(19): siRNA sense strand
uuuaugagaugguaauugc

SEQ ID NO: 262940 - RNA, 19 nt, Homo sapiens
  misc_RNA (1)...(19): siRNA sense strand
cuagcuaagccaccaauug

SEQ ID NO: 262941 - RNA, 19 nt, Homo sapiens
  misc_RNA (1)...(19): siRNA sense strand
cagccugacauggaauuua

SEQ ID NO: 262942 - RNA, 19 nt, Homo sapiens
  misc_RNA (1)...(19): siRNA sense strand
guggacagccugacaugga

SEQ ID NO: 262943 - RNA, 19 nt, Homo sapiens
  misc_RNA (1)...(19): siRNA sense strand
uggacagccugacauggaa

SEQ ID NO: 262944 - RNA, 19 nt, Homo sapiens
  misc_RNA (1)...(19): siRNA sense strand
uaacagcccagcacuucau

SEQ ID NO: 262945 - RNA, 19 nt, Homo sapiens
  misc_RNA (1)...(19): siRNA sense strand
uuaugaaauugguccaguu

SEQ ID NO: 262946 - RNA, 19 nt, Homo sapiens
  misc_RNA (1)...(19): siRNA sense strand
uagcuaagccaccaauugg

SEQ ID NO: 262947 - RNA, 19 nt, Homo sapiens
  misc_RNA (1)...(19): siRNA sense strand
gagaauuccagaguacaga

SEQ ID NO: 262948 - RNA, 19 nt, Homo sapiens
  misc_RNA (1)...(19): siRNA sense strand
guguauagacagcgaguug

SEQ ID NO: 262949 - RNA, 19 nt, Homo sapiens
  misc_RNA (1)...(19): siRNA sense strand
aagcagcugauuauuagaa

SEQ ID NO: 262950 - RNA, 19 nt, Homo sapiens
  misc_RNA (1)...(19): siRNA sense strand
ugugguuacugccucauug

SEQ ID NO: 262951 - RNA, 19 nt, Homo sapiens
  misc_RNA (1)...(19): siRNA sense strand
ucacagauuaugaaauugg

SEQ ID NO: 262952 - RNA, 19 nt, Homo sapiens
  misc_RNA (1)...(19): siRNA sense strand
uaacuccuaaggccaaaga

SEQ ID NO: 262953 - RNA, 19 nt, Homo sapiens
  misc_RNA (1)...(19): siRNA sense strand
aagaaagagcugaacaaga

SEQ ID NO: 262954 - RNA, 19 nt, Homo sapiens
  misc_RNA (1)...(19): siRNA sense strand
aaagaaaggaccagagaac

SEQ ID NO: 262955 - RNA, 19 nt, Homo sapiens
  misc_RNA (1)...(19): siRNA sense strand
cagauucgggagcucuaua

SEQ ID NO: 262956 - RNA, 19 nt, Homo sapiens
  misc_RNA (1)...(19): siRNA sense strand
ccuggaaguccuccuugua

SEQ ID NO: 262957 - RNA, 19 nt, Homo sapiens
  misc_RNA (1)...(19): siRNA sense strand
aagagugucuccagauggu

SEQ ID NO: 262958 - RNA, 19 nt, Homo sapiens
  misc_RNA (1)...(19): siRNA sense strand
ugaacaaccuccuuuugga

SEQ ID NO: 262959 - RNA, 19 nt, Homo sapiens
  misc_RNA (1)...(19): siRNA sense strand
gcuggccaccacuaaguuu

SEQ ID NO: 262960 - RNA, 19 nt, Homo sapiens
  misc_RNA (1)...(19): siRNA sense strand
gcggcuggaugaguuugaa

SEQ ID NO: 262961 - RNA, 19 nt, Homo sapiens
  misc_RNA (1)...(19): siRNA sense strand
gaaagagcugaacaagaag

SEQ ID NO: 262962 - RNA, 19 nt, Homo sapiens
  misc_RNA (1)...(19): siRNA sense strand
acucugaggccuuccacua

SEQ ID NO: 262963 - RNA, 19 nt, Homo sapiens
  misc_RNA (1)...(19): siRNA sense strand
gaaugguggcuccuggaau

SEQ ID NO: 262964 - RNA, 19 nt, Homo sapiens
  misc_RNA (1)...(19): siRNA sense strand
gugcugauacuccaguguu

SEQ ID NO: 262965 - RNA, 19 nt, Homo sapiens
  misc_RNA (1)...(19): siRNA sense strand
gaagcguuccguccagaag

SEQ ID NO: 262966 - RNA, 19 nt, Homo sapiens
  misc_RNA (1)...(19): siRNA sense strand
ggaagaagcuugcugaguu

SEQ ID NO: 262967 - RNA, 19 nt, Homo sapiens
  misc_RNA (1)...(19): siRNA sense strand
agaaagagcugaacaagaa

SEQ ID NO: 262968 - RNA, 19 nt, Homo sapiens
  misc_RNA (1)...(19): siRNA sense strand
ggaagcagcugauuauuag

SEQ ID NO: 262969 - RNA, 19 nt, Homo sapiens
  misc_RNA (1)...(19): siRNA sense strand
gaagauuacuacaccgaua

SEQ ID NO: 262970 - RNA, 19 nt, Homo sapiens
  misc_RNA (1)...(19): siRNA sense strand
gcaagucacccaucagaua

SEQ ID NO: 262971 - RNA, 19 nt, Homo sapiens
  misc_RNA (1)...(19): siRNA sense strand
gcaauaggguggcacagaa

SEQ ID NO: 262972 - RNA, 19 nt, Homo sapiens
  misc_RNA (1)...(19): siRNA sense strand
cuacagagaucccacacua

SEQ ID NO: 262973 - RNA, 19 nt, Homo sapiens
  misc_RNA (1)...(19): siRNA sense strand
gcacaaagacacagacuug

SEQ ID NO: 262974 - RNA, 19 nt, Homo sapiens
  misc_RNA (1)...(19): siRNA sense strand
gaagaaggcuuuuaagaug

SEQ ID NO: 262975 - RNA, 19 nt, Homo sapiens
  misc_RNA (1)...(19): siRNA sense strand
gagcuugugugcccugaua

SEQ ID NO: 262976 - RNA, 19 nt, Homo sapiens
  misc_RNA (1)...(19): siRNA sense strand
ggagcuaccuuccugugua

SEQ ID NO: 262977 - RNA, 19 nt, Homo sapiens
  misc_RNA (1)...(19): siRNA sense strand
ggaaugaccugccaguaca

SEQ ID NO: 262978 - RNA, 19 nt, Homo sapiens
  misc_RNA (1)...(19): siRNA sense strand
gaagugagcgcaagcuuga

SEQ ID NO: 262979 - RNA, 19 nt, Homo sapiens
  misc_RNA (1)...(19): siRNA sense strand
gaagauucaugcaggaaga

SEQ ID NO: 262980 - RNA, 19 nt, Homo sapiens
  misc_RNA (1)...(19): siRNA sense strand
gaagaagcuugcugaguuc

SEQ ID NO: 262981 - RNA, 19 nt, Homo sapiens
  misc_RNA (1)...(19): siRNA sense strand
ccacacuacuuccggcuua

SEQ ID NO: 262982 - RNA, 19 nt, Homo sapiens
  misc_RNA (1)...(19): siRNA sense strand
gaacuacauugggauaaau

SEQ ID NO: 262983 - RNA, 19 nt, Homo sapiens
  misc_RNA (1)...(19): siRNA sense strand
ugaaauugguccaguuuau

SEQ ID NO: 262984 - RNA, 19 nt, Homo sapiens
  misc_RNA (1)...(19): siRNA sense strand
ggccaaggcuccuaugaug

SEQ ID NO: 262985 - RNA, 19 nt, Homo sapiens
  misc_RNA (1)...(19): siRNA sense strand
gagaugguguuuacucaga

SEQ ID NO: 262986 - RNA, 19 nt, Homo sapiens
  misc_RNA (1)...(19): siRNA sense strand
ggaaaggccugaggaugug

SEQ ID NO: 262987 - RNA, 19 nt, Homo sapiens
  misc_RNA (1)...(19): siRNA sense strand
ggagaccuauguuccagaa

SEQ ID NO: 262988 - RNA, 19 nt, Homo sapiens
  misc_RNA (1)...(19): siRNA sense strand
aaacauugcccagggauua

SEQ ID NO: 262989 - RNA, 19 nt, Homo sapiens
  misc_RNA (1)...(19): siRNA sense strand
cccgggacaugcuauauua

SEQ ID NO: 262990 - RNA, 19 nt, Homo sapiens
  misc_RNA (1)...(19): siRNA sense strand
gagagaugguguuuacuca

SEQ ID NO: 262991 - RNA, 19 nt, Homo sapiens
  misc_RNA (1)...(19): siRNA sense strand
ggugaaaggcucaguagaa

SEQ ID NO: 262992 - RNA, 19 nt, Homo sapiens
  misc_RNA (1)...(19): siRNA sense strand
gcuaggaagcagcugauua

SEQ ID NO: 262993 - RNA, 19 nt, Homo sapiens
  misc_RNA (1)...(19): siRNA sense strand
ggaugaguuugaaauguug

SEQ ID NO: 262994 - RNA, 19 nt, Homo sapiens
  misc_RNA (1)...(19): siRNA sense strand
gaagacaaccaucacacuu

SEQ ID NO: 262995 - RNA, 19 nt, Homo sapiens
  misc_RNA (1)...(19): siRNA sense strand
gaagcuugcugaguucgaa

SEQ ID NO: 262996 - RNA, 19 nt, Homo sapiens
  misc_RNA (1)...(19): siRNA sense strand
cacagaagcucaucucagu

SEQ ID NO: 262997 - RNA, 19 nt, Homo sapiens
  misc_RNA (1)...(19): siRNA sense strand
gagagcagcuggauuuuau

SEQ ID NO: 262998 - RNA, 19 nt, Homo sapiens
  misc_RNA (1)...(19): siRNA sense strand
ggagaacuacauugggaua

SEQ ID NO: 262999 - RNA, 19 nt, Homo sapiens
  misc_RNA (1)...(19): siRNA sense strand
ccaguacauuguccaguuu

SEQ ID NO: 263000 - RNA, 19 nt, Homo sapiens
  misc_RNA (1)...(19): siRNA sense strand
gagcuaccuuccuguguau

SEQ ID NO: 263001 - RNA, 19 nt, Homo sapiens
  misc_RNA (1)...(19): siRNA sense strand
ggaauugggcagcugauug

SEQ ID NO: 263002 - RNA, 19 nt, Homo sapiens
  misc_RNA (1)...(19): siRNA sense strand
agagagagaugguguuuac

SEQ ID NO: 263003 - RNA, 19 nt, Homo sapiens
  misc_RNA (1)...(19): siRNA sense strand
gccaguacauuguccaguu

SEQ ID NO: 263004 - RNA, 19 nt, Homo sapiens
  misc_RNA (1)...(19): siRNA sense strand
gaccaacacuacagagauc

SEQ ID NO: 263005 - RNA, 19 nt, Homo sapiens
  misc_RNA (1)...(19): siRNA sense strand
caaaacagccugagcaaaa

SEQ ID NO: 263006 - RNA, 19 nt, Homo sapiens
  misc_RNA (1)...(19): siRNA sense strand
agacaaccaucacacuuau

SEQ ID NO: 263007 - RNA, 19 nt, Homo sapiens
  misc_RNA (1)...(19): siRNA sense strand
ugaguucgaagaugaguua

SEQ ID NO: 263008 - RNA, 19 nt, Homo sapiens
  misc_RNA (1)...(19): siRNA sense strand
ccuaggcccucaugauuug

SEQ ID NO: 263009 - RNA, 19 nt, Homo sapiens
  misc_RNA (1)...(19): siRNA sense strand
gaaauugguccaguuuaug

SEQ ID NO: 263010 - RNA, 19 nt, Homo sapiens
  misc_RNA (1)...(19): siRNA sense strand
gaacccuucgccugaauaa

SEQ ID NO: 263011 - RNA, 19 nt, Homo sapiens
  misc_RNA (1)...(19): siRNA sense strand
ggacugcaaguggccauua

SEQ ID NO: 263012 - RNA, 19 nt, Homo sapiens
  misc_RNA (1)...(19): siRNA sense strand
gaagaaagagcugaacaag

SEQ ID NO: 263013 - RNA, 19 nt, Homo sapiens
  misc_RNA (1)...(19): siRNA sense strand
gcccugagauccugcacaa

SEQ ID NO: 263014 - RNA, 19 nt, Homo sapiens
  misc_RNA (1)...(19): siRNA sense strand
aggaagcagcugauuauua

SEQ ID NO: 263015 - RNA, 19 nt, Homo sapiens
  misc_RNA (1)...(19): siRNA sense strand
uggaugaguuugaaauguu

SEQ ID NO: 263016 - RNA, 19 nt, Homo sapiens
  misc_RNA (1)...(19): siRNA sense strand
ggaaguccuccuuguauuc

SEQ ID NO: 263017 - RNA, 19 nt, Homo sapiens
  misc_RNA (1)...(19): siRNA sense strand
cgucucagcccuucaguuu

SEQ ID NO: 263018 - RNA, 19 nt, Homo sapiens
  misc_RNA (1)...(19): siRNA sense strand
gcccagcacuucauacgau

SEQ ID NO: 263019 - RNA, 19 nt, Homo sapiens
  misc_RNA (1)...(19): siRNA sense strand
ugaagagugucuccagaug

SEQ ID NO: 263020 - RNA, 19 nt, Homo sapiens
  misc_RNA (1)...(19): siRNA sense strand
ccaaagaaaggaccagaga

SEQ ID NO: 263021 - RNA, 19 nt, Homo sapiens
  misc_RNA (1)...(19): siRNA sense strand
aggaagagcugacccaucu

SEQ ID NO: 263022 - RNA, 19 nt, Homo sapiens
  misc_RNA (1)...(19): siRNA sense strand
cuggagagcucacagacuu

SEQ ID NO: 263023 - RNA, 19 nt, Homo sapiens
  misc_RNA (1)...(19): siRNA sense strand
gccagaagcaggaguguga

SEQ ID NO: 263024 - RNA, 19 nt, Homo sapiens
  misc_RNA (1)...(19): siRNA sense strand
agaccuauguuccagaaga

SEQ ID NO: 263025 - RNA, 19 nt, Homo sapiens
  misc_RNA (1)...(19): siRNA sense strand
ggagagcucacagacuuaa

SEQ ID NO: 263026 - RNA, 19 nt, Homo sapiens
  misc_RNA (1)...(19): siRNA sense strand
guucaaaacugacauuuag

SEQ ID NO: 263027 - RNA, 19 nt, Homo sapiens
  misc_RNA (1)...(19): siRNA sense strand
gcucccagcugaccagaca

SEQ ID NO: 263028 - RNA, 19 nt, Homo sapiens
  misc_RNA (1)...(19): siRNA sense strand
ccacugaggacccguguga

SEQ ID NO: 263029 - RNA, 19 nt, Homo sapiens
  misc_RNA (1)...(19): siRNA sense strand
aagacaaccaucacacuua

SEQ ID NO: 263030 - RNA, 19 nt, Homo sapiens
  misc_RNA (1)...(19): siRNA sense strand
gaucagcgacugccacauc

SEQ ID NO: 263031 - RNA, 19 nt, Homo sapiens
  misc_RNA (1)...(19): siRNA sense strand
cauggaauuuaacuccuaa

SEQ ID NO: 263032 - RNA, 19 nt, Homo sapiens
  misc_RNA (1)...(19): siRNA sense strand
aaagaagccagcaccgaua

SEQ ID NO: 263033 - RNA, 19 nt, Homo sapiens
  misc_RNA (1)...(19): siRNA sense strand
gcuccuaugaugagagaua

SEQ ID NO: 263034 - RNA, 19 nt, Homo sapiens
  misc_RNA (1)...(19): siRNA sense strand
gauaggagaauuccagagu

SEQ ID NO: 263035 - RNA, 19 nt, Homo sapiens
  misc_RNA (1)...(19): siRNA sense strand
agccugacauggaauuuaa

SEQ ID NO: 263036 - RNA, 19 nt, Homo sapiens
  misc_RNA (1)...(19): siRNA sense strand
cgugaggccugcacagcua

SEQ ID NO: 263037 - RNA, 19 nt, Homo sapiens
  misc_RNA (1)...(19): siRNA sense strand
gaccagccuucccaacaug

SEQ ID NO: 263038 - RNA, 19 nt, Homo sapiens
  misc_RNA (1)...(19): siRNA sense strand
cuaaggagagcucugauug

SEQ ID NO: 263039 - RNA, 19 nt, Homo sapiens
  misc_RNA (1)...(19): siRNA sense strand
acauugaggcugucuuuaa

SEQ ID NO: 263040 - RNA, 19 nt, Homo sapiens
  misc_RNA (1)...(19): siRNA sense strand
agaacuacauugggauaaa

SEQ ID NO: 263041 - RNA, 19 nt, Homo sapiens
  misc_RNA (1)...(19): siRNA sense strand
cuaggaagcagcugauuau

SEQ ID NO: 263042 - RNA, 19 nt, Homo sapiens
  misc_RNA (1)...(19): siRNA sense strand
gggacaugcuauauuagug

SEQ ID NO: 263043 - RNA, 19 nt, Homo sapiens
  misc_RNA (1)...(19): siRNA sense strand
agagagagcuagacagacu

SEQ ID NO: 263044 - RNA, 19 nt, Homo sapiens
  misc_RNA (1)...(19): siRNA sense strand
gaucuauauuucuggugaa

SEQ ID NO: 263045 - RNA, 19 nt, Homo sapiens
  misc_RNA (1)...(19): siRNA sense strand
gcagccagguggagguuag

SEQ ID NO: 263046 - RNA, 19 nt, Homo sapiens
  misc_RNA (1)...(19): siRNA sense strand
aaugguggcuccuggaaug

SEQ ID NO: 263047 - RNA, 19 nt, Homo sapiens
  misc_RNA (1)...(19): siRNA sense strand
ugccgaagcuacuggacua

SEQ ID NO: 263048 - RNA, 19 nt, Homo sapiens
  misc_RNA (1)...(19): siRNA sense strand
gcaguaccaucuacaucuc

SEQ ID NO: 263049 - RNA, 19 nt, Homo sapiens
  misc_RNA (1)...(19): siRNA sense strand
ccauuaccaucucuaagga

SEQ ID NO: 263050 - RNA, 19 nt, Homo sapiens
  misc_RNA (1)...(19): siRNA sense strand
ggucaucggcgacgaagug

SEQ ID NO: 263051 - RNA, 19 nt, Homo sapiens
  misc_RNA (1)...(19): siRNA sense strand
uaaaugugaagaaggcuuu

SEQ ID NO: 263052 - RNA, 19 nt, Homo sapiens
  misc_RNA (1)...(19): siRNA sense strand
uugcugaguucgaagauga

SEQ ID NO: 263053 - RNA, 19 nt, Homo sapiens
  misc_RNA (1)...(19): siRNA sense strand
uuugggaccugcuuuguga

SEQ ID NO: 263054 - RNA, 19 nt, Homo sapiens
  misc_RNA (1)...(19): siRNA sense strand
caucggaauucagccauga

SEQ ID NO: 263055 - RNA, 19 nt, Homo sapiens
  misc_RNA (1)...(19): siRNA sense strand
ggccugcccucaucaucaa

SEQ ID NO: 263056 - RNA, 19 nt, Homo sapiens
  misc_RNA (1)...(19): siRNA sense strand
aaauguggguuucaguguu

SEQ ID NO: 263057 - RNA, 19 nt, Homo sapiens
  misc_RNA (1)...(19): siRNA sense strand
auaggagaauuccagagua

SEQ ID NO: 263058 - RNA, 19 nt, Homo sapiens
  misc_RNA (1)...(19): siRNA sense strand
caaagaaaggaccagagaa

SEQ ID NO: 263059 - RNA, 19 nt, Homo sapiens
  misc_RNA (1)...(19): siRNA sense strand
cauugaggcugucuuuaag

SEQ ID NO: 263060 - RNA, 19 nt, Homo sapiens
  misc_RNA (1)...(19): siRNA sense strand
uggaaguccuccuuguauu

SEQ ID NO: 263061 - RNA, 19 nt, Homo sapiens
  misc_RNA (1)...(19): siRNA sense strand
gaccaccuccuacacuauu

SEQ ID NO: 263062 - RNA, 19 nt, Homo sapiens
  misc_RNA (1)...(19): siRNA sense strand
cccaagauaucucgcacuu

SEQ ID NO: 263063 - RNA, 19 nt, Homo sapiens
  misc_RNA (1)...(19): siRNA sense strand
gauuuguccucagagcuaa

SEQ ID NO: 263064 - RNA, 19 nt, Homo sapiens
  misc_RNA (1)...(19): siRNA sense strand
gagagagagaugguguuua

SEQ ID NO: 263065 - RNA, 19 nt, Homo sapiens
  misc_RNA (1)...(19): siRNA sense strand
ucgagagccuugucagguu

SEQ ID NO: 263066 - RNA, 19 nt, Homo sapiens
  misc_RNA (1)...(19): siRNA sense strand
ggaagaagcuugcugaguu

SEQ ID NO: 263067 - RNA, 19 nt, Homo sapiens
  misc_RNA (1)...(19): siRNA sense strand
agaaagagcugaacaagaa

SEQ ID NO: 263068 - RNA, 19 nt, Homo sapiens
  misc_RNA (1)...(19): siRNA sense strand
ggaagcagcugauuauuag

SEQ ID NO: 263069 - RNA, 19 nt, Homo sapiens
  misc_RNA (1)...(19): siRNA sense strand
gaagauuacuacaccgaua

SEQ ID NO: 263070 - RNA, 19 nt, Homo sapiens
  misc_RNA (1)...(19): siRNA sense strand
ggaaugaccugccaguaca

SEQ ID NO: 263071 - RNA, 19 nt, Homo sapiens
  misc_RNA (1)...(19): siRNA sense strand
gaagugagcgcaagcuuga

SEQ ID NO: 263072 - RNA, 19 nt, Homo sapiens
  misc_RNA (1)...(19): siRNA sense strand
gaagauucaugcaggaaga

SEQ ID NO: 263073 - RNA, 19 nt, Homo sapiens
  misc_RNA (1)...(19): siRNA sense strand
gaagaagcuugcugaguuc

SEQ ID NO: 263074 - RNA, 19 nt, Homo sapiens
  misc_RNA (1)...(19): siRNA sense strand
ugaaauugguccaguuuau

SEQ ID NO: 263075 - RNA, 19 nt, Homo sapiens
  misc_RNA (1)...(19): siRNA sense strand
cccgggacaugcuauauua

SEQ ID NO: 263076 - RNA, 19 nt, Homo sapiens
  misc_RNA (1)...(19): siRNA sense strand
gcuaggaagcagcugauua

SEQ ID NO: 263077 - RNA, 19 nt, Homo sapiens
  misc_RNA (1)...(19): siRNA sense strand
ggaugaguuugaaauguug

SEQ ID NO: 263078 - RNA, 19 nt, Homo sapiens
  misc_RNA (1)...(19): siRNA sense strand
gaagcuugcugaguucgaa

SEQ ID NO: 263079 - RNA, 19 nt, Homo sapiens
  misc_RNA (1)...(19): siRNA sense strand
ccaguacauuguccaguuu

SEQ ID NO: 263080 - RNA, 19 nt, Homo sapiens
  misc_RNA (1)...(19): siRNA sense strand
ggaauugggcagcugauug

SEQ ID NO: 263081 - RNA, 19 nt, Homo sapiens
  misc_RNA (1)...(19): siRNA sense strand
gccaguacauuguccaguu

SEQ ID NO: 263082 - RNA, 19 nt, Homo sapiens
  misc_RNA (1)...(19): siRNA sense strand
ugaguucgaagaugaguua

SEQ ID NO: 263083 - RNA, 19 nt, Homo sapiens
  misc_RNA (1)...(19): siRNA sense strand
gaaauugguccaguuuaug

SEQ ID NO: 263084 - RNA, 19 nt, Homo sapiens
  misc_RNA (1)...(19): siRNA sense strand
gaagaaagagcugaacaag

SEQ ID NO: 263085 - RNA, 19 nt, Homo sapiens
  misc_RNA (1)...(19): siRNA sense strand
aggaagcagcugauuauua

SEQ ID NO: 263086 - RNA, 19 nt, Homo sapiens
  misc_RNA (1)...(19): siRNA sense strand
uggaugaguuugaaauguu

SEQ ID NO: 263087 - RNA, 19 nt, Homo sapiens
  misc_RNA (1)...(19): siRNA sense strand
ggaaguccuccuuguauuc

SEQ ID NO: 263088 - RNA, 19 nt, Homo sapiens
  misc_RNA (1)...(19): siRNA sense strand
gcccagcacuucauacgau

SEQ ID NO: 263089 - RNA, 19 nt, Homo sapiens
  misc_RNA (1)...(19): siRNA sense strand
ugaagagugucuccagaug

SEQ ID NO: 263090 - RNA, 19 nt, Homo sapiens
  misc_RNA (1)...(19): siRNA sense strand
ccaaagaaaggaccagaga

SEQ ID NO: 263091 - RNA, 19 nt, Homo sapiens
  misc_RNA (1)...(19): siRNA sense strand
cuggagagcucacagacuu

SEQ ID NO: 263092 - RNA, 19 nt, Homo sapiens
  misc_RNA (1)...(19): siRNA sense strand
ggagagcucacagacuuaa

SEQ ID NO: 263093 - RNA, 19 nt, Homo sapiens
  misc_RNA (1)...(19): siRNA sense strand
guucaaaacugacauuuag

SEQ ID NO: 263094 - RNA, 19 nt, Homo sapiens
  misc_RNA (1)...(19): siRNA sense strand
cauggaauuuaacuccuaa

SEQ ID NO: 263095 - RNA, 19 nt, Homo sapiens
  misc_RNA (1)...(19): siRNA sense strand
aaagaagccagcaccgaua

SEQ ID NO: 263096 - RNA, 19 nt, Homo sapiens
  misc_RNA (1)...(19): siRNA sense strand
gauaggagaauuccagagu

SEQ ID NO: 263097 - RNA, 19 nt, Homo sapiens
  misc_RNA (1)...(19): siRNA sense strand
agccugacauggaauuuaa

SEQ ID NO: 263098 - RNA, 19 nt, Homo sapiens
  misc_RNA (1)...(19): siRNA sense strand
cuaggaagcagcugauuau

SEQ ID NO: 263099 - RNA, 19 nt, Homo sapiens
  misc_RNA (1)...(19): siRNA sense strand
gggacaugcuauauuagug

SEQ ID NO: 263100 - RNA, 19 nt, Homo sapiens
  misc_RNA (1)...(19): siRNA sense strand
agagagagcuagacagacu

SEQ ID NO: 263101 - RNA, 19 nt, Homo sapiens
  misc_RNA (1)...(19): siRNA sense strand
gaucuauauuucuggugaa

SEQ ID NO: 263102 - RNA, 19 nt, Homo sapiens
  misc_RNA (1)...(19): siRNA sense strand
ggucaucggcgacgaagug

SEQ ID NO: 263103 - RNA, 19 nt, Homo sapiens
  misc_RNA (1)...(19): siRNA sense strand
aaugguggcuccuggaaug

SEQ ID NO: 263104 - RNA, 19 nt, Homo sapiens
  misc_RNA (1)...(19): siRNA sense strand
uugcugaguucgaagauga

SEQ ID NO: 263105 - RNA, 19 nt, Homo sapiens
  misc_RNA (1)...(19): siRNA sense strand
aaauguggguuucaguguu

SEQ ID NO: 263106 - RNA, 19 nt, Homo sapiens
  misc_RNA (1)...(19): siRNA sense strand
auaggagaauuccagagua

SEQ ID NO: 263107 - RNA, 19 nt, Homo sapiens
  misc_RNA (1)...(19): siRNA sense strand
caaagaaaggaccagagaa

SEQ ID NO: 263108 - RNA, 19 nt, Homo sapiens
  misc_RNA (1)...(19): siRNA sense strand
uggaaguccuccuuguauu

SEQ ID NO: 263109 - RNA, 19 nt, Homo sapiens
  misc_RNA (1)...(19): siRNA sense strand
cccaagauaucucgcacuu

SEQ ID NO: 263110 - RNA, 19 nt, Homo sapiens
  misc_RNA (1)...(19): siRNA sense strand
gcagcugauuauuagaaau

SEQ ID NO: 263111 - RNA, 19 nt, Homo sapiens
  misc_RNA (1)...(19): siRNA sense strand
uugggcagcugauugcuuu

SEQ ID NO: 263112 - RNA, 19 nt, Homo sapiens
  misc_RNA (1)...(19): siRNA sense strand
ggaaugguggcuccuggaa

SEQ ID NO: 263113 - RNA, 19 nt, Homo sapiens
  misc_RNA (1)...(19): siRNA sense strand
gaaccucucaagaaagcaa

SEQ ID NO: 263114 - RNA, 19 nt, Homo sapiens
  misc_RNA (1)...(19): siRNA sense strand
acauggaauuuaacuccua

SEQ ID NO: 263115 - RNA, 19 nt, Homo sapiens
  misc_RNA (1)...(19): siRNA sense strand
cuacggaaacaucauuuga

SEQ ID NO: 263116 - RNA, 19 nt, Homo sapiens
  misc_RNA (1)...(19): siRNA sense strand
ucgagagccuugucagguu

SEQ ID NO: 263117 - RNA, 19 nt, Homo sapiens
  misc_RNA (1)...(19): siRNA sense strand
aaauugguccaguuuauga

SEQ ID NO: 263118 - RNA, 19 nt, Homo sapiens
  misc_RNA (1)...(19): siRNA sense strand
acagagagagcuagacaga

SEQ ID NO: 263119 - RNA, 19 nt, Homo sapiens
  misc_RNA (1)...(19): siRNA sense strand
ccagucagcccacacacuu

SEQ ID NO: 263120 - RNA, 19 nt, Homo sapiens
  misc_RNA (1)...(19): siRNA sense strand
ccacagagagagcuagaca

SEQ ID NO: 263121 - RNA, 19 nt, Homo sapiens
  misc_RNA (1)...(19): siRNA sense strand
aauguggguuucaguguug

SEQ ID NO: 263122 - RNA, 19 nt, Homo sapiens
  misc_RNA (1)...(19): siRNA sense strand
uaauugcgcugcagaacac

SEQ ID NO: 263123 - RNA, 19 nt, Homo sapiens
  misc_RNA (1)...(19): siRNA sense strand
uaugaaauugguccaguuu

SEQ ID NO: 263124 - RNA, 19 nt, Homo sapiens
  misc_RNA (1)...(19): siRNA sense strand
cagcaccgauaggagaauu

SEQ ID NO: 263125 - RNA, 19 nt, Homo sapiens
  misc_RNA (1)...(19): siRNA sense strand
gaagccagcaccgauagga

SEQ ID NO: 263126 - RNA, 19 nt, Homo sapiens
  misc_RNA (1)...(19): siRNA sense strand
cagcugauuauuagaaaug

SEQ ID NO: 263127 - RNA, 19 nt, Homo sapiens
  misc_RNA (1)...(19): siRNA sense strand
gcagcugauugcuuuggau

SEQ ID NO: 263128 - RNA, 19 nt, Homo sapiens
  misc_RNA (1)...(19): siRNA sense strand
ucgcugcgcacccaagaua

SEQ ID NO: 263129 - RNA, 19 nt, Homo sapiens
  misc_RNA (1)...(19): siRNA sense strand
guacucagccgaggucauc

SEQ ID NO: 263130 - RNA, 19 nt, Homo sapiens
  misc_RNA (1)...(19): siRNA sense strand
cagguugccuccagugaag

SEQ ID NO: 263131 - RNA, 19 nt, Homo sapiens
  misc_RNA (1)...(19): siRNA sense strand
gcugauugcuuuggaucug

SEQ ID NO: 263132 - RNA, 19 nt, Homo sapiens
  misc_RNA (1)...(19): siRNA sense strand
gaauugggcagcugauugc

SEQ ID NO: 263133 - RNA, 19 nt, Homo sapiens
  misc_RNA (1)...(19): siRNA sense strand
aauccugccuucgguguuu

SEQ ID NO: 263134 - RNA, 19 nt, Homo sapiens
  misc_RNA (1)...(19): siRNA sense strand
gaacaaccuccuuuuggaa

SEQ ID NO: 263135 - RNA, 19 nt, Homo sapiens
  misc_RNA (1)...(19): siRNA sense strand
guaauugcgcugcagaaca

SEQ ID NO: 263136 - RNA, 19 nt, Homo sapiens
  misc_RNA (1)...(19): siRNA sense strand
uaggagaauuccagaguac

SEQ ID NO: 263137 - RNA, 19 nt, Homo sapiens
  misc_RNA (1)...(19): siRNA sense strand
gcgaguugcuacggaaaca

SEQ ID NO: 263138 - RNA, 19 nt, Homo sapiens
  misc_RNA (1)...(19): siRNA sense strand
agaagaaagagcugaacaa

SEQ ID NO: 263139 - RNA, 19 nt, Homo sapiens
  misc_RNA (1)...(19): siRNA sense strand
uuuaugagaugguaauugc

SEQ ID NO: 263140 - RNA, 19 nt, Homo sapiens
  misc_RNA (1)...(19): siRNA sense strand
cuagcuaagccaccaauug

SEQ ID NO: 263141 - RNA, 19 nt, Homo sapiens
  misc_RNA (1)...(19): siRNA sense strand
cagccugacauggaauuua

SEQ ID NO: 263142 - RNA, 19 nt, Homo sapiens
  misc_RNA (1)...(19): siRNA sense strand
guggacagccugacaugga

SEQ ID NO: 263143 - RNA, 19 nt, Homo sapiens
  misc_RNA (1)...(19): siRNA sense strand
uggacagccugacauggaa

SEQ ID NO: 263144 - RNA, 19 nt, Homo sapiens
  misc_RNA (1)...(19): siRNA sense strand
uaacagcccagcacuucau

SEQ ID NO: 263145 - RNA, 19 nt, Homo sapiens
  misc_RNA (1)...(19): siRNA sense strand
uuaugaaauugguccaguu

SEQ ID NO: 263146 - RNA, 19 nt, Homo sapiens
  misc_RNA (1)...(19): siRNA sense strand
uagcuaagccaccaauugg

SEQ ID NO: 263147 - RNA, 19 nt, Homo sapiens
  misc_RNA (1)...(19): siRNA sense strand
gagaauuccagaguacaga

SEQ ID NO: 263148 - RNA, 19 nt, Homo sapiens
  misc_RNA (1)...(19): siRNA sense strand
guguauagacagcgaguug

SEQ ID NO: 263149 - RNA, 19 nt, Homo sapiens
  misc_RNA (1)...(19): siRNA sense strand
aagcagcugauuauuagaa

SEQ ID NO: 263150 - RNA, 19 nt, Homo sapiens
  misc_RNA (1)...(19): siRNA sense strand
ugugguuacugccucauug

SEQ ID NO: 263151 - RNA, 19 nt, Homo sapiens
  misc_RNA (1)...(19): siRNA sense strand
ucacagauuaugaaauugg

SEQ ID NO: 263152 - RNA, 19 nt, Homo sapiens
  misc_RNA (1)...(19): siRNA sense strand
uaacuccuaaggccaaaga

SEQ ID NO: 263153 - RNA, 19 nt, Homo sapiens
  misc_RNA (1)...(19): siRNA sense strand
aagaaagagcugaacaaga

SEQ ID NO: 263154 - RNA, 19 nt, Homo sapiens
  misc_RNA (1)...(19): siRNA sense strand
aaagaaaggaccagagaac

SEQ ID NO: 263155 - RNA, 19 nt, Homo sapiens
  misc_RNA (1)...(19): siRNA sense strand
cagauucgggagcucuaua

SEQ ID NO: 263156 - RNA, 19 nt, Homo sapiens
  misc_RNA (1)...(19): siRNA sense strand
ccuggaaguccuccuugua

SEQ ID NO: 263157 - RNA, 19 nt, Homo sapiens
  misc_RNA (1)...(19): siRNA sense strand
aagagugucuccagauggu

SEQ ID NO: 263158 - RNA, 19 nt, Homo sapiens
  misc_RNA (1)...(19): siRNA sense strand
ugaacaaccuccuuuugga

SEQ ID NO: 263159 - RNA, 19 nt, Homo sapiens
  misc_RNA (1)...(19): siRNA sense strand
gcuggccaccacuaaguuu

SEQ ID NO: 263160 - RNA, 19 nt, Homo sapiens
  misc_RNA (1)...(19): siRNA sense strand
gcggcuggaugaguuugaa

SEQ ID NO: 263161 - RNA, 19 nt, Homo sapiens
  misc_RNA (1)...(19): siRNA sense strand
gaaagagcugaacaagaag

SEQ ID NO: 263162 - RNA, 19 nt, Homo sapiens
  misc_RNA (1)...(19): siRNA sense strand
acucugaggccuuccacua

SEQ ID NO: 263163 - RNA, 19 nt, Homo sapiens
  misc_RNA (1)...(19): siRNA sense strand
gaaugguggcuccuggaau

SEQ ID NO: 263164 - RNA, 19 nt, Homo sapiens
  misc_RNA (1)...(19): siRNA sense strand
gugcugauacuccaguguu

SEQ ID NO: 263165 - RNA, 19 nt, Homo sapiens
  misc_RNA (1)...(19): siRNA sense strand
gaagcguuccguccagaag

SEQ ID NO: 263166 - RNA, 19 nt, Homo sapiens
  misc_RNA (1)...(19): siRNA sense strand
ugacagagaucuuccagaa

SEQ ID NO: 263167 - RNA, 19 nt, Homo sapiens
  misc_RNA (1)...(19): siRNA sense strand
ggaggagcaucucacaaua

SEQ ID NO: 263168 - RNA, 19 nt, Homo sapiens
  misc_RNA (1)...(19): siRNA sense strand
gaaauuauuggacgucaua

SEQ ID NO: 263169 - RNA, 19 nt, Homo sapiens
  misc_RNA (1)...(19): siRNA sense strand
acagagaucuuccagaauu

SEQ ID NO: 263170 - RNA, 19 nt, Homo sapiens
  misc_RNA (1)...(19): siRNA sense strand
gcacugcaguccacagaga

SEQ ID NO: 263171 - RNA, 19 nt, Homo sapiens
  misc_RNA (1)...(19): siRNA sense strand
gaacagaugugcccuuuuc

SEQ ID NO: 263172 - RNA, 19 nt, Homo sapiens
  misc_RNA (1)...(19): siRNA sense strand
gacggucacuucuccagua

SEQ ID NO: 263173 - RNA, 19 nt, Homo sapiens
  misc_RNA (1)...(19): siRNA sense strand
gaaugaauuuguugcagau

SEQ ID NO: 263174 - RNA, 19 nt, Homo sapiens
  misc_RNA (1)...(19): siRNA sense strand
ccacaagguugcagcauuc

SEQ ID NO: 263175 - RNA, 19 nt, Homo sapiens
  misc_RNA (1)...(19): siRNA sense strand
ggucacuucuccaguacua

SEQ ID NO: 263176 - RNA, 19 nt, Homo sapiens
  misc_RNA (1)...(19): siRNA sense strand
ucacauacagagagaauuu

SEQ ID NO: 263177 - RNA, 19 nt, Homo sapiens
  misc_RNA (1)...(19): siRNA sense strand
gguaaagguuguugcuguu

SEQ ID NO: 263178 - RNA, 19 nt, Homo sapiens
  misc_RNA (1)...(19): siRNA sense strand
gagagaagauccgcaacga

SEQ ID NO: 263179 - RNA, 19 nt, Homo sapiens
  misc_RNA (1)...(19): siRNA sense strand
caagaggauucacgcagaa

SEQ ID NO: 263180 - RNA, 19 nt, Homo sapiens
  misc_RNA (1)...(19): siRNA sense strand
gaauuucuuuggucaguag

SEQ ID NO: 263181 - RNA, 19 nt, Homo sapiens
  misc_RNA (1)...(19): siRNA sense strand
uaaagguuguugcuguuga

SEQ ID NO: 263182 - RNA, 19 nt, Homo sapiens
  misc_RNA (1)...(19): siRNA sense strand
gaucaccccugaaauuauu

SEQ ID NO: 263183 - RNA, 19 nt, Homo sapiens
  misc_RNA (1)...(19): siRNA sense strand
cagagaucuuccagaauuu

SEQ ID NO: 263184 - RNA, 19 nt, Homo sapiens
  misc_RNA (1)...(19): siRNA sense strand
gcagauacaggauaaaguc

SEQ ID NO: 263185 - RNA, 19 nt, Homo sapiens
  misc_RNA (1)...(19): siRNA sense strand
guucuggaaugaauuuguu

SEQ ID NO: 263186 - RNA, 19 nt, Homo sapiens
  misc_RNA (1)...(19): siRNA sense strand
cagcaacacggaaguauau

SEQ ID NO: 263187 - RNA, 19 nt, Homo sapiens
  misc_RNA (1)...(19): siRNA sense strand
gagguucgagcacuaauug

SEQ ID NO: 263188 - RNA, 19 nt, Homo sapiens
  misc_RNA (1)...(19): siRNA sense strand
agaguugaaugucuucuau

SEQ ID NO: 263189 - RNA, 19 nt, Homo sapiens
  misc_RNA (1)...(19): siRNA sense strand
gcacgcagcagguaaaggu

SEQ ID NO: 263190 - RNA, 19 nt, Homo sapiens
  misc_RNA (1)...(19): siRNA sense strand
guaccaucaugcucaguug

SEQ ID NO: 263191 - RNA, 19 nt, Homo sapiens
  misc_RNA (1)...(19): siRNA sense strand
ggagaucaccccugaaauu

SEQ ID NO: 263192 - RNA, 19 nt, Homo sapiens
  misc_RNA (1)...(19): siRNA sense strand
uauuggacgucauagguuu

SEQ ID NO: 263193 - RNA, 19 nt, Homo sapiens
  misc_RNA (1)...(19): siRNA sense strand
ggccugggcuaucgaguca

SEQ ID NO: 263194 - RNA, 19 nt, Homo sapiens
  misc_RNA (1)...(19): siRNA sense strand
ccuauugacuacagugaug

SEQ ID NO: 263195 - RNA, 19 nt, Homo sapiens
  misc_RNA (1)...(19): siRNA sense strand
gagaucaccccugaaauua

SEQ ID NO: 263196 - RNA, 19 nt, Homo sapiens
  misc_RNA (1)...(19): siRNA sense strand
gucaguagcuuugcugcuu

SEQ ID NO: 263197 - RNA, 19 nt, Homo sapiens
  misc_RNA (1)...(19): siRNA sense strand
uggaacagaugugcccuuu

SEQ ID NO: 263198 - RNA, 19 nt, Homo sapiens
  misc_RNA (1)...(19): siRNA sense strand
aguugaaugucuucuauga

SEQ ID NO: 263199 - RNA, 19 nt, Homo sapiens
  misc_RNA (1)...(19): siRNA sense strand
cccgaggccuacucacaua

SEQ ID NO: 263200 - RNA, 19 nt, Homo sapiens
  misc_RNA (1)...(19): siRNA sense strand
gaaugucuucuaugaggaa

SEQ ID NO: 263201 - RNA, 19 nt, Homo sapiens
  misc_RNA (1)...(19): siRNA sense strand
ggcacuggauaucaucuug

SEQ ID NO: 263202 - RNA, 19 nt, Homo sapiens
  misc_RNA (1)...(19): siRNA sense strand
aggagcaucucacaauaga

SEQ ID NO: 263203 - RNA, 19 nt, Homo sapiens
  misc_RNA (1)...(19): siRNA sense strand
gucauagguuuaacacaga

SEQ ID NO: 263204 - RNA, 19 nt, Homo sapiens
  misc_RNA (1)...(19): siRNA sense strand
gcaaagugguggccuucac

SEQ ID NO: 263205 - RNA, 19 nt, Homo sapiens
  misc_RNA (1)...(19): siRNA sense strand
cuacucacauacagagaga

SEQ ID NO: 263206 - RNA, 19 nt, Homo sapiens
  misc_RNA (1)...(19): siRNA sense strand
ccagcaacacggaaguaua

SEQ ID NO: 263207 - RNA, 19 nt, Homo sapiens
  misc_RNA (1)...(19): siRNA sense strand
gaagcuuagcccaccagua

SEQ ID NO: 263208 - RNA, 19 nt, Homo sapiens
  misc_RNA (1)...(19): siRNA sense strand
ucagggcgguguucaugug

SEQ ID NO: 263209 - RNA, 19 nt, Homo sapiens
  misc_RNA (1)...(19): siRNA sense strand
gcuaucgagucauguccaa

SEQ ID NO: 263210 - RNA, 19 nt, Homo sapiens
  misc_RNA (1)...(19): siRNA sense strand
gacaauucauggccaagag

SEQ ID NO: 263211 - RNA, 19 nt, Homo sapiens
  misc_RNA (1)...(19): siRNA sense strand
ggacaauucauggccaaga

SEQ ID NO: 263212 - RNA, 19 nt, Homo sapiens
  misc_RNA (1)...(19): siRNA sense strand
ugaauuuguugcagauaca

SEQ ID NO: 263213 - RNA, 19 nt, Homo sapiens
  misc_RNA (1)...(19): siRNA sense strand
gaggagcaucucacaauag

SEQ ID NO: 263214 - RNA, 19 nt, Homo sapiens
  misc_RNA (1)...(19): siRNA sense strand
ugggagccauuucuuccua

SEQ ID NO: 263215 - RNA, 19 nt, Homo sapiens
  misc_RNA (1)...(19): siRNA sense strand
gagcuucucaggucuacga

SEQ ID NO: 263216 - RNA, 19 nt, Homo sapiens
  misc_RNA (1)...(19): siRNA sense strand
gcagaaggccugggcuauc

SEQ ID NO: 263217 - RNA, 19 nt, Homo sapiens
  misc_RNA (1)...(19): siRNA sense strand
ggagguucgagcacuaauu

SEQ ID NO: 263218 - RNA, 19 nt, Homo sapiens
  misc_RNA (1)...(19): siRNA sense strand
ggacgucauagguuuaaca

SEQ ID NO: 263219 - RNA, 19 nt, Homo sapiens
  misc_RNA (1)...(19): siRNA sense strand
gaagauccgcaacgagucu

SEQ ID NO: 263220 - RNA, 19 nt, Homo sapiens
  misc_RNA (1)...(19): siRNA sense strand
gaugcagaguugaaugucu

SEQ ID NO: 263221 - RNA, 19 nt, Homo sapiens
  misc_RNA (1)...(19): siRNA sense strand
uacaggugcuugcagaugu

SEQ ID NO: 263222 - RNA, 19 nt, Homo sapiens
  misc_RNA (1)...(19): siRNA sense strand
ugacuacagugaugguucu

SEQ ID NO: 263223 - RNA, 19 nt, Homo sapiens
  misc_RNA (1)...(19): siRNA sense strand
gcaggcacugacaagcuua

SEQ ID NO: 263224 - RNA, 19 nt, Homo sapiens
  misc_RNA (1)...(19): siRNA sense strand
uguugcagauacaggauaa

SEQ ID NO: 263225 - RNA, 19 nt, Homo sapiens
  misc_RNA (1)...(19): siRNA sense strand
ugaugguucuggaaugaau

SEQ ID NO: 263226 - RNA, 19 nt, Homo sapiens
  misc_RNA (1)...(19): siRNA sense strand
gcaacacggaaguauauac

SEQ ID NO: 263227 - RNA, 19 nt, Homo sapiens
  misc_RNA (1)...(19): siRNA sense strand
aagcuuagcccaccaguac

SEQ ID NO: 263228 - RNA, 19 nt, Homo sapiens
  misc_RNA (1)...(19): siRNA sense strand
ucauagguuuaacacagaa

SEQ ID NO: 263229 - RNA, 19 nt, Homo sapiens
  misc_RNA (1)...(19): siRNA sense strand
cagaaggccugggcuaucg

SEQ ID NO: 263230 - RNA, 19 nt, Homo sapiens
  misc_RNA (1)...(19): siRNA sense strand
gguucgagcacuaauugaa

SEQ ID NO: 263231 - RNA, 19 nt, Homo sapiens
  misc_RNA (1)...(19): siRNA sense strand
guccagcgcuacggauuuc

SEQ ID NO: 263232 - RNA, 19 nt, Homo sapiens
  misc_RNA (1)...(19): siRNA sense strand
agugaugguucuggaauga

SEQ ID NO: 263233 - RNA, 19 nt, Homo sapiens
  misc_RNA (1)...(19): siRNA sense strand
ggugcuugcagauguguuu

SEQ ID NO: 263234 - RNA, 19 nt, Homo sapiens
  misc_RNA (1)...(19): siRNA sense strand
guaaagguuguugcuguug

SEQ ID NO: 263235 - RNA, 19 nt, Homo sapiens
  misc_RNA (1)...(19): siRNA sense strand
gguuguugcuguugaugca

SEQ ID NO: 263236 - RNA, 19 nt, Homo sapiens
  misc_RNA (1)...(19): siRNA sense strand
caccagaccuccggcuaca

SEQ ID NO: 263237 - RNA, 19 nt, Homo sapiens
  misc_RNA (1)...(19): siRNA sense strand
guugugaaguuagcuccaa

SEQ ID NO: 263238 - RNA, 19 nt, Homo sapiens
  misc_RNA (1)...(19): siRNA sense strand
caauagagaaaucuuacag

SEQ ID NO: 263239 - RNA, 19 nt, Homo sapiens
  misc_RNA (1)...(19): siRNA sense strand
ucacuucuccaguacuaau

SEQ ID NO: 263240 - RNA, 19 nt, Homo sapiens
  misc_RNA (1)...(19): siRNA sense strand
uaucgagucauguccaaga

SEQ ID NO: 263241 - RNA, 19 nt, Homo sapiens
  misc_RNA (1)...(19): siRNA sense strand
aaauggcucccucaugaga

SEQ ID NO: 263242 - RNA, 19 nt, Homo sapiens
  misc_RNA (1)...(19): siRNA sense strand
aaagguuguugcuguugau

SEQ ID NO: 263243 - RNA, 19 nt, Homo sapiens
  misc_RNA (1)...(19): siRNA sense strand
uggauaucaucuuggagaa

SEQ ID NO: 263244 - RNA, 19 nt, Homo sapiens
  misc_RNA (1)...(19): siRNA sense strand
cacuggauaucaucuugga

SEQ ID NO: 263245 - RNA, 19 nt, Homo sapiens
  misc_RNA (1)...(19): siRNA sense strand
guguucaugugcacaagga

SEQ ID NO: 263246 - RNA, 19 nt, Homo sapiens
  misc_RNA (1)...(19): siRNA sense strand
gcccaccaguaccaucaug

SEQ ID NO: 263247 - RNA, 19 nt, Homo sapiens
  misc_RNA (1)...(19): siRNA sense strand
ugaggaaagugugcauuuu

SEQ ID NO: 263248 - RNA, 19 nt, Homo sapiens
  misc_RNA (1)...(19): siRNA sense strand
cagugaugguucuggaaug

SEQ ID NO: 263249 - RNA, 19 nt, Homo sapiens
  misc_RNA (1)...(19): siRNA sense strand
cagggaaccaaauugcaaa

SEQ ID NO: 263250 - RNA, 19 nt, Homo sapiens
  misc_RNA (1)...(19): siRNA sense strand
acagggaaccaaauugcaa

SEQ ID NO: 263251 - RNA, 19 nt, Homo sapiens
  misc_RNA (1)...(19): siRNA sense strand
ccugggcuaucgagucaug

SEQ ID NO: 263252 - RNA, 19 nt, Homo sapiens
  misc_RNA (1)...(19): siRNA sense strand
uguggagguucgagcacua

SEQ ID NO: 263253 - RNA, 19 nt, Homo sapiens
  misc_RNA (1)...(19): siRNA sense strand
accacaagguugcagcauu

SEQ ID NO: 263254 - RNA, 19 nt, Homo sapiens
  misc_RNA (1)...(19): siRNA sense strand
augcagaguugaaugucuu

SEQ ID NO: 263255 - RNA, 19 nt, Homo sapiens
  misc_RNA (1)...(19): siRNA sense strand
gagaugggcaacgguggaa

SEQ ID NO: 263256 - RNA, 19 nt, Homo sapiens
  misc_RNA (1)...(19): siRNA sense strand
gagccauuucuuccuacua

SEQ ID NO: 263257 - RNA, 19 nt, Homo sapiens
  misc_RNA (1)...(19): siRNA sense strand
ugccugugcaccucauuua

SEQ ID NO: 263258 - RNA, 19 nt, Homo sapiens
  misc_RNA (1)...(19): siRNA sense strand
cagaguugaaugucuucua

SEQ ID NO: 263259 - RNA, 19 nt, Homo sapiens
  misc_RNA (1)...(19): siRNA sense strand
caggacuguuucuccauca

SEQ ID NO: 263260 - RNA, 19 nt, Homo sapiens
  misc_RNA (1)...(19): siRNA sense strand
gccaaacucgagcagagaa

SEQ ID NO: 263261 - RNA, 19 nt, Homo sapiens
  misc_RNA (1)...(19): siRNA sense strand
gaggaaagugugcauuuug

SEQ ID NO: 263262 - RNA, 19 nt, Homo sapiens
  misc_RNA (1)...(19): siRNA sense strand
aggaggagcaucucacaau

SEQ ID NO: 263263 - RNA, 19 nt, Homo sapiens
  misc_RNA (1)...(19): siRNA sense strand
ccagugacacccuguuucu

SEQ ID NO: 263264 - RNA, 19 nt, Homo sapiens
  misc_RNA (1)...(19): siRNA sense strand
ggacucagggcgguguuca

SEQ ID NO: 263265 - RNA, 19 nt, Homo sapiens
  misc_RNA (1)...(19): siRNA sense strand
gcuugcagauguguuugau

SEQ ID NO: 263266 - RNA, 19 nt, Homo sapiens
  misc_RNA (1)...(19): siRNA sense strand
ggauaaaccuugagaaaug

SEQ ID NO: 263267 - RNA, 19 nt, Homo sapiens
  misc_RNA (1)...(19): siRNA sense strand
gaagauggcucaguacaga

SEQ ID NO: 263268 - RNA, 19 nt, Homo sapiens
  misc_RNA (1)...(19): siRNA sense strand
cggaagggauuuaguaaua

SEQ ID NO: 263269 - RNA, 19 nt, Homo sapiens
  misc_RNA (1)...(19): siRNA sense strand
gaacgauccuccuucuuug

SEQ ID NO: 263270 - RNA, 19 nt, Homo sapiens
  misc_RNA (1)...(19): siRNA sense strand
ggaagaaccucagucaaau

SEQ ID NO: 263271 - RNA, 19 nt, Homo sapiens
  misc_RNA (1)...(19): siRNA sense strand
aaacugguguucaagauaa

SEQ ID NO: 263272 - RNA, 19 nt, Homo sapiens
  misc_RNA (1)...(19): siRNA sense strand
ugugaaagcuggaaacauu

SEQ ID NO: 263273 - RNA, 19 nt, Homo sapiens
  misc_RNA (1)...(19): siRNA sense strand
gcagagagcaccaaccauu

SEQ ID NO: 263274 - RNA, 19 nt, Homo sapiens
  misc_RNA (1)...(19): siRNA sense strand
ggacagauccacagagaug

SEQ ID NO: 263275 - RNA, 19 nt, Homo sapiens
  misc_RNA (1)...(19): siRNA sense strand
gaaauaaagugagaaagac

SEQ ID NO: 263276 - RNA, 19 nt, Homo sapiens
  misc_RNA (1)...(19): siRNA sense strand
gaugaacuccugaaagaaa

SEQ ID NO: 263277 - RNA, 19 nt, Homo sapiens
  misc_RNA (1)...(19): siRNA sense strand
ggaaacugguguucaagau

SEQ ID NO: 263278 - RNA, 19 nt, Homo sapiens
  misc_RNA (1)...(19): siRNA sense strand
gaaacugguguucaagaua

SEQ ID NO: 263279 - RNA, 19 nt, Homo sapiens
  misc_RNA (1)...(19): siRNA sense strand
ggagaaaguggcaaucaaa

SEQ ID NO: 263280 - RNA, 19 nt, Homo sapiens
  misc_RNA (1)...(19): siRNA sense strand
guggagugaugaugaauuu

SEQ ID NO: 263281 - RNA, 19 nt, Homo sapiens
  misc_RNA (1)...(19): siRNA sense strand
cgaaauaaagugagaaaga

SEQ ID NO: 263282 - RNA, 19 nt, Homo sapiens
  misc_RNA (1)...(19): siRNA sense strand
ggaguggagugaugaugaa

SEQ ID NO: 263283 - RNA, 19 nt, Homo sapiens
  misc_RNA (1)...(19): siRNA sense strand
gauggcaccugaaguuaug

SEQ ID NO: 263284 - RNA, 19 nt, Homo sapiens
  misc_RNA (1)...(19): siRNA sense strand
uggaugaacuccugaaaga

SEQ ID NO: 263285 - RNA, 19 nt, Homo sapiens
  misc_RNA (1)...(19): siRNA sense strand
gaaccucagucaaaucgau

SEQ ID NO: 263286 - RNA, 19 nt, Homo sapiens
  misc_RNA (1)...(19): siRNA sense strand
gaagggaaagcagcaauuu

SEQ ID NO: 263287 - RNA, 19 nt, Homo sapiens
  misc_RNA (1)...(19): siRNA sense strand
uggagaagauggcucagua

SEQ ID NO: 263288 - RNA, 19 nt, Homo sapiens
  misc_RNA (1)...(19): siRNA sense strand
gaacagguccgugguuaug

SEQ ID NO: 263289 - RNA, 19 nt, Homo sapiens
  misc_RNA (1)...(19): siRNA sense strand
gaagggauuuaguaauagu

SEQ ID NO: 263290 - RNA, 19 nt, Homo sapiens
  misc_RNA (1)...(19): siRNA sense strand
gagguucuguucuggauau

SEQ ID NO: 263291 - RNA, 19 nt, Homo sapiens
  misc_RNA (1)...(19): siRNA sense strand
gauaaaccuugagaaaugu

SEQ ID NO: 263292 - RNA, 19 nt, Homo sapiens
  misc_RNA (1)...(19): siRNA sense strand
ggagugaugaugaauuuga

SEQ ID NO: 263293 - RNA, 19 nt, Homo sapiens
  misc_RNA (1)...(19): siRNA sense strand
ucauaaauauccaccaaug

SEQ ID NO: 263294 - RNA, 19 nt, Homo sapiens
  misc_RNA (1)...(19): siRNA sense strand
gaugagcuguggcuuguca

SEQ ID NO: 263295 - RNA, 19 nt, Homo sapiens
  misc_RNA (1)...(19): siRNA sense strand
ggaagggauuuaguaauag

SEQ ID NO: 263296 - RNA, 19 nt, Homo sapiens
  misc_RNA (1)...(19): siRNA sense strand
gcagcaauuucacaacuca

SEQ ID NO: 263297 - RNA, 19 nt, Homo sapiens
  misc_RNA (1)...(19): siRNA sense strand
cgacggaagggauuuagua

SEQ ID NO: 263298 - RNA, 19 nt, Homo sapiens
  misc_RNA (1)...(19): siRNA sense strand
aaaguggaguccuagauga

SEQ ID NO: 263299 - RNA, 19 nt, Homo sapiens
  misc_RNA (1)...(19): siRNA sense strand
gggcuggaauaucugcaua

SEQ ID NO: 263300 - RNA, 19 nt, Homo sapiens
  misc_RNA (1)...(19): siRNA sense strand
uggaagggcuggaauaucu

SEQ ID NO: 263301 - RNA, 19 nt, Homo sapiens
  misc_RNA (1)...(19): siRNA sense strand
ggaucagguucacaagaaa

SEQ ID NO: 263302 - RNA, 19 nt, Homo sapiens
  misc_RNA (1)...(19): siRNA sense strand
gcaacugguggugauauua

SEQ ID NO: 263303 - RNA, 19 nt, Homo sapiens
  misc_RNA (1)...(19): siRNA sense strand
gcuggaauaucugcauaaa

SEQ ID NO: 263304 - RNA, 19 nt, Homo sapiens
  misc_RNA (1)...(19): siRNA sense strand
guucuguucuggauauuau

SEQ ID NO: 263305 - RNA, 19 nt, Homo sapiens
  misc_RNA (1)...(19): siRNA sense strand
ccagugggcgucuucauaa

SEQ ID NO: 263306 - RNA, 19 nt, Homo sapiens
  misc_RNA (1)...(19): siRNA sense strand
aagcugauauuuggaguuu

SEQ ID NO: 263307 - RNA, 19 nt, Homo sapiens
  misc_RNA (1)...(19): siRNA sense strand
ucaaaucgaucugucacuu

SEQ ID NO: 263308 - RNA, 19 nt, Homo sapiens
  misc_RNA (1)...(19): siRNA sense strand
uggaagaaccucagucaaa

SEQ ID NO: 263309 - RNA, 19 nt, Homo sapiens
  misc_RNA (1)...(19): siRNA sense strand
aacagcagcagaacuauua

SEQ ID NO: 263310 - RNA, 19 nt, Homo sapiens
  misc_RNA (1)...(19): siRNA sense strand
uggaacagguccgugguua

SEQ ID NO: 263311 - RNA, 19 nt, Homo sapiens
  misc_RNA (1)...(19): siRNA sense strand
cccaaucagucuaguacua

SEQ ID NO: 263312 - RNA, 19 nt, Homo sapiens
  misc_RNA (1)...(19): siRNA sense strand
gaaaccaagaucccaauca

SEQ ID NO: 263313 - RNA, 19 nt, Homo sapiens
  misc_RNA (1)...(19): siRNA sense strand
ggaagggaaagcagcaauu

SEQ ID NO: 263314 - RNA, 19 nt, Homo sapiens
  misc_RNA (1)...(19): siRNA sense strand
ccagaaagcaaagaauaaa

SEQ ID NO: 263315 - RNA, 19 nt, Homo sapiens
  misc_RNA (1)...(19): siRNA sense strand
gcuggaaacauucuucuug

SEQ ID NO: 263316 - RNA, 19 nt, Homo sapiens
  misc_RNA (1)...(19): siRNA sense strand
gagcaccaaccauuucuga

SEQ ID NO: 263317 - RNA, 19 nt, Homo sapiens
  misc_RNA (1)...(19): siRNA sense strand
guggugauauuacccgaaa

SEQ ID NO: 263318 - RNA, 19 nt, Homo sapiens
  misc_RNA (1)...(19): siRNA sense strand
gauccuccuucuuuggaaa

SEQ ID NO: 263319 - RNA, 19 nt, Homo sapiens
  misc_RNA (1)...(19): siRNA sense strand
gaugaugaauuugaugaag

SEQ ID NO: 263320 - RNA, 19 nt, Homo sapiens
  misc_RNA (1)...(19): siRNA sense strand
caacagcagcagaacuauu

SEQ ID NO: 263321 - RNA, 19 nt, Homo sapiens
  misc_RNA (1)...(19): siRNA sense strand
caaaucgaucugucacuuu

SEQ ID NO: 263322 - RNA, 19 nt, Homo sapiens
  misc_RNA (1)...(19): siRNA sense strand
ucugagcucuuuccaacaa

SEQ ID NO: 263323 - RNA, 19 nt, Homo sapiens
  misc_RNA (1)...(19): siRNA sense strand
ucaaugccaucauccuaau

SEQ ID NO: 263324 - RNA, 19 nt, Homo sapiens
  misc_RNA (1)...(19): siRNA sense strand
ugaugaugguaaacugaua

SEQ ID NO: 263325 - RNA, 19 nt, Homo sapiens
  misc_RNA (1)...(19): siRNA sense strand
gucgaaggcucagauauuc

SEQ ID NO: 263326 - RNA, 19 nt, Homo sapiens
  misc_RNA (1)...(19): siRNA sense strand
aggaucagguucacaagaa

SEQ ID NO: 263327 - RNA, 19 nt, Homo sapiens
  misc_RNA (1)...(19): siRNA sense strand
gaacuauuaaggcacaaau

SEQ ID NO: 263328 - RNA, 19 nt, Homo sapiens
  misc_RNA (1)...(19): siRNA sense strand
ccaaucagucuaguacuaa

SEQ ID NO: 263329 - RNA, 19 nt, Homo sapiens
  misc_RNA (1)...(19): siRNA sense strand
aaaucgaucugucacuuuc

SEQ ID NO: 263330 - RNA, 19 nt, Homo sapiens
  misc_RNA (1)...(19): siRNA sense strand
gaagaaccucagucaaauc

SEQ ID NO: 263331 - RNA, 19 nt, Homo sapiens
  misc_RNA (1)...(19): siRNA sense strand
uaauaguggcagcuaauuu

SEQ ID NO: 263332 - RNA, 19 nt, Homo sapiens
  misc_RNA (1)...(19): siRNA sense strand
gacggaagggauuuaguaa

SEQ ID NO: 263333 - RNA, 19 nt, Homo sapiens
  misc_RNA (1)...(19): siRNA sense strand
caguacagauugcagacuu

SEQ ID NO: 263334 - RNA, 19 nt, Homo sapiens
  misc_RNA (1)...(19): siRNA sense strand
gcagaaaauuguggaagaa

SEQ ID NO: 263335 - RNA, 19 nt, Homo sapiens
  misc_RNA (1)...(19): siRNA sense strand
caccugaaguuauggaaca

SEQ ID NO: 263336 - RNA, 19 nt, Homo sapiens
  misc_RNA (1)...(19): siRNA sense strand
ggauggcaccugaaguuau

SEQ ID NO: 263337 - RNA, 19 nt, Homo sapiens
  misc_RNA (1)...(19): siRNA sense strand
cagagagcaccaaccauuu

SEQ ID NO: 263338 - RNA, 19 nt, Homo sapiens
  misc_RNA (1)...(19): siRNA sense strand
gaugguaaacugauaggau

SEQ ID NO: 263339 - RNA, 19 nt, Homo sapiens
  misc_RNA (1)...(19): siRNA sense strand
gggaguggagugaugauga

SEQ ID NO: 263340 - RNA, 19 nt, Homo sapiens
  misc_RNA (1)...(19): siRNA sense strand
aagaugagcuguggcuugu

SEQ ID NO: 263341 - RNA, 19 nt, Homo sapiens
  misc_RNA (1)...(19): siRNA sense strand
ugucgaaggcucagauauu

SEQ ID NO: 263342 - RNA, 19 nt, Homo sapiens
  misc_RNA (1)...(19): siRNA sense strand
aaaccaagaucccaaucag

SEQ ID NO: 263343 - RNA, 19 nt, Homo sapiens
  misc_RNA (1)...(19): siRNA sense strand
cgagugaaagaaucaauau

SEQ ID NO: 263344 - RNA, 19 nt, Homo sapiens
  misc_RNA (1)...(19): siRNA sense strand
gguccgugguuaugauuuc

SEQ ID NO: 263345 - RNA, 19 nt, Homo sapiens
  misc_RNA (1)...(19): siRNA sense strand
acacaaaaguggaguccua

SEQ ID NO: 263346 - RNA, 19 nt, Homo sapiens
  misc_RNA (1)...(19): siRNA sense strand
gagugaugaugaauuugau

SEQ ID NO: 263347 - RNA, 19 nt, Homo sapiens
  misc_RNA (1)...(19): siRNA sense strand
aaacuagcauggaugaacu

SEQ ID NO: 263348 - RNA, 19 nt, Homo sapiens
  misc_RNA (1)...(19): siRNA sense strand
gagaagauggcucaguaca

SEQ ID NO: 263349 - RNA, 19 nt, Homo sapiens
  misc_RNA (1)...(19): siRNA sense strand
gcagcuaauuugcagaaaa

SEQ ID NO: 263350 - RNA, 19 nt, Homo sapiens
  misc_RNA (1)...(19): siRNA sense strand
aauaguggcagcuaauuug

SEQ ID NO: 263351 - RNA, 19 nt, Homo sapiens
  misc_RNA (1)...(19): siRNA sense strand
guaauaguggcagcuaauu

SEQ ID NO: 263352 - RNA, 19 nt, Homo sapiens
  misc_RNA (1)...(19): siRNA sense strand
caagaucccaaucagucua

SEQ ID NO: 263353 - RNA, 19 nt, Homo sapiens
  misc_RNA (1)...(19): siRNA sense strand
gccaucauccuaauauugu

SEQ ID NO: 263354 - RNA, 19 nt, Homo sapiens
  misc_RNA (1)...(19): siRNA sense strand
cauaaauauccaccaauga

SEQ ID NO: 263355 - RNA, 19 nt, Homo sapiens
  misc_RNA (1)...(19): siRNA sense strand
gcugauauuuggaguuuug

SEQ ID NO: 263356 - RNA, 19 nt, Homo sapiens
  misc_RNA (1)...(19): siRNA sense strand
augguaaacugauaggauu

SEQ ID NO: 263357 - RNA, 19 nt, Homo sapiens
  misc_RNA (1)...(19): siRNA sense strand
ccaucauccuaauauugua

SEQ ID NO: 263358 - RNA, 19 nt, Homo sapiens
  misc_RNA (1)...(19): siRNA sense strand
gaucgggaguggagcaacu

SEQ ID NO: 263359 - RNA, 19 nt, Homo sapiens
  misc_RNA (1)...(19): siRNA sense strand
ggaacagguccgugguuau

SEQ ID NO: 263360 - RNA, 19 nt, Homo sapiens
  misc_RNA (1)...(19): siRNA sense strand
ggcuuugucuucaggauca

SEQ ID NO: 263361 - RNA, 19 nt, Homo sapiens
  misc_RNA (1)...(19): siRNA sense strand
ccaucaacagggacgauua

SEQ ID NO: 263362 - RNA, 19 nt, Homo sapiens
  misc_RNA (1)...(19): siRNA sense strand
gucaaugccaucauccuaa

SEQ ID NO: 263363 - RNA, 19 nt, Homo sapiens
  misc_RNA (1)...(19): siRNA sense strand
cuacacagccaacucaagu

SEQ ID NO: 263364 - RNA, 19 nt, Homo sapiens
  misc_RNA (1)...(19): siRNA sense strand
gaucccaaucagucuagua

SEQ ID NO: 263365 - RNA, 19 nt, Homo sapiens
  misc_RNA (1)...(19): siRNA sense strand
cagucuaguacuaagauua

SEQ ID NO: 263366 - RNA, 19 nt, Homo sapiens
  misc_RNA (1)...(19): siRNA sense strand
ggagugagauuauauagua

SEQ ID NO: 263367 - RNA, 19 nt, Homo sapiens
  misc_RNA (1)...(19): siRNA sense strand
caacagaguuccacagaug

SEQ ID NO: 263368 - RNA, 19 nt, Homo sapiens
  misc_RNA (1)...(19): siRNA sense strand
gauaagcagugccuugaaa

SEQ ID NO: 263369 - RNA, 19 nt, Homo sapiens
  misc_RNA (1)...(19): siRNA sense strand
gagcauuacuugguucaua

SEQ ID NO: 263370 - RNA, 19 nt, Homo sapiens
  misc_RNA (1)...(19): siRNA sense strand
ggagagaaauugcuggaau

SEQ ID NO: 263371 - RNA, 19 nt, Homo sapiens
  misc_RNA (1)...(19): siRNA sense strand
ggaauuguauuagauguug

SEQ ID NO: 263372 - RNA, 19 nt, Homo sapiens
  misc_RNA (1)...(19): siRNA sense strand
ucaaccagaugaugaagua

SEQ ID NO: 263373 - RNA, 19 nt, Homo sapiens
  misc_RNA (1)...(19): siRNA sense strand
gauaauggauggagcaagu

SEQ ID NO: 263374 - RNA, 19 nt, Homo sapiens
  misc_RNA (1)...(19): siRNA sense strand
gggaguagauauuguccua

SEQ ID NO: 263375 - RNA, 19 nt, Homo sapiens
  misc_RNA (1)...(19): siRNA sense strand
gaagcaagguaucauucuu

SEQ ID NO: 263376 - RNA, 19 nt, Homo sapiens
  misc_RNA (1)...(19): siRNA sense strand
gaguagauauuguccuaga

SEQ ID NO: 263377 - RNA, 19 nt, Homo sapiens
  misc_RNA (1)...(19): siRNA sense strand
ccagauagccacugccuuu

SEQ ID NO: 263378 - RNA, 19 nt, Homo sapiens
  misc_RNA (1)...(19): siRNA sense strand
ggaagcagcaggaagcauu

SEQ ID NO: 263379 - RNA, 19 nt, Homo sapiens
  misc_RNA (1)...(19): siRNA sense strand
gcaagugcauuugguacaa

SEQ ID NO: 263380 - RNA, 19 nt, Homo sapiens
  misc_RNA (1)...(19): siRNA sense strand
uuccacagaugaagaaaua

SEQ ID NO: 263381 - RNA, 19 nt, Homo sapiens
  misc_RNA (1)...(19): siRNA sense strand
ccagauaaauacaaagcuu

SEQ ID NO: 263382 - RNA, 19 nt, Homo sapiens
  misc_RNA (1)...(19): siRNA sense strand
ggauggagcaagugcauuu

SEQ ID NO: 263383 - RNA, 19 nt, Homo sapiens
  misc_RNA (1)...(19): siRNA sense strand
gaggauaacuuugugaaac

SEQ ID NO: 263384 - RNA, 19 nt, Homo sapiens
  misc_RNA (1)...(19): siRNA sense strand
gauaucaucacacuucuug

SEQ ID NO: 263385 - RNA, 19 nt, Homo sapiens
  misc_RNA (1)...(19): siRNA sense strand
cuacaacuacuaccacaua

SEQ ID NO: 263386 - RNA, 19 nt, Homo sapiens
  misc_RNA (1)...(19): siRNA sense strand
gcaugcagccuugaagaua

SEQ ID NO: 263387 - RNA, 19 nt, Homo sapiens
  misc_RNA (1)...(19): siRNA sense strand
ugaagacccuggacuuugu

SEQ ID NO: 263388 - RNA, 19 nt, Homo sapiens
  misc_RNA (1)...(19): siRNA sense strand
gaaagcuguuuggaagaaa

SEQ ID NO: 263389 - RNA, 19 nt, Homo sapiens
  misc_RNA (1)...(19): siRNA sense strand
ugaaagcuguuuggaagaa

SEQ ID NO: 263390 - RNA, 19 nt, Homo sapiens
  misc_RNA (1)...(19): siRNA sense strand
caugcagccuugaagauaa

SEQ ID NO: 263391 - RNA, 19 nt, Homo sapiens
  misc_RNA (1)...(19): siRNA sense strand
uggcagaaaugaagaugaa

SEQ ID NO: 263392 - RNA, 19 nt, Homo sapiens
  misc_RNA (1)...(19): siRNA sense strand
gcagugccuugaaagauuc

SEQ ID NO: 263393 - RNA, 19 nt, Homo sapiens
  misc_RNA (1)...(19): siRNA sense strand
ugauguaucuaaugggaaa

SEQ ID NO: 263394 - RNA, 19 nt, Homo sapiens
  misc_RNA (1)...(19): siRNA sense strand
uagcuuuccugaaugauga

SEQ ID NO: 263395 - RNA, 19 nt, Homo sapiens
  misc_RNA (1)...(19): siRNA sense strand
caagguaucauucuuucaa

SEQ ID NO: 263396 - RNA, 19 nt, Homo sapiens
  misc_RNA (1)...(19): siRNA sense strand
ucucaucucucuccuggaa

SEQ ID NO: 263397 - RNA, 19 nt, Homo sapiens
  misc_RNA (1)...(19): siRNA sense strand
auacagcucugcauuaucu

SEQ ID NO: 263398 - RNA, 19 nt, Homo sapiens
  misc_RNA (1)...(19): siRNA sense strand
cuauacagcucugcauuau

SEQ ID NO: 263399 - RNA, 19 nt, Homo sapiens
  misc_RNA (1)...(19): siRNA sense strand
uagaggagccaaagugauu

SEQ ID NO: 263400 - RNA, 19 nt, Homo sapiens
  misc_RNA (1)...(19): siRNA sense strand
ucaguuagcacaucauaga

SEQ ID NO: 263401 - RNA, 19 nt, Homo sapiens
  misc_RNA (1)...(19): siRNA sense strand
gaugaaguaguuggaauuu

SEQ ID NO: 263402 - RNA, 19 nt, Homo sapiens
  misc_RNA (1)...(19): siRNA sense strand
ggagcaagugcauuuggua

SEQ ID NO: 263403 - RNA, 19 nt, Homo sapiens
  misc_RNA (1)...(19): siRNA sense strand
aacguuagcuuuccugaau

SEQ ID NO: 263404 - RNA, 19 nt, Homo sapiens
  misc_RNA (1)...(19): siRNA sense strand
gagccaaagugauuucaac

SEQ ID NO: 263405 - RNA, 19 nt, Homo sapiens
  misc_RNA (1)...(19): siRNA sense strand
ccuauacagcucugcauua

SEQ ID NO: 263406 - RNA, 19 nt, Homo sapiens
  misc_RNA (1)...(19): siRNA sense strand
ggauaacuuugugaaacuu

SEQ ID NO: 263407 - RNA, 19 nt, Homo sapiens
  misc_RNA (1)...(19): siRNA sense strand
ugagccagauaaauacaaa

SEQ ID NO: 263408 - RNA, 19 nt, Homo sapiens
  misc_RNA (1)...(19): siRNA sense strand
gaugaugaaccagcuguaa

SEQ ID NO: 263409 - RNA, 19 nt, Homo sapiens
  misc_RNA (1)...(19): siRNA sense strand
ccacauaaacaugauauca

SEQ ID NO: 263410 - RNA, 19 nt, Homo sapiens
  misc_RNA (1)...(19): siRNA sense strand
ugaaccagcuguaaaacua

SEQ ID NO: 263411 - RNA, 19 nt, Homo sapiens
  misc_RNA (1)...(19): siRNA sense strand
ugaaguaguuggaauuuug

SEQ ID NO: 263412 - RNA, 19 nt, Homo sapiens
  misc_RNA (1)...(19): siRNA sense strand
ggaggccacuggguaacaa

SEQ ID NO: 263413 - RNA, 19 nt, Homo sapiens
  misc_RNA (1)...(19): siRNA sense strand
ccuagaugcuggagugaga

SEQ ID NO: 263414 - RNA, 19 nt, Homo sapiens
  misc_RNA (1)...(19): siRNA sense strand
uuagaguacaugagcauua

SEQ ID NO: 263415 - RNA, 19 nt, Homo sapiens
  misc_RNA (1)...(19): siRNA sense strand
ccucaagggagcaacguua

SEQ ID NO: 263416 - RNA, 19 nt, Homo sapiens
  misc_RNA (1)...(19): siRNA sense strand
uaguaaagaugaugaacca

SEQ ID NO: 263417 - RNA, 19 nt, Homo sapiens
  misc_RNA (1)...(19): siRNA sense strand
uuacagaggauaacuuugu

SEQ ID NO: 263418 - RNA, 19 nt, Homo sapiens
  misc_RNA (1)...(19): siRNA sense strand
guagauauuguccuagaug

SEQ ID NO: 263419 - RNA, 19 nt, Homo sapiens
  misc_RNA (1)...(19): siRNA sense strand
caacuacuaccacauaaac

SEQ ID NO: 263420 - RNA, 19 nt, Homo sapiens
  misc_RNA (1)...(19): siRNA sense strand
agcauuacuugguucauaa

SEQ ID NO: 263421 - RNA, 19 nt, Homo sapiens
  misc_RNA (1)...(19): siRNA sense strand
uacaacuacuaccacauaa

SEQ ID NO: 263422 - RNA, 19 nt, Homo sapiens
  misc_RNA (1)...(19): siRNA sense strand
gcuggagugagauuauaua

SEQ ID NO: 263423 - RNA, 19 nt, Homo sapiens
  misc_RNA (1)...(19): siRNA sense strand
ugcauuaucuuucucaucu

SEQ ID NO: 263424 - RNA, 19 nt, Homo sapiens
  misc_RNA (1)...(19): siRNA sense strand
guuaaagcuugugcucuga

SEQ ID NO: 263425 - RNA, 19 nt, Homo sapiens
  misc_RNA (1)...(19): siRNA sense strand
ugauugauguaucuaaugg

SEQ ID NO: 263426 - RNA, 19 nt, Homo sapiens
  misc_RNA (1)...(19): siRNA sense strand
ccaacagaguuccacagau

SEQ ID NO: 263427 - RNA, 19 nt, Homo sapiens
  misc_RNA (1)...(19): siRNA sense strand
cguuagcuuuccugaauga

SEQ ID NO: 263428 - RNA, 19 nt, Homo sapiens
  misc_RNA (1)...(19): siRNA sense strand
aaagugauuucaacagcau

SEQ ID NO: 263429 - RNA, 19 nt, Homo sapiens
  misc_RNA (1)...(19): siRNA sense strand
cauagaggagccaaaguga

SEQ ID NO: 263430 - RNA, 19 nt, Homo sapiens
  misc_RNA (1)...(19): siRNA sense strand
aagcaagguaucauucuuu

SEQ ID NO: 263431 - RNA, 19 nt, Homo sapiens
  misc_RNA (1)...(19): siRNA sense strand
caacagggaaaauaucuuu

SEQ ID NO: 263432 - RNA, 19 nt, Homo sapiens
  misc_RNA (1)...(19): siRNA sense strand
agcagugccuugaaagauu

SEQ ID NO: 263433 - RNA, 19 nt, Homo sapiens
  misc_RNA (1)...(19): siRNA sense strand
gcauuugguacaauagcua

SEQ ID NO: 263434 - RNA, 19 nt, Homo sapiens
  misc_RNA (1)...(19): siRNA sense strand
caagugcauuugguacaau

SEQ ID NO: 263435 - RNA, 19 nt, Homo sapiens
  misc_RNA (1)...(19): siRNA sense strand
ggaagcaagguaucauucu

SEQ ID NO: 263436 - RNA, 19 nt, Homo sapiens
  misc_RNA (1)...(19): siRNA sense strand
gauguuggaagcaagguau

SEQ ID NO: 263437 - RNA, 19 nt, Homo sapiens
  misc_RNA (1)...(19): siRNA sense strand
uugugaaguuguuagagua

SEQ ID NO: 263438 - RNA, 19 nt, Homo sapiens
  misc_RNA (1)...(19): siRNA sense strand
caaauguacaacagggaaa

SEQ ID NO: 263439 - RNA, 19 nt, Homo sapiens
  misc_RNA (1)...(19): siRNA sense strand
aagaaaaccuucaguugga

SEQ ID NO: 263440 - RNA, 19 nt, Homo sapiens
  misc_RNA (1)...(19): siRNA sense strand
aagugcauuugguacaaua

SEQ ID NO: 263441 - RNA, 19 nt, Homo sapiens
  misc_RNA (1)...(19): siRNA sense strand
gcauuacuugguucauaaa

SEQ ID NO: 263442 - RNA, 19 nt, Homo sapiens
  misc_RNA (1)...(19): siRNA sense strand
acaugagcauuacuugguu

SEQ ID NO: 263443 - RNA, 19 nt, Homo sapiens
  misc_RNA (1)...(19): siRNA sense strand
gaagcagcaggaagcauuc

SEQ ID NO: 263444 - RNA, 19 nt, Homo sapiens
  misc_RNA (1)...(19): siRNA sense strand
uagaguacaugagcauuac

SEQ ID NO: 263445 - RNA, 19 nt, Homo sapiens
  misc_RNA (1)...(19): siRNA sense strand
caacguuagcuuuccugaa

SEQ ID NO: 263446 - RNA, 19 nt, Homo sapiens
  misc_RNA (1)...(19): siRNA sense strand
gccacuggguaacaacaga

SEQ ID NO: 263447 - RNA, 19 nt, Homo sapiens
  misc_RNA (1)...(19): siRNA sense strand
gaugcuggagugagauuau

SEQ ID NO: 263448 - RNA, 19 nt, Homo sapiens
  misc_RNA (1)...(19): siRNA sense strand
uaagcagugccuugaaaga

SEQ ID NO: 263449 - RNA, 19 nt, Homo sapiens
  misc_RNA (1)...(19): siRNA sense strand
ucauagaggagccaaagug

SEQ ID NO: 263450 - RNA, 19 nt, Homo sapiens
  misc_RNA (1)...(19): siRNA sense strand
gcagaaaugaagaugaaaa

SEQ ID NO: 263451 - RNA, 19 nt, Homo sapiens
  misc_RNA (1)...(19): siRNA sense strand
uugcuggaauuguauuaga

SEQ ID NO: 263452 - RNA, 19 nt, Homo sapiens
  misc_RNA (1)...(19): siRNA sense strand
ugaugaaguaguuggaauu

SEQ ID NO: 263453 - RNA, 19 nt, Homo sapiens
  misc_RNA (1)...(19): siRNA sense strand
uauuagauguuggaagcaa

SEQ ID NO: 263454 - RNA, 19 nt, Homo sapiens
  misc_RNA (1)...(19): siRNA sense strand
cagaggauaacuuugugaa

SEQ ID NO: 263455 - RNA, 19 nt, Homo sapiens
  misc_RNA (1)...(19): siRNA sense strand
gaugaugaaguaguuggaa

SEQ ID NO: 263456 - RNA, 19 nt, Homo sapiens
  misc_RNA (1)...(19): siRNA sense strand
gggagcaacguuagcuuuc

SEQ ID NO: 263457 - RNA, 19 nt, Homo sapiens
  misc_RNA (1)...(19): siRNA sense strand
guuggaggccacuggguaa

SEQ ID NO: 263458 - RNA, 19 nt, Homo sapiens
  misc_RNA (1)...(19): siRNA sense strand
uacagaggauaacuuugug

SEQ ID NO: 263459 - RNA, 19 nt, Homo sapiens
  misc_RNA (1)...(19): siRNA sense strand
gauggagugcgugccuaua

SEQ ID NO: 263460 - RNA, 19 nt, Homo sapiens
  misc_RNA (1)...(19): siRNA sense strand
ggauggagugcgugccuau

SEQ ID NO: 263461 - RNA, 19 nt, Homo sapiens
  misc_RNA (1)...(19): siRNA sense strand
gaaguuguuagaguacaug

SEQ ID NO: 263462 - RNA, 19 nt, Homo sapiens
  misc_RNA (1)...(19): siRNA sense strand
gagcaacguuagcuuuccu

SEQ ID NO: 263463 - RNA, 19 nt, Homo sapiens
  misc_RNA (1)...(19): siRNA sense strand
gagugauugauguaucuaa

SEQ ID NO: 263464 - RNA, 19 nt, Homo sapiens
  misc_RNA (1)...(19): siRNA sense strand
ccgagugauugauguaucu

SEQ ID NO: 263465 - RNA, 19 nt, Homo sapiens
  misc_RNA (1)...(19): siRNA sense strand
gaguuccacagaugaagaa

SEQ ID NO: 263466 - RNA, 19 nt, Homo sapiens
  misc_RNA (1)...(19): siRNA sense strand
caacagaguuccacagaug

SEQ ID NO: 263467 - RNA, 19 nt, Homo sapiens
  misc_RNA (1)...(19): siRNA sense strand
gauaagcagugccuugaaa

SEQ ID NO: 263468 - RNA, 19 nt, Homo sapiens
  misc_RNA (1)...(19): siRNA sense strand
gagcauuacuugguucaua

SEQ ID NO: 263469 - RNA, 19 nt, Homo sapiens
  misc_RNA (1)...(19): siRNA sense strand
ggagagaaauugcuggaau

SEQ ID NO: 263470 - RNA, 19 nt, Homo sapiens
  misc_RNA (1)...(19): siRNA sense strand
ggaauuguauuagauguug

SEQ ID NO: 263471 - RNA, 19 nt, Homo sapiens
  misc_RNA (1)...(19): siRNA sense strand
ucaaccagaugaugaagua

SEQ ID NO: 263472 - RNA, 19 nt, Homo sapiens
  misc_RNA (1)...(19): siRNA sense strand
gauaauggauggagcaagu

SEQ ID NO: 263473 - RNA, 19 nt, Homo sapiens
  misc_RNA (1)...(19): siRNA sense strand
gaagcaagguaucauucuu

SEQ ID NO: 263474 - RNA, 19 nt, Homo sapiens
  misc_RNA (1)...(19): siRNA sense strand
ggaagcagcaggaagcauu

SEQ ID NO: 263475 - RNA, 19 nt, Homo sapiens
  misc_RNA (1)...(19): siRNA sense strand
gcaagugcauuugguacaa

SEQ ID NO: 263476 - RNA, 19 nt, Homo sapiens
  misc_RNA (1)...(19): siRNA sense strand
uuccacagaugaagaaaua

SEQ ID NO: 263477 - RNA, 19 nt, Homo sapiens
  misc_RNA (1)...(19): siRNA sense strand
ccagauaaauacaaagcuu

SEQ ID NO: 263478 - RNA, 19 nt, Homo sapiens
  misc_RNA (1)...(19): siRNA sense strand
ggauggagcaagugcauuu

SEQ ID NO: 263479 - RNA, 19 nt, Homo sapiens
  misc_RNA (1)...(19): siRNA sense strand
gaggauaacuuugugaaac

SEQ ID NO: 263480 - RNA, 19 nt, Homo sapiens
  misc_RNA (1)...(19): siRNA sense strand
gcaugcagccuugaagaua

SEQ ID NO: 263481 - RNA, 19 nt, Homo sapiens
  misc_RNA (1)...(19): siRNA sense strand
ugaagacccuggacuuugu

SEQ ID NO: 263482 - RNA, 19 nt, Homo sapiens
  misc_RNA (1)...(19): siRNA sense strand
caugcagccuugaagauaa

SEQ ID NO: 263483 - RNA, 19 nt, Homo sapiens
  misc_RNA (1)...(19): siRNA sense strand
uggcagaaaugaagaugaa

SEQ ID NO: 263484 - RNA, 19 nt, Homo sapiens
  misc_RNA (1)...(19): siRNA sense strand
gcagugccuugaaagauuc

SEQ ID NO: 263485 - RNA, 19 nt, Homo sapiens
  misc_RNA (1)...(19): siRNA sense strand
caagguaucauucuuucaa

SEQ ID NO: 263486 - RNA, 19 nt, Homo sapiens
  misc_RNA (1)...(19): siRNA sense strand
ucucaucucucuccuggaa

SEQ ID NO: 263487 - RNA, 19 nt, Homo sapiens
  misc_RNA (1)...(19): siRNA sense strand
auacagcucugcauuaucu

SEQ ID NO: 263488 - RNA, 19 nt, Homo sapiens
  misc_RNA (1)...(19): siRNA sense strand
cuauacagcucugcauuau

SEQ ID NO: 263489 - RNA, 19 nt, Homo sapiens
  misc_RNA (1)...(19): siRNA sense strand
uagaggagccaaagugauu

SEQ ID NO: 263490 - RNA, 19 nt, Homo sapiens
  misc_RNA (1)...(19): siRNA sense strand
ucaguuagcacaucauaga

SEQ ID NO: 263491 - RNA, 19 nt, Homo sapiens
  misc_RNA (1)...(19): siRNA sense strand
gaugaaguaguuggaauuu

SEQ ID NO: 263492 - RNA, 19 nt, Homo sapiens
  misc_RNA (1)...(19): siRNA sense strand
ggagcaagugcauuuggua

SEQ ID NO: 263493 - RNA, 19 nt, Homo sapiens
  misc_RNA (1)...(19): siRNA sense strand
gagccaaagugauuucaac

SEQ ID NO: 263494 - RNA, 19 nt, Homo sapiens
  misc_RNA (1)...(19): siRNA sense strand
ugagccagauaaauacaaa

SEQ ID NO: 263495 - RNA, 19 nt, Homo sapiens
  misc_RNA (1)...(19): siRNA sense strand
ccuauacagcucugcauua

SEQ ID NO: 263496 - RNA, 19 nt, Homo sapiens
  misc_RNA (1)...(19): siRNA sense strand
ggauaacuuugugaaacuu

SEQ ID NO: 263497 - RNA, 19 nt, Homo sapiens
  misc_RNA (1)...(19): siRNA sense strand
ugaaguaguuggaauuuug

SEQ ID NO: 263498 - RNA, 19 nt, Homo sapiens
  misc_RNA (1)...(19): siRNA sense strand
uuacagaggauaacuuugu

SEQ ID NO: 263499 - RNA, 19 nt, Homo sapiens
  misc_RNA (1)...(19): siRNA sense strand
uuagaguacaugagcauua

SEQ ID NO: 263500 - RNA, 19 nt, Homo sapiens
  misc_RNA (1)...(19): siRNA sense strand
agcauuacuugguucauaa

SEQ ID NO: 263501 - RNA, 19 nt, Homo sapiens
  misc_RNA (1)...(19): siRNA sense strand
ugcauuaucuuucucaucu

SEQ ID NO: 263502 - RNA, 19 nt, Homo sapiens
  misc_RNA (1)...(19): siRNA sense strand
guuaaagcuugugcucuga

SEQ ID NO: 263503 - RNA, 19 nt, Homo sapiens
  misc_RNA (1)...(19): siRNA sense strand
ccaacagaguuccacagau

SEQ ID NO: 263504 - RNA, 19 nt, Homo sapiens
  misc_RNA (1)...(19): siRNA sense strand
aaagugauuucaacagcau

SEQ ID NO: 263505 - RNA, 19 nt, Homo sapiens
  misc_RNA (1)...(19): siRNA sense strand
cauagaggagccaaaguga

SEQ ID NO: 263506 - RNA, 19 nt, Homo sapiens
  misc_RNA (1)...(19): siRNA sense strand
aagcaagguaucauucuuu

SEQ ID NO: 263507 - RNA, 19 nt, Homo sapiens
  misc_RNA (1)...(19): siRNA sense strand
agcagugccuugaaagauu

SEQ ID NO: 263508 - RNA, 19 nt, Homo sapiens
  misc_RNA (1)...(19): siRNA sense strand
gcauuugguacaauagcua

SEQ ID NO: 263509 - RNA, 19 nt, Homo sapiens
  misc_RNA (1)...(19): siRNA sense strand
caagugcauuugguacaau

SEQ ID NO: 263510 - RNA, 19 nt, Homo sapiens
  misc_RNA (1)...(19): siRNA sense strand
gauguuggaagcaagguau

SEQ ID NO: 263511 - RNA, 19 nt, Homo sapiens
  misc_RNA (1)...(19): siRNA sense strand
ggaagcaagguaucauucu

SEQ ID NO: 263512 - RNA, 19 nt, Homo sapiens
  misc_RNA (1)...(19): siRNA sense strand
uugugaaguuguuagagua

SEQ ID NO: 263513 - RNA, 19 nt, Homo sapiens
  misc_RNA (1)...(19): siRNA sense strand
aagugcauuugguacaaua

SEQ ID NO: 263514 - RNA, 19 nt, Homo sapiens
  misc_RNA (1)...(19): siRNA sense strand
gcauuacuugguucauaaa

SEQ ID NO: 263515 - RNA, 19 nt, Homo sapiens
  misc_RNA (1)...(19): siRNA sense strand
acaugagcauuacuugguu

SEQ ID NO: 263516 - RNA, 19 nt, Homo sapiens
  misc_RNA (1)...(19): siRNA sense strand
gaagcagcaggaagcauuc

SEQ ID NO: 263517 - RNA, 19 nt, Homo sapiens
  misc_RNA (1)...(19): siRNA sense strand
uagaguacaugagcauuac

SEQ ID NO: 263518 - RNA, 19 nt, Homo sapiens
  misc_RNA (1)...(19): siRNA sense strand
uaagcagugccuugaaaga

SEQ ID NO: 263519 - RNA, 19 nt, Homo sapiens
  misc_RNA (1)...(19): siRNA sense strand
ucauagaggagccaaagug

SEQ ID NO: 263520 - RNA, 19 nt, Homo sapiens
  misc_RNA (1)...(19): siRNA sense strand
gcagaaaugaagaugaaaa

SEQ ID NO: 263521 - RNA, 19 nt, Homo sapiens
  misc_RNA (1)...(19): siRNA sense strand
uugcuggaauuguauuaga

SEQ ID NO: 263522 - RNA, 19 nt, Homo sapiens
  misc_RNA (1)...(19): siRNA sense strand
uauuagauguuggaagcaa

SEQ ID NO: 263523 - RNA, 19 nt, Homo sapiens
  misc_RNA (1)...(19): siRNA sense strand
cagaggauaacuuugugaa

SEQ ID NO: 263524 - RNA, 19 nt, Homo sapiens
  misc_RNA (1)...(19): siRNA sense strand
ugaugaaguaguuggaauu

SEQ ID NO: 263525 - RNA, 19 nt, Homo sapiens
  misc_RNA (1)...(19): siRNA sense strand
gaugaugaaguaguuggaa

SEQ ID NO: 263526 - RNA, 19 nt, Homo sapiens
  misc_RNA (1)...(19): siRNA sense strand
uacagaggauaacuuugug

SEQ ID NO: 263527 - RNA, 19 nt, Homo sapiens
  misc_RNA (1)...(19): siRNA sense strand
gauggagugcgugccuaua

SEQ ID NO: 263528 - RNA, 19 nt, Homo sapiens
  misc_RNA (1)...(19): siRNA sense strand
ggauggagugcgugccuau

SEQ ID NO: 263529 - RNA, 19 nt, Homo sapiens
  misc_RNA (1)...(19): siRNA sense strand
gaaguuguuagaguacaug

SEQ ID NO: 263530 - RNA, 19 nt, Homo sapiens
  misc_RNA (1)...(19): siRNA sense strand
gaguuccacagaugaagaa

SEQ ID NO: 263531 - RNA, 19 nt, Homo sapiens
  misc_RNA (1)...(19): siRNA sense strand
gcaagguaucauucuuuca

SEQ ID NO: 263532 - RNA, 19 nt, Homo sapiens
  misc_RNA (1)...(19): siRNA sense strand
aagauaagcagugccuuga

SEQ ID NO: 263533 - RNA, 19 nt, Homo sapiens
  misc_RNA (1)...(19): siRNA sense strand
cagcaugcagccuugaaga

SEQ ID NO: 263534 - RNA, 19 nt, Homo sapiens
  misc_RNA (1)...(19): siRNA sense strand
gcuggaauuguauuagaug

SEQ ID NO: 263535 - RNA, 19 nt, Homo sapiens
  misc_RNA (1)...(19): siRNA sense strand
ugaaguuguuagaguacau

SEQ ID NO: 263536 - RNA, 19 nt, Homo sapiens
  misc_RNA (1)...(19): siRNA sense strand
accagaugaugaaguaguu

SEQ ID NO: 263537 - RNA, 19 nt, Homo sapiens
  misc_RNA (1)...(19): siRNA sense strand
ccacagaugaagaaauaac

SEQ ID NO: 263538 - RNA, 19 nt, Homo sapiens
  misc_RNA (1)...(19): siRNA sense strand
aggcuuauauuuccaacag

SEQ ID NO: 263539 - RNA, 19 nt, Homo sapiens
  misc_RNA (1)...(19): siRNA sense strand
cauuaucuuucucaucucu

SEQ ID NO: 263540 - RNA, 19 nt, Homo sapiens
  misc_RNA (1)...(19): siRNA sense strand
gaagacccuggacuuugug

SEQ ID NO: 263541 - RNA, 19 nt, Homo sapiens
  misc_RNA (1)...(19): siRNA sense strand
ucugaagacccuggacuuu

SEQ ID NO: 263542 - RNA, 19 nt, Homo sapiens
  misc_RNA (1)...(19): siRNA sense strand
agcaagguaucauucuuuc

SEQ ID NO: 263543 - RNA, 19 nt, Homo sapiens
  misc_RNA (1)...(19): siRNA sense strand
ggagccaaagugauuucaa

SEQ ID NO: 263544 - RNA, 19 nt, Homo sapiens
  misc_RNA (1)...(19): siRNA sense strand
gaggagccaaagugauuuc

SEQ ID NO: 263545 - RNA, 19 nt, Homo sapiens
  misc_RNA (1)...(19): siRNA sense strand
caucauagaggagccaaag

SEQ ID NO: 263546 - RNA, 19 nt, Homo sapiens
  misc_RNA (1)...(19): siRNA sense strand
cuauucaguuagcacauca

SEQ ID NO: 263547 - RNA, 19 nt, Homo sapiens
  misc_RNA (1)...(19): siRNA sense strand
aggauaacuuugugaaacu

SEQ ID NO: 263548 - RNA, 19 nt, Homo sapiens
  misc_RNA (1)...(19): siRNA sense strand
uuugugaaguuguuagagu

SEQ ID NO: 263549 - RNA, 19 nt, Homo sapiens
  misc_RNA (1)...(19): siRNA sense strand
agaggauaacuuugugaaa

SEQ ID NO: 263550 - RNA, 19 nt, Homo sapiens
  misc_RNA (1)...(19): siRNA sense strand
caacagcaugcagccuuga

SEQ ID NO: 263551 - RNA, 19 nt, Homo sapiens
  misc_RNA (1)...(19): siRNA sense strand
gauaacuuugugaaacuuc

SEQ ID NO: 263552 - RNA, 19 nt, Homo sapiens
  misc_RNA (1)...(19): siRNA sense strand
uacaugagcauuacuuggu

SEQ ID NO: 263553 - RNA, 19 nt, Homo sapiens
  misc_RNA (1)...(19): siRNA sense strand
cugaagacccuggacuuug

SEQ ID NO: 263554 - RNA, 19 nt, Homo sapiens
  misc_RNA (1)...(19): siRNA sense strand
caacagaguuccacagaug

SEQ ID NO: 263555 - RNA, 19 nt, Homo sapiens
  misc_RNA (1)...(19): siRNA sense strand
gauaagcagugccuugaaa

SEQ ID NO: 263556 - RNA, 19 nt, Homo sapiens
  misc_RNA (1)...(19): siRNA sense strand
gagcauuacuugguucaua

SEQ ID NO: 263557 - RNA, 19 nt, Homo sapiens
  misc_RNA (1)...(19): siRNA sense strand
ggagagaaauugcuggaau

SEQ ID NO: 263558 - RNA, 19 nt, Homo sapiens
  misc_RNA (1)...(19): siRNA sense strand
ggaauuguauuagauguug

SEQ ID NO: 263559 - RNA, 19 nt, Homo sapiens
  misc_RNA (1)...(19): siRNA sense strand
ucaaccagaugaugaagua

SEQ ID NO: 263560 - RNA, 19 nt, Homo sapiens
  misc_RNA (1)...(19): siRNA sense strand
gauaauggauggagcaagu

SEQ ID NO: 263561 - RNA, 19 nt, Homo sapiens
  misc_RNA (1)...(19): siRNA sense strand
gaagcaagguaucauucuu

SEQ ID NO: 263562 - RNA, 19 nt, Homo sapiens
  misc_RNA (1)...(19): siRNA sense strand
ggaagcagcaggaagcauu

SEQ ID NO: 263563 - RNA, 19 nt, Homo sapiens
  misc_RNA (1)...(19): siRNA sense strand
gcaagugcauuugguacaa

SEQ ID NO: 263564 - RNA, 19 nt, Homo sapiens
  misc_RNA (1)...(19): siRNA sense strand
uuccacagaugaagaaaua

SEQ ID NO: 263565 - RNA, 19 nt, Homo sapiens
  misc_RNA (1)...(19): siRNA sense strand
ccagauaaauacaaagcuu

SEQ ID NO: 263566 - RNA, 19 nt, Homo sapiens
  misc_RNA (1)...(19): siRNA sense strand
ggauggagcaagugcauuu

SEQ ID NO: 263567 - RNA, 19 nt, Homo sapiens
  misc_RNA (1)...(19): siRNA sense strand
gaggauaacuuugugaaac

SEQ ID NO: 263568 - RNA, 19 nt, Homo sapiens
  misc_RNA (1)...(19): siRNA sense strand
gcaugcagccuugaagaua

SEQ ID NO: 263569 - RNA, 19 nt, Homo sapiens
  misc_RNA (1)...(19): siRNA sense strand
ugaagacccuggacuuugu

SEQ ID NO: 263570 - RNA, 19 nt, Homo sapiens
  misc_RNA (1)...(19): siRNA sense strand
caugcagccuugaagauaa

SEQ ID NO: 263571 - RNA, 19 nt, Homo sapiens
  misc_RNA (1)...(19): siRNA sense strand
uggcagaaaugaagaugaa

SEQ ID NO: 263572 - RNA, 19 nt, Homo sapiens
  misc_RNA (1)...(19): siRNA sense strand
gcagugccuugaaagauuc

SEQ ID NO: 263573 - RNA, 19 nt, Homo sapiens
  misc_RNA (1)...(19): siRNA sense strand
caagguaucauucuuucaa

SEQ ID NO: 263574 - RNA, 19 nt, Homo sapiens
  misc_RNA (1)...(19): siRNA sense strand
ucucaucucucuccuggaa

SEQ ID NO: 263575 - RNA, 19 nt, Homo sapiens
  misc_RNA (1)...(19): siRNA sense strand
auacagcucugcauuaucu

SEQ ID NO: 263576 - RNA, 19 nt, Homo sapiens
  misc_RNA (1)...(19): siRNA sense strand
cuauacagcucugcauuau

SEQ ID NO: 263577 - RNA, 19 nt, Homo sapiens
  misc_RNA (1)...(19): siRNA sense strand
uagaggagccaaagugauu

SEQ ID NO: 263578 - RNA, 19 nt, Homo sapiens
  misc_RNA (1)...(19): siRNA sense strand
ucaguuagcacaucauaga

SEQ ID NO: 263579 - RNA, 19 nt, Homo sapiens
  misc_RNA (1)...(19): siRNA sense strand
gaugaaguaguuggaauuu

SEQ ID NO: 263580 - RNA, 19 nt, Homo sapiens
  misc_RNA (1)...(19): siRNA sense strand
ggagcaagugcauuuggua

SEQ ID NO: 263581 - RNA, 19 nt, Homo sapiens
  misc_RNA (1)...(19): siRNA sense strand
gagccaaagugauuucaac

SEQ ID NO: 263582 - RNA, 19 nt, Homo sapiens
  misc_RNA (1)...(19): siRNA sense strand
ugagccagauaaauacaaa

SEQ ID NO: 263583 - RNA, 19 nt, Homo sapiens
  misc_RNA (1)...(19): siRNA sense strand
ccuauacagcucugcauua

SEQ ID NO: 263584 - RNA, 19 nt, Homo sapiens
  misc_RNA (1)...(19): siRNA sense strand
ggauaacuuugugaaacuu

SEQ ID NO: 263585 - RNA, 19 nt, Homo sapiens
  misc_RNA (1)...(19): siRNA sense strand
ugaaguaguuggaauuuug

SEQ ID NO: 263586 - RNA, 19 nt, Homo sapiens
  misc_RNA (1)...(19): siRNA sense strand
uuacagaggauaacuuugu

SEQ ID NO: 263587 - RNA, 19 nt, Homo sapiens
  misc_RNA (1)...(19): siRNA sense strand
uuagaguacaugagcauua

SEQ ID NO: 263588 - RNA, 19 nt, Homo sapiens
  misc_RNA (1)...(19): siRNA sense strand
agcauuacuugguucauaa

SEQ ID NO: 263589 - RNA, 19 nt, Homo sapiens
  misc_RNA (1)...(19): siRNA sense strand
ugcauuaucuuucucaucu

SEQ ID NO: 263590 - RNA, 19 nt, Homo sapiens
  misc_RNA (1)...(19): siRNA sense strand
guuaaagcuugugcucuga

SEQ ID NO: 263591 - RNA, 19 nt, Homo sapiens
  misc_RNA (1)...(19): siRNA sense strand
ccaacagaguuccacagau

SEQ ID NO: 263592 - RNA, 19 nt, Homo sapiens
  misc_RNA (1)...(19): siRNA sense strand
aaagugauuucaacagcau

SEQ ID NO: 263593 - RNA, 19 nt, Homo sapiens
  misc_RNA (1)...(19): siRNA sense strand
cauagaggagccaaaguga

SEQ ID NO: 263594 - RNA, 19 nt, Homo sapiens
  misc_RNA (1)...(19): siRNA sense strand
aagcaagguaucauucuuu

SEQ ID NO: 263595 - RNA, 19 nt, Homo sapiens
  misc_RNA (1)...(19): siRNA sense strand
agcagugccuugaaagauu

SEQ ID NO: 263596 - RNA, 19 nt, Homo sapiens
  misc_RNA (1)...(19): siRNA sense strand
gcauuugguacaauagcua

SEQ ID NO: 263597 - RNA, 19 nt, Homo sapiens
  misc_RNA (1)...(19): siRNA sense strand
caagugcauuugguacaau

SEQ ID NO: 263598 - RNA, 19 nt, Homo sapiens
  misc_RNA (1)...(19): siRNA sense strand
gauguuggaagcaagguau

SEQ ID NO: 263599 - RNA, 19 nt, Homo sapiens
  misc_RNA (1)...(19): siRNA sense strand
ggaagcaagguaucauucu

SEQ ID NO: 263600 - RNA, 19 nt, Homo sapiens
  misc_RNA (1)...(19): siRNA sense strand
uugugaaguuguuagagua

SEQ ID NO: 263601 - RNA, 19 nt, Homo sapiens
  misc_RNA (1)...(19): siRNA sense strand
aagugcauuugguacaaua

SEQ ID NO: 263602 - RNA, 19 nt, Homo sapiens
  misc_RNA (1)...(19): siRNA sense strand
gcauuacuugguucauaaa

SEQ ID NO: 263603 - RNA, 19 nt, Homo sapiens
  misc_RNA (1)...(19): siRNA sense strand
acaugagcauuacuugguu

SEQ ID NO: 263604 - RNA, 19 nt, Homo sapiens
  misc_RNA (1)...(19): siRNA sense strand
gaagcagcaggaagcauuc

SEQ ID NO: 263605 - RNA, 19 nt, Homo sapiens
  misc_RNA (1)...(19): siRNA sense strand
uagaguacaugagcauuac

SEQ ID NO: 263606 - RNA, 19 nt, Homo sapiens
  misc_RNA (1)...(19): siRNA sense strand
uaagcagugccuugaaaga

SEQ ID NO: 263607 - RNA, 19 nt, Homo sapiens
  misc_RNA (1)...(19): siRNA sense strand
ucauagaggagccaaagug

SEQ ID NO: 263608 - RNA, 19 nt, Homo sapiens
  misc_RNA (1)...(19): siRNA sense strand
gcagaaaugaagaugaaaa

SEQ ID NO: 263609 - RNA, 19 nt, Homo sapiens
  misc_RNA (1)...(19): siRNA sense strand
uugcuggaauuguauuaga

SEQ ID NO: 263610 - RNA, 19 nt, Homo sapiens
  misc_RNA (1)...(19): siRNA sense strand
uauuagauguuggaagcaa

SEQ ID NO: 263611 - RNA, 19 nt, Homo sapiens
  misc_RNA (1)...(19): siRNA sense strand
cagaggauaacuuugugaa

SEQ ID NO: 263612 - RNA, 19 nt, Homo sapiens
  misc_RNA (1)...(19): siRNA sense strand
ugaugaaguaguuggaauu

SEQ ID NO: 263613 - RNA, 19 nt, Homo sapiens
  misc_RNA (1)...(19): siRNA sense strand
gaugaugaaguaguuggaa

SEQ ID NO: 263614 - RNA, 19 nt, Homo sapiens
  misc_RNA (1)...(19): siRNA sense strand
uacagaggauaacuuugug

SEQ ID NO: 263615 - RNA, 19 nt, Homo sapiens
  misc_RNA (1)...(19): siRNA sense strand
gauggagugcgugccuaua

SEQ ID NO: 263616 - RNA, 19 nt, Homo sapiens
  misc_RNA (1)...(19): siRNA sense strand
ggauggagugcgugccuau

SEQ ID NO: 263617 - RNA, 19 nt, Homo sapiens
  misc_RNA (1)...(19): siRNA sense strand
gaaguuguuagaguacaug

SEQ ID NO: 263618 - RNA, 19 nt, Homo sapiens
  misc_RNA (1)...(19): siRNA sense strand
gaguuccacagaugaagaa

SEQ ID NO: 263619 - RNA, 19 nt, Homo sapiens
  misc_RNA (1)...(19): siRNA sense strand
gcaagguaucauucuuuca

SEQ ID NO: 263620 - RNA, 19 nt, Homo sapiens
  misc_RNA (1)...(19): siRNA sense strand
aagauaagcagugccuuga

SEQ ID NO: 263621 - RNA, 19 nt, Homo sapiens
  misc_RNA (1)...(19): siRNA sense strand
cagcaugcagccuugaaga

SEQ ID NO: 263622 - RNA, 19 nt, Homo sapiens
  misc_RNA (1)...(19): siRNA sense strand
gcuggaauuguauuagaug

SEQ ID NO: 263623 - RNA, 19 nt, Homo sapiens
  misc_RNA (1)...(19): siRNA sense strand
ugaaguuguuagaguacau

SEQ ID NO: 263624 - RNA, 19 nt, Homo sapiens
  misc_RNA (1)...(19): siRNA sense strand
accagaugaugaaguaguu

SEQ ID NO: 263625 - RNA, 19 nt, Homo sapiens
  misc_RNA (1)...(19): siRNA sense strand
ccacagaugaagaaauaac

SEQ ID NO: 263626 - RNA, 19 nt, Homo sapiens
  misc_RNA (1)...(19): siRNA sense strand
aggcuuauauuuccaacag

SEQ ID NO: 263627 - RNA, 19 nt, Homo sapiens
  misc_RNA (1)...(19): siRNA sense strand
cauuaucuuucucaucucu

SEQ ID NO: 263628 - RNA, 19 nt, Homo sapiens
  misc_RNA (1)...(19): siRNA sense strand
gaagacccuggacuuugug

SEQ ID NO: 263629 - RNA, 19 nt, Homo sapiens
  misc_RNA (1)...(19): siRNA sense strand
ucugaagacccuggacuuu

SEQ ID NO: 263630 - RNA, 19 nt, Homo sapiens
  misc_RNA (1)...(19): siRNA sense strand
agcaagguaucauucuuuc

SEQ ID NO: 263631 - RNA, 19 nt, Homo sapiens
  misc_RNA (1)...(19): siRNA sense strand
ggagccaaagugauuucaa

SEQ ID NO: 263632 - RNA, 19 nt, Homo sapiens
  misc_RNA (1)...(19): siRNA sense strand
gaggagccaaagugauuuc

SEQ ID NO: 263633 - RNA, 19 nt, Homo sapiens
  misc_RNA (1)...(19): siRNA sense strand
caucauagaggagccaaag

SEQ ID NO: 263634 - RNA, 19 nt, Homo sapiens
  misc_RNA (1)...(19): siRNA sense strand
cuauucaguuagcacauca

SEQ ID NO: 263635 - RNA, 19 nt, Homo sapiens
  misc_RNA (1)...(19): siRNA sense strand
aggauaacuuugugaaacu

SEQ ID NO: 263636 - RNA, 19 nt, Homo sapiens
  misc_RNA (1)...(19): siRNA sense strand
uuugugaaguuguuagagu

SEQ ID NO: 263637 - RNA, 19 nt, Homo sapiens
  misc_RNA (1)...(19): siRNA sense strand
agaggauaacuuugugaaa

SEQ ID NO: 263638 - RNA, 19 nt, Homo sapiens
  misc_RNA (1)...(19): siRNA sense strand
caacagcaugcagccuuga

SEQ ID NO: 263639 - RNA, 19 nt, Homo sapiens
  misc_RNA (1)...(19): siRNA sense strand
gauaacuuugugaaacuuc

SEQ ID NO: 263640 - RNA, 19 nt, Homo sapiens
  misc_RNA (1)...(19): siRNA sense strand
uacaugagcauuacuuggu

SEQ ID NO: 263641 - RNA, 19 nt, Homo sapiens
  misc_RNA (1)...(19): siRNA sense strand
cugaagacccuggacuuug

SEQ ID NO: 263642 - RNA, 19 nt, Homo sapiens
  misc_RNA (1)...(19): siRNA sense strand
gcaccacgcugaaggauga

SEQ ID NO: 263643 - RNA, 19 nt, Homo sapiens
  misc_RNA (1)...(19): siRNA sense strand
ggacaaaacuuccaagauu

SEQ ID NO: 263644 - RNA, 19 nt, Homo sapiens
  misc_RNA (1)...(19): siRNA sense strand
ggaaagugcgucauccuaa

SEQ ID NO: 263645 - RNA, 19 nt, Homo sapiens
  misc_RNA (1)...(19): siRNA sense strand
guaaaucgauccagugucu

SEQ ID NO: 263646 - RNA, 19 nt, Homo sapiens
  misc_RNA (1)...(19): siRNA sense strand
caucaagggucacaguaaa

SEQ ID NO: 263647 - RNA, 19 nt, Homo sapiens
  misc_RNA (1)...(19): siRNA sense strand
gaaagugcgucauccuaag

SEQ ID NO: 263648 - RNA, 19 nt, Homo sapiens
  misc_RNA (1)...(19): siRNA sense strand
gcaagguggucacaguguu

SEQ ID NO: 263649 - RNA, 19 nt, Homo sapiens
  misc_RNA (1)...(19): siRNA sense strand
ggugggauuuacgcaauua

SEQ ID NO: 263650 - RNA, 19 nt, Homo sapiens
  misc_RNA (1)...(19): siRNA sense strand
gcagaaggagcaccuguug

SEQ ID NO: 263651 - RNA, 19 nt, Homo sapiens
  misc_RNA (1)...(19): siRNA sense strand
aggagcaccuguugaagua

SEQ ID NO: 263652 - RNA, 19 nt, Homo sapiens
  misc_RNA (1)...(19): siRNA sense strand
gaccacagccgcuuuguca

SEQ ID NO: 263653 - RNA, 19 nt, Homo sapiens
  misc_RNA (1)...(19): siRNA sense strand
gaaggaagggagaaguuug

SEQ ID NO: 263654 - RNA, 19 nt, Homo sapiens
  misc_RNA (1)...(19): siRNA sense strand
ggaaggaagggagaaguuu

SEQ ID NO: 263655 - RNA, 19 nt, Homo sapiens
  misc_RNA (1)...(19): siRNA sense strand
gagcaccuguugaaguaug

SEQ ID NO: 263656 - RNA, 19 nt, Homo sapiens
  misc_RNA (1)...(19): siRNA sense strand
gacaaaacuuccaagauuu

SEQ ID NO: 263657 - RNA, 19 nt, Homo sapiens
  misc_RNA (1)...(19): siRNA sense strand
gcggcaaguccuacauuua

SEQ ID NO: 263658 - RNA, 19 nt, Homo sapiens
  misc_RNA (1)...(19): siRNA sense strand
ggauuuacgcaauuaguug

SEQ ID NO: 263659 - RNA, 19 nt, Homo sapiens
  misc_RNA (1)...(19): siRNA sense strand
ggacuacagcggacaagga

SEQ ID NO: 263660 - RNA, 19 nt, Homo sapiens
  misc_RNA (1)...(19): siRNA sense strand
acacagagcacgcccauca

SEQ ID NO: 263661 - RNA, 19 nt, Homo sapiens
  misc_RNA (1)...(19): siRNA sense strand
agaaggagcaccuguugaa

SEQ ID NO: 263662 - RNA, 19 nt, Homo sapiens
  misc_RNA (1)...(19): siRNA sense strand
ggcggcaaguccuacauuu

SEQ ID NO: 263663 - RNA, 19 nt, Homo sapiens
  misc_RNA (1)...(19): siRNA sense strand
gauuacaggacacaacaaa

SEQ ID NO: 263664 - RNA, 19 nt, Homo sapiens
  misc_RNA (1)...(19): siRNA sense strand
agacauugcuuggacugaa

SEQ ID NO: 263665 - RNA, 19 nt, Homo sapiens
  misc_RNA (1)...(19): siRNA sense strand
gcagucuuccucugggaua

SEQ ID NO: 263666 - RNA, 19 nt, Homo sapiens
  misc_RNA (1)...(19): siRNA sense strand
ccagcaagguggucacagu

SEQ ID NO: 263667 - RNA, 19 nt, Homo sapiens
  misc_RNA (1)...(19): siRNA sense strand
ggaaaggccacacgaacca

SEQ ID NO: 263668 - RNA, 19 nt, Homo sapiens
  misc_RNA (1)...(19): siRNA sense strand
gagccacgacggacacauu

SEQ ID NO: 263669 - RNA, 19 nt, Homo sapiens
  misc_RNA (1)...(19): siRNA sense strand
gggaagaucaaagacauug

SEQ ID NO: 263670 - RNA, 19 nt, Homo sapiens
  misc_RNA (1)...(19): siRNA sense strand
ccacgggaagcgaugauaa

SEQ ID NO: 263671 - RNA, 19 nt, Homo sapiens
  misc_RNA (1)...(19): siRNA sense strand
ggacacaacaaagucauca

SEQ ID NO: 263672 - RNA, 19 nt, Homo sapiens
  misc_RNA (1)...(19): siRNA sense strand
gagauuacaggacacaaca

SEQ ID NO: 263673 - RNA, 19 nt, Homo sapiens
  misc_RNA (1)...(19): siRNA sense strand
cgaaccagguguccaggau

SEQ ID NO: 263674 - RNA, 19 nt, Homo sapiens
  misc_RNA (1)...(19): siRNA sense strand
gugcgauucucuccugaug

SEQ ID NO: 263675 - RNA, 19 nt, Homo sapiens
  misc_RNA (1)...(19): siRNA sense strand
gcuacgagcccgaaguugu

SEQ ID NO: 263676 - RNA, 19 nt, Homo sapiens
  misc_RNA (1)...(19): siRNA sense strand
gugcugacggccagauaua

SEQ ID NO: 263677 - RNA, 19 nt, Homo sapiens
  misc_RNA (1)...(19): siRNA sense strand
gggaaggaagggagaaguu

SEQ ID NO: 263678 - RNA, 19 nt, Homo sapiens
  misc_RNA (1)...(19): siRNA sense strand
cguacgagaucaagaaggu

SEQ ID NO: 263679 - RNA, 19 nt, Homo sapiens
  misc_RNA (1)...(19): siRNA sense strand
gggauuuacgcaauuaguu

SEQ ID NO: 263680 - RNA, 19 nt, Homo sapiens
  misc_RNA (1)...(19): siRNA sense strand
ccauucaaguucaaguuca

SEQ ID NO: 263681 - RNA, 19 nt, Homo sapiens
  misc_RNA (1)...(19): siRNA sense strand
aaccagguguccaggauga

SEQ ID NO: 263682 - RNA, 19 nt, Homo sapiens
  misc_RNA (1)...(19): siRNA sense strand
cacauuaauuacugggauu

SEQ ID NO: 263683 - RNA, 19 nt, Homo sapiens
  misc_RNA (1)...(19): siRNA sense strand
gcccagcggauucuacauu

SEQ ID NO: 263684 - RNA, 19 nt, Homo sapiens
  misc_RNA (1)...(19): siRNA sense strand
aagcugaggaucugggaua

SEQ ID NO: 263685 - RNA, 19 nt, Homo sapiens
  misc_RNA (1)...(19): siRNA sense strand
uugcugacaucuacacaga

SEQ ID NO: 263686 - RNA, 19 nt, Homo sapiens
  misc_RNA (1)...(19): siRNA sense strand
acgacggacacauuaauua

SEQ ID NO: 263687 - RNA, 19 nt, Homo sapiens
  misc_RNA (1)...(19): siRNA sense strand
ccggguacaucaacuaucu

SEQ ID NO: 263688 - RNA, 19 nt, Homo sapiens
  misc_RNA (1)...(19): siRNA sense strand
gggacacgguggcaauugg

SEQ ID NO: 263689 - RNA, 19 nt, Homo sapiens
  misc_RNA (1)...(19): siRNA sense strand
gcaacguccgccuguauuc

SEQ ID NO: 263690 - RNA, 19 nt, Homo sapiens
  misc_RNA (1)...(19): siRNA sense strand
gacauugcuuggacugaag

SEQ ID NO: 263691 - RNA, 19 nt, Homo sapiens
  misc_RNA (1)...(19): siRNA sense strand
ccacgacggacacauuaau

SEQ ID NO: 263692 - RNA, 19 nt, Homo sapiens
  misc_RNA (1)...(19): siRNA sense strand
caacagcguggacaucaag

SEQ ID NO: 263693 - RNA, 19 nt, Homo sapiens
  misc_RNA (1)...(19): siRNA sense strand
ucaacagcguggacaucaa

SEQ ID NO: 263694 - RNA, 19 nt, Homo sapiens
  misc_RNA (1)...(19): siRNA sense strand
acaacaaagucaucaacag

SEQ ID NO: 263695 - RNA, 19 nt, Homo sapiens
  misc_RNA (1)...(19): siRNA sense strand
cccagcggauucuacauug

SEQ ID NO: 263696 - RNA, 19 nt, Homo sapiens
  misc_RNA (1)...(19): siRNA sense strand
cuacagcggacaaggaguu

SEQ ID NO: 263697 - RNA, 19 nt, Homo sapiens
  misc_RNA (1)...(19): siRNA sense strand
uuacaggacacaacaaagu

SEQ ID NO: 263698 - RNA, 19 nt, Homo sapiens
  misc_RNA (1)...(19): siRNA sense strand
gaagaucaaagacauugcu

SEQ ID NO: 263699 - RNA, 19 nt, Homo sapiens
  misc_RNA (1)...(19): siRNA sense strand
ucaucaagggucacaguaa

SEQ ID NO: 263700 - RNA, 19 nt, Homo sapiens
  misc_RNA (1)...(19): siRNA sense strand
gggauaccacgcagaagga

SEQ ID NO: 263701 - RNA, 19 nt, Homo sapiens
  misc_RNA (1)...(19): siRNA sense strand
cgacggacacauuaauuac

SEQ ID NO: 263702 - RNA, 19 nt, Homo sapiens
  misc_RNA (1)...(19): siRNA sense strand
cuacauugccuccggagau

SEQ ID NO: 263703 - RNA, 19 nt, Homo sapiens
  misc_RNA (1)...(19): siRNA sense strand
ccaggaugaccguggauga

SEQ ID NO: 263704 - RNA, 19 nt, Homo sapiens
  misc_RNA (1)...(19): siRNA sense strand
ugaaggaucagaggaagug

SEQ ID NO: 263705 - RNA, 19 nt, Homo sapiens
  misc_RNA (1)...(19): siRNA sense strand
cggcaaguccuacauuuac

SEQ ID NO: 263706 - RNA, 19 nt, Homo sapiens
  misc_RNA (1)...(19): siRNA sense strand
gcuacucggagaacaaugu

SEQ ID NO: 263707 - RNA, 19 nt, Homo sapiens
  misc_RNA (1)...(19): siRNA sense strand
cgugugcauuggacagauu

SEQ ID NO: 263708 - RNA, 19 nt, Homo sapiens
  misc_RNA (1)...(19): siRNA sense strand
aaaucgauccagugucuga

SEQ ID NO: 263709 - RNA, 19 nt, Homo sapiens
  misc_RNA (1)...(19): siRNA sense strand
ugaccgacguggccuacuc

SEQ ID NO: 263710 - RNA, 19 nt, Homo sapiens
  misc_RNA (1)...(19): siRNA sense strand
ggcaacguccgccuguauu

SEQ ID NO: 263711 - RNA, 19 nt, Homo sapiens
  misc_RNA (1)...(19): siRNA sense strand
gaaggagcaccuguugaag

SEQ ID NO: 263712 - RNA, 19 nt, Homo sapiens
  misc_RNA (1)...(19): siRNA sense strand
ugucaacugugugcgauuc

SEQ ID NO: 263713 - RNA, 19 nt, Homo sapiens
  misc_RNA (1)...(19): siRNA sense strand
gggcaacaauuuucuguac

SEQ ID NO: 263714 - RNA, 19 nt, Homo sapiens
  misc_RNA (1)...(19): siRNA sense strand
caagguggucacaguguuc

SEQ ID NO: 263715 - RNA, 19 nt, Homo sapiens
  misc_RNA (1)...(19): siRNA sense strand
cuacgagcccgaaguugug

SEQ ID NO: 263716 - RNA, 19 nt, Homo sapiens
  misc_RNA (1)...(19): siRNA sense strand
uggaaagugcgucauccua

SEQ ID NO: 263717 - RNA, 19 nt, Homo sapiens
  misc_RNA (1)...(19): siRNA sense strand
acggacacauuaauuacug

SEQ ID NO: 263718 - RNA, 19 nt, Homo sapiens
  misc_RNA (1)...(19): siRNA sense strand
cugggaagaucaaagacau

SEQ ID NO: 263719 - RNA, 19 nt, Homo sapiens
  misc_RNA (1)...(19): siRNA sense strand
cagaaggagcaccuguuga

SEQ ID NO: 263720 - RNA, 19 nt, Homo sapiens
  misc_RNA (1)...(19): siRNA sense strand
uacauugccuccggagaug

SEQ ID NO: 263721 - RNA, 19 nt, Homo sapiens
  misc_RNA (1)...(19): siRNA sense strand
gcaaguccuacauuuacuc

SEQ ID NO: 263722 - RNA, 19 nt, Homo sapiens
  misc_RNA (1)...(19): siRNA sense strand
ggcaaguccuacauuuacu

SEQ ID NO: 263723 - RNA, 19 nt, Homo sapiens
  misc_RNA (1)...(19): siRNA sense strand
gcucuucugugggcgagau

SEQ ID NO: 263724 - RNA, 19 nt, Homo sapiens
  misc_RNA (1)...(19): siRNA sense strand
caauggaaagugcgucauc

SEQ ID NO: 263725 - RNA, 19 nt, Homo sapiens
  misc_RNA (1)...(19): siRNA sense strand
uuaauuacugggauucaga

SEQ ID NO: 263726 - RNA, 19 nt, Homo sapiens
  misc_RNA (1)...(19): siRNA sense strand
gaaggaccaccugcucagu

SEQ ID NO: 263727 - RNA, 19 nt, Homo sapiens
  misc_RNA (1)...(19): siRNA sense strand
gcugacggccagauauaca

SEQ ID NO: 263728 - RNA, 19 nt, Homo sapiens
  misc_RNA (1)...(19): siRNA sense strand
ccacagccgcuuugucaac

SEQ ID NO: 263729 - RNA, 19 nt, Homo sapiens
  misc_RNA (1)...(19): siRNA sense strand
cagccgcuuugucaacugu

SEQ ID NO: 263730 - RNA, 19 nt, Homo sapiens
  misc_RNA (1)...(19): siRNA sense strand
cggcaacguccgccuguau

SEQ ID NO: 263731 - RNA, 19 nt, Homo sapiens
  misc_RNA (1)...(19): siRNA sense strand
cacgacggacacauuaauu

SEQ ID NO: 263732 - RNA, 19 nt, Homo sapiens
  misc_RNA (1)...(19): siRNA sense strand
gggauaguggcucuucugu

SEQ ID NO: 263733 - RNA, 19 nt, Homo sapiens
  misc_RNA (1)...(19): siRNA sense strand
caguaaaucgauccagugu

SEQ ID NO: 263734 - RNA, 19 nt, Homo sapiens
  misc_RNA (1)...(19): siRNA sense strand
ucaagggucacaguaaauc

SEQ ID NO: 263735 - RNA, 19 nt, Homo sapiens
  misc_RNA (1)...(19): siRNA sense strand
gcaccacgcugaaggauga

SEQ ID NO: 263736 - RNA, 19 nt, Homo sapiens
  misc_RNA (1)...(19): siRNA sense strand
ggacaaaacuuccaagauu

SEQ ID NO: 263737 - RNA, 19 nt, Homo sapiens
  misc_RNA (1)...(19): siRNA sense strand
ggaaagugcgucauccuaa

SEQ ID NO: 263738 - RNA, 19 nt, Homo sapiens
  misc_RNA (1)...(19): siRNA sense strand
guaaaucgauccagugucu

SEQ ID NO: 263739 - RNA, 19 nt, Homo sapiens
  misc_RNA (1)...(19): siRNA sense strand
caucaagggucacaguaaa

SEQ ID NO: 263740 - RNA, 19 nt, Homo sapiens
  misc_RNA (1)...(19): siRNA sense strand
gaaagugcgucauccuaag

SEQ ID NO: 263741 - RNA, 19 nt, Homo sapiens
  misc_RNA (1)...(19): siRNA sense strand
gcaagguggucacaguguu

SEQ ID NO: 263742 - RNA, 19 nt, Homo sapiens
  misc_RNA (1)...(19): siRNA sense strand
ggugggauuuacgcaauua

SEQ ID NO: 263743 - RNA, 19 nt, Homo sapiens
  misc_RNA (1)...(19): siRNA sense strand
gcagaaggagcaccuguug

SEQ ID NO: 263744 - RNA, 19 nt, Homo sapiens
  misc_RNA (1)...(19): siRNA sense strand
aggagcaccuguugaagua

SEQ ID NO: 263745 - RNA, 19 nt, Homo sapiens
  misc_RNA (1)...(19): siRNA sense strand
gaccacagccgcuuuguca

SEQ ID NO: 263746 - RNA, 19 nt, Homo sapiens
  misc_RNA (1)...(19): siRNA sense strand
gaaggaagggagaaguuug

SEQ ID NO: 263747 - RNA, 19 nt, Homo sapiens
  misc_RNA (1)...(19): siRNA sense strand
ggaaggaagggagaaguuu

SEQ ID NO: 263748 - RNA, 19 nt, Homo sapiens
  misc_RNA (1)...(19): siRNA sense strand
gagcaccuguugaaguaug

SEQ ID NO: 263749 - RNA, 19 nt, Homo sapiens
  misc_RNA (1)...(19): siRNA sense strand
gacaaaacuuccaagauuu

SEQ ID NO: 263750 - RNA, 19 nt, Homo sapiens
  misc_RNA (1)...(19): siRNA sense strand
gcggcaaguccuacauuua

SEQ ID NO: 263751 - RNA, 19 nt, Homo sapiens
  misc_RNA (1)...(19): siRNA sense strand
ggauuuacgcaauuaguug

SEQ ID NO: 263752 - RNA, 19 nt, Homo sapiens
  misc_RNA (1)...(19): siRNA sense strand
ggacuacagcggacaagga

SEQ ID NO: 263753 - RNA, 19 nt, Homo sapiens
  misc_RNA (1)...(19): siRNA sense strand
acacagagcacgcccauca

SEQ ID NO: 263754 - RNA, 19 nt, Homo sapiens
  misc_RNA (1)...(19): siRNA sense strand
agaaggagcaccuguugaa

SEQ ID NO: 263755 - RNA, 19 nt, Homo sapiens
  misc_RNA (1)...(19): siRNA sense strand
ggcggcaaguccuacauuu

SEQ ID NO: 263756 - RNA, 19 nt, Homo sapiens
  misc_RNA (1)...(19): siRNA sense strand
gauuacaggacacaacaaa

SEQ ID NO: 263757 - RNA, 19 nt, Homo sapiens
  misc_RNA (1)...(19): siRNA sense strand
agacauugcuuggacugaa

SEQ ID NO: 263758 - RNA, 19 nt, Homo sapiens
  misc_RNA (1)...(19): siRNA sense strand
gcagucuuccucugggaua

SEQ ID NO: 263759 - RNA, 19 nt, Homo sapiens
  misc_RNA (1)...(19): siRNA sense strand
ccagcaagguggucacagu

SEQ ID NO: 263760 - RNA, 19 nt, Homo sapiens
  misc_RNA (1)...(19): siRNA sense strand
ggaaaggccacacgaacca

SEQ ID NO: 263761 - RNA, 19 nt, Homo sapiens
  misc_RNA (1)...(19): siRNA sense strand
gagccacgacggacacauu

SEQ ID NO: 263762 - RNA, 19 nt, Homo sapiens
  misc_RNA (1)...(19): siRNA sense strand
gggaagaucaaagacauug

SEQ ID NO: 263763 - RNA, 19 nt, Homo sapiens
  misc_RNA (1)...(19): siRNA sense strand
ccacgggaagcgaugauaa

SEQ ID NO: 263764 - RNA, 19 nt, Homo sapiens
  misc_RNA (1)...(19): siRNA sense strand
ggacacaacaaagucauca

SEQ ID NO: 263765 - RNA, 19 nt, Homo sapiens
  misc_RNA (1)...(19): siRNA sense strand
gagauuacaggacacaaca

SEQ ID NO: 263766 - RNA, 19 nt, Homo sapiens
  misc_RNA (1)...(19): siRNA sense strand
cgaaccagguguccaggau

SEQ ID NO: 263767 - RNA, 19 nt, Homo sapiens
  misc_RNA (1)...(19): siRNA sense strand
gugcgauucucuccugaug

SEQ ID NO: 263768 - RNA, 19 nt, Homo sapiens
  misc_RNA (1)...(19): siRNA sense strand
gcuacgagcccgaaguugu

SEQ ID NO: 263769 - RNA, 19 nt, Homo sapiens
  misc_RNA (1)...(19): siRNA sense strand
gugcugacggccagauaua

SEQ ID NO: 263770 - RNA, 19 nt, Homo sapiens
  misc_RNA (1)...(19): siRNA sense strand
gggaaggaagggagaaguu

SEQ ID NO: 263771 - RNA, 19 nt, Homo sapiens
  misc_RNA (1)...(19): siRNA sense strand
cguacgagaucaagaaggu

SEQ ID NO: 263772 - RNA, 19 nt, Homo sapiens
  misc_RNA (1)...(19): siRNA sense strand
gggauuuacgcaauuaguu

SEQ ID NO: 263773 - RNA, 19 nt, Homo sapiens
  misc_RNA (1)...(19): siRNA sense strand
ccauucaaguucaaguuca

SEQ ID NO: 263774 - RNA, 19 nt, Homo sapiens
  misc_RNA (1)...(19): siRNA sense strand
aaccagguguccaggauga

SEQ ID NO: 263775 - RNA, 19 nt, Homo sapiens
  misc_RNA (1)...(19): siRNA sense strand
cacauuaauuacugggauu

SEQ ID NO: 263776 - RNA, 19 nt, Homo sapiens
  misc_RNA (1)...(19): siRNA sense strand
gcccagcggauucuacauu

SEQ ID NO: 263777 - RNA, 19 nt, Homo sapiens
  misc_RNA (1)...(19): siRNA sense strand
aagcugaggaucugggaua

SEQ ID NO: 263778 - RNA, 19 nt, Homo sapiens
  misc_RNA (1)...(19): siRNA sense strand
uugcugacaucuacacaga

SEQ ID NO: 263779 - RNA, 19 nt, Homo sapiens
  misc_RNA (1)...(19): siRNA sense strand
acgacggacacauuaauua

SEQ ID NO: 263780 - RNA, 19 nt, Homo sapiens
  misc_RNA (1)...(19): siRNA sense strand
ccggguacaucaacuaucu

SEQ ID NO: 263781 - RNA, 19 nt, Homo sapiens
  misc_RNA (1)...(19): siRNA sense strand
gggacacgguggcaauugg

SEQ ID NO: 263782 - RNA, 19 nt, Homo sapiens
  misc_RNA (1)...(19): siRNA sense strand
gcaacguccgccuguauuc

SEQ ID NO: 263783 - RNA, 19 nt, Homo sapiens
  misc_RNA (1)...(19): siRNA sense strand
gacauugcuuggacugaag

SEQ ID NO: 263784 - RNA, 19 nt, Homo sapiens
  misc_RNA (1)...(19): siRNA sense strand
ccacgacggacacauuaau

SEQ ID NO: 263785 - RNA, 19 nt, Homo sapiens
  misc_RNA (1)...(19): siRNA sense strand
caacagcguggacaucaag

SEQ ID NO: 263786 - RNA, 19 nt, Homo sapiens
  misc_RNA (1)...(19): siRNA sense strand
ucaacagcguggacaucaa

SEQ ID NO: 263787 - RNA, 19 nt, Homo sapiens
  misc_RNA (1)...(19): siRNA sense strand
acaacaaagucaucaacag

SEQ ID NO: 263788 - RNA, 19 nt, Homo sapiens
  misc_RNA (1)...(19): siRNA sense strand
cccagcggauucuacauug

SEQ ID NO: 263789 - RNA, 19 nt, Homo sapiens
  misc_RNA (1)...(19): siRNA sense strand
cuacagcggacaaggaguu

SEQ ID NO: 263790 - RNA, 19 nt, Homo sapiens
  misc_RNA (1)...(19): siRNA sense strand
uuacaggacacaacaaagu

SEQ ID NO: 263791 - RNA, 19 nt, Homo sapiens
  misc_RNA (1)...(19): siRNA sense strand
gaagaucaaagacauugcu

SEQ ID NO: 263792 - RNA, 19 nt, Homo sapiens
  misc_RNA (1)...(19): siRNA sense strand
ucaucaagggucacaguaa

SEQ ID NO: 263793 - RNA, 19 nt, Homo sapiens
  misc_RNA (1)...(19): siRNA sense strand
gggauaccacgcagaagga

SEQ ID NO: 263794 - RNA, 19 nt, Homo sapiens
  misc_RNA (1)...(19): siRNA sense strand
cgacggacacauuaauuac

SEQ ID NO: 263795 - RNA, 19 nt, Homo sapiens
  misc_RNA (1)...(19): siRNA sense strand
cuacauugccuccggagau

SEQ ID NO: 263796 - RNA, 19 nt, Homo sapiens
  misc_RNA (1)...(19): siRNA sense strand
ccaggaugaccguggauga

SEQ ID NO: 263797 - RNA, 19 nt, Homo sapiens
  misc_RNA (1)...(19): siRNA sense strand
ugaaggaucagaggaagug

SEQ ID NO: 263798 - RNA, 19 nt, Homo sapiens
  misc_RNA (1)...(19): siRNA sense strand
cggcaaguccuacauuuac

SEQ ID NO: 263799 - RNA, 19 nt, Homo sapiens
  misc_RNA (1)...(19): siRNA sense strand
gcuacucggagaacaaugu

SEQ ID NO: 263800 - RNA, 19 nt, Homo sapiens
  misc_RNA (1)...(19): siRNA sense strand
cgugugcauuggacagauu

SEQ ID NO: 263801 - RNA, 19 nt, Homo sapiens
  misc_RNA (1)...(19): siRNA sense strand
aaaucgauccagugucuga

SEQ ID NO: 263802 - RNA, 19 nt, Homo sapiens
  misc_RNA (1)...(19): siRNA sense strand
ugaccgacguggccuacuc

SEQ ID NO: 263803 - RNA, 19 nt, Homo sapiens
  misc_RNA (1)...(19): siRNA sense strand
ggcaacguccgccuguauu

SEQ ID NO: 263804 - RNA, 19 nt, Homo sapiens
  misc_RNA (1)...(19): siRNA sense strand
gaaggagcaccuguugaag

SEQ ID NO: 263805 - RNA, 19 nt, Homo sapiens
  misc_RNA (1)...(19): siRNA sense strand
ugucaacugugugcgauuc

SEQ ID NO: 263806 - RNA, 19 nt, Homo sapiens
  misc_RNA (1)...(19): siRNA sense strand
gggcaacaauuuucuguac

SEQ ID NO: 263807 - RNA, 19 nt, Homo sapiens
  misc_RNA (1)...(19): siRNA sense strand
caagguggucacaguguuc

SEQ ID NO: 263808 - RNA, 19 nt, Homo sapiens
  misc_RNA (1)...(19): siRNA sense strand
cuacgagcccgaaguugug

SEQ ID NO: 263809 - RNA, 19 nt, Homo sapiens
  misc_RNA (1)...(19): siRNA sense strand
uggaaagugcgucauccua

SEQ ID NO: 263810 - RNA, 19 nt, Homo sapiens
  misc_RNA (1)...(19): siRNA sense strand
acggacacauuaauuacug

SEQ ID NO: 263811 - RNA, 19 nt, Homo sapiens
  misc_RNA (1)...(19): siRNA sense strand
cugggaagaucaaagacau

SEQ ID NO: 263812 - RNA, 19 nt, Homo sapiens
  misc_RNA (1)...(19): siRNA sense strand
cagaaggagcaccuguuga

SEQ ID NO: 263813 - RNA, 19 nt, Homo sapiens
  misc_RNA (1)...(19): siRNA sense strand
uacauugccuccggagaug

SEQ ID NO: 263814 - RNA, 19 nt, Homo sapiens
  misc_RNA (1)...(19): siRNA sense strand
gcaaguccuacauuuacuc

SEQ ID NO: 263815 - RNA, 19 nt, Homo sapiens
  misc_RNA (1)...(19): siRNA sense strand
ggcaaguccuacauuuacu

SEQ ID NO: 263816 - RNA, 19 nt, Homo sapiens
  misc_RNA (1)...(19): siRNA sense strand
gcucuucugugggcgagau

SEQ ID NO: 263817 - RNA, 19 nt, Homo sapiens
  misc_RNA (1)...(19): siRNA sense strand
caauggaaagugcgucauc

SEQ ID NO: 263818 - RNA, 19 nt, Homo sapiens
  misc_RNA (1)...(19): siRNA sense strand
uuaauuacugggauucaga

SEQ ID NO: 263819 - RNA, 19 nt, Homo sapiens
  misc_RNA (1)...(19): siRNA sense strand
gaaggaccaccugcucagu

SEQ ID NO: 263820 - RNA, 19 nt, Homo sapiens
  misc_RNA (1)...(19): siRNA sense strand
gcugacggccagauauaca

SEQ ID NO: 263821 - RNA, 19 nt, Homo sapiens
  misc_RNA (1)...(19): siRNA sense strand
ccacagccgcuuugucaac

SEQ ID NO: 263822 - RNA, 19 nt, Homo sapiens
  misc_RNA (1)...(19): siRNA sense strand
cagccgcuuugucaacugu

SEQ ID NO: 263823 - RNA, 19 nt, Homo sapiens
  misc_RNA (1)...(19): siRNA sense strand
cggcaacguccgccuguau

SEQ ID NO: 263824 - RNA, 19 nt, Homo sapiens
  misc_RNA (1)...(19): siRNA sense strand
cacgacggacacauuaauu

SEQ ID NO: 263825 - RNA, 19 nt, Homo sapiens
  misc_RNA (1)...(19): siRNA sense strand
gggauaguggcucuucugu

SEQ ID NO: 263826 - RNA, 19 nt, Homo sapiens
  misc_RNA (1)...(19): siRNA sense strand
caguaaaucgauccagugu

SEQ ID NO: 263827 - RNA, 19 nt, Homo sapiens
  misc_RNA (1)...(19): siRNA sense strand
ucaagggucacaguaaauc

SEQ ID NO: 263828 - RNA, 19 nt, Homo sapiens
  misc_RNA (1)...(19): siRNA sense strand
ggaaucagcuuaccaauaa

SEQ ID NO: 263829 - RNA, 19 nt, Homo sapiens
  misc_RNA (1)...(19): siRNA sense strand
caaagagacucaagaagaa

SEQ ID NO: 263830 - RNA, 19 nt, Homo sapiens
  misc_RNA (1)...(19): siRNA sense strand
ggaccuaaaucuacguaua

SEQ ID NO: 263831 - RNA, 19 nt, Homo sapiens
  misc_RNA (1)...(19): siRNA sense strand
ccaaauagcugggcagaaa

SEQ ID NO: 263832 - RNA, 19 nt, Homo sapiens
  misc_RNA (1)...(19): siRNA sense strand
gaaguucagucuuuaaauc

SEQ ID NO: 263833 - RNA, 19 nt, Homo sapiens
  misc_RNA (1)...(19): siRNA sense strand
gcagaaagcauccaaacaa

SEQ ID NO: 263834 - RNA, 19 nt, Homo sapiens
  misc_RNA (1)...(19): siRNA sense strand
gaaagcauccaaacaagaa

SEQ ID NO: 263835 - RNA, 19 nt, Homo sapiens
  misc_RNA (1)...(19): siRNA sense strand
gaaaaugugucaucaaaug

SEQ ID NO: 263836 - RNA, 19 nt, Homo sapiens
  misc_RNA (1)...(19): siRNA sense strand
gaagaggguugaugaacug

SEQ ID NO: 263837 - RNA, 19 nt, Homo sapiens
  misc_RNA (1)...(19): siRNA sense strand
gaaauggaacgucagaauu

SEQ ID NO: 263838 - RNA, 19 nt, Homo sapiens
  misc_RNA (1)...(19): siRNA sense strand
ggaauuaauugacuacaag

SEQ ID NO: 263839 - RNA, 19 nt, Homo sapiens
  misc_RNA (1)...(19): siRNA sense strand
caacagcucucaguaggaa

SEQ ID NO: 263840 - RNA, 19 nt, Homo sapiens
  misc_RNA (1)...(19): siRNA sense strand
caggagagcuauaaacaga

SEQ ID NO: 263841 - RNA, 19 nt, Homo sapiens
  misc_RNA (1)...(19): siRNA sense strand
ggaucugcaugaccaaaua

SEQ ID NO: 263842 - RNA, 19 nt, Homo sapiens
  misc_RNA (1)...(19): siRNA sense strand
gaacaaagaacacauugca

SEQ ID NO: 263843 - RNA, 19 nt, Homo sapiens
  misc_RNA (1)...(19): siRNA sense strand
gaagaucuuuaucgaacaa

SEQ ID NO: 263844 - RNA, 19 nt, Homo sapiens
  misc_RNA (1)...(19): siRNA sense strand
ccaaagagacucaagaaga

SEQ ID NO: 263845 - RNA, 19 nt, Homo sapiens
  misc_RNA (1)...(19): siRNA sense strand
aaacuaaucuggcaggaau

SEQ ID NO: 263846 - RNA, 19 nt, Homo sapiens
  misc_RNA (1)...(19): siRNA sense strand
guaacagccugcagaauca

SEQ ID NO: 263847 - RNA, 19 nt, Homo sapiens
  misc_RNA (1)...(19): siRNA sense strand
gcaaguuaaugaagcagaa

SEQ ID NO: 263848 - RNA, 19 nt, Homo sapiens
  misc_RNA (1)...(19): siRNA sense strand
ggagagcuauaaacagaug

SEQ ID NO: 263849 - RNA, 19 nt, Homo sapiens
  misc_RNA (1)...(19): siRNA sense strand
caaagcugcuaguucaauu

SEQ ID NO: 263850 - RNA, 19 nt, Homo sapiens
  misc_RNA (1)...(19): siRNA sense strand
agaggaaucuucaaaggaa

SEQ ID NO: 263851 - RNA, 19 nt, Homo sapiens
  misc_RNA (1)...(19): siRNA sense strand
ccaaccauauggcaaauga

SEQ ID NO: 263852 - RNA, 19 nt, Homo sapiens
  misc_RNA (1)...(19): siRNA sense strand
ugauuguucuguugacuua

SEQ ID NO: 263853 - RNA, 19 nt, Homo sapiens
  misc_RNA (1)...(19): siRNA sense strand
ggucaugauuguucuguug

SEQ ID NO: 263854 - RNA, 19 nt, Homo sapiens
  misc_RNA (1)...(19): siRNA sense strand
gcauggagcuggaagaacu

SEQ ID NO: 263855 - RNA, 19 nt, Homo sapiens
  misc_RNA (1)...(19): siRNA sense strand
ucgcaaagcugcuaguuca

SEQ ID NO: 263856 - RNA, 19 nt, Homo sapiens
  misc_RNA (1)...(19): siRNA sense strand
gaacuucaccagcaaaaua

SEQ ID NO: 263857 - RNA, 19 nt, Homo sapiens
  misc_RNA (1)...(19): siRNA sense strand
ggaaauggaacgucagaau

SEQ ID NO: 263858 - RNA, 19 nt, Homo sapiens
  misc_RNA (1)...(19): siRNA sense strand
ccaugaaggucaagaggaa

SEQ ID NO: 263859 - RNA, 19 nt, Homo sapiens
  misc_RNA (1)...(19): siRNA sense strand
gcacucgucugcgaaaugu

SEQ ID NO: 263860 - RNA, 19 nt, Homo sapiens
  misc_RNA (1)...(19): siRNA sense strand
gaaagaaggcucugguuuu

SEQ ID NO: 263861 - RNA, 19 nt, Homo sapiens
  misc_RNA (1)...(19): siRNA sense strand
gaaagaaaauacucagaug

SEQ ID NO: 263862 - RNA, 19 nt, Homo sapiens
  misc_RNA (1)...(19): siRNA sense strand
aaacaaagcaagagcaaga

SEQ ID NO: 263863 - RNA, 19 nt, Homo sapiens
  misc_RNA (1)...(19): siRNA sense strand
caaaucacaugaacugucu

SEQ ID NO: 263864 - RNA, 19 nt, Homo sapiens
  misc_RNA (1)...(19): siRNA sense strand
ggaguuccacuauauagaa

SEQ ID NO: 263865 - RNA, 19 nt, Homo sapiens
  misc_RNA (1)...(19): siRNA sense strand
ccacgaagcugccaguaac

SEQ ID NO: 263866 - RNA, 19 nt, Homo sapiens
  misc_RNA (1)...(19): siRNA sense strand
ccaaguagaugaccugacu

SEQ ID NO: 263867 - RNA, 19 nt, Homo sapiens
  misc_RNA (1)...(19): siRNA sense strand
gccaguaacucagauucua

SEQ ID NO: 263868 - RNA, 19 nt, Homo sapiens
  misc_RNA (1)...(19): siRNA sense strand
ggaaagacaaugccagcaa

SEQ ID NO: 263869 - RNA, 19 nt, Homo sapiens
  misc_RNA (1)...(19): siRNA sense strand
gaagaagaggguugaugaa

SEQ ID NO: 263870 - RNA, 19 nt, Homo sapiens
  misc_RNA (1)...(19): siRNA sense strand
augaugagcugcuguuuga

SEQ ID NO: 263871 - RNA, 19 nt, Homo sapiens
  misc_RNA (1)...(19): siRNA sense strand
ggucuucgauuaauauguc

SEQ ID NO: 263872 - RNA, 19 nt, Homo sapiens
  misc_RNA (1)...(19): siRNA sense strand
gaacuccgccucuggaagu

SEQ ID NO: 263873 - RNA, 19 nt, Homo sapiens
  misc_RNA (1)...(19): siRNA sense strand
acaaagaacacauugcaaa

SEQ ID NO: 263874 - RNA, 19 nt, Homo sapiens
  misc_RNA (1)...(19): siRNA sense strand
gcaggaguuccacuauaua

SEQ ID NO: 263875 - RNA, 19 nt, Homo sapiens
  misc_RNA (1)...(19): siRNA sense strand
aagcaggaguuccacuaua

SEQ ID NO: 263876 - RNA, 19 nt, Homo sapiens
  misc_RNA (1)...(19): siRNA sense strand
gaaaaugcaucuguuccua

SEQ ID NO: 263877 - RNA, 19 nt, Homo sapiens
  misc_RNA (1)...(19): siRNA sense strand
ccagauacaucagcucaga

SEQ ID NO: 263878 - RNA, 19 nt, Homo sapiens
  misc_RNA (1)...(19): siRNA sense strand
aauggaacgucagaauuua

SEQ ID NO: 263879 - RNA, 19 nt, Homo sapiens
  misc_RNA (1)...(19): siRNA sense strand
gaaagugagacuccaggaa

SEQ ID NO: 263880 - RNA, 19 nt, Homo sapiens
  misc_RNA (1)...(19): siRNA sense strand
aauuaaagaucgagacgaa

SEQ ID NO: 263881 - RNA, 19 nt, Homo sapiens
  misc_RNA (1)...(19): siRNA sense strand
gguaacagccugcagaauc

SEQ ID NO: 263882 - RNA, 19 nt, Homo sapiens
  misc_RNA (1)...(19): siRNA sense strand
gaccuaaaucuacguauau

SEQ ID NO: 263883 - RNA, 19 nt, Homo sapiens
  misc_RNA (1)...(19): siRNA sense strand
gcaccacgaccaaccauau

SEQ ID NO: 263884 - RNA, 19 nt, Homo sapiens
  misc_RNA (1)...(19): siRNA sense strand
gaugagcugcuguuugauu

SEQ ID NO: 263885 - RNA, 19 nt, Homo sapiens
  misc_RNA (1)...(19): siRNA sense strand
gcugauaacauucgaaauc

SEQ ID NO: 263886 - RNA, 19 nt, Homo sapiens
  misc_RNA (1)...(19): siRNA sense strand
ucaaagagugaucgaauga

SEQ ID NO: 263887 - RNA, 19 nt, Homo sapiens
  misc_RNA (1)...(19): siRNA sense strand
agacaaugccagcaacaua

SEQ ID NO: 263888 - RNA, 19 nt, Homo sapiens
  misc_RNA (1)...(19): siRNA sense strand
gagaacaguuacaggaucu

SEQ ID NO: 263889 - RNA, 19 nt, Homo sapiens
  misc_RNA (1)...(19): siRNA sense strand
ugaaagaaggcucugguuu

SEQ ID NO: 263890 - RNA, 19 nt, Homo sapiens
  misc_RNA (1)...(19): siRNA sense strand
aagucaagcuguauaaguu

SEQ ID NO: 263891 - RNA, 19 nt, Homo sapiens
  misc_RNA (1)...(19): siRNA sense strand
gcaauuacacuggccgaaa

SEQ ID NO: 263892 - RNA, 19 nt, Homo sapiens
  misc_RNA (1)...(19): siRNA sense strand
aacaagaacuagagacaga

SEQ ID NO: 263893 - RNA, 19 nt, Homo sapiens
  misc_RNA (1)...(19): siRNA sense strand
cuccaaagauccaaagaga

SEQ ID NO: 263894 - RNA, 19 nt, Homo sapiens
  misc_RNA (1)...(19): siRNA sense strand
gacaaugccagcaacauau

SEQ ID NO: 263895 - RNA, 19 nt, Homo sapiens
  misc_RNA (1)...(19): siRNA sense strand
gagagcaggagagcuauaa

SEQ ID NO: 263896 - RNA, 19 nt, Homo sapiens
  misc_RNA (1)...(19): siRNA sense strand
gaaucaagcucugcagacu

SEQ ID NO: 263897 - RNA, 19 nt, Homo sapiens
  misc_RNA (1)...(19): siRNA sense strand
gaggaaucuucaaaggaaa

SEQ ID NO: 263898 - RNA, 19 nt, Homo sapiens
  misc_RNA (1)...(19): siRNA sense strand
cgauuaauaugucuggaau

SEQ ID NO: 263899 - RNA, 19 nt, Homo sapiens
  misc_RNA (1)...(19): siRNA sense strand
gaaucagcuuaccaauaaa

SEQ ID NO: 263900 - RNA, 19 nt, Homo sapiens
  misc_RNA (1)...(19): siRNA sense strand
caaagcagaauuaaagauc

SEQ ID NO: 263901 - RNA, 19 nt, Homo sapiens
  misc_RNA (1)...(19): siRNA sense strand
cagaaagcauccaaacaag

SEQ ID NO: 263902 - RNA, 19 nt, Homo sapiens
  misc_RNA (1)...(19): siRNA sense strand
caauuacacuggccgaaag

SEQ ID NO: 263903 - RNA, 19 nt, Homo sapiens
  misc_RNA (1)...(19): siRNA sense strand
agagagagcaggagagcua

SEQ ID NO: 263904 - RNA, 19 nt, Homo sapiens
  misc_RNA (1)...(19): siRNA sense strand
cuaguucaauugaucaguu

SEQ ID NO: 263905 - RNA, 19 nt, Homo sapiens
  misc_RNA (1)...(19): siRNA sense strand
aaacucaggaaucagcuua

SEQ ID NO: 263906 - RNA, 19 nt, Homo sapiens
  misc_RNA (1)...(19): siRNA sense strand
gcaaagcagaauuaaagau

SEQ ID NO: 263907 - RNA, 19 nt, Homo sapiens
  misc_RNA (1)...(19): siRNA sense strand
gaagcaggaguuccacuau

SEQ ID NO: 263908 - RNA, 19 nt, Homo sapiens
  misc_RNA (1)...(19): siRNA sense strand
gcucagauccgaauuacag

SEQ ID NO: 263909 - RNA, 19 nt, Homo sapiens
  misc_RNA (1)...(19): siRNA sense strand
agaagaagaggguugauga

SEQ ID NO: 263910 - RNA, 19 nt, Homo sapiens
  misc_RNA (1)...(19): siRNA sense strand
ucagagcucucagacauca

SEQ ID NO: 263911 - RNA, 19 nt, Homo sapiens
  misc_RNA (1)...(19): siRNA sense strand
gcaaagcugcuaguucaau

SEQ ID NO: 263912 - RNA, 19 nt, Homo sapiens
  misc_RNA (1)...(19): siRNA sense strand
gcacagcaaguuaaugaag

SEQ ID NO: 263913 - RNA, 19 nt, Homo sapiens
  misc_RNA (1)...(19): siRNA sense strand
gaauaaugcaggaucaaag

SEQ ID NO: 263914 - RNA, 19 nt, Homo sapiens
  misc_RNA (1)...(19): siRNA sense strand
uuucagagcucucagacau

SEQ ID NO: 263915 - RNA, 19 nt, Homo sapiens
  misc_RNA (1)...(19): siRNA sense strand
gaaauguuccuguucuuuu

SEQ ID NO: 263916 - RNA, 19 nt, Homo sapiens
  misc_RNA (1)...(19): siRNA sense strand
gcgaaauguuccuguucuu

SEQ ID NO: 263917 - RNA, 19 nt, Homo sapiens
  misc_RNA (1)...(19): siRNA sense strand
gaacuuggaguccucuaag

SEQ ID NO: 263918 - RNA, 19 nt, Homo sapiens
  misc_RNA (1)...(19): siRNA sense strand
ucaagaaauggccucguua

SEQ ID NO: 263919 - RNA, 19 nt, Homo sapiens
  misc_RNA (1)...(19): siRNA sense strand
ucaagugucaguucuguga

SEQ ID NO: 263920 - RNA, 19 nt, Homo sapiens
  misc_RNA (1)...(19): siRNA sense strand
uaauaugucuggaauugac

SEQ ID NO: 263921 - RNA, 19 nt, Homo sapiens
  misc_RNA (1)...(19): siRNA sense strand
caaacaagaacuagagaca

SEQ ID NO: 263922 - RNA, 19 nt, Homo sapiens
  misc_RNA (1)...(19): siRNA sense strand
guggaaaucagaaaggaaa

SEQ ID NO: 263923 - RNA, 19 nt, Homo sapiens
  misc_RNA (1)...(19): siRNA sense strand
agaacucccuggucuuuca

SEQ ID NO: 263924 - RNA, 19 nt, Homo sapiens
  misc_RNA (1)...(19): siRNA sense strand
auacugcaaucuaaggaaa

SEQ ID NO: 263925 - RNA, 19 nt, Homo sapiens
  misc_RNA (1)...(19): siRNA sense strand
gcacugcaaaugugaaagu

SEQ ID NO: 263926 - RNA, 19 nt, Homo sapiens
  misc_RNA (1)...(19): siRNA sense strand
guagaugaccugacugaag

SEQ ID NO: 263927 - RNA, 19 nt, Homo sapiens
  misc_RNA (1)...(19): siRNA sense strand
gagcaagaguugaaaagug

SEQ ID NO: 263928 - RNA, 19 nt, Homo sapiens
  misc_RNA (1)...(19): siRNA sense strand
ucaauaaacugcacgaaua

SEQ ID NO: 263929 - RNA, 19 nt, Homo sapiens
  misc_RNA (1)...(19): siRNA sense strand
ccaagucgaucccaaacua

SEQ ID NO: 263930 - RNA, 19 nt, Homo sapiens
  misc_RNA (1)...(19): siRNA sense strand
gcuucgaacuucuacuuua

SEQ ID NO: 263931 - RNA, 19 nt, Homo sapiens
  misc_RNA (1)...(19): siRNA sense strand
gagcgagucuacagcauga

SEQ ID NO: 263932 - RNA, 19 nt, Homo sapiens
  misc_RNA (1)...(19): siRNA sense strand
gaucaaugcuucgaacuuc

SEQ ID NO: 263933 - RNA, 19 nt, Homo sapiens
  misc_RNA (1)...(19): siRNA sense strand
gaacgagguccacuucuuc

SEQ ID NO: 263934 - RNA, 19 nt, Homo sapiens
  misc_RNA (1)...(19): siRNA sense strand
gaucccaaacuacucaaua

SEQ ID NO: 263935 - RNA, 19 nt, Homo sapiens
  misc_RNA (1)...(19): siRNA sense strand
cuucgaacuucuacuuuaa

SEQ ID NO: 263936 - RNA, 19 nt, Homo sapiens
  misc_RNA (1)...(19): siRNA sense strand
ccaaacuacucaauaaacu

SEQ ID NO: 263937 - RNA, 19 nt, Homo sapiens
  misc_RNA (1)...(19): siRNA sense strand
ggagaacgagguccacuuc

SEQ ID NO: 263938 - RNA, 19 nt, Homo sapiens
  misc_RNA (1)...(19): siRNA sense strand
caauaaacugcacgaauau

SEQ ID NO: 263939 - RNA, 19 nt, Homo sapiens
  misc_RNA (1)...(19): siRNA sense strand
gcacgaauauuuucaugag

SEQ ID NO: 263940 - RNA, 19 nt, Homo sapiens
  misc_RNA (1)...(19): siRNA sense strand
cgggaccgcugcuuacaug

SEQ ID NO: 263941 - RNA, 19 nt, Homo sapiens
  misc_RNA (1)...(19): siRNA sense strand
gaccgcugcuuacaugagu

SEQ ID NO: 263942 - RNA, 19 nt, Homo sapiens
  misc_RNA (1)...(19): siRNA sense strand
aucccaaacuacucaauaa

SEQ ID NO: 263943 - RNA, 19 nt, Homo sapiens
  misc_RNA (1)...(19): siRNA sense strand
gucgagagguuccuaaagc

SEQ ID NO: 263944 - RNA, 19 nt, Homo sapiens
  misc_RNA (1)...(19): siRNA sense strand
ucaaugcuucgaacuucua

SEQ ID NO: 263945 - RNA, 19 nt, Homo sapiens
  misc_RNA (1)...(19): siRNA sense strand
caaacuacucaauaaacug

SEQ ID NO: 263946 - RNA, 19 nt, Homo sapiens
  misc_RNA (1)...(19): siRNA sense strand
cggagcgcgugcuaucuga

SEQ ID NO: 263947 - RNA, 19 nt, Homo sapiens
  misc_RNA (1)...(19): siRNA sense strand
uucaugagccaaauaagaa

SEQ ID NO: 263948 - RNA, 19 nt, Homo sapiens
  misc_RNA (1)...(19): siRNA sense strand
cugcuuacaugaguccaaa

SEQ ID NO: 263949 - RNA, 19 nt, Homo sapiens
  misc_RNA (1)...(19): siRNA sense strand
uaacaaaaccaagggcuuu

SEQ ID NO: 263950 - RNA, 19 nt, Homo sapiens
  misc_RNA (1)...(19): siRNA sense strand
acaaccacaugcagaagca

SEQ ID NO: 263951 - RNA, 19 nt, Homo sapiens
  misc_RNA (1)...(19): siRNA sense strand
uuucaugagccaaauaaga

SEQ ID NO: 263952 - RNA, 19 nt, Homo sapiens
  misc_RNA (1)...(19): siRNA sense strand
ucgaacuucuacuuuaaca

SEQ ID NO: 263953 - RNA, 19 nt, Homo sapiens
  misc_RNA (1)...(19): siRNA sense strand
ggcucaauguggacuacaa

SEQ ID NO: 263954 - RNA, 19 nt, Homo sapiens
  misc_RNA (1)...(19): siRNA sense strand
gcgcacugcuggagaugcu

SEQ ID NO: 263955 - RNA, 19 nt, Homo sapiens
  misc_RNA (1)...(19): siRNA sense strand
ucgacugggaggagcauua

SEQ ID NO: 263956 - RNA, 19 nt, Homo sapiens
  misc_RNA (1)...(19): siRNA sense strand
ggacuacaaggcccucaac

SEQ ID NO: 263957 - RNA, 19 nt, Homo sapiens
  misc_RNA (1)...(19): siRNA sense strand
uaaaggcgcugcuugauuu

SEQ ID NO: 263958 - RNA, 19 nt, Homo sapiens
  misc_RNA (1)...(19): siRNA sense strand
gaacucagcccgcaucauu

SEQ ID NO: 263959 - RNA, 19 nt, Homo sapiens
  misc_RNA (1)...(19): siRNA sense strand
ggauaaagauggagacaag

SEQ ID NO: 263960 - RNA, 19 nt, Homo sapiens
  misc_RNA (1)...(19): siRNA sense strand
uggaggagcugcugaacaa

SEQ ID NO: 263961 - RNA, 19 nt, Homo sapiens
  misc_RNA (1)...(19): siRNA sense strand
uugaggagguucuggauuu

SEQ ID NO: 263962 - RNA, 19 nt, Homo sapiens
  misc_RNA (1)...(19): siRNA sense strand
gaggagcaguucacagugu

SEQ ID NO: 263963 - RNA, 19 nt, Homo sapiens
  misc_RNA (1)...(19): siRNA sense strand
acacugcccuccaucuaaa

SEQ ID NO: 263964 - RNA, 19 nt, Homo sapiens
  misc_RNA (1)...(19): siRNA sense strand
caacacugcccuccaucua

SEQ ID NO: 263965 - RNA, 19 nt, Homo sapiens
  misc_RNA (1)...(19): siRNA sense strand
ccacaacuacugcgugauu

SEQ ID NO: 263966 - RNA, 19 nt, Homo sapiens
  misc_RNA (1)...(19): siRNA sense strand
ucacagacgucaucaccau

SEQ ID NO: 263967 - RNA, 19 nt, Homo sapiens
  misc_RNA (1)...(19): siRNA sense strand
gaacgagggcaucuaugug

SEQ ID NO: 263968 - RNA, 19 nt, Homo sapiens
  misc_RNA (1)...(19): siRNA sense strand
gcagaugacagaggccaua

SEQ ID NO: 263969 - RNA, 19 nt, Homo sapiens
  misc_RNA (1)...(19): siRNA sense strand
uaacagugcaggacacaga

SEQ ID NO: 263970 - RNA, 19 nt, Homo sapiens
  misc_RNA (1)...(19): siRNA sense strand
ggaaaggugcgcgcuguga

SEQ ID NO: 263971 - RNA, 19 nt, Homo sapiens
  misc_RNA (1)...(19): siRNA sense strand
ucgaugacuuccauaagaa

SEQ ID NO: 263972 - RNA, 19 nt, Homo sapiens
  misc_RNA (1)...(19): siRNA sense strand
gagaaggacacagcuaaga

SEQ ID NO: 263973 - RNA, 19 nt, Homo sapiens
  misc_RNA (1)...(19): siRNA sense strand
ggccugacuucuucacaga

SEQ ID NO: 263974 - RNA, 19 nt, Homo sapiens
  misc_RNA (1)...(19): siRNA sense strand
cauucgcacugcugucuuu

SEQ ID NO: 263975 - RNA, 19 nt, Homo sapiens
  misc_RNA (1)...(19): siRNA sense strand
gugagaaggacacagcuaa

SEQ ID NO: 263976 - RNA, 19 nt, Homo sapiens
  misc_RNA (1)...(19): siRNA sense strand
gccuacaacuggcacuuug

SEQ ID NO: 263977 - RNA, 19 nt, Homo sapiens
  misc_RNA (1)...(19): siRNA sense strand
gcuuggugcuguuugaugu

SEQ ID NO: 263978 - RNA, 19 nt, Homo sapiens
  misc_RNA (1)...(19): siRNA sense strand
cuaaaggcgcugcuugauu

SEQ ID NO: 263979 - RNA, 19 nt, Homo sapiens
  misc_RNA (1)...(19): siRNA sense strand
cgagaacgagggcaucuau

SEQ ID NO: 263980 - RNA, 19 nt, Homo sapiens
  misc_RNA (1)...(19): siRNA sense strand
uggcugagguggaggugaa

SEQ ID NO: 263981 - RNA, 19 nt, Homo sapiens
  misc_RNA (1)...(19): siRNA sense strand
ccaucgagaucaccaccaa

SEQ ID NO: 263982 - RNA, 19 nt, Homo sapiens
  misc_RNA (1)...(19): siRNA sense strand
ucaagggagagaagucuuu

SEQ ID NO: 263983 - RNA, 19 nt, Homo sapiens
  misc_RNA (1)...(19): siRNA sense strand
gaaaggugcgcgcugugau

SEQ ID NO: 263984 - RNA, 19 nt, Homo sapiens
  misc_RNA (1)...(19): siRNA sense strand
gcccaacacugcccuccau

SEQ ID NO: 263985 - RNA, 19 nt, Homo sapiens
  misc_RNA (1)...(19): siRNA sense strand
gaccggauggcaagaauca

SEQ ID NO: 263986 - RNA, 19 nt, Homo sapiens
  misc_RNA (1)...(19): siRNA sense strand
caaugagaggguacuguuu

SEQ ID NO: 263987 - RNA, 19 nt, Homo sapiens
  misc_RNA (1)...(19): siRNA sense strand
caggagagcagcuggaaca

SEQ ID NO: 263988 - RNA, 19 nt, Homo sapiens
  misc_RNA (1)...(19): siRNA sense strand
uucgaugacuuccauaaga

SEQ ID NO: 263989 - RNA, 19 nt, Homo sapiens
  misc_RNA (1)...(19): siRNA sense strand
gaaguccugugggagaaag

SEQ ID NO: 263990 - RNA, 19 nt, Homo sapiens
  misc_RNA (1)...(19): siRNA sense strand
gggcaucuaugugcaggau

SEQ ID NO: 263991 - RNA, 19 nt, Homo sapiens
  misc_RNA (1)...(19): siRNA sense strand
ugaggagguucuggauuug

SEQ ID NO: 263992 - RNA, 19 nt, Homo sapiens
  misc_RNA (1)...(19): siRNA sense strand
ccagucagaagccgagaaa

SEQ ID NO: 263993 - RNA, 19 nt, Homo sapiens
  misc_RNA (1)...(19): siRNA sense strand
aggaguggcugguaacagu

SEQ ID NO: 263994 - RNA, 19 nt, Homo sapiens
  misc_RNA (1)...(19): siRNA sense strand
agguggaggugaagaaguu

SEQ ID NO: 263995 - RNA, 19 nt, Homo sapiens
  misc_RNA (1)...(19): siRNA sense strand
caguggagccuguggauca

SEQ ID NO: 263996 - RNA, 19 nt, Homo sapiens
  misc_RNA (1)...(19): siRNA sense strand
acaaugagaggguacuguu

SEQ ID NO: 263997 - RNA, 19 nt, Homo sapiens
  misc_RNA (1)...(19): siRNA sense strand
ugacuuccauaagaacuca

SEQ ID NO: 263998 - RNA, 19 nt, Homo sapiens
  misc_RNA (1)...(19): siRNA sense strand
gaagaaguucaagcagaug

SEQ ID NO: 263999 - RNA, 19 nt, Homo sapiens
  misc_RNA (1)...(19): siRNA sense strand
uguaggugaugccugcaaa

SEQ ID NO: 264000 - RNA, 19 nt, Homo sapiens
  misc_RNA (1)...(19): siRNA sense strand
gccaggccaucccucuaga

SEQ ID NO: 264001 - RNA, 19 nt, Homo sapiens
  misc_RNA (1)...(19): siRNA sense strand
aaugagaggguacuguuug

SEQ ID NO: 264002 - RNA, 19 nt, Homo sapiens
  misc_RNA (1)...(19): siRNA sense strand
caggggaggugcuggaaaa

SEQ ID NO: 264003 - RNA, 19 nt, Homo sapiens
  misc_RNA (1)...(19): siRNA sense strand
guacgacuaccgagagaag

SEQ ID NO: 264004 - RNA, 19 nt, Homo sapiens
  misc_RNA (1)...(19): siRNA sense strand
agaacgagggcaucuaugu

SEQ ID NO: 264005 - RNA, 19 nt, Homo sapiens
  misc_RNA (1)...(19): siRNA sense strand
aaaggugcgcgcugugauu

SEQ ID NO: 264006 - RNA, 19 nt, Homo sapiens
  misc_RNA (1)...(19): siRNA sense strand
gacgucaucaccaucgaaa

SEQ ID NO: 264007 - RNA, 19 nt, Homo sapiens
  misc_RNA (1)...(19): siRNA sense strand
cggugcagguguacgacua

SEQ ID NO: 264008 - RNA, 19 nt, Homo sapiens
  misc_RNA (1)...(19): siRNA sense strand
ggugagaaggacacagcua

SEQ ID NO: 264009 - RNA, 19 nt, Homo sapiens
  misc_RNA (1)...(19): siRNA sense strand
guaccucccagcgguguuu

SEQ ID NO: 264010 - RNA, 19 nt, Homo sapiens
  misc_RNA (1)...(19): siRNA sense strand
gggaggugcuggaaaagga

SEQ ID NO: 264011 - RNA, 19 nt, Homo sapiens
  misc_RNA (1)...(19): siRNA sense strand
ggugcgcgcugugauugga

SEQ ID NO: 264012 - RNA, 19 nt, Homo sapiens
  misc_RNA (1)...(19): siRNA sense strand
guaugugccaucugccaaa

SEQ ID NO: 264013 - RNA, 19 nt, Homo sapiens
  misc_RNA (1)...(19): siRNA sense strand
ggaggucguggagaucauu

SEQ ID NO: 264014 - RNA, 19 nt, Homo sapiens
  misc_RNA (1)...(19): siRNA sense strand
gaaguucaagcagaugaca

SEQ ID NO: 264015 - RNA, 19 nt, Homo sapiens
  misc_RNA (1)...(19): siRNA sense strand
guggaggucgggccaaaga

SEQ ID NO: 264016 - RNA, 19 nt, Homo sapiens
  misc_RNA (1)...(19): siRNA sense strand
gaagguccgagagcuggaa

SEQ ID NO: 264017 - RNA, 19 nt, Homo sapiens
  misc_RNA (1)...(19): siRNA sense strand
gauuggaagcaccuacaug

SEQ ID NO: 264018 - RNA, 19 nt, Homo sapiens
  misc_RNA (1)...(19): siRNA sense strand
ggcagaagcgcguggucaa

SEQ ID NO: 264019 - RNA, 19 nt, Homo sapiens
  misc_RNA (1)...(19): siRNA sense strand
gaugucacagggcaaguuc

SEQ ID NO: 264020 - RNA, 19 nt, Homo sapiens
  misc_RNA (1)...(19): siRNA sense strand
ggggaggaguggcugguaa

SEQ ID NO: 264021 - RNA, 19 nt, Homo sapiens
  misc_RNA (1)...(19): siRNA sense strand
aacugcagcuggccuacaa

SEQ ID NO: 264022 - RNA, 19 nt, Homo sapiens
  misc_RNA (1)...(19): siRNA sense strand
gagaacgagggcaucuaug

SEQ ID NO: 264023 - RNA, 19 nt, Homo sapiens
  misc_RNA (1)...(19): siRNA sense strand
ggagagcagcuggaacaag

SEQ ID NO: 264024 - RNA, 19 nt, Homo sapiens
  misc_RNA (1)...(19): siRNA sense strand
gcaggagaugaguggcuuu

SEQ ID NO: 264025 - RNA, 19 nt, Homo sapiens
  misc_RNA (1)...(19): siRNA sense strand
guguacgacuaccgagaga

SEQ ID NO: 264026 - RNA, 19 nt, Homo sapiens
  misc_RNA (1)...(19): siRNA sense strand
ugugccaucugccaaagug

SEQ ID NO: 264027 - RNA, 19 nt, Homo sapiens
  misc_RNA (1)...(19): siRNA sense strand
guguggaggucgggccaaa

SEQ ID NO: 264028 - RNA, 19 nt, Homo sapiens
  misc_RNA (1)...(19): siRNA sense strand
aaguggaggucguggagau

SEQ ID NO: 264029 - RNA, 19 nt, Homo sapiens
  misc_RNA (1)...(19): siRNA sense strand
ggccuacaacuggcacuuu

SEQ ID NO: 264030 - RNA, 19 nt, Homo sapiens
  misc_RNA (1)...(19): siRNA sense strand
uaaaggcgcugcuugauuu

SEQ ID NO: 264031 - RNA, 19 nt, Homo sapiens
  misc_RNA (1)...(19): siRNA sense strand
gaacucagcccgcaucauu

SEQ ID NO: 264032 - RNA, 19 nt, Homo sapiens
  misc_RNA (1)...(19): siRNA sense strand
ggauaaagauggagacaag

SEQ ID NO: 264033 - RNA, 19 nt, Homo sapiens
  misc_RNA (1)...(19): siRNA sense strand
uggaggagcugcugaacaa

SEQ ID NO: 264034 - RNA, 19 nt, Homo sapiens
  misc_RNA (1)...(19): siRNA sense strand
uugaggagguucuggauuu

SEQ ID NO: 264035 - RNA, 19 nt, Homo sapiens
  misc_RNA (1)...(19): siRNA sense strand
gaggagcaguucacagugu

SEQ ID NO: 264036 - RNA, 19 nt, Homo sapiens
  misc_RNA (1)...(19): siRNA sense strand
acacugcccuccaucuaaa

SEQ ID NO: 264037 - RNA, 19 nt, Homo sapiens
  misc_RNA (1)...(19): siRNA sense strand
caacacugcccuccaucua

SEQ ID NO: 264038 - RNA, 19 nt, Homo sapiens
  misc_RNA (1)...(19): siRNA sense strand
ccacaacuacugcgugauu

SEQ ID NO: 264039 - RNA, 19 nt, Homo sapiens
  misc_RNA (1)...(19): siRNA sense strand
ucacagacgucaucaccau

SEQ ID NO: 264040 - RNA, 19 nt, Homo sapiens
  misc_RNA (1)...(19): siRNA sense strand
gaacgagggcaucuaugug

SEQ ID NO: 264041 - RNA, 19 nt, Homo sapiens
  misc_RNA (1)...(19): siRNA sense strand
gcagaugacagaggccaua

SEQ ID NO: 264042 - RNA, 19 nt, Homo sapiens
  misc_RNA (1)...(19): siRNA sense strand
uaacagugcaggacacaga

SEQ ID NO: 264043 - RNA, 19 nt, Homo sapiens
  misc_RNA (1)...(19): siRNA sense strand
ggaaaggugcgcgcuguga

SEQ ID NO: 264044 - RNA, 19 nt, Homo sapiens
  misc_RNA (1)...(19): siRNA sense strand
ucgaugacuuccauaagaa

SEQ ID NO: 264045 - RNA, 19 nt, Homo sapiens
  misc_RNA (1)...(19): siRNA sense strand
gagaaggacacagcuaaga

SEQ ID NO: 264046 - RNA, 19 nt, Homo sapiens
  misc_RNA (1)...(19): siRNA sense strand
ggccugacuucuucacaga

SEQ ID NO: 264047 - RNA, 19 nt, Homo sapiens
  misc_RNA (1)...(19): siRNA sense strand
cauucgcacugcugucuuu

SEQ ID NO: 264048 - RNA, 19 nt, Homo sapiens
  misc_RNA (1)...(19): siRNA sense strand
gugagaaggacacagcuaa

SEQ ID NO: 264049 - RNA, 19 nt, Homo sapiens
  misc_RNA (1)...(19): siRNA sense strand
gccuacaacuggcacuuug

SEQ ID NO: 264050 - RNA, 19 nt, Homo sapiens
  misc_RNA (1)...(19): siRNA sense strand
gcuuggugcuguuugaugu

SEQ ID NO: 264051 - RNA, 19 nt, Homo sapiens
  misc_RNA (1)...(19): siRNA sense strand
cuaaaggcgcugcuugauu

SEQ ID NO: 264052 - RNA, 19 nt, Homo sapiens
  misc_RNA (1)...(19): siRNA sense strand
cgagaacgagggcaucuau

SEQ ID NO: 264053 - RNA, 19 nt, Homo sapiens
  misc_RNA (1)...(19): siRNA sense strand
uggcugagguggaggugaa

SEQ ID NO: 264054 - RNA, 19 nt, Homo sapiens
  misc_RNA (1)...(19): siRNA sense strand
ccaucgagaucaccaccaa

SEQ ID NO: 264055 - RNA, 19 nt, Homo sapiens
  misc_RNA (1)...(19): siRNA sense strand
ucaagggagagaagucuuu

SEQ ID NO: 264056 - RNA, 19 nt, Homo sapiens
  misc_RNA (1)...(19): siRNA sense strand
gaaaggugcgcgcugugau

SEQ ID NO: 264057 - RNA, 19 nt, Homo sapiens
  misc_RNA (1)...(19): siRNA sense strand
gcccaacacugcccuccau

SEQ ID NO: 264058 - RNA, 19 nt, Homo sapiens
  misc_RNA (1)...(19): siRNA sense strand
gaccggauggcaagaauca

SEQ ID NO: 264059 - RNA, 19 nt, Homo sapiens
  misc_RNA (1)...(19): siRNA sense strand
caaugagaggguacuguuu

SEQ ID NO: 264060 - RNA, 19 nt, Homo sapiens
  misc_RNA (1)...(19): siRNA sense strand
caggagagcagcuggaaca

SEQ ID NO: 264061 - RNA, 19 nt, Homo sapiens
  misc_RNA (1)...(19): siRNA sense strand
uucgaugacuuccauaaga

SEQ ID NO: 264062 - RNA, 19 nt, Homo sapiens
  misc_RNA (1)...(19): siRNA sense strand
gaaguccugugggagaaag

SEQ ID NO: 264063 - RNA, 19 nt, Homo sapiens
  misc_RNA (1)...(19): siRNA sense strand
gggcaucuaugugcaggau

SEQ ID NO: 264064 - RNA, 19 nt, Homo sapiens
  misc_RNA (1)...(19): siRNA sense strand
ugaggagguucuggauuug

SEQ ID NO: 264065 - RNA, 19 nt, Homo sapiens
  misc_RNA (1)...(19): siRNA sense strand
ccagucagaagccgagaaa

SEQ ID NO: 264066 - RNA, 19 nt, Homo sapiens
  misc_RNA (1)...(19): siRNA sense strand
aggaguggcugguaacagu

SEQ ID NO: 264067 - RNA, 19 nt, Homo sapiens
  misc_RNA (1)...(19): siRNA sense strand
agguggaggugaagaaguu

SEQ ID NO: 264068 - RNA, 19 nt, Homo sapiens
  misc_RNA (1)...(19): siRNA sense strand
caguggagccuguggauca

SEQ ID NO: 264069 - RNA, 19 nt, Homo sapiens
  misc_RNA (1)...(19): siRNA sense strand
acaaugagaggguacuguu

SEQ ID NO: 264070 - RNA, 19 nt, Homo sapiens
  misc_RNA (1)...(19): siRNA sense strand
ugacuuccauaagaacuca

SEQ ID NO: 264071 - RNA, 19 nt, Homo sapiens
  misc_RNA (1)...(19): siRNA sense strand
gaagaaguucaagcagaug

SEQ ID NO: 264072 - RNA, 19 nt, Homo sapiens
  misc_RNA (1)...(19): siRNA sense strand
uguaggugaugccugcaaa

SEQ ID NO: 264073 - RNA, 19 nt, Homo sapiens
  misc_RNA (1)...(19): siRNA sense strand
gccaggccaucccucuaga

SEQ ID NO: 264074 - RNA, 19 nt, Homo sapiens
  misc_RNA (1)...(19): siRNA sense strand
aaugagaggguacuguuug

SEQ ID NO: 264075 - RNA, 19 nt, Homo sapiens
  misc_RNA (1)...(19): siRNA sense strand
caggggaggugcuggaaaa

SEQ ID NO: 264076 - RNA, 19 nt, Homo sapiens
  misc_RNA (1)...(19): siRNA sense strand
guacgacuaccgagagaag

SEQ ID NO: 264077 - RNA, 19 nt, Homo sapiens
  misc_RNA (1)...(19): siRNA sense strand
agaacgagggcaucuaugu

SEQ ID NO: 264078 - RNA, 19 nt, Homo sapiens
  misc_RNA (1)...(19): siRNA sense strand
aaaggugcgcgcugugauu

SEQ ID NO: 264079 - RNA, 19 nt, Homo sapiens
  misc_RNA (1)...(19): siRNA sense strand
gacgucaucaccaucgaaa

SEQ ID NO: 264080 - RNA, 19 nt, Homo sapiens
  misc_RNA (1)...(19): siRNA sense strand
cggugcagguguacgacua

SEQ ID NO: 264081 - RNA, 19 nt, Homo sapiens
  misc_RNA (1)...(19): siRNA sense strand
ggugagaaggacacagcua

SEQ ID NO: 264082 - RNA, 19 nt, Homo sapiens
  misc_RNA (1)...(19): siRNA sense strand
guaccucccagcgguguuu

SEQ ID NO: 264083 - RNA, 19 nt, Homo sapiens
  misc_RNA (1)...(19): siRNA sense strand
gggaggugcuggaaaagga

SEQ ID NO: 264084 - RNA, 19 nt, Homo sapiens
  misc_RNA (1)...(19): siRNA sense strand
ggugcgcgcugugauugga

SEQ ID NO: 264085 - RNA, 19 nt, Homo sapiens
  misc_RNA (1)...(19): siRNA sense strand
guaugugccaucugccaaa

SEQ ID NO: 264086 - RNA, 19 nt, Homo sapiens
  misc_RNA (1)...(19): siRNA sense strand
ggaggucguggagaucauu

SEQ ID NO: 264087 - RNA, 19 nt, Homo sapiens
  misc_RNA (1)...(19): siRNA sense strand
gaaguucaagcagaugaca

SEQ ID NO: 264088 - RNA, 19 nt, Homo sapiens
  misc_RNA (1)...(19): siRNA sense strand
guggaggucgggccaaaga

SEQ ID NO: 264089 - RNA, 19 nt, Homo sapiens
  misc_RNA (1)...(19): siRNA sense strand
gaagguccgagagcuggaa

SEQ ID NO: 264090 - RNA, 19 nt, Homo sapiens
  misc_RNA (1)...(19): siRNA sense strand
gauuggaagcaccuacaug

SEQ ID NO: 264091 - RNA, 19 nt, Homo sapiens
  misc_RNA (1)...(19): siRNA sense strand
ggcagaagcgcguggucaa

SEQ ID NO: 264092 - RNA, 19 nt, Homo sapiens
  misc_RNA (1)...(19): siRNA sense strand
gaugucacagggcaaguuc

SEQ ID NO: 264093 - RNA, 19 nt, Homo sapiens
  misc_RNA (1)...(19): siRNA sense strand
ggggaggaguggcugguaa

SEQ ID NO: 264094 - RNA, 19 nt, Homo sapiens
  misc_RNA (1)...(19): siRNA sense strand
aacugcagcuggccuacaa

SEQ ID NO: 264095 - RNA, 19 nt, Homo sapiens
  misc_RNA (1)...(19): siRNA sense strand
gagaacgagggcaucuaug

SEQ ID NO: 264096 - RNA, 19 nt, Homo sapiens
  misc_RNA (1)...(19): siRNA sense strand
ggagagcagcuggaacaag

SEQ ID NO: 264097 - RNA, 19 nt, Homo sapiens
  misc_RNA (1)...(19): siRNA sense strand
gcaggagaugaguggcuuu

SEQ ID NO: 264098 - RNA, 19 nt, Homo sapiens
  misc_RNA (1)...(19): siRNA sense strand
guguacgacuaccgagaga

SEQ ID NO: 264099 - RNA, 19 nt, Homo sapiens
  misc_RNA (1)...(19): siRNA sense strand
ugugccaucugccaaagug

SEQ ID NO: 264100 - RNA, 19 nt, Homo sapiens
  misc_RNA (1)...(19): siRNA sense strand
guguggaggucgggccaaa

SEQ ID NO: 264101 - RNA, 19 nt, Homo sapiens
  misc_RNA (1)...(19): siRNA sense strand
aaguggaggucguggagau

SEQ ID NO: 264102 - RNA, 19 nt, Homo sapiens
  misc_RNA (1)...(19): siRNA sense strand
ggccuacaacuggcacuuu

SEQ ID NO: 264103 - RNA, 19 nt, Homo sapiens
  misc_RNA (1)...(19): siRNA sense strand
gaggagagcucuaauauua

SEQ ID NO: 264104 - RNA, 19 nt, Homo sapiens
  misc_RNA (1)...(19): siRNA sense strand
gaagaaagcugacaaugaa

SEQ ID NO: 264105 - RNA, 19 nt, Homo sapiens
  misc_RNA (1)...(19): siRNA sense strand
gaagacaaaugaaagcuaa

SEQ ID NO: 264106 - RNA, 19 nt, Homo sapiens
  misc_RNA (1)...(19): siRNA sense strand
caacaagaaugaagaugua

SEQ ID NO: 264107 - RNA, 19 nt, Homo sapiens
  misc_RNA (1)...(19): siRNA sense strand
gauaaagacugcuguuaga

SEQ ID NO: 264108 - RNA, 19 nt, Homo sapiens
  misc_RNA (1)...(19): siRNA sense strand
ggaagaaagcugacaauga

SEQ ID NO: 264109 - RNA, 19 nt, Homo sapiens
  misc_RNA (1)...(19): siRNA sense strand
gaagauagauucuguugcu

SEQ ID NO: 264110 - RNA, 19 nt, Homo sapiens
  misc_RNA (1)...(19): siRNA sense strand
caauucgucucaagcauua

SEQ ID NO: 264111 - RNA, 19 nt, Homo sapiens
  misc_RNA (1)...(19): siRNA sense strand
gaacaaaguuacagacaac

SEQ ID NO: 264112 - RNA, 19 nt, Homo sapiens
  misc_RNA (1)...(19): siRNA sense strand
gaagcgagcccuuacauug

SEQ ID NO: 264113 - RNA, 19 nt, Homo sapiens
  misc_RNA (1)...(19): siRNA sense strand
gaagauguaugcagcuguu

SEQ ID NO: 264114 - RNA, 19 nt, Homo sapiens
  misc_RNA (1)...(19): siRNA sense strand
ggaauugaaacaccaaaua

SEQ ID NO: 264115 - RNA, 19 nt, Homo sapiens
  misc_RNA (1)...(19): siRNA sense strand
caacaagcccaguaguuua

SEQ ID NO: 264116 - RNA, 19 nt, Homo sapiens
  misc_RNA (1)...(19): siRNA sense strand
caaagauacuucaacaaga

SEQ ID NO: 264117 - RNA, 19 nt, Homo sapiens
  misc_RNA (1)...(19): siRNA sense strand
gaagaugucaagcccuuua

SEQ ID NO: 264118 - RNA, 19 nt, Homo sapiens
  misc_RNA (1)...(19): siRNA sense strand
gauaacaucucaacuacca

SEQ ID NO: 264119 - RNA, 19 nt, Homo sapiens
  misc_RNA (1)...(19): siRNA sense strand
ggagccagcaguaauaaua

SEQ ID NO: 264120 - RNA, 19 nt, Homo sapiens
  misc_RNA (1)...(19): siRNA sense strand
gagugaaggcuuuaaauuu

SEQ ID NO: 264121 - RNA, 19 nt, Homo sapiens
  misc_RNA (1)...(19): siRNA sense strand
gcaacaagcccaguaguuu

SEQ ID NO: 264122 - RNA, 19 nt, Homo sapiens
  misc_RNA (1)...(19): siRNA sense strand
gcagucccauguuuaaauu

SEQ ID NO: 264123 - RNA, 19 nt, Homo sapiens
  misc_RNA (1)...(19): siRNA sense strand
aaagguggauucucaauau

SEQ ID NO: 264124 - RNA, 19 nt, Homo sapiens
  misc_RNA (1)...(19): siRNA sense strand
caacuugucugccuuugga

SEQ ID NO: 264125 - RNA, 19 nt, Homo sapiens
  misc_RNA (1)...(19): siRNA sense strand
uaaacagacuggaauugaa

SEQ ID NO: 264126 - RNA, 19 nt, Homo sapiens
  misc_RNA (1)...(19): siRNA sense strand
gaugagaauucuucaaagu

SEQ ID NO: 264127 - RNA, 19 nt, Homo sapiens
  misc_RNA (1)...(19): siRNA sense strand
ggaaagugcugagacuaug

SEQ ID NO: 264128 - RNA, 19 nt, Homo sapiens
  misc_RNA (1)...(19): siRNA sense strand
caaauuuggugucucauca

SEQ ID NO: 264129 - RNA, 19 nt, Homo sapiens
  misc_RNA (1)...(19): siRNA sense strand
agaauuccauccauuguuu

SEQ ID NO: 264130 - RNA, 19 nt, Homo sapiens
  misc_RNA (1)...(19): siRNA sense strand
gauaacaagugcaguacug

SEQ ID NO: 264131 - RNA, 19 nt, Homo sapiens
  misc_RNA (1)...(19): siRNA sense strand
gauaggagugggauagaua

SEQ ID NO: 264132 - RNA, 19 nt, Homo sapiens
  misc_RNA (1)...(19): siRNA sense strand
uucaagagcuucugauaaa

SEQ ID NO: 264133 - RNA, 19 nt, Homo sapiens
  misc_RNA (1)...(19): siRNA sense strand
caucaggaguguucacauu

SEQ ID NO: 264134 - RNA, 19 nt, Homo sapiens
  misc_RNA (1)...(19): siRNA sense strand
agaaaugccugccaccaaa

SEQ ID NO: 264135 - RNA, 19 nt, Homo sapiens
  misc_RNA (1)...(19): siRNA sense strand
ggauugugauaccuguuua

SEQ ID NO: 264136 - RNA, 19 nt, Homo sapiens
  misc_RNA (1)...(19): siRNA sense strand
uaacaaggccuucucuuca

SEQ ID NO: 264137 - RNA, 19 nt, Homo sapiens
  misc_RNA (1)...(19): siRNA sense strand
caggaagacuaaucaaaga

SEQ ID NO: 264138 - RNA, 19 nt, Homo sapiens
  misc_RNA (1)...(19): siRNA sense strand
gcaagagccugucacuucu

SEQ ID NO: 264139 - RNA, 19 nt, Homo sapiens
  misc_RNA (1)...(19): siRNA sense strand
uaacaagcacuggaaauuu

SEQ ID NO: 264140 - RNA, 19 nt, Homo sapiens
  misc_RNA (1)...(19): siRNA sense strand
gaugaggagagcucuaaua

SEQ ID NO: 264141 - RNA, 19 nt, Homo sapiens
  misc_RNA (1)...(19): siRNA sense strand
ugacacaucuuccucaucu

SEQ ID NO: 264142 - RNA, 19 nt, Homo sapiens
  misc_RNA (1)...(19): siRNA sense strand
ccaguuagaagacaaauga

SEQ ID NO: 264143 - RNA, 19 nt, Homo sapiens
  misc_RNA (1)...(19): siRNA sense strand
ggagagcucuaauauuacu

SEQ ID NO: 264144 - RNA, 19 nt, Homo sapiens
  misc_RNA (1)...(19): siRNA sense strand
gaagacaccaccugaagau

SEQ ID NO: 264145 - RNA, 19 nt, Homo sapiens
  misc_RNA (1)...(19): siRNA sense strand
gaauauugcagucuuuaga

SEQ ID NO: 264146 - RNA, 19 nt, Homo sapiens
  misc_RNA (1)...(19): siRNA sense strand
caaauuauccagauguguu

SEQ ID NO: 264147 - RNA, 19 nt, Homo sapiens
  misc_RNA (1)...(19): siRNA sense strand
caacuaguacugcuucaaa

SEQ ID NO: 264148 - RNA, 19 nt, Homo sapiens
  misc_RNA (1)...(19): siRNA sense strand
cuaguacugcuucaaauua

SEQ ID NO: 264149 - RNA, 19 nt, Homo sapiens
  misc_RNA (1)...(19): siRNA sense strand
cagcagcacuacaaauuuc

SEQ ID NO: 264150 - RNA, 19 nt, Homo sapiens
  misc_RNA (1)...(19): siRNA sense strand
caaaguccacauuuaguuu

SEQ ID NO: 264151 - RNA, 19 nt, Homo sapiens
  misc_RNA (1)...(19): siRNA sense strand
caagauagcaaacuagcaa

SEQ ID NO: 264152 - RNA, 19 nt, Homo sapiens
  misc_RNA (1)...(19): siRNA sense strand
gcagcagcacuacaaauuu

SEQ ID NO: 264153 - RNA, 19 nt, Homo sapiens
  misc_RNA (1)...(19): siRNA sense strand
gcaacucagugcacaaucu

SEQ ID NO: 264154 - RNA, 19 nt, Homo sapiens
  misc_RNA (1)...(19): siRNA sense strand
ggacuuucuucugguuuaa

SEQ ID NO: 264155 - RNA, 19 nt, Homo sapiens
  misc_RNA (1)...(19): siRNA sense strand
aaauaggugugucaucuga

SEQ ID NO: 264156 - RNA, 19 nt, Homo sapiens
  misc_RNA (1)...(19): siRNA sense strand
gauaggcacuugggauugu

SEQ ID NO: 264157 - RNA, 19 nt, Homo sapiens
  misc_RNA (1)...(19): siRNA sense strand
gaaaccaggaaguucagua

SEQ ID NO: 264158 - RNA, 19 nt, Homo sapiens
  misc_RNA (1)...(19): siRNA sense strand
caucggagccaucugaauu

SEQ ID NO: 264159 - RNA, 19 nt, Homo sapiens
  misc_RNA (1)...(19): siRNA sense strand
guuccacgcuggccagaaa

SEQ ID NO: 264160 - RNA, 19 nt, Homo sapiens
  misc_RNA (1)...(19): siRNA sense strand
aagaggaacugcccaaauc

SEQ ID NO: 264161 - RNA, 19 nt, Homo sapiens
  misc_RNA (1)...(19): siRNA sense strand
gaaccuucaacaacuagua

SEQ ID NO: 264162 - RNA, 19 nt, Homo sapiens
  misc_RNA (1)...(19): siRNA sense strand
gugcaguacuggauaugaa

SEQ ID NO: 264163 - RNA, 19 nt, Homo sapiens
  misc_RNA (1)...(19): siRNA sense strand
caagugcaguacuggauau

SEQ ID NO: 264164 - RNA, 19 nt, Homo sapiens
  misc_RNA (1)...(19): siRNA sense strand
ccagucagcuuggagauuc

SEQ ID NO: 264165 - RNA, 19 nt, Homo sapiens
  misc_RNA (1)...(19): siRNA sense strand
gcacuacaaauuucaacuu

SEQ ID NO: 264166 - RNA, 19 nt, Homo sapiens
  misc_RNA (1)...(19): siRNA sense strand
ccaggagccagcaguaaua

SEQ ID NO: 264167 - RNA, 19 nt, Homo sapiens
  misc_RNA (1)...(19): siRNA sense strand
gggaaggacagaagagaaa

SEQ ID NO: 264168 - RNA, 19 nt, Homo sapiens
  misc_RNA (1)...(19): siRNA sense strand
cagcaucagggcauucuua

SEQ ID NO: 264169 - RNA, 19 nt, Homo sapiens
  misc_RNA (1)...(19): siRNA sense strand
caaaguuacagacaacaaa

SEQ ID NO: 264170 - RNA, 19 nt, Homo sapiens
  misc_RNA (1)...(19): siRNA sense strand
cuaccuccaucaucuauug

SEQ ID NO: 264171 - RNA, 19 nt, Homo sapiens
  misc_RNA (1)...(19): siRNA sense strand
ugguuuaucuucuggagua

SEQ ID NO: 264172 - RNA, 19 nt, Homo sapiens
  misc_RNA (1)...(19): siRNA sense strand
gcagugugauacaugucua

SEQ ID NO: 264173 - RNA, 19 nt, Homo sapiens
  misc_RNA (1)...(19): siRNA sense strand
ucaggaguguucacauuug

SEQ ID NO: 264174 - RNA, 19 nt, Homo sapiens
  misc_RNA (1)...(19): siRNA sense strand
gaauucagagcaaaccaaa

SEQ ID NO: 264175 - RNA, 19 nt, Homo sapiens
  misc_RNA (1)...(19): siRNA sense strand
uaagcaacccaguuucuuu

SEQ ID NO: 264176 - RNA, 19 nt, Homo sapiens
  misc_RNA (1)...(19): siRNA sense strand
gaaagugcugagacuauga

SEQ ID NO: 264177 - RNA, 19 nt, Homo sapiens
  misc_RNA (1)...(19): siRNA sense strand
caagagcuucugauaaaga

SEQ ID NO: 264178 - RNA, 19 nt, Homo sapiens
  misc_RNA (1)...(19): siRNA sense strand
uaagacaucagaagcuaaa

SEQ ID NO: 264179 - RNA, 19 nt, Homo sapiens
  misc_RNA (1)...(19): siRNA sense strand
aaacagacuggaauugaaa

SEQ ID NO: 264180 - RNA, 19 nt, Homo sapiens
  misc_RNA (1)...(19): siRNA sense strand
acagugaacaguacaaauu

SEQ ID NO: 264181 - RNA, 19 nt, Homo sapiens
  misc_RNA (1)...(19): siRNA sense strand
ggaagacuaaucaaagaau

SEQ ID NO: 264182 - RNA, 19 nt, Homo sapiens
  misc_RNA (1)...(19): siRNA sense strand
ggugguggcauauuuggua

SEQ ID NO: 264183 - RNA, 19 nt, Homo sapiens
  misc_RNA (1)...(19): siRNA sense strand
caucugagaaggaaucuga

SEQ ID NO: 264184 - RNA, 19 nt, Homo sapiens
  misc_RNA (1)...(19): siRNA sense strand
ccagagauacugcuaaaca

SEQ ID NO: 264185 - RNA, 19 nt, Homo sapiens
  misc_RNA (1)...(19): siRNA sense strand
auacaugucuacuccagaa

SEQ ID NO: 264186 - RNA, 19 nt, Homo sapiens
  misc_RNA (1)...(19): siRNA sense strand
gacaccaccugaagauugu

SEQ ID NO: 264187 - RNA, 19 nt, Homo sapiens
  misc_RNA (1)...(19): siRNA sense strand
caacagcucggcgaauauu

SEQ ID NO: 264188 - RNA, 19 nt, Homo sapiens
  misc_RNA (1)...(19): siRNA sense strand
ggcagcagcacuacaaauu

SEQ ID NO: 264189 - RNA, 19 nt, Homo sapiens
  misc_RNA (1)...(19): siRNA sense strand
uaguucggcuuuccaguuu

SEQ ID NO: 264190 - RNA, 19 nt, Homo sapiens
  misc_RNA (1)...(19): siRNA sense strand
ggacagcaaccuagucagu

SEQ ID NO: 264191 - RNA, 19 nt, Homo sapiens
  misc_RNA (1)...(19): siRNA sense strand
gagccagcagucaguaaua

SEQ ID NO: 264192 - RNA, 19 nt, Homo sapiens
  misc_RNA (1)...(19): siRNA sense strand
caacaguuccucuaguuca

SEQ ID NO: 264193 - RNA, 19 nt, Homo sapiens
  misc_RNA (1)...(19): siRNA sense strand
gaaagaggaacugcccaaa

SEQ ID NO: 264194 - RNA, 19 nt, Homo sapiens
  misc_RNA (1)...(19): siRNA sense strand
aagcaacccaguuucuuua

SEQ ID NO: 264195 - RNA, 19 nt, Homo sapiens
  misc_RNA (1)...(19): siRNA sense strand
ggcagacucuaccaaaugu

SEQ ID NO: 264196 - RNA, 19 nt, Homo sapiens
  misc_RNA (1)...(19): siRNA sense strand
ggacaggcuuuggagacaa

SEQ ID NO: 264197 - RNA, 19 nt, Homo sapiens
  misc_RNA (1)...(19): siRNA sense strand
acaaacaagguacaaauga

SEQ ID NO: 264198 - RNA, 19 nt, Homo sapiens
  misc_RNA (1)...(19): siRNA sense strand
ucucaagcauuaacaaaca

SEQ ID NO: 264199 - RNA, 19 nt, Homo sapiens
  misc_RNA (1)...(19): siRNA sense strand
gugcuucaguggcuccuuu

SEQ ID NO: 264200 - RNA, 19 nt, Homo sapiens
  misc_RNA (1)...(19): siRNA sense strand
uggaggcucucuaggauug

SEQ ID NO: 264201 - RNA, 19 nt, Homo sapiens
  misc_RNA (1)...(19): siRNA sense strand
agaacaaaguuacagacaa

SEQ ID NO: 264202 - RNA, 19 nt, Homo sapiens
  misc_RNA (1)...(19): siRNA sense strand
gcaaauguacuaccuccau

SEQ ID NO: 264203 - RNA, 19 nt, Homo sapiens
  misc_RNA (1)...(19): siRNA sense strand
ggccaucccuuauccaaga

SEQ ID NO: 264204 - RNA, 19 nt, Homo sapiens
  misc_RNA (1)...(19): siRNA sense strand
gcggagaccugggcaaugu

SEQ ID NO: 264205 - RNA, 19 nt, Homo sapiens
  misc_RNA (1)...(19): siRNA sense strand
ggccgcagccugauuauug

SEQ ID NO: 264206 - RNA, 19 nt, Homo sapiens
  misc_RNA (1)...(19): siRNA sense strand
gcagccugauuauugauga

SEQ ID NO: 264207 - RNA, 19 nt, Homo sapiens
  misc_RNA (1)...(19): siRNA sense strand
gaaggugugggaugugauu

SEQ ID NO: 264208 - RNA, 19 nt, Homo sapiens
  misc_RNA (1)...(19): siRNA sense strand
gcacuuggaggaccagaug

SEQ ID NO: 264209 - RNA, 19 nt, Homo sapiens
  misc_RNA (1)...(19): siRNA sense strand
gcugugggaaucacuuuaa

SEQ ID NO: 264210 - RNA, 19 nt, Homo sapiens
  misc_RNA (1)...(19): siRNA sense strand
gauuauugaugagggagaa

SEQ ID NO: 264211 - RNA, 19 nt, Homo sapiens
  misc_RNA (1)...(19): siRNA sense strand
gccgcagccugauuauuga

SEQ ID NO: 264212 - RNA, 19 nt, Homo sapiens
  misc_RNA (1)...(19): siRNA sense strand
gguggcagguguccaggau

SEQ ID NO: 264213 - RNA, 19 nt, Homo sapiens
  misc_RNA (1)...(19): siRNA sense strand
cagauggucuugguacaca

SEQ ID NO: 264214 - RNA, 19 nt, Homo sapiens
  misc_RNA (1)...(19): siRNA sense strand
ggaguucgcggugcagaug

SEQ ID NO: 264215 - RNA, 19 nt, Homo sapiens
  misc_RNA (1)...(19): siRNA sense strand
gacuccacguccaucagua

SEQ ID NO: 264216 - RNA, 19 nt, Homo sapiens
  misc_RNA (1)...(19): siRNA sense strand
uggcagguguccaggaugu

SEQ ID NO: 264217 - RNA, 19 nt, Homo sapiens
  misc_RNA (1)...(19): siRNA sense strand
gcagcggccaguugcagaa

SEQ ID NO: 264218 - RNA, 19 nt, Homo sapiens
  misc_RNA (1)...(19): siRNA sense strand
guuggccuguggcaucauu

SEQ ID NO: 264219 - RNA, 19 nt, Homo sapiens
  misc_RNA (1)...(19): siRNA sense strand
cugaaggugugggauguga

SEQ ID NO: 264220 - RNA, 19 nt, Homo sapiens
  misc_RNA (1)...(19): siRNA sense strand
gaggccaucccuuauccaa

SEQ ID NO: 264221 - RNA, 19 nt, Homo sapiens
  misc_RNA (1)...(19): siRNA sense strand
ugcaacagcugugggaauc

SEQ ID NO: 264222 - RNA, 19 nt, Homo sapiens
  misc_RNA (1)...(19): siRNA sense strand
caacagcugugggaaucac

SEQ ID NO: 264223 - RNA, 19 nt, Homo sapiens
  misc_RNA (1)...(19): siRNA sense strand
gcggccaguugcagaaucu

SEQ ID NO: 264224 - RNA, 19 nt, Homo sapiens
  misc_RNA (1)...(19): siRNA sense strand
ggcaauguccgugcugaug

SEQ ID NO: 264225 - RNA, 19 nt, Homo sapiens
  misc_RNA (1)...(19): siRNA sense strand
ggauguggaggugcacuug

SEQ ID NO: 264226 - RNA, 19 nt, Homo sapiens
  misc_RNA (1)...(19): siRNA sense strand
cagaugggcugaagguugu

SEQ ID NO: 264227 - RNA, 19 nt, Homo sapiens
  misc_RNA (1)...(19): siRNA sense strand
gccauuccuucugcaauua

SEQ ID NO: 264228 - RNA, 19 nt, Homo sapiens
  misc_RNA (1)...(19): siRNA sense strand
cuacacugcuuuccucuuc

SEQ ID NO: 264229 - RNA, 19 nt, Homo sapiens
  misc_RNA (1)...(19): siRNA sense strand
ugaugcagcucucuaugga

SEQ ID NO: 264230 - RNA, 19 nt, Homo sapiens
  misc_RNA (1)...(19): siRNA sense strand
ugacagaggagcugguguu

SEQ ID NO: 264231 - RNA, 19 nt, Homo sapiens
  misc_RNA (1)...(19): siRNA sense strand
ugccauuccuucugcaauu

SEQ ID NO: 264232 - RNA, 19 nt, Homo sapiens
  misc_RNA (1)...(19): siRNA sense strand
augcagcucucuauggauu

SEQ ID NO: 264233 - RNA, 19 nt, Homo sapiens
  misc_RNA (1)...(19): siRNA sense strand
ccuguaugcugcccauguu

SEQ ID NO: 264234 - RNA, 19 nt, Homo sapiens
  misc_RNA (1)...(19): siRNA sense strand
uugcugaccaugauucuuu

SEQ ID NO: 264235 - RNA, 19 nt, Homo sapiens
  misc_RNA (1)...(19): siRNA sense strand
uuauugagcagcugcguuu

SEQ ID NO: 264236 - RNA, 19 nt, Homo sapiens
  misc_RNA (1)...(19): siRNA sense strand
ccacugaugcagcucucua

SEQ ID NO: 264237 - RNA, 19 nt, Homo sapiens
  misc_RNA (1)...(19): siRNA sense strand
gcugcugggugucaguguu

SEQ ID NO: 264238 - RNA, 19 nt, Homo sapiens
  misc_RNA (1)...(19): siRNA sense strand
ggugguguccagucucuca

SEQ ID NO: 264239 - RNA, 19 nt, Homo sapiens
  misc_RNA (1)...(19): siRNA sense strand
gcagcucucuauggauugc

SEQ ID NO: 264240 - RNA, 19 nt, Homo sapiens
  misc_RNA (1)...(19): siRNA sense strand
gagcggagcuuugguugga

SEQ ID NO: 264241 - RNA, 19 nt, Homo sapiens
  misc_RNA (1)...(19): siRNA sense strand
gaagccaacuguccagaag

SEQ ID NO: 264242 - RNA, 19 nt, Homo sapiens
  misc_RNA (1)...(19): siRNA sense strand
gcagcucccucaauacugu

SEQ ID NO: 264243 - RNA, 19 nt, Homo sapiens
  misc_RNA (1)...(19): siRNA sense strand
gugcaacccugggcaguuu

SEQ ID NO: 264244 - RNA, 19 nt, Homo sapiens
  misc_RNA (1)...(19): siRNA sense strand
ggacccagauggcaacagu

SEQ ID NO: 264245 - RNA, 19 nt, Homo sapiens
  misc_RNA (1)...(19): siRNA sense strand
aaagagugcugcaaguuca

SEQ ID NO: 264246 - RNA, 19 nt, Homo sapiens
  misc_RNA (1)...(19): siRNA sense strand
gcugggagguggcauucaa

SEQ ID NO: 264247 - RNA, 19 nt, Homo sapiens
  misc_RNA (1)...(19): siRNA sense strand
ggaaggaccagcgcaaguu

SEQ ID NO: 264248 - RNA, 19 nt, Homo sapiens
  misc_RNA (1)...(19): siRNA sense strand
cagcuucagugcuuccauu

SEQ ID NO: 264249 - RNA, 19 nt, Homo sapiens
  misc_RNA (1)...(19): siRNA sense strand
agccgcagcucccucaaua

SEQ ID NO: 264250 - RNA, 19 nt, Homo sapiens
  misc_RNA (1)...(19): siRNA sense strand
ucacgccgcugcaucuuuc

SEQ ID NO: 264251 - RNA, 19 nt, Homo sapiens
  misc_RNA (1)...(19): siRNA sense strand
gaaggaccagcgcaaguug

SEQ ID NO: 264252 - RNA, 19 nt, Homo sapiens
  misc_RNA (1)...(19): siRNA sense strand
caaagagugcugcaaguuc

SEQ ID NO: 264253 - RNA, 19 nt, Homo sapiens
  misc_RNA (1)...(19): siRNA sense strand
gcgcaucgagucccugauu

SEQ ID NO: 264254 - RNA, 19 nt, Homo sapiens
  misc_RNA (1)...(19): siRNA sense strand
gggugggacuuuccauuuc

SEQ ID NO: 264255 - RNA, 19 nt, Homo sapiens
  misc_RNA (1)...(19): siRNA sense strand
cggacaguguguucuauga

SEQ ID NO: 264256 - RNA, 19 nt, Homo sapiens
  misc_RNA (1)...(19): siRNA sense strand
gugcccagcuucagugcuu

SEQ ID NO: 264257 - RNA, 19 nt, Homo sapiens
  misc_RNA (1)...(19): siRNA sense strand
ccaaagagugcugcaaguu

SEQ ID NO: 264258 - RNA, 19 nt, Homo sapiens
  misc_RNA (1)...(19): siRNA sense strand
agucuucauuucuguguaa

SEQ ID NO: 264259 - RNA, 19 nt, Homo sapiens
  misc_RNA (1)...(19): siRNA sense strand
gagcugcaccugccaugga

SEQ ID NO: 264260 - RNA, 19 nt, Homo sapiens
  misc_RNA (1)...(19): siRNA sense strand
ggacaacgugguggaugaa

SEQ ID NO: 264261 - RNA, 19 nt, Homo sapiens
  misc_RNA (1)...(19): siRNA sense strand
guguguggcugcucucugu

SEQ ID NO: 264262 - RNA, 19 nt, Homo sapiens
  misc_RNA (1)...(19): siRNA sense strand
cccguucgcuucagcaguu

SEQ ID NO: 264263 - RNA, 19 nt, Homo sapiens
  misc_RNA (1)...(19): siRNA sense strand
ccucggccaugucugagaa

SEQ ID NO: 264264 - RNA, 19 nt, Homo sapiens
  misc_RNA (1)...(19): siRNA sense strand
gcugcaaguucaugugucu

SEQ ID NO: 264265 - RNA, 19 nt, Homo sapiens
  misc_RNA (1)...(19): siRNA sense strand
gagcgacgaagccaacugu

SEQ ID NO: 264266 - RNA, 19 nt, Homo sapiens
  misc_RNA (1)...(19): siRNA sense strand
gaccaggagcugcgcuuug

SEQ ID NO: 264267 - RNA, 19 nt, Homo sapiens
  misc_RNA (1)...(19): siRNA sense strand
gagggugggacuuuccauu

SEQ ID NO: 264268 - RNA, 19 nt, Homo sapiens
  misc_RNA (1)...(19): siRNA sense strand
aaagaagucaaacaugugu

SEQ ID NO: 264269 - RNA, 19 nt, Homo sapiens
  misc_RNA (1)...(19): siRNA sense strand
ggaucccuggcuuugauua

SEQ ID NO: 264270 - RNA, 19 nt, Homo sapiens
  misc_RNA (1)...(19): siRNA sense strand
caaacuugcaccacuucaa

SEQ ID NO: 264271 - RNA, 19 nt, Homo sapiens
  misc_RNA (1)...(19): siRNA sense strand
aggacaacgugguggauga

SEQ ID NO: 264272 - RNA, 19 nt, Homo sapiens
  misc_RNA (1)...(19): siRNA sense strand
ccucaauacugugguguag

SEQ ID NO: 264273 - RNA, 19 nt, Homo sapiens
  misc_RNA (1)...(19): siRNA sense strand
caaguuguggguuggcuau

SEQ ID NO: 264274 - RNA, 19 nt, Homo sapiens
  misc_RNA (1)...(19): siRNA sense strand
ggagugaaggugcauuacu

SEQ ID NO: 264275 - RNA, 19 nt, Homo sapiens
  misc_RNA (1)...(19): siRNA sense strand
uggguuggcuaucaguaug

SEQ ID NO: 264276 - RNA, 19 nt, Homo sapiens
  misc_RNA (1)...(19): siRNA sense strand
cgaagccaacuguccagaa

SEQ ID NO: 264277 - RNA, 19 nt, Homo sapiens
  misc_RNA (1)...(19): siRNA sense strand
cuaugacccugcagacgau

SEQ ID NO: 264278 - RNA, 19 nt, Homo sapiens
  misc_RNA (1)...(19): siRNA sense strand
cuacacggcauacaaguac

SEQ ID NO: 264279 - RNA, 19 nt, Homo sapiens
  misc_RNA (1)...(19): siRNA sense strand
ccuacacggcauacaagua

SEQ ID NO: 264280 - RNA, 19 nt, Homo sapiens
  misc_RNA (1)...(19): siRNA sense strand
cugcagacgaugaugcuuu

SEQ ID NO: 264281 - RNA, 19 nt, Homo sapiens
  misc_RNA (1)...(19): siRNA sense strand
ugggagugaaggugcauua

SEQ ID NO: 264282 - RNA, 19 nt, Homo sapiens
  misc_RNA (1)...(19): siRNA sense strand
gguuggcuaucaguauguu

SEQ ID NO: 264283 - RNA, 19 nt, Homo sapiens
  misc_RNA (1)...(19): siRNA sense strand
cccaaagagugcugcaagu

SEQ ID NO: 264284 - RNA, 19 nt, Homo sapiens
  misc_RNA (1)...(19): siRNA sense strand
gagagcugcuacgagaagu

SEQ ID NO: 264285 - RNA, 19 nt, Homo sapiens
  misc_RNA (1)...(19): siRNA sense strand
uuacggcccagacggguuu

SEQ ID NO: 264286 - RNA, 19 nt, Homo sapiens
  misc_RNA (1)...(19): siRNA sense strand
accaggagcugcgcuuugu

SEQ ID NO: 264287 - RNA, 19 nt, Homo sapiens
  misc_RNA (1)...(19): siRNA sense strand
ucagcugcaucuccuccuu

SEQ ID NO: 264288 - RNA, 19 nt, Homo sapiens
  misc_RNA (1)...(19): siRNA sense strand
cgagagcugcuacgagaag

SEQ ID NO: 264289 - RNA, 19 nt, Homo sapiens
  misc_RNA (1)...(19): siRNA sense strand
ggcuaucaguauguuauca

SEQ ID NO: 264290 - RNA, 19 nt, Homo sapiens
  misc_RNA (1)...(19): siRNA sense strand
agggugggacuuuccauuu

SEQ ID NO: 264291 - RNA, 19 nt, Homo sapiens
  misc_RNA (1)...(19): siRNA sense strand
agccaacuguccagaagug

SEQ ID NO: 264292 - RNA, 19 nt, Homo sapiens
  misc_RNA (1)...(19): siRNA sense strand
guaaaagaagucaaacaug

SEQ ID NO: 264293 - RNA, 19 nt, Homo sapiens
  misc_RNA (1)...(19): siRNA sense strand
caucugagguccuggcuuu

SEQ ID NO: 264294 - RNA, 19 nt, Homo sapiens
  misc_RNA (1)...(19): siRNA sense strand
gccagugggugcugaugua

SEQ ID NO: 264295 - RNA, 19 nt, Homo sapiens
  misc_RNA (1)...(19): siRNA sense strand
ggaagcagagccugguuug

SEQ ID NO: 264296 - RNA, 19 nt, Homo sapiens
  misc_RNA (1)...(19): siRNA sense strand
gcagaucggcugagcagau

SEQ ID NO: 264297 - RNA, 19 nt, Homo sapiens
  misc_RNA (1)...(19): siRNA sense strand
gaacccggcugcugaucac

SEQ ID NO: 264298 - RNA, 19 nt, Homo sapiens
  misc_RNA (1)...(19): siRNA sense strand
acaguuaccgcguguacua

SEQ ID NO: 264299 - RNA, 19 nt, Homo sapiens
  misc_RNA (1)...(19): siRNA sense strand
gacggccucuucacggauu

SEQ ID NO: 264300 - RNA, 19 nt, Homo sapiens
  misc_RNA (1)...(19): siRNA sense strand
gauguacuuuggcuucacu

SEQ ID NO: 264301 - RNA, 19 nt, Homo sapiens
  misc_RNA (1)...(19): siRNA sense strand
agugggugcugauguacuu

SEQ ID NO: 264302 - RNA, 19 nt, Homo sapiens
  misc_RNA (1)...(19): siRNA sense strand
ccacuccauugccaucuac

SEQ ID NO: 264303 - RNA, 19 nt, Homo sapiens
  misc_RNA (1)...(19): siRNA sense strand
cccaggcuagucacaguua

SEQ ID NO: 264304 - RNA, 19 nt, Homo sapiens
  misc_RNA (1)...(19): siRNA sense strand
gguccuggcuuuugucaag

SEQ ID NO: 264305 - RNA, 19 nt, Homo sapiens
  misc_RNA (1)...(19): siRNA sense strand
gaccagagcugauugagua

SEQ ID NO: 264306 - RNA, 19 nt, Homo sapiens
  misc_RNA (1)...(19): siRNA sense strand
ucaacgagcuggauuacua

SEQ ID NO: 264307 - RNA, 19 nt, Homo sapiens
  misc_RNA (1)...(19): siRNA sense strand
gcacacagaucgagaacau

SEQ ID NO: 264308 - RNA, 19 nt, Homo sapiens
  misc_RNA (1)...(19): siRNA sense strand
gaacaaugccuucgaagug

SEQ ID NO: 264309 - RNA, 19 nt, Homo sapiens
  misc_RNA (1)...(19): siRNA sense strand
gaacauugaugaggacuuc

SEQ ID NO: 264310 - RNA, 19 nt, Homo sapiens
  misc_RNA (1)...(19): siRNA sense strand
gugcagaacuuccacauca

SEQ ID NO: 264311 - RNA, 19 nt, Homo sapiens
  misc_RNA (1)...(19): siRNA sense strand
ggucaucgcuuccuucaag

SEQ ID NO: 264312 - RNA, 19 nt, Homo sapiens
  misc_RNA (1)...(19): siRNA sense strand
gcacagaccagagcugauu

SEQ ID NO: 264313 - RNA, 19 nt, Homo sapiens
  misc_RNA (1)...(19): siRNA sense strand
cgaaguggcugagaaauac

SEQ ID NO: 264314 - RNA, 19 nt, Homo sapiens
  misc_RNA (1)...(19): siRNA sense strand
ggacaucaaagcccucauu

SEQ ID NO: 264315 - RNA, 19 nt, Homo sapiens
  misc_RNA (1)...(19): siRNA sense strand
aggaguggcugcugaauga

SEQ ID NO: 264316 - RNA, 19 nt, Homo sapiens
  misc_RNA (1)...(19): siRNA sense strand
ggacaagaacuucaucaca

SEQ ID NO: 264317 - RNA, 19 nt, Homo sapiens
  misc_RNA (1)...(19): siRNA sense strand
ggaaggaagccaugcugaa

SEQ ID NO: 264318 - RNA, 19 nt, Homo sapiens
  misc_RNA (1)...(19): siRNA sense strand
guaaggugcuggcugucaa

SEQ ID NO: 264319 - RNA, 19 nt, Homo sapiens
  misc_RNA (1)...(19): siRNA sense strand
gcaagcagcaguccaacga

SEQ ID NO: 264320 - RNA, 19 nt, Homo sapiens
  misc_RNA (1)...(19): siRNA sense strand
gaaagacagccccguauaa

SEQ ID NO: 264321 - RNA, 19 nt, Homo sapiens
  misc_RNA (1)...(19): siRNA sense strand
ugagccaccugaagcagua

SEQ ID NO: 264322 - RNA, 19 nt, Homo sapiens
  misc_RNA (1)...(19): siRNA sense strand
ucaacacgcugcagaccaa

SEQ ID NO: 264323 - RNA, 19 nt, Homo sapiens
  misc_RNA (1)...(19): siRNA sense strand
ucaccaaccugaacaaugc

SEQ ID NO: 264324 - RNA, 19 nt, Homo sapiens
  misc_RNA (1)...(19): siRNA sense strand
cagagcugauugaguauga

SEQ ID NO: 264325 - RNA, 19 nt, Homo sapiens
  misc_RNA (1)...(19): siRNA sense strand
ggaccaucauccuuagguu

SEQ ID NO: 264326 - RNA, 19 nt, Homo sapiens
  misc_RNA (1)...(19): siRNA sense strand
caacaagcacaccaacuau

SEQ ID NO: 264327 - RNA, 19 nt, Homo sapiens
  misc_RNA (1)...(19): siRNA sense strand
gaacgucaaugugcagaac

SEQ ID NO: 264328 - RNA, 19 nt, Homo sapiens
  misc_RNA (1)...(19): siRNA sense strand
acaacaagcacaccaacua

SEQ ID NO: 264329 - RNA, 19 nt, Homo sapiens
  misc_RNA (1)...(19): siRNA sense strand
gcaagauggucucggacau

SEQ ID NO: 264330 - RNA, 19 nt, Homo sapiens
  misc_RNA (1)...(19): siRNA sense strand
gacgagaaggccauaauga

SEQ ID NO: 264331 - RNA, 19 nt, Homo sapiens
  misc_RNA (1)...(19): siRNA sense strand
gaagaugagagugcacaaa

SEQ ID NO: 264332 - RNA, 19 nt, Homo sapiens
  misc_RNA (1)...(19): siRNA sense strand
ggacggcaacgcaaagaug

SEQ ID NO: 264333 - RNA, 19 nt, Homo sapiens
  misc_RNA (1)...(19): siRNA sense strand
acacagaucgagaacauug

SEQ ID NO: 264334 - RNA, 19 nt, Homo sapiens
  misc_RNA (1)...(19): siRNA sense strand
gaaggaagccaugcugaag

SEQ ID NO: 264335 - RNA, 19 nt, Homo sapiens
  misc_RNA (1)...(19): siRNA sense strand
ucgaaguggcugagaaaua

SEQ ID NO: 264336 - RNA, 19 nt, Homo sapiens
  misc_RNA (1)...(19): siRNA sense strand
gaguucaaccgcaucauga

SEQ ID NO: 264337 - RNA, 19 nt, Homo sapiens
  misc_RNA (1)...(19): siRNA sense strand
ggugcuggcugucaaccaa

SEQ ID NO: 264338 - RNA, 19 nt, Homo sapiens
  misc_RNA (1)...(19): siRNA sense strand
ugaccuauguguccagcuu

SEQ ID NO: 264339 - RNA, 19 nt, Homo sapiens
  misc_RNA (1)...(19): siRNA sense strand
agaccaagauggaggagau

SEQ ID NO: 264340 - RNA, 19 nt, Homo sapiens
  misc_RNA (1)...(19): siRNA sense strand
ggacaucuccguggaagag

SEQ ID NO: 264341 - RNA, 19 nt, Homo sapiens
  misc_RNA (1)...(19): siRNA sense strand
gcuacgacguggagaacga

SEQ ID NO: 264342 - RNA, 19 nt, Homo sapiens
  misc_RNA (1)...(19): siRNA sense strand
gcugagagcaaccacauca

SEQ ID NO: 264343 - RNA, 19 nt, Homo sapiens
  misc_RNA (1)...(19): siRNA sense strand
gagacgggcucaagcucau

SEQ ID NO: 264344 - RNA, 19 nt, Homo sapiens
  misc_RNA (1)...(19): siRNA sense strand
agaaggccauaaugaccua

SEQ ID NO: 264345 - RNA, 19 nt, Homo sapiens
  misc_RNA (1)...(19): siRNA sense strand
ucaacgagguggagaacca

SEQ ID NO: 264346 - RNA, 19 nt, Homo sapiens
  misc_RNA (1)...(19): siRNA sense strand
cagagaaguuccggcagaa

SEQ ID NO: 264347 - RNA, 19 nt, Homo sapiens
  misc_RNA (1)...(19): siRNA sense strand
ccugaacaaugccuucgaa

SEQ ID NO: 264348 - RNA, 19 nt, Homo sapiens
  misc_RNA (1)...(19): siRNA sense strand
aaccauagcggccuuguga

SEQ ID NO: 264349 - RNA, 19 nt, Homo sapiens
  misc_RNA (1)...(19): siRNA sense strand
ucaacaaugugaacaaagc

SEQ ID NO: 264350 - RNA, 19 nt, Homo sapiens
  misc_RNA (1)...(19): siRNA sense strand
gcagcaucguggacuacaa

SEQ ID NO: 264351 - RNA, 19 nt, Homo sapiens
  misc_RNA (1)...(19): siRNA sense strand
ucucggacaucaacaaugg

SEQ ID NO: 264352 - RNA, 19 nt, Homo sapiens
  misc_RNA (1)...(19): siRNA sense strand
gaaggcaggcacacagauc

SEQ ID NO: 264353 - RNA, 19 nt, Homo sapiens
  misc_RNA (1)...(19): siRNA sense strand
uccaggagaugcagcagaa

SEQ ID NO: 264354 - RNA, 19 nt, Homo sapiens
  misc_RNA (1)...(19): siRNA sense strand
cguauaagaacgucaaugu

SEQ ID NO: 264355 - RNA, 19 nt, Homo sapiens
  misc_RNA (1)...(19): siRNA sense strand
gaucuggaccaucauccuu

SEQ ID NO: 264356 - RNA, 19 nt, Homo sapiens
  misc_RNA (1)...(19): siRNA sense strand
ugagaaauaccucgacauc

SEQ ID NO: 264357 - RNA, 19 nt, Homo sapiens
  misc_RNA (1)...(19): siRNA sense strand
aagaugacccugggaauga

SEQ ID NO: 264358 - RNA, 19 nt, Homo sapiens
  misc_RNA (1)...(19): siRNA sense strand
cugaggagcugcggagaga

SEQ ID NO: 264359 - RNA, 19 nt, Homo sapiens
  misc_RNA (1)...(19): siRNA sense strand
gagaagcagcagcgcaaga

SEQ ID NO: 264360 - RNA, 19 nt, Homo sapiens
  misc_RNA (1)...(19): siRNA sense strand
cgaaccagucguaccagua

SEQ ID NO: 264361 - RNA, 19 nt, Homo sapiens
  misc_RNA (1)...(19): siRNA sense strand
agcagaagcuggaggacuu

SEQ ID NO: 264362 - RNA, 19 nt, Homo sapiens
  misc_RNA (1)...(19): siRNA sense strand
cagcuucuaccaugccuuu

SEQ ID NO: 264363 - RNA, 19 nt, Homo sapiens
  misc_RNA (1)...(19): siRNA sense strand
gaggaguggcugcugaaug

SEQ ID NO: 264364 - RNA, 19 nt, Homo sapiens
  misc_RNA (1)...(19): siRNA sense strand
caaaucaucaacuccaagu

SEQ ID NO: 264365 - RNA, 19 nt, Homo sapiens
  misc_RNA (1)...(19): siRNA sense strand
gcgucaagcuggucuccau

SEQ ID NO: 264366 - RNA, 19 nt, Homo sapiens
  misc_RNA (1)...(19): siRNA sense strand
ccggugcccucgacuacaa

SEQ ID NO: 264367 - RNA, 19 nt, Homo sapiens
  misc_RNA (1)...(19): siRNA sense strand
cgacgagaaggccauaaug

SEQ ID NO: 264368 - RNA, 19 nt, Homo sapiens
  misc_RNA (1)...(19): siRNA sense strand
caaagaugacccugggaau

SEQ ID NO: 264369 - RNA, 19 nt, Homo sapiens
  misc_RNA (1)...(19): siRNA sense strand
gacggcaacgcaaagauga

SEQ ID NO: 264370 - RNA, 19 nt, Homo sapiens
  misc_RNA (1)...(19): siRNA sense strand
aggagcagaugcaggaguu

SEQ ID NO: 264371 - RNA, 19 nt, Homo sapiens
  misc_RNA (1)...(19): siRNA sense strand
ucaaccacuucgacaagga

SEQ ID NO: 264372 - RNA, 19 nt, Homo sapiens
  misc_RNA (1)...(19): siRNA sense strand
gggcguccuucaaccacuu

SEQ ID NO: 264373 - RNA, 19 nt, Homo sapiens
  misc_RNA (1)...(19): siRNA sense strand
guauaagaacgucaaugug

SEQ ID NO: 264374 - RNA, 19 nt, Homo sapiens
  misc_RNA (1)...(19): siRNA sense strand
cagcugcucaccaccauug

SEQ ID NO: 264375 - RNA, 19 nt, Homo sapiens
  misc_RNA (1)...(19): siRNA sense strand
aacaagcacaccaacuaua

SEQ ID NO: 264376 - RNA, 19 nt, Homo sapiens
  misc_RNA (1)...(19): siRNA sense strand
cacacuaucggacaucaaa

SEQ ID NO: 264377 - RNA, 19 nt, Homo sapiens
  misc_RNA (1)...(19): siRNA sense strand
ccaaggugcaggagaagug

SEQ ID NO: 264378 - RNA, 19 nt, Homo sapiens
  misc_RNA (1)...(19): siRNA sense strand
gauggaggacuacgagaag

SEQ ID NO: 264379 - RNA, 19 nt, Homo sapiens
  misc_RNA (1)...(19): siRNA sense strand
ccgccaaccggaucuguaa

SEQ ID NO: 264380 - RNA, 19 nt, Homo sapiens
  misc_RNA (1)...(19): siRNA sense strand
aaagaugacccugggaaug

SEQ ID NO: 264381 - RNA, 19 nt, Homo sapiens
  misc_RNA (1)...(19): siRNA sense strand
gcccucaucuucgacaaca

SEQ ID NO: 264382 - RNA, 19 nt, Homo sapiens
  misc_RNA (1)...(19): siRNA sense strand
cgcccaaggugcaggagaa

SEQ ID NO: 264383 - RNA, 19 nt, Homo sapiens
  misc_RNA (1)...(19): siRNA sense strand
cagaggacaucgugaacac

SEQ ID NO: 264384 - RNA, 19 nt, Homo sapiens
  misc_RNA (1)...(19): siRNA sense strand
gcagaggacaucgugaaca

SEQ ID NO: 264385 - RNA, 19 nt, Homo sapiens
  misc_RNA (1)...(19): siRNA sense strand
aggauggucuugccuucaa

SEQ ID NO: 264386 - RNA, 19 nt, Homo sapiens
  misc_RNA (1)...(19): siRNA sense strand
ggauggucuugccuucaau

SEQ ID NO: 264387 - RNA, 19 nt, Homo sapiens
  misc_RNA (1)...(19): siRNA sense strand
ggaaggcaggcacacagau

SEQ ID NO: 264388 - RNA, 19 nt, Homo sapiens
  misc_RNA (1)...(19): siRNA sense strand
ggagauugagggccugauc

SEQ ID NO: 264389 - RNA, 19 nt, Homo sapiens
  misc_RNA (1)...(19): siRNA sense strand
ggaccuccaggacauguuc

SEQ ID NO: 264390 - RNA, 19 nt, Homo sapiens
  misc_RNA (1)...(19): siRNA sense strand
ucgaccaccuggcagagaa

SEQ ID NO: 264391 - RNA, 19 nt, Homo sapiens
  misc_RNA (1)...(19): siRNA sense strand
acaaggaggcccagaggau

SEQ ID NO: 264392 - RNA, 19 nt, Homo sapiens
  misc_RNA (1)...(19): siRNA sense strand
uuacuacgacucccacaau

SEQ ID NO: 264393 - RNA, 19 nt, Homo sapiens
  misc_RNA (1)...(19): siRNA sense strand
cuacgagacggccacacua

SEQ ID NO: 264394 - RNA, 19 nt, Homo sapiens
  misc_RNA (1)...(19): siRNA sense strand
agaacgagcaccugaugga

SEQ ID NO: 264395 - RNA, 19 nt, Homo sapiens
  misc_RNA (1)...(19): siRNA sense strand
cgaguucaaccgcaucaug

SEQ ID NO: 264396 - RNA, 19 nt, Homo sapiens
  misc_RNA (1)...(19): siRNA sense strand
ggaagaugagagugcacaa

SEQ ID NO: 264397 - RNA, 19 nt, Homo sapiens
  misc_RNA (1)...(19): siRNA sense strand
gggaagcccuggagaaaac

SEQ ID NO: 264398 - RNA, 19 nt, Homo sapiens
  misc_RNA (1)...(19): siRNA sense strand
gacaucaaagcccucauuc

SEQ ID NO: 264399 - RNA, 19 nt, Homo sapiens
  misc_RNA (1)...(19): siRNA sense strand
ugaacaaugccuucgaagu

SEQ ID NO: 264400 - RNA, 19 nt, Homo sapiens
  misc_RNA (1)...(19): siRNA sense strand
acaagcacaccaacuauac

SEQ ID NO: 264401 - RNA, 19 nt, Homo sapiens
  misc_RNA (1)...(19): siRNA sense strand
ugauggaggacuacgagaa

SEQ ID NO: 264402 - RNA, 19 nt, Homo sapiens
  misc_RNA (1)...(19): siRNA sense strand
ugaacaaagcgcuggacuu

SEQ ID NO: 264403 - RNA, 19 nt, Homo sapiens
  misc_RNA (1)...(19): siRNA sense strand
gaguggcugcugaaugaga

SEQ ID NO: 264404 - RNA, 19 nt, Homo sapiens
  misc_RNA (1)...(19): siRNA sense strand
gacauguucaucguccaua

SEQ ID NO: 264405 - RNA, 19 nt, Homo sapiens
  misc_RNA (1)...(19): siRNA sense strand
gaaaggagcugcagaacuu

SEQ ID NO: 264406 - RNA, 19 nt, Homo sapiens
  misc_RNA (1)...(19): siRNA sense strand
gaacggaucuugcucuuau

SEQ ID NO: 264407 - RNA, 19 nt, Homo sapiens
  misc_RNA (1)...(19): siRNA sense strand
agaguuggcucacguauua

SEQ ID NO: 264408 - RNA, 19 nt, Homo sapiens
  misc_RNA (1)...(19): siRNA sense strand
gcaaagagaugauggaaaa

SEQ ID NO: 264409 - RNA, 19 nt, Homo sapiens
  misc_RNA (1)...(19): siRNA sense strand
uaacugagauggccagguu

SEQ ID NO: 264410 - RNA, 19 nt, Homo sapiens
  misc_RNA (1)...(19): siRNA sense strand
guuaucaccugaaaugaaa

SEQ ID NO: 264411 - RNA, 19 nt, Homo sapiens
  misc_RNA (1)...(19): siRNA sense strand
caucacagccucacaguuu

SEQ ID NO: 264412 - RNA, 19 nt, Homo sapiens
  misc_RNA (1)...(19): siRNA sense strand
cacaguggcuucauagaaa

SEQ ID NO: 264413 - RNA, 19 nt, Homo sapiens
  misc_RNA (1)...(19): siRNA sense strand
aacaggaucuggauauuaa

SEQ ID NO: 264414 - RNA, 19 nt, Homo sapiens
  misc_RNA (1)...(19): siRNA sense strand
ggaguuaucaccugaaaug

SEQ ID NO: 264415 - RNA, 19 nt, Homo sapiens
  misc_RNA (1)...(19): siRNA sense strand
uaaaggaccugcuagaaaa

SEQ ID NO: 264416 - RNA, 19 nt, Homo sapiens
  misc_RNA (1)...(19): siRNA sense strand
gaaagaaggcuggauugga

SEQ ID NO: 264417 - RNA, 19 nt, Homo sapiens
  misc_RNA (1)...(19): siRNA sense strand
agaagaacauaauggcuuu

SEQ ID NO: 264418 - RNA, 19 nt, Homo sapiens
  misc_RNA (1)...(19): siRNA sense strand
cugaggagcuuaagaacuu

SEQ ID NO: 264419 - RNA, 19 nt, Homo sapiens
  misc_RNA (1)...(19): siRNA sense strand
aaaaugaacuggaugcuuu

SEQ ID NO: 264420 - RNA, 19 nt, Homo sapiens
  misc_RNA (1)...(19): siRNA sense strand
ugaaggaucugugcgagaa

SEQ ID NO: 264421 - RNA, 19 nt, Homo sapiens
  misc_RNA (1)...(19): siRNA sense strand
gugguuaccuggaaggaaa

SEQ ID NO: 264422 - RNA, 19 nt, Homo sapiens
  misc_RNA (1)...(19): siRNA sense strand
aaacaggaucuggauauua

SEQ ID NO: 264423 - RNA, 19 nt, Homo sapiens
  misc_RNA (1)...(19): siRNA sense strand
uaaacaggaucuggauauu

SEQ ID NO: 264424 - RNA, 19 nt, Homo sapiens
  misc_RNA (1)...(19): siRNA sense strand
aaacugaggagcuuaagaa

SEQ ID NO: 264425 - RNA, 19 nt, Homo sapiens
  misc_RNA (1)...(19): siRNA sense strand
cuaaaggaccugcuagaaa

SEQ ID NO: 264426 - RNA, 19 nt, Homo sapiens
  misc_RNA (1)...(19): siRNA sense strand
gggaaagaguucaauaagg

SEQ ID NO: 264427 - RNA, 19 nt, Homo sapiens
  misc_RNA (1)...(19): siRNA sense strand
gaacuggaugcuuuacuga

SEQ ID NO: 264428 - RNA, 19 nt, Homo sapiens
  misc_RNA (1)...(19): siRNA sense strand
ggcaauggauacauagaug

SEQ ID NO: 264429 - RNA, 19 nt, Homo sapiens
  misc_RNA (1)...(19): siRNA sense strand
gaucugugcgagaagaaua

SEQ ID NO: 264430 - RNA, 19 nt, Homo sapiens
  misc_RNA (1)...(19): siRNA sense strand
caacauacaagaagaacau

SEQ ID NO: 264431 - RNA, 19 nt, Homo sapiens
  misc_RNA (1)...(19): siRNA sense strand
auacagaccuaaugcugaa

SEQ ID NO: 264432 - RNA, 19 nt, Homo sapiens
  misc_RNA (1)...(19): siRNA sense strand
gaccuaaugcugaaacuau

SEQ ID NO: 264433 - RNA, 19 nt, Homo sapiens
  misc_RNA (1)...(19): siRNA sense strand
aauaggaauuguagaguug

SEQ ID NO: 264434 - RNA, 19 nt, Homo sapiens
  misc_RNA (1)...(19): siRNA sense strand
cauagaaacugaggagcuu

SEQ ID NO: 264435 - RNA, 19 nt, Homo sapiens
  misc_RNA (1)...(19): siRNA sense strand
gcaauggauacauagauga

SEQ ID NO: 264436 - RNA, 19 nt, Homo sapiens
  misc_RNA (1)...(19): siRNA sense strand
gaauaaacaggaucuggau

SEQ ID NO: 264437 - RNA, 19 nt, Homo sapiens
  misc_RNA (1)...(19): siRNA sense strand
gaugggaagcuggaauuaa

SEQ ID NO: 264438 - RNA, 19 nt, Homo sapiens
  misc_RNA (1)...(19): siRNA sense strand
ugaacuggaugcuuuacug

SEQ ID NO: 264439 - RNA, 19 nt, Homo sapiens
  misc_RNA (1)...(19): siRNA sense strand
gcagucaucccucaucaca

SEQ ID NO: 264440 - RNA, 19 nt, Homo sapiens
  misc_RNA (1)...(19): siRNA sense strand
gaaacugaggagcuuaaga

SEQ ID NO: 264441 - RNA, 19 nt, Homo sapiens
  misc_RNA (1)...(19): siRNA sense strand
cgagaagaauaaacaggau

SEQ ID NO: 264442 - RNA, 19 nt, Homo sapiens
  misc_RNA (1)...(19): siRNA sense strand
gugggaaagaguucaauaa

SEQ ID NO: 264443 - RNA, 19 nt, Homo sapiens
  misc_RNA (1)...(19): siRNA sense strand
cggaagugguuaccuggaa

SEQ ID NO: 264444 - RNA, 19 nt, Homo sapiens
  misc_RNA (1)...(19): siRNA sense strand
caggaucuggauauuaaua

SEQ ID NO: 264445 - RNA, 19 nt, Homo sapiens
  misc_RNA (1)...(19): siRNA sense strand
gaaggcuggauuggaguua

SEQ ID NO: 264446 - RNA, 19 nt, Homo sapiens
  misc_RNA (1)...(19): siRNA sense strand
aagcuggaauuaacugaga

SEQ ID NO: 264447 - RNA, 19 nt, Homo sapiens
  misc_RNA (1)...(19): siRNA sense strand
uaccagugcaggagaauuu

SEQ ID NO: 264448 - RNA, 19 nt, Homo sapiens
  misc_RNA (1)...(19): siRNA sense strand
gcgaaagaaggcuggauug

SEQ ID NO: 264449 - RNA, 19 nt, Homo sapiens
  misc_RNA (1)...(19): siRNA sense strand
ggaaaggagcugcagaacu

SEQ ID NO: 264450 - RNA, 19 nt, Homo sapiens
  misc_RNA (1)...(19): siRNA sense strand
ugugaggaauucaugaaga

SEQ ID NO: 264451 - RNA, 19 nt, Homo sapiens
  misc_RNA (1)...(19): siRNA sense strand
caccugaaaugaaaacuuu

SEQ ID NO: 264452 - RNA, 19 nt, Homo sapiens
  misc_RNA (1)...(19): siRNA sense strand
caagacuguugaugacaca

SEQ ID NO: 264453 - RNA, 19 nt, Homo sapiens
  misc_RNA (1)...(19): siRNA sense strand
ggaucaguaugggcaaaga

SEQ ID NO: 264454 - RNA, 19 nt, Homo sapiens
  misc_RNA (1)...(19): siRNA sense strand
caauggauacauagaugaa

SEQ ID NO: 264455 - RNA, 19 nt, Homo sapiens
  misc_RNA (1)...(19): siRNA sense strand
ugagauggccagguuacua

SEQ ID NO: 264456 - RNA, 19 nt, Homo sapiens
  misc_RNA (1)...(19): siRNA sense strand
aaaugaacuggaugcuuua

SEQ ID NO: 264457 - RNA, 19 nt, Homo sapiens
  misc_RNA (1)...(19): siRNA sense strand
ggaucuugcucuuauucuc

SEQ ID NO: 264458 - RNA, 19 nt, Homo sapiens
  misc_RNA (1)...(19): siRNA sense strand
auaaacaggaucuggauau

SEQ ID NO: 264459 - RNA, 19 nt, Homo sapiens
  misc_RNA (1)...(19): siRNA sense strand
uagaaacugaggagcuuaa

SEQ ID NO: 264460 - RNA, 19 nt, Homo sapiens
  misc_RNA (1)...(19): siRNA sense strand
agaauuuccugcugcucuu

SEQ ID NO: 264461 - RNA, 19 nt, Homo sapiens
  misc_RNA (1)...(19): siRNA sense strand
uucgagaucuggcuccauu

SEQ ID NO: 264462 - RNA, 19 nt, Homo sapiens
  misc_RNA (1)...(19): siRNA sense strand
gagauggccagguuacuac

SEQ ID NO: 264463 - RNA, 19 nt, Homo sapiens
  misc_RNA (1)...(19): siRNA sense strand
ggaagcuggaauuaacuga

SEQ ID NO: 264464 - RNA, 19 nt, Homo sapiens
  misc_RNA (1)...(19): siRNA sense strand
ggagaaaauaugauacuga

SEQ ID NO: 264465 - RNA, 19 nt, Homo sapiens
  misc_RNA (1)...(19): siRNA sense strand
gggcaaagagaugauggaa

SEQ ID NO: 264466 - RNA, 19 nt, Homo sapiens
  misc_RNA (1)...(19): siRNA sense strand
gaagacauggagaaaauau

SEQ ID NO: 264467 - RNA, 19 nt, Homo sapiens
  misc_RNA (1)...(19): siRNA sense strand
aaacuuuuguggaucagua

SEQ ID NO: 264468 - RNA, 19 nt, Homo sapiens
  misc_RNA (1)...(19): siRNA sense strand
acacaaaauuagccgagua

SEQ ID NO: 264469 - RNA, 19 nt, Homo sapiens
  misc_RNA (1)...(19): siRNA sense strand
gugaggaauucaugaagac

SEQ ID NO: 264470 - RNA, 19 nt, Homo sapiens
  misc_RNA (1)...(19): siRNA sense strand
cgaguauacagaccuaaug

SEQ ID NO: 264471 - RNA, 19 nt, Homo sapiens
  misc_RNA (1)...(19): siRNA sense strand
cgaacggaucuugcucuua

SEQ ID NO: 264472 - RNA, 19 nt, Homo sapiens
  misc_RNA (1)...(19): siRNA sense strand
ccgaacggaucuugcucuu

SEQ ID NO: 264473 - RNA, 19 nt, Homo sapiens
  misc_RNA (1)...(19): siRNA sense strand
ccuaaugcugaaacuauuu

SEQ ID NO: 264474 - RNA, 19 nt, Homo sapiens
  misc_RNA (1)...(19): siRNA sense strand
ggcaaagagaugauggaaa

SEQ ID NO: 264475 - RNA, 19 nt, Homo sapiens
  misc_RNA (1)...(19): siRNA sense strand
gaucuugcucuuauucucu

SEQ ID NO: 264476 - RNA, 19 nt, Homo sapiens
  misc_RNA (1)...(19): siRNA sense strand
uuucgacgcugacggaagu

SEQ ID NO: 264477 - RNA, 19 nt, Homo sapiens
  misc_RNA (1)...(19): siRNA sense strand
ugaggagcuuaagaacuuu

SEQ ID NO: 264478 - RNA, 19 nt, Homo sapiens
  misc_RNA (1)...(19): siRNA sense strand
ucacguauuacccacagaa

SEQ ID NO: 264479 - RNA, 19 nt, Homo sapiens
  misc_RNA (1)...(19): siRNA sense strand
cgagaucuggcuccauuuc

SEQ ID NO: 264480 - RNA, 19 nt, Homo sapiens
  misc_RNA (1)...(19): siRNA sense strand
aaggaaaggagcugcagaa

SEQ ID NO: 264481 - RNA, 19 nt, Homo sapiens
  misc_RNA (1)...(19): siRNA sense strand
aaucccaccugcagucauc

SEQ ID NO: 264482 - RNA, 19 nt, Homo sapiens
  misc_RNA (1)...(19): siRNA sense strand
gaagaacauaauggcuuug

SEQ ID NO: 264483 - RNA, 19 nt, Homo sapiens
  misc_RNA (1)...(19): siRNA sense strand
aauaaacaggaucuggaua

SEQ ID NO: 264484 - RNA, 19 nt, Homo sapiens
  misc_RNA (1)...(19): siRNA sense strand
ugcugaaacuauuugauuc

SEQ ID NO: 264485 - RNA, 19 nt, Homo sapiens
  misc_RNA (1)...(19): siRNA sense strand
gaaaaugaacuggaugcuu

SEQ ID NO: 264486 - RNA, 19 nt, Homo sapiens
  misc_RNA (1)...(19): siRNA sense strand
ugaugggaagcuggaauua

SEQ ID NO: 264487 - RNA, 19 nt, Homo sapiens
  misc_RNA (1)...(19): siRNA sense strand
agaucuggcuccauuucga

SEQ ID NO: 264488 - RNA, 19 nt, Homo sapiens
  misc_RNA (1)...(19): siRNA sense strand
cuaaugcugaaacuauuug

SEQ ID NO: 264489 - RNA, 19 nt, Homo sapiens
  misc_RNA (1)...(19): siRNA sense strand
gaggaauucaugaagacau

SEQ ID NO: 264490 - RNA, 19 nt, Homo sapiens
  misc_RNA (1)...(19): siRNA sense strand
caaaaugugugggaaagag

SEQ ID NO: 264491 - RNA, 19 nt, Homo sapiens
  misc_RNA (1)...(19): siRNA sense strand
augggaagcuggaauuaac

SEQ ID NO: 264492 - RNA, 19 nt, Homo sapiens
  misc_RNA (1)...(19): siRNA sense strand
accuaaugcugaaacuauu

SEQ ID NO: 264493 - RNA, 19 nt, Homo sapiens
  misc_RNA (1)...(19): siRNA sense strand
uuggaguuaucaccugaaa

SEQ ID NO: 264494 - RNA, 19 nt, Homo sapiens
  misc_RNA (1)...(19): siRNA sense strand
cguauuacccacagaagag

SEQ ID NO: 264495 - RNA, 19 nt, Homo sapiens
  misc_RNA (1)...(19): siRNA sense strand
aaggaucugugcgagaaga

SEQ ID NO: 264496 - RNA, 19 nt, Homo sapiens
  misc_RNA (1)...(19): siRNA sense strand
cgaaagaaggcuggauugg

SEQ ID NO: 264497 - RNA, 19 nt, Homo sapiens
  misc_RNA (1)...(19): siRNA sense strand
ggagauggaucaaagaaga

SEQ ID NO: 264498 - RNA, 19 nt, Homo sapiens
  misc_RNA (1)...(19): siRNA sense strand
gaaguacgcugaacgagau

SEQ ID NO: 264499 - RNA, 19 nt, Homo sapiens
  misc_RNA (1)...(19): siRNA sense strand
ggagugauccucauaaaga

SEQ ID NO: 264500 - RNA, 19 nt, Homo sapiens
  misc_RNA (1)...(19): siRNA sense strand
caaaggauaucgucaaugg

SEQ ID NO: 264501 - RNA, 19 nt, Homo sapiens
  misc_RNA (1)...(19): siRNA sense strand
aagaagcucugaagaauga

SEQ ID NO: 264502 - RNA, 19 nt, Homo sapiens
  misc_RNA (1)...(19): siRNA sense strand
gagacaagguggugggaaa

SEQ ID NO: 264503 - RNA, 19 nt, Homo sapiens
  misc_RNA (1)...(19): siRNA sense strand
aaagaaggcuggagaugga

SEQ ID NO: 264504 - RNA, 19 nt, Homo sapiens
  misc_RNA (1)...(19): siRNA sense strand
ccagacagauggagaagga

SEQ ID NO: 264505 - RNA, 19 nt, Homo sapiens
  misc_RNA (1)...(19): siRNA sense strand
acaagaagcucugaagaau

SEQ ID NO: 264506 - RNA, 19 nt, Homo sapiens
  misc_RNA (1)...(19): siRNA sense strand
gaucuccugucuucuguug

SEQ ID NO: 264507 - RNA, 19 nt, Homo sapiens
  misc_RNA (1)...(19): siRNA sense strand
gagugauccucauaaagaa

SEQ ID NO: 264508 - RNA, 19 nt, Homo sapiens
  misc_RNA (1)...(19): siRNA sense strand
ugaacgagaucuacuuugg

SEQ ID NO: 264509 - RNA, 19 nt, Homo sapiens
  misc_RNA (1)...(19): siRNA sense strand
ucaaugggcugaggucugu

SEQ ID NO: 264510 - RNA, 19 nt, Homo sapiens
  misc_RNA (1)...(19): siRNA sense strand
gguggaggcuuugaagaga

SEQ ID NO: 264511 - RNA, 19 nt, Homo sapiens
  misc_RNA (1)...(19): siRNA sense strand
acaaugccuuugaccagua

SEQ ID NO: 264512 - RNA, 19 nt, Homo sapiens
  misc_RNA (1)...(19): siRNA sense strand
gaacgagaucuacuuugga

SEQ ID NO: 264513 - RNA, 19 nt, Homo sapiens
  misc_RNA (1)...(19): siRNA sense strand
uagaggacauggaaaauaa

SEQ ID NO: 264514 - RNA, 19 nt, Homo sapiens
  misc_RNA (1)...(19): siRNA sense strand
gcaccgcccauuacaaguu

SEQ ID NO: 264515 - RNA, 19 nt, Homo sapiens
  misc_RNA (1)...(19): siRNA sense strand
caccauggaguaacaagua

SEQ ID NO: 264516 - RNA, 19 nt, Homo sapiens
  misc_RNA (1)...(19): siRNA sense strand
aaacaaaggauaucgucaa

SEQ ID NO: 264517 - RNA, 19 nt, Homo sapiens
  misc_RNA (1)...(19): siRNA sense strand
gaagguggcgucucaucug

SEQ ID NO: 264518 - RNA, 19 nt, Homo sapiens
  misc_RNA (1)...(19): siRNA sense strand
ggacugugccuuggaccua

SEQ ID NO: 264519 - RNA, 19 nt, Homo sapiens
  misc_RNA (1)...(19): siRNA sense strand
gcugaacgagaucuacuuu

SEQ ID NO: 264520 - RNA, 19 nt, Homo sapiens
  misc_RNA (1)...(19): siRNA sense strand
aacgagaucuacuuuggaa

SEQ ID NO: 264521 - RNA, 19 nt, Homo sapiens
  misc_RNA (1)...(19): siRNA sense strand
ggaagccaacaaugccuuu

SEQ ID NO: 264522 - RNA, 19 nt, Homo sapiens
  misc_RNA (1)...(19): siRNA sense strand
caagaagcucugaagaaug

SEQ ID NO: 264523 - RNA, 19 nt, Homo sapiens
  misc_RNA (1)...(19): siRNA sense strand
aaacaagaagcucugaaga

SEQ ID NO: 264524 - RNA, 19 nt, Homo sapiens
  misc_RNA (1)...(19): siRNA sense strand
gaagagaaagcagcaaugc

SEQ ID NO: 264525 - RNA, 19 nt, Homo sapiens
  misc_RNA (1)...(19): siRNA sense strand
ggagguggaagccaacaau

SEQ ID NO: 264526 - RNA, 19 nt, Homo sapiens
  misc_RNA (1)...(19): siRNA sense strand
gcagacaaaucaaaacaag

SEQ ID NO: 264527 - RNA, 19 nt, Homo sapiens
  misc_RNA (1)...(19): siRNA sense strand
gacugugccuuggaccuaa

SEQ ID NO: 264528 - RNA, 19 nt, Homo sapiens
  misc_RNA (1)...(19): siRNA sense strand
aacaagaagcucugaagaa

SEQ ID NO: 264529 - RNA, 19 nt, Homo sapiens
  misc_RNA (1)...(19): siRNA sense strand
aacaaaggauaucgucaau

SEQ ID NO: 264530 - RNA, 19 nt, Homo sapiens
  misc_RNA (1)...(19): siRNA sense strand
gagaaggaugaaacuguga

SEQ ID NO: 264531 - RNA, 19 nt, Homo sapiens
  misc_RNA (1)...(19): siRNA sense strand
guggaggcuuugaagagaa

SEQ ID NO: 264532 - RNA, 19 nt, Homo sapiens
  misc_RNA (1)...(19): siRNA sense strand
caaugccuuugaccaguau

SEQ ID NO: 264533 - RNA, 19 nt, Homo sapiens
  misc_RNA (1)...(19): siRNA sense strand
cuggagugauccucauaaa

SEQ ID NO: 264534 - RNA, 19 nt, Homo sapiens
  misc_RNA (1)...(19): siRNA sense strand
aucaaaggcugcugggauu

SEQ ID NO: 264535 - RNA, 19 nt, Homo sapiens
  misc_RNA (1)...(19): siRNA sense strand
uggaggcuuugaagagaaa

SEQ ID NO: 264536 - RNA, 19 nt, Homo sapiens
  misc_RNA (1)...(19): siRNA sense strand
ugguagaagugcaggagaa

SEQ ID NO: 264537 - RNA, 19 nt, Homo sapiens
  misc_RNA (1)...(19): siRNA sense strand
gcuggagugauccucauaa

SEQ ID NO: 264538 - RNA, 19 nt, Homo sapiens
  misc_RNA (1)...(19): siRNA sense strand
ggcuggagauggaucaaag

SEQ ID NO: 264539 - RNA, 19 nt, Homo sapiens
  misc_RNA (1)...(19): siRNA sense strand
cauggaguaacaaguauga

SEQ ID NO: 264540 - RNA, 19 nt, Homo sapiens
  misc_RNA (1)...(19): siRNA sense strand
caccgcccauuacaaguug

SEQ ID NO: 264541 - RNA, 19 nt, Homo sapiens
  misc_RNA (1)...(19): siRNA sense strand
aggauuaccuuuuguguga

SEQ ID NO: 264542 - RNA, 19 nt, Homo sapiens
  misc_RNA (1)...(19): siRNA sense strand
gaaaauugccagagacaag

SEQ ID NO: 264543 - RNA, 19 nt, Homo sapiens
  misc_RNA (1)...(19): siRNA sense strand
uagaagugcaggagaaauc

SEQ ID NO: 264544 - RNA, 19 nt, Homo sapiens
  misc_RNA (1)...(19): siRNA sense strand
gguagaagugcaggagaaa

SEQ ID NO: 264545 - RNA, 19 nt, Homo sapiens
  misc_RNA (1)...(19): siRNA sense strand
gguggcgucucaucugucu

SEQ ID NO: 264546 - RNA, 19 nt, Homo sapiens
  misc_RNA (1)...(19): siRNA sense strand
ggacauggaaaauaaaauc

SEQ ID NO: 264547 - RNA, 19 nt, Homo sapiens
  misc_RNA (1)...(19): siRNA sense strand
guagaggacauggaaaaua

SEQ ID NO: 264548 - RNA, 19 nt, Homo sapiens
  misc_RNA (1)...(19): siRNA sense strand
gacagauggagaaggauga

SEQ ID NO: 264549 - RNA, 19 nt, Homo sapiens
  misc_RNA (1)...(19): siRNA sense strand
aggaugaaacugugaguga

SEQ ID NO: 264550 - RNA, 19 nt, Homo sapiens
  misc_RNA (1)...(19): siRNA sense strand
gaaggcuggagauggauca

SEQ ID NO: 264551 - RNA, 19 nt, Homo sapiens
  misc_RNA (1)...(19): siRNA sense strand
gagauggaucaaagaagau

SEQ ID NO: 264552 - RNA, 19 nt, Homo sapiens
  misc_RNA (1)...(19): siRNA sense strand
ugacugcuccccacacaua

SEQ ID NO: 264553 - RNA, 19 nt, Homo sapiens
  misc_RNA (1)...(19): siRNA sense strand
acaagguggugggaaagga

SEQ ID NO: 264554 - RNA, 19 nt, Homo sapiens
  misc_RNA (1)...(19): siRNA sense strand
ugaagagaaagcagcaaug

SEQ ID NO: 264555 - RNA, 19 nt, Homo sapiens
  misc_RNA (1)...(19): siRNA sense strand
uccuauaggucaccaugga

SEQ ID NO: 264556 - RNA, 19 nt, Homo sapiens
  misc_RNA (1)...(19): siRNA sense strand
gagguggaagccaacaaug

SEQ ID NO: 264557 - RNA, 19 nt, Homo sapiens
  misc_RNA (1)...(19): siRNA sense strand
gaccagccacugaaaauug

SEQ ID NO: 264558 - RNA, 19 nt, Homo sapiens
  misc_RNA (1)...(19): siRNA sense strand
gaaggaugaaacugugagu

SEQ ID NO: 264559 - RNA, 19 nt, Homo sapiens
  misc_RNA (1)...(19): siRNA sense strand
uggagaaggaugaaacugu

SEQ ID NO: 264560 - RNA, 19 nt, Homo sapiens
  misc_RNA (1)...(19): siRNA sense strand
uauaggucaccauggagua

SEQ ID NO: 264561 - RNA, 19 nt, Homo sapiens
  misc_RNA (1)...(19): siRNA sense strand
guacgcugaacgagaucua

SEQ ID NO: 264562 - RNA, 19 nt, Homo sapiens
  misc_RNA (1)...(19): siRNA sense strand
gauggggacuccuauaggu

SEQ ID NO: 264563 - RNA, 19 nt, Homo sapiens
  misc_RNA (1)...(19): siRNA sense strand
gaagccaacaaugccuuug

SEQ ID NO: 264564 - RNA, 19 nt, Homo sapiens
  misc_RNA (1)...(19): siRNA sense strand
cgagaucuacuuuggaaaa

SEQ ID NO: 264565 - RNA, 19 nt, Homo sapiens
  misc_RNA (1)...(19): siRNA sense strand
ccugguagaggacauggaa

SEQ ID NO: 264566 - RNA, 19 nt, Homo sapiens
  misc_RNA (1)...(19): siRNA sense strand
cauaaagaaggcuggagau

SEQ ID NO: 264567 - RNA, 19 nt, Homo sapiens
  misc_RNA (1)...(19): siRNA sense strand
ggagaucucuucauuauua

SEQ ID NO: 264568 - RNA, 19 nt, Homo sapiens
  misc_RNA (1)...(19): siRNA sense strand
ggagauggaucacuuaaau

SEQ ID NO: 264569 - RNA, 19 nt, Homo sapiens
  misc_RNA (1)...(19): siRNA sense strand
gaaaguguauacccuuaaa

SEQ ID NO: 264570 - RNA, 19 nt, Homo sapiens
  misc_RNA (1)...(19): siRNA sense strand
gcacaacauuacagugaua

SEQ ID NO: 264571 - RNA, 19 nt, Homo sapiens
  misc_RNA (1)...(19): siRNA sense strand
caaacuggccuacaucuua

SEQ ID NO: 264572 - RNA, 19 nt, Homo sapiens
  misc_RNA (1)...(19): siRNA sense strand
caacagagaucaauaaucc

SEQ ID NO: 264573 - RNA, 19 nt, Homo sapiens
  misc_RNA (1)...(19): siRNA sense strand
gacagaauauucaacauug

SEQ ID NO: 264574 - RNA, 19 nt, Homo sapiens
  misc_RNA (1)...(19): siRNA sense strand
caggagaucucuucauuau

SEQ ID NO: 264575 - RNA, 19 nt, Homo sapiens
  misc_RNA (1)...(19): siRNA sense strand
aagagaagaugcucagaua

SEQ ID NO: 264576 - RNA, 19 nt, Homo sapiens
  misc_RNA (1)...(19): siRNA sense strand
gaacagugcuaaaguuguc

SEQ ID NO: 264577 - RNA, 19 nt, Homo sapiens
  misc_RNA (1)...(19): siRNA sense strand
caacauugauucuggaaau

SEQ ID NO: 264578 - RNA, 19 nt, Homo sapiens
  misc_RNA (1)...(19): siRNA sense strand
gaaauugaguacagcauca

SEQ ID NO: 264579 - RNA, 19 nt, Homo sapiens
  misc_RNA (1)...(19): siRNA sense strand
gccuacaucuuacaaauaa

SEQ ID NO: 264580 - RNA, 19 nt, Homo sapiens
  misc_RNA (1)...(19): siRNA sense strand
caaugacaaugaaccaaua

SEQ ID NO: 264581 - RNA, 19 nt, Homo sapiens
  misc_RNA (1)...(19): siRNA sense strand
gagaagaugcucagauaaa

SEQ ID NO: 264582 - RNA, 19 nt, Homo sapiens
  misc_RNA (1)...(19): siRNA sense strand
cagaguacauaccaguuua

SEQ ID NO: 264583 - RNA, 19 nt, Homo sapiens
  misc_RNA (1)...(19): siRNA sense strand
gaacuuaccgcuacuucuu

SEQ ID NO: 264584 - RNA, 19 nt, Homo sapiens
  misc_RNA (1)...(19): siRNA sense strand
ggaugcagaucaagacuau

SEQ ID NO: 264585 - RNA, 19 nt, Homo sapiens
  misc_RNA (1)...(19): siRNA sense strand
ggacagaauauucaacauu

SEQ ID NO: 264586 - RNA, 19 nt, Homo sapiens
  misc_RNA (1)...(19): siRNA sense strand
caagauccaugacaucaau

SEQ ID NO: 264587 - RNA, 19 nt, Homo sapiens
  misc_RNA (1)...(19): siRNA sense strand
gcucaaacuuuaccauuca

SEQ ID NO: 264588 - RNA, 19 nt, Homo sapiens
  misc_RNA (1)...(19): siRNA sense strand
ucgaguaccucuauauauu

SEQ ID NO: 264589 - RNA, 19 nt, Homo sapiens
  misc_RNA (1)...(19): siRNA sense strand
ugacaucaaugacaaugaa

SEQ ID NO: 264590 - RNA, 19 nt, Homo sapiens
  misc_RNA (1)...(19): siRNA sense strand
cauagaggacaacaaauua

SEQ ID NO: 264591 - RNA, 19 nt, Homo sapiens
  misc_RNA (1)...(19): siRNA sense strand
acacagauauggacagaau

SEQ ID NO: 264592 - RNA, 19 nt, Homo sapiens
  misc_RNA (1)...(19): siRNA sense strand
ggacaucagagauaacauu

SEQ ID NO: 264593 - RNA, 19 nt, Homo sapiens
  misc_RNA (1)...(19): siRNA sense strand
gcaggagaucucuucauua

SEQ ID NO: 264594 - RNA, 19 nt, Homo sapiens
  misc_RNA (1)...(19): siRNA sense strand
caacaccgaugucagagau

SEQ ID NO: 264595 - RNA, 19 nt, Homo sapiens
  misc_RNA (1)...(19): siRNA sense strand
guagaucgacacacagaua

SEQ ID NO: 264596 - RNA, 19 nt, Homo sapiens
  misc_RNA (1)...(19): siRNA sense strand
gaugagcaccuaucucuug

SEQ ID NO: 264597 - RNA, 19 nt, Homo sapiens
  misc_RNA (1)...(19): siRNA sense strand
gaucaauaauccaaagcaa

SEQ ID NO: 264598 - RNA, 19 nt, Homo sapiens
  misc_RNA (1)...(19): siRNA sense strand
aaaguugucuacaguauuc

SEQ ID NO: 264599 - RNA, 19 nt, Homo sapiens
  misc_RNA (1)...(19): siRNA sense strand
cgaguaccucuauauauua

SEQ ID NO: 264600 - RNA, 19 nt, Homo sapiens
  misc_RNA (1)...(19): siRNA sense strand
gauguggaaucaguucuuu

SEQ ID NO: 264601 - RNA, 19 nt, Homo sapiens
  misc_RNA (1)...(19): siRNA sense strand
gaugucagagauuucauua

SEQ ID NO: 264602 - RNA, 19 nt, Homo sapiens
  misc_RNA (1)...(19): siRNA sense strand
aagaaaguguauacccuua

SEQ ID NO: 264603 - RNA, 19 nt, Homo sapiens
  misc_RNA (1)...(19): siRNA sense strand
caaguacucuguagaucga

SEQ ID NO: 264604 - RNA, 19 nt, Homo sapiens
  misc_RNA (1)...(19): siRNA sense strand
aaagaggacaucagagaua

SEQ ID NO: 264605 - RNA, 19 nt, Homo sapiens
  misc_RNA (1)...(19): siRNA sense strand
ucagauaaacaccacaaua

SEQ ID NO: 264606 - RNA, 19 nt, Homo sapiens
  misc_RNA (1)...(19): siRNA sense strand
ccaaagaggacaucagaga

SEQ ID NO: 264607 - RNA, 19 nt, Homo sapiens
  misc_RNA (1)...(19): siRNA sense strand
gagauggaucacuuaaaua

SEQ ID NO: 264608 - RNA, 19 nt, Homo sapiens
  misc_RNA (1)...(19): siRNA sense strand
ccauagaggacaacaaauu

SEQ ID NO: 264609 - RNA, 19 nt, Homo sapiens
  misc_RNA (1)...(19): siRNA sense strand
caucagagauaacauuguc

SEQ ID NO: 264610 - RNA, 19 nt, Homo sapiens
  misc_RNA (1)...(19): siRNA sense strand
gaauugugguggaggaugu

SEQ ID NO: 264611 - RNA, 19 nt, Homo sapiens
  misc_RNA (1)...(19): siRNA sense strand
uagaggagauggaucacuu

SEQ ID NO: 264612 - RNA, 19 nt, Homo sapiens
  misc_RNA (1)...(19): siRNA sense strand
cuaaaguugucuacaguau

SEQ ID NO: 264613 - RNA, 19 nt, Homo sapiens
  misc_RNA (1)...(19): siRNA sense strand
caagacagcuuugcucaac

SEQ ID NO: 264614 - RNA, 19 nt, Homo sapiens
  misc_RNA (1)...(19): siRNA sense strand
guacauuuguuguccaagu

SEQ ID NO: 264615 - RNA, 19 nt, Homo sapiens
  misc_RNA (1)...(19): siRNA sense strand
ggauagaggagauggauca

SEQ ID NO: 264616 - RNA, 19 nt, Homo sapiens
  misc_RNA (1)...(19): siRNA sense strand
ucaagacuaugauuaccuu

SEQ ID NO: 264617 - RNA, 19 nt, Homo sapiens
  misc_RNA (1)...(19): siRNA sense strand
ucaaagaggacuagugguu

SEQ ID NO: 264618 - RNA, 19 nt, Homo sapiens
  misc_RNA (1)...(19): siRNA sense strand
ggacaccaauuuucguuuu

SEQ ID NO: 264619 - RNA, 19 nt, Homo sapiens
  misc_RNA (1)...(19): siRNA sense strand
gggagaaaaugcugaaauu

SEQ ID NO: 264620 - RNA, 19 nt, Homo sapiens
  misc_RNA (1)...(19): siRNA sense strand
ggacaccaauuggcagaau

SEQ ID NO: 264621 - RNA, 19 nt, Homo sapiens
  misc_RNA (1)...(19): siRNA sense strand
aaacagguauuaucaagac

SEQ ID NO: 264622 - RNA, 19 nt, Homo sapiens
  misc_RNA (1)...(19): siRNA sense strand
gaaacagguauuaucaaga

SEQ ID NO: 264623 - RNA, 19 nt, Homo sapiens
  misc_RNA (1)...(19): siRNA sense strand
caaagaggacuagugguuu

SEQ ID NO: 264624 - RNA, 19 nt, Homo sapiens
  misc_RNA (1)...(19): siRNA sense strand
ggagcuggauguggaauca

SEQ ID NO: 264625 - RNA, 19 nt, Homo sapiens
  misc_RNA (1)...(19): siRNA sense strand
ucucucaacuccacuauca

SEQ ID NO: 264626 - RNA, 19 nt, Homo sapiens
  misc_RNA (1)...(19): siRNA sense strand
aaagcaaaguagucgagua

SEQ ID NO: 264627 - RNA, 19 nt, Homo sapiens
  misc_RNA (1)...(19): siRNA sense strand
agaaacagguauuaucaag

SEQ ID NO: 264628 - RNA, 19 nt, Homo sapiens
  misc_RNA (1)...(19): siRNA sense strand
ugucagagauuucauuaac

SEQ ID NO: 264629 - RNA, 19 nt, Homo sapiens
  misc_RNA (1)...(19): siRNA sense strand
aagaggacaucagagauaa

SEQ ID NO: 264630 - RNA, 19 nt, Homo sapiens
  misc_RNA (1)...(19): siRNA sense strand
gaagggauuauaacuguca

SEQ ID NO: 264631 - RNA, 19 nt, Homo sapiens
  misc_RNA (1)...(19): siRNA sense strand
gaaucagaaacagguauua

SEQ ID NO: 264632 - RNA, 19 nt, Homo sapiens
  misc_RNA (1)...(19): siRNA sense strand
gaccacggaugcagaucaa

SEQ ID NO: 264633 - RNA, 19 nt, Homo sapiens
  misc_RNA (1)...(19): siRNA sense strand
gagauuucauuaaccaaag

SEQ ID NO: 264634 - RNA, 19 nt, Homo sapiens
  misc_RNA (1)...(19): siRNA sense strand
caacuccacuaucaaagag

SEQ ID NO: 264635 - RNA, 19 nt, Homo sapiens
  misc_RNA (1)...(19): siRNA sense strand
uagcaacagagaucaauaa

SEQ ID NO: 264636 - RNA, 19 nt, Homo sapiens
  misc_RNA (1)...(19): siRNA sense strand
aaagaggacuagugguuuc

SEQ ID NO: 264637 - RNA, 19 nt, Homo sapiens
  misc_RNA (1)...(19): siRNA sense strand
cagauaaacaccacaauag

SEQ ID NO: 264638 - RNA, 19 nt, Homo sapiens
  misc_RNA (1)...(19): siRNA sense strand
cagcuuugcucaacaugga

SEQ ID NO: 264639 - RNA, 19 nt, Homo sapiens
  misc_RNA (1)...(19): siRNA sense strand
ggaauccugucaaguacuc

SEQ ID NO: 264640 - RNA, 19 nt, Homo sapiens
  misc_RNA (1)...(19): siRNA sense strand
gacaacgacuacccaguuc

SEQ ID NO: 264641 - RNA, 19 nt, Homo sapiens
  misc_RNA (1)...(19): siRNA sense strand
gacacgagaugagcaccua

SEQ ID NO: 264642 - RNA, 19 nt, Homo sapiens
  misc_RNA (1)...(19): siRNA sense strand
ugacaacgccccagaauuu

SEQ ID NO: 264643 - RNA, 19 nt, Homo sapiens
  misc_RNA (1)...(19): siRNA sense strand
ucagaaacagguauuauca

SEQ ID NO: 264644 - RNA, 19 nt, Homo sapiens
  misc_RNA (1)...(19): siRNA sense strand
gagaaaaugcugaaauuga

SEQ ID NO: 264645 - RNA, 19 nt, Homo sapiens
  misc_RNA (1)...(19): siRNA sense strand
gcagaugauccaacauaug

SEQ ID NO: 264646 - RNA, 19 nt, Homo sapiens
  misc_RNA (1)...(19): siRNA sense strand
acaccgaugucagagauuu

SEQ ID NO: 264647 - RNA, 19 nt, Homo sapiens
  misc_RNA (1)...(19): siRNA sense strand
gaauacacaggauccgauu

SEQ ID NO: 264648 - RNA, 19 nt, Homo sapiens
  misc_RNA (1)...(19): siRNA sense strand
guagucgaguaccucuaua

SEQ ID NO: 264649 - RNA, 19 nt, Homo sapiens
  misc_RNA (1)...(19): siRNA sense strand
gaagaugcucagauaaaca

SEQ ID NO: 264650 - RNA, 19 nt, Homo sapiens
  misc_RNA (1)...(19): siRNA sense strand
aggaagggauuauaacugu

SEQ ID NO: 264651 - RNA, 19 nt, Homo sapiens
  misc_RNA (1)...(19): siRNA sense strand
gaggagauggaucacuuaa

SEQ ID NO: 264652 - RNA, 19 nt, Homo sapiens
  misc_RNA (1)...(19): siRNA sense strand
ucagagauuucauuaacca

SEQ ID NO: 264653 - RNA, 19 nt, Homo sapiens
  misc_RNA (1)...(19): siRNA sense strand
ggccuacaucuuacaaaua

SEQ ID NO: 264654 - RNA, 19 nt, Homo sapiens
  misc_RNA (1)...(19): siRNA sense strand
gcccgagucugaauucauc

SEQ ID NO: 264655 - RNA, 19 nt, Homo sapiens
  misc_RNA (1)...(19): siRNA sense strand
agcaggagaucucuucauu

SEQ ID NO: 264656 - RNA, 19 nt, Homo sapiens
  misc_RNA (1)...(19): siRNA sense strand
gcaaaggcagaucaguuga

SEQ ID NO: 264657 - RNA, 19 nt, Homo sapiens
  misc_RNA (1)...(19): siRNA sense strand
ccagaguacauaccaguuu

SEQ ID NO: 264658 - RNA, 19 nt, Homo sapiens
  misc_RNA (1)...(19): siRNA sense strand
caacauggaucgagaaaac

SEQ ID NO: 264659 - RNA, 19 nt, Homo sapiens
  misc_RNA (1)...(19): siRNA sense strand
gcuaaaguugucuacagua

SEQ ID NO: 264660 - RNA, 19 nt, Homo sapiens
  misc_RNA (1)...(19): siRNA sense strand
gggaacagugcuaaaguug

SEQ ID NO: 264661 - RNA, 19 nt, Homo sapiens
  misc_RNA (1)...(19): siRNA sense strand
gaggacaacaaauuacgaa

SEQ ID NO: 264662 - RNA, 19 nt, Homo sapiens
  misc_RNA (1)...(19): siRNA sense strand
agacaacgacuacccaguu

SEQ ID NO: 264663 - RNA, 19 nt, Homo sapiens
  misc_RNA (1)...(19): siRNA sense strand
gcaaaguagucgaguaccu

SEQ ID NO: 264664 - RNA, 19 nt, Homo sapiens
  misc_RNA (1)...(19): siRNA sense strand
ucagcaaacuggccuacau

SEQ ID NO: 264665 - RNA, 19 nt, Homo sapiens
  misc_RNA (1)...(19): siRNA sense strand
gccacgauuucucuacuug

SEQ ID NO: 264666 - RNA, 19 nt, Homo sapiens
  misc_RNA (1)...(19): siRNA sense strand
ccaauuggcagaaucaaag

SEQ ID NO: 264667 - RNA, 19 nt, Homo sapiens
  misc_RNA (1)...(19): siRNA sense strand
ugaaggcccuggacuauga

SEQ ID NO: 264668 - RNA, 19 nt, Homo sapiens
  misc_RNA (1)...(19): siRNA sense strand
ccacggaccuggagauugu

SEQ ID NO: 264669 - RNA, 19 nt, Homo sapiens
  misc_RNA (1)...(19): siRNA sense strand
ggacaucgccgacuucauc

SEQ ID NO: 264670 - RNA, 19 nt, Homo sapiens
  misc_RNA (1)...(19): siRNA sense strand
cgacacagcccucaucuau

SEQ ID NO: 264671 - RNA, 19 nt, Homo sapiens
  misc_RNA (1)...(19): siRNA sense strand
caacuacgaugagcaagga

SEQ ID NO: 264672 - RNA, 19 nt, Homo sapiens
  misc_RNA (1)...(19): siRNA sense strand
ggacuacgacuaccucaga

SEQ ID NO: 264673 - RNA, 19 nt, Homo sapiens
  misc_RNA (1)...(19): siRNA sense strand
ggacgaccuucgagacaau

SEQ ID NO: 264674 - RNA, 19 nt, Homo sapiens
  misc_RNA (1)...(19): siRNA sense strand
gguguucuguccauuguga

SEQ ID NO: 264675 - RNA, 19 nt, Homo sapiens
  misc_RNA (1)...(19): siRNA sense strand
gcgaugaggaccaggacua

SEQ ID NO: 264676 - RNA, 19 nt, Homo sapiens
  misc_RNA (1)...(19): siRNA sense strand
ggaccuggagauuguaguu

SEQ ID NO: 264677 - RNA, 19 nt, Homo sapiens
  misc_RNA (1)...(19): siRNA sense strand
acaauguccucaacuacga

SEQ ID NO: 264678 - RNA, 19 nt, Homo sapiens
  misc_RNA (1)...(19): siRNA sense strand
ugagagcugugaacacuac

SEQ ID NO: 264679 - RNA, 19 nt, Homo sapiens
  misc_RNA (1)...(19): siRNA sense strand
uaugagagcugugaacacu

SEQ ID NO: 264680 - RNA, 19 nt, Homo sapiens
  misc_RNA (1)...(19): siRNA sense strand
aagugucggugcagaauga

SEQ ID NO: 264681 - RNA, 19 nt, Homo sapiens
  misc_RNA (1)...(19): siRNA sense strand
gcacugcuacccagacaca

SEQ ID NO: 264682 - RNA, 19 nt, Homo sapiens
  misc_RNA (1)...(19): siRNA sense strand
caccagggaugaguucuuc

SEQ ID NO: 264683 - RNA, 19 nt, Homo sapiens
  misc_RNA (1)...(19): siRNA sense strand
caggagagauccgcacagu

SEQ ID NO: 264684 - RNA, 19 nt, Homo sapiens
  misc_RNA (1)...(19): siRNA sense strand
ggaccaggacuacgacuac

SEQ ID NO: 264685 - RNA, 19 nt, Homo sapiens
  misc_RNA (1)...(19): siRNA sense strand
gcagguggcggacaugucu

SEQ ID NO: 264686 - RNA, 19 nt, Homo sapiens
  misc_RNA (1)...(19): siRNA sense strand
ugaacacuacgaacucaaa

SEQ ID NO: 264687 - RNA, 19 nt, Homo sapiens
  misc_RNA (1)...(19): siRNA sense strand
ccaggacgccuacgacauc

SEQ ID NO: 264688 - RNA, 19 nt, Homo sapiens
  misc_RNA (1)...(19): siRNA sense strand
gaacacuacgaacucaaag

SEQ ID NO: 264689 - RNA, 19 nt, Homo sapiens
  misc_RNA (1)...(19): siRNA sense strand
gggcacugcuacccagaca

SEQ ID NO: 264690 - RNA, 19 nt, Homo sapiens
  misc_RNA (1)...(19): siRNA sense strand
gagcugugaacacuacgaa

SEQ ID NO: 264691 - RNA, 19 nt, Homo sapiens
  misc_RNA (1)...(19): siRNA sense strand
caaagugucggugcagaau

SEQ ID NO: 264692 - RNA, 19 nt, Homo sapiens
  misc_RNA (1)...(19): siRNA sense strand
gaggguguucuguccauug

SEQ ID NO: 264693 - RNA, 19 nt, Homo sapiens
  misc_RNA (1)...(19): siRNA sense strand
cgucuucucuaucgacaag

SEQ ID NO: 264694 - RNA, 19 nt, Homo sapiens
  misc_RNA (1)...(19): siRNA sense strand
gcacggaccccaagaccaa

SEQ ID NO: 264695 - RNA, 19 nt, Homo sapiens
  misc_RNA (1)...(19): siRNA sense strand
gcgagcagccucugaacgu

SEQ ID NO: 264696 - RNA, 19 nt, Homo sapiens
  misc_RNA (1)...(19): siRNA sense strand
ucaaagugucggugcagaa

SEQ ID NO: 264697 - RNA, 19 nt, Homo sapiens
  misc_RNA (1)...(19): siRNA sense strand
ggaugugggacgccuggaa

SEQ ID NO: 264698 - RNA, 19 nt, Homo sapiens
  misc_RNA (1)...(19): siRNA sense strand
gcuuggaggcugcagauag

SEQ ID NO: 264699 - RNA, 19 nt, Homo sapiens
  misc_RNA (1)...(19): siRNA sense strand
ggacuaugagagcugugaa

SEQ ID NO: 264700 - RNA, 19 nt, Homo sapiens
  misc_RNA (1)...(19): siRNA sense strand
cuuggaggcugcagauagu

SEQ ID NO: 264701 - RNA, 19 nt, Homo sapiens
  misc_RNA (1)...(19): siRNA sense strand
ggagauuguaguuguggau

SEQ ID NO: 264702 - RNA, 19 nt, Homo sapiens
  misc_RNA (1)...(19): siRNA sense strand
ggaagacuggcugcaagug

SEQ ID NO: 264703 - RNA, 19 nt, Homo sapiens
  misc_RNA (1)...(19): siRNA sense strand
ggaggugaacgaccaugca

SEQ ID NO: 264704 - RNA, 19 nt, Homo sapiens
  misc_RNA (1)...(19): siRNA sense strand
gacacagcccucaucuaug

SEQ ID NO: 264705 - RNA, 19 nt, Homo sapiens
  misc_RNA (1)...(19): siRNA sense strand
cagccaucaucacccuuga

SEQ ID NO: 264706 - RNA, 19 nt, Homo sapiens
  misc_RNA (1)...(19): siRNA sense strand
ccagugugccgccuuacga

SEQ ID NO: 264707 - RNA, 19 nt, Homo sapiens
  misc_RNA (1)...(19): siRNA sense strand
caucgccgacuucaucaau

SEQ ID NO: 264708 - RNA, 19 nt, Homo sapiens
  misc_RNA (1)...(19): siRNA sense strand
gcagcgucaucuacagcau

SEQ ID NO: 264709 - RNA, 19 nt, Homo sapiens
  misc_RNA (1)...(19): siRNA sense strand
gaucagcguauccgagaac

SEQ ID NO: 264710 - RNA, 19 nt, Homo sapiens
  misc_RNA (1)...(19): siRNA sense strand
ucgagauccuggaggugaa

SEQ ID NO: 264711 - RNA, 19 nt, Homo sapiens
  misc_RNA (1)...(19): siRNA sense strand
ggacuacgacccggaagac

SEQ ID NO: 264712 - RNA, 19 nt, Homo sapiens
  misc_RNA (1)...(19): siRNA sense strand
gaccaacgaggguguucug

SEQ ID NO: 264713 - RNA, 19 nt, Homo sapiens
  misc_RNA (1)...(19): siRNA sense strand
gccacugccucagccauca

SEQ ID NO: 264714 - RNA, 19 nt, Homo sapiens
  misc_RNA (1)...(19): siRNA sense strand
ugugaacacuacgaacuca

SEQ ID NO: 264715 - RNA, 19 nt, Homo sapiens
  misc_RNA (1)...(19): siRNA sense strand
gcauagauguucaggaauu

SEQ ID NO: 264716 - RNA, 19 nt, Homo sapiens
  misc_RNA (1)...(19): siRNA sense strand
aaagagcccuugaucauuu

SEQ ID NO: 264717 - RNA, 19 nt, Homo sapiens
  misc_RNA (1)...(19): siRNA sense strand
gcaaauacacaucuugauu

SEQ ID NO: 264718 - RNA, 19 nt, Homo sapiens
  misc_RNA (1)...(19): siRNA sense strand
gaacauuacuccguaguca

SEQ ID NO: 264719 - RNA, 19 nt, Homo sapiens
  misc_RNA (1)...(19): siRNA sense strand
gagaagaaacuccauggua

SEQ ID NO: 264720 - RNA, 19 nt, Homo sapiens
  misc_RNA (1)...(19): siRNA sense strand
uaaagaagccacugaacua

SEQ ID NO: 264721 - RNA, 19 nt, Homo sapiens
  misc_RNA (1)...(19): siRNA sense strand
gaugaacgccugccuguaa

SEQ ID NO: 264722 - RNA, 19 nt, Homo sapiens
  misc_RNA (1)...(19): siRNA sense strand
gaccauacauuguuacugu

SEQ ID NO: 264723 - RNA, 19 nt, Homo sapiens
  misc_RNA (1)...(19): siRNA sense strand
gcacuccaauucugacaaa

SEQ ID NO: 264724 - RNA, 19 nt, Homo sapiens
  misc_RNA (1)...(19): siRNA sense strand
ugaacucuauggagaaaua

SEQ ID NO: 264725 - RNA, 19 nt, Homo sapiens
  misc_RNA (1)...(19): siRNA sense strand
gugcagagguguuauggaa

SEQ ID NO: 264726 - RNA, 19 nt, Homo sapiens
  misc_RNA (1)...(19): siRNA sense strand
ugacaguacuaacagcuua

SEQ ID NO: 264727 - RNA, 19 nt, Homo sapiens
  misc_RNA (1)...(19): siRNA sense strand
ccaccacgcuuuccucaaa

SEQ ID NO: 264728 - RNA, 19 nt, Homo sapiens
  misc_RNA (1)...(19): siRNA sense strand
gggacuauauuuaucauug

SEQ ID NO: 264729 - RNA, 19 nt, Homo sapiens
  misc_RNA (1)...(19): siRNA sense strand
ggacagagaagccagagaa

SEQ ID NO: 264730 - RNA, 19 nt, Homo sapiens
  misc_RNA (1)...(19): siRNA sense strand
ugacaaaggugauggaucu

SEQ ID NO: 264731 - RNA, 19 nt, Homo sapiens
  misc_RNA (1)...(19): siRNA sense strand
aagcauagauguucaggaa

SEQ ID NO: 264732 - RNA, 19 nt, Homo sapiens
  misc_RNA (1)...(19): siRNA sense strand
caacauagaaggagcaaau

SEQ ID NO: 264733 - RNA, 19 nt, Homo sapiens
  misc_RNA (1)...(19): siRNA sense strand
gaccagauccucaguaugu

SEQ ID NO: 264734 - RNA, 19 nt, Homo sapiens
  misc_RNA (1)...(19): siRNA sense strand
ggaccaagguuuaacuucu

SEQ ID NO: 264735 - RNA, 19 nt, Homo sapiens
  misc_RNA (1)...(19): siRNA sense strand
gaaacuccaugguacaaca

SEQ ID NO: 264736 - RNA, 19 nt, Homo sapiens
  misc_RNA (1)...(19): siRNA sense strand
gaacauaugggaccagauc

SEQ ID NO: 264737 - RNA, 19 nt, Homo sapiens
  misc_RNA (1)...(19): siRNA sense strand
uguauuaucugcccauuau

SEQ ID NO: 264738 - RNA, 19 nt, Homo sapiens
  misc_RNA (1)...(19): siRNA sense strand
cauauacccucaacauaga

SEQ ID NO: 264739 - RNA, 19 nt, Homo sapiens
  misc_RNA (1)...(19): siRNA sense strand
uggaaucaguucuuuguuu

SEQ ID NO: 264740 - RNA, 19 nt, Homo sapiens
  misc_RNA (1)...(19): siRNA sense strand
gggagaacguggucaccua

SEQ ID NO: 264741 - RNA, 19 nt, Homo sapiens
  misc_RNA (1)...(19): siRNA sense strand
agaagccacugaacuauga

SEQ ID NO: 264742 - RNA, 19 nt, Homo sapiens
  misc_RNA (1)...(19): siRNA sense strand
gacaugaccuacuccauca

SEQ ID NO: 264743 - RNA, 19 nt, Homo sapiens
  misc_RNA (1)...(19): siRNA sense strand
agacauggcugggcaaguu

SEQ ID NO: 264744 - RNA, 19 nt, Homo sapiens
  misc_RNA (1)...(19): siRNA sense strand
ggagaaauagaaucugaaa

SEQ ID NO: 264745 - RNA, 19 nt, Homo sapiens
  misc_RNA (1)...(19): siRNA sense strand
gaugagaaaccaaaccaaa

SEQ ID NO: 264746 - RNA, 19 nt, Homo sapiens
  misc_RNA (1)...(19): siRNA sense strand
gaaggacaaugaagauaac

SEQ ID NO: 264747 - RNA, 19 nt, Homo sapiens
  misc_RNA (1)...(19): siRNA sense strand
gagaagccagagaacauua

SEQ ID NO: 264748 - RNA, 19 nt, Homo sapiens
  misc_RNA (1)...(19): siRNA sense strand
aaacagcgcucgggugguu

SEQ ID NO: 264749 - RNA, 19 nt, Homo sapiens
  misc_RNA (1)...(19): siRNA sense strand
gguauggaaucaguucuuu

SEQ ID NO: 264750 - RNA, 19 nt, Homo sapiens
  misc_RNA (1)...(19): siRNA sense strand
cggaggagauuuagucgaa

SEQ ID NO: 264751 - RNA, 19 nt, Homo sapiens
  misc_RNA (1)...(19): siRNA sense strand
aauccaaacuucacucuga

SEQ ID NO: 264752 - RNA, 19 nt, Homo sapiens
  misc_RNA (1)...(19): siRNA sense strand
uagcacaucuugcaucugu

SEQ ID NO: 264753 - RNA, 19 nt, Homo sapiens
  misc_RNA (1)...(19): siRNA sense strand
gccaauggaccaagguuua

SEQ ID NO: 264754 - RNA, 19 nt, Homo sapiens
  misc_RNA (1)...(19): siRNA sense strand
gagcaaauacacaucuuga

SEQ ID NO: 264755 - RNA, 19 nt, Homo sapiens
  misc_RNA (1)...(19): siRNA sense strand
gaccaagguuuaacuucuu

SEQ ID NO: 264756 - RNA, 19 nt, Homo sapiens
  misc_RNA (1)...(19): siRNA sense strand
ggaaucaguucuuuguuuu

SEQ ID NO: 264757 - RNA, 19 nt, Homo sapiens
  misc_RNA (1)...(19): siRNA sense strand
ugacaacgcuccaaaauuc

SEQ ID NO: 264758 - RNA, 19 nt, Homo sapiens
  misc_RNA (1)...(19): siRNA sense strand
ggaaagcugcacuccaauu

SEQ ID NO: 264759 - RNA, 19 nt, Homo sapiens
  misc_RNA (1)...(19): siRNA sense strand
gaaagcugcacuccaauuc

SEQ ID NO: 264760 - RNA, 19 nt, Homo sapiens
  misc_RNA (1)...(19): siRNA sense strand
ugauagacguacaaacaaa

SEQ ID NO: 264761 - RNA, 19 nt, Homo sapiens
  misc_RNA (1)...(19): siRNA sense strand
ugaaggacaaugaagauaa

SEQ ID NO: 264762 - RNA, 19 nt, Homo sapiens
  misc_RNA (1)...(19): siRNA sense strand
ggucaccuaugaugaugaa

SEQ ID NO: 264763 - RNA, 19 nt, Homo sapiens
  misc_RNA (1)...(19): siRNA sense strand
gcagaagacccacuaugug

SEQ ID NO: 264764 - RNA, 19 nt, Homo sapiens
  misc_RNA (1)...(19): siRNA sense strand
gcagaugacccuaccuaug

SEQ ID NO: 264765 - RNA, 19 nt, Homo sapiens
  misc_RNA (1)...(19): siRNA sense strand
gggaccagauccucaguau

SEQ ID NO: 264766 - RNA, 19 nt, Homo sapiens
  misc_RNA (1)...(19): siRNA sense strand
gcagagguguuauggaacu

SEQ ID NO: 264767 - RNA, 19 nt, Homo sapiens
  misc_RNA (1)...(19): siRNA sense strand
gaacggccuuacauaacau

SEQ ID NO: 264768 - RNA, 19 nt, Homo sapiens
  misc_RNA (1)...(19): siRNA sense strand
aaacaggaguuauuagaac

SEQ ID NO: 264769 - RNA, 19 nt, Homo sapiens
  misc_RNA (1)...(19): siRNA sense strand
ccacugauaaagaugauuu

SEQ ID NO: 264770 - RNA, 19 nt, Homo sapiens
  misc_RNA (1)...(19): siRNA sense strand
gcugaacucuauggagaaa

SEQ ID NO: 264771 - RNA, 19 nt, Homo sapiens
  misc_RNA (1)...(19): siRNA sense strand
caaguugguucagcuguug

SEQ ID NO: 264772 - RNA, 19 nt, Homo sapiens
  misc_RNA (1)...(19): siRNA sense strand
gaucagaagcugggucuau

SEQ ID NO: 264773 - RNA, 19 nt, Homo sapiens
  misc_RNA (1)...(19): siRNA sense strand
agucacugcuucagaaauu

SEQ ID NO: 264774 - RNA, 19 nt, Homo sapiens
  misc_RNA (1)...(19): siRNA sense strand
gaagaaacuccaugguaca

SEQ ID NO: 264775 - RNA, 19 nt, Homo sapiens
  misc_RNA (1)...(19): siRNA sense strand
gccaauacugggaccauua

SEQ ID NO: 264776 - RNA, 19 nt, Homo sapiens
  misc_RNA (1)...(19): siRNA sense strand
guaagauacuucaucaacu

SEQ ID NO: 264777 - RNA, 19 nt, Homo sapiens
  misc_RNA (1)...(19): siRNA sense strand
ggugauauccacucaacaa

SEQ ID NO: 264778 - RNA, 19 nt, Homo sapiens
  misc_RNA (1)...(19): siRNA sense strand
cauagauguucaggaauuu

SEQ ID NO: 264779 - RNA, 19 nt, Homo sapiens
  misc_RNA (1)...(19): siRNA sense strand
gagauuuagucgaacuguu

SEQ ID NO: 264780 - RNA, 19 nt, Homo sapiens
  misc_RNA (1)...(19): siRNA sense strand
gauacuucaucaacuacaa

SEQ ID NO: 264781 - RNA, 19 nt, Homo sapiens
  misc_RNA (1)...(19): siRNA sense strand
gcacaagauccugacagua

SEQ ID NO: 264782 - RNA, 19 nt, Homo sapiens
  misc_RNA (1)...(19): siRNA sense strand
gaccgucguugguacaguu

SEQ ID NO: 264783 - RNA, 19 nt, Homo sapiens
  misc_RNA (1)...(19): siRNA sense strand
uuagaacggccuuacauaa

SEQ ID NO: 264784 - RNA, 19 nt, Homo sapiens
  misc_RNA (1)...(19): siRNA sense strand
aaaccaaaccaaacacauu

SEQ ID NO: 264785 - RNA, 19 nt, Homo sapiens
  misc_RNA (1)...(19): siRNA sense strand
guacaaacaaaccucuuga

SEQ ID NO: 264786 - RNA, 19 nt, Homo sapiens
  misc_RNA (1)...(19): siRNA sense strand
acaaggcggaggagauuua

SEQ ID NO: 264787 - RNA, 19 nt, Homo sapiens
  misc_RNA (1)...(19): siRNA sense strand
gaacuugccagggaauaug

SEQ ID NO: 264788 - RNA, 19 nt, Homo sapiens
  misc_RNA (1)...(19): siRNA sense strand
guagaugaaccaccacuau

SEQ ID NO: 264789 - RNA, 19 nt, Homo sapiens
  misc_RNA (1)...(19): siRNA sense strand
gaagucauauacccucaac

SEQ ID NO: 264790 - RNA, 19 nt, Homo sapiens
  misc_RNA (1)...(19): siRNA sense strand
caaagagaccagagaagga

SEQ ID NO: 264791 - RNA, 19 nt, Homo sapiens
  misc_RNA (1)...(19): siRNA sense strand
uacauaacauggacagaga

SEQ ID NO: 264792 - RNA, 19 nt, Homo sapiens
  misc_RNA (1)...(19): siRNA sense strand
ggacaaugaagauaacaca

SEQ ID NO: 264793 - RNA, 19 nt, Homo sapiens
  misc_RNA (1)...(19): siRNA sense strand
gguuuaacuucuuucuuga

SEQ ID NO: 264794 - RNA, 19 nt, Homo sapiens
  misc_RNA (1)...(19): siRNA sense strand
ugauggaucugucaaguac

SEQ ID NO: 264795 - RNA, 19 nt, Homo sapiens
  misc_RNA (1)...(19): siRNA sense strand
caaacacauugaaggugaa

SEQ ID NO: 264796 - RNA, 19 nt, Homo sapiens
  misc_RNA (1)...(19): siRNA sense strand
augacucucuucagacuua

SEQ ID NO: 264797 - RNA, 19 nt, Homo sapiens
  misc_RNA (1)...(19): siRNA sense strand
guauuagaguucuggaugu

SEQ ID NO: 264798 - RNA, 19 nt, Homo sapiens
  misc_RNA (1)...(19): siRNA sense strand
gcaugggaauauucucaau

SEQ ID NO: 264799 - RNA, 19 nt, Homo sapiens
  misc_RNA (1)...(19): siRNA sense strand
agaacggccuuacauaaca

SEQ ID NO: 264800 - RNA, 19 nt, Homo sapiens
  misc_RNA (1)...(19): siRNA sense strand
ggugacagcuacugaugca

SEQ ID NO: 264801 - RNA, 19 nt, Homo sapiens
  misc_RNA (1)...(19): siRNA sense strand
gacgauaccacgggugaua

SEQ ID NO: 264802 - RNA, 19 nt, Homo sapiens
  misc_RNA (1)...(19): siRNA sense strand
ggaagacacagaggccuuu

SEQ ID NO: 264803 - RNA, 19 nt, Homo sapiens
  misc_RNA (1)...(19): siRNA sense strand
ugaaggaggcggagaggaa

SEQ ID NO: 264804 - RNA, 19 nt, Homo sapiens
  misc_RNA (1)...(19): siRNA sense strand
agaacguggucaccuauga

SEQ ID NO: 264805 - RNA, 19 nt, Homo sapiens
  misc_RNA (1)...(19): siRNA sense strand
agguuuaacuucuuucuug

SEQ ID NO: 264806 - RNA, 19 nt, Homo sapiens
  misc_RNA (1)...(19): siRNA sense strand
ucauauacccucaacauag

SEQ ID NO: 264807 - RNA, 19 nt, Homo sapiens
  misc_RNA (1)...(19): siRNA sense strand
ugacaacccaccacgcuuu

SEQ ID NO: 264808 - RNA, 19 nt, Homo sapiens
  misc_RNA (1)...(19): siRNA sense strand
caaaugcugacaugaccua

SEQ ID NO: 264809 - RNA, 19 nt, Homo sapiens
  misc_RNA (1)...(19): siRNA sense strand
ccuuaugacucucuucaga

SEQ ID NO: 264810 - RNA, 19 nt, Homo sapiens
  misc_RNA (1)...(19): siRNA sense strand
gaaaauuacuagcacaucu

SEQ ID NO: 264811 - RNA, 19 nt, Homo sapiens
  misc_RNA (1)...(19): siRNA sense strand
ggauggguauggaaucagu

SEQ ID NO: 264812 - RNA, 19 nt, Homo sapiens
  misc_RNA (1)...(19): siRNA sense strand
cauuaggacuacaaagguu

SEQ ID NO: 264813 - RNA, 19 nt, Homo sapiens
  misc_RNA (1)...(19): siRNA sense strand
agaugaaccaccacuauuu

SEQ ID NO: 264814 - RNA, 19 nt, Homo sapiens
  misc_RNA (1)...(19): siRNA sense strand
ugacaaagagaccagagaa

SEQ ID NO: 264815 - RNA, 19 nt, Homo sapiens
  misc_RNA (1)...(19): siRNA sense strand
gaaaucaucugcaagaaau

SEQ ID NO: 264816 - RNA, 19 nt, Homo sapiens
  misc_RNA (1)...(19): siRNA sense strand
gaagaaaugccgugagaaa

SEQ ID NO: 264817 - RNA, 19 nt, Homo sapiens
  misc_RNA (1)...(19): siRNA sense strand
gaaucgauguccaggauaa

SEQ ID NO: 264818 - RNA, 19 nt, Homo sapiens
  misc_RNA (1)...(19): siRNA sense strand
ccagaacgcuuauuugaau

SEQ ID NO: 264819 - RNA, 19 nt, Homo sapiens
  misc_RNA (1)...(19): siRNA sense strand
gaacagguuuggaaaugau

SEQ ID NO: 264820 - RNA, 19 nt, Homo sapiens
  misc_RNA (1)...(19): siRNA sense strand
caacugaauuucucaaaca

SEQ ID NO: 264821 - RNA, 19 nt, Homo sapiens
  misc_RNA (1)...(19): siRNA sense strand
gcacgggacaccuccauua

SEQ ID NO: 264822 - RNA, 19 nt, Homo sapiens
  misc_RNA (1)...(19): siRNA sense strand
caagaaacguuagcaaaug

SEQ ID NO: 264823 - RNA, 19 nt, Homo sapiens
  misc_RNA (1)...(19): siRNA sense strand
gaacauggagccgaccuua

SEQ ID NO: 264824 - RNA, 19 nt, Homo sapiens
  misc_RNA (1)...(19): siRNA sense strand
gaaauacgaagccagauug

SEQ ID NO: 264825 - RNA, 19 nt, Homo sapiens
  misc_RNA (1)...(19): siRNA sense strand
gaauggaguuggcgauuuc

SEQ ID NO: 264826 - RNA, 19 nt, Homo sapiens
  misc_RNA (1)...(19): siRNA sense strand
gagaaucgauguccaggau

SEQ ID NO: 264827 - RNA, 19 nt, Homo sapiens
  misc_RNA (1)...(19): siRNA sense strand
gaagaacccacuccaaguu

SEQ ID NO: 264828 - RNA, 19 nt, Homo sapiens
  misc_RNA (1)...(19): siRNA sense strand
gcaagaaacguuagcaaau

SEQ ID NO: 264829 - RNA, 19 nt, Homo sapiens
  misc_RNA (1)...(19): siRNA sense strand
ggacaucuccaacaaguau

SEQ ID NO: 264830 - RNA, 19 nt, Homo sapiens
  misc_RNA (1)...(19): siRNA sense strand
caguaaacauggagaaauu

SEQ ID NO: 264831 - RNA, 19 nt, Homo sapiens
  misc_RNA (1)...(19): siRNA sense strand
gaucaagccuaaagauaca

SEQ ID NO: 264832 - RNA, 19 nt, Homo sapiens
  misc_RNA (1)...(19): siRNA sense strand
gaagacuccuuugugauga

SEQ ID NO: 264833 - RNA, 19 nt, Homo sapiens
  misc_RNA (1)...(19): siRNA sense strand
caaaugaucccacgucaau

SEQ ID NO: 264834 - RNA, 19 nt, Homo sapiens
  misc_RNA (1)...(19): siRNA sense strand
auacuacaguugcucauua

SEQ ID NO: 264835 - RNA, 19 nt, Homo sapiens
  misc_RNA (1)...(19): siRNA sense strand
ggaagcaacugaauuucuc

SEQ ID NO: 264836 - RNA, 19 nt, Homo sapiens
  misc_RNA (1)...(19): siRNA sense strand
ggaacagguuuggaaauga

SEQ ID NO: 264837 - RNA, 19 nt, Homo sapiens
  misc_RNA (1)...(19): siRNA sense strand
caacuaugauguuaaccaa

SEQ ID NO: 264838 - RNA, 19 nt, Homo sapiens
  misc_RNA (1)...(19): siRNA sense strand
ccaaagauuucauaagaag

SEQ ID NO: 264839 - RNA, 19 nt, Homo sapiens
  misc_RNA (1)...(19): siRNA sense strand
gcaaauguauccgcuguca

SEQ ID NO: 264840 - RNA, 19 nt, Homo sapiens
  misc_RNA (1)...(19): siRNA sense strand
caacaggcacuuaguagaa

SEQ ID NO: 264841 - RNA, 19 nt, Homo sapiens
  misc_RNA (1)...(19): siRNA sense strand
ggaagacuccuuugugaug

SEQ ID NO: 264842 - RNA, 19 nt, Homo sapiens
  misc_RNA (1)...(19): siRNA sense strand
ccacgucgauaccuugaaa

SEQ ID NO: 264843 - RNA, 19 nt, Homo sapiens
  misc_RNA (1)...(19): siRNA sense strand
gugaagaaaugccgugaga

SEQ ID NO: 264844 - RNA, 19 nt, Homo sapiens
  misc_RNA (1)...(19): siRNA sense strand
acacaucguugcugaaaga

SEQ ID NO: 264845 - RNA, 19 nt, Homo sapiens
  misc_RNA (1)...(19): siRNA sense strand
guuugucgcuccugagaua

SEQ ID NO: 264846 - RNA, 19 nt, Homo sapiens
  misc_RNA (1)...(19): siRNA sense strand
ggucaaggauccaaagaag

SEQ ID NO: 264847 - RNA, 19 nt, Homo sapiens
  misc_RNA (1)...(19): siRNA sense strand
gaaggcauccucuguguuc

SEQ ID NO: 264848 - RNA, 19 nt, Homo sapiens
  misc_RNA (1)...(19): siRNA sense strand
gcacguagcaggucuccuu

SEQ ID NO: 264849 - RNA, 19 nt, Homo sapiens
  misc_RNA (1)...(19): siRNA sense strand
agccaaagauuucauaaga

SEQ ID NO: 264850 - RNA, 19 nt, Homo sapiens
  misc_RNA (1)...(19): siRNA sense strand
gucgauaccuugaaauuuc

SEQ ID NO: 264851 - RNA, 19 nt, Homo sapiens
  misc_RNA (1)...(19): siRNA sense strand
gccaaagauuucauaagaa

SEQ ID NO: 264852 - RNA, 19 nt, Homo sapiens
  misc_RNA (1)...(19): siRNA sense strand
cgacaaggacggacacauu

SEQ ID NO: 264853 - RNA, 19 nt, Homo sapiens
  misc_RNA (1)...(19): siRNA sense strand
gcaagacuucgaaaggaua

SEQ ID NO: 264854 - RNA, 19 nt, Homo sapiens
  misc_RNA (1)...(19): siRNA sense strand
cgagcuguuugacuucuua

SEQ ID NO: 264855 - RNA, 19 nt, Homo sapiens
  misc_RNA (1)...(19): siRNA sense strand
ggcagaagaucuugcuaga

SEQ ID NO: 264856 - RNA, 19 nt, Homo sapiens
  misc_RNA (1)...(19): siRNA sense strand
aaacguggaugauuacuac

SEQ ID NO: 264857 - RNA, 19 nt, Homo sapiens
  misc_RNA (1)...(19): siRNA sense strand
uguagaaucucucaagugu

SEQ ID NO: 264858 - RNA, 19 nt, Homo sapiens
  misc_RNA (1)...(19): siRNA sense strand
gaacaucaagaaccgagaa

SEQ ID NO: 264859 - RNA, 19 nt, Homo sapiens
  misc_RNA (1)...(19): siRNA sense strand
acaauccguucgcuugaua

SEQ ID NO: 264860 - RNA, 19 nt, Homo sapiens
  misc_RNA (1)...(19): siRNA sense strand
gaggcgaguuuggauauga

SEQ ID NO: 264861 - RNA, 19 nt, Homo sapiens
  misc_RNA (1)...(19): siRNA sense strand
agaggaagcaacugaauuu

SEQ ID NO: 264862 - RNA, 19 nt, Homo sapiens
  misc_RNA (1)...(19): siRNA sense strand
gcaacagcggcaccucuua

SEQ ID NO: 264863 - RNA, 19 nt, Homo sapiens
  misc_RNA (1)...(19): siRNA sense strand
auacgaagccagauuguuu

SEQ ID NO: 264864 - RNA, 19 nt, Homo sapiens
  misc_RNA (1)...(19): siRNA sense strand
gugaggagccgcagcauga

SEQ ID NO: 264865 - RNA, 19 nt, Homo sapiens
  misc_RNA (1)...(19): siRNA sense strand
gcugcuggcugugggaaua

SEQ ID NO: 264866 - RNA, 19 nt, Homo sapiens
  misc_RNA (1)...(19): siRNA sense strand
gcgaugauacucuggauga

SEQ ID NO: 264867 - RNA, 19 nt, Homo sapiens
  misc_RNA (1)...(19): siRNA sense strand
gaagaggaagcaacugaau

SEQ ID NO: 264868 - RNA, 19 nt, Homo sapiens
  misc_RNA (1)...(19): siRNA sense strand
gagaucaacaucaugcaaa

SEQ ID NO: 264869 - RNA, 19 nt, Homo sapiens
  misc_RNA (1)...(19): siRNA sense strand
caaaggacaugaagguacu

SEQ ID NO: 264870 - RNA, 19 nt, Homo sapiens
  misc_RNA (1)...(19): siRNA sense strand
ugaaagagauuaggaacag

SEQ ID NO: 264871 - RNA, 19 nt, Homo sapiens
  misc_RNA (1)...(19): siRNA sense strand
ccuaugagauccagcugaa

SEQ ID NO: 264872 - RNA, 19 nt, Homo sapiens
  misc_RNA (1)...(19): siRNA sense strand
uagaagagcccuaugagau

SEQ ID NO: 264873 - RNA, 19 nt, Homo sapiens
  misc_RNA (1)...(19): siRNA sense strand
ugaauggaguuggcgauuu

SEQ ID NO: 264874 - RNA, 19 nt, Homo sapiens
  misc_RNA (1)...(19): siRNA sense strand
gcuguaacgugaacaucaa

SEQ ID NO: 264875 - RNA, 19 nt, Homo sapiens
  misc_RNA (1)...(19): siRNA sense strand
ggagaaauucaagaaguuu

SEQ ID NO: 264876 - RNA, 19 nt, Homo sapiens
  misc_RNA (1)...(19): siRNA sense strand
caaagaagagaaugacaau

SEQ ID NO: 264877 - RNA, 19 nt, Homo sapiens
  misc_RNA (1)...(19): siRNA sense strand
gcaacugaauuucucaaac

SEQ ID NO: 264878 - RNA, 19 nt, Homo sapiens
  misc_RNA (1)...(19): siRNA sense strand
ccagugcccuagccaaaga

SEQ ID NO: 264879 - RNA, 19 nt, Homo sapiens
  misc_RNA (1)...(19): siRNA sense strand
gaaguuugcagcccggaaa

SEQ ID NO: 264880 - RNA, 19 nt, Homo sapiens
  misc_RNA (1)...(19): siRNA sense strand
cgaaaucaucugcaagaaa

SEQ ID NO: 264881 - RNA, 19 nt, Homo sapiens
  misc_RNA (1)...(19): siRNA sense strand
gaagucccuugucccaguu

SEQ ID NO: 264882 - RNA, 19 nt, Homo sapiens
  misc_RNA (1)...(19): siRNA sense strand
gaaaaccacccuuguagaa

SEQ ID NO: 264883 - RNA, 19 nt, Homo sapiens
  misc_RNA (1)...(19): siRNA sense strand
ugacguggcucaaguuacu

SEQ ID NO: 264884 - RNA, 19 nt, Homo sapiens
  misc_RNA (1)...(19): siRNA sense strand
gaaccugcagccaagaauu

SEQ ID NO: 264885 - RNA, 19 nt, Homo sapiens
  misc_RNA (1)...(19): siRNA sense strand
guuguugucuuuagucuag

SEQ ID NO: 264886 - RNA, 19 nt, Homo sapiens
  misc_RNA (1)...(19): siRNA sense strand
aaaccacccuuguagaauc

SEQ ID NO: 264887 - RNA, 19 nt, Homo sapiens
  misc_RNA (1)...(19): siRNA sense strand
uaccugcacucccuucaaa

SEQ ID NO: 264888 - RNA, 19 nt, Homo sapiens
  misc_RNA (1)...(19): siRNA sense strand
caucguugcugaaagagau

SEQ ID NO: 264889 - RNA, 19 nt, Homo sapiens
  misc_RNA (1)...(19): siRNA sense strand
cagcugaacccagugauuu

SEQ ID NO: 264890 - RNA, 19 nt, Homo sapiens
  misc_RNA (1)...(19): siRNA sense strand
gaaagacggcagaagaucu

SEQ ID NO: 264891 - RNA, 19 nt, Homo sapiens
  misc_RNA (1)...(19): siRNA sense strand
gacaaggacggacacauug

SEQ ID NO: 264892 - RNA, 19 nt, Homo sapiens
  misc_RNA (1)...(19): siRNA sense strand
ggucauuccuguccagaag

SEQ ID NO: 264893 - RNA, 19 nt, Homo sapiens
  misc_RNA (1)...(19): siRNA sense strand
uggagaaauucaagaaguu

SEQ ID NO: 264894 - RNA, 19 nt, Homo sapiens
  misc_RNA (1)...(19): siRNA sense strand
ggaucaagccuaaagauac

SEQ ID NO: 264895 - RNA, 19 nt, Homo sapiens
  misc_RNA (1)...(19): siRNA sense strand
uaaccuauauccuccuaag

SEQ ID NO: 264896 - RNA, 19 nt, Homo sapiens
  misc_RNA (1)...(19): siRNA sense strand
uccauuagcucuguuguau

SEQ ID NO: 264897 - RNA, 19 nt, Homo sapiens
  misc_RNA (1)...(19): siRNA sense strand
ccacgucaauccauguugu

SEQ ID NO: 264898 - RNA, 19 nt, Homo sapiens
  misc_RNA (1)...(19): siRNA sense strand
ggacaaaggaagaagaaac

SEQ ID NO: 264899 - RNA, 19 nt, Homo sapiens
  misc_RNA (1)...(19): siRNA sense strand
ccaaagaagagaaugacaa

SEQ ID NO: 264900 - RNA, 19 nt, Homo sapiens
  misc_RNA (1)...(19): siRNA sense strand
ggauagaaauguccccaaa

SEQ ID NO: 264901 - RNA, 19 nt, Homo sapiens
  misc_RNA (1)...(19): siRNA sense strand
gagauuaggaacagguuug

SEQ ID NO: 264902 - RNA, 19 nt, Homo sapiens
  misc_RNA (1)...(19): siRNA sense strand
guggcgagcuguuugacuu

SEQ ID NO: 264903 - RNA, 19 nt, Homo sapiens
  misc_RNA (1)...(19): siRNA sense strand
caugcaaagugaaacaguu

SEQ ID NO: 264904 - RNA, 19 nt, Homo sapiens
  misc_RNA (1)...(19): siRNA sense strand
gaacuuggcaguggacagu

SEQ ID NO: 264905 - RNA, 19 nt, Homo sapiens
  misc_RNA (1)...(19): siRNA sense strand
caagacaggcacggcaaua

SEQ ID NO: 264906 - RNA, 19 nt, Homo sapiens
  misc_RNA (1)...(19): siRNA sense strand
gcucaaaucccaauaucca

SEQ ID NO: 264907 - RNA, 19 nt, Homo sapiens
  misc_RNA (1)...(19): siRNA sense strand
gcaguaaacauggagaaau

SEQ ID NO: 264908 - RNA, 19 nt, Homo sapiens
  misc_RNA (1)...(19): siRNA sense strand
acacaacaggcacuuagua

SEQ ID NO: 264909 - RNA, 19 nt, Homo sapiens
  misc_RNA (1)...(19): siRNA sense strand
ccugagaacauaaugcuuu

SEQ ID NO: 264910 - RNA, 19 nt, Homo sapiens
  misc_RNA (1)...(19): siRNA sense strand
gcuguaagacggugucaga

SEQ ID NO: 264911 - RNA, 19 nt, Homo sapiens
  misc_RNA (1)...(19): siRNA sense strand
gaacgcuuauuugaaugga

SEQ ID NO: 264912 - RNA, 19 nt, Homo sapiens
  misc_RNA (1)...(19): siRNA sense strand
aaggguguuucgucgauua

SEQ ID NO: 264913 - RNA, 19 nt, Homo sapiens
  misc_RNA (1)...(19): siRNA sense strand
ccaaggguguuucgucgau

SEQ ID NO: 264914 - RNA, 19 nt, Homo sapiens
  misc_RNA (1)...(19): siRNA sense strand
ggugucagauggagguaau

SEQ ID NO: 264915 - RNA, 19 nt, Homo sapiens
  misc_RNA (1)...(19): siRNA sense strand
gaaaggagauguaagauuc

SEQ ID NO: 264916 - RNA, 19 nt, Homo sapiens
  misc_RNA (1)...(19): siRNA sense strand
gaagaaugcugaacugaaa

SEQ ID NO: 264917 - RNA, 19 nt, Homo sapiens
  misc_RNA (1)...(19): siRNA sense strand
ggaaagaaaucccauaaca

SEQ ID NO: 264918 - RNA, 19 nt, Homo sapiens
  misc_RNA (1)...(19): siRNA sense strand
ggaaagagccacauuagaa

SEQ ID NO: 264919 - RNA, 19 nt, Homo sapiens
  misc_RNA (1)...(19): siRNA sense strand
uaaagaaacuguccgagaa

SEQ ID NO: 264920 - RNA, 19 nt, Homo sapiens
  misc_RNA (1)...(19): siRNA sense strand
gaagaggaauuuaaguuuc

SEQ ID NO: 264921 - RNA, 19 nt, Homo sapiens
  misc_RNA (1)...(19): siRNA sense strand
uaagauggaucaagcaauu

SEQ ID NO: 264922 - RNA, 19 nt, Homo sapiens
  misc_RNA (1)...(19): siRNA sense strand
gauguuaccuggauauaga

SEQ ID NO: 264923 - RNA, 19 nt, Homo sapiens
  misc_RNA (1)...(19): siRNA sense strand
uaaauaggaugcacaauca

SEQ ID NO: 264924 - RNA, 19 nt, Homo sapiens
  misc_RNA (1)...(19): siRNA sense strand
uaagggagcuucugauaau

SEQ ID NO: 264925 - RNA, 19 nt, Homo sapiens
  misc_RNA (1)...(19): siRNA sense strand
gaaauaccaccacauauga

SEQ ID NO: 264926 - RNA, 19 nt, Homo sapiens
  misc_RNA (1)...(19): siRNA sense strand
cgaaagcucucauuguuga

SEQ ID NO: 264927 - RNA, 19 nt, Homo sapiens
  misc_RNA (1)...(19): siRNA sense strand
gaagaacaccugaacugua

SEQ ID NO: 264928 - RNA, 19 nt, Homo sapiens
  misc_RNA (1)...(19): siRNA sense strand
cauuagaacugaugaugua

SEQ ID NO: 264929 - RNA, 19 nt, Homo sapiens
  misc_RNA (1)...(19): siRNA sense strand
gcagagaaguaaaggaaug

SEQ ID NO: 264930 - RNA, 19 nt, Homo sapiens
  misc_RNA (1)...(19): siRNA sense strand
cuacauggguugacuuaaa

SEQ ID NO: 264931 - RNA, 19 nt, Homo sapiens
  misc_RNA (1)...(19): siRNA sense strand
gaauuuaaguuuccaccaa

SEQ ID NO: 264932 - RNA, 19 nt, Homo sapiens
  misc_RNA (1)...(19): siRNA sense strand
caccugaacuguaccauuu

SEQ ID NO: 264933 - RNA, 19 nt, Homo sapiens
  misc_RNA (1)...(19): siRNA sense strand
gaaagaaaucccauaacaa

SEQ ID NO: 264934 - RNA, 19 nt, Homo sapiens
  misc_RNA (1)...(19): siRNA sense strand
gaaaucccauaacaaacaa

SEQ ID NO: 264935 - RNA, 19 nt, Homo sapiens
  misc_RNA (1)...(19): siRNA sense strand
gaaacuguccgagaagaua

SEQ ID NO: 264936 - RNA, 19 nt, Homo sapiens
  misc_RNA (1)...(19): siRNA sense strand
ccgagaagauaaugcauuu

SEQ ID NO: 264937 - RNA, 19 nt, Homo sapiens
  misc_RNA (1)...(19): siRNA sense strand
acacaagacucaaggaaga

SEQ ID NO: 264938 - RNA, 19 nt, Homo sapiens
  misc_RNA (1)...(19): siRNA sense strand
ggaaagauuuaagaaagga

SEQ ID NO: 264939 - RNA, 19 nt, Homo sapiens
  misc_RNA (1)...(19): siRNA sense strand
cagaaagccucaugagaga

SEQ ID NO: 264940 - RNA, 19 nt, Homo sapiens
  misc_RNA (1)...(19): siRNA sense strand
gauguggucugaagcuauu

SEQ ID NO: 264941 - RNA, 19 nt, Homo sapiens
  misc_RNA (1)...(19): siRNA sense strand
uaagaaaggagauguaaga

SEQ ID NO: 264942 - RNA, 19 nt, Homo sapiens
  misc_RNA (1)...(19): siRNA sense strand
gaaccaaaauugacuguga

SEQ ID NO: 264943 - RNA, 19 nt, Homo sapiens
  misc_RNA (1)...(19): siRNA sense strand
uaagggacaugucaaguuc

SEQ ID NO: 264944 - RNA, 19 nt, Homo sapiens
  misc_RNA (1)...(19): siRNA sense strand
gaaagccucaugagagaaa

SEQ ID NO: 264945 - RNA, 19 nt, Homo sapiens
  misc_RNA (1)...(19): siRNA sense strand
ggagaggaauucacuaugc

SEQ ID NO: 264946 - RNA, 19 nt, Homo sapiens
  misc_RNA (1)...(19): siRNA sense strand
ggaugaauuugaugggaaa

SEQ ID NO: 264947 - RNA, 19 nt, Homo sapiens
  misc_RNA (1)...(19): siRNA sense strand
gaaagggaaacacuacuau

SEQ ID NO: 264948 - RNA, 19 nt, Homo sapiens
  misc_RNA (1)...(19): siRNA sense strand
caucuuggcuaccuuccua

SEQ ID NO: 264949 - RNA, 19 nt, Homo sapiens
  misc_RNA (1)...(19): siRNA sense strand
ggaugggucuggcaauuuc

SEQ ID NO: 264950 - RNA, 19 nt, Homo sapiens
  misc_RNA (1)...(19): siRNA sense strand
ucacagcacucagguaaug

SEQ ID NO: 264951 - RNA, 19 nt, Homo sapiens
  misc_RNA (1)...(19): siRNA sense strand
ccaaggcaccggaugguua

SEQ ID NO: 264952 - RNA, 19 nt, Homo sapiens
  misc_RNA (1)...(19): siRNA sense strand
ggauuuggcuuugguggaa

SEQ ID NO: 264953 - RNA, 19 nt, Homo sapiens
  misc_RNA (1)...(19): siRNA sense strand
uggaguagauauaguugua

SEQ ID NO: 264954 - RNA, 19 nt, Homo sapiens
  misc_RNA (1)...(19): siRNA sense strand
caccaguucucauguguuu

SEQ ID NO: 264955 - RNA, 19 nt, Homo sapiens
  misc_RNA (1)...(19): siRNA sense strand
ggacaccaguucucaugug

SEQ ID NO: 264956 - RNA, 19 nt, Homo sapiens
  misc_RNA (1)...(19): siRNA sense strand
gaauuugaugggaaaguua

SEQ ID NO: 264957 - RNA, 19 nt, Homo sapiens
  misc_RNA (1)...(19): siRNA sense strand
ggaccuagguacugacaag

SEQ ID NO: 264958 - RNA, 19 nt, Homo sapiens
  misc_RNA (1)...(19): siRNA sense strand
gagcaguacuuuauacaac

SEQ ID NO: 264959 - RNA, 19 nt, Homo sapiens
  misc_RNA (1)...(19): siRNA sense strand
gugauaacuuggagcagua

SEQ ID NO: 264960 - RNA, 19 nt, Homo sapiens
  misc_RNA (1)...(19): siRNA sense strand
gggaaacacuacuaugaag

SEQ ID NO: 264961 - RNA, 19 nt, Homo sapiens
  misc_RNA (1)...(19): siRNA sense strand
ugaacaacaucaagcaguu

SEQ ID NO: 264962 - RNA, 19 nt, Homo sapiens
  misc_RNA (1)...(19): siRNA sense strand
ugaaauaccaccacauaug

SEQ ID NO: 264963 - RNA, 19 nt, Homo sapiens
  misc_RNA (1)...(19): siRNA sense strand
gaacaacaucaagcaguuu

SEQ ID NO: 264964 - RNA, 19 nt, Homo sapiens
  misc_RNA (1)...(19): siRNA sense strand
uaaaggccauguggauauu

SEQ ID NO: 264965 - RNA, 19 nt, Homo sapiens
  misc_RNA (1)...(19): siRNA sense strand
cacaagaccuggugcuaau

SEQ ID NO: 264966 - RNA, 19 nt, Homo sapiens
  misc_RNA (1)...(19): siRNA sense strand
gggaaaggcuuggaaagag

SEQ ID NO: 264967 - RNA, 19 nt, Homo sapiens
  misc_RNA (1)...(19): siRNA sense strand
ccuagguacugacaaguuu

SEQ ID NO: 264968 - RNA, 19 nt, Homo sapiens
  misc_RNA (1)...(19): siRNA sense strand
guacaacgagaugcaguua

SEQ ID NO: 264969 - RNA, 19 nt, Homo sapiens
  misc_RNA (1)...(19): siRNA sense strand
gcaguacuuuauacaacaa

SEQ ID NO: 264970 - RNA, 19 nt, Homo sapiens
  misc_RNA (1)...(19): siRNA sense strand
uccgaaagcucucauuguu

SEQ ID NO: 264971 - RNA, 19 nt, Homo sapiens
  misc_RNA (1)...(19): siRNA sense strand
ggaauucacuaugcaugau

SEQ ID NO: 264972 - RNA, 19 nt, Homo sapiens
  misc_RNA (1)...(19): siRNA sense strand
cuggaaagcugaacuuauc

SEQ ID NO: 264973 - RNA, 19 nt, Homo sapiens
  misc_RNA (1)...(19): siRNA sense strand
agaguuggcugcccuugaa

SEQ ID NO: 264974 - RNA, 19 nt, Homo sapiens
  misc_RNA (1)...(19): siRNA sense strand
caaggaggaggaccugaua

SEQ ID NO: 264975 - RNA, 19 nt, Homo sapiens
  misc_RNA (1)...(19): siRNA sense strand
ggucagauggucuuuguug

SEQ ID NO: 264976 - RNA, 19 nt, Homo sapiens
  misc_RNA (1)...(19): siRNA sense strand
gaacauaagauggaucaag

SEQ ID NO: 264977 - RNA, 19 nt, Homo sapiens
  misc_RNA (1)...(19): siRNA sense strand
gcacaggugacacaaacaa

SEQ ID NO: 264978 - RNA, 19 nt, Homo sapiens
  misc_RNA (1)...(19): siRNA sense strand
gaaauuuaacuucggugaa

SEQ ID NO: 264979 - RNA, 19 nt, Homo sapiens
  misc_RNA (1)...(19): siRNA sense strand
uagagcuacuaaaggauua

SEQ ID NO: 264980 - RNA, 19 nt, Homo sapiens
  misc_RNA (1)...(19): siRNA sense strand
gagaggaauucacuaugca

SEQ ID NO: 264981 - RNA, 19 nt, Homo sapiens
  misc_RNA (1)...(19): siRNA sense strand
aagcugaacuuaucucaag

SEQ ID NO: 264982 - RNA, 19 nt, Homo sapiens
  misc_RNA (1)...(19): siRNA sense strand
gaauucacuaugcaugaua

SEQ ID NO: 264983 - RNA, 19 nt, Homo sapiens
  misc_RNA (1)...(19): siRNA sense strand
uggcauggguguagagcua

SEQ ID NO: 264984 - RNA, 19 nt, Homo sapiens
  misc_RNA (1)...(19): siRNA sense strand
guagauauaguuguaggua

SEQ ID NO: 264985 - RNA, 19 nt, Homo sapiens
  misc_RNA (1)...(19): siRNA sense strand
gggaucagcucucuguuuu

SEQ ID NO: 264986 - RNA, 19 nt, Homo sapiens
  misc_RNA (1)...(19): siRNA sense strand
gcuacuaaaggauuaauga

SEQ ID NO: 264987 - RNA, 19 nt, Homo sapiens
  misc_RNA (1)...(19): siRNA sense strand
gaugaacccauaugacaga

SEQ ID NO: 264988 - RNA, 19 nt, Homo sapiens
  misc_RNA (1)...(19): siRNA sense strand
gagauguggucugaagcua

SEQ ID NO: 264989 - RNA, 19 nt, Homo sapiens
  misc_RNA (1)...(19): siRNA sense strand
gaaagagccacauuagaac

SEQ ID NO: 264990 - RNA, 19 nt, Homo sapiens
  misc_RNA (1)...(19): siRNA sense strand
guacugacaaguuuggauu

SEQ ID NO: 264991 - RNA, 19 nt, Homo sapiens
  misc_RNA (1)...(19): siRNA sense strand
gcaggccucuuuggaccua

SEQ ID NO: 264992 - RNA, 19 nt, Homo sapiens
  misc_RNA (1)...(19): siRNA sense strand
ggaauggcauggguguaga

SEQ ID NO: 264993 - RNA, 19 nt, Homo sapiens
  misc_RNA (1)...(19): siRNA sense strand
ugucaaagcagagaaguaa

SEQ ID NO: 264994 - RNA, 19 nt, Homo sapiens
  misc_RNA (1)...(19): siRNA sense strand
ugaauuugaugggaaaguu

SEQ ID NO: 264995 - RNA, 19 nt, Homo sapiens
  misc_RNA (1)...(19): siRNA sense strand
gcugcuagaggaauugaua

SEQ ID NO: 264996 - RNA, 19 nt, Homo sapiens
  misc_RNA (1)...(19): siRNA sense strand
gcaaucaaggaacauaaga

SEQ ID NO: 264997 - RNA, 19 nt, Homo sapiens
  misc_RNA (1)...(19): siRNA sense strand
gaaucuaucccauugaucu

SEQ ID NO: 264998 - RNA, 19 nt, Homo sapiens
  misc_RNA (1)...(19): siRNA sense strand
caggaaagaaaucccauaa

SEQ ID NO: 264999 - RNA, 19 nt, Homo sapiens
  misc_RNA (1)...(19): siRNA sense strand
cugaacaaauggcagauga

SEQ ID NO: 265000 - RNA, 19 nt, Homo sapiens
  misc_RNA (1)...(19): siRNA sense strand
cugaugggcuucuuucuca

SEQ ID NO: 265001 - RNA, 19 nt, Homo sapiens
  misc_RNA (1)...(19): siRNA sense strand
gugaagaggaauuuaaguu

SEQ ID NO: 265002 - RNA, 19 nt, Homo sapiens
  misc_RNA (1)...(19): siRNA sense strand
cagauggucuuuguuguca

SEQ ID NO: 265003 - RNA, 19 nt, Homo sapiens
  misc_RNA (1)...(19): siRNA sense strand
aagaacaccugaacuguac

SEQ ID NO: 265004 - RNA, 19 nt, Homo sapiens
  misc_RNA (1)...(19): siRNA sense strand
gacuucaggugauuguuug

SEQ ID NO: 265005 - RNA, 19 nt, Homo sapiens
  misc_RNA (1)...(19): siRNA sense strand
ggauauagauaagggacau

SEQ ID NO: 265006 - RNA, 19 nt, Homo sapiens
  misc_RNA (1)...(19): siRNA sense strand
ugaaagggaaacacuacua

SEQ ID NO: 265007 - RNA, 19 nt, Homo sapiens
  misc_RNA (1)...(19): siRNA sense strand
aaaguuaccuacggucaga

SEQ ID NO: 265008 - RNA, 19 nt, Homo sapiens
  misc_RNA (1)...(19): siRNA sense strand
uaacacaagacucaaggaa

SEQ ID NO: 265009 - RNA, 19 nt, Homo sapiens
  misc_RNA (1)...(19): siRNA sense strand
uaacuuggagcaguacuuu

SEQ ID NO: 265010 - RNA, 19 nt, Homo sapiens
  misc_RNA (1)...(19): siRNA sense strand
ucucaagguuauucugauu

SEQ ID NO: 265011 - RNA, 19 nt, Homo sapiens
  misc_RNA (1)...(19): siRNA sense strand
gggcuucuuucucaagguu

SEQ ID NO: 265012 - RNA, 19 nt, Homo sapiens
  misc_RNA (1)...(19): siRNA sense strand
aaucacagcacucagguaa

SEQ ID NO: 265013 - RNA, 19 nt, Homo sapiens
  misc_RNA (1)...(19): siRNA sense strand
ccacgguguuccuuauguu

SEQ ID NO: 265014 - RNA, 19 nt, Homo sapiens
  misc_RNA (1)...(19): siRNA sense strand
gaagauggaggcuguacca

SEQ ID NO: 265015 - RNA, 19 nt, Homo sapiens
  misc_RNA (1)...(19): siRNA sense strand
gcacugagcuggacaauca

SEQ ID NO: 265016 - RNA, 19 nt, Homo sapiens
  misc_RNA (1)...(19): siRNA sense strand
caacacagaucacccagua

SEQ ID NO: 265017 - RNA, 19 nt, Homo sapiens
  misc_RNA (1)...(19): siRNA sense strand
gagaagaucuaaacccaaa

SEQ ID NO: 265018 - RNA, 19 nt, Homo sapiens
  misc_RNA (1)...(19): siRNA sense strand
ggaugaagaugaugugaaa

SEQ ID NO: 265019 - RNA, 19 nt, Homo sapiens
  misc_RNA (1)...(19): siRNA sense strand
ggaaggaccgggacaaaua

SEQ ID NO: 265020 - RNA, 19 nt, Homo sapiens
  misc_RNA (1)...(19): siRNA sense strand
gcaaagauccaguuguuaa

SEQ ID NO: 265021 - RNA, 19 nt, Homo sapiens
  misc_RNA (1)...(19): siRNA sense strand
ggaauaaagugaagucuag

SEQ ID NO: 265022 - RNA, 19 nt, Homo sapiens
  misc_RNA (1)...(19): siRNA sense strand
gcagagacaucgcugacua

SEQ ID NO: 265023 - RNA, 19 nt, Homo sapiens
  misc_RNA (1)...(19): siRNA sense strand
ggaguuugguuguugcuua

SEQ ID NO: 265024 - RNA, 19 nt, Homo sapiens
  misc_RNA (1)...(19): siRNA sense strand
agacaucgcugacuauuga

SEQ ID NO: 265025 - RNA, 19 nt, Homo sapiens
  misc_RNA (1)...(19): siRNA sense strand
gcaaagagaugcugaacac

SEQ ID NO: 265026 - RNA, 19 nt, Homo sapiens
  misc_RNA (1)...(19): siRNA sense strand
caacuaagcuaagcaaaca

SEQ ID NO: 265027 - RNA, 19 nt, Homo sapiens
  misc_RNA (1)...(19): siRNA sense strand
gaacgugccuaccgagaug

SEQ ID NO: 265028 - RNA, 19 nt, Homo sapiens
  misc_RNA (1)...(19): siRNA sense strand
gaagaucuaaacccaaaua

SEQ ID NO: 265029 - RNA, 19 nt, Homo sapiens
  misc_RNA (1)...(19): siRNA sense strand
gcagaaagguugugauugc

SEQ ID NO: 265030 - RNA, 19 nt, Homo sapiens
  misc_RNA (1)...(19): siRNA sense strand
cggauucucuuauuaguaa

SEQ ID NO: 265031 - RNA, 19 nt, Homo sapiens
  misc_RNA (1)...(19): siRNA sense strand
uagcaaagauccaguuguu

SEQ ID NO: 265032 - RNA, 19 nt, Homo sapiens
  misc_RNA (1)...(19): siRNA sense strand
uaagguggaugaugaagaa

SEQ ID NO: 265033 - RNA, 19 nt, Homo sapiens
  misc_RNA (1)...(19): siRNA sense strand
gaucugcuguccuuugauu

SEQ ID NO: 265034 - RNA, 19 nt, Homo sapiens
  misc_RNA (1)...(19): siRNA sense strand
gcagauucauuuaacagaa

SEQ ID NO: 265035 - RNA, 19 nt, Homo sapiens
  misc_RNA (1)...(19): siRNA sense strand
gcaguggguucuuccguaa

SEQ ID NO: 265036 - RNA, 19 nt, Homo sapiens
  misc_RNA (1)...(19): siRNA sense strand
caaaggaaccugagacaga

SEQ ID NO: 265037 - RNA, 19 nt, Homo sapiens
  misc_RNA (1)...(19): siRNA sense strand
agaagaauuuccagacuuu

SEQ ID NO: 265038 - RNA, 19 nt, Homo sapiens
  misc_RNA (1)...(19): siRNA sense strand
gaauacaugcgugaaguua

SEQ ID NO: 265039 - RNA, 19 nt, Homo sapiens
  misc_RNA (1)...(19): siRNA sense strand
ucaaugaucugcuguccuu

SEQ ID NO: 265040 - RNA, 19 nt, Homo sapiens
  misc_RNA (1)...(19): siRNA sense strand
gaaauacuguacacaaagg

SEQ ID NO: 265041 - RNA, 19 nt, Homo sapiens
  misc_RNA (1)...(19): siRNA sense strand
gacaggaucuggaaagaca

SEQ ID NO: 265042 - RNA, 19 nt, Homo sapiens
  misc_RNA (1)...(19): siRNA sense strand
ugaaggauguggaucaaga

SEQ ID NO: 265043 - RNA, 19 nt, Homo sapiens
  misc_RNA (1)...(19): siRNA sense strand
ggaaagacaacacagauca

SEQ ID NO: 265044 - RNA, 19 nt, Homo sapiens
  misc_RNA (1)...(19): siRNA sense strand
ccaaauagacggcgaaauc

SEQ ID NO: 265045 - RNA, 19 nt, Homo sapiens
  misc_RNA (1)...(19): siRNA sense strand
ggaccuugcugaauuugug

SEQ ID NO: 265046 - RNA, 19 nt, Homo sapiens
  misc_RNA (1)...(19): siRNA sense strand
aaaccgagaucgagacaga

SEQ ID NO: 265047 - RNA, 19 nt, Homo sapiens
  misc_RNA (1)...(19): siRNA sense strand
gaccugauguuccagaguu

SEQ ID NO: 265048 - RNA, 19 nt, Homo sapiens
  misc_RNA (1)...(19): siRNA sense strand
gggaugaugcccaaugaua

SEQ ID NO: 265049 - RNA, 19 nt, Homo sapiens
  misc_RNA (1)...(19): siRNA sense strand
aagcugagauggauucuau

SEQ ID NO: 265050 - RNA, 19 nt, Homo sapiens
  misc_RNA (1)...(19): siRNA sense strand
ggaagaagcaugccuuugg

SEQ ID NO: 265051 - RNA, 19 nt, Homo sapiens
  misc_RNA (1)...(19): siRNA sense strand
ggacugcacuagcccugaa

SEQ ID NO: 265052 - RNA, 19 nt, Homo sapiens
  misc_RNA (1)...(19): siRNA sense strand
gaaaguugcuguggauguc

SEQ ID NO: 265053 - RNA, 19 nt, Homo sapiens
  misc_RNA (1)...(19): siRNA sense strand
ucaagagacuggagaagau

SEQ ID NO: 265054 - RNA, 19 nt, Homo sapiens
  misc_RNA (1)...(19): siRNA sense strand
gggagagccugcccaucua

SEQ ID NO: 265055 - RNA, 19 nt, Homo sapiens
  misc_RNA (1)...(19): siRNA sense strand
ggaagaacuugccaaacuc

SEQ ID NO: 265056 - RNA, 19 nt, Homo sapiens
  misc_RNA (1)...(19): siRNA sense strand
cugaaacagucaucaagua

SEQ ID NO: 265057 - RNA, 19 nt, Homo sapiens
  misc_RNA (1)...(19): siRNA sense strand
gaacgaaaccgagauagag

SEQ ID NO: 265058 - RNA, 19 nt, Homo sapiens
  misc_RNA (1)...(19): siRNA sense strand
aagcagauguuaggcauaa

SEQ ID NO: 265059 - RNA, 19 nt, Homo sapiens
  misc_RNA (1)...(19): siRNA sense strand
gauccuguaugaaagaaug

SEQ ID NO: 265060 - RNA, 19 nt, Homo sapiens
  misc_RNA (1)...(19): siRNA sense strand
gcacaugagaggacaauuc

SEQ ID NO: 265061 - RNA, 19 nt, Homo sapiens
  misc_RNA (1)...(19): siRNA sense strand
gaagaugaugugaaaguug

SEQ ID NO: 265062 - RNA, 19 nt, Homo sapiens
  misc_RNA (1)...(19): siRNA sense strand
cccaaugccuggagaauau

SEQ ID NO: 265063 - RNA, 19 nt, Homo sapiens
  misc_RNA (1)...(19): siRNA sense strand
cuugugagauccuguauga

SEQ ID NO: 265064 - RNA, 19 nt, Homo sapiens
  misc_RNA (1)...(19): siRNA sense strand
gcaaacagaagaagcaaca

SEQ ID NO: 265065 - RNA, 19 nt, Homo sapiens
  misc_RNA (1)...(19): siRNA sense strand
gauguuccagaguuaauua

SEQ ID NO: 265066 - RNA, 19 nt, Homo sapiens
  misc_RNA (1)...(19): siRNA sense strand
ggagaggaauaaagugaag

SEQ ID NO: 265067 - RNA, 19 nt, Homo sapiens
  misc_RNA (1)...(19): siRNA sense strand
cggaagaacuugccaaacu

SEQ ID NO: 265068 - RNA, 19 nt, Homo sapiens
  misc_RNA (1)...(19): siRNA sense strand
uggaaauacuguacacaaa

SEQ ID NO: 265069 - RNA, 19 nt, Homo sapiens
  misc_RNA (1)...(19): siRNA sense strand
gaugaugcccaaugauauu

SEQ ID NO: 265070 - RNA, 19 nt, Homo sapiens
  misc_RNA (1)...(19): siRNA sense strand
cuggauagauggcgggaua

SEQ ID NO: 265071 - RNA, 19 nt, Homo sapiens
  misc_RNA (1)...(19): siRNA sense strand
aaagugaagucuagauauc

SEQ ID NO: 265072 - RNA, 19 nt, Homo sapiens
  misc_RNA (1)...(19): siRNA sense strand
gaaggaccgggacaaauau

SEQ ID NO: 265073 - RNA, 19 nt, Homo sapiens
  misc_RNA (1)...(19): siRNA sense strand
gaugggauguugcuuagag

SEQ ID NO: 265074 - RNA, 19 nt, Homo sapiens
  misc_RNA (1)...(19): siRNA sense strand
gagacaggaucuggaaaga

SEQ ID NO: 265075 - RNA, 19 nt, Homo sapiens
  misc_RNA (1)...(19): siRNA sense strand
gcaagcgccucacccgaau

SEQ ID NO: 265076 - RNA, 19 nt, Homo sapiens
  misc_RNA (1)...(19): siRNA sense strand
gcaguuugguugcuuugug

SEQ ID NO: 265077 - RNA, 19 nt, Homo sapiens
  misc_RNA (1)...(19): siRNA sense strand
ggaacgaaaccgagauaga

SEQ ID NO: 265078 - RNA, 19 nt, Homo sapiens
  misc_RNA (1)...(19): siRNA sense strand
agacuggcauucucccuaa

SEQ ID NO: 265079 - RNA, 19 nt, Homo sapiens
  misc_RNA (1)...(19): siRNA sense strand
guaaugcugccaagaaaga

SEQ ID NO: 265080 - RNA, 19 nt, Homo sapiens
  misc_RNA (1)...(19): siRNA sense strand
acagauugcugccaacaug

SEQ ID NO: 265081 - RNA, 19 nt, Homo sapiens
  misc_RNA (1)...(19): siRNA sense strand
caaagauccaguuguuaaa

SEQ ID NO: 265082 - RNA, 19 nt, Homo sapiens
  misc_RNA (1)...(19): siRNA sense strand
guacaaccgcuaugaggaa

SEQ ID NO: 265083 - RNA, 19 nt, Homo sapiens
  misc_RNA (1)...(19): siRNA sense strand
ggacaauucacacugaugu

SEQ ID NO: 265084 - RNA, 19 nt, Homo sapiens
  misc_RNA (1)...(19): siRNA sense strand
gcacuagcccugaaacagu

SEQ ID NO: 265085 - RNA, 19 nt, Homo sapiens
  misc_RNA (1)...(19): siRNA sense strand
ccagaagaguggcagcuau

SEQ ID NO: 265086 - RNA, 19 nt, Homo sapiens
  misc_RNA (1)...(19): siRNA sense strand
ugaagaagaugaggaccuu

SEQ ID NO: 265087 - RNA, 19 nt, Homo sapiens
  misc_RNA (1)...(19): siRNA sense strand
ggagagcggaaucuggaua

SEQ ID NO: 265088 - RNA, 19 nt, Homo sapiens
  misc_RNA (1)...(19): siRNA sense strand
ggaccauguuggaugaaga

SEQ ID NO: 265089 - RNA, 19 nt, Homo sapiens
  misc_RNA (1)...(19): siRNA sense strand
cagaagagcccaccauugg

SEQ ID NO: 265090 - RNA, 19 nt, Homo sapiens
  misc_RNA (1)...(19): siRNA sense strand
caacagacagccagaaugg

SEQ ID NO: 265091 - RNA, 19 nt, Homo sapiens
  misc_RNA (1)...(19): siRNA sense strand
ucuauaggcccaaggauaa

SEQ ID NO: 265092 - RNA, 19 nt, Homo sapiens
  misc_RNA (1)...(19): siRNA sense strand
ggaaauacuguacacaaag

SEQ ID NO: 265093 - RNA, 19 nt, Homo sapiens
  misc_RNA (1)...(19): siRNA sense strand
gaugugcucuuuggauugu

SEQ ID NO: 265094 - RNA, 19 nt, Homo sapiens
  misc_RNA (1)...(19): siRNA sense strand
cagaggaguuugguuguug

SEQ ID NO: 265095 - RNA, 19 nt, Homo sapiens
  misc_RNA (1)...(19): siRNA sense strand
uaaggcuucucucgucaaa

SEQ ID NO: 265096 - RNA, 19 nt, Homo sapiens
  misc_RNA (1)...(19): siRNA sense strand
gaugcagacccgaaucuuu

SEQ ID NO: 265097 - RNA, 19 nt, Homo sapiens
  misc_RNA (1)...(19): siRNA sense strand
uaauuauccucccagugua

SEQ ID NO: 265098 - RNA, 19 nt, Homo sapiens
  misc_RNA (1)...(19): siRNA sense strand
caucccaggucgaacauau

SEQ ID NO: 265099 - RNA, 19 nt, Homo sapiens
  misc_RNA (1)...(19): siRNA sense strand
caugacagaugggauguug

SEQ ID NO: 265100 - RNA, 19 nt, Homo sapiens
  misc_RNA (1)...(19): siRNA sense strand
gggcuacaccauucgauuu

SEQ ID NO: 265101 - RNA, 19 nt, Homo sapiens
  misc_RNA (1)...(19): siRNA sense strand
ggaugaugcccaaugauau

SEQ ID NO: 265102 - RNA, 19 nt, Homo sapiens
  misc_RNA (1)...(19): siRNA sense strand
gacaugagccccauuaaaa

SEQ ID NO: 265103 - RNA, 19 nt, Homo sapiens
  misc_RNA (1)...(19): siRNA sense strand
ucccuaagguggaugauga

SEQ ID NO: 265104 - RNA, 19 nt, Homo sapiens
  misc_RNA (1)...(19): siRNA sense strand
ccagagaagugggagauca

SEQ ID NO: 265105 - RNA, 19 nt, Homo sapiens
  misc_RNA (1)...(19): siRNA sense strand
ugaagaugaugugaaaguu

SEQ ID NO: 265106 - RNA, 19 nt, Homo sapiens
  misc_RNA (1)...(19): siRNA sense strand
ggucaggaagaaauugaua

SEQ ID NO: 265107 - RNA, 19 nt, Homo sapiens
  misc_RNA (1)...(19): siRNA sense strand
ccaugggacucaacaaaca

SEQ ID NO: 265108 - RNA, 19 nt, Homo sapiens
  misc_RNA (1)...(19): siRNA sense strand
ugugagauccuguaugaaa

SEQ ID NO: 265109 - RNA, 19 nt, Homo sapiens
  misc_RNA (1)...(19): siRNA sense strand
gcaaaaugcucaucauguc

SEQ ID NO: 265110 - RNA, 19 nt, Homo sapiens
  misc_RNA (1)...(19): siRNA sense strand
guaccugucuuugguguca

SEQ ID NO: 265111 - RNA, 19 nt, Homo sapiens
  misc_RNA (1)...(19): siRNA sense strand
ccaccaacgugccggaaau

SEQ ID NO: 265112 - RNA, 19 nt, Homo sapiens
  misc_RNA (1)...(19): siRNA sense strand
gaacaggcccagggaagug

SEQ ID NO: 265113 - RNA, 19 nt, Homo sapiens
  misc_RNA (1)...(19): siRNA sense strand
ggacccaggauucgugaaa

SEQ ID NO: 265114 - RNA, 19 nt, Homo sapiens
  misc_RNA (1)...(19): siRNA sense strand
cagcagaaagguugugauu

SEQ ID NO: 265115 - RNA, 19 nt, Homo sapiens
  misc_RNA (1)...(19): siRNA sense strand
gaagauaacugguuugaaa

SEQ ID NO: 265116 - RNA, 19 nt, Homo sapiens
  misc_RNA (1)...(19): siRNA sense strand
gaagauggcucaauuuaca

SEQ ID NO: 265117 - RNA, 19 nt, Homo sapiens
  misc_RNA (1)...(19): siRNA sense strand
gcacagauccaaauacaaa

SEQ ID NO: 265118 - RNA, 19 nt, Homo sapiens
  misc_RNA (1)...(19): siRNA sense strand
acaaagaacccuucaauuu

SEQ ID NO: 265119 - RNA, 19 nt, Homo sapiens
  misc_RNA (1)...(19): siRNA sense strand
acacauauguuaacaguga

SEQ ID NO: 265120 - RNA, 19 nt, Homo sapiens
  misc_RNA (1)...(19): siRNA sense strand
ugaaggaccuggagaagaa

SEQ ID NO: 265121 - RNA, 19 nt, Homo sapiens
  misc_RNA (1)...(19): siRNA sense strand
gaaaguuuaucuucgaguu

SEQ ID NO: 265122 - RNA, 19 nt, Homo sapiens
  misc_RNA (1)...(19): siRNA sense strand
gauagagaauccaaauuug

SEQ ID NO: 265123 - RNA, 19 nt, Homo sapiens
  misc_RNA (1)...(19): siRNA sense strand
ggaugaagauaacugguuu

SEQ ID NO: 265124 - RNA, 19 nt, Homo sapiens
  misc_RNA (1)...(19): siRNA sense strand
gcauugaccgugagaaaua

SEQ ID NO: 265125 - RNA, 19 nt, Homo sapiens
  misc_RNA (1)...(19): siRNA sense strand
gaaugaagguacaggauca

SEQ ID NO: 265126 - RNA, 19 nt, Homo sapiens
  misc_RNA (1)...(19): siRNA sense strand
gaaaacaagucuccuaaga

SEQ ID NO: 265127 - RNA, 19 nt, Homo sapiens
  misc_RNA (1)...(19): siRNA sense strand
gaagucaaucgccaaguua

SEQ ID NO: 265128 - RNA, 19 nt, Homo sapiens
  misc_RNA (1)...(19): siRNA sense strand
ggacaaagaacccuucaau

SEQ ID NO: 265129 - RNA, 19 nt, Homo sapiens
  misc_RNA (1)...(19): siRNA sense strand
ggaaauauccaguggugaa

SEQ ID NO: 265130 - RNA, 19 nt, Homo sapiens
  misc_RNA (1)...(19): siRNA sense strand
aaagaacccuucaauuugu

SEQ ID NO: 265131 - RNA, 19 nt, Homo sapiens
  misc_RNA (1)...(19): siRNA sense strand
gguguuggguucuguauug

SEQ ID NO: 265132 - RNA, 19 nt, Homo sapiens
  misc_RNA (1)...(19): siRNA sense strand
aaacaagucuccuaagaag

SEQ ID NO: 265133 - RNA, 19 nt, Homo sapiens
  misc_RNA (1)...(19): siRNA sense strand
uaagagaacagucaagaaa

SEQ ID NO: 265134 - RNA, 19 nt, Homo sapiens
  misc_RNA (1)...(19): siRNA sense strand
gagaguaugugacuguuca

SEQ ID NO: 265135 - RNA, 19 nt, Homo sapiens
  misc_RNA (1)...(19): siRNA sense strand
ggauaauucugccaguaaa

SEQ ID NO: 265136 - RNA, 19 nt, Homo sapiens
  misc_RNA (1)...(19): siRNA sense strand
gaacacagagugacuaucu

SEQ ID NO: 265137 - RNA, 19 nt, Homo sapiens
  misc_RNA (1)...(19): siRNA sense strand
gaagagacauaccaaagac

SEQ ID NO: 265138 - RNA, 19 nt, Homo sapiens
  misc_RNA (1)...(19): siRNA sense strand
caagagacguuagaccaaa

SEQ ID NO: 265139 - RNA, 19 nt, Homo sapiens
  misc_RNA (1)...(19): siRNA sense strand
gaaccugacacucuccaua

SEQ ID NO: 265140 - RNA, 19 nt, Homo sapiens
  misc_RNA (1)...(19): siRNA sense strand
guuggguucuguauuguua

SEQ ID NO: 265141 - RNA, 19 nt, Homo sapiens
  misc_RNA (1)...(19): siRNA sense strand
gacguuagaccaaauguaa

SEQ ID NO: 265142 - RNA, 19 nt, Homo sapiens
  misc_RNA (1)...(19): siRNA sense strand
cuacaacugucaccguuaa

SEQ ID NO: 265143 - RNA, 19 nt, Homo sapiens
  misc_RNA (1)...(19): siRNA sense strand
gcagcgagcucacaaacuc

SEQ ID NO: 265144 - RNA, 19 nt, Homo sapiens
  misc_RNA (1)...(19): siRNA sense strand
ucuagaagauggcucaauu

SEQ ID NO: 265145 - RNA, 19 nt, Homo sapiens
  misc_RNA (1)...(19): siRNA sense strand
guaacggaagcaaauauua

SEQ ID NO: 265146 - RNA, 19 nt, Homo sapiens
  misc_RNA (1)...(19): siRNA sense strand
ugagaaauacgaacaguuu

SEQ ID NO: 265147 - RNA, 19 nt, Homo sapiens
  misc_RNA (1)...(19): siRNA sense strand
uagaagauggcucaauuua

SEQ ID NO: 265148 - RNA, 19 nt, Homo sapiens
  misc_RNA (1)...(19): siRNA sense strand
gcacagaauuacaccaucu

SEQ ID NO: 265149 - RNA, 19 nt, Homo sapiens
  misc_RNA (1)...(19): siRNA sense strand
gaauauccacucccuuuga

SEQ ID NO: 265150 - RNA, 19 nt, Homo sapiens
  misc_RNA (1)...(19): siRNA sense strand
agacaggcaugguuuaguu

SEQ ID NO: 265151 - RNA, 19 nt, Homo sapiens
  misc_RNA (1)...(19): siRNA sense strand
gaauugacguggagauuuu

SEQ ID NO: 265152 - RNA, 19 nt, Homo sapiens
  misc_RNA (1)...(19): siRNA sense strand
gaaguaacggaagcaaaua

SEQ ID NO: 265153 - RNA, 19 nt, Homo sapiens
  misc_RNA (1)...(19): siRNA sense strand
ggugaaggcuuaagguauc

SEQ ID NO: 265154 - RNA, 19 nt, Homo sapiens
  misc_RNA (1)...(19): siRNA sense strand
gccaaacacuccucacuca

SEQ ID NO: 265155 - RNA, 19 nt, Homo sapiens
  misc_RNA (1)...(19): siRNA sense strand
ugaagucaaucgccaaguu

SEQ ID NO: 265156 - RNA, 19 nt, Homo sapiens
  misc_RNA (1)...(19): siRNA sense strand
cucaaaggcuguauacaaa

SEQ ID NO: 265157 - RNA, 19 nt, Homo sapiens
  misc_RNA (1)...(19): siRNA sense strand
gauaaaaguuguacuguca

SEQ ID NO: 265158 - RNA, 19 nt, Homo sapiens
  misc_RNA (1)...(19): siRNA sense strand
cagaauauccacucccuuu

SEQ ID NO: 265159 - RNA, 19 nt, Homo sapiens
  misc_RNA (1)...(19): siRNA sense strand
caaaggagguggacaucag

SEQ ID NO: 265160 - RNA, 19 nt, Homo sapiens
  misc_RNA (1)...(19): siRNA sense strand
gaaggagugcuguguguug

SEQ ID NO: 265161 - RNA, 19 nt, Homo sapiens
  misc_RNA (1)...(19): siRNA sense strand
caaacacuccucacucaaa

SEQ ID NO: 265162 - RNA, 19 nt, Homo sapiens
  misc_RNA (1)...(19): siRNA sense strand
caacaaaucccagaucauc

SEQ ID NO: 265163 - RNA, 19 nt, Homo sapiens
  misc_RNA (1)...(19): siRNA sense strand
ugaaacacuuguaggcaaa

SEQ ID NO: 265164 - RNA, 19 nt, Homo sapiens
  misc_RNA (1)...(19): siRNA sense strand
gggagauacuggcagauau

SEQ ID NO: 265165 - RNA, 19 nt, Homo sapiens
  misc_RNA (1)...(19): siRNA sense strand
agagaacagucaagaaaug

SEQ ID NO: 265166 - RNA, 19 nt, Homo sapiens
  misc_RNA (1)...(19): siRNA sense strand
ucagaaaguuuaucuucga

SEQ ID NO: 265167 - RNA, 19 nt, Homo sapiens
  misc_RNA (1)...(19): siRNA sense strand
gcacuggacccggaaauau

SEQ ID NO: 265168 - RNA, 19 nt, Homo sapiens
  misc_RNA (1)...(19): siRNA sense strand
acgaacaguuugcguuaua

SEQ ID NO: 265169 - RNA, 19 nt, Homo sapiens
  misc_RNA (1)...(19): siRNA sense strand
gacccugccuucagaauuc

SEQ ID NO: 265170 - RNA, 19 nt, Homo sapiens
  misc_RNA (1)...(19): siRNA sense strand
gagcauugaccgugagaaa

SEQ ID NO: 265171 - RNA, 19 nt, Homo sapiens
  misc_RNA (1)...(19): siRNA sense strand
ucaacacacuggcgacuug

SEQ ID NO: 265172 - RNA, 19 nt, Homo sapiens
  misc_RNA (1)...(19): siRNA sense strand
cuuaagguaucagaaguua

SEQ ID NO: 265173 - RNA, 19 nt, Homo sapiens
  misc_RNA (1)...(19): siRNA sense strand
caggaacaauuacuauuuc

SEQ ID NO: 265174 - RNA, 19 nt, Homo sapiens
  misc_RNA (1)...(19): siRNA sense strand
uagcacagauccaaauaca

SEQ ID NO: 265175 - RNA, 19 nt, Homo sapiens
  misc_RNA (1)...(19): siRNA sense strand
gaagacauagcccagcaaa

SEQ ID NO: 265176 - RNA, 19 nt, Homo sapiens
  misc_RNA (1)...(19): siRNA sense strand
gaugggcuauucuugcuau

SEQ ID NO: 265177 - RNA, 19 nt, Homo sapiens
  misc_RNA (1)...(19): siRNA sense strand
gaucacgcaccucaaauug

SEQ ID NO: 265178 - RNA, 19 nt, Homo sapiens
  misc_RNA (1)...(19): siRNA sense strand
gcaaguuggugucauuaac

SEQ ID NO: 265179 - RNA, 19 nt, Homo sapiens
  misc_RNA (1)...(19): siRNA sense strand
gacaaagaacccuucaauu

SEQ ID NO: 265180 - RNA, 19 nt, Homo sapiens
  misc_RNA (1)...(19): siRNA sense strand
gcagacauccaacauuugu

SEQ ID NO: 265181 - RNA, 19 nt, Homo sapiens
  misc_RNA (1)...(19): siRNA sense strand
cagggagcaucuucuguaa

SEQ ID NO: 265182 - RNA, 19 nt, Homo sapiens
  misc_RNA (1)...(19): siRNA sense strand
cuauuucacuugaggauga

SEQ ID NO: 265183 - RNA, 19 nt, Homo sapiens
  misc_RNA (1)...(19): siRNA sense strand
caaagcauuucuccauaca

SEQ ID NO: 265184 - RNA, 19 nt, Homo sapiens
  misc_RNA (1)...(19): siRNA sense strand
gacaaagaagugaccauuu

SEQ ID NO: 265185 - RNA, 19 nt, Homo sapiens
  misc_RNA (1)...(19): siRNA sense strand
augcagacauccaacauuu

SEQ ID NO: 265186 - RNA, 19 nt, Homo sapiens
  misc_RNA (1)...(19): siRNA sense strand
ccagggagcaucuucugua

SEQ ID NO: 265187 - RNA, 19 nt, Homo sapiens
  misc_RNA (1)...(19): siRNA sense strand
gaguguagaaugaaggaua

SEQ ID NO: 265188 - RNA, 19 nt, Homo sapiens
  misc_RNA (1)...(19): siRNA sense strand
ggggauaucuuuuguacaa

SEQ ID NO: 265189 - RNA, 19 nt, Homo sapiens
  misc_RNA (1)...(19): siRNA sense strand
ggccaggcguggacaaaga

SEQ ID NO: 265190 - RNA, 19 nt, Homo sapiens
  misc_RNA (1)...(19): siRNA sense strand
ccaaagcauuucuccauac

SEQ ID NO: 265191 - RNA, 19 nt, Homo sapiens
  misc_RNA (1)...(19): siRNA sense strand
ucacaaacuccuacaaugu

SEQ ID NO: 265192 - RNA, 19 nt, Homo sapiens
  misc_RNA (1)...(19): siRNA sense strand
cagaucauccaaagcauuu

SEQ ID NO: 265193 - RNA, 19 nt, Homo sapiens
  misc_RNA (1)...(19): siRNA sense strand
gaacauagaagaaaaggau

SEQ ID NO: 265194 - RNA, 19 nt, Homo sapiens
  misc_RNA (1)...(19): siRNA sense strand
gggaacaacaagagauaaa

SEQ ID NO: 265195 - RNA, 19 nt, Homo sapiens
  misc_RNA (1)...(19): siRNA sense strand
caacaaaggagguggacau

SEQ ID NO: 265196 - RNA, 19 nt, Homo sapiens
  misc_RNA (1)...(19): siRNA sense strand
uccaaagcauuucuccaua

SEQ ID NO: 265197 - RNA, 19 nt, Homo sapiens
  misc_RNA (1)...(19): siRNA sense strand
gagugacuaucuuuacugu

SEQ ID NO: 265198 - RNA, 19 nt, Homo sapiens
  misc_RNA (1)...(19): siRNA sense strand
gaacucguuggguccauuu

SEQ ID NO: 265199 - RNA, 19 nt, Homo sapiens
  misc_RNA (1)...(19): siRNA sense strand
ggagugcuguguguuguca

SEQ ID NO: 265200 - RNA, 19 nt, Homo sapiens
  misc_RNA (1)...(19): siRNA sense strand
ccaucugaguguagaauga

SEQ ID NO: 265201 - RNA, 19 nt, Homo sapiens
  misc_RNA (1)...(19): siRNA sense strand
gaaugccacccuccaguga

SEQ ID NO: 265202 - RNA, 19 nt, Homo sapiens
  misc_RNA (1)...(19): siRNA sense strand
caauuuacacaacacauga

SEQ ID NO: 265203 - RNA, 19 nt, Homo sapiens
  misc_RNA (1)...(19): siRNA sense strand
ggagauacuggcagauaug

SEQ ID NO: 265204 - RNA, 19 nt, Homo sapiens
  misc_RNA (1)...(19): siRNA sense strand
ggauuuugcuguucugaaa

SEQ ID NO: 265205 - RNA, 19 nt, Homo sapiens
  misc_RNA (1)...(19): siRNA sense strand
cuugagaacucuaaaagua

SEQ ID NO: 265206 - RNA, 19 nt, Homo sapiens
  misc_RNA (1)...(19): siRNA sense strand
gggagcaucuucuguaagc

SEQ ID NO: 265207 - RNA, 19 nt, Homo sapiens
  misc_RNA (1)...(19): siRNA sense strand
gguacaggaucaggauuug

SEQ ID NO: 265208 - RNA, 19 nt, Homo sapiens
  misc_RNA (1)...(19): siRNA sense strand
gaagguacaggaucaggau

SEQ ID NO: 265209 - RNA, 19 nt, Homo sapiens
  misc_RNA (1)...(19): siRNA sense strand
gaacaguuugcguuauaug

SEQ ID NO: 265210 - RNA, 19 nt, Homo sapiens
  misc_RNA (1)...(19): siRNA sense strand
caaguuauuuugcaaguug

SEQ ID NO: 265211 - RNA, 19 nt, Homo sapiens
  misc_RNA (1)...(19): siRNA sense strand
acaagcaugucuguuggua

SEQ ID NO: 265212 - RNA, 19 nt, Homo sapiens
  misc_RNA (1)...(19): siRNA sense strand
uaacggaagcaaauauuag

SEQ ID NO: 265213 - RNA, 19 nt, Homo sapiens
  misc_RNA (1)...(19): siRNA sense strand
cguuagaccaaauguaaua

SEQ ID NO: 265214 - RNA, 19 nt, Homo sapiens
  misc_RNA (1)...(19): siRNA sense strand
gcaguuggccgaucuugca

SEQ ID NO: 265215 - RNA, 19 nt, Homo sapiens
  misc_RNA (1)...(19): siRNA sense strand
gaagauaacugguuugaaa

SEQ ID NO: 265216 - RNA, 19 nt, Homo sapiens
  misc_RNA (1)...(19): siRNA sense strand
gaagauggcucaauuuaca

SEQ ID NO: 265217 - RNA, 19 nt, Homo sapiens
  misc_RNA (1)...(19): siRNA sense strand
gcaaagacaugcaucaaga

SEQ ID NO: 265218 - RNA, 19 nt, Homo sapiens
  misc_RNA (1)...(19): siRNA sense strand
gcacagauccaaauacaaa

SEQ ID NO: 265219 - RNA, 19 nt, Homo sapiens
  misc_RNA (1)...(19): siRNA sense strand
agacaugcaucaagaaaua

SEQ ID NO: 265220 - RNA, 19 nt, Homo sapiens
  misc_RNA (1)...(19): siRNA sense strand
acaaagaacccuucaauuu

SEQ ID NO: 265221 - RNA, 19 nt, Homo sapiens
  misc_RNA (1)...(19): siRNA sense strand
acacauauguuaacaguga

SEQ ID NO: 265222 - RNA, 19 nt, Homo sapiens
  misc_RNA (1)...(19): siRNA sense strand
ugaaggaccuggagaagaa

SEQ ID NO: 265223 - RNA, 19 nt, Homo sapiens
  misc_RNA (1)...(19): siRNA sense strand
gaaaguuuaucuucgaguu

SEQ ID NO: 265224 - RNA, 19 nt, Homo sapiens
  misc_RNA (1)...(19): siRNA sense strand
gauagagaauccaaauuug

SEQ ID NO: 265225 - RNA, 19 nt, Homo sapiens
  misc_RNA (1)...(19): siRNA sense strand
ggaugaagauaacugguuu

SEQ ID NO: 265226 - RNA, 19 nt, Homo sapiens
  misc_RNA (1)...(19): siRNA sense strand
gcauugaccgugagaaaua

SEQ ID NO: 265227 - RNA, 19 nt, Homo sapiens
  misc_RNA (1)...(19): siRNA sense strand
gaaugaagguacaggauca

SEQ ID NO: 265228 - RNA, 19 nt, Homo sapiens
  misc_RNA (1)...(19): siRNA sense strand
gaaaacaagucuccuaaga

SEQ ID NO: 265229 - RNA, 19 nt, Homo sapiens
  misc_RNA (1)...(19): siRNA sense strand
gaagucaaucgccaaguua

SEQ ID NO: 265230 - RNA, 19 nt, Homo sapiens
  misc_RNA (1)...(19): siRNA sense strand
ggacaaagaacccuucaau

SEQ ID NO: 265231 - RNA, 19 nt, Homo sapiens
  misc_RNA (1)...(19): siRNA sense strand
ggaaauauccaguggugaa

SEQ ID NO: 265232 - RNA, 19 nt, Homo sapiens
  misc_RNA (1)...(19): siRNA sense strand
aaagaacccuucaauuugu

SEQ ID NO: 265233 - RNA, 19 nt, Homo sapiens
  misc_RNA (1)...(19): siRNA sense strand
gguguuggguucuguauug

SEQ ID NO: 265234 - RNA, 19 nt, Homo sapiens
  misc_RNA (1)...(19): siRNA sense strand
aaacaagucuccuaagaag

SEQ ID NO: 265235 - RNA, 19 nt, Homo sapiens
  misc_RNA (1)...(19): siRNA sense strand
uaagagaacagucaagaaa

SEQ ID NO: 265236 - RNA, 19 nt, Homo sapiens
  misc_RNA (1)...(19): siRNA sense strand
gagaguaugugacuguuca

SEQ ID NO: 265237 - RNA, 19 nt, Homo sapiens
  misc_RNA (1)...(19): siRNA sense strand
ggauaauucugccaguaaa

SEQ ID NO: 265238 - RNA, 19 nt, Homo sapiens
  misc_RNA (1)...(19): siRNA sense strand
gaacacagagugacuaucu

SEQ ID NO: 265239 - RNA, 19 nt, Homo sapiens
  misc_RNA (1)...(19): siRNA sense strand
gaagagacauaccaaagac

SEQ ID NO: 265240 - RNA, 19 nt, Homo sapiens
  misc_RNA (1)...(19): siRNA sense strand
caagagacguuagaccaaa

SEQ ID NO: 265241 - RNA, 19 nt, Homo sapiens
  misc_RNA (1)...(19): siRNA sense strand
ggacuggaguuucuagauc

SEQ ID NO: 265242 - RNA, 19 nt, Homo sapiens
  misc_RNA (1)...(19): siRNA sense strand
gaaccugacacucuccaua

SEQ ID NO: 265243 - RNA, 19 nt, Homo sapiens
  misc_RNA (1)...(19): siRNA sense strand
guuggguucuguauuguua

SEQ ID NO: 265244 - RNA, 19 nt, Homo sapiens
  misc_RNA (1)...(19): siRNA sense strand
gacguuagaccaaauguaa

SEQ ID NO: 265245 - RNA, 19 nt, Homo sapiens
  misc_RNA (1)...(19): siRNA sense strand
cuacaacugucaccguuaa

SEQ ID NO: 265246 - RNA, 19 nt, Homo sapiens
  misc_RNA (1)...(19): siRNA sense strand
gcagcgagcucacaaacuc

SEQ ID NO: 265247 - RNA, 19 nt, Homo sapiens
  misc_RNA (1)...(19): siRNA sense strand
ucuagaagauggcucaauu

SEQ ID NO: 265248 - RNA, 19 nt, Homo sapiens
  misc_RNA (1)...(19): siRNA sense strand
guaacggaagcaaauauua

SEQ ID NO: 265249 - RNA, 19 nt, Homo sapiens
  misc_RNA (1)...(19): siRNA sense strand
ugagaaauacgaacaguuu

SEQ ID NO: 265250 - RNA, 19 nt, Homo sapiens
  misc_RNA (1)...(19): siRNA sense strand
uagaagauggcucaauuua

SEQ ID NO: 265251 - RNA, 19 nt, Homo sapiens
  misc_RNA (1)...(19): siRNA sense strand
gcacagaauuacaccaucu

SEQ ID NO: 265252 - RNA, 19 nt, Homo sapiens
  misc_RNA (1)...(19): siRNA sense strand
gaauauccacucccuuuga

SEQ ID NO: 265253 - RNA, 19 nt, Homo sapiens
  misc_RNA (1)...(19): siRNA sense strand
gcauaaacauugugaagac

SEQ ID NO: 265254 - RNA, 19 nt, Homo sapiens
  misc_RNA (1)...(19): siRNA sense strand
agacaggcaugguuuaguu

SEQ ID NO: 265255 - RNA, 19 nt, Homo sapiens
  misc_RNA (1)...(19): siRNA sense strand
gaauugacguggagauuuu

SEQ ID NO: 265256 - RNA, 19 nt, Homo sapiens
  misc_RNA (1)...(19): siRNA sense strand
gaaguaacggaagcaaaua

SEQ ID NO: 265257 - RNA, 19 nt, Homo sapiens
  misc_RNA (1)...(19): siRNA sense strand
ggugaaggcuuaagguauc

SEQ ID NO: 265258 - RNA, 19 nt, Homo sapiens
  misc_RNA (1)...(19): siRNA sense strand
gccaaacacuccucacuca

SEQ ID NO: 265259 - RNA, 19 nt, Homo sapiens
  misc_RNA (1)...(19): siRNA sense strand
gaacccaaauuuaggacau

SEQ ID NO: 265260 - RNA, 19 nt, Homo sapiens
  misc_RNA (1)...(19): siRNA sense strand
gacaagaugaggagcauaa

SEQ ID NO: 265261 - RNA, 19 nt, Homo sapiens
  misc_RNA (1)...(19): siRNA sense strand
ugaagucaaucgccaaguu

SEQ ID NO: 265262 - RNA, 19 nt, Homo sapiens
  misc_RNA (1)...(19): siRNA sense strand
cucaaaggcuguauacaaa

SEQ ID NO: 265263 - RNA, 19 nt, Homo sapiens
  misc_RNA (1)...(19): siRNA sense strand
gauaaaaguuguacuguca

SEQ ID NO: 265264 - RNA, 19 nt, Homo sapiens
  misc_RNA (1)...(19): siRNA sense strand
cagaauauccacucccuuu

SEQ ID NO: 265265 - RNA, 19 nt, Homo sapiens
  misc_RNA (1)...(19): siRNA sense strand
caaaggagguggacaucag

SEQ ID NO: 265266 - RNA, 19 nt, Homo sapiens
  misc_RNA (1)...(19): siRNA sense strand
gaaggagugcuguguguug

SEQ ID NO: 265267 - RNA, 19 nt, Homo sapiens
  misc_RNA (1)...(19): siRNA sense strand
caaacacuccucacucaaa

SEQ ID NO: 265268 - RNA, 19 nt, Homo sapiens
  misc_RNA (1)...(19): siRNA sense strand
caacaaaucccagaucauc

SEQ ID NO: 265269 - RNA, 19 nt, Homo sapiens
  misc_RNA (1)...(19): siRNA sense strand
ugaaacacuuguaggcaaa

SEQ ID NO: 265270 - RNA, 19 nt, Homo sapiens
  misc_RNA (1)...(19): siRNA sense strand
gggagauacuggcagauau

SEQ ID NO: 265271 - RNA, 19 nt, Homo sapiens
  misc_RNA (1)...(19): siRNA sense strand
ucagaaaguuuaucuucga

SEQ ID NO: 265272 - RNA, 19 nt, Homo sapiens
  misc_RNA (1)...(19): siRNA sense strand
agagaacagucaagaaaug

SEQ ID NO: 265273 - RNA, 19 nt, Homo sapiens
  misc_RNA (1)...(19): siRNA sense strand
gcacuggacccggaaauau

SEQ ID NO: 265274 - RNA, 19 nt, Homo sapiens
  misc_RNA (1)...(19): siRNA sense strand
acgaacaguuugcguuaua

SEQ ID NO: 265275 - RNA, 19 nt, Homo sapiens
  misc_RNA (1)...(19): siRNA sense strand
gacccugccuucagaauuc

SEQ ID NO: 265276 - RNA, 19 nt, Homo sapiens
  misc_RNA (1)...(19): siRNA sense strand
gagcauugaccgugagaaa

SEQ ID NO: 265277 - RNA, 19 nt, Homo sapiens
  misc_RNA (1)...(19): siRNA sense strand
ucaacacacuggcgacuug

SEQ ID NO: 265278 - RNA, 19 nt, Homo sapiens
  misc_RNA (1)...(19): siRNA sense strand
cuuaagguaucagaaguua

SEQ ID NO: 265279 - RNA, 19 nt, Homo sapiens
  misc_RNA (1)...(19): siRNA sense strand
caggaacaauuacuauuuc

SEQ ID NO: 265280 - RNA, 19 nt, Homo sapiens
  misc_RNA (1)...(19): siRNA sense strand
uagcacagauccaaauaca

SEQ ID NO: 265281 - RNA, 19 nt, Homo sapiens
  misc_RNA (1)...(19): siRNA sense strand
gaagacauagcccagcaaa

SEQ ID NO: 265282 - RNA, 19 nt, Homo sapiens
  misc_RNA (1)...(19): siRNA sense strand
gaugggcuauucuugcuau

SEQ ID NO: 265283 - RNA, 19 nt, Homo sapiens
  misc_RNA (1)...(19): siRNA sense strand
gaucacgcaccucaaauug

SEQ ID NO: 265284 - RNA, 19 nt, Homo sapiens
  misc_RNA (1)...(19): siRNA sense strand
gcaaguuggugucauuaac

SEQ ID NO: 265285 - RNA, 19 nt, Homo sapiens
  misc_RNA (1)...(19): siRNA sense strand
gacaaagaacccuucaauu

SEQ ID NO: 265286 - RNA, 19 nt, Homo sapiens
  misc_RNA (1)...(19): siRNA sense strand
gcagacauccaacauuugu

SEQ ID NO: 265287 - RNA, 19 nt, Homo sapiens
  misc_RNA (1)...(19): siRNA sense strand
cagggagcaucuucuguaa

SEQ ID NO: 265288 - RNA, 19 nt, Homo sapiens
  misc_RNA (1)...(19): siRNA sense strand
cuauuucacuugaggauga

SEQ ID NO: 265289 - RNA, 19 nt, Homo sapiens
  misc_RNA (1)...(19): siRNA sense strand
caaagcauuucuccauaca

SEQ ID NO: 265290 - RNA, 19 nt, Homo sapiens
  misc_RNA (1)...(19): siRNA sense strand
ccagggagcaucuucugua

SEQ ID NO: 265291 - RNA, 19 nt, Homo sapiens
  misc_RNA (1)...(19): siRNA sense strand
augcagacauccaacauuu

SEQ ID NO: 265292 - RNA, 19 nt, Homo sapiens
  misc_RNA (1)...(19): siRNA sense strand
gaguguagaaugaaggaua

SEQ ID NO: 265293 - RNA, 19 nt, Homo sapiens
  misc_RNA (1)...(19): siRNA sense strand
gacaaagaagugaccauuu

SEQ ID NO: 265294 - RNA, 19 nt, Homo sapiens
  misc_RNA (1)...(19): siRNA sense strand
ggggauaucuuuuguacaa

SEQ ID NO: 265295 - RNA, 19 nt, Homo sapiens
  misc_RNA (1)...(19): siRNA sense strand
ggccaggcguggacaaaga

SEQ ID NO: 265296 - RNA, 19 nt, Homo sapiens
  misc_RNA (1)...(19): siRNA sense strand
ccaaagcauuucuccauac

SEQ ID NO: 265297 - RNA, 19 nt, Homo sapiens
  misc_RNA (1)...(19): siRNA sense strand
ucacaaacuccuacaaugu

SEQ ID NO: 265298 - RNA, 19 nt, Homo sapiens
  misc_RNA (1)...(19): siRNA sense strand
cagaucauccaaagcauuu

SEQ ID NO: 265299 - RNA, 19 nt, Homo sapiens
  misc_RNA (1)...(19): siRNA sense strand
gaacauagaagaaaaggau

SEQ ID NO: 265300 - RNA, 19 nt, Homo sapiens
  misc_RNA (1)...(19): siRNA sense strand
gggaacaacaagagauaaa

SEQ ID NO: 265301 - RNA, 19 nt, Homo sapiens
  misc_RNA (1)...(19): siRNA sense strand
gagcauaaacauugugaag

SEQ ID NO: 265302 - RNA, 19 nt, Homo sapiens
  misc_RNA (1)...(19): siRNA sense strand
caacaaaggagguggacau

SEQ ID NO: 265303 - RNA, 19 nt, Homo sapiens
  misc_RNA (1)...(19): siRNA sense strand
uccaaagcauuucuccaua

SEQ ID NO: 265304 - RNA, 19 nt, Homo sapiens
  misc_RNA (1)...(19): siRNA sense strand
gagugacuaucuuuacugu

SEQ ID NO: 265305 - RNA, 19 nt, Homo sapiens
  misc_RNA (1)...(19): siRNA sense strand
gaacucguuggguccauuu

SEQ ID NO: 265306 - RNA, 19 nt, Homo sapiens
  misc_RNA (1)...(19): siRNA sense strand
ggagugcuguguguuguca

SEQ ID NO: 265307 - RNA, 19 nt, Homo sapiens
  misc_RNA (1)...(19): siRNA sense strand
gacuggaguuucuagauca

SEQ ID NO: 265308 - RNA, 19 nt, Homo sapiens
  misc_RNA (1)...(19): siRNA sense strand
gaagagggacuggaguuuc

SEQ ID NO: 265309 - RNA, 19 nt, Homo sapiens
  misc_RNA (1)...(19): siRNA sense strand
ccaucugaguguagaauga

SEQ ID NO: 265310 - RNA, 19 nt, Homo sapiens
  misc_RNA (1)...(19): siRNA sense strand
gaaugccacccuccaguga

SEQ ID NO: 265311 - RNA, 19 nt, Homo sapiens
  misc_RNA (1)...(19): siRNA sense strand
gggagcaucuucuguaagc

SEQ ID NO: 265312 - RNA, 19 nt, Homo sapiens
  misc_RNA (1)...(19): siRNA sense strand
gaugaggagcauaaacauu

SEQ ID NO: 265313 - RNA, 19 nt, Homo sapiens
  misc_RNA (1)...(19): siRNA sense strand
ggagauacuggcagauaug

SEQ ID NO: 265314 - RNA, 19 nt, Homo sapiens
  misc_RNA (1)...(19): siRNA sense strand
ggauuuugcuguucugaaa

SEQ ID NO: 265315 - RNA, 19 nt, Homo sapiens
  misc_RNA (1)...(19): siRNA sense strand
gaaauuaacugauccaaca

SEQ ID NO: 265316 - RNA, 19 nt, Homo sapiens
  misc_RNA (1)...(19): siRNA sense strand
aaacaaagguccuaaagaa

SEQ ID NO: 265317 - RNA, 19 nt, Homo sapiens
  misc_RNA (1)...(19): siRNA sense strand
guggaaaucuuacgaguua

SEQ ID NO: 265318 - RNA, 19 nt, Homo sapiens
  misc_RNA (1)...(19): siRNA sense strand
ccaagaaccucggaauuua

SEQ ID NO: 265319 - RNA, 19 nt, Homo sapiens
  misc_RNA (1)...(19): siRNA sense strand
gauccugacuuccaaauuu

SEQ ID NO: 265320 - RNA, 19 nt, Homo sapiens
  misc_RNA (1)...(19): siRNA sense strand
caaacuagaugccgagaaa

SEQ ID NO: 265321 - RNA, 19 nt, Homo sapiens
  misc_RNA (1)...(19): siRNA sense strand
gcaaauugguguaguuaau

SEQ ID NO: 265322 - RNA, 19 nt, Homo sapiens
  misc_RNA (1)...(19): siRNA sense strand
gaagagaaguuuuaccaua

SEQ ID NO: 265323 - RNA, 19 nt, Homo sapiens
  misc_RNA (1)...(19): siRNA sense strand
gagagacacuggaaacuug

SEQ ID NO: 265324 - RNA, 19 nt, Homo sapiens
  misc_RNA (1)...(19): siRNA sense strand
gaacaacaagcaauggaua

SEQ ID NO: 265325 - RNA, 19 nt, Homo sapiens
  misc_RNA (1)...(19): siRNA sense strand
gagaguuaauugacaagua

SEQ ID NO: 265326 - RNA, 19 nt, Homo sapiens
  misc_RNA (1)...(19): siRNA sense strand
cauaagagguccuggaguu

SEQ ID NO: 265327 - RNA, 19 nt, Homo sapiens
  misc_RNA (1)...(19): siRNA sense strand
ggaguucuuuguguaguua

SEQ ID NO: 265328 - RNA, 19 nt, Homo sapiens
  misc_RNA (1)...(19): siRNA sense strand
ugaaggaguucuuugugua

SEQ ID NO: 265329 - RNA, 19 nt, Homo sapiens
  misc_RNA (1)...(19): siRNA sense strand
agacauggauggucaguau

SEQ ID NO: 265330 - RNA, 19 nt, Homo sapiens
  misc_RNA (1)...(19): siRNA sense strand
gaaagaaaaugcagaagug

SEQ ID NO: 265331 - RNA, 19 nt, Homo sapiens
  misc_RNA (1)...(19): siRNA sense strand
cagcagaaccuaauuguau

SEQ ID NO: 265332 - RNA, 19 nt, Homo sapiens
  misc_RNA (1)...(19): siRNA sense strand
uaaagcauaugacccagaa

SEQ ID NO: 265333 - RNA, 19 nt, Homo sapiens
  misc_RNA (1)...(19): siRNA sense strand
gaaaaugacugcacacauc

SEQ ID NO: 265334 - RNA, 19 nt, Homo sapiens
  misc_RNA (1)...(19): siRNA sense strand
gcucauauguaguaccuau

SEQ ID NO: 265335 - RNA, 19 nt, Homo sapiens
  misc_RNA (1)...(19): siRNA sense strand
cagagaauguggagacuga

SEQ ID NO: 265336 - RNA, 19 nt, Homo sapiens
  misc_RNA (1)...(19): siRNA sense strand
ggaggaugguucagucuau

SEQ ID NO: 265337 - RNA, 19 nt, Homo sapiens
  misc_RNA (1)...(19): siRNA sense strand
gcacgucuuuccuaucaga

SEQ ID NO: 265338 - RNA, 19 nt, Homo sapiens
  misc_RNA (1)...(19): siRNA sense strand
gauaacagcccauucauac

SEQ ID NO: 265339 - RNA, 19 nt, Homo sapiens
  misc_RNA (1)...(19): siRNA sense strand
gaguuacuguugaggauaa

SEQ ID NO: 265340 - RNA, 19 nt, Homo sapiens
  misc_RNA (1)...(19): siRNA sense strand
gcaguggcauaagguauaa

SEQ ID NO: 265341 - RNA, 19 nt, Homo sapiens
  misc_RNA (1)...(19): siRNA sense strand
gaaccuaauuguaucaaac

SEQ ID NO: 265342 - RNA, 19 nt, Homo sapiens
  misc_RNA (1)...(19): siRNA sense strand
ucagaagccuggauagaga

SEQ ID NO: 265343 - RNA, 19 nt, Homo sapiens
  misc_RNA (1)...(19): siRNA sense strand
gaggaugguucagucuaua

SEQ ID NO: 265344 - RNA, 19 nt, Homo sapiens
  misc_RNA (1)...(19): siRNA sense strand
cagcacgucuuuccuauca

SEQ ID NO: 265345 - RNA, 19 nt, Homo sapiens
  misc_RNA (1)...(19): siRNA sense strand
caacaagcaauggauauaa

SEQ ID NO: 265346 - RNA, 19 nt, Homo sapiens
  misc_RNA (1)...(19): siRNA sense strand
gagaagaugggcuccaauu

SEQ ID NO: 265347 - RNA, 19 nt, Homo sapiens
  misc_RNA (1)...(19): siRNA sense strand
ccauuuggcucauauguag

SEQ ID NO: 265348 - RNA, 19 nt, Homo sapiens
  misc_RNA (1)...(19): siRNA sense strand
guaguuaagccuuugaauu

SEQ ID NO: 265349 - RNA, 19 nt, Homo sapiens
  misc_RNA (1)...(19): siRNA sense strand
acuggaaacuuguauugua

SEQ ID NO: 265350 - RNA, 19 nt, Homo sapiens
  misc_RNA (1)...(19): siRNA sense strand
gauuggcgguggaggagua

SEQ ID NO: 265351 - RNA, 19 nt, Homo sapiens
  misc_RNA (1)...(19): siRNA sense strand
ggcauaagguauaagaaau

SEQ ID NO: 265352 - RNA, 19 nt, Homo sapiens
  misc_RNA (1)...(19): siRNA sense strand
cugcaaaucuaauucauuc

SEQ ID NO: 265353 - RNA, 19 nt, Homo sapiens
  misc_RNA (1)...(19): siRNA sense strand
ggccauccuugcaauauug

SEQ ID NO: 265354 - RNA, 19 nt, Homo sapiens
  misc_RNA (1)...(19): siRNA sense strand
ggacaagugugugcuacug

SEQ ID NO: 265355 - RNA, 19 nt, Homo sapiens
  misc_RNA (1)...(19): siRNA sense strand
cgagaaacuuguugguaga

SEQ ID NO: 265356 - RNA, 19 nt, Homo sapiens
  misc_RNA (1)...(19): siRNA sense strand
gaaaauacaggaucaauca

SEQ ID NO: 265357 - RNA, 19 nt, Homo sapiens
  misc_RNA (1)...(19): siRNA sense strand
gcaauggauauaaagcaua

SEQ ID NO: 265358 - RNA, 19 nt, Homo sapiens
  misc_RNA (1)...(19): siRNA sense strand
cagagaggcuaguccaaga

SEQ ID NO: 265359 - RNA, 19 nt, Homo sapiens
  misc_RNA (1)...(19): siRNA sense strand
ugauguaaaugaccacuug

SEQ ID NO: 265360 - RNA, 19 nt, Homo sapiens
  misc_RNA (1)...(19): siRNA sense strand
aaauacaguugauguggaa

SEQ ID NO: 265361 - RNA, 19 nt, Homo sapiens
  misc_RNA (1)...(19): siRNA sense strand
caaacaaagguccuaaaga

SEQ ID NO: 265362 - RNA, 19 nt, Homo sapiens
  misc_RNA (1)...(19): siRNA sense strand
gacagagaguuaauugaca

SEQ ID NO: 265363 - RNA, 19 nt, Homo sapiens
  misc_RNA (1)...(19): siRNA sense strand
acacggagguggacaacug

SEQ ID NO: 265364 - RNA, 19 nt, Homo sapiens
  misc_RNA (1)...(19): siRNA sense strand
uuacaguccuugcaucaga

SEQ ID NO: 265365 - RNA, 19 nt, Homo sapiens
  misc_RNA (1)...(19): siRNA sense strand
guuaagccuuugaauuaug

SEQ ID NO: 265366 - RNA, 19 nt, Homo sapiens
  misc_RNA (1)...(19): siRNA sense strand
guauuguacucguccugua

SEQ ID NO: 265367 - RNA, 19 nt, Homo sapiens
  misc_RNA (1)...(19): siRNA sense strand
agaaguagcaguggcauaa

SEQ ID NO: 265368 - RNA, 19 nt, Homo sapiens
  misc_RNA (1)...(19): siRNA sense strand
gagagcuaauuauaccauu

SEQ ID NO: 265369 - RNA, 19 nt, Homo sapiens
  misc_RNA (1)...(19): siRNA sense strand
ucagcuagacagagaguua

SEQ ID NO: 265370 - RNA, 19 nt, Homo sapiens
  misc_RNA (1)...(19): siRNA sense strand
gacccucgcgaucuuaaua

SEQ ID NO: 265371 - RNA, 19 nt, Homo sapiens
  misc_RNA (1)...(19): siRNA sense strand
caaaaguaauuccugauga

SEQ ID NO: 265372 - RNA, 19 nt, Homo sapiens
  misc_RNA (1)...(19): siRNA sense strand
gggccauccuugcaauauu

SEQ ID NO: 265373 - RNA, 19 nt, Homo sapiens
  misc_RNA (1)...(19): siRNA sense strand
caaggagggagaacaugua

SEQ ID NO: 265374 - RNA, 19 nt, Homo sapiens
  misc_RNA (1)...(19): siRNA sense strand
gaccaagaaccucggaauu

SEQ ID NO: 265375 - RNA, 19 nt, Homo sapiens
  misc_RNA (1)...(19): siRNA sense strand
cauguucccuccaaacuag

SEQ ID NO: 265376 - RNA, 19 nt, Homo sapiens
  misc_RNA (1)...(19): siRNA sense strand
gaugagggcccugagugua

SEQ ID NO: 265377 - RNA, 19 nt, Homo sapiens
  misc_RNA (1)...(19): siRNA sense strand
acagagaguuaauugacaa

SEQ ID NO: 265378 - RNA, 19 nt, Homo sapiens
  misc_RNA (1)...(19): siRNA sense strand
cuuuacagcugcaaaucua

SEQ ID NO: 265379 - RNA, 19 nt, Homo sapiens
  misc_RNA (1)...(19): siRNA sense strand
cauuuacucguacuucuua

SEQ ID NO: 265380 - RNA, 19 nt, Homo sapiens
  misc_RNA (1)...(19): siRNA sense strand
gagaugacaaaguguauuc

SEQ ID NO: 265381 - RNA, 19 nt, Homo sapiens
  misc_RNA (1)...(19): siRNA sense strand
gcaauauuguugggcauag

SEQ ID NO: 265382 - RNA, 19 nt, Homo sapiens
  misc_RNA (1)...(19): siRNA sense strand
agacagugaucaucugcaa

SEQ ID NO: 265383 - RNA, 19 nt, Homo sapiens
  misc_RNA (1)...(19): siRNA sense strand
caagaaccucggaauuuau

SEQ ID NO: 265384 - RNA, 19 nt, Homo sapiens
  misc_RNA (1)...(19): siRNA sense strand
guggacaacugcagauaca

SEQ ID NO: 265385 - RNA, 19 nt, Homo sapiens
  misc_RNA (1)...(19): siRNA sense strand
gagauagacuuggcauguc

SEQ ID NO: 265386 - RNA, 19 nt, Homo sapiens
  misc_RNA (1)...(19): siRNA sense strand
ccuauaacagugagagaua

SEQ ID NO: 265387 - RNA, 19 nt, Homo sapiens
  misc_RNA (1)...(19): siRNA sense strand
ggcccacccuuugacuuua

SEQ ID NO: 265388 - RNA, 19 nt, Homo sapiens
  misc_RNA (1)...(19): siRNA sense strand
gaagugggaacaacaagca

SEQ ID NO: 265389 - RNA, 19 nt, Homo sapiens
  misc_RNA (1)...(19): siRNA sense strand
gcagaagugggaacaacaa

SEQ ID NO: 265390 - RNA, 19 nt, Homo sapiens
  misc_RNA (1)...(19): siRNA sense strand
gaagaaaagcaacagauga

SEQ ID NO: 265391 - RNA, 19 nt, Homo sapiens
  misc_RNA (1)...(19): siRNA sense strand
gaccacuugccaacauuua

SEQ ID NO: 265392 - RNA, 19 nt, Homo sapiens
  misc_RNA (1)...(19): siRNA sense strand
cugaaguacuccaucauug

SEQ ID NO: 265393 - RNA, 19 nt, Homo sapiens
  misc_RNA (1)...(19): siRNA sense strand
gcacuacugugggacaagu

SEQ ID NO: 265394 - RNA, 19 nt, Homo sapiens
  misc_RNA (1)...(19): siRNA sense strand
cuaacuggagagcuaauua

SEQ ID NO: 265395 - RNA, 19 nt, Homo sapiens
  misc_RNA (1)...(19): siRNA sense strand
ugauaacagcccauucaua

SEQ ID NO: 265396 - RNA, 19 nt, Homo sapiens
  misc_RNA (1)...(19): siRNA sense strand
gaaggaguucuuuguguag

SEQ ID NO: 265397 - RNA, 19 nt, Homo sapiens
  misc_RNA (1)...(19): siRNA sense strand
gcauaugacccagaaacaa

SEQ ID NO: 265398 - RNA, 19 nt, Homo sapiens
  misc_RNA (1)...(19): siRNA sense strand
gagaauguggagacugaaa

SEQ ID NO: 265399 - RNA, 19 nt, Homo sapiens
  misc_RNA (1)...(19): siRNA sense strand
uucaacagguucaaucuga

SEQ ID NO: 265400 - RNA, 19 nt, Homo sapiens
  misc_RNA (1)...(19): siRNA sense strand
agacugaaagcaauuaaug

SEQ ID NO: 265401 - RNA, 19 nt, Homo sapiens
  misc_RNA (1)...(19): siRNA sense strand
gaguguaacccuccaauac

SEQ ID NO: 265402 - RNA, 19 nt, Homo sapiens
  misc_RNA (1)...(19): siRNA sense strand
gccuuugaauuaugaagaa

SEQ ID NO: 265403 - RNA, 19 nt, Homo sapiens
  misc_RNA (1)...(19): siRNA sense strand
caacaucaucucagcuaga

SEQ ID NO: 265404 - RNA, 19 nt, Homo sapiens
  misc_RNA (1)...(19): siRNA sense strand
ugagauaauugccuuugca

SEQ ID NO: 265405 - RNA, 19 nt, Homo sapiens
  misc_RNA (1)...(19): siRNA sense strand
ggagagagacacuggaaac

SEQ ID NO: 265406 - RNA, 19 nt, Homo sapiens
  misc_RNA (1)...(19): siRNA sense strand
gcccaaaacuauaccauau

SEQ ID NO: 265407 - RNA, 19 nt, Homo sapiens
  misc_RNA (1)...(19): siRNA sense strand
gaagaugggcuccaauucc

SEQ ID NO: 265408 - RNA, 19 nt, Homo sapiens
  misc_RNA (1)...(19): siRNA sense strand
gcaaacccaccaugucauc

SEQ ID NO: 265409 - RNA, 19 nt, Homo sapiens
  misc_RNA (1)...(19): siRNA sense strand
uaacuggagagcuaauuau

SEQ ID NO: 265410 - RNA, 19 nt, Homo sapiens
  misc_RNA (1)...(19): siRNA sense strand
ugacaucaguggaagaaaa

SEQ ID NO: 265411 - RNA, 19 nt, Homo sapiens
  misc_RNA (1)...(19): siRNA sense strand
acucguacuucuuauguga

SEQ ID NO: 265412 - RNA, 19 nt, Homo sapiens
  misc_RNA (1)...(19): siRNA sense strand
cuacagacaacuucaacuu

SEQ ID NO: 265413 - RNA, 19 nt, Homo sapiens
  misc_RNA (1)...(19): siRNA sense strand
gggcuccaauuccuuguuc

SEQ ID NO: 265414 - RNA, 19 nt, Homo sapiens
  misc_RNA (1)...(19): siRNA sense strand
cagcagcacgucuuuccua

SEQ ID NO: 265415 - RNA, 19 nt, Homo sapiens
  misc_RNA (1)...(19): siRNA sense strand
gaaauuaacugauccaaca

SEQ ID NO: 265416 - RNA, 19 nt, Homo sapiens
  misc_RNA (1)...(19): siRNA sense strand
aaacaaagguccuaaagaa

SEQ ID NO: 265417 - RNA, 19 nt, Homo sapiens
  misc_RNA (1)...(19): siRNA sense strand
guggaaaucuuacgaguua

SEQ ID NO: 265418 - RNA, 19 nt, Homo sapiens
  misc_RNA (1)...(19): siRNA sense strand
ccaagaaccucggaauuua

SEQ ID NO: 265419 - RNA, 19 nt, Homo sapiens
  misc_RNA (1)...(19): siRNA sense strand
gauccugacuuccaaauuu

SEQ ID NO: 265420 - RNA, 19 nt, Homo sapiens
  misc_RNA (1)...(19): siRNA sense strand
caaacuagaugccgagaaa

SEQ ID NO: 265421 - RNA, 19 nt, Homo sapiens
  misc_RNA (1)...(19): siRNA sense strand
gcaaauugguguaguuaau

SEQ ID NO: 265422 - RNA, 19 nt, Homo sapiens
  misc_RNA (1)...(19): siRNA sense strand
gaagagaaguuuuaccaua

SEQ ID NO: 265423 - RNA, 19 nt, Homo sapiens
  misc_RNA (1)...(19): siRNA sense strand
gagagacacuggaaacuug

SEQ ID NO: 265424 - RNA, 19 nt, Homo sapiens
  misc_RNA (1)...(19): siRNA sense strand
gaacaacaagcaauggaua

SEQ ID NO: 265425 - RNA, 19 nt, Homo sapiens
  misc_RNA (1)...(19): siRNA sense strand
gagaguuaauugacaagua

SEQ ID NO: 265426 - RNA, 19 nt, Homo sapiens
  misc_RNA (1)...(19): siRNA sense strand
cauaagagguccuggaguu

SEQ ID NO: 265427 - RNA, 19 nt, Homo sapiens
  misc_RNA (1)...(19): siRNA sense strand
gcagaagcaugcaugaaga

SEQ ID NO: 265428 - RNA, 19 nt, Homo sapiens
  misc_RNA (1)...(19): siRNA sense strand
ggaguucuuuguguaguua

SEQ ID NO: 265429 - RNA, 19 nt, Homo sapiens
  misc_RNA (1)...(19): siRNA sense strand
ugaaggaguucuuugugua

SEQ ID NO: 265430 - RNA, 19 nt, Homo sapiens
  misc_RNA (1)...(19): siRNA sense strand
agacauggauggucaguau

SEQ ID NO: 265431 - RNA, 19 nt, Homo sapiens
  misc_RNA (1)...(19): siRNA sense strand
gaaagaaaaugcagaagug

SEQ ID NO: 265432 - RNA, 19 nt, Homo sapiens
  misc_RNA (1)...(19): siRNA sense strand
cagcagaaccuaauuguau

SEQ ID NO: 265433 - RNA, 19 nt, Homo sapiens
  misc_RNA (1)...(19): siRNA sense strand
uaaagcauaugacccagaa

SEQ ID NO: 265434 - RNA, 19 nt, Homo sapiens
  misc_RNA (1)...(19): siRNA sense strand
gaaaaugacugcacacauc

SEQ ID NO: 265435 - RNA, 19 nt, Homo sapiens
  misc_RNA (1)...(19): siRNA sense strand
gcucauauguaguaccuau

SEQ ID NO: 265436 - RNA, 19 nt, Homo sapiens
  misc_RNA (1)...(19): siRNA sense strand
cagagaauguggagacuga

SEQ ID NO: 265437 - RNA, 19 nt, Homo sapiens
  misc_RNA (1)...(19): siRNA sense strand
ggaggaugguucagucuau

SEQ ID NO: 265438 - RNA, 19 nt, Homo sapiens
  misc_RNA (1)...(19): siRNA sense strand
gcacgucuuuccuaucaga

SEQ ID NO: 265439 - RNA, 19 nt, Homo sapiens
  misc_RNA (1)...(19): siRNA sense strand
gauaacagcccauucauac

SEQ ID NO: 265440 - RNA, 19 nt, Homo sapiens
  misc_RNA (1)...(19): siRNA sense strand
gaguuacuguugaggauaa

SEQ ID NO: 265441 - RNA, 19 nt, Homo sapiens
  misc_RNA (1)...(19): siRNA sense strand
gcaguggcauaagguauaa

SEQ ID NO: 265442 - RNA, 19 nt, Homo sapiens
  misc_RNA (1)...(19): siRNA sense strand
gaaccuaauuguaucaaac

SEQ ID NO: 265443 - RNA, 19 nt, Homo sapiens
  misc_RNA (1)...(19): siRNA sense strand
ucagaagccuggauagaga

SEQ ID NO: 265444 - RNA, 19 nt, Homo sapiens
  misc_RNA (1)...(19): siRNA sense strand
gaggaugguucagucuaua

SEQ ID NO: 265445 - RNA, 19 nt, Homo sapiens
  misc_RNA (1)...(19): siRNA sense strand
cagcacgucuuuccuauca

SEQ ID NO: 265446 - RNA, 19 nt, Homo sapiens
  misc_RNA (1)...(19): siRNA sense strand
caacaagcaauggauauaa

SEQ ID NO: 265447 - RNA, 19 nt, Homo sapiens
  misc_RNA (1)...(19): siRNA sense strand
gagaagaugggcuccaauu

SEQ ID NO: 265448 - RNA, 19 nt, Homo sapiens
  misc_RNA (1)...(19): siRNA sense strand
ccauuuggcucauauguag

SEQ ID NO: 265449 - RNA, 19 nt, Homo sapiens
  misc_RNA (1)...(19): siRNA sense strand
guaguuaagccuuugaauu

SEQ ID NO: 265450 - RNA, 19 nt, Homo sapiens
  misc_RNA (1)...(19): siRNA sense strand
acuggaaacuuguauugua

SEQ ID NO: 265451 - RNA, 19 nt, Homo sapiens
  misc_RNA (1)...(19): siRNA sense strand
gauuggcgguggaggagua

SEQ ID NO: 265452 - RNA, 19 nt, Homo sapiens
  misc_RNA (1)...(19): siRNA sense strand
ggcauaagguauaagaaau

SEQ ID NO: 265453 - RNA, 19 nt, Homo sapiens
  misc_RNA (1)...(19): siRNA sense strand
cugcaaaucuaauucauuc

SEQ ID NO: 265454 - RNA, 19 nt, Homo sapiens
  misc_RNA (1)...(19): siRNA sense strand
ggccauccuugcaauauug

SEQ ID NO: 265455 - RNA, 19 nt, Homo sapiens
  misc_RNA (1)...(19): siRNA sense strand
ggacaagugugugcuacug

SEQ ID NO: 265456 - RNA, 19 nt, Homo sapiens
  misc_RNA (1)...(19): siRNA sense strand
ugauguaaaugaccacuug

SEQ ID NO: 265457 - RNA, 19 nt, Homo sapiens
  misc_RNA (1)...(19): siRNA sense strand
gaaaauacaggaucaauca

SEQ ID NO: 265458 - RNA, 19 nt, Homo sapiens
  misc_RNA (1)...(19): siRNA sense strand
cgagaaacuuguugguaga

SEQ ID NO: 265459 - RNA, 19 nt, Homo sapiens
  misc_RNA (1)...(19): siRNA sense strand
gcaauggauauaaagcaua

SEQ ID NO: 265460 - RNA, 19 nt, Homo sapiens
  misc_RNA (1)...(19): siRNA sense strand
cagagaggcuaguccaaga

SEQ ID NO: 265461 - RNA, 19 nt, Homo sapiens
  misc_RNA (1)...(19): siRNA sense strand
aaauacaguugauguggaa

SEQ ID NO: 265462 - RNA, 19 nt, Homo sapiens
  misc_RNA (1)...(19): siRNA sense strand
agaagaagaugggcuugaa

SEQ ID NO: 265463 - RNA, 19 nt, Homo sapiens
  misc_RNA (1)...(19): siRNA sense strand
caaacaaagguccuaaaga

SEQ ID NO: 265464 - RNA, 19 nt, Homo sapiens
  misc_RNA (1)...(19): siRNA sense strand
gacagagaguuaauugaca

SEQ ID NO: 265465 - RNA, 19 nt, Homo sapiens
  misc_RNA (1)...(19): siRNA sense strand
acacggagguggacaacug

SEQ ID NO: 265466 - RNA, 19 nt, Homo sapiens
  misc_RNA (1)...(19): siRNA sense strand
uuacaguccuugcaucaga

SEQ ID NO: 265467 - RNA, 19 nt, Homo sapiens
  misc_RNA (1)...(19): siRNA sense strand
guuaagccuuugaauuaug

SEQ ID NO: 265468 - RNA, 19 nt, Homo sapiens
  misc_RNA (1)...(19): siRNA sense strand
guauuguacucguccugua

SEQ ID NO: 265469 - RNA, 19 nt, Homo sapiens
  misc_RNA (1)...(19): siRNA sense strand
gcagugaacgacaagaaga

SEQ ID NO: 265470 - RNA, 19 nt, Homo sapiens
  misc_RNA (1)...(19): siRNA sense strand
agaaguagcaguggcauaa

SEQ ID NO: 265471 - RNA, 19 nt, Homo sapiens
  misc_RNA (1)...(19): siRNA sense strand
gagagcuaauuauaccauu

SEQ ID NO: 265472 - RNA, 19 nt, Homo sapiens
  misc_RNA (1)...(19): siRNA sense strand
ucagcuagacagagaguua

SEQ ID NO: 265473 - RNA, 19 nt, Homo sapiens
  misc_RNA (1)...(19): siRNA sense strand
caaggagggagaacaugua

SEQ ID NO: 265474 - RNA, 19 nt, Homo sapiens
  misc_RNA (1)...(19): siRNA sense strand
gacccucgcgaucuuaaua

SEQ ID NO: 265475 - RNA, 19 nt, Homo sapiens
  misc_RNA (1)...(19): siRNA sense strand
caaaaguaauuccugauga

SEQ ID NO: 265476 - RNA, 19 nt, Homo sapiens
  misc_RNA (1)...(19): siRNA sense strand
gggccauccuugcaauauu

SEQ ID NO: 265477 - RNA, 19 nt, Homo sapiens
  misc_RNA (1)...(19): siRNA sense strand
gaccaagaaccucggaauu

SEQ ID NO: 265478 - RNA, 19 nt, Homo sapiens
  misc_RNA (1)...(19): siRNA sense strand
cuuuacagcugcaaaucua

SEQ ID NO: 265479 - RNA, 19 nt, Homo sapiens
  misc_RNA (1)...(19): siRNA sense strand
cauguucccuccaaacuag

SEQ ID NO: 265480 - RNA, 19 nt, Homo sapiens
  misc_RNA (1)...(19): siRNA sense strand
gaugagggcccugagugua

SEQ ID NO: 265481 - RNA, 19 nt, Homo sapiens
  misc_RNA (1)...(19): siRNA sense strand
acagagaguuaauugacaa

SEQ ID NO: 265482 - RNA, 19 nt, Homo sapiens
  misc_RNA (1)...(19): siRNA sense strand
cauuuacucguacuucuua

SEQ ID NO: 265483 - RNA, 19 nt, Homo sapiens
  misc_RNA (1)...(19): siRNA sense strand
gagaugacaaaguguauuc

SEQ ID NO: 265484 - RNA, 19 nt, Homo sapiens
  misc_RNA (1)...(19): siRNA sense strand
gcaauauuguugggcauag

SEQ ID NO: 265485 - RNA, 19 nt, Homo sapiens
  misc_RNA (1)...(19): siRNA sense strand
agacagugaucaucugcaa

SEQ ID NO: 265486 - RNA, 19 nt, Homo sapiens
  misc_RNA (1)...(19): siRNA sense strand
caagaaccucggaauuuau

SEQ ID NO: 265487 - RNA, 19 nt, Homo sapiens
  misc_RNA (1)...(19): siRNA sense strand
aagcaugcaugaagagaug

SEQ ID NO: 265488 - RNA, 19 nt, Homo sapiens
  misc_RNA (1)...(19): siRNA sense strand
guggacaacugcagauaca

SEQ ID NO: 265489 - RNA, 19 nt, Homo sapiens
  misc_RNA (1)...(19): siRNA sense strand
gagauagacuuggcauguc

SEQ ID NO: 265490 - RNA, 19 nt, Homo sapiens
  misc_RNA (1)...(19): siRNA sense strand
ccuauaacagugagagaua

SEQ ID NO: 265491 - RNA, 19 nt, Homo sapiens
  misc_RNA (1)...(19): siRNA sense strand
ggcccacccuuugacuuua

SEQ ID NO: 265492 - RNA, 19 nt, Homo sapiens
  misc_RNA (1)...(19): siRNA sense strand
gaagugggaacaacaagca

SEQ ID NO: 265493 - RNA, 19 nt, Homo sapiens
  misc_RNA (1)...(19): siRNA sense strand
gcagaagugggaacaacaa

SEQ ID NO: 265494 - RNA, 19 nt, Homo sapiens
  misc_RNA (1)...(19): siRNA sense strand
gaagaaaagcaacagauga

SEQ ID NO: 265495 - RNA, 19 nt, Homo sapiens
  misc_RNA (1)...(19): siRNA sense strand
gaccacuugccaacauuua

SEQ ID NO: 265496 - RNA, 19 nt, Homo sapiens
  misc_RNA (1)...(19): siRNA sense strand
cugaaguacuccaucauug

SEQ ID NO: 265497 - RNA, 19 nt, Homo sapiens
  misc_RNA (1)...(19): siRNA sense strand
gcacuacugugggacaagu

SEQ ID NO: 265498 - RNA, 19 nt, Homo sapiens
  misc_RNA (1)...(19): siRNA sense strand
cuaacuggagagcuaauua

SEQ ID NO: 265499 - RNA, 19 nt, Homo sapiens
  misc_RNA (1)...(19): siRNA sense strand
gaagaugggcuugaauuuu

SEQ ID NO: 265500 - RNA, 19 nt, Homo sapiens
  misc_RNA (1)...(19): siRNA sense strand
ugauaacagcccauucaua

SEQ ID NO: 265501 - RNA, 19 nt, Homo sapiens
  misc_RNA (1)...(19): siRNA sense strand
gaaggaguucuuuguguag

SEQ ID NO: 265502 - RNA, 19 nt, Homo sapiens
  misc_RNA (1)...(19): siRNA sense strand
gcauaugacccagaaacaa

SEQ ID NO: 265503 - RNA, 19 nt, Homo sapiens
  misc_RNA (1)...(19): siRNA sense strand
gaagaagaugggcuugaau

SEQ ID NO: 265504 - RNA, 19 nt, Homo sapiens
  misc_RNA (1)...(19): siRNA sense strand
gagaauguggagacugaaa

SEQ ID NO: 265505 - RNA, 19 nt, Homo sapiens
  misc_RNA (1)...(19): siRNA sense strand
uucaacagguucaaucuga

SEQ ID NO: 265506 - RNA, 19 nt, Homo sapiens
  misc_RNA (1)...(19): siRNA sense strand
agacugaaagcaauuaaug

SEQ ID NO: 265507 - RNA, 19 nt, Homo sapiens
  misc_RNA (1)...(19): siRNA sense strand
gaguguaacccuccaauac

SEQ ID NO: 265508 - RNA, 19 nt, Homo sapiens
  misc_RNA (1)...(19): siRNA sense strand
gccuuugaauuaugaagaa

SEQ ID NO: 265509 - RNA, 19 nt, Homo sapiens
  misc_RNA (1)...(19): siRNA sense strand
caacaucaucucagcuaga

SEQ ID NO: 265510 - RNA, 19 nt, Homo sapiens
  misc_RNA (1)...(19): siRNA sense strand
ugagauaauugccuuugca

SEQ ID NO: 265511 - RNA, 19 nt, Homo sapiens
  misc_RNA (1)...(19): siRNA sense strand
ggagagagacacuggaaac

SEQ ID NO: 265512 - RNA, 19 nt, Homo sapiens
  misc_RNA (1)...(19): siRNA sense strand
gcccaaaacuauaccauau

SEQ ID NO: 265513 - RNA, 19 nt, Homo sapiens
  misc_RNA (1)...(19): siRNA sense strand
uaacuggagagcuaauuau

SEQ ID NO: 265514 - RNA, 19 nt, Homo sapiens
  misc_RNA (1)...(19): siRNA sense strand
gcaaacccaccaugucauc

SEQ ID NO: 265515 - RNA, 19 nt, Homo sapiens
  misc_RNA (1)...(19): siRNA sense strand
gaacaccgcuuauuucuau

SEQ ID NO: 265516 - RNA, 19 nt, Homo sapiens
  misc_RNA (1)...(19): siRNA sense strand
uagaagaccuggauaauuu

SEQ ID NO: 265517 - RNA, 19 nt, Homo sapiens
  misc_RNA (1)...(19): siRNA sense strand
gaagauacguucugcaaug

SEQ ID NO: 265518 - RNA, 19 nt, Homo sapiens
  misc_RNA (1)...(19): siRNA sense strand
ggaaagggauaaagcaaga

SEQ ID NO: 265519 - RNA, 19 nt, Homo sapiens
  misc_RNA (1)...(19): siRNA sense strand
caaagaacaccgcuuauuu

SEQ ID NO: 265520 - RNA, 19 nt, Homo sapiens
  misc_RNA (1)...(19): siRNA sense strand
uaaggcagcucccagaauu

SEQ ID NO: 265521 - RNA, 19 nt, Homo sapiens
  misc_RNA (1)...(19): siRNA sense strand
acacacaaaugaagacuuu

SEQ ID NO: 265522 - RNA, 19 nt, Homo sapiens
  misc_RNA (1)...(19): siRNA sense strand
ugaaauagccacaguaaug

SEQ ID NO: 265523 - RNA, 19 nt, Homo sapiens
  misc_RNA (1)...(19): siRNA sense strand
caagaagcauuuaaagaca

SEQ ID NO: 265524 - RNA, 19 nt, Homo sapiens
  misc_RNA (1)...(19): siRNA sense strand
gauaaagcaagaagcauuu

SEQ ID NO: 265525 - RNA, 19 nt, Homo sapiens
  misc_RNA (1)...(19): siRNA sense strand
caauagacuuggaaggaaa

SEQ ID NO: 265526 - RNA, 19 nt, Homo sapiens
  misc_RNA (1)...(19): siRNA sense strand
gcaagaagcauuuaaagac

SEQ ID NO: 265527 - RNA, 19 nt, Homo sapiens
  misc_RNA (1)...(19): siRNA sense strand
caucaacuaugacucagaa

SEQ ID NO: 265528 - RNA, 19 nt, Homo sapiens
  misc_RNA (1)...(19): siRNA sense strand
guacugugaugaccaugaa

SEQ ID NO: 265529 - RNA, 19 nt, Homo sapiens
  misc_RNA (1)...(19): siRNA sense strand
gauggaaacccuauuaauc

SEQ ID NO: 265530 - RNA, 19 nt, Homo sapiens
  misc_RNA (1)...(19): siRNA sense strand
uagaguccaucaacuauga

SEQ ID NO: 265531 - RNA, 19 nt, Homo sapiens
  misc_RNA (1)...(19): siRNA sense strand
ggauaaagcaagaagcauu

SEQ ID NO: 265532 - RNA, 19 nt, Homo sapiens
  misc_RNA (1)...(19): siRNA sense strand
gaacagagagcuccucacu

SEQ ID NO: 265533 - RNA, 19 nt, Homo sapiens
  misc_RNA (1)...(19): siRNA sense strand
gacauuagcaggacuuguu

SEQ ID NO: 265534 - RNA, 19 nt, Homo sapiens
  misc_RNA (1)...(19): siRNA sense strand
ccaaagaacaccgcuuauu

SEQ ID NO: 265535 - RNA, 19 nt, Homo sapiens
  misc_RNA (1)...(19): siRNA sense strand
gacauucgauuggauggaa

SEQ ID NO: 265536 - RNA, 19 nt, Homo sapiens
  misc_RNA (1)...(19): siRNA sense strand
gaaggaaagggauaaagca

SEQ ID NO: 265537 - RNA, 19 nt, Homo sapiens
  misc_RNA (1)...(19): siRNA sense strand
gcccuucaccuccagaaua

SEQ ID NO: 265538 - RNA, 19 nt, Homo sapiens
  misc_RNA (1)...(19): siRNA sense strand
aaagaacaccgcuuauuuc

SEQ ID NO: 265539 - RNA, 19 nt, Homo sapiens
  misc_RNA (1)...(19): siRNA sense strand
acaauagacuuggaaggaa

SEQ ID NO: 265540 - RNA, 19 nt, Homo sapiens
  misc_RNA (1)...(19): siRNA sense strand
guaccucacugauaacaac

SEQ ID NO: 265541 - RNA, 19 nt, Homo sapiens
  misc_RNA (1)...(19): siRNA sense strand
caucuguaccucacugaua

SEQ ID NO: 265542 - RNA, 19 nt, Homo sapiens
  misc_RNA (1)...(19): siRNA sense strand
ggauggaaacccuauuaau

SEQ ID NO: 265543 - RNA, 19 nt, Homo sapiens
  misc_RNA (1)...(19): siRNA sense strand
ugucuuugguguacuugua

SEQ ID NO: 265544 - RNA, 19 nt, Homo sapiens
  misc_RNA (1)...(19): siRNA sense strand
guaaggcacuagaggacau

SEQ ID NO: 265545 - RNA, 19 nt, Homo sapiens
  misc_RNA (1)...(19): siRNA sense strand
ccaugaacuugaugcuauu

SEQ ID NO: 265546 - RNA, 19 nt, Homo sapiens
  misc_RNA (1)...(19): siRNA sense strand
aaccuaugaugccaccuua

SEQ ID NO: 265547 - RNA, 19 nt, Homo sapiens
  misc_RNA (1)...(19): siRNA sense strand
cccuucaccuccagaauaa

SEQ ID NO: 265548 - RNA, 19 nt, Homo sapiens
  misc_RNA (1)...(19): siRNA sense strand
gaagaugcauuccgaaaac

SEQ ID NO: 265549 - RNA, 19 nt, Homo sapiens
  misc_RNA (1)...(19): siRNA sense strand
caaccugucuuugguguac

SEQ ID NO: 265550 - RNA, 19 nt, Homo sapiens
  misc_RNA (1)...(19): siRNA sense strand
gaaauagccacaguaaugc

SEQ ID NO: 265551 - RNA, 19 nt, Homo sapiens
  misc_RNA (1)...(19): siRNA sense strand
agacauguaugaucuccau

SEQ ID NO: 265552 - RNA, 19 nt, Homo sapiens
  misc_RNA (1)...(19): siRNA sense strand
gugaugaccaugaacuuga

SEQ ID NO: 265553 - RNA, 19 nt, Homo sapiens
  misc_RNA (1)...(19): siRNA sense strand
accaugaacuugaugcuau

SEQ ID NO: 265554 - RNA, 19 nt, Homo sapiens
  misc_RNA (1)...(19): siRNA sense strand
guauaaguaccaccgugua

SEQ ID NO: 265555 - RNA, 19 nt, Homo sapiens
  misc_RNA (1)...(19): siRNA sense strand
gcaagccuaagugauuuaa

SEQ ID NO: 265556 - RNA, 19 nt, Homo sapiens
  misc_RNA (1)...(19): siRNA sense strand
gaagacauuagcaggacuu

SEQ ID NO: 265557 - RNA, 19 nt, Homo sapiens
  misc_RNA (1)...(19): siRNA sense strand
ugccaaagaacaccgcuua

SEQ ID NO: 265558 - RNA, 19 nt, Homo sapiens
  misc_RNA (1)...(19): siRNA sense strand
uuagaagaccuggauaauu

SEQ ID NO: 265559 - RNA, 19 nt, Homo sapiens
  misc_RNA (1)...(19): siRNA sense strand
ggaaacccuauuaaucuca

SEQ ID NO: 265560 - RNA, 19 nt, Homo sapiens
  misc_RNA (1)...(19): siRNA sense strand
ggaaggaaagggauaaagc

SEQ ID NO: 265561 - RNA, 19 nt, Homo sapiens
  misc_RNA (1)...(19): siRNA sense strand
uagcaacaauagacuugga

SEQ ID NO: 265562 - RNA, 19 nt, Homo sapiens
  misc_RNA (1)...(19): siRNA sense strand
ugagauugaugaagaugca

SEQ ID NO: 265563 - RNA, 19 nt, Homo sapiens
  misc_RNA (1)...(19): siRNA sense strand
uuauuucuauucccgcuuu

SEQ ID NO: 265564 - RNA, 19 nt, Homo sapiens
  misc_RNA (1)...(19): siRNA sense strand
gaagaccuggauaauuugu

SEQ ID NO: 265565 - RNA, 19 nt, Homo sapiens
  misc_RNA (1)...(19): siRNA sense strand
ggaaaugcacgaagauacg

SEQ ID NO: 265566 - RNA, 19 nt, Homo sapiens
  misc_RNA (1)...(19): siRNA sense strand
uugcaagccuaagugauuu

SEQ ID NO: 265567 - RNA, 19 nt, Homo sapiens
  misc_RNA (1)...(19): siRNA sense strand
gauugaaauagccacagua

SEQ ID NO: 265568 - RNA, 19 nt, Homo sapiens
  misc_RNA (1)...(19): siRNA sense strand
ccucacugauaacaacuug

SEQ ID NO: 265569 - RNA, 19 nt, Homo sapiens
  misc_RNA (1)...(19): siRNA sense strand
agaagcauuuaaagacaug

SEQ ID NO: 265570 - RNA, 19 nt, Homo sapiens
  misc_RNA (1)...(19): siRNA sense strand
ggacuuguucugggacuug

SEQ ID NO: 265571 - RNA, 19 nt, Homo sapiens
  misc_RNA (1)...(19): siRNA sense strand
gaccaugaacuugaugcua

SEQ ID NO: 265572 - RNA, 19 nt, Homo sapiens
  misc_RNA (1)...(19): siRNA sense strand
uagaggacauucgauugga

SEQ ID NO: 265573 - RNA, 19 nt, Homo sapiens
  misc_RNA (1)...(19): siRNA sense strand
gaagaggaggaggaaucua

SEQ ID NO: 265574 - RNA, 19 nt, Homo sapiens
  misc_RNA (1)...(19): siRNA sense strand
ucugggacuugucaucuug

SEQ ID NO: 265575 - RNA, 19 nt, Homo sapiens
  misc_RNA (1)...(19): siRNA sense strand
ucacugauaacaacuugga

SEQ ID NO: 265576 - RNA, 19 nt, Homo sapiens
  misc_RNA (1)...(19): siRNA sense strand
gaaagggauaaagcaagaa

SEQ ID NO: 265577 - RNA, 19 nt, Homo sapiens
  misc_RNA (1)...(19): siRNA sense strand
gcugauugauggcucuucu

SEQ ID NO: 265578 - RNA, 19 nt, Homo sapiens
  misc_RNA (1)...(19): siRNA sense strand
ggaagaggaggaggaaucu

SEQ ID NO: 265579 - RNA, 19 nt, Homo sapiens
  misc_RNA (1)...(19): siRNA sense strand
ccuccagaauaacaacauu

SEQ ID NO: 265580 - RNA, 19 nt, Homo sapiens
  misc_RNA (1)...(19): siRNA sense strand
cauaccuguugauaaaguu

SEQ ID NO: 265581 - RNA, 19 nt, Homo sapiens
  misc_RNA (1)...(19): siRNA sense strand
ccuaugaugccaccuuaga

SEQ ID NO: 265582 - RNA, 19 nt, Homo sapiens
  misc_RNA (1)...(19): siRNA sense strand
gaaggcccaggaagaggaa

SEQ ID NO: 265583 - RNA, 19 nt, Homo sapiens
  misc_RNA (1)...(19): siRNA sense strand
guaaugccuucagggaaca

SEQ ID NO: 265584 - RNA, 19 nt, Homo sapiens
  misc_RNA (1)...(19): siRNA sense strand
uauucccgcuuuaacagaa

SEQ ID NO: 265585 - RNA, 19 nt, Homo sapiens
  misc_RNA (1)...(19): siRNA sense strand
agaccuggauaauuuguac

SEQ ID NO: 265586 - RNA, 19 nt, Homo sapiens
  misc_RNA (1)...(19): siRNA sense strand
acauaccuguugauaaagu

SEQ ID NO: 265587 - RNA, 19 nt, Homo sapiens
  misc_RNA (1)...(19): siRNA sense strand
gcauuuaaagacauguaug

SEQ ID NO: 265588 - RNA, 19 nt, Homo sapiens
  misc_RNA (1)...(19): siRNA sense strand
guugauaaaguugagauug

SEQ ID NO: 265589 - RNA, 19 nt, Homo sapiens
  misc_RNA (1)...(19): siRNA sense strand
uuggauggaaacccuauua

SEQ ID NO: 265590 - RNA, 19 nt, Homo sapiens
  misc_RNA (1)...(19): siRNA sense strand
aucuguaccucacugauaa

SEQ ID NO: 265591 - RNA, 19 nt, Homo sapiens
  misc_RNA (1)...(19): siRNA sense strand
ccuuagaagaccuggauaa

SEQ ID NO: 265592 - RNA, 19 nt, Homo sapiens
  misc_RNA (1)...(19): siRNA sense strand
ugaugaccaugaacuugau

SEQ ID NO: 265593 - RNA, 19 nt, Homo sapiens
  misc_RNA (1)...(19): siRNA sense strand
uuugcaagccuaagugauu

SEQ ID NO: 265594 - RNA, 19 nt, Homo sapiens
  misc_RNA (1)...(19): siRNA sense strand
uggaaacccuauuaaucuc

SEQ ID NO: 265595 - RNA, 19 nt, Homo sapiens
  misc_RNA (1)...(19): siRNA sense strand
gaaaugcacgaagauacgu

SEQ ID NO: 265596 - RNA, 19 nt, Homo sapiens
  misc_RNA (1)...(19): siRNA sense strand
uaacaacuuggaccacauc

SEQ ID NO: 265597 - RNA, 19 nt, Homo sapiens
  misc_RNA (1)...(19): siRNA sense strand
aaugaagacuuuccaaccu

SEQ ID NO: 265598 - RNA, 19 nt, Homo sapiens
  misc_RNA (1)...(19): siRNA sense strand
gcacuagaggacauucgau

SEQ ID NO: 265599 - RNA, 19 nt, Homo sapiens
  misc_RNA (1)...(19): siRNA sense strand
aacaauagacuuggaagga

SEQ ID NO: 265600 - RNA, 19 nt, Homo sapiens
  misc_RNA (1)...(19): siRNA sense strand
uuccuccgcugccaaagaa

SEQ ID NO: 265601 - RNA, 19 nt, Homo sapiens
  misc_RNA (1)...(19): siRNA sense strand
ggccacacacaaaugaaga

SEQ ID NO: 265602 - RNA, 19 nt, Homo sapiens
  misc_RNA (1)...(19): siRNA sense strand
guccaucaacuaugacuca

SEQ ID NO: 265603 - RNA, 19 nt, Homo sapiens
  misc_RNA (1)...(19): siRNA sense strand
cugagaaggcccaggaaga

SEQ ID NO: 265604 - RNA, 19 nt, Homo sapiens
  misc_RNA (1)...(19): siRNA sense strand
uggauggaaacccuauuaa

SEQ ID NO: 265605 - RNA, 19 nt, Homo sapiens
  misc_RNA (1)...(19): siRNA sense strand
ucuagaguccaucaacuau

SEQ ID NO: 265606 - RNA, 19 nt, Homo sapiens
  misc_RNA (1)...(19): siRNA sense strand
ucuuugguguacuuguaua

SEQ ID NO: 265607 - RNA, 19 nt, Homo sapiens
  misc_RNA (1)...(19): siRNA sense strand
gacuuuccaaccugucuuu

SEQ ID NO: 265608 - RNA, 19 nt, Homo sapiens
  misc_RNA (1)...(19): siRNA sense strand
cgaagauacguucugcaau

SEQ ID NO: 265609 - RNA, 19 nt, Homo sapiens
  misc_RNA (1)...(19): siRNA sense strand
acgaagauacguucugcaa

SEQ ID NO: 265610 - RNA, 19 nt, Homo sapiens
  misc_RNA (1)...(19): siRNA sense strand
agauugaaauagccacagu

SEQ ID NO: 265611 - RNA, 19 nt, Homo sapiens
  misc_RNA (1)...(19): siRNA sense strand
ugagaaggcccaggaagag

SEQ ID NO: 265612 - RNA, 19 nt, Homo sapiens
  misc_RNA (1)...(19): siRNA sense strand
cacuagaggacauucgauu

SEQ ID NO: 265613 - RNA, 19 nt, Homo sapiens
  misc_RNA (1)...(19): siRNA sense strand
auugaaauagccacaguaa

SEQ ID NO: 265614 - RNA, 19 nt, Homo sapiens
  misc_RNA (1)...(19): siRNA sense strand
agcaagaagcauuuaaaga

SEQ ID NO: 265615 - RNA, 19 nt, Homo sapiens
  misc_RNA (1)...(19): siRNA sense strand
gaaaucugguguaaacaaa

SEQ ID NO: 265616 - RNA, 19 nt, Homo sapiens
  misc_RNA (1)...(19): siRNA sense strand
gcaggaggcugaaaggauu

SEQ ID NO: 265617 - RNA, 19 nt, Homo sapiens
  misc_RNA (1)...(19): siRNA sense strand
gcaagucaguguaucgauu

SEQ ID NO: 265618 - RNA, 19 nt, Homo sapiens
  misc_RNA (1)...(19): siRNA sense strand
ggauauguacuuccacuua

SEQ ID NO: 265619 - RNA, 19 nt, Homo sapiens
  misc_RNA (1)...(19): siRNA sense strand
uaacugcgcuaguguuuua

SEQ ID NO: 265620 - RNA, 19 nt, Homo sapiens
  misc_RNA (1)...(19): siRNA sense strand
gggcauguuucauaggaua

SEQ ID NO: 265621 - RNA, 19 nt, Homo sapiens
  misc_RNA (1)...(19): siRNA sense strand
gauauguacuuccacuuau

SEQ ID NO: 265622 - RNA, 19 nt, Homo sapiens
  misc_RNA (1)...(19): siRNA sense strand
gaugauacauuccaagucu

SEQ ID NO: 265623 - RNA, 19 nt, Homo sapiens
  misc_RNA (1)...(19): siRNA sense strand
ugagaaaucugguguaaac

SEQ ID NO: 265624 - RNA, 19 nt, Homo sapiens
  misc_RNA (1)...(19): siRNA sense strand
cuucagaacugccaaacaa

SEQ ID NO: 265625 - RNA, 19 nt, Homo sapiens
  misc_RNA (1)...(19): siRNA sense strand
agacauucguuccagauuu

SEQ ID NO: 265626 - RNA, 19 nt, Homo sapiens
  misc_RNA (1)...(19): siRNA sense strand
agagaaagguuaugaggau

SEQ ID NO: 265627 - RNA, 19 nt, Homo sapiens
  misc_RNA (1)...(19): siRNA sense strand
gugcauauuugucuggauu

SEQ ID NO: 265628 - RNA, 19 nt, Homo sapiens
  misc_RNA (1)...(19): siRNA sense strand
aaacgcagaugaugauaca

SEQ ID NO: 265629 - RNA, 19 nt, Homo sapiens
  misc_RNA (1)...(19): siRNA sense strand
cuaaaucucuucccuggau

SEQ ID NO: 265630 - RNA, 19 nt, Homo sapiens
  misc_RNA (1)...(19): siRNA sense strand
gauaacugcgcuaguguuu

SEQ ID NO: 265631 - RNA, 19 nt, Homo sapiens
  misc_RNA (1)...(19): siRNA sense strand
guaaaggguauaagagaaa

SEQ ID NO: 265632 - RNA, 19 nt, Homo sapiens
  misc_RNA (1)...(19): siRNA sense strand
uuuaugaccugccugagua

SEQ ID NO: 265633 - RNA, 19 nt, Homo sapiens
  misc_RNA (1)...(19): siRNA sense strand
guacuuccacuuauaauca

SEQ ID NO: 265634 - RNA, 19 nt, Homo sapiens
  misc_RNA (1)...(19): siRNA sense strand
aagcuucguuucucuaauu

SEQ ID NO: 265635 - RNA, 19 nt, Homo sapiens
  misc_RNA (1)...(19): siRNA sense strand
gaaaugacugugaccucua

SEQ ID NO: 265636 - RNA, 19 nt, Homo sapiens
  misc_RNA (1)...(19): siRNA sense strand
gacauucguuccagauuuc

SEQ ID NO: 265637 - RNA, 19 nt, Homo sapiens
  misc_RNA (1)...(19): siRNA sense strand
ucucugcacuuuacaguau

SEQ ID NO: 265638 - RNA, 19 nt, Homo sapiens
  misc_RNA (1)...(19): siRNA sense strand
ugucuggauucuaguauuu

SEQ ID NO: 265639 - RNA, 19 nt, Homo sapiens
  misc_RNA (1)...(19): siRNA sense strand
ucauugggcucgugggaaa

SEQ ID NO: 265640 - RNA, 19 nt, Homo sapiens
  misc_RNA (1)...(19): siRNA sense strand
ggguauaagagaaagguua

SEQ ID NO: 265641 - RNA, 19 nt, Homo sapiens
  misc_RNA (1)...(19): siRNA sense strand
gcauguaaaggguauaaga

SEQ ID NO: 265642 - RNA, 19 nt, Homo sapiens
  misc_RNA (1)...(19): siRNA sense strand
caguaugccugaugaacuu

SEQ ID NO: 265643 - RNA, 19 nt, Homo sapiens
  misc_RNA (1)...(19): siRNA sense strand
ccucuacgcuacaacaaga

SEQ ID NO: 265644 - RNA, 19 nt, Homo sapiens
  misc_RNA (1)...(19): siRNA sense strand
gcucucaacacaauuauuc

SEQ ID NO: 265645 - RNA, 19 nt, Homo sapiens
  misc_RNA (1)...(19): siRNA sense strand
caagucaguguaucgauuu

SEQ ID NO: 265646 - RNA, 19 nt, Homo sapiens
  misc_RNA (1)...(19): siRNA sense strand
uguaaaggguauaagagaa

SEQ ID NO: 265647 - RNA, 19 nt, Homo sapiens
  misc_RNA (1)...(19): siRNA sense strand
cuacacgaauagccuacua

SEQ ID NO: 265648 - RNA, 19 nt, Homo sapiens
  misc_RNA (1)...(19): siRNA sense strand
ccacuuauaaucauucuca

SEQ ID NO: 265649 - RNA, 19 nt, Homo sapiens
  misc_RNA (1)...(19): siRNA sense strand
ucacagcacggccaggaua

SEQ ID NO: 265650 - RNA, 19 nt, Homo sapiens
  misc_RNA (1)...(19): siRNA sense strand
uaggauaacugcgcuagug

SEQ ID NO: 265651 - RNA, 19 nt, Homo sapiens
  misc_RNA (1)...(19): siRNA sense strand
gcaaaaggcgugugcauau

SEQ ID NO: 265652 - RNA, 19 nt, Homo sapiens
  misc_RNA (1)...(19): siRNA sense strand
gaaacggcaagucagugua

SEQ ID NO: 265653 - RNA, 19 nt, Homo sapiens
  misc_RNA (1)...(19): siRNA sense strand
cuacuucuuugcauguaaa

SEQ ID NO: 265654 - RNA, 19 nt, Homo sapiens
  misc_RNA (1)...(19): siRNA sense strand
gaaacuuacuagccuuggu

SEQ ID NO: 265655 - RNA, 19 nt, Homo sapiens
  misc_RNA (1)...(19): siRNA sense strand
gaagcuucguuucucuaau

SEQ ID NO: 265656 - RNA, 19 nt, Homo sapiens
  misc_RNA (1)...(19): siRNA sense strand
uuucacaccuuaccauguu

SEQ ID NO: 265657 - RNA, 19 nt, Homo sapiens
  misc_RNA (1)...(19): siRNA sense strand
ugaccugccugaguauuga

SEQ ID NO: 265658 - RNA, 19 nt, Homo sapiens
  misc_RNA (1)...(19): siRNA sense strand
ucucagaucugcugcaaac

SEQ ID NO: 265659 - RNA, 19 nt, Homo sapiens
  misc_RNA (1)...(19): siRNA sense strand
gcaggugugaacuuuauga

SEQ ID NO: 265660 - RNA, 19 nt, Homo sapiens
  misc_RNA (1)...(19): siRNA sense strand
aaaugacugugaccucuau

SEQ ID NO: 265661 - RNA, 19 nt, Homo sapiens
  misc_RNA (1)...(19): siRNA sense strand
aaaggcgugugcauauuug

SEQ ID NO: 265662 - RNA, 19 nt, Homo sapiens
  misc_RNA (1)...(19): siRNA sense strand
uaaucauucucaucugcua

SEQ ID NO: 265663 - RNA, 19 nt, Homo sapiens
  misc_RNA (1)...(19): siRNA sense strand
gucaguguaucgauuucua

SEQ ID NO: 265664 - RNA, 19 nt, Homo sapiens
  misc_RNA (1)...(19): siRNA sense strand
acugagaaaucugguguaa

SEQ ID NO: 265665 - RNA, 19 nt, Homo sapiens
  misc_RNA (1)...(19): siRNA sense strand
ugacagaaacgcagaugau

SEQ ID NO: 265666 - RNA, 19 nt, Homo sapiens
  misc_RNA (1)...(19): siRNA sense strand
gcugcaaacucuucagaac

SEQ ID NO: 265667 - RNA, 19 nt, Homo sapiens
  misc_RNA (1)...(19): siRNA sense strand
gaguauugaccgcuucauu

SEQ ID NO: 265668 - RNA, 19 nt, Homo sapiens
  misc_RNA (1)...(19): siRNA sense strand
cagaaacgcagaugaugau

SEQ ID NO: 265669 - RNA, 19 nt, Homo sapiens
  misc_RNA (1)...(19): siRNA sense strand
ugauuaagaagcuucguuu

SEQ ID NO: 265670 - RNA, 19 nt, Homo sapiens
  misc_RNA (1)...(19): siRNA sense strand
caacuccucagggaaauga

SEQ ID NO: 265671 - RNA, 19 nt, Homo sapiens
  misc_RNA (1)...(19): siRNA sense strand
ccuggaauguagccaaaga

SEQ ID NO: 265672 - RNA, 19 nt, Homo sapiens
  misc_RNA (1)...(19): siRNA sense strand
caaaaggcgugugcauauu

SEQ ID NO: 265673 - RNA, 19 nt, Homo sapiens
  misc_RNA (1)...(19): siRNA sense strand
ugcaaacucuucagaacug

SEQ ID NO: 265674 - RNA, 19 nt, Homo sapiens
  misc_RNA (1)...(19): siRNA sense strand
ucaucaacccuaugucaaa

SEQ ID NO: 265675 - RNA, 19 nt, Homo sapiens
  misc_RNA (1)...(19): siRNA sense strand
ggauaacugcgcuaguguu

SEQ ID NO: 265676 - RNA, 19 nt, Homo sapiens
  misc_RNA (1)...(19): siRNA sense strand
acagaaacgcagaugauga

SEQ ID NO: 265677 - RNA, 19 nt, Homo sapiens
  misc_RNA (1)...(19): siRNA sense strand
caucaacccuaugucaaag

SEQ ID NO: 265678 - RNA, 19 nt, Homo sapiens
  misc_RNA (1)...(19): siRNA sense strand
gaaacgcagaugaugauac

SEQ ID NO: 265679 - RNA, 19 nt, Homo sapiens
  misc_RNA (1)...(19): siRNA sense strand
ucacgugaaaugacagaaa

SEQ ID NO: 265680 - RNA, 19 nt, Homo sapiens
  misc_RNA (1)...(19): siRNA sense strand
aaaaggcucucaacacaau

SEQ ID NO: 265681 - RNA, 19 nt, Homo sapiens
  misc_RNA (1)...(19): siRNA sense strand
gcucgugggaaacuuacua

SEQ ID NO: 265682 - RNA, 19 nt, Homo sapiens
  misc_RNA (1)...(19): siRNA sense strand
cugaaaggauuacaugcau

SEQ ID NO: 265683 - RNA, 19 nt, Homo sapiens
  misc_RNA (1)...(19): siRNA sense strand
agaaaucugguguaaacaa

SEQ ID NO: 265684 - RNA, 19 nt, Homo sapiens
  misc_RNA (1)...(19): siRNA sense strand
caaagcaggaggcugaaag

SEQ ID NO: 265685 - RNA, 19 nt, Homo sapiens
  misc_RNA (1)...(19): siRNA sense strand
uaaaggguauaagagaaag

SEQ ID NO: 265686 - RNA, 19 nt, Homo sapiens
  misc_RNA (1)...(19): siRNA sense strand
cagcacggccaggauagua

SEQ ID NO: 265687 - RNA, 19 nt, Homo sapiens
  misc_RNA (1)...(19): siRNA sense strand
gaucugcugcaaacucuuc

SEQ ID NO: 265688 - RNA, 19 nt, Homo sapiens
  misc_RNA (1)...(19): siRNA sense strand
cagaucugcugcaaacucu

SEQ ID NO: 265689 - RNA, 19 nt, Homo sapiens
  misc_RNA (1)...(19): siRNA sense strand
gcugaaaggauuacaugca

SEQ ID NO: 265690 - RNA, 19 nt, Homo sapiens
  misc_RNA (1)...(19): siRNA sense strand
auauuugucuggauucuag

SEQ ID NO: 265691 - RNA, 19 nt, Homo sapiens
  misc_RNA (1)...(19): siRNA sense strand
gacagaaacgcagaugaug

SEQ ID NO: 265692 - RNA, 19 nt, Homo sapiens
  misc_RNA (1)...(19): siRNA sense strand
gcauggacccuuuuaucua

SEQ ID NO: 265693 - RNA, 19 nt, Homo sapiens
  misc_RNA (1)...(19): siRNA sense strand
agauuucucugcacuuuac

SEQ ID NO: 265694 - RNA, 19 nt, Homo sapiens
  misc_RNA (1)...(19): siRNA sense strand
gcauuacagccucgucuuc

SEQ ID NO: 265695 - RNA, 19 nt, Homo sapiens
  misc_RNA (1)...(19): siRNA sense strand
ggauuacaugcauggagua

SEQ ID NO: 265696 - RNA, 19 nt, Homo sapiens
  misc_RNA (1)...(19): siRNA sense strand
augcaggugugaacuuuau

SEQ ID NO: 265697 - RNA, 19 nt, Homo sapiens
  misc_RNA (1)...(19): siRNA sense strand
gcacggccaggauaguaau

SEQ ID NO: 265698 - RNA, 19 nt, Homo sapiens
  misc_RNA (1)...(19): siRNA sense strand
aaacggcaagucaguguau

SEQ ID NO: 265699 - RNA, 19 nt, Homo sapiens
  misc_RNA (1)...(19): siRNA sense strand
gaaagguuaugaggaugcu

SEQ ID NO: 265700 - RNA, 19 nt, Homo sapiens
  misc_RNA (1)...(19): siRNA sense strand
uuacaugcauggaguaucc

SEQ ID NO: 265701 - RNA, 19 nt, Homo sapiens
  misc_RNA (1)...(19): siRNA sense strand
ucuaguauuugcucagaca

SEQ ID NO: 265702 - RNA, 19 nt, Homo sapiens
  misc_RNA (1)...(19): siRNA sense strand
cuaccacccucuauucaac

SEQ ID NO: 265703 - RNA, 19 nt, Homo sapiens
  misc_RNA (1)...(19): siRNA sense strand
auaugcaggugugaacuuu

SEQ ID NO: 265704 - RNA, 19 nt, Homo sapiens
  misc_RNA (1)...(19): siRNA sense strand
gucuucaaauggaaaguga

SEQ ID NO: 265705 - RNA, 19 nt, Homo sapiens
  misc_RNA (1)...(19): siRNA sense strand
cgcagaugaugauacauuc

SEQ ID NO: 265706 - RNA, 19 nt, Homo sapiens
  misc_RNA (1)...(19): siRNA sense strand
cuuaccauguugcaauuau

SEQ ID NO: 265707 - RNA, 19 nt, Homo sapiens
  misc_RNA (1)...(19): siRNA sense strand
cacccucuauucaacaaau

SEQ ID NO: 265708 - RNA, 19 nt, Homo sapiens
  misc_RNA (1)...(19): siRNA sense strand
gcauauuugucuggauucu

SEQ ID NO: 265709 - RNA, 19 nt, Homo sapiens
  misc_RNA (1)...(19): siRNA sense strand
aguauugaccgcuucauug

SEQ ID NO: 265710 - RNA, 19 nt, Homo sapiens
  misc_RNA (1)...(19): siRNA sense strand
acgcagaugaugauacauu

SEQ ID NO: 265711 - RNA, 19 nt, Homo sapiens
  misc_RNA (1)...(19): siRNA sense strand
caacucuaccacccucuau

SEQ ID NO: 265712 - RNA, 19 nt, Homo sapiens
  misc_RNA (1)...(19): siRNA sense strand
ccucaucaacccuauguca

SEQ ID NO: 265713 - RNA, 19 nt, Homo sapiens
  misc_RNA (1)...(19): siRNA sense strand
ugaaacggcaagucagugu

SEQ ID NO: 265714 - RNA, 19 nt, Homo sapiens
  misc_RNA (1)...(19): siRNA sense strand
gauauacaaauggcaaaca

SEQ ID NO: 265715 - RNA, 19 nt, Homo sapiens
  misc_RNA (1)...(19): siRNA sense strand
gcggagagguauuugauua

SEQ ID NO: 265716 - RNA, 19 nt, Homo sapiens
  misc_RNA (1)...(19): siRNA sense strand
gaaugaaccugaaagcaaa

SEQ ID NO: 265717 - RNA, 19 nt, Homo sapiens
  misc_RNA (1)...(19): siRNA sense strand
ucacgaagaugaugaacua

SEQ ID NO: 265718 - RNA, 19 nt, Homo sapiens
  misc_RNA (1)...(19): siRNA sense strand
ggaaagagguagcugugaa

SEQ ID NO: 265719 - RNA, 19 nt, Homo sapiens
  misc_RNA (1)...(19): siRNA sense strand
ggaacaagcuggacaccuu

SEQ ID NO: 265720 - RNA, 19 nt, Homo sapiens
  misc_RNA (1)...(19): siRNA sense strand
gaaacuauuccgcgaagua

SEQ ID NO: 265721 - RNA, 19 nt, Homo sapiens
  misc_RNA (1)...(19): siRNA sense strand
gauaugaacaucaagauug

SEQ ID NO: 265722 - RNA, 19 nt, Homo sapiens
  misc_RNA (1)...(19): siRNA sense strand
gagaggcacuuuagagcaa

SEQ ID NO: 265723 - RNA, 19 nt, Homo sapiens
  misc_RNA (1)...(19): siRNA sense strand
gaaccugaaugaaccugaa

SEQ ID NO: 265724 - RNA, 19 nt, Homo sapiens
  misc_RNA (1)...(19): siRNA sense strand
gaaugugggucacgaagau

SEQ ID NO: 265725 - RNA, 19 nt, Homo sapiens
  misc_RNA (1)...(19): siRNA sense strand
aaagaucgauggaugaaug

SEQ ID NO: 265726 - RNA, 19 nt, Homo sapiens
  misc_RNA (1)...(19): siRNA sense strand
gcaaugaauucaccuuugg

SEQ ID NO: 265727 - RNA, 19 nt, Homo sapiens
  misc_RNA (1)...(19): siRNA sense strand
caucaagauugcagacuuu

SEQ ID NO: 265728 - RNA, 19 nt, Homo sapiens
  misc_RNA (1)...(19): siRNA sense strand
caaguucaccuccaaguuu

SEQ ID NO: 265729 - RNA, 19 nt, Homo sapiens
  misc_RNA (1)...(19): siRNA sense strand
gcucuuggaugcugauaug

SEQ ID NO: 265730 - RNA, 19 nt, Homo sapiens
  misc_RNA (1)...(19): siRNA sense strand
gagcaaaucaugaaagauc

SEQ ID NO: 265731 - RNA, 19 nt, Homo sapiens
  misc_RNA (1)...(19): siRNA sense strand
gaaguuggcccgacacauc

SEQ ID NO: 265732 - RNA, 19 nt, Homo sapiens
  misc_RNA (1)...(19): siRNA sense strand
gaaguuuauuguccauaga

SEQ ID NO: 265733 - RNA, 19 nt, Homo sapiens
  misc_RNA (1)...(19): siRNA sense strand
gaagaucauugacaagacu

SEQ ID NO: 265734 - RNA, 19 nt, Homo sapiens
  misc_RNA (1)...(19): siRNA sense strand
uagagcaaaucaugaaaga

SEQ ID NO: 265735 - RNA, 19 nt, Homo sapiens
  misc_RNA (1)...(19): siRNA sense strand
cgaagaugaugaacuaaag

SEQ ID NO: 265736 - RNA, 19 nt, Homo sapiens
  misc_RNA (1)...(19): siRNA sense strand
ugacaagacucaacugaac

SEQ ID NO: 265737 - RNA, 19 nt, Homo sapiens
  misc_RNA (1)...(19): siRNA sense strand
gugaaaaccugcuuaagaa

SEQ ID NO: 265738 - RNA, 19 nt, Homo sapiens
  misc_RNA (1)...(19): siRNA sense strand
gacuuuggcuucagcaaug

SEQ ID NO: 265739 - RNA, 19 nt, Homo sapiens
  misc_RNA (1)...(19): siRNA sense strand
gaauucaccuuugggaaca

SEQ ID NO: 265740 - RNA, 19 nt, Homo sapiens
  misc_RNA (1)...(19): siRNA sense strand
augaugaacuaaagccuua

SEQ ID NO: 265741 - RNA, 19 nt, Homo sapiens
  misc_RNA (1)...(19): siRNA sense strand
gggagcaucuucagcaagu

SEQ ID NO: 265742 - RNA, 19 nt, Homo sapiens
  misc_RNA (1)...(19): siRNA sense strand
ugaaugaaccugaaagcaa

SEQ ID NO: 265743 - RNA, 19 nt, Homo sapiens
  misc_RNA (1)...(19): siRNA sense strand
gcaguacugucaccagaag

SEQ ID NO: 265744 - RNA, 19 nt, Homo sapiens
  misc_RNA (1)...(19): siRNA sense strand
aaacauugccuccaaaaua

SEQ ID NO: 265745 - RNA, 19 nt, Homo sapiens
  misc_RNA (1)...(19): siRNA sense strand
gcacaaaucgaagcaggaa

SEQ ID NO: 265746 - RNA, 19 nt, Homo sapiens
  misc_RNA (1)...(19): siRNA sense strand
gcaccuccauggccuucaa

SEQ ID NO: 265747 - RNA, 19 nt, Homo sapiens
  misc_RNA (1)...(19): siRNA sense strand
aaucaucccaacauaguua

SEQ ID NO: 265748 - RNA, 19 nt, Homo sapiens
  misc_RNA (1)...(19): siRNA sense strand
gaaacuaccggcuccucaa

SEQ ID NO: 265749 - RNA, 19 nt, Homo sapiens
  misc_RNA (1)...(19): siRNA sense strand
gcaaguucaccuccaaguu

SEQ ID NO: 265750 - RNA, 19 nt, Homo sapiens
  misc_RNA (1)...(19): siRNA sense strand
agagguagcugugaagauc

SEQ ID NO: 265751 - RNA, 19 nt, Homo sapiens
  misc_RNA (1)...(19): siRNA sense strand
acaaaucgaagcaggaauu

SEQ ID NO: 265752 - RNA, 19 nt, Homo sapiens
  misc_RNA (1)...(19): siRNA sense strand
caagagaggcacuuuagag

SEQ ID NO: 265753 - RNA, 19 nt, Homo sapiens
  misc_RNA (1)...(19): siRNA sense strand
gcaagagaggcacuuuaga

SEQ ID NO: 265754 - RNA, 19 nt, Homo sapiens
  misc_RNA (1)...(19): siRNA sense strand
ggaguuauccucuauacac

SEQ ID NO: 265755 - RNA, 19 nt, Homo sapiens
  misc_RNA (1)...(19): siRNA sense strand
uauuguccauagagacuua

SEQ ID NO: 265756 - RNA, 19 nt, Homo sapiens
  misc_RNA (1)...(19): siRNA sense strand
cagcaagagaggcacuuua

SEQ ID NO: 265757 - RNA, 19 nt, Homo sapiens
  misc_RNA (1)...(19): siRNA sense strand
ccucuaauucuuacucuaa

SEQ ID NO: 265758 - RNA, 19 nt, Homo sapiens
  misc_RNA (1)...(19): siRNA sense strand
guguggagccuaggaguua

SEQ ID NO: 265759 - RNA, 19 nt, Homo sapiens
  misc_RNA (1)...(19): siRNA sense strand
gaaagagguagcugugaag

SEQ ID NO: 265760 - RNA, 19 nt, Homo sapiens
  misc_RNA (1)...(19): siRNA sense strand
cguauuccauucuacaugu

SEQ ID NO: 265761 - RNA, 19 nt, Homo sapiens
  misc_RNA (1)...(19): siRNA sense strand
uugaagugauugagacuga

SEQ ID NO: 265762 - RNA, 19 nt, Homo sapiens
  misc_RNA (1)...(19): siRNA sense strand
cagaaaaccugcucuugga

SEQ ID NO: 265763 - RNA, 19 nt, Homo sapiens
  misc_RNA (1)...(19): siRNA sense strand
gaagugauugagacugaga

SEQ ID NO: 265764 - RNA, 19 nt, Homo sapiens
  misc_RNA (1)...(19): siRNA sense strand
aaacuauuccgcgaaguaa

SEQ ID NO: 265765 - RNA, 19 nt, Homo sapiens
  misc_RNA (1)...(19): siRNA sense strand
ggagauggaggugugcaaa

SEQ ID NO: 265766 - RNA, 19 nt, Homo sapiens
  misc_RNA (1)...(19): siRNA sense strand
agaaguuuauuguccauag

SEQ ID NO: 265767 - RNA, 19 nt, Homo sapiens
  misc_RNA (1)...(19): siRNA sense strand
gugaagaucauugacaaga

SEQ ID NO: 265768 - RNA, 19 nt, Homo sapiens
  misc_RNA (1)...(19): siRNA sense strand
cagcaaugaauucaccuuu

SEQ ID NO: 265769 - RNA, 19 nt, Homo sapiens
  misc_RNA (1)...(19): siRNA sense strand
ugaaucaucccaacauagu

SEQ ID NO: 265770 - RNA, 19 nt, Homo sapiens
  misc_RNA (1)...(19): siRNA sense strand
gcggaucccugccuuuuga

SEQ ID NO: 265771 - RNA, 19 nt, Homo sapiens
  misc_RNA (1)...(19): siRNA sense strand
ucagcaaguucaccuccaa

SEQ ID NO: 265772 - RNA, 19 nt, Homo sapiens
  misc_RNA (1)...(19): siRNA sense strand
uuugaaucaucccaacaua

SEQ ID NO: 265773 - RNA, 19 nt, Homo sapiens
  misc_RNA (1)...(19): siRNA sense strand
agaaaacgcucuaccuugu

SEQ ID NO: 265774 - RNA, 19 nt, Homo sapiens
  misc_RNA (1)...(19): siRNA sense strand
gaaucaucccaacauaguu

SEQ ID NO: 265775 - RNA, 19 nt, Homo sapiens
  misc_RNA (1)...(19): siRNA sense strand
ccauggagcccaacgagau

SEQ ID NO: 265776 - RNA, 19 nt, Homo sapiens
  misc_RNA (1)...(19): siRNA sense strand
ugaaagaucgauggaugaa

SEQ ID NO: 265777 - RNA, 19 nt, Homo sapiens
  misc_RNA (1)...(19): siRNA sense strand
gaaaaccugcuuaagaaau

SEQ ID NO: 265778 - RNA, 19 nt, Homo sapiens
  misc_RNA (1)...(19): siRNA sense strand
acaucaagauugcagacuu

SEQ ID NO: 265779 - RNA, 19 nt, Homo sapiens
  misc_RNA (1)...(19): siRNA sense strand
caaauuccgccagauagug

SEQ ID NO: 265780 - RNA, 19 nt, Homo sapiens
  misc_RNA (1)...(19): siRNA sense strand
gagcaucuucagcaaguuc

SEQ ID NO: 265781 - RNA, 19 nt, Homo sapiens
  misc_RNA (1)...(19): siRNA sense strand
gcgacaccaucacccugaa

SEQ ID NO: 265782 - RNA, 19 nt, Homo sapiens
  misc_RNA (1)...(19): siRNA sense strand
guacugucaccagaaguuu

SEQ ID NO: 265783 - RNA, 19 nt, Homo sapiens
  misc_RNA (1)...(19): siRNA sense strand
guaacaacgcagaaaauaa

SEQ ID NO: 265784 - RNA, 19 nt, Homo sapiens
  misc_RNA (1)...(19): siRNA sense strand
cauggcaggaugaaagaaa

SEQ ID NO: 265785 - RNA, 19 nt, Homo sapiens
  misc_RNA (1)...(19): siRNA sense strand
aaguucaccuccaaguuug

SEQ ID NO: 265786 - RNA, 19 nt, Homo sapiens
  misc_RNA (1)...(19): siRNA sense strand
gaguuauccucuauacacu

SEQ ID NO: 265787 - RNA, 19 nt, Homo sapiens
  misc_RNA (1)...(19): siRNA sense strand
agcaaugaauucaccuuug

SEQ ID NO: 265788 - RNA, 19 nt, Homo sapiens
  misc_RNA (1)...(19): siRNA sense strand
cugugaagaucauugacaa

SEQ ID NO: 265789 - RNA, 19 nt, Homo sapiens
  misc_RNA (1)...(19): siRNA sense strand
gagauacaacgaggugaug

SEQ ID NO: 265790 - RNA, 19 nt, Homo sapiens
  misc_RNA (1)...(19): siRNA sense strand
gccacucccugacuacaag

SEQ ID NO: 265791 - RNA, 19 nt, Homo sapiens
  misc_RNA (1)...(19): siRNA sense strand
cgaaguaagaauaaugaag

SEQ ID NO: 265792 - RNA, 19 nt, Homo sapiens
  misc_RNA (1)...(19): siRNA sense strand
gaaagaucgauggaugaau

SEQ ID NO: 265793 - RNA, 19 nt, Homo sapiens
  misc_RNA (1)...(19): siRNA sense strand
ccagaaguuuauuguccau

SEQ ID NO: 265794 - RNA, 19 nt, Homo sapiens
  misc_RNA (1)...(19): siRNA sense strand
ugaagaucauugacaagac

SEQ ID NO: 265795 - RNA, 19 nt, Homo sapiens
  misc_RNA (1)...(19): siRNA sense strand
gcaaaucaugaaagaucga

SEQ ID NO: 265796 - RNA, 19 nt, Homo sapiens
  misc_RNA (1)...(19): siRNA sense strand
gagccaaauuccgccagau

SEQ ID NO: 265797 - RNA, 19 nt, Homo sapiens
  misc_RNA (1)...(19): siRNA sense strand
uaacaacgcagaaaauaag

SEQ ID NO: 265798 - RNA, 19 nt, Homo sapiens
  misc_RNA (1)...(19): siRNA sense strand
cagaguaacaacgcagaaa

SEQ ID NO: 265799 - RNA, 19 nt, Homo sapiens
  misc_RNA (1)...(19): siRNA sense strand
gggaaagagguagcuguga

SEQ ID NO: 265800 - RNA, 19 nt, Homo sapiens
  misc_RNA (1)...(19): siRNA sense strand
ccaaauuccgccagauagu

SEQ ID NO: 265801 - RNA, 19 nt, Homo sapiens
  misc_RNA (1)...(19): siRNA sense strand
gccaaauuccgccagauag

SEQ ID NO: 265802 - RNA, 19 nt, Homo sapiens
  misc_RNA (1)...(19): siRNA sense strand
acgaagaugaugaacuaaa

SEQ ID NO: 265803 - RNA, 19 nt, Homo sapiens
  misc_RNA (1)...(19): siRNA sense strand
ggagcaucuucagcaaguu

SEQ ID NO: 265804 - RNA, 19 nt, Homo sapiens
  misc_RNA (1)...(19): siRNA sense strand
gugcgggaccagcagaauu

SEQ ID NO: 265805 - RNA, 19 nt, Homo sapiens
  misc_RNA (1)...(19): siRNA sense strand
gcuaguggcggagagguau

SEQ ID NO: 265806 - RNA, 19 nt, Homo sapiens
  misc_RNA (1)...(19): siRNA sense strand
caacgggguucgauuuaag

SEQ ID NO: 265807 - RNA, 19 nt, Homo sapiens
  misc_RNA (1)...(19): siRNA sense strand
ggucuggagaggaagaaga

SEQ ID NO: 265808 - RNA, 19 nt, Homo sapiens
  misc_RNA (1)...(19): siRNA sense strand
gaugaaugugggucacgaa

SEQ ID NO: 265809 - RNA, 19 nt, Homo sapiens
  misc_RNA (1)...(19): siRNA sense strand
gaggcacuuuagagcaaau

SEQ ID NO: 265810 - RNA, 19 nt, Homo sapiens
  misc_RNA (1)...(19): siRNA sense strand
agccaaauuccgccagaua

SEQ ID NO: 265811 - RNA, 19 nt, Homo sapiens
  misc_RNA (1)...(19): siRNA sense strand
gcugugaagaucauugaca

SEQ ID NO: 265812 - RNA, 19 nt, Homo sapiens
  misc_RNA (1)...(19): siRNA sense strand
ugcgggaccagcagaauuu

SEQ ID NO: 265813 - RNA, 19 nt, Homo sapiens
  misc_RNA (1)...(19): siRNA sense strand
caaaucgaagcaggaauuc

SEQ ID NO: 265814 - RNA, 19 nt, Homo sapiens
  misc_RNA (1)...(19): siRNA sense strand
gaagaugaugaacuaaagc

SEQ ID NO: 265815 - RNA, 19 nt, Homo sapiens
  misc_RNA (1)...(19): siRNA sense strand
gcggagagguauuugauua

SEQ ID NO: 265816 - RNA, 19 nt, Homo sapiens
  misc_RNA (1)...(19): siRNA sense strand
gaaugaaccugaaagcaaa

SEQ ID NO: 265817 - RNA, 19 nt, Homo sapiens
  misc_RNA (1)...(19): siRNA sense strand
ucacgaagaugaugaacua

SEQ ID NO: 265818 - RNA, 19 nt, Homo sapiens
  misc_RNA (1)...(19): siRNA sense strand
ggaaagagguagcugugaa

SEQ ID NO: 265819 - RNA, 19 nt, Homo sapiens
  misc_RNA (1)...(19): siRNA sense strand
ggaacaagcuggacaccuu

SEQ ID NO: 265820 - RNA, 19 nt, Homo sapiens
  misc_RNA (1)...(19): siRNA sense strand
gaaacuauuccgcgaagua

SEQ ID NO: 265821 - RNA, 19 nt, Homo sapiens
  misc_RNA (1)...(19): siRNA sense strand
gauaugaacaucaagauug

SEQ ID NO: 265822 - RNA, 19 nt, Homo sapiens
  misc_RNA (1)...(19): siRNA sense strand
gagaggcacuuuagagcaa

SEQ ID NO: 265823 - RNA, 19 nt, Homo sapiens
  misc_RNA (1)...(19): siRNA sense strand
gaaccugaaugaaccugaa

SEQ ID NO: 265824 - RNA, 19 nt, Homo sapiens
  misc_RNA (1)...(19): siRNA sense strand
gaaugugggucacgaagau

SEQ ID NO: 265825 - RNA, 19 nt, Homo sapiens
  misc_RNA (1)...(19): siRNA sense strand
aaagaucgauggaugaaug

SEQ ID NO: 265826 - RNA, 19 nt, Homo sapiens
  misc_RNA (1)...(19): siRNA sense strand
gcaaugaauucaccuuugg

SEQ ID NO: 265827 - RNA, 19 nt, Homo sapiens
  misc_RNA (1)...(19): siRNA sense strand
caucaagauugcagacuuu

SEQ ID NO: 265828 - RNA, 19 nt, Homo sapiens
  misc_RNA (1)...(19): siRNA sense strand
caaguucaccuccaaguuu

SEQ ID NO: 265829 - RNA, 19 nt, Homo sapiens
  misc_RNA (1)...(19): siRNA sense strand
gcucuuggaugcugauaug

SEQ ID NO: 265830 - RNA, 19 nt, Homo sapiens
  misc_RNA (1)...(19): siRNA sense strand
gagcaaaucaugaaagauc

SEQ ID NO: 265831 - RNA, 19 nt, Homo sapiens
  misc_RNA (1)...(19): siRNA sense strand
gaaguuggcccgacacauc

SEQ ID NO: 265832 - RNA, 19 nt, Homo sapiens
  misc_RNA (1)...(19): siRNA sense strand
gaaguuuauuguccauaga

SEQ ID NO: 265833 - RNA, 19 nt, Homo sapiens
  misc_RNA (1)...(19): siRNA sense strand
gaagaucauugacaagacu

SEQ ID NO: 265834 - RNA, 19 nt, Homo sapiens
  misc_RNA (1)...(19): siRNA sense strand
uagagcaaaucaugaaaga

SEQ ID NO: 265835 - RNA, 19 nt, Homo sapiens
  misc_RNA (1)...(19): siRNA sense strand
cgaagaugaugaacuaaag

SEQ ID NO: 265836 - RNA, 19 nt, Homo sapiens
  misc_RNA (1)...(19): siRNA sense strand
ugacaagacucaacugaac

SEQ ID NO: 265837 - RNA, 19 nt, Homo sapiens
  misc_RNA (1)...(19): siRNA sense strand
gugaaaaccugcuuaagaa

SEQ ID NO: 265838 - RNA, 19 nt, Homo sapiens
  misc_RNA (1)...(19): siRNA sense strand
gacuuuggcuucagcaaug

SEQ ID NO: 265839 - RNA, 19 nt, Homo sapiens
  misc_RNA (1)...(19): siRNA sense strand
gaauucaccuuugggaaca

SEQ ID NO: 265840 - RNA, 19 nt, Homo sapiens
  misc_RNA (1)...(19): siRNA sense strand
augaugaacuaaagccuua

SEQ ID NO: 265841 - RNA, 19 nt, Homo sapiens
  misc_RNA (1)...(19): siRNA sense strand
gggagcaucuucagcaagu

SEQ ID NO: 265842 - RNA, 19 nt, Homo sapiens
  misc_RNA (1)...(19): siRNA sense strand
ugaaugaaccugaaagcaa

SEQ ID NO: 265843 - RNA, 19 nt, Homo sapiens
  misc_RNA (1)...(19): siRNA sense strand
gcaguacugucaccagaag

SEQ ID NO: 265844 - RNA, 19 nt, Homo sapiens
  misc_RNA (1)...(19): siRNA sense strand
aaacauugccuccaaaaua

SEQ ID NO: 265845 - RNA, 19 nt, Homo sapiens
  misc_RNA (1)...(19): siRNA sense strand
gcacaaaucgaagcaggaa

SEQ ID NO: 265846 - RNA, 19 nt, Homo sapiens
  misc_RNA (1)...(19): siRNA sense strand
gcaccuccauggccuucaa

SEQ ID NO: 265847 - RNA, 19 nt, Homo sapiens
  misc_RNA (1)...(19): siRNA sense strand
aaucaucccaacauaguua

SEQ ID NO: 265848 - RNA, 19 nt, Homo sapiens
  misc_RNA (1)...(19): siRNA sense strand
gaaacuaccggcuccucaa

SEQ ID NO: 265849 - RNA, 19 nt, Homo sapiens
  misc_RNA (1)...(19): siRNA sense strand
gcaaguucaccuccaaguu

SEQ ID NO: 265850 - RNA, 19 nt, Homo sapiens
  misc_RNA (1)...(19): siRNA sense strand
agagguagcugugaagauc

SEQ ID NO: 265851 - RNA, 19 nt, Homo sapiens
  misc_RNA (1)...(19): siRNA sense strand
acaaaucgaagcaggaauu

SEQ ID NO: 265852 - RNA, 19 nt, Homo sapiens
  misc_RNA (1)...(19): siRNA sense strand
caagagaggcacuuuagag

SEQ ID NO: 265853 - RNA, 19 nt, Homo sapiens
  misc_RNA (1)...(19): siRNA sense strand
gcaagagaggcacuuuaga

SEQ ID NO: 265854 - RNA, 19 nt, Homo sapiens
  misc_RNA (1)...(19): siRNA sense strand
ggaguuauccucuauacac

SEQ ID NO: 265855 - RNA, 19 nt, Homo sapiens
  misc_RNA (1)...(19): siRNA sense strand
uauuguccauagagacuua

SEQ ID NO: 265856 - RNA, 19 nt, Homo sapiens
  misc_RNA (1)...(19): siRNA sense strand
cagcaagagaggcacuuua

SEQ ID NO: 265857 - RNA, 19 nt, Homo sapiens
  misc_RNA (1)...(19): siRNA sense strand
ccucuaauucuuacucuaa

SEQ ID NO: 265858 - RNA, 19 nt, Homo sapiens
  misc_RNA (1)...(19): siRNA sense strand
guguggagccuaggaguua

SEQ ID NO: 265859 - RNA, 19 nt, Homo sapiens
  misc_RNA (1)...(19): siRNA sense strand
gaaagagguagcugugaag

SEQ ID NO: 265860 - RNA, 19 nt, Homo sapiens
  misc_RNA (1)...(19): siRNA sense strand
cguauuccauucuacaugu

SEQ ID NO: 265861 - RNA, 19 nt, Homo sapiens
  misc_RNA (1)...(19): siRNA sense strand
uugaagugauugagacuga

SEQ ID NO: 265862 - RNA, 19 nt, Homo sapiens
  misc_RNA (1)...(19): siRNA sense strand
cagaaaaccugcucuugga

SEQ ID NO: 265863 - RNA, 19 nt, Homo sapiens
  misc_RNA (1)...(19): siRNA sense strand
gaagugauugagacugaga

SEQ ID NO: 265864 - RNA, 19 nt, Homo sapiens
  misc_RNA (1)...(19): siRNA sense strand
aaacuauuccgcgaaguaa

SEQ ID NO: 265865 - RNA, 19 nt, Homo sapiens
  misc_RNA (1)...(19): siRNA sense strand
ggagauggaggugugcaaa

SEQ ID NO: 265866 - RNA, 19 nt, Homo sapiens
  misc_RNA (1)...(19): siRNA sense strand
agaaguuuauuguccauag

SEQ ID NO: 265867 - RNA, 19 nt, Homo sapiens
  misc_RNA (1)...(19): siRNA sense strand
gugaagaucauugacaaga

SEQ ID NO: 265868 - RNA, 19 nt, Homo sapiens
  misc_RNA (1)...(19): siRNA sense strand
cagcaaugaauucaccuuu

SEQ ID NO: 265869 - RNA, 19 nt, Homo sapiens
  misc_RNA (1)...(19): siRNA sense strand
ugaaucaucccaacauagu

SEQ ID NO: 265870 - RNA, 19 nt, Homo sapiens
  misc_RNA (1)...(19): siRNA sense strand
gcggaucccugccuuuuga

SEQ ID NO: 265871 - RNA, 19 nt, Homo sapiens
  misc_RNA (1)...(19): siRNA sense strand
ucagcaaguucaccuccaa

SEQ ID NO: 265872 - RNA, 19 nt, Homo sapiens
  misc_RNA (1)...(19): siRNA sense strand
uuugaaucaucccaacaua

SEQ ID NO: 265873 - RNA, 19 nt, Homo sapiens
  misc_RNA (1)...(19): siRNA sense strand
agaaaacgcucuaccuugu

SEQ ID NO: 265874 - RNA, 19 nt, Homo sapiens
  misc_RNA (1)...(19): siRNA sense strand
gaaucaucccaacauaguu

SEQ ID NO: 265875 - RNA, 19 nt, Homo sapiens
  misc_RNA (1)...(19): siRNA sense strand
ccauggagcccaacgagau

SEQ ID NO: 265876 - RNA, 19 nt, Homo sapiens
  misc_RNA (1)...(19): siRNA sense strand
ugaaagaucgauggaugaa

SEQ ID NO: 265877 - RNA, 19 nt, Homo sapiens
  misc_RNA (1)...(19): siRNA sense strand
gaaaaccugcuuaagaaau

SEQ ID NO: 265878 - RNA, 19 nt, Homo sapiens
  misc_RNA (1)...(19): siRNA sense strand
acaucaagauugcagacuu

SEQ ID NO: 265879 - RNA, 19 nt, Homo sapiens
  misc_RNA (1)...(19): siRNA sense strand
caaauuccgccagauagug

SEQ ID NO: 265880 - RNA, 19 nt, Homo sapiens
  misc_RNA (1)...(19): siRNA sense strand
gagcaucuucagcaaguuc

SEQ ID NO: 265881 - RNA, 19 nt, Homo sapiens
  misc_RNA (1)...(19): siRNA sense strand
gcgacaccaucacccugaa

SEQ ID NO: 265882 - RNA, 19 nt, Homo sapiens
  misc_RNA (1)...(19): siRNA sense strand
guacugucaccagaaguuu

SEQ ID NO: 265883 - RNA, 19 nt, Homo sapiens
  misc_RNA (1)...(19): siRNA sense strand
guaacaacgcagaaaauaa

SEQ ID NO: 265884 - RNA, 19 nt, Homo sapiens
  misc_RNA (1)...(19): siRNA sense strand
cauggcaggaugaaagaaa

SEQ ID NO: 265885 - RNA, 19 nt, Homo sapiens
  misc_RNA (1)...(19): siRNA sense strand
aaguucaccuccaaguuug

SEQ ID NO: 265886 - RNA, 19 nt, Homo sapiens
  misc_RNA (1)...(19): siRNA sense strand
gaguuauccucuauacacu

SEQ ID NO: 265887 - RNA, 19 nt, Homo sapiens
  misc_RNA (1)...(19): siRNA sense strand
agcaaugaauucaccuuug

SEQ ID NO: 265888 - RNA, 19 nt, Homo sapiens
  misc_RNA (1)...(19): siRNA sense strand
cugugaagaucauugacaa

SEQ ID NO: 265889 - RNA, 19 nt, Homo sapiens
  misc_RNA (1)...(19): siRNA sense strand
gagauacaacgaggugaug

SEQ ID NO: 265890 - RNA, 19 nt, Homo sapiens
  misc_RNA (1)...(19): siRNA sense strand
gccacucccugacuacaag

SEQ ID NO: 265891 - RNA, 19 nt, Homo sapiens
  misc_RNA (1)...(19): siRNA sense strand
cgaaguaagaauaaugaag

SEQ ID NO: 265892 - RNA, 19 nt, Homo sapiens
  misc_RNA (1)...(19): siRNA sense strand
gaaagaucgauggaugaau

SEQ ID NO: 265893 - RNA, 19 nt, Homo sapiens
  misc_RNA (1)...(19): siRNA sense strand
ccagaaguuuauuguccau

SEQ ID NO: 265894 - RNA, 19 nt, Homo sapiens
  misc_RNA (1)...(19): siRNA sense strand
ugaagaucauugacaagac

SEQ ID NO: 265895 - RNA, 19 nt, Homo sapiens
  misc_RNA (1)...(19): siRNA sense strand
gcaaaucaugaaagaucga

SEQ ID NO: 265896 - RNA, 19 nt, Homo sapiens
  misc_RNA (1)...(19): siRNA sense strand
gagccaaauuccgccagau

SEQ ID NO: 265897 - RNA, 19 nt, Homo sapiens
  misc_RNA (1)...(19): siRNA sense strand
uaacaacgcagaaaauaag

SEQ ID NO: 265898 - RNA, 19 nt, Homo sapiens
  misc_RNA (1)...(19): siRNA sense strand
cagaguaacaacgcagaaa

SEQ ID NO: 265899 - RNA, 19 nt, Homo sapiens
  misc_RNA (1)...(19): siRNA sense strand
gggaaagagguagcuguga

SEQ ID NO: 265900 - RNA, 19 nt, Homo sapiens
  misc_RNA (1)...(19): siRNA sense strand
ccaaauuccgccagauagu

SEQ ID NO: 265901 - RNA, 19 nt, Homo sapiens
  misc_RNA (1)...(19): siRNA sense strand
gccaaauuccgccagauag

SEQ ID NO: 265902 - RNA, 19 nt, Homo sapiens
  misc_RNA (1)...(19): siRNA sense strand
acgaagaugaugaacuaaa

SEQ ID NO: 265903 - RNA, 19 nt, Homo sapiens
  misc_RNA (1)...(19): siRNA sense strand
ggagcaucuucagcaaguu

SEQ ID NO: 265904 - RNA, 19 nt, Homo sapiens
  misc_RNA (1)...(19): siRNA sense strand
gugcgggaccagcagaauu

SEQ ID NO: 265905 - RNA, 19 nt, Homo sapiens
  misc_RNA (1)...(19): siRNA sense strand
gcuaguggcggagagguau

SEQ ID NO: 265906 - RNA, 19 nt, Homo sapiens
  misc_RNA (1)...(19): siRNA sense strand
caacgggguucgauuuaag

SEQ ID NO: 265907 - RNA, 19 nt, Homo sapiens
  misc_RNA (1)...(19): siRNA sense strand
ggucuggagaggaagaaga

SEQ ID NO: 265908 - RNA, 19 nt, Homo sapiens
  misc_RNA (1)...(19): siRNA sense strand
gaugaaugugggucacgaa

SEQ ID NO: 265909 - RNA, 19 nt, Homo sapiens
  misc_RNA (1)...(19): siRNA sense strand
gaggcacuuuagagcaaau

SEQ ID NO: 265910 - RNA, 19 nt, Homo sapiens
  misc_RNA (1)...(19): siRNA sense strand
agccaaauuccgccagaua

SEQ ID NO: 265911 - RNA, 19 nt, Homo sapiens
  misc_RNA (1)...(19): siRNA sense strand
gcugugaagaucauugaca

SEQ ID NO: 265912 - RNA, 19 nt, Homo sapiens
  misc_RNA (1)...(19): siRNA sense strand
ugcgggaccagcagaauuu

SEQ ID NO: 265913 - RNA, 19 nt, Homo sapiens
  misc_RNA (1)...(19): siRNA sense strand
caaaucgaagcaggaauuc

SEQ ID NO: 265914 - RNA, 19 nt, Homo sapiens
  misc_RNA (1)...(19): siRNA sense strand
gaagaugaugaacuaaagc

SEQ ID NO: 265915 - RNA, 19 nt, Homo sapiens
  misc_RNA (1)...(19): siRNA sense strand
gaaacaaagucaacugaga

SEQ ID NO: 265916 - RNA, 19 nt, Homo sapiens
  misc_RNA (1)...(19): siRNA sense strand
acacuauccugaguaauua

SEQ ID NO: 265917 - RNA, 19 nt, Homo sapiens
  misc_RNA (1)...(19): siRNA sense strand
ugaacacuauccugaguaa

SEQ ID NO: 265918 - RNA, 19 nt, Homo sapiens
  misc_RNA (1)...(19): siRNA sense strand
gaguaauuaugaccacaaa

SEQ ID NO: 265919 - RNA, 19 nt, Homo sapiens
  misc_RNA (1)...(19): siRNA sense strand
gggaucaccucuguucuga

SEQ ID NO: 265920 - RNA, 19 nt, Homo sapiens
  misc_RNA (1)...(19): siRNA sense strand
ucacagccuuggauuucua

SEQ ID NO: 265921 - RNA, 19 nt, Homo sapiens
  misc_RNA (1)...(19): siRNA sense strand
ccgcgugucuccuauauca

SEQ ID NO: 265922 - RNA, 19 nt, Homo sapiens
  misc_RNA (1)...(19): siRNA sense strand
ggaauacaccauugacauc

SEQ ID NO: 265923 - RNA, 19 nt, Homo sapiens
  misc_RNA (1)...(19): siRNA sense strand
gcaagcguuuuaagaagua

SEQ ID NO: 265924 - RNA, 19 nt, Homo sapiens
  misc_RNA (1)...(19): siRNA sense strand
ucaacuuccugaucuacaa

SEQ ID NO: 265925 - RNA, 19 nt, Homo sapiens
  misc_RNA (1)...(19): siRNA sense strand
gaauacaccauugacauca

SEQ ID NO: 265926 - RNA, 19 nt, Homo sapiens
  misc_RNA (1)...(19): siRNA sense strand
cagacugaaucaaagaaug

SEQ ID NO: 265927 - RNA, 19 nt, Homo sapiens
  misc_RNA (1)...(19): siRNA sense strand
gugcucaacuuccugaucu

SEQ ID NO: 265928 - RNA, 19 nt, Homo sapiens
  misc_RNA (1)...(19): siRNA sense strand
gccaacaucaggaagcuuu

SEQ ID NO: 265929 - RNA, 19 nt, Homo sapiens
  misc_RNA (1)...(19): siRNA sense strand
acgaugcucuccuggguuu

SEQ ID NO: 265930 - RNA, 19 nt, Homo sapiens
  misc_RNA (1)...(19): siRNA sense strand
aaacuccgccauccucgua

SEQ ID NO: 265931 - RNA, 19 nt, Homo sapiens
  misc_RNA (1)...(19): siRNA sense strand
aaacugcgcccuggcauug

SEQ ID NO: 265932 - RNA, 19 nt, Homo sapiens
  misc_RNA (1)...(19): siRNA sense strand
cccagugacuuucuucuuc

SEQ ID NO: 265933 - RNA, 19 nt, Homo sapiens
  misc_RNA (1)...(19): siRNA sense strand
guaauuaugaccacaaacu

SEQ ID NO: 265934 - RNA, 19 nt, Homo sapiens
  misc_RNA (1)...(19): siRNA sense strand
agacugaaucaaagaauga

SEQ ID NO: 265935 - RNA, 19 nt, Homo sapiens
  misc_RNA (1)...(19): siRNA sense strand
caauggauucucacucuug

SEQ ID NO: 265936 - RNA, 19 nt, Homo sapiens
  misc_RNA (1)...(19): siRNA sense strand
ggaguuugcugugcucaac

SEQ ID NO: 265937 - RNA, 19 nt, Homo sapiens
  misc_RNA (1)...(19): siRNA sense strand
aacacuauccugaguaauu

SEQ ID NO: 265938 - RNA, 19 nt, Homo sapiens
  misc_RNA (1)...(19): siRNA sense strand
gccagauugucaccacuga

SEQ ID NO: 265939 - RNA, 19 nt, Homo sapiens
  misc_RNA (1)...(19): siRNA sense strand
uaucacagccuuggauuuc

SEQ ID NO: 265940 - RNA, 19 nt, Homo sapiens
  misc_RNA (1)...(19): siRNA sense strand
gcaggcgguuuggcuaugu

SEQ ID NO: 265941 - RNA, 19 nt, Homo sapiens
  misc_RNA (1)...(19): siRNA sense strand
ccaauggauucucacucuu

SEQ ID NO: 265942 - RNA, 19 nt, Homo sapiens
  misc_RNA (1)...(19): siRNA sense strand
ugaaaucaaugagaagaac

SEQ ID NO: 265943 - RNA, 19 nt, Homo sapiens
  misc_RNA (1)...(19): siRNA sense strand
uuacaggagugagcaacaa

SEQ ID NO: 265944 - RNA, 19 nt, Homo sapiens
  misc_RNA (1)...(19): siRNA sense strand
guuuggcuauguugccuuu

SEQ ID NO: 265945 - RNA, 19 nt, Homo sapiens
  misc_RNA (1)...(19): siRNA sense strand
gagacugggagcagaguug

SEQ ID NO: 265946 - RNA, 19 nt, Homo sapiens
  misc_RNA (1)...(19): siRNA sense strand
ccagugacuuucuucuucu

SEQ ID NO: 265947 - RNA, 19 nt, Homo sapiens
  misc_RNA (1)...(19): siRNA sense strand
gagcaggcgguuuggcuau

SEQ ID NO: 265948 - RNA, 19 nt, Homo sapiens
  misc_RNA (1)...(19): siRNA sense strand
gagcaacaaaacugaaaua

SEQ ID NO: 265949 - RNA, 19 nt, Homo sapiens
  misc_RNA (1)...(19): siRNA sense strand
acucuugcccucuaucuuu

SEQ ID NO: 265950 - RNA, 19 nt, Homo sapiens
  misc_RNA (1)...(19): siRNA sense strand
uuuccuauccugagaauga

SEQ ID NO: 265951 - RNA, 19 nt, Homo sapiens
  misc_RNA (1)...(19): siRNA sense strand
ucuaccgccuggauaacua

SEQ ID NO: 265952 - RNA, 19 nt, Homo sapiens
  misc_RNA (1)...(19): siRNA sense strand
ccuccuaggcaucuuauug

SEQ ID NO: 265953 - RNA, 19 nt, Homo sapiens
  misc_RNA (1)...(19): siRNA sense strand
ccauugacaucaucuucuc

SEQ ID NO: 265954 - RNA, 19 nt, Homo sapiens
  misc_RNA (1)...(19): siRNA sense strand
ugacuuucuucuucuucaa

SEQ ID NO: 265955 - RNA, 19 nt, Homo sapiens
  misc_RNA (1)...(19): siRNA sense strand
ccugaacacuauccugagu

SEQ ID NO: 265956 - RNA, 19 nt, Homo sapiens
  misc_RNA (1)...(19): siRNA sense strand
gugacuuucuucuucuuca

SEQ ID NO: 265957 - RNA, 19 nt, Homo sapiens
  misc_RNA (1)...(19): siRNA sense strand
gaggaaacaaagucaacug

SEQ ID NO: 265958 - RNA, 19 nt, Homo sapiens
  misc_RNA (1)...(19): siRNA sense strand
uaagaggacccacgagcau

SEQ ID NO: 265959 - RNA, 19 nt, Homo sapiens
  misc_RNA (1)...(19): siRNA sense strand
caaacugcgcccuggcauu

SEQ ID NO: 265960 - RNA, 19 nt, Homo sapiens
  misc_RNA (1)...(19): siRNA sense strand
gcccaugcuucuccuaaac

SEQ ID NO: 265961 - RNA, 19 nt, Homo sapiens
  misc_RNA (1)...(19): siRNA sense strand
aagcuggccugcugugagu

SEQ ID NO: 265962 - RNA, 19 nt, Homo sapiens
  misc_RNA (1)...(19): siRNA sense strand
uguggucacuguugagauc

SEQ ID NO: 265963 - RNA, 19 nt, Homo sapiens
  misc_RNA (1)...(19): siRNA sense strand
cuagggaucaccucuguuc

SEQ ID NO: 265964 - RNA, 19 nt, Homo sapiens
  misc_RNA (1)...(19): siRNA sense strand
aaaacuaugucccuucuuc

SEQ ID NO: 265965 - RNA, 19 nt, Homo sapiens
  misc_RNA (1)...(19): siRNA sense strand
ucucgcauccugaacacua

SEQ ID NO: 265966 - RNA, 19 nt, Homo sapiens
  misc_RNA (1)...(19): siRNA sense strand
gaugcucacuccacaugcu

SEQ ID NO: 265967 - RNA, 19 nt, Homo sapiens
  misc_RNA (1)...(19): siRNA sense strand
cgccauccucguaucaaua

SEQ ID NO: 265968 - RNA, 19 nt, Homo sapiens
  misc_RNA (1)...(19): siRNA sense strand
gcccuggcauuggagagaa

SEQ ID NO: 265969 - RNA, 19 nt, Homo sapiens
  misc_RNA (1)...(19): siRNA sense strand
aaugugagcaggcgguuug

SEQ ID NO: 265970 - RNA, 19 nt, Homo sapiens
  misc_RNA (1)...(19): siRNA sense strand
cccgugauguugucuaugg

SEQ ID NO: 265971 - RNA, 19 nt, Homo sapiens
  misc_RNA (1)...(19): siRNA sense strand
augcucagauuuccaaugg

SEQ ID NO: 265972 - RNA, 19 nt, Homo sapiens
  misc_RNA (1)...(19): siRNA sense strand
gaaaucaaugagaagaacu

SEQ ID NO: 265973 - RNA, 19 nt, Homo sapiens
  misc_RNA (1)...(19): siRNA sense strand
cccaguuggugacuucaug

SEQ ID NO: 265974 - RNA, 19 nt, Homo sapiens
  misc_RNA (1)...(19): siRNA sense strand
agccuuggauuucuauauc

SEQ ID NO: 265975 - RNA, 19 nt, Homo sapiens
  misc_RNA (1)...(19): siRNA sense strand
ucaccucuguucugaccau

SEQ ID NO: 265976 - RNA, 19 nt, Homo sapiens
  misc_RNA (1)...(19): siRNA sense strand
ucugcgcucuguuggaguu

SEQ ID NO: 265977 - RNA, 19 nt, Homo sapiens
  misc_RNA (1)...(19): siRNA sense strand
auacaccauugacaucauc

SEQ ID NO: 265978 - RNA, 19 nt, Homo sapiens
  misc_RNA (1)...(19): siRNA sense strand
gccauccucguaucaauag

SEQ ID NO: 265979 - RNA, 19 nt, Homo sapiens
  misc_RNA (1)...(19): siRNA sense strand
ccgccauccucguaucaau

SEQ ID NO: 265980 - RNA, 19 nt, Homo sapiens
  misc_RNA (1)...(19): siRNA sense strand
cagccuuggauuucuauau

SEQ ID NO: 265981 - RNA, 19 nt, Homo sapiens
  misc_RNA (1)...(19): siRNA sense strand
gcucuccuggguuuccuuu

SEQ ID NO: 265982 - RNA, 19 nt, Homo sapiens
  misc_RNA (1)...(19): siRNA sense strand
caccaugcccaaccagaug

SEQ ID NO: 265983 - RNA, 19 nt, Homo sapiens
  misc_RNA (1)...(19): siRNA sense strand
agaggacccacgagcauga

SEQ ID NO: 265984 - RNA, 19 nt, Homo sapiens
  misc_RNA (1)...(19): siRNA sense strand
gggaucaccucuguucuga

SEQ ID NO: 265985 - RNA, 19 nt, Homo sapiens
  misc_RNA (1)...(19): siRNA sense strand
ucacagccuuggauuucua

SEQ ID NO: 265986 - RNA, 19 nt, Homo sapiens
  misc_RNA (1)...(19): siRNA sense strand
ccgcgugucuccuauauca

SEQ ID NO: 265987 - RNA, 19 nt, Homo sapiens
  misc_RNA (1)...(19): siRNA sense strand
ggaauacaccauugacauc

SEQ ID NO: 265988 - RNA, 19 nt, Homo sapiens
  misc_RNA (1)...(19): siRNA sense strand
gcaagcguuuuaagaagua

SEQ ID NO: 265989 - RNA, 19 nt, Homo sapiens
  misc_RNA (1)...(19): siRNA sense strand
ucaacuuccugaucuacaa

SEQ ID NO: 265990 - RNA, 19 nt, Homo sapiens
  misc_RNA (1)...(19): siRNA sense strand
gaauacaccauugacauca

SEQ ID NO: 265991 - RNA, 19 nt, Homo sapiens
  misc_RNA (1)...(19): siRNA sense strand
gugcucaacuuccugaucu

SEQ ID NO: 265992 - RNA, 19 nt, Homo sapiens
  misc_RNA (1)...(19): siRNA sense strand
gccaacaucaggaagcuuu

SEQ ID NO: 265993 - RNA, 19 nt, Homo sapiens
  misc_RNA (1)...(19): siRNA sense strand
acgaugcucuccuggguuu

SEQ ID NO: 265994 - RNA, 19 nt, Homo sapiens
  misc_RNA (1)...(19): siRNA sense strand
aaacuccgccauccucgua

SEQ ID NO: 265995 - RNA, 19 nt, Homo sapiens
  misc_RNA (1)...(19): siRNA sense strand
cccagugacuuucuucuuc

SEQ ID NO: 265996 - RNA, 19 nt, Homo sapiens
  misc_RNA (1)...(19): siRNA sense strand
caauggauucucacucuug

SEQ ID NO: 265997 - RNA, 19 nt, Homo sapiens
  misc_RNA (1)...(19): siRNA sense strand
ggaguuugcugugcucaac

SEQ ID NO: 265998 - RNA, 19 nt, Homo sapiens
  misc_RNA (1)...(19): siRNA sense strand
ccaauggauucucacucuu

SEQ ID NO: 265999 - RNA, 19 nt, Homo sapiens
  misc_RNA (1)...(19): siRNA sense strand
gccagauugucaccacuga

SEQ ID NO: 266000 - RNA, 19 nt, Homo sapiens
  misc_RNA (1)...(19): siRNA sense strand
uaucacagccuuggauuuc

SEQ ID NO: 266001 - RNA, 19 nt, Homo sapiens
  misc_RNA (1)...(19): siRNA sense strand
gcaggcgguuuggcuaugu

SEQ ID NO: 266002 - RNA, 19 nt, Homo sapiens
  misc_RNA (1)...(19): siRNA sense strand
ugaaaucaaugagaagaac

SEQ ID NO: 266003 - RNA, 19 nt, Homo sapiens
  misc_RNA (1)...(19): siRNA sense strand
uuacaggagugagcaacaa

SEQ ID NO: 266004 - RNA, 19 nt, Homo sapiens
  misc_RNA (1)...(19): siRNA sense strand
guuuggcuauguugccuuu

SEQ ID NO: 266005 - RNA, 19 nt, Homo sapiens
  misc_RNA (1)...(19): siRNA sense strand
acucuugcccucuaucuuu

SEQ ID NO: 266006 - RNA, 19 nt, Homo sapiens
  misc_RNA (1)...(19): siRNA sense strand
ccagugacuuucuucuucu

SEQ ID NO: 266007 - RNA, 19 nt, Homo sapiens
  misc_RNA (1)...(19): siRNA sense strand
gagcaggcgguuuggcuau

SEQ ID NO: 266008 - RNA, 19 nt, Homo sapiens
  misc_RNA (1)...(19): siRNA sense strand
gagcaacaaaacugaaaua

SEQ ID NO: 266009 - RNA, 19 nt, Homo sapiens
  misc_RNA (1)...(19): siRNA sense strand
uuuccuauccugagaauga

SEQ ID NO: 266010 - RNA, 19 nt, Homo sapiens
  misc_RNA (1)...(19): siRNA sense strand
ucuaccgccuggauaacua

SEQ ID NO: 266011 - RNA, 19 nt, Homo sapiens
  misc_RNA (1)...(19): siRNA sense strand
ccauugacaucaucuucuc

SEQ ID NO: 266012 - RNA, 19 nt, Homo sapiens
  misc_RNA (1)...(19): siRNA sense strand
ugacuuucuucuucuucaa

SEQ ID NO: 266013 - RNA, 19 nt, Homo sapiens
  misc_RNA (1)...(19): siRNA sense strand
uaagaggacccacgagcau

SEQ ID NO: 266014 - RNA, 19 nt, Homo sapiens
  misc_RNA (1)...(19): siRNA sense strand
gugacuuucuucuucuuca

SEQ ID NO: 266015 - RNA, 19 nt, Homo sapiens
  misc_RNA (1)...(19): siRNA sense strand
gcccaugcuucuccuaaac

SEQ ID NO: 266016 - RNA, 19 nt, Homo sapiens
  misc_RNA (1)...(19): siRNA sense strand
aagcuggccugcugugagu

SEQ ID NO: 266017 - RNA, 19 nt, Homo sapiens
  misc_RNA (1)...(19): siRNA sense strand
aaaacuaugucccuucuuc

SEQ ID NO: 266018 - RNA, 19 nt, Homo sapiens
  misc_RNA (1)...(19): siRNA sense strand
cuagggaucaccucuguuc

SEQ ID NO: 266019 - RNA, 19 nt, Homo sapiens
  misc_RNA (1)...(19): siRNA sense strand
gaugcucacuccacaugcu

SEQ ID NO: 266020 - RNA, 19 nt, Homo sapiens
  misc_RNA (1)...(19): siRNA sense strand
cgccauccucguaucaaua

SEQ ID NO: 266021 - RNA, 19 nt, Homo sapiens
  misc_RNA (1)...(19): siRNA sense strand
aaugugagcaggcgguuug

SEQ ID NO: 266022 - RNA, 19 nt, Homo sapiens
  misc_RNA (1)...(19): siRNA sense strand
augcucagauuuccaaugg

SEQ ID NO: 266023 - RNA, 19 nt, Homo sapiens
  misc_RNA (1)...(19): siRNA sense strand
gaaaucaaugagaagaacu

SEQ ID NO: 266024 - RNA, 19 nt, Homo sapiens
  misc_RNA (1)...(19): siRNA sense strand
cccaguuggugacuucaug

SEQ ID NO: 266025 - RNA, 19 nt, Homo sapiens
  misc_RNA (1)...(19): siRNA sense strand
agccuuggauuucuauauc

SEQ ID NO: 266026 - RNA, 19 nt, Homo sapiens
  misc_RNA (1)...(19): siRNA sense strand
ucaccucuguucugaccau

SEQ ID NO: 266027 - RNA, 19 nt, Homo sapiens
  misc_RNA (1)...(19): siRNA sense strand
ucugcgcucuguuggaguu

SEQ ID NO: 266028 - RNA, 19 nt, Homo sapiens
  misc_RNA (1)...(19): siRNA sense strand
caccaugcccaaccagaug

SEQ ID NO: 266029 - RNA, 19 nt, Homo sapiens
  misc_RNA (1)...(19): siRNA sense strand
gccauccucguaucaauag

SEQ ID NO: 266030 - RNA, 19 nt, Homo sapiens
  misc_RNA (1)...(19): siRNA sense strand
ccgccauccucguaucaau

SEQ ID NO: 266031 - RNA, 19 nt, Homo sapiens
  misc_RNA (1)...(19): siRNA sense strand
cagccuuggauuucuauau

SEQ ID NO: 266032 - RNA, 19 nt, Homo sapiens
  misc_RNA (1)...(19): siRNA sense strand
auacaccauugacaucauc

SEQ ID NO: 266033 - RNA, 19 nt, Homo sapiens
  misc_RNA (1)...(19): siRNA sense strand
gcucuccuggguuuccuuu

SEQ ID NO: 266034 - RNA, 19 nt, Homo sapiens
  misc_RNA (1)...(19): siRNA sense strand
agaggacccacgagcauga

SEQ ID NO: 266035 - RNA, 19 nt, Homo sapiens
  misc_RNA (1)...(19): siRNA sense strand
gggaucaccucuguucuga

SEQ ID NO: 266036 - RNA, 19 nt, Homo sapiens
  misc_RNA (1)...(19): siRNA sense strand
ucacagccuuggauuucua

SEQ ID NO: 266037 - RNA, 19 nt, Homo sapiens
  misc_RNA (1)...(19): siRNA sense strand
ccgcgugucuccuauauca

SEQ ID NO: 266038 - RNA, 19 nt, Homo sapiens
  misc_RNA (1)...(19): siRNA sense strand
ggaauacaccauugacauc

SEQ ID NO: 266039 - RNA, 19 nt, Homo sapiens
  misc_RNA (1)...(19): siRNA sense strand
gcaagcguuuuaagaagua

SEQ ID NO: 266040 - RNA, 19 nt, Homo sapiens
  misc_RNA (1)...(19): siRNA sense strand
ucaacuuccugaucuacaa

SEQ ID NO: 266041 - RNA, 19 nt, Homo sapiens
  misc_RNA (1)...(19): siRNA sense strand
gaauacaccauugacauca

SEQ ID NO: 266042 - RNA, 19 nt, Homo sapiens
  misc_RNA (1)...(19): siRNA sense strand
gugcucaacuuccugaucu

SEQ ID NO: 266043 - RNA, 19 nt, Homo sapiens
  misc_RNA (1)...(19): siRNA sense strand
gccaacaucaggaagcuuu

SEQ ID NO: 266044 - RNA, 19 nt, Homo sapiens
  misc_RNA (1)...(19): siRNA sense strand
acgaugcucuccuggguuu

SEQ ID NO: 266045 - RNA, 19 nt, Homo sapiens
  misc_RNA (1)...(19): siRNA sense strand
aaacuccgccauccucgua

SEQ ID NO: 266046 - RNA, 19 nt, Homo sapiens
  misc_RNA (1)...(19): siRNA sense strand
cccagugacuuucuucuuc

SEQ ID NO: 266047 - RNA, 19 nt, Homo sapiens
  misc_RNA (1)...(19): siRNA sense strand
caauggauucucacucuug

SEQ ID NO: 266048 - RNA, 19 nt, Homo sapiens
  misc_RNA (1)...(19): siRNA sense strand
ggaguuugcugugcucaac

SEQ ID NO: 266049 - RNA, 19 nt, Homo sapiens
  misc_RNA (1)...(19): siRNA sense strand
ccaauggauucucacucuu

SEQ ID NO: 266050 - RNA, 19 nt, Homo sapiens
  misc_RNA (1)...(19): siRNA sense strand
gccagauugucaccacuga

SEQ ID NO: 266051 - RNA, 19 nt, Homo sapiens
  misc_RNA (1)...(19): siRNA sense strand
uaucacagccuuggauuuc

SEQ ID NO: 266052 - RNA, 19 nt, Homo sapiens
  misc_RNA (1)...(19): siRNA sense strand
gcaggcgguuuggcuaugu

SEQ ID NO: 266053 - RNA, 19 nt, Homo sapiens
  misc_RNA (1)...(19): siRNA sense strand
ugaaaucaaugagaagaac

SEQ ID NO: 266054 - RNA, 19 nt, Homo sapiens
  misc_RNA (1)...(19): siRNA sense strand
uuacaggagugagcaacaa

SEQ ID NO: 266055 - RNA, 19 nt, Homo sapiens
  misc_RNA (1)...(19): siRNA sense strand
guuuggcuauguugccuuu

SEQ ID NO: 266056 - RNA, 19 nt, Homo sapiens
  misc_RNA (1)...(19): siRNA sense strand
acucuugcccucuaucuuu

SEQ ID NO: 266057 - RNA, 19 nt, Homo sapiens
  misc_RNA (1)...(19): siRNA sense strand
ccagugacuuucuucuucu

SEQ ID NO: 266058 - RNA, 19 nt, Homo sapiens
  misc_RNA (1)...(19): siRNA sense strand
gagcaggcgguuuggcuau

SEQ ID NO: 266059 - RNA, 19 nt, Homo sapiens
  misc_RNA (1)...(19): siRNA sense strand
gagcaacaaaacugaaaua

SEQ ID NO: 266060 - RNA, 19 nt, Homo sapiens
  misc_RNA (1)...(19): siRNA sense strand
uuuccuauccugagaauga

SEQ ID NO: 266061 - RNA, 19 nt, Homo sapiens
  misc_RNA (1)...(19): siRNA sense strand
ucuaccgccuggauaacua

SEQ ID NO: 266062 - RNA, 19 nt, Homo sapiens
  misc_RNA (1)...(19): siRNA sense strand
ccauugacaucaucuucuc

SEQ ID NO: 266063 - RNA, 19 nt, Homo sapiens
  misc_RNA (1)...(19): siRNA sense strand
ugacuuucuucuucuucaa

SEQ ID NO: 266064 - RNA, 19 nt, Homo sapiens
  misc_RNA (1)...(19): siRNA sense strand
uaagaggacccacgagcau

SEQ ID NO: 266065 - RNA, 19 nt, Homo sapiens
  misc_RNA (1)...(19): siRNA sense strand
gugacuuucuucuucuuca

SEQ ID NO: 266066 - RNA, 19 nt, Homo sapiens
  misc_RNA (1)...(19): siRNA sense strand
gcccaugcuucuccuaaac

SEQ ID NO: 266067 - RNA, 19 nt, Homo sapiens
  misc_RNA (1)...(19): siRNA sense strand
aagcuggccugcugugagu

SEQ ID NO: 266068 - RNA, 19 nt, Homo sapiens
  misc_RNA (1)...(19): siRNA sense strand
aaaacuaugucccuucuuc

SEQ ID NO: 266069 - RNA, 19 nt, Homo sapiens
  misc_RNA (1)...(19): siRNA sense strand
cuagggaucaccucuguuc

SEQ ID NO: 266070 - RNA, 19 nt, Homo sapiens
  misc_RNA (1)...(19): siRNA sense strand
gaugcucacuccacaugcu

SEQ ID NO: 266071 - RNA, 19 nt, Homo sapiens
  misc_RNA (1)...(19): siRNA sense strand
cgccauccucguaucaaua

SEQ ID NO: 266072 - RNA, 19 nt, Homo sapiens
  misc_RNA (1)...(19): siRNA sense strand
aaugugagcaggcgguuug

SEQ ID NO: 266073 - RNA, 19 nt, Homo sapiens
  misc_RNA (1)...(19): siRNA sense strand
augcucagauuuccaaugg

SEQ ID NO: 266074 - RNA, 19 nt, Homo sapiens
  misc_RNA (1)...(19): siRNA sense strand
gaaaucaaugagaagaacu

SEQ ID NO: 266075 - RNA, 19 nt, Homo sapiens
  misc_RNA (1)...(19): siRNA sense strand
cccaguuggugacuucaug

SEQ ID NO: 266076 - RNA, 19 nt, Homo sapiens
  misc_RNA (1)...(19): siRNA sense strand
agccuuggauuucuauauc

SEQ ID NO: 266077 - RNA, 19 nt, Homo sapiens
  misc_RNA (1)...(19): siRNA sense strand
ucaccucuguucugaccau

SEQ ID NO: 266078 - RNA, 19 nt, Homo sapiens
  misc_RNA (1)...(19): siRNA sense strand
ucugcgcucuguuggaguu

SEQ ID NO: 266079 - RNA, 19 nt, Homo sapiens
  misc_RNA (1)...(19): siRNA sense strand
caccaugcccaaccagaug

SEQ ID NO: 266080 - RNA, 19 nt, Homo sapiens
  misc_RNA (1)...(19): siRNA sense strand
gccauccucguaucaauag

SEQ ID NO: 266081 - RNA, 19 nt, Homo sapiens
  misc_RNA (1)...(19): siRNA sense strand
ccgccauccucguaucaau

SEQ ID NO: 266082 - RNA, 19 nt, Homo sapiens
  misc_RNA (1)...(19): siRNA sense strand
cagccuuggauuucuauau

SEQ ID NO: 266083 - RNA, 19 nt, Homo sapiens
  misc_RNA (1)...(19): siRNA sense strand
auacaccauugacaucauc

SEQ ID NO: 266084 - RNA, 19 nt, Homo sapiens
  misc_RNA (1)...(19): siRNA sense strand
gcucuccuggguuuccuuu

SEQ ID NO: 266085 - RNA, 19 nt, Homo sapiens
  misc_RNA (1)...(19): siRNA sense strand
agaggacccacgagcauga

SEQ ID NO: 266086 - RNA, 19 nt, Homo sapiens
  misc_RNA (1)...(19): siRNA sense strand
gggaucaccucuguucuga

SEQ ID NO: 266087 - RNA, 19 nt, Homo sapiens
  misc_RNA (1)...(19): siRNA sense strand
ucacagccuuggauuucua

SEQ ID NO: 266088 - RNA, 19 nt, Homo sapiens
  misc_RNA (1)...(19): siRNA sense strand
ccgcgugucuccuauauca

SEQ ID NO: 266089 - RNA, 19 nt, Homo sapiens
  misc_RNA (1)...(19): siRNA sense strand
ggaauacaccauugacauc

SEQ ID NO: 266090 - RNA, 19 nt, Homo sapiens
  misc_RNA (1)...(19): siRNA sense strand
gcaagcguuuuaagaagua

SEQ ID NO: 266091 - RNA, 19 nt, Homo sapiens
  misc_RNA (1)...(19): siRNA sense strand
ucaacuuccugaucuacaa

SEQ ID NO: 266092 - RNA, 19 nt, Homo sapiens
  misc_RNA (1)...(19): siRNA sense strand
gaauacaccauugacauca

SEQ ID NO: 266093 - RNA, 19 nt, Homo sapiens
  misc_RNA (1)...(19): siRNA sense strand
gugcucaacuuccugaucu

SEQ ID NO: 266094 - RNA, 19 nt, Homo sapiens
  misc_RNA (1)...(19): siRNA sense strand
gccaacaucaggaagcuuu

SEQ ID NO: 266095 - RNA, 19 nt, Homo sapiens
  misc_RNA (1)...(19): siRNA sense strand
acgaugcucuccuggguuu

SEQ ID NO: 266096 - RNA, 19 nt, Homo sapiens
  misc_RNA (1)...(19): siRNA sense strand
aaacuccgccauccucgua

SEQ ID NO: 266097 - RNA, 19 nt, Homo sapiens
  misc_RNA (1)...(19): siRNA sense strand
cccagugacuuucuucuuc

SEQ ID NO: 266098 - RNA, 19 nt, Homo sapiens
  misc_RNA (1)...(19): siRNA sense strand
caauggauucucacucuug

SEQ ID NO: 266099 - RNA, 19 nt, Homo sapiens
  misc_RNA (1)...(19): siRNA sense strand
ggaguuugcugugcucaac

SEQ ID NO: 266100 - RNA, 19 nt, Homo sapiens
  misc_RNA (1)...(19): siRNA sense strand
ccaauggauucucacucuu

SEQ ID NO: 266101 - RNA, 19 nt, Homo sapiens
  misc_RNA (1)...(19): siRNA sense strand
gccagauugucaccacuga

SEQ ID NO: 266102 - RNA, 19 nt, Homo sapiens
  misc_RNA (1)...(19): siRNA sense strand
uaucacagccuuggauuuc

SEQ ID NO: 266103 - RNA, 19 nt, Homo sapiens
  misc_RNA (1)...(19): siRNA sense strand
gcaggcgguuuggcuaugu

SEQ ID NO: 266104 - RNA, 19 nt, Homo sapiens
  misc_RNA (1)...(19): siRNA sense strand
ugaaaucaaugagaagaac

SEQ ID NO: 266105 - RNA, 19 nt, Homo sapiens
  misc_RNA (1)...(19): siRNA sense strand
uuacaggagugagcaacaa

SEQ ID NO: 266106 - RNA, 19 nt, Homo sapiens
  misc_RNA (1)...(19): siRNA sense strand
guuuggcuauguugccuuu

SEQ ID NO: 266107 - RNA, 19 nt, Homo sapiens
  misc_RNA (1)...(19): siRNA sense strand
acucuugcccucuaucuuu

SEQ ID NO: 266108 - RNA, 19 nt, Homo sapiens
  misc_RNA (1)...(19): siRNA sense strand
ccagugacuuucuucuucu

SEQ ID NO: 266109 - RNA, 19 nt, Homo sapiens
  misc_RNA (1)...(19): siRNA sense strand
gagcaggcgguuuggcuau

SEQ ID NO: 266110 - RNA, 19 nt, Homo sapiens
  misc_RNA (1)...(19): siRNA sense strand
gagcaacaaaacugaaaua

SEQ ID NO: 266111 - RNA, 19 nt, Homo sapiens
  misc_RNA (1)...(19): siRNA sense strand
uuuccuauccugagaauga

SEQ ID NO: 266112 - RNA, 19 nt, Homo sapiens
  misc_RNA (1)...(19): siRNA sense strand
ucuaccgccuggauaacua

SEQ ID NO: 266113 - RNA, 19 nt, Homo sapiens
  misc_RNA (1)...(19): siRNA sense strand
ccauugacaucaucuucuc

SEQ ID NO: 266114 - RNA, 19 nt, Homo sapiens
  misc_RNA (1)...(19): siRNA sense strand
ugacuuucuucuucuucaa

SEQ ID NO: 266115 - RNA, 19 nt, Homo sapiens
  misc_RNA (1)...(19): siRNA sense strand
uaagaggacccacgagcau

SEQ ID NO: 266116 - RNA, 19 nt, Homo sapiens
  misc_RNA (1)...(19): siRNA sense strand
gugacuuucuucuucuuca

SEQ ID NO: 266117 - RNA, 19 nt, Homo sapiens
  misc_RNA (1)...(19): siRNA sense strand
gcccaugcuucuccuaaac

SEQ ID NO: 266118 - RNA, 19 nt, Homo sapiens
  misc_RNA (1)...(19): siRNA sense strand
aagcuggccugcugugagu

SEQ ID NO: 266119 - RNA, 19 nt, Homo sapiens
  misc_RNA (1)...(19): siRNA sense strand
aaaacuaugucccuucuuc

SEQ ID NO: 266120 - RNA, 19 nt, Homo sapiens
  misc_RNA (1)...(19): siRNA sense strand
cuagggaucaccucuguuc

SEQ ID NO: 266121 - RNA, 19 nt, Homo sapiens
  misc_RNA (1)...(19): siRNA sense strand
gaugcucacuccacaugcu

SEQ ID NO: 266122 - RNA, 19 nt, Homo sapiens
  misc_RNA (1)...(19): siRNA sense strand
cgccauccucguaucaaua

SEQ ID NO: 266123 - RNA, 19 nt, Homo sapiens
  misc_RNA (1)...(19): siRNA sense strand
aaugugagcaggcgguuug

SEQ ID NO: 266124 - RNA, 19 nt, Homo sapiens
  misc_RNA (1)...(19): siRNA sense strand
augcucagauuuccaaugg

SEQ ID NO: 266125 - RNA, 19 nt, Homo sapiens
  misc_RNA (1)...(19): siRNA sense strand
gaaaucaaugagaagaacu

SEQ ID NO: 266126 - RNA, 19 nt, Homo sapiens
  misc_RNA (1)...(19): siRNA sense strand
cccaguuggugacuucaug

SEQ ID NO: 266127 - RNA, 19 nt, Homo sapiens
  misc_RNA (1)...(19): siRNA sense strand
agccuuggauuucuauauc

SEQ ID NO: 266128 - RNA, 19 nt, Homo sapiens
  misc_RNA (1)...(19): siRNA sense strand
ucaccucuguucugaccau

SEQ ID NO: 266129 - RNA, 19 nt, Homo sapiens
  misc_RNA (1)...(19): siRNA sense strand
ucugcgcucuguuggaguu

SEQ ID NO: 266130 - RNA, 19 nt, Homo sapiens
  misc_RNA (1)...(19): siRNA sense strand
caccaugcccaaccagaug

SEQ ID NO: 266131 - RNA, 19 nt, Homo sapiens
  misc_RNA (1)...(19): siRNA sense strand
gccauccucguaucaauag

SEQ ID NO: 266132 - RNA, 19 nt, Homo sapiens
  misc_RNA (1)...(19): siRNA sense strand
ccgccauccucguaucaau

SEQ ID NO: 266133 - RNA, 19 nt, Homo sapiens
  misc_RNA (1)...(19): siRNA sense strand
cagccuuggauuucuauau

SEQ ID NO: 266134 - RNA, 19 nt, Homo sapiens
  misc_RNA (1)...(19): siRNA sense strand
auacaccauugacaucauc

SEQ ID NO: 266135 - RNA, 19 nt, Homo sapiens
  misc_RNA (1)...(19): siRNA sense strand
gcucuccuggguuuccuuu

SEQ ID NO: 266136 - RNA, 19 nt, Homo sapiens
  misc_RNA (1)...(19): siRNA sense strand
agaggacccacgagcauga

SEQ ID NO: 266137 - RNA, 19 nt, Homo sapiens
  misc_RNA (1)...(19): siRNA sense strand
gaaggaagaugaacauguu

SEQ ID NO: 266138 - RNA, 19 nt, Homo sapiens
  misc_RNA (1)...(19): siRNA sense strand
caagauaagucaguuguaa

SEQ ID NO: 266139 - RNA, 19 nt, Homo sapiens
  misc_RNA (1)...(19): siRNA sense strand
gaaagcaauuguacucuau

SEQ ID NO: 266140 - RNA, 19 nt, Homo sapiens
  misc_RNA (1)...(19): siRNA sense strand
gaagauggauguuugucaa

SEQ ID NO: 266141 - RNA, 19 nt, Homo sapiens
  misc_RNA (1)...(19): siRNA sense strand
ggacacaaaugcaguuauc

SEQ ID NO: 266142 - RNA, 19 nt, Homo sapiens
  misc_RNA (1)...(19): siRNA sense strand
gaaccugucuggacuuauc

SEQ ID NO: 266143 - RNA, 19 nt, Homo sapiens
  misc_RNA (1)...(19): siRNA sense strand
gagaaccugucuggacuua

SEQ ID NO: 266144 - RNA, 19 nt, Homo sapiens
  misc_RNA (1)...(19): siRNA sense strand
ggaccuggaugccaagcua

SEQ ID NO: 266145 - RNA, 19 nt, Homo sapiens
  misc_RNA (1)...(19): siRNA sense strand
gcaauuguacucuaucaaa

SEQ ID NO: 266146 - RNA, 19 nt, Homo sapiens
  misc_RNA (1)...(19): siRNA sense strand
ggacuuaucgaaagcaauu

SEQ ID NO: 266147 - RNA, 19 nt, Homo sapiens
  misc_RNA (1)...(19): siRNA sense strand
cgaaagcaauuguacucua

SEQ ID NO: 266148 - RNA, 19 nt, Homo sapiens
  misc_RNA (1)...(19): siRNA sense strand
gaugcaaucucuugucuca

SEQ ID NO: 266149 - RNA, 19 nt, Homo sapiens
  misc_RNA (1)...(19): siRNA sense strand
ggagcacuauuauggauga

SEQ ID NO: 266150 - RNA, 19 nt, Homo sapiens
  misc_RNA (1)...(19): siRNA sense strand
cgaagcaggccuuuauuaa

SEQ ID NO: 266151 - RNA, 19 nt, Homo sapiens
  misc_RNA (1)...(19): siRNA sense strand
guaaauaagaugcaacaga

SEQ ID NO: 266152 - RNA, 19 nt, Homo sapiens
  misc_RNA (1)...(19): siRNA sense strand
ggacuuacaggaucgauau

SEQ ID NO: 266153 - RNA, 19 nt, Homo sapiens
  misc_RNA (1)...(19): siRNA sense strand
ugaaggugcugacaaagau

SEQ ID NO: 266154 - RNA, 19 nt, Homo sapiens
  misc_RNA (1)...(19): siRNA sense strand
gaagaaggaagaugaacau

SEQ ID NO: 266155 - RNA, 19 nt, Homo sapiens
  misc_RNA (1)...(19): siRNA sense strand
acaagcaaauggagaaguu

SEQ ID NO: 266156 - RNA, 19 nt, Homo sapiens
  misc_RNA (1)...(19): siRNA sense strand
ggacgugucucaggagcuu

SEQ ID NO: 266157 - RNA, 19 nt, Homo sapiens
  misc_RNA (1)...(19): siRNA sense strand
gaggagcacuauuauggau

SEQ ID NO: 266158 - RNA, 19 nt, Homo sapiens
  misc_RNA (1)...(19): siRNA sense strand
gaacagugcaggacggaau

SEQ ID NO: 266159 - RNA, 19 nt, Homo sapiens
  misc_RNA (1)...(19): siRNA sense strand
ggaucgauaugcucaagau

SEQ ID NO: 266160 - RNA, 19 nt, Homo sapiens
  misc_RNA (1)...(19): siRNA sense strand
ucccaagguuuccaagaua

SEQ ID NO: 266161 - RNA, 19 nt, Homo sapiens
  misc_RNA (1)...(19): siRNA sense strand
ucucuugucucacaugcua

SEQ ID NO: 266162 - RNA, 19 nt, Homo sapiens
  misc_RNA (1)...(19): siRNA sense strand
cgaaauccuuugugucgau

SEQ ID NO: 266163 - RNA, 19 nt, Homo sapiens
  misc_RNA (1)...(19): siRNA sense strand
ccagaccucuacaagcaaa

SEQ ID NO: 266164 - RNA, 19 nt, Homo sapiens
  misc_RNA (1)...(19): siRNA sense strand
agacgaagcaggccuuuau

SEQ ID NO: 266165 - RNA, 19 nt, Homo sapiens
  misc_RNA (1)...(19): siRNA sense strand
aagaugaccugcugcuguu

SEQ ID NO: 266166 - RNA, 19 nt, Homo sapiens
  misc_RNA (1)...(19): siRNA sense strand
ggaagaaggaagaugaaca

SEQ ID NO: 266167 - RNA, 19 nt, Homo sapiens
  misc_RNA (1)...(19): siRNA sense strand
auacuuggcugacggugaa

SEQ ID NO: 266168 - RNA, 19 nt, Homo sapiens
  misc_RNA (1)...(19): siRNA sense strand
gaagguacaaacacaagug

SEQ ID NO: 266169 - RNA, 19 nt, Homo sapiens
  misc_RNA (1)...(19): siRNA sense strand
ucaggaagguacaaacaca

SEQ ID NO: 266170 - RNA, 19 nt, Homo sapiens
  misc_RNA (1)...(19): siRNA sense strand
cuagagcuguuucauucaa

SEQ ID NO: 266171 - RNA, 19 nt, Homo sapiens
  misc_RNA (1)...(19): siRNA sense strand
cccaagguuuccaagauaa

SEQ ID NO: 266172 - RNA, 19 nt, Homo sapiens
  misc_RNA (1)...(19): siRNA sense strand
ccacagggaagaaggaaga

SEQ ID NO: 266173 - RNA, 19 nt, Homo sapiens
  misc_RNA (1)...(19): siRNA sense strand
aauugaagauggauguuug

SEQ ID NO: 266174 - RNA, 19 nt, Homo sapiens
  misc_RNA (1)...(19): siRNA sense strand
ggagcgagcagaugcaauc

SEQ ID NO: 266175 - RNA, 19 nt, Homo sapiens
  misc_RNA (1)...(19): siRNA sense strand
uagaggagcacuauuaugg

SEQ ID NO: 266176 - RNA, 19 nt, Homo sapiens
  misc_RNA (1)...(19): siRNA sense strand
ggaugaaggacgugucuca

SEQ ID NO: 266177 - RNA, 19 nt, Homo sapiens
  misc_RNA (1)...(19): siRNA sense strand
acgaagcaggccuuuauua

SEQ ID NO: 266178 - RNA, 19 nt, Homo sapiens
  misc_RNA (1)...(19): siRNA sense strand
aaaacgaacugggaaaauu

SEQ ID NO: 266179 - RNA, 19 nt, Homo sapiens
  misc_RNA (1)...(19): siRNA sense strand
ggaauauagaggagcacua

SEQ ID NO: 266180 - RNA, 19 nt, Homo sapiens
  misc_RNA (1)...(19): siRNA sense strand
cagggaagaaggaagauga

SEQ ID NO: 266181 - RNA, 19 nt, Homo sapiens
  misc_RNA (1)...(19): siRNA sense strand
gaucgauaugcucaagaua

SEQ ID NO: 266182 - RNA, 19 nt, Homo sapiens
  misc_RNA (1)...(19): siRNA sense strand
ugucuggacuuaucgaaag

SEQ ID NO: 266183 - RNA, 19 nt, Homo sapiens
  misc_RNA (1)...(19): siRNA sense strand
ugcaaucucuugucucaca

SEQ ID NO: 266184 - RNA, 19 nt, Homo sapiens
  misc_RNA (1)...(19): siRNA sense strand
gugcaggacggaauauaga

SEQ ID NO: 266185 - RNA, 19 nt, Homo sapiens
  misc_RNA (1)...(19): siRNA sense strand
ucgauaugcucaagauaag

SEQ ID NO: 266186 - RNA, 19 nt, Homo sapiens
  misc_RNA (1)...(19): siRNA sense strand
gauaugcucaagauaaguc

SEQ ID NO: 266187 - RNA, 19 nt, Homo sapiens
  misc_RNA (1)...(19): siRNA sense strand
caggaaaggcccucugcuu

SEQ ID NO: 266188 - RNA, 19 nt, Homo sapiens
  misc_RNA (1)...(19): siRNA sense strand
aaccagagcaggaaagaug

SEQ ID NO: 266189 - RNA, 19 nt, Homo sapiens
  misc_RNA (1)...(19): siRNA sense strand
aagcaauuguacucuauca

SEQ ID NO: 266190 - RNA, 19 nt, Homo sapiens
  misc_RNA (1)...(19): siRNA sense strand
agaaauauugggagacgaa

SEQ ID NO: 266191 - RNA, 19 nt, Homo sapiens
  misc_RNA (1)...(19): siRNA sense strand
gagacgaagcaggccuuua

SEQ ID NO: 266192 - RNA, 19 nt, Homo sapiens
  misc_RNA (1)...(19): siRNA sense strand
uuucuucgaucccaagguu

SEQ ID NO: 266193 - RNA, 19 nt, Homo sapiens
  misc_RNA (1)...(19): siRNA sense strand
agagcuguuucauucaauu

SEQ ID NO: 266194 - RNA, 19 nt, Homo sapiens
  misc_RNA (1)...(19): siRNA sense strand
aaauggagaaguucaggaa

SEQ ID NO: 266195 - RNA, 19 nt, Homo sapiens
  misc_RNA (1)...(19): siRNA sense strand
cuuacgaaauccuuugugu

SEQ ID NO: 266196 - RNA, 19 nt, Homo sapiens
  misc_RNA (1)...(19): siRNA sense strand
gaugaccugcugcuguuga

SEQ ID NO: 266197 - RNA, 19 nt, Homo sapiens
  misc_RNA (1)...(19): siRNA sense strand
aaaaguggaucuucuugga

SEQ ID NO: 266198 - RNA, 19 nt, Homo sapiens
  misc_RNA (1)...(19): siRNA sense strand
agaugcaacagaaauauug

SEQ ID NO: 266199 - RNA, 19 nt, Homo sapiens
  misc_RNA (1)...(19): siRNA sense strand
ggagaaguucaggaaggua

SEQ ID NO: 266200 - RNA, 19 nt, Homo sapiens
  misc_RNA (1)...(19): siRNA sense strand
ucaagauaagucaguugua

SEQ ID NO: 266201 - RNA, 19 nt, Homo sapiens
  misc_RNA (1)...(19): siRNA sense strand
gacgaagcaggccuuuauu

SEQ ID NO: 266202 - RNA, 19 nt, Homo sapiens
  misc_RNA (1)...(19): siRNA sense strand
ccaagguuuccaagauaaa

SEQ ID NO: 266203 - RNA, 19 nt, Homo sapiens
  misc_RNA (1)...(19): siRNA sense strand
agaaggaagaugaacaugu

SEQ ID NO: 266204 - RNA, 19 nt, Homo sapiens
  misc_RNA (1)...(19): siRNA sense strand
gagcaggaaagaugaugca

SEQ ID NO: 266205 - RNA, 19 nt, Homo sapiens
  misc_RNA (1)...(19): siRNA sense strand
gcaaucucuugucucacau

SEQ ID NO: 266206 - RNA, 19 nt, Homo sapiens
  misc_RNA (1)...(19): siRNA sense strand
acaaauugaagauggaugu

SEQ ID NO: 266207 - RNA, 19 nt, Homo sapiens
  misc_RNA (1)...(19): siRNA sense strand
gggacuuacaggaucgaua

SEQ ID NO: 266208 - RNA, 19 nt, Homo sapiens
  misc_RNA (1)...(19): siRNA sense strand
gaaggugcugacaaagaug

SEQ ID NO: 266209 - RNA, 19 nt, Homo sapiens
  misc_RNA (1)...(19): siRNA sense strand
cucacaugcuagcaacaua

SEQ ID NO: 266210 - RNA, 19 nt, Homo sapiens
  misc_RNA (1)...(19): siRNA sense strand
ggaagguacaaacacaagu

SEQ ID NO: 266211 - RNA, 19 nt, Homo sapiens
  misc_RNA (1)...(19): siRNA sense strand
auccagaccucuacaagca

SEQ ID NO: 266212 - RNA, 19 nt, Homo sapiens
  misc_RNA (1)...(19): siRNA sense strand
gugucgauuucaccaagaa

SEQ ID NO: 266213 - RNA, 19 nt, Homo sapiens
  misc_RNA (1)...(19): siRNA sense strand
gaucccaagguuuccaaga

SEQ ID NO: 266214 - RNA, 19 nt, Homo sapiens
  misc_RNA (1)...(19): siRNA sense strand
gcucaagauaagucaguug

SEQ ID NO: 266215 - RNA, 19 nt, Homo sapiens
  misc_RNA (1)...(19): siRNA sense strand
guucaggaagguacaaaca

SEQ ID NO: 266216 - RNA, 19 nt, Homo sapiens
  misc_RNA (1)...(19): siRNA sense strand
aaacgaacugggaaaauuu

SEQ ID NO: 266217 - RNA, 19 nt, Homo sapiens
  misc_RNA (1)...(19): siRNA sense strand
cugaaggugcugacaaaga

SEQ ID NO: 266218 - RNA, 19 nt, Homo sapiens
  misc_RNA (1)...(19): siRNA sense strand
ugaagauggauguuuguca

SEQ ID NO: 266219 - RNA, 19 nt, Homo sapiens
  misc_RNA (1)...(19): siRNA sense strand
gaaguucaggaagguacaa

SEQ ID NO: 266220 - RNA, 19 nt, Homo sapiens
  misc_RNA (1)...(19): siRNA sense strand
gaugcaagcgacaggaaag

SEQ ID NO: 266221 - RNA, 19 nt, Homo sapiens
  misc_RNA (1)...(19): siRNA sense strand
gagcuguuucauucaauuc

SEQ ID NO: 266222 - RNA, 19 nt, Homo sapiens
  misc_RNA (1)...(19): siRNA sense strand
gaaaacgaacugggaaaau

SEQ ID NO: 266223 - RNA, 19 nt, Homo sapiens
  misc_RNA (1)...(19): siRNA sense strand
uagagcuguuucauucaau

SEQ ID NO: 266224 - RNA, 19 nt, Homo sapiens
  misc_RNA (1)...(19): siRNA sense strand
gauaaaaccagagcaggaa

SEQ ID NO: 266225 - RNA, 19 nt, Homo sapiens
  misc_RNA (1)...(19): siRNA sense strand
caggaucgauaugcucaag

SEQ ID NO: 266226 - RNA, 19 nt, Homo sapiens
  misc_RNA (1)...(19): siRNA sense strand
caggacacaaaugcaguua

SEQ ID NO: 266227 - RNA, 19 nt, Homo sapiens
  misc_RNA (1)...(19): siRNA sense strand
caaauugaagauggauguu

SEQ ID NO: 266228 - RNA, 19 nt, Homo sapiens
  misc_RNA (1)...(19): siRNA sense strand
ggagacgaagcaggccuuu

SEQ ID NO: 266229 - RNA, 19 nt, Homo sapiens
  misc_RNA (1)...(19): siRNA sense strand
gagcacuauuauggaugaa

SEQ ID NO: 266230 - RNA, 19 nt, Homo sapiens
  misc_RNA (1)...(19): siRNA sense strand
ucuacaagcaaauggagaa

SEQ ID NO: 266231 - RNA, 19 nt, Homo sapiens
  misc_RNA (1)...(19): siRNA sense strand
gaaggaagaugaacauguu

SEQ ID NO: 266232 - RNA, 19 nt, Homo sapiens
  misc_RNA (1)...(19): siRNA sense strand
caagauaagucaguuguaa

SEQ ID NO: 266233 - RNA, 19 nt, Homo sapiens
  misc_RNA (1)...(19): siRNA sense strand
gaaagcaauuguacucuau

SEQ ID NO: 266234 - RNA, 19 nt, Homo sapiens
  misc_RNA (1)...(19): siRNA sense strand
gaagauggauguuugucaa

SEQ ID NO: 266235 - RNA, 19 nt, Homo sapiens
  misc_RNA (1)...(19): siRNA sense strand
ggacacaaaugcaguuauc

SEQ ID NO: 266236 - RNA, 19 nt, Homo sapiens
  misc_RNA (1)...(19): siRNA sense strand
gaaccugucuggacuuauc

SEQ ID NO: 266237 - RNA, 19 nt, Homo sapiens
  misc_RNA (1)...(19): siRNA sense strand
gagaaccugucuggacuua

SEQ ID NO: 266238 - RNA, 19 nt, Homo sapiens
  misc_RNA (1)...(19): siRNA sense strand
ggaccuggaugccaagcua

SEQ ID NO: 266239 - RNA, 19 nt, Homo sapiens
  misc_RNA (1)...(19): siRNA sense strand
gcaauuguacucuaucaaa

SEQ ID NO: 266240 - RNA, 19 nt, Homo sapiens
  misc_RNA (1)...(19): siRNA sense strand
ggacuuaucgaaagcaauu

SEQ ID NO: 266241 - RNA, 19 nt, Homo sapiens
  misc_RNA (1)...(19): siRNA sense strand
cgaaagcaauuguacucua

SEQ ID NO: 266242 - RNA, 19 nt, Homo sapiens
  misc_RNA (1)...(19): siRNA sense strand
gaugcaaucucuugucuca

SEQ ID NO: 266243 - RNA, 19 nt, Homo sapiens
  misc_RNA (1)...(19): siRNA sense strand
ggagcacuauuauggauga

SEQ ID NO: 266244 - RNA, 19 nt, Homo sapiens
  misc_RNA (1)...(19): siRNA sense strand
cgaagcaggccuuuauuaa

SEQ ID NO: 266245 - RNA, 19 nt, Homo sapiens
  misc_RNA (1)...(19): siRNA sense strand
guaaauaagaugcaacaga

SEQ ID NO: 266246 - RNA, 19 nt, Homo sapiens
  misc_RNA (1)...(19): siRNA sense strand
ggacuuacaggaucgauau

SEQ ID NO: 266247 - RNA, 19 nt, Homo sapiens
  misc_RNA (1)...(19): siRNA sense strand
ugaaggugcugacaaagau

SEQ ID NO: 266248 - RNA, 19 nt, Homo sapiens
  misc_RNA (1)...(19): siRNA sense strand
cgauaaagaacacgaauug

SEQ ID NO: 266249 - RNA, 19 nt, Homo sapiens
  misc_RNA (1)...(19): siRNA sense strand
gaagaaggaagaugaacau

SEQ ID NO: 266250 - RNA, 19 nt, Homo sapiens
  misc_RNA (1)...(19): siRNA sense strand
acaagcaaauggagaaguu

SEQ ID NO: 266251 - RNA, 19 nt, Homo sapiens
  misc_RNA (1)...(19): siRNA sense strand
ggacgugucucaggagcuu

SEQ ID NO: 266252 - RNA, 19 nt, Homo sapiens
  misc_RNA (1)...(19): siRNA sense strand
gaggagcacuauuauggau

SEQ ID NO: 266253 - RNA, 19 nt, Homo sapiens
  misc_RNA (1)...(19): siRNA sense strand
gaacagugcaggacggaau

SEQ ID NO: 266254 - RNA, 19 nt, Homo sapiens
  misc_RNA (1)...(19): siRNA sense strand
ugagugagaucuucaaugc

SEQ ID NO: 266255 - RNA, 19 nt, Homo sapiens
  misc_RNA (1)...(19): siRNA sense strand
ggaucgauaugcucaagau

SEQ ID NO: 266256 - RNA, 19 nt, Homo sapiens
  misc_RNA (1)...(19): siRNA sense strand
ucccaagguuuccaagaua

SEQ ID NO: 266257 - RNA, 19 nt, Homo sapiens
  misc_RNA (1)...(19): siRNA sense strand
ucucuugucucacaugcua

SEQ ID NO: 266258 - RNA, 19 nt, Homo sapiens
  misc_RNA (1)...(19): siRNA sense strand
cgaaauccuuugugucgau

SEQ ID NO: 266259 - RNA, 19 nt, Homo sapiens
  misc_RNA (1)...(19): siRNA sense strand
ccagaccucuacaagcaaa

SEQ ID NO: 266260 - RNA, 19 nt, Homo sapiens
  misc_RNA (1)...(19): siRNA sense strand
agacgaagcaggccuuuau

SEQ ID NO: 266261 - RNA, 19 nt, Homo sapiens
  misc_RNA (1)...(19): siRNA sense strand
aagaugaccugcugcuguu

SEQ ID NO: 266262 - RNA, 19 nt, Homo sapiens
  misc_RNA (1)...(19): siRNA sense strand
ggaagaaggaagaugaaca

SEQ ID NO: 266263 - RNA, 19 nt, Homo sapiens
  misc_RNA (1)...(19): siRNA sense strand
auacuuggcugacggugaa

SEQ ID NO: 266264 - RNA, 19 nt, Homo sapiens
  misc_RNA (1)...(19): siRNA sense strand
gaagguacaaacacaagug

SEQ ID NO: 266265 - RNA, 19 nt, Homo sapiens
  misc_RNA (1)...(19): siRNA sense strand
ucaggaagguacaaacaca

SEQ ID NO: 266266 - RNA, 19 nt, Homo sapiens
  misc_RNA (1)...(19): siRNA sense strand
agugagaucuucaaugcuu

SEQ ID NO: 266267 - RNA, 19 nt, Homo sapiens
  misc_RNA (1)...(19): siRNA sense strand
cuagagcuguuucauucaa

SEQ ID NO: 266268 - RNA, 19 nt, Homo sapiens
  misc_RNA (1)...(19): siRNA sense strand
uuacaggccucgcuacaag

SEQ ID NO: 266269 - RNA, 19 nt, Homo sapiens
  misc_RNA (1)...(19): siRNA sense strand
cccaagguuuccaagauaa

SEQ ID NO: 266270 - RNA, 19 nt, Homo sapiens
  misc_RNA (1)...(19): siRNA sense strand
ccacagggaagaaggaaga

SEQ ID NO: 266271 - RNA, 19 nt, Homo sapiens
  misc_RNA (1)...(19): siRNA sense strand
aauugaagauggauguuug

SEQ ID NO: 266272 - RNA, 19 nt, Homo sapiens
  misc_RNA (1)...(19): siRNA sense strand
ggagcgagcagaugcaauc

SEQ ID NO: 266273 - RNA, 19 nt, Homo sapiens
  misc_RNA (1)...(19): siRNA sense strand
uagaggagcacuauuaugg

SEQ ID NO: 266274 - RNA, 19 nt, Homo sapiens
  misc_RNA (1)...(19): siRNA sense strand
ggaugaaggacgugucuca

SEQ ID NO: 266275 - RNA, 19 nt, Homo sapiens
  misc_RNA (1)...(19): siRNA sense strand
acgaagcaggccuuuauua

SEQ ID NO: 266276 - RNA, 19 nt, Homo sapiens
  misc_RNA (1)...(19): siRNA sense strand
aaaacgaacugggaaaauu

SEQ ID NO: 266277 - RNA, 19 nt, Homo sapiens
  misc_RNA (1)...(19): siRNA sense strand
ggaauauagaggagcacua

SEQ ID NO: 266278 - RNA, 19 nt, Homo sapiens
  misc_RNA (1)...(19): siRNA sense strand
cagggaagaaggaagauga

SEQ ID NO: 266279 - RNA, 19 nt, Homo sapiens
  misc_RNA (1)...(19): siRNA sense strand
gaucgauaugcucaagaua

SEQ ID NO: 266280 - RNA, 19 nt, Homo sapiens
  misc_RNA (1)...(19): siRNA sense strand
ugucuggacuuaucgaaag

SEQ ID NO: 266281 - RNA, 19 nt, Homo sapiens
  misc_RNA (1)...(19): siRNA sense strand
ugcaaucucuugucucaca

SEQ ID NO: 266282 - RNA, 19 nt, Homo sapiens
  misc_RNA (1)...(19): siRNA sense strand
gugcaggacggaauauaga

SEQ ID NO: 266283 - RNA, 19 nt, Homo sapiens
  misc_RNA (1)...(19): siRNA sense strand
ucgauaugcucaagauaag

SEQ ID NO: 266284 - RNA, 19 nt, Homo sapiens
  misc_RNA (1)...(19): siRNA sense strand
aagcaauuguacucuauca

SEQ ID NO: 266285 - RNA, 19 nt, Homo sapiens
  misc_RNA (1)...(19): siRNA sense strand
ccagacaggcucagguuuc

SEQ ID NO: 266286 - RNA, 19 nt, Homo sapiens
  misc_RNA (1)...(19): siRNA sense strand
gauaugcucaagauaaguc

SEQ ID NO: 266287 - RNA, 19 nt, Homo sapiens
  misc_RNA (1)...(19): siRNA sense strand
caggaaaggcccucugcuu

SEQ ID NO: 266288 - RNA, 19 nt, Homo sapiens
  misc_RNA (1)...(19): siRNA sense strand
aaccagagcaggaaagaug

SEQ ID NO: 266289 - RNA, 19 nt, Homo sapiens
  misc_RNA (1)...(19): siRNA sense strand
uuucuucgaucccaagguu

SEQ ID NO: 266290 - RNA, 19 nt, Homo sapiens
  misc_RNA (1)...(19): siRNA sense strand
agaaauauugggagacgaa

SEQ ID NO: 266291 - RNA, 19 nt, Homo sapiens
  misc_RNA (1)...(19): siRNA sense strand
gagacgaagcaggccuuua

SEQ ID NO: 266292 - RNA, 19 nt, Homo sapiens
  misc_RNA (1)...(19): siRNA sense strand
agagcuguuucauucaauu

SEQ ID NO: 266293 - RNA, 19 nt, Homo sapiens
  misc_RNA (1)...(19): siRNA sense strand
gcuguugagugagaucuuc

SEQ ID NO: 266294 - RNA, 19 nt, Homo sapiens
  misc_RNA (1)...(19): siRNA sense strand
aaauggagaaguucaggaa

SEQ ID NO: 266295 - RNA, 19 nt, Homo sapiens
  misc_RNA (1)...(19): siRNA sense strand
cuuacgaaauccuuugugu

SEQ ID NO: 266296 - RNA, 19 nt, Homo sapiens
  misc_RNA (1)...(19): siRNA sense strand
gaugaccugcugcuguuga

SEQ ID NO: 266297 - RNA, 19 nt, Homo sapiens
  misc_RNA (1)...(19): siRNA sense strand
aaaaguggaucuucuugga

SEQ ID NO: 266298 - RNA, 19 nt, Homo sapiens
  misc_RNA (1)...(19): siRNA sense strand
agaugcaacagaaauauug

SEQ ID NO: 266299 - RNA, 19 nt, Homo sapiens
  misc_RNA (1)...(19): siRNA sense strand
ggagaaguucaggaaggua

SEQ ID NO: 266300 - RNA, 19 nt, Homo sapiens
  misc_RNA (1)...(19): siRNA sense strand
ucaagauaagucaguugua

SEQ ID NO: 266301 - RNA, 19 nt, Homo sapiens
  misc_RNA (1)...(19): siRNA sense strand
gacgaagcaggccuuuauu

SEQ ID NO: 266302 - RNA, 19 nt, Homo sapiens
  misc_RNA (1)...(19): siRNA sense strand
ccaagguuuccaagauaaa

SEQ ID NO: 266303 - RNA, 19 nt, Homo sapiens
  misc_RNA (1)...(19): siRNA sense strand
gaaaaccgauaaagaacac

SEQ ID NO: 266304 - RNA, 19 nt, Homo sapiens
  misc_RNA (1)...(19): siRNA sense strand
agaaggaagaugaacaugu

SEQ ID NO: 266305 - RNA, 19 nt, Homo sapiens
  misc_RNA (1)...(19): siRNA sense strand
gagggcgaguucagcaaag

SEQ ID NO: 266306 - RNA, 19 nt, Homo sapiens
  misc_RNA (1)...(19): siRNA sense strand
gagcaggaaagaugaugca

SEQ ID NO: 266307 - RNA, 19 nt, Homo sapiens
  misc_RNA (1)...(19): siRNA sense strand
gcaaucucuugucucacau

SEQ ID NO: 266308 - RNA, 19 nt, Homo sapiens
  misc_RNA (1)...(19): siRNA sense strand
acaaauugaagauggaugu

SEQ ID NO: 266309 - RNA, 19 nt, Homo sapiens
  misc_RNA (1)...(19): siRNA sense strand
gggacuuacaggaucgaua

SEQ ID NO: 266310 - RNA, 19 nt, Homo sapiens
  misc_RNA (1)...(19): siRNA sense strand
gcccagacaggcucagguu

SEQ ID NO: 266311 - RNA, 19 nt, Homo sapiens
  misc_RNA (1)...(19): siRNA sense strand
cugcugcuguugagugaga

SEQ ID NO: 266312 - RNA, 19 nt, Homo sapiens
  misc_RNA (1)...(19): siRNA sense strand
gaaggugcugacaaagaug

SEQ ID NO: 266313 - RNA, 19 nt, Homo sapiens
  misc_RNA (1)...(19): siRNA sense strand
cucacaugcuagcaacaua

SEQ ID NO: 266314 - RNA, 19 nt, Homo sapiens
  misc_RNA (1)...(19): siRNA sense strand
ggaagguacaaacacaagu

SEQ ID NO: 266315 - RNA, 19 nt, Homo sapiens
  misc_RNA (1)...(19): siRNA sense strand
auccagaccucuacaagca

SEQ ID NO: 266316 - RNA, 19 nt, Homo sapiens
  misc_RNA (1)...(19): siRNA sense strand
gugucgauuucaccaagaa

SEQ ID NO: 266317 - RNA, 19 nt, Homo sapiens
  misc_RNA (1)...(19): siRNA sense strand
gaucccaagguuuccaaga

SEQ ID NO: 266318 - RNA, 19 nt, Homo sapiens
  misc_RNA (1)...(19): siRNA sense strand
guucaggaagguacaaaca

SEQ ID NO: 266319 - RNA, 19 nt, Homo sapiens
  misc_RNA (1)...(19): siRNA sense strand
gacaggcucagguuuccuu

SEQ ID NO: 266320 - RNA, 19 nt, Homo sapiens
  misc_RNA (1)...(19): siRNA sense strand
gcucaagauaagucaguug

SEQ ID NO: 266321 - RNA, 19 nt, Homo sapiens
  misc_RNA (1)...(19): siRNA sense strand
aaacgaacugggaaaauuu

SEQ ID NO: 266322 - RNA, 19 nt, Homo sapiens
  misc_RNA (1)...(19): siRNA sense strand
cugaaggugcugacaaaga

SEQ ID NO: 266323 - RNA, 19 nt, Homo sapiens
  misc_RNA (1)...(19): siRNA sense strand
ugaagauggauguuuguca

SEQ ID NO: 266324 - RNA, 19 nt, Homo sapiens
  misc_RNA (1)...(19): siRNA sense strand
gagcuguuucauucaauuc

SEQ ID NO: 266325 - RNA, 19 nt, Homo sapiens
  misc_RNA (1)...(19): siRNA sense strand
gaaguucaggaagguacaa

SEQ ID NO: 266326 - RNA, 19 nt, Homo sapiens
  misc_RNA (1)...(19): siRNA sense strand
gaugcaagcgacaggaaag

SEQ ID NO: 266327 - RNA, 19 nt, Homo sapiens
  misc_RNA (1)...(19): siRNA sense strand
gauaaaaccagagcaggaa

SEQ ID NO: 266328 - RNA, 19 nt, Homo sapiens
  misc_RNA (1)...(19): siRNA sense strand
ccgauaaagaacacgaauu

SEQ ID NO: 266329 - RNA, 19 nt, Homo sapiens
  misc_RNA (1)...(19): siRNA sense strand
ugaccucgacccacucuca

SEQ ID NO: 266330 - RNA, 19 nt, Homo sapiens
  misc_RNA (1)...(19): siRNA sense strand
uagagcuguuucauucaau

SEQ ID NO: 266331 - RNA, 19 nt, Homo sapiens
  misc_RNA (1)...(19): siRNA sense strand
gaaggaagaugaacauguu

SEQ ID NO: 266332 - RNA, 19 nt, Homo sapiens
  misc_RNA (1)...(19): siRNA sense strand
caagauaagucaguuguaa

SEQ ID NO: 266333 - RNA, 19 nt, Homo sapiens
  misc_RNA (1)...(19): siRNA sense strand
gaaagcaauuguacucuau

SEQ ID NO: 266334 - RNA, 19 nt, Homo sapiens
  misc_RNA (1)...(19): siRNA sense strand
ggacacaaaugcaguuauc

SEQ ID NO: 266335 - RNA, 19 nt, Homo sapiens
  misc_RNA (1)...(19): siRNA sense strand
gaaccugucuggacuuauc

SEQ ID NO: 266336 - RNA, 19 nt, Homo sapiens
  misc_RNA (1)...(19): siRNA sense strand
gagaaccugucuggacuua

SEQ ID NO: 266337 - RNA, 19 nt, Homo sapiens
  misc_RNA (1)...(19): siRNA sense strand
ggaccuggaugccaagcua

SEQ ID NO: 266338 - RNA, 19 nt, Homo sapiens
  misc_RNA (1)...(19): siRNA sense strand
gcaauuguacucuaucaaa

SEQ ID NO: 266339 - RNA, 19 nt, Homo sapiens
  misc_RNA (1)...(19): siRNA sense strand
ggacuuaucgaaagcaauu

SEQ ID NO: 266340 - RNA, 19 nt, Homo sapiens
  misc_RNA (1)...(19): siRNA sense strand
cgaaagcaauuguacucua

SEQ ID NO: 266341 - RNA, 19 nt, Homo sapiens
  misc_RNA (1)...(19): siRNA sense strand
cgaagcaggccuuuauuaa

SEQ ID NO: 266342 - RNA, 19 nt, Homo sapiens
  misc_RNA (1)...(19): siRNA sense strand
guaaauaagaugcaacaga

SEQ ID NO: 266343 - RNA, 19 nt, Homo sapiens
  misc_RNA (1)...(19): siRNA sense strand
ggacuuacaggaucgauau

SEQ ID NO: 266344 - RNA, 19 nt, Homo sapiens
  misc_RNA (1)...(19): siRNA sense strand
gaagaaggaagaugaacau

SEQ ID NO: 266345 - RNA, 19 nt, Homo sapiens
  misc_RNA (1)...(19): siRNA sense strand
ggaucgauaugcucaagau

SEQ ID NO: 266346 - RNA, 19 nt, Homo sapiens
  misc_RNA (1)...(19): siRNA sense strand
agacgaagcaggccuuuau

SEQ ID NO: 266347 - RNA, 19 nt, Homo sapiens
  misc_RNA (1)...(19): siRNA sense strand
ggaagaaggaagaugaaca

SEQ ID NO: 266348 - RNA, 19 nt, Homo sapiens
  misc_RNA (1)...(19): siRNA sense strand
cuagagcuguuucauucaa

SEQ ID NO: 266349 - RNA, 19 nt, Homo sapiens
  misc_RNA (1)...(19): siRNA sense strand
ccacagggaagaaggaaga

SEQ ID NO: 266350 - RNA, 19 nt, Homo sapiens
  misc_RNA (1)...(19): siRNA sense strand
acgaagcaggccuuuauua

SEQ ID NO: 266351 - RNA, 19 nt, Homo sapiens
  misc_RNA (1)...(19): siRNA sense strand
cagggaagaaggaagauga

SEQ ID NO: 266352 - RNA, 19 nt, Homo sapiens
  misc_RNA (1)...(19): siRNA sense strand
gaucgauaugcucaagaua

SEQ ID NO: 266353 - RNA, 19 nt, Homo sapiens
  misc_RNA (1)...(19): siRNA sense strand
ugucuggacuuaucgaaag

SEQ ID NO: 266354 - RNA, 19 nt, Homo sapiens
  misc_RNA (1)...(19): siRNA sense strand
ucgauaugcucaagauaag

SEQ ID NO: 266355 - RNA, 19 nt, Homo sapiens
  misc_RNA (1)...(19): siRNA sense strand
gauaugcucaagauaaguc

SEQ ID NO: 266356 - RNA, 19 nt, Homo sapiens
  misc_RNA (1)...(19): siRNA sense strand
aagcaauuguacucuauca

SEQ ID NO: 266357 - RNA, 19 nt, Homo sapiens
  misc_RNA (1)...(19): siRNA sense strand
agaaauauugggagacgaa

SEQ ID NO: 266358 - RNA, 19 nt, Homo sapiens
  misc_RNA (1)...(19): siRNA sense strand
gagacgaagcaggccuuua

SEQ ID NO: 266359 - RNA, 19 nt, Homo sapiens
  misc_RNA (1)...(19): siRNA sense strand
agagcuguuucauucaauu

SEQ ID NO: 266360 - RNA, 19 nt, Homo sapiens
  misc_RNA (1)...(19): siRNA sense strand
agaugcaacagaaauauug

SEQ ID NO: 266361 - RNA, 19 nt, Homo sapiens
  misc_RNA (1)...(19): siRNA sense strand
ucaagauaagucaguugua

SEQ ID NO: 266362 - RNA, 19 nt, Homo sapiens
  misc_RNA (1)...(19): siRNA sense strand
gacgaagcaggccuuuauu

SEQ ID NO: 266363 - RNA, 19 nt, Homo sapiens
  misc_RNA (1)...(19): siRNA sense strand
agaaggaagaugaacaugu

SEQ ID NO: 266364 - RNA, 19 nt, Homo sapiens
  misc_RNA (1)...(19): siRNA sense strand
gggacuuacaggaucgaua

SEQ ID NO: 266365 - RNA, 19 nt, Homo sapiens
  misc_RNA (1)...(19): siRNA sense strand
gcucaagauaagucaguug

SEQ ID NO: 266366 - RNA, 19 nt, Homo sapiens
  misc_RNA (1)...(19): siRNA sense strand
gagcuguuucauucaauuc

SEQ ID NO: 266367 - RNA, 19 nt, Homo sapiens
  misc_RNA (1)...(19): siRNA sense strand
uagagcuguuucauucaau

SEQ ID NO: 266368 - RNA, 19 nt, Homo sapiens
  misc_RNA (1)...(19): siRNA sense strand
caggaucgauaugcucaag

SEQ ID NO: 266369 - RNA, 19 nt, Homo sapiens
  misc_RNA (1)...(19): siRNA sense strand
caggacacaaaugcaguua

SEQ ID NO: 266370 - RNA, 19 nt, Homo sapiens
  misc_RNA (1)...(19): siRNA sense strand
ggagacgaagcaggccuuu

SEQ ID NO: 266371 - RNA, 19 nt, Homo sapiens
  misc_RNA (1)...(19): siRNA sense strand
gcaaauagauccaguucuu

SEQ ID NO: 266372 - RNA, 19 nt, Homo sapiens
  misc_RNA (1)...(19): siRNA sense strand
gagcaaagauccaagacua

SEQ ID NO: 266373 - RNA, 19 nt, Homo sapiens
  misc_RNA (1)...(19): siRNA sense strand
gccagaaacuugaaacuua

SEQ ID NO: 266374 - RNA, 19 nt, Homo sapiens
  misc_RNA (1)...(19): siRNA sense strand
guacagauuucgcagauuu

SEQ ID NO: 266375 - RNA, 19 nt, Homo sapiens
  misc_RNA (1)...(19): siRNA sense strand
gaacaggauuuacaguuau

SEQ ID NO: 266376 - RNA, 19 nt, Homo sapiens
  misc_RNA (1)...(19): siRNA sense strand
gauccuggcauuaguauua

SEQ ID NO: 266377 - RNA, 19 nt, Homo sapiens
  misc_RNA (1)...(19): siRNA sense strand
agaacaggauuuacaguua

SEQ ID NO: 266378 - RNA, 19 nt, Homo sapiens
  misc_RNA (1)...(19): siRNA sense strand
gaacauccaccucuucuau

SEQ ID NO: 266379 - RNA, 19 nt, Homo sapiens
  misc_RNA (1)...(19): siRNA sense strand
acagaaugcuggaacaaua

SEQ ID NO: 266380 - RNA, 19 nt, Homo sapiens
  misc_RNA (1)...(19): siRNA sense strand
gcagauuuauucagcaauu

SEQ ID NO: 266381 - RNA, 19 nt, Homo sapiens
  misc_RNA (1)...(19): siRNA sense strand
ccagaaacuugaaacuuaa

SEQ ID NO: 266382 - RNA, 19 nt, Homo sapiens
  misc_RNA (1)...(19): siRNA sense strand
gaacgaaugguguuucuga

SEQ ID NO: 266383 - RNA, 19 nt, Homo sapiens
  misc_RNA (1)...(19): siRNA sense strand
ggaaaugccaauucuauga

SEQ ID NO: 266384 - RNA, 19 nt, Homo sapiens
  misc_RNA (1)...(19): siRNA sense strand
gaacggauagaucacauaa

SEQ ID NO: 266385 - RNA, 19 nt, Homo sapiens
  misc_RNA (1)...(19): siRNA sense strand
uacgagaucuuaacaguuu

SEQ ID NO: 266386 - RNA, 19 nt, Homo sapiens
  misc_RNA (1)...(19): siRNA sense strand
gaagagaaguaggagacua

SEQ ID NO: 266387 - RNA, 19 nt, Homo sapiens
  misc_RNA (1)...(19): siRNA sense strand
ggaauggccugccuuacga

SEQ ID NO: 266388 - RNA, 19 nt, Homo sapiens
  misc_RNA (1)...(19): siRNA sense strand
cgaauaagguacagauuuc

SEQ ID NO: 266389 - RNA, 19 nt, Homo sapiens
  misc_RNA (1)...(19): siRNA sense strand
ugucaugucuuaccucuuu

SEQ ID NO: 266390 - RNA, 19 nt, Homo sapiens
  misc_RNA (1)...(19): siRNA sense strand
ugaaaucccuacagcauga

SEQ ID NO: 266391 - RNA, 19 nt, Homo sapiens
  misc_RNA (1)...(19): siRNA sense strand
gaaauauauugguggagaa

SEQ ID NO: 266392 - RNA, 19 nt, Homo sapiens
  misc_RNA (1)...(19): siRNA sense strand
gaauuuaugcguaugauug

SEQ ID NO: 266393 - RNA, 19 nt, Homo sapiens
  misc_RNA (1)...(19): siRNA sense strand
gcacaucauuaccucugua

SEQ ID NO: 266394 - RNA, 19 nt, Homo sapiens
  misc_RNA (1)...(19): siRNA sense strand
uuacagaggccuacucaua

SEQ ID NO: 266395 - RNA, 19 nt, Homo sapiens
  misc_RNA (1)...(19): siRNA sense strand
gauccaagacuaucauauu

SEQ ID NO: 266396 - RNA, 19 nt, Homo sapiens
  misc_RNA (1)...(19): siRNA sense strand
gcaaggguauggaguaucu

SEQ ID NO: 266397 - RNA, 19 nt, Homo sapiens
  misc_RNA (1)...(19): siRNA sense strand
ggagauaaaccucuaagug

SEQ ID NO: 266398 - RNA, 19 nt, Homo sapiens
  misc_RNA (1)...(19): siRNA sense strand
gaaugguguuucugaugua

SEQ ID NO: 266399 - RNA, 19 nt, Homo sapiens
  misc_RNA (1)...(19): siRNA sense strand
gggaguauguugcagaaga

SEQ ID NO: 266400 - RNA, 19 nt, Homo sapiens
  misc_RNA (1)...(19): siRNA sense strand
gcaaagccacugccagaaa

SEQ ID NO: 266401 - RNA, 19 nt, Homo sapiens
  misc_RNA (1)...(19): siRNA sense strand
caaggaagcgaauaaggua

SEQ ID NO: 266402 - RNA, 19 nt, Homo sapiens
  misc_RNA (1)...(19): siRNA sense strand
ucacauacauugagaagag

SEQ ID NO: 266403 - RNA, 19 nt, Homo sapiens
  misc_RNA (1)...(19): siRNA sense strand
gaaacuauucagagucuuu

SEQ ID NO: 266404 - RNA, 19 nt, Homo sapiens
  misc_RNA (1)...(19): siRNA sense strand
gcgaauaagguacagauuu

SEQ ID NO: 266405 - RNA, 19 nt, Homo sapiens
  misc_RNA (1)...(19): siRNA sense strand
gaaagcagguaaucagacu

SEQ ID NO: 266406 - RNA, 19 nt, Homo sapiens
  misc_RNA (1)...(19): siRNA sense strand
gaacgagaacagaguuaaa

SEQ ID NO: 266407 - RNA, 19 nt, Homo sapiens
  misc_RNA (1)...(19): siRNA sense strand
uaagugcucuggauucuca

SEQ ID NO: 266408 - RNA, 19 nt, Homo sapiens
  misc_RNA (1)...(19): siRNA sense strand
gaacuucagcagucuuaaa

SEQ ID NO: 266409 - RNA, 19 nt, Homo sapiens
  misc_RNA (1)...(19): siRNA sense strand
ccaauucuaugaagcaaau

SEQ ID NO: 266410 - RNA, 19 nt, Homo sapiens
  misc_RNA (1)...(19): siRNA sense strand
ggaauucaguggucaagag

SEQ ID NO: 266411 - RNA, 19 nt, Homo sapiens
  misc_RNA (1)...(19): siRNA sense strand
ggaguauguugcagaagaa

SEQ ID NO: 266412 - RNA, 19 nt, Homo sapiens
  misc_RNA (1)...(19): siRNA sense strand
gaagaaagcagguaaucag

SEQ ID NO: 266413 - RNA, 19 nt, Homo sapiens
  misc_RNA (1)...(19): siRNA sense strand
gaacagaguuaaaauugga

SEQ ID NO: 266414 - RNA, 19 nt, Homo sapiens
  misc_RNA (1)...(19): siRNA sense strand
gaaaugccaauucuaugaa

SEQ ID NO: 266415 - RNA, 19 nt, Homo sapiens
  misc_RNA (1)...(19): siRNA sense strand
ugaaguugcuaaacaguug

SEQ ID NO: 266416 - RNA, 19 nt, Homo sapiens
  misc_RNA (1)...(19): siRNA sense strand
guaccaaccucaccaacau

SEQ ID NO: 266417 - RNA, 19 nt, Homo sapiens
  misc_RNA (1)...(19): siRNA sense strand
ggauggcaguguuagauau

SEQ ID NO: 266418 - RNA, 19 nt, Homo sapiens
  misc_RNA (1)...(19): siRNA sense strand
ccagauggaugcccagaug

SEQ ID NO: 266419 - RNA, 19 nt, Homo sapiens
  misc_RNA (1)...(19): siRNA sense strand
gaucuggcaacgagaaaua

SEQ ID NO: 266420 - RNA, 19 nt, Homo sapiens
  misc_RNA (1)...(19): siRNA sense strand
uaagggaagcuuugucuuu

SEQ ID NO: 266421 - RNA, 19 nt, Homo sapiens
  misc_RNA (1)...(19): siRNA sense strand
ggaaacauaaagaaaguga

SEQ ID NO: 266422 - RNA, 19 nt, Homo sapiens
  misc_RNA (1)...(19): siRNA sense strand
caacugucauggcccaauu

SEQ ID NO: 266423 - RNA, 19 nt, Homo sapiens
  misc_RNA (1)...(19): siRNA sense strand
aaucaaaccuucuagucuu

SEQ ID NO: 266424 - RNA, 19 nt, Homo sapiens
  misc_RNA (1)...(19): siRNA sense strand
gguauggaguaucuuggua

SEQ ID NO: 266425 - RNA, 19 nt, Homo sapiens
  misc_RNA (1)...(19): siRNA sense strand
gcaauucagccaaugcaaa

SEQ ID NO: 266426 - RNA, 19 nt, Homo sapiens
  misc_RNA (1)...(19): siRNA sense strand
gaucguguuccauuugaua

SEQ ID NO: 266427 - RNA, 19 nt, Homo sapiens
  misc_RNA (1)...(19): siRNA sense strand
gcagaauuagcaaaccuua

SEQ ID NO: 266428 - RNA, 19 nt, Homo sapiens
  misc_RNA (1)...(19): siRNA sense strand
ccaccugaaugcauugaaa

SEQ ID NO: 266429 - RNA, 19 nt, Homo sapiens
  misc_RNA (1)...(19): siRNA sense strand
cgaaugguguuucugaugu

SEQ ID NO: 266430 - RNA, 19 nt, Homo sapiens
  misc_RNA (1)...(19): siRNA sense strand
gaaaacacccuuauucaug

SEQ ID NO: 266431 - RNA, 19 nt, Homo sapiens
  misc_RNA (1)...(19): siRNA sense strand
uuacgagacuaucuucaaa

SEQ ID NO: 266432 - RNA, 19 nt, Homo sapiens
  misc_RNA (1)...(19): siRNA sense strand
gaagaaaacacccuuauuc

SEQ ID NO: 266433 - RNA, 19 nt, Homo sapiens
  misc_RNA (1)...(19): siRNA sense strand
ggaaauugaaauccugaaa

SEQ ID NO: 266434 - RNA, 19 nt, Homo sapiens
  misc_RNA (1)...(19): siRNA sense strand
gguaccaccugaaugcauu

SEQ ID NO: 266435 - RNA, 19 nt, Homo sapiens
  misc_RNA (1)...(19): siRNA sense strand
ccaaccaugucuuccauau

SEQ ID NO: 266436 - RNA, 19 nt, Homo sapiens
  misc_RNA (1)...(19): siRNA sense strand
gaagagcaccuaagagacu

SEQ ID NO: 266437 - RNA, 19 nt, Homo sapiens
  misc_RNA (1)...(19): siRNA sense strand
aaccaugucuuccauauag

SEQ ID NO: 266438 - RNA, 19 nt, Homo sapiens
  misc_RNA (1)...(19): siRNA sense strand
uggaguaucuugguacaaa

SEQ ID NO: 266439 - RNA, 19 nt, Homo sapiens
  misc_RNA (1)...(19): siRNA sense strand
cauacgagaucuuaacagu

SEQ ID NO: 266440 - RNA, 19 nt, Homo sapiens
  misc_RNA (1)...(19): siRNA sense strand
gaagacaggaagacaggaa

SEQ ID NO: 266441 - RNA, 19 nt, Homo sapiens
  misc_RNA (1)...(19): siRNA sense strand
cagcaaguaugaugagcaa

SEQ ID NO: 266442 - RNA, 19 nt, Homo sapiens
  misc_RNA (1)...(19): siRNA sense strand
ggucaagagggaaacauaa

SEQ ID NO: 266443 - RNA, 19 nt, Homo sapiens
  misc_RNA (1)...(19): siRNA sense strand
aaugaaagccgaguuguaa

SEQ ID NO: 266444 - RNA, 19 nt, Homo sapiens
  misc_RNA (1)...(19): siRNA sense strand
gcaccaaagugggcagaau

SEQ ID NO: 266445 - RNA, 19 nt, Homo sapiens
  misc_RNA (1)...(19): siRNA sense strand
gagcaagcuuucucacaag

SEQ ID NO: 266446 - RNA, 19 nt, Homo sapiens
  misc_RNA (1)...(19): siRNA sense strand
caaaugguguuucacaaaa

SEQ ID NO: 266447 - RNA, 19 nt, Homo sapiens
  misc_RNA (1)...(19): siRNA sense strand
ccaaaugguguuucacaaa

SEQ ID NO: 266448 - RNA, 19 nt, Homo sapiens
  misc_RNA (1)...(19): siRNA sense strand
cuacucauaugaaccaaau

SEQ ID NO: 266449 - RNA, 19 nt, Homo sapiens
  misc_RNA (1)...(19): siRNA sense strand
uaaucagacuggacuguau

SEQ ID NO: 266450 - RNA, 19 nt, Homo sapiens
  misc_RNA (1)...(19): siRNA sense strand
ucaaauaagggauaacaug

SEQ ID NO: 266451 - RNA, 19 nt, Homo sapiens
  misc_RNA (1)...(19): siRNA sense strand
uaucugaccuuuccaucug

SEQ ID NO: 266452 - RNA, 19 nt, Homo sapiens
  misc_RNA (1)...(19): siRNA sense strand
caacagacaaauggaguuu

SEQ ID NO: 266453 - RNA, 19 nt, Homo sapiens
  misc_RNA (1)...(19): siRNA sense strand
ggauaaagcacacagaaac

SEQ ID NO: 266454 - RNA, 19 nt, Homo sapiens
  misc_RNA (1)...(19): siRNA sense strand
caagagggaaacauaaaga

SEQ ID NO: 266455 - RNA, 19 nt, Homo sapiens
  misc_RNA (1)...(19): siRNA sense strand
gagaacgagaacagaguua

SEQ ID NO: 266456 - RNA, 19 nt, Homo sapiens
  misc_RNA (1)...(19): siRNA sense strand
cagaaacuauucagagucu

SEQ ID NO: 266457 - RNA, 19 nt, Homo sapiens
  misc_RNA (1)...(19): siRNA sense strand
gaugagaauagccaaagaa

SEQ ID NO: 266458 - RNA, 19 nt, Homo sapiens
  misc_RNA (1)...(19): siRNA sense strand
cagcggaauuuaugcguau

SEQ ID NO: 266459 - RNA, 19 nt, Homo sapiens
  misc_RNA (1)...(19): siRNA sense strand
ggcauuaguauuacaguuu

SEQ ID NO: 266460 - RNA, 19 nt, Homo sapiens
  misc_RNA (1)...(19): siRNA sense strand
uuggaucacuagauacaua

SEQ ID NO: 266461 - RNA, 19 nt, Homo sapiens
  misc_RNA (1)...(19): siRNA sense strand
ugacagaacaggauuuaca

SEQ ID NO: 266462 - RNA, 19 nt, Homo sapiens
  misc_RNA (1)...(19): siRNA sense strand
gcaaagauccaagacuauc

SEQ ID NO: 266463 - RNA, 19 nt, Homo sapiens
  misc_RNA (1)...(19): siRNA sense strand
gcuggucggcguaaucuaa

SEQ ID NO: 266464 - RNA, 19 nt, Homo sapiens
  misc_RNA (1)...(19): siRNA sense strand
gcaccuaagagacuuugaa

SEQ ID NO: 266465 - RNA, 19 nt, Homo sapiens
  misc_RNA (1)...(19): siRNA sense strand
ucaacugcaugaaacagaa

SEQ ID NO: 266466 - RNA, 19 nt, Homo sapiens
  misc_RNA (1)...(19): siRNA sense strand
caaagccacugccagaaac

SEQ ID NO: 266467 - RNA, 19 nt, Homo sapiens
  misc_RNA (1)...(19): siRNA sense strand
ggacauucuucaggagaga

SEQ ID NO: 266468 - RNA, 19 nt, Homo sapiens
  misc_RNA (1)...(19): siRNA sense strand
ucacaagcauuugguuuua

SEQ ID NO: 266469 - RNA, 19 nt, Homo sapiens
  misc_RNA (1)...(19): siRNA sense strand
gaaauugaacuuagcucau

SEQ ID NO: 266470 - RNA, 19 nt, Homo sapiens
  misc_RNA (1)...(19): siRNA sense strand
gugagacacugacagaaca

SEQ ID NO: 266471 - RNA, 19 nt, Homo sapiens
  misc_RNA (1)...(19): siRNA sense strand
ggacagaguuggcugagaa

SEQ ID NO: 266472 - RNA, 19 nt, Homo sapiens
  misc_RNA (1)...(19): siRNA sense strand
agaagugccucuaccauua

SEQ ID NO: 266473 - RNA, 19 nt, Homo sapiens
  misc_RNA (1)...(19): siRNA sense strand
gcagguguguuaacuauug

SEQ ID NO: 266474 - RNA, 19 nt, Homo sapiens
  misc_RNA (1)...(19): siRNA sense strand
gaacaucauugacauugug

SEQ ID NO: 266475 - RNA, 19 nt, Homo sapiens
  misc_RNA (1)...(19): siRNA sense strand
gaaugugcccuuagauaua

SEQ ID NO: 266476 - RNA, 19 nt, Homo sapiens
  misc_RNA (1)...(19): siRNA sense strand
gauuauagcuauugugucu

SEQ ID NO: 266477 - RNA, 19 nt, Homo sapiens
  misc_RNA (1)...(19): siRNA sense strand
gagaggaacaggcccaaua

SEQ ID NO: 266478 - RNA, 19 nt, Homo sapiens
  misc_RNA (1)...(19): siRNA sense strand
ggaacaggcccaauacuug

SEQ ID NO: 266479 - RNA, 19 nt, Homo sapiens
  misc_RNA (1)...(19): siRNA sense strand
caaagaaacgaaugaggua

SEQ ID NO: 266480 - RNA, 19 nt, Homo sapiens
  misc_RNA (1)...(19): siRNA sense strand
gaauugggccuccugauau

SEQ ID NO: 266481 - RNA, 19 nt, Homo sapiens
  misc_RNA (1)...(19): siRNA sense strand
aauguuaacugaugucuga

SEQ ID NO: 266482 - RNA, 19 nt, Homo sapiens
  misc_RNA (1)...(19): siRNA sense strand
ccaaaggucuccagauucu

SEQ ID NO: 266483 - RNA, 19 nt, Homo sapiens
  misc_RNA (1)...(19): siRNA sense strand
uguguuaacuauugccuua

SEQ ID NO: 266484 - RNA, 19 nt, Homo sapiens
  misc_RNA (1)...(19): siRNA sense strand
uaacaguaaugaggacuuu

SEQ ID NO: 266485 - RNA, 19 nt, Homo sapiens
  misc_RNA (1)...(19): siRNA sense strand
guaaugaggacuuuagaga

SEQ ID NO: 266486 - RNA, 19 nt, Homo sapiens
  misc_RNA (1)...(19): siRNA sense strand
caugacaacuguaggcuau

SEQ ID NO: 266487 - RNA, 19 nt, Homo sapiens
  misc_RNA (1)...(19): siRNA sense strand
gaaccgcccuagcuuugau

SEQ ID NO: 266488 - RNA, 19 nt, Homo sapiens
  misc_RNA (1)...(19): siRNA sense strand
cacagacccuuucuucauu

SEQ ID NO: 266489 - RNA, 19 nt, Homo sapiens
  misc_RNA (1)...(19): siRNA sense strand
ggaugagaaugaagacaug

SEQ ID NO: 266490 - RNA, 19 nt, Homo sapiens
  misc_RNA (1)...(19): siRNA sense strand
gcagucgucuccaugacaa

SEQ ID NO: 266491 - RNA, 19 nt, Homo sapiens
  misc_RNA (1)...(19): siRNA sense strand
gcaguccacuuccuucaca

SEQ ID NO: 266492 - RNA, 19 nt, Homo sapiens
  misc_RNA (1)...(19): siRNA sense strand
aagaagcgauggagauguu

SEQ ID NO: 266493 - RNA, 19 nt, Homo sapiens
  misc_RNA (1)...(19): siRNA sense strand
gugaaugugcccuuagaua

SEQ ID NO: 266494 - RNA, 19 nt, Homo sapiens
  misc_RNA (1)...(19): siRNA sense strand
gagaagaagcgauggagau

SEQ ID NO: 266495 - RNA, 19 nt, Homo sapiens
  misc_RNA (1)...(19): siRNA sense strand
agaauugggccuccugaua

SEQ ID NO: 266496 - RNA, 19 nt, Homo sapiens
  misc_RNA (1)...(19): siRNA sense strand
cuccaaaggucuccagauu

SEQ ID NO: 266497 - RNA, 19 nt, Homo sapiens
  misc_RNA (1)...(19): siRNA sense strand
gagacacucugcaucaucu

SEQ ID NO: 266498 - RNA, 19 nt, Homo sapiens
  misc_RNA (1)...(19): siRNA sense strand
ggagacagagggagaggaa

SEQ ID NO: 266499 - RNA, 19 nt, Homo sapiens
  misc_RNA (1)...(19): siRNA sense strand
ugaaugugcccuuagauau

SEQ ID NO: 266500 - RNA, 19 nt, Homo sapiens
  misc_RNA (1)...(19): siRNA sense strand
gcccuuagauauauucucu

SEQ ID NO: 266501 - RNA, 19 nt, Homo sapiens
  misc_RNA (1)...(19): siRNA sense strand
ucucagggcugcgguuuga

SEQ ID NO: 266502 - RNA, 19 nt, Homo sapiens
  misc_RNA (1)...(19): siRNA sense strand
ccuuagauauauucucuga

SEQ ID NO: 266503 - RNA, 19 nt, Homo sapiens
  misc_RNA (1)...(19): siRNA sense strand
ggagacaugguuccgacua

SEQ ID NO: 266504 - RNA, 19 nt, Homo sapiens
  misc_RNA (1)...(19): siRNA sense strand
gcuucugucuggaaacauu

SEQ ID NO: 266505 - RNA, 19 nt, Homo sapiens
  misc_RNA (1)...(19): siRNA sense strand
aaguguggcuucucuuuga

SEQ ID NO: 266506 - RNA, 19 nt, Homo sapiens
  misc_RNA (1)...(19): siRNA sense strand
ggagauguuucgggaagau

SEQ ID NO: 266507 - RNA, 19 nt, Homo sapiens
  misc_RNA (1)...(19): siRNA sense strand
ucaccaacaucaugaacau

SEQ ID NO: 266508 - RNA, 19 nt, Homo sapiens
  misc_RNA (1)...(19): siRNA sense strand
ucacagacccuuucuucau

SEQ ID NO: 266509 - RNA, 19 nt, Homo sapiens
  misc_RNA (1)...(19): siRNA sense strand
gaccacgagugcugugaga

SEQ ID NO: 266510 - RNA, 19 nt, Homo sapiens
  misc_RNA (1)...(19): siRNA sense strand
auucugaucucaauuguca

SEQ ID NO: 266511 - RNA, 19 nt, Homo sapiens
  misc_RNA (1)...(19): siRNA sense strand
ccauuaguaagucugauua

SEQ ID NO: 266512 - RNA, 19 nt, Homo sapiens
  misc_RNA (1)...(19): siRNA sense strand
ggaaacauugcccaucuuc

SEQ ID NO: 266513 - RNA, 19 nt, Homo sapiens
  misc_RNA (1)...(19): siRNA sense strand
uaaagaccuuagcccaguu

SEQ ID NO: 266514 - RNA, 19 nt, Homo sapiens
  misc_RNA (1)...(19): siRNA sense strand
gugagaggguggugaucaa

SEQ ID NO: 266515 - RNA, 19 nt, Homo sapiens
  misc_RNA (1)...(19): siRNA sense strand
gaggaaaacuugaaaacag

SEQ ID NO: 266516 - RNA, 19 nt, Homo sapiens
  misc_RNA (1)...(19): siRNA sense strand
ccuccgaaaugaguacuuu

SEQ ID NO: 266517 - RNA, 19 nt, Homo sapiens
  misc_RNA (1)...(19): siRNA sense strand
gacccuuucuucauuguag

SEQ ID NO: 266518 - RNA, 19 nt, Homo sapiens
  misc_RNA (1)...(19): siRNA sense strand
uuuaugagcugggagaaga

SEQ ID NO: 266519 - RNA, 19 nt, Homo sapiens
  misc_RNA (1)...(19): siRNA sense strand
aaugugcccuuagauauau

SEQ ID NO: 266520 - RNA, 19 nt, Homo sapiens
  misc_RNA (1)...(19): siRNA sense strand
cgauugaggcgaccuguga

SEQ ID NO: 266521 - RNA, 19 nt, Homo sapiens
  misc_RNA (1)...(19): siRNA sense strand
gaagaaauucgguuuuaug

SEQ ID NO: 266522 - RNA, 19 nt, Homo sapiens
  misc_RNA (1)...(19): siRNA sense strand
ccaggaggguguaaauaac

SEQ ID NO: 266523 - RNA, 19 nt, Homo sapiens
  misc_RNA (1)...(19): siRNA sense strand
aaacgaaugagguacuuug

SEQ ID NO: 266524 - RNA, 19 nt, Homo sapiens
  misc_RNA (1)...(19): siRNA sense strand
gaagugccucuaccauuag

SEQ ID NO: 266525 - RNA, 19 nt, Homo sapiens
  misc_RNA (1)...(19): siRNA sense strand
agacaaguguggcuucucu

SEQ ID NO: 266526 - RNA, 19 nt, Homo sapiens
  misc_RNA (1)...(19): siRNA sense strand
gaaacgaaugagguacuuu

SEQ ID NO: 266527 - RNA, 19 nt, Homo sapiens
  misc_RNA (1)...(19): siRNA sense strand
guaccuuggcuaacacaaa

SEQ ID NO: 266528 - RNA, 19 nt, Homo sapiens
  misc_RNA (1)...(19): siRNA sense strand
gaggcgaccugugaaugug

SEQ ID NO: 266529 - RNA, 19 nt, Homo sapiens
  misc_RNA (1)...(19): siRNA sense strand
uugcagguguguuaacuau

SEQ ID NO: 266530 - RNA, 19 nt, Homo sapiens
  misc_RNA (1)...(19): siRNA sense strand
ucucuagugcuguguauuu

SEQ ID NO: 266531 - RNA, 19 nt, Homo sapiens
  misc_RNA (1)...(19): siRNA sense strand
caucaucugguucuccuuu

SEQ ID NO: 266532 - RNA, 19 nt, Homo sapiens
  misc_RNA (1)...(19): siRNA sense strand
agacccagcuaaagaccuu

SEQ ID NO: 266533 - RNA, 19 nt, Homo sapiens
  misc_RNA (1)...(19): siRNA sense strand
uccaggaggguguaaauaa

SEQ ID NO: 266534 - RNA, 19 nt, Homo sapiens
  misc_RNA (1)...(19): siRNA sense strand
guucuccuuugaauucuug

SEQ ID NO: 266535 - RNA, 19 nt, Homo sapiens
  misc_RNA (1)...(19): siRNA sense strand
gaagacaugcaugguagug

SEQ ID NO: 266536 - RNA, 19 nt, Homo sapiens
  misc_RNA (1)...(19): siRNA sense strand
uguggcuucucuuugaaua

SEQ ID NO: 266537 - RNA, 19 nt, Homo sapiens
  misc_RNA (1)...(19): siRNA sense strand
gauccaggaggguguaaau

SEQ ID NO: 266538 - RNA, 19 nt, Homo sapiens
  misc_RNA (1)...(19): siRNA sense strand
gaucggaaccgcccuagcu

SEQ ID NO: 266539 - RNA, 19 nt, Homo sapiens
  misc_RNA (1)...(19): siRNA sense strand
gagacaugguuccgacuac

SEQ ID NO: 266540 - RNA, 19 nt, Homo sapiens
  misc_RNA (1)...(19): siRNA sense strand
gguuugagacccagcuaaa

SEQ ID NO: 266541 - RNA, 19 nt, Homo sapiens
  misc_RNA (1)...(19): siRNA sense strand
gaagaagcgauggagaugu

SEQ ID NO: 266542 - RNA, 19 nt, Homo sapiens
  misc_RNA (1)...(19): siRNA sense strand
aauugggccuccugauauu

SEQ ID NO: 266543 - RNA, 19 nt, Homo sapiens
  misc_RNA (1)...(19): siRNA sense strand
acagacccuuucuucauug

SEQ ID NO: 266544 - RNA, 19 nt, Homo sapiens
  misc_RNA (1)...(19): siRNA sense strand
uuauagcuauugugucugu

SEQ ID NO: 266545 - RNA, 19 nt, Homo sapiens
  misc_RNA (1)...(19): siRNA sense strand
caaguguggcuucucuuug

SEQ ID NO: 266546 - RNA, 19 nt, Homo sapiens
  misc_RNA (1)...(19): siRNA sense strand
gagcguccucugccugaaa

SEQ ID NO: 266547 - RNA, 19 nt, Homo sapiens
  misc_RNA (1)...(19): siRNA sense strand
cugaagaaauucgguuuua

SEQ ID NO: 266548 - RNA, 19 nt, Homo sapiens
  misc_RNA (1)...(19): siRNA sense strand
ggguguaaauaacaguaau

SEQ ID NO: 266549 - RNA, 19 nt, Homo sapiens
  misc_RNA (1)...(19): siRNA sense strand
aaugaagacaugcauggua

SEQ ID NO: 266550 - RNA, 19 nt, Homo sapiens
  misc_RNA (1)...(19): siRNA sense strand
gugauucugaucucaauug

SEQ ID NO: 266551 - RNA, 19 nt, Homo sapiens
  misc_RNA (1)...(19): siRNA sense strand
agaaacgaaugagguacuu

SEQ ID NO: 266552 - RNA, 19 nt, Homo sapiens
  misc_RNA (1)...(19): siRNA sense strand
gaggguguaaauaacagua

SEQ ID NO: 266553 - RNA, 19 nt, Homo sapiens
  misc_RNA (1)...(19): siRNA sense strand
ugaacaucauugacauugu

SEQ ID NO: 266554 - RNA, 19 nt, Homo sapiens
  misc_RNA (1)...(19): siRNA sense strand
acaaguguggcuucucuuu

SEQ ID NO: 266555 - RNA, 19 nt, Homo sapiens
  misc_RNA (1)...(19): siRNA sense strand
aaaaugaguuucagagaca

SEQ ID NO: 266556 - RNA, 19 nt, Homo sapiens
  misc_RNA (1)...(19): siRNA sense strand
ucaucugguucuccuuuga

SEQ ID NO: 266557 - RNA, 19 nt, Homo sapiens
  misc_RNA (1)...(19): siRNA sense strand
uguaggcuauggagacaug

SEQ ID NO: 266558 - RNA, 19 nt, Homo sapiens
  misc_RNA (1)...(19): siRNA sense strand
ucaaagccagcaugagaga

SEQ ID NO: 266559 - RNA, 19 nt, Homo sapiens
  misc_RNA (1)...(19): siRNA sense strand
gacccaaagaaacgaauga

SEQ ID NO: 266560 - RNA, 19 nt, Homo sapiens
  misc_RNA (1)...(19): siRNA sense strand
ggaaccgcccuagcuuuga

SEQ ID NO: 266561 - RNA, 19 nt, Homo sapiens
  misc_RNA (1)...(19): siRNA sense strand
gugccucuaccauuaguaa

SEQ ID NO: 266562 - RNA, 19 nt, Homo sapiens
  misc_RNA (1)...(19): siRNA sense strand
uguccaauuucaacuacuu

SEQ ID NO: 266563 - RNA, 19 nt, Homo sapiens
  misc_RNA (1)...(19): siRNA sense strand
ugacaacuguaggcuaugg

SEQ ID NO: 266564 - RNA, 19 nt, Homo sapiens
  misc_RNA (1)...(19): siRNA sense strand
gggaugagaaugaagacau

SEQ ID NO: 266565 - RNA, 19 nt, Homo sapiens
  misc_RNA (1)...(19): siRNA sense strand
cagcuucugucuggaaaca

SEQ ID NO: 266566 - RNA, 19 nt, Homo sapiens
  misc_RNA (1)...(19): siRNA sense strand
gguaccagcaguccacuuc

SEQ ID NO: 266567 - RNA, 19 nt, Homo sapiens
  misc_RNA (1)...(19): siRNA sense strand
ccaggauuauagcuauugu

SEQ ID NO: 266568 - RNA, 19 nt, Homo sapiens
  misc_RNA (1)...(19): siRNA sense strand
ggagauccaggagggugua

SEQ ID NO: 266569 - RNA, 19 nt, Homo sapiens
  misc_RNA (1)...(19): siRNA sense strand
ccaauuucaacuacuucua

SEQ ID NO: 266570 - RNA, 19 nt, Homo sapiens
  misc_RNA (1)...(19): siRNA sense strand
gauugcagguguguuaacu

SEQ ID NO: 266571 - RNA, 19 nt, Homo sapiens
  misc_RNA (1)...(19): siRNA sense strand
gaaauuaacagagcaggua

SEQ ID NO: 266572 - RNA, 19 nt, Homo sapiens
  misc_RNA (1)...(19): siRNA sense strand
uaacagagcagguaggaaa

SEQ ID NO: 266573 - RNA, 19 nt, Homo sapiens
  misc_RNA (1)...(19): siRNA sense strand
caacaucauugacuuugug

SEQ ID NO: 266574 - RNA, 19 nt, Homo sapiens
  misc_RNA (1)...(19): siRNA sense strand
guaaaucugucguaaacuc

SEQ ID NO: 266575 - RNA, 19 nt, Homo sapiens
  misc_RNA (1)...(19): siRNA sense strand
cgggauguauuacuccuua

SEQ ID NO: 266576 - RNA, 19 nt, Homo sapiens
  misc_RNA (1)...(19): siRNA sense strand
gcagaaacuaccaaagaaa

SEQ ID NO: 266577 - RNA, 19 nt, Homo sapiens
  misc_RNA (1)...(19): siRNA sense strand
ggccuucgcuucccucuuc

SEQ ID NO: 266578 - RNA, 19 nt, Homo sapiens
  misc_RNA (1)...(19): siRNA sense strand
gagcccugcugcuggauga

SEQ ID NO: 266579 - RNA, 19 nt, Homo sapiens
  misc_RNA (1)...(19): siRNA sense strand
gagcacacgcacuuuaaga

SEQ ID NO: 266580 - RNA, 19 nt, Homo sapiens
  misc_RNA (1)...(19): siRNA sense strand
ccacagccacuucgacuau

SEQ ID NO: 266581 - RNA, 19 nt, Homo sapiens
  misc_RNA (1)...(19): siRNA sense strand
aagcagaaacuaccaaaga

SEQ ID NO: 266582 - RNA, 19 nt, Homo sapiens
  misc_RNA (1)...(19): siRNA sense strand
ccucaugcgugucaucuuc

SEQ ID NO: 266583 - RNA, 19 nt, Homo sapiens
  misc_RNA (1)...(19): siRNA sense strand
acaauuucgggauguauua

SEQ ID NO: 266584 - RNA, 19 nt, Homo sapiens
  misc_RNA (1)...(19): siRNA sense strand
agacggagaucgagaacgu

SEQ ID NO: 266585 - RNA, 19 nt, Homo sapiens
  misc_RNA (1)...(19): siRNA sense strand
gaacaauuucgggauguau

SEQ ID NO: 266586 - RNA, 19 nt, Homo sapiens
  misc_RNA (1)...(19): siRNA sense strand
ugaacaauuucgggaugua

SEQ ID NO: 266587 - RNA, 19 nt, Homo sapiens
  misc_RNA (1)...(19): siRNA sense strand
caagguagaguucaucaag

SEQ ID NO: 266588 - RNA, 19 nt, Homo sapiens
  misc_RNA (1)...(19): siRNA sense strand
uaagcugacccgccacuuu

SEQ ID NO: 266589 - RNA, 19 nt, Homo sapiens
  misc_RNA (1)...(19): siRNA sense strand
caagaacucgcucaacauc

SEQ ID NO: 266590 - RNA, 19 nt, Homo sapiens
  misc_RNA (1)...(19): siRNA sense strand
ccaacaagguagaguucau

SEQ ID NO: 266591 - RNA, 19 nt, Homo sapiens
  misc_RNA (1)...(19): siRNA sense strand
cuacuacgccgagaggaua

SEQ ID NO: 266592 - RNA, 19 nt, Homo sapiens
  misc_RNA (1)...(19): siRNA sense strand
gcaucuugcgcaucuuuaa

SEQ ID NO: 266593 - RNA, 19 nt, Homo sapiens
  misc_RNA (1)...(19): siRNA sense strand
gaacucgcucaacaucauu

SEQ ID NO: 266594 - RNA, 19 nt, Homo sapiens
  misc_RNA (1)...(19): siRNA sense strand
agcagaaacuaccaaagaa

SEQ ID NO: 266595 - RNA, 19 nt, Homo sapiens
  misc_RNA (1)...(19): siRNA sense strand
agguagaguucaucaagaa

SEQ ID NO: 266596 - RNA, 19 nt, Homo sapiens
  misc_RNA (1)...(19): siRNA sense strand
agaacucgcucaacaucau

SEQ ID NO: 266597 - RNA, 19 nt, Homo sapiens
  misc_RNA (1)...(19): siRNA sense strand
ucgcgcacauccugaacua

SEQ ID NO: 266598 - RNA, 19 nt, Homo sapiens
  misc_RNA (1)...(19): siRNA sense strand
gagacggaggccuuccuua

SEQ ID NO: 266599 - RNA, 19 nt, Homo sapiens
  misc_RNA (1)...(19): siRNA sense strand
gugagcacacgcacuuuaa

SEQ ID NO: 266600 - RNA, 19 nt, Homo sapiens
  misc_RNA (1)...(19): siRNA sense strand
ccacaccacaguacucaga

SEQ ID NO: 266601 - RNA, 19 nt, Homo sapiens
  misc_RNA (1)...(19): siRNA sense strand
ugacgacccugggcuaugg

SEQ ID NO: 266602 - RNA, 19 nt, Homo sapiens
  misc_RNA (1)...(19): siRNA sense strand
gcacacgcacuuuaagaac

SEQ ID NO: 266603 - RNA, 19 nt, Homo sapiens
  misc_RNA (1)...(19): siRNA sense strand
gaucgagaacguucgcaau

SEQ ID NO: 266604 - RNA, 19 nt, Homo sapiens
  misc_RNA (1)...(19): siRNA sense strand
cacacgcacuuuaagaaca

SEQ ID NO: 266605 - RNA, 19 nt, Homo sapiens
  misc_RNA (1)...(19): siRNA sense strand
aggaggagcuggccuucug

SEQ ID NO: 266606 - RNA, 19 nt, Homo sapiens
  misc_RNA (1)...(19): siRNA sense strand
aagguagaguucaucaaga

SEQ ID NO: 266607 - RNA, 19 nt, Homo sapiens
  misc_RNA (1)...(19): siRNA sense strand
ucgccaccaugaucuacua

SEQ ID NO: 266608 - RNA, 19 nt, Homo sapiens
  misc_RNA (1)...(19): siRNA sense strand
acagccacuucgacuauga

SEQ ID NO: 266609 - RNA, 19 nt, Homo sapiens
  misc_RNA (1)...(19): siRNA sense strand
gcgagcgcaucgugaucaa

SEQ ID NO: 266610 - RNA, 19 nt, Homo sapiens
  misc_RNA (1)...(19): siRNA sense strand
aagcugacccgccacuuug

SEQ ID NO: 266611 - RNA, 19 nt, Homo sapiens
  misc_RNA (1)...(19): siRNA sense strand
uuguaaaucugucguaaac

SEQ ID NO: 266612 - RNA, 19 nt, Homo sapiens
  misc_RNA (1)...(19): siRNA sense strand
acacgcacuuuaagaacau

SEQ ID NO: 266613 - RNA, 19 nt, Homo sapiens
  misc_RNA (1)...(19): siRNA sense strand
aucaagaacucgcucaaca

SEQ ID NO: 266614 - RNA, 19 nt, Homo sapiens
  misc_RNA (1)...(19): siRNA sense strand
gcgcuccucuggacaacag

SEQ ID NO: 266615 - RNA, 19 nt, Homo sapiens
  misc_RNA (1)...(19): siRNA sense strand
cggaggccuuccuuaccua

SEQ ID NO: 266616 - RNA, 19 nt, Homo sapiens
  misc_RNA (1)...(19): siRNA sense strand
gugaacaauuucgggaugu

SEQ ID NO: 266617 - RNA, 19 nt, Homo sapiens
  misc_RNA (1)...(19): siRNA sense strand
cgcacauccugaacuacua

SEQ ID NO: 266618 - RNA, 19 nt, Homo sapiens
  misc_RNA (1)...(19): siRNA sense strand
ugagcggccuguccuccaa

SEQ ID NO: 266619 - RNA, 19 nt, Homo sapiens
  misc_RNA (1)...(19): siRNA sense strand
ugaacaagacggagaucga

SEQ ID NO: 266620 - RNA, 19 nt, Homo sapiens
  misc_RNA (1)...(19): siRNA sense strand
gagccagcaccaacgaguu

SEQ ID NO: 266621 - RNA, 19 nt, Homo sapiens
  misc_RNA (1)...(19): siRNA sense strand
caacaagguagaguucauc

SEQ ID NO: 266622 - RNA, 19 nt, Homo sapiens
  misc_RNA (1)...(19): siRNA sense strand
acaagacggagaucgagaa

SEQ ID NO: 266623 - RNA, 19 nt, Homo sapiens
  misc_RNA (1)...(19): siRNA sense strand
ucgcuucccucuucuucau

SEQ ID NO: 266624 - RNA, 19 nt, Homo sapiens
  misc_RNA (1)...(19): siRNA sense strand
uuagaggcaugucgaucug

SEQ ID NO: 266625 - RNA, 19 nt, Homo sapiens
  misc_RNA (1)...(19): siRNA sense strand
ccugggcuauggagacaug

SEQ ID NO: 266626 - RNA, 19 nt, Homo sapiens
  misc_RNA (1)...(19): siRNA sense strand
gcgcacauccugaacuacu

SEQ ID NO: 266627 - RNA, 19 nt, Homo sapiens
  misc_RNA (1)...(19): siRNA sense strand
gcacauccugaacuacuac

SEQ ID NO: 266628 - RNA, 19 nt, Homo sapiens
  misc_RNA (1)...(19): siRNA sense strand
aggaggcucuggacagcuu

SEQ ID NO: 266629 - RNA, 19 nt, Homo sapiens
  misc_RNA (1)...(19): siRNA sense strand
cuaagcagaaacuaccaaa

SEQ ID NO: 266630 - RNA, 19 nt, Homo sapiens
  misc_RNA (1)...(19): siRNA sense strand
ucaagaacucgcucaacau

SEQ ID NO: 266631 - RNA, 19 nt, Homo sapiens
  misc_RNA (1)...(19): siRNA sense strand
ucgagaacguucgcaaugg

SEQ ID NO: 266632 - RNA, 19 nt, Homo sapiens
  misc_RNA (1)...(19): siRNA sense strand
cagaaacuaccaaagaaaa

SEQ ID NO: 266633 - RNA, 19 nt, Homo sapiens
  misc_RNA (1)...(19): siRNA sense strand
agacggaggccuuccuuac

SEQ ID NO: 266634 - RNA, 19 nt, Homo sapiens
  misc_RNA (1)...(19): siRNA sense strand
gaggacgagcuggagauga

SEQ ID NO: 266635 - RNA, 19 nt, Homo sapiens
  misc_RNA (1)...(19): siRNA sense strand
gcuaagcagaaacuaccaa

SEQ ID NO: 266636 - RNA, 19 nt, Homo sapiens
  misc_RNA (1)...(19): siRNA sense strand
ccgucaucgugaacaauuu

SEQ ID NO: 266637 - RNA, 19 nt, Homo sapiens
  misc_RNA (1)...(19): siRNA sense strand
caacaacuuuggcauguac

SEQ ID NO: 266638 - RNA, 19 nt, Homo sapiens
  misc_RNA (1)...(19): siRNA sense strand
ccaagaagaagaacaaaca

SEQ ID NO: 266639 - RNA, 19 nt, Homo sapiens
  misc_RNA (1)...(19): siRNA sense strand
caagguggaguuucuuaaa

SEQ ID NO: 266640 - RNA, 19 nt, Homo sapiens
  misc_RNA (1)...(19): siRNA sense strand
gacaagguggaguuucuua

SEQ ID NO: 266641 - RNA, 19 nt, Homo sapiens
  misc_RNA (1)...(19): siRNA sense strand
gaagaagaacaaacacauc

SEQ ID NO: 266642 - RNA, 19 nt, Homo sapiens
  misc_RNA (1)...(19): siRNA sense strand
ucgcguacgugcucaacua

SEQ ID NO: 266643 - RNA, 19 nt, Homo sapiens
  misc_RNA (1)...(19): siRNA sense strand
gagggcuucauccauauua

SEQ ID NO: 266644 - RNA, 19 nt, Homo sapiens
  misc_RNA (1)...(19): siRNA sense strand
cguacgugcucaacuacua

SEQ ID NO: 266645 - RNA, 19 nt, Homo sapiens
  misc_RNA (1)...(19): siRNA sense strand
ccgacgaguucuucuuuga

SEQ ID NO: 266646 - RNA, 19 nt, Homo sapiens
  misc_RNA (1)...(19): siRNA sense strand
caucuucgccaccaugauu

SEQ ID NO: 266647 - RNA, 19 nt, Homo sapiens
  misc_RNA (1)...(19): siRNA sense strand
cagacaagguggaguuucu

SEQ ID NO: 266648 - RNA, 19 nt, Homo sapiens
  misc_RNA (1)...(19): siRNA sense strand
ucaacaacuuuggcaugua

SEQ ID NO: 266649 - RNA, 19 nt, Homo sapiens
  misc_RNA (1)...(19): siRNA sense strand
gaggccugcugcuggauga

SEQ ID NO: 266650 - RNA, 19 nt, Homo sapiens
  misc_RNA (1)...(19): siRNA sense strand
gucaacaacuuuggcaugu

SEQ ID NO: 266651 - RNA, 19 nt, Homo sapiens
  misc_RNA (1)...(19): siRNA sense strand
caaccacaccuacuucaag

SEQ ID NO: 266652 - RNA, 19 nt, Homo sapiens
  misc_RNA (1)...(19): siRNA sense strand
aaccacaccuacuucaaga

SEQ ID NO: 266653 - RNA, 19 nt, Homo sapiens
  misc_RNA (1)...(19): siRNA sense strand
ggaagccguggccgcuaua

SEQ ID NO: 266654 - RNA, 19 nt, Homo sapiens
  misc_RNA (1)...(19): siRNA sense strand
ucgccaccaugauuuacua

SEQ ID NO: 266655 - RNA, 19 nt, Homo sapiens
  misc_RNA (1)...(19): siRNA sense strand
aggaggaggugauugagau

SEQ ID NO: 266656 - RNA, 19 nt, Homo sapiens
  misc_RNA (1)...(19): siRNA sense strand
ugacgacccugggcuaugg

SEQ ID NO: 266657 - RNA, 19 nt, Homo sapiens
  misc_RNA (1)...(19): siRNA sense strand
cagaagcugcccaagaaga

SEQ ID NO: 266658 - RNA, 19 nt, Homo sapiens
  misc_RNA (1)...(19): siRNA sense strand
gcuccaaccacaccuacuu

SEQ ID NO: 266659 - RNA, 19 nt, Homo sapiens
  misc_RNA (1)...(19): siRNA sense strand
gccgacgaguucuucuuug

SEQ ID NO: 266660 - RNA, 19 nt, Homo sapiens
  misc_RNA (1)...(19): siRNA sense strand
aaagcagccucaacaucau

SEQ ID NO: 266661 - RNA, 19 nt, Homo sapiens
  misc_RNA (1)...(19): siRNA sense strand
agaagcugcccaagaagaa

SEQ ID NO: 266662 - RNA, 19 nt, Homo sapiens
  misc_RNA (1)...(19): siRNA sense strand
ggagacauguaccccaaga

SEQ ID NO: 266663 - RNA, 19 nt, Homo sapiens
  misc_RNA (1)...(19): siRNA sense strand
acaccuacuucaagaacau

SEQ ID NO: 266664 - RNA, 19 nt, Homo sapiens
  misc_RNA (1)...(19): siRNA sense strand
cggagaacaucaccaacgu

SEQ ID NO: 266665 - RNA, 19 nt, Homo sapiens
  misc_RNA (1)...(19): siRNA sense strand
gcccagacaagguggaguu

SEQ ID NO: 266666 - RNA, 19 nt, Homo sapiens
  misc_RNA (1)...(19): siRNA sense strand
uggaagccguggccgcuau

SEQ ID NO: 266667 - RNA, 19 nt, Homo sapiens
  misc_RNA (1)...(19): siRNA sense strand
caacuuuggcauguacuau

SEQ ID NO: 266668 - RNA, 19 nt, Homo sapiens
  misc_RNA (1)...(19): siRNA sense strand
ucaacaucaucgacugugu

SEQ ID NO: 266669 - RNA, 19 nt, Homo sapiens
  misc_RNA (1)...(19): siRNA sense strand
gggugugcguggucugguu

SEQ ID NO: 266670 - RNA, 19 nt, Homo sapiens
  misc_RNA (1)...(19): siRNA sense strand
agaagaagaacaaacacau

SEQ ID NO: 266671 - RNA, 19 nt, Homo sapiens
  misc_RNA (1)...(19): siRNA sense strand
acaagguggaguuucuuaa

SEQ ID NO: 266672 - RNA, 19 nt, Homo sapiens
  misc_RNA (1)...(19): siRNA sense strand
aaaagcagccucaacauca

SEQ ID NO: 266673 - RNA, 19 nt, Homo sapiens
  misc_RNA (1)...(19): siRNA sense strand
gaggacugcccagccauug

SEQ ID NO: 266674 - RNA, 19 nt, Homo sapiens
  misc_RNA (1)...(19): siRNA sense strand
ccugggcuauggagacaug

SEQ ID NO: 266675 - RNA, 19 nt, Homo sapiens
  misc_RNA (1)...(19): siRNA sense strand
gggcaccuccggagaacau

SEQ ID NO: 266676 - RNA, 19 nt, Homo sapiens
  misc_RNA (1)...(19): siRNA sense strand
ggacugcccagccauugac

SEQ ID NO: 266677 - RNA, 19 nt, Homo sapiens
  misc_RNA (1)...(19): siRNA sense strand
ccaaccacaccuacuucaa

SEQ ID NO: 266678 - RNA, 19 nt, Homo sapiens
  misc_RNA (1)...(19): siRNA sense strand
cgaggacugcccagccauu

SEQ ID NO: 266679 - RNA, 19 nt, Homo sapiens
  misc_RNA (1)...(19): siRNA sense strand
cgccgacgaguucuucuuu

SEQ ID NO: 266680 - RNA, 19 nt, Homo sapiens
  misc_RNA (1)...(19): siRNA sense strand
gaacaagccuccguccaaa

SEQ ID NO: 266681 - RNA, 19 nt, Homo sapiens
  misc_RNA (1)...(19): siRNA sense strand
gacagcaccugcagugaua

SEQ ID NO: 266682 - RNA, 19 nt, Homo sapiens
  misc_RNA (1)...(19): siRNA sense strand
gaacccugcugcuggauga

SEQ ID NO: 266683 - RNA, 19 nt, Homo sapiens
  misc_RNA (1)...(19): siRNA sense strand
ucaagaaccugcucaacau

SEQ ID NO: 266684 - RNA, 19 nt, Homo sapiens
  misc_RNA (1)...(19): siRNA sense strand
ggaacaagccuccguccaa

SEQ ID NO: 266685 - RNA, 19 nt, Homo sapiens
  misc_RNA (1)...(19): siRNA sense strand
cggagaagaucaucaucaa

SEQ ID NO: 266686 - RNA, 19 nt, Homo sapiens
  misc_RNA (1)...(19): siRNA sense strand
ggagacccaugaggccuuu

SEQ ID NO: 266687 - RNA, 19 nt, Homo sapiens
  misc_RNA (1)...(19): siRNA sense strand
ggacagcaccugcagugau

SEQ ID NO: 266688 - RNA, 19 nt, Homo sapiens
  misc_RNA (1)...(19): siRNA sense strand
caugaggccuuuaauaucg

SEQ ID NO: 266689 - RNA, 19 nt, Homo sapiens
  misc_RNA (1)...(19): siRNA sense strand
ccuacgugcucaacuacua

SEQ ID NO: 266690 - RNA, 19 nt, Homo sapiens
  misc_RNA (1)...(19): siRNA sense strand
guaaugaccacaccgacuu

SEQ ID NO: 266691 - RNA, 19 nt, Homo sapiens
  misc_RNA (1)...(19): siRNA sense strand
aagaggagcucaccuucug

SEQ ID NO: 266692 - RNA, 19 nt, Homo sapiens
  misc_RNA (1)...(19): siRNA sense strand
gcacgcgacaugagaccua

SEQ ID NO: 266693 - RNA, 19 nt, Homo sapiens
  misc_RNA (1)...(19): siRNA sense strand
ccaagaaacggaagaagca

SEQ ID NO: 266694 - RNA, 19 nt, Homo sapiens
  misc_RNA (1)...(19): siRNA sense strand
cgacgagaccgacguggaa

SEQ ID NO: 266695 - RNA, 19 nt, Homo sapiens
  misc_RNA (1)...(19): siRNA sense strand
caacaucaucgacuuugug

SEQ ID NO: 266696 - RNA, 19 nt, Homo sapiens
  misc_RNA (1)...(19): siRNA sense strand
gcguaugugugcugugguu

SEQ ID NO: 266697 - RNA, 19 nt, Homo sapiens
  misc_RNA (1)...(19): siRNA sense strand
cccaugaggccuuuaauau

SEQ ID NO: 266698 - RNA, 19 nt, Homo sapiens
  misc_RNA (1)...(19): siRNA sense strand
gcucaacaucaucgacuuu

SEQ ID NO: 266699 - RNA, 19 nt, Homo sapiens
  misc_RNA (1)...(19): siRNA sense strand
ucaacaacuucggcaugua

SEQ ID NO: 266700 - RNA, 19 nt, Homo sapiens
  misc_RNA (1)...(19): siRNA sense strand
ucgccuacgugcucaacua

SEQ ID NO: 266701 - RNA, 19 nt, Homo sapiens
  misc_RNA (1)...(19): siRNA sense strand
cagcuggagucacccaugu

SEQ ID NO: 266702 - RNA, 19 nt, Homo sapiens
  misc_RNA (1)...(19): siRNA sense strand
gggaagaggguaugaucga

SEQ ID NO: 266703 - RNA, 19 nt, Homo sapiens
  misc_RNA (1)...(19): siRNA sense strand
ggcgggagguagagacaga

SEQ ID NO: 266704 - RNA, 19 nt, Homo sapiens
  misc_RNA (1)...(19): siRNA sense strand
ccaugaggccuuuaauauc

SEQ ID NO: 266705 - RNA, 19 nt, Homo sapiens
  misc_RNA (1)...(19): siRNA sense strand
caacaacuucggcauguac

SEQ ID NO: 266706 - RNA, 19 nt, Homo sapiens
  misc_RNA (1)...(19): siRNA sense strand
gucaacaacuucggcaugu

SEQ ID NO: 266707 - RNA, 19 nt, Homo sapiens
  misc_RNA (1)...(19): siRNA sense strand
aaugaguuccugcugcuua

SEQ ID NO: 266708 - RNA, 19 nt, Homo sapiens
  misc_RNA (1)...(19): siRNA sense strand
gucaagaaccugcucaaca

SEQ ID NO: 266709 - RNA, 19 nt, Homo sapiens
  misc_RNA (1)...(19): siRNA sense strand
cagagcccauccugaccua

SEQ ID NO: 266710 - RNA, 19 nt, Homo sapiens
  misc_RNA (1)...(19): siRNA sense strand
aggaggcgcucgacaucuu

SEQ ID NO: 266711 - RNA, 19 nt, Homo sapiens
  misc_RNA (1)...(19): siRNA sense strand
gaccacaccgacuucaaga

SEQ ID NO: 266712 - RNA, 19 nt, Homo sapiens
  misc_RNA (1)...(19): siRNA sense strand
gaccgcaacgugacagaga

SEQ ID NO: 266713 - RNA, 19 nt, Homo sapiens
  misc_RNA (1)...(19): siRNA sense strand
ugagcggccugucauccaa

SEQ ID NO: 266714 - RNA, 19 nt, Homo sapiens
  misc_RNA (1)...(19): siRNA sense strand
ucaacaucaucgacuuugu

SEQ ID NO: 266715 - RNA, 19 nt, Homo sapiens
  misc_RNA (1)...(19): siRNA sense strand
ggagacauguaccccaaga

SEQ ID NO: 266716 - RNA, 19 nt, Homo sapiens
  misc_RNA (1)...(19): siRNA sense strand
gggcugcgaguucuucuuc

SEQ ID NO: 266717 - RNA, 19 nt, Homo sapiens
  misc_RNA (1)...(19): siRNA sense strand
gcugcgaguucuucuucga

SEQ ID NO: 266718 - RNA, 19 nt, Homo sapiens
  misc_RNA (1)...(19): siRNA sense strand
ggccagcaccaaugaguuc

SEQ ID NO: 266719 - RNA, 19 nt, Homo sapiens
  misc_RNA (1)...(19): siRNA sense strand
ggccuuugccucucucuuc

SEQ ID NO: 266720 - RNA, 19 nt, Homo sapiens
  misc_RNA (1)...(19): siRNA sense strand
acaccgacuucaagaacau

SEQ ID NO: 266721 - RNA, 19 nt, Homo sapiens
  misc_RNA (1)...(19): siRNA sense strand
acacugggcuacggagaca

SEQ ID NO: 266722 - RNA, 19 nt, Homo sapiens
  misc_RNA (1)...(19): siRNA sense strand
gaaccugcucaacaucauc

SEQ ID NO: 266723 - RNA, 19 nt, Homo sapiens
  misc_RNA (1)...(19): siRNA sense strand
ccacaccgacuucaagaac

SEQ ID NO: 266724 - RNA, 19 nt, Homo sapiens
  misc_RNA (1)...(19): siRNA sense strand
caagcucacacgccacuuc

SEQ ID NO: 266725 - RNA, 19 nt, Homo sapiens
  misc_RNA (1)...(19): siRNA sense strand
uugccaccaugaucuacua

SEQ ID NO: 266726 - RNA, 19 nt, Homo sapiens
  misc_RNA (1)...(19): siRNA sense strand
acccaugaggccuuuaaua

SEQ ID NO: 266727 - RNA, 19 nt, Homo sapiens
  misc_RNA (1)...(19): siRNA sense strand
ugagggccagcaccaauga

SEQ ID NO: 266728 - RNA, 19 nt, Homo sapiens
  misc_RNA (1)...(19): siRNA sense strand
gagcccauccugaccuaca

SEQ ID NO: 266729 - RNA, 19 nt, Homo sapiens
  misc_RNA (1)...(19): siRNA sense strand
gcaugugggcgcucuucga

SEQ ID NO: 266730 - RNA, 19 nt, Homo sapiens
  misc_RNA (1)...(19): siRNA sense strand
gcgaggcgucggagaagau

SEQ ID NO: 266731 - RNA, 19 nt, Homo sapiens
  misc_RNA (1)...(19): siRNA sense strand
caagaaccugcucaacauc

SEQ ID NO: 266732 - RNA, 19 nt, Homo sapiens
  misc_RNA (1)...(19): siRNA sense strand
acgcuggacuucgucaaga

SEQ ID NO: 266733 - RNA, 19 nt, Homo sapiens
  misc_RNA (1)...(19): siRNA sense strand
gguaugaucgagaggaaac

SEQ ID NO: 266734 - RNA, 19 nt, Homo sapiens
  misc_RNA (1)...(19): siRNA sense strand
ccauguacugcaagucuga

SEQ ID NO: 266735 - RNA, 19 nt, Homo sapiens
  misc_RNA (1)...(19): siRNA sense strand
caacuucggcauguacuac

SEQ ID NO: 266736 - RNA, 19 nt, Homo sapiens
  misc_RNA (1)...(19): siRNA sense strand
agaagaucaucaucaacgu

SEQ ID NO: 266737 - RNA, 19 nt, Homo sapiens
  misc_RNA (1)...(19): siRNA sense strand
ucgaagaggagcucaccuu

SEQ ID NO: 266738 - RNA, 19 nt, Homo sapiens
  misc_RNA (1)...(19): siRNA sense strand
gaacaagccuccguccaaa

SEQ ID NO: 266739 - RNA, 19 nt, Homo sapiens
  misc_RNA (1)...(19): siRNA sense strand
gacagcaccugcagugaua

SEQ ID NO: 266740 - RNA, 19 nt, Homo sapiens
  misc_RNA (1)...(19): siRNA sense strand
gaacccugcugcuggauga

SEQ ID NO: 266741 - RNA, 19 nt, Homo sapiens
  misc_RNA (1)...(19): siRNA sense strand
ucaagaaccugcucaacau

SEQ ID NO: 266742 - RNA, 19 nt, Homo sapiens
  misc_RNA (1)...(19): siRNA sense strand
ggaacaagccuccguccaa

SEQ ID NO: 266743 - RNA, 19 nt, Homo sapiens
  misc_RNA (1)...(19): siRNA sense strand
cggagaagaucaucaucaa

SEQ ID NO: 266744 - RNA, 19 nt, Homo sapiens
  misc_RNA (1)...(19): siRNA sense strand
ggagacccaugaggccuuu

SEQ ID NO: 266745 - RNA, 19 nt, Homo sapiens
  misc_RNA (1)...(19): siRNA sense strand
ggacagcaccugcagugau

SEQ ID NO: 266746 - RNA, 19 nt, Homo sapiens
  misc_RNA (1)...(19): siRNA sense strand
caugaggccuuuaauaucg

SEQ ID NO: 266747 - RNA, 19 nt, Homo sapiens
  misc_RNA (1)...(19): siRNA sense strand
ccuacgugcucaacuacua

SEQ ID NO: 266748 - RNA, 19 nt, Homo sapiens
  misc_RNA (1)...(19): siRNA sense strand
guaaugaccacaccgacuu

SEQ ID NO: 266749 - RNA, 19 nt, Homo sapiens
  misc_RNA (1)...(19): siRNA sense strand
aagaggagcucaccuucug

SEQ ID NO: 266750 - RNA, 19 nt, Homo sapiens
  misc_RNA (1)...(19): siRNA sense strand
gcacgcgacaugagaccua

SEQ ID NO: 266751 - RNA, 19 nt, Homo sapiens
  misc_RNA (1)...(19): siRNA sense strand
ccaagaaacggaagaagca

SEQ ID NO: 266752 - RNA, 19 nt, Homo sapiens
  misc_RNA (1)...(19): siRNA sense strand
cgacgagaccgacguggaa

SEQ ID NO: 266753 - RNA, 19 nt, Homo sapiens
  misc_RNA (1)...(19): siRNA sense strand
caacaucaucgacuuugug

SEQ ID NO: 266754 - RNA, 19 nt, Homo sapiens
  misc_RNA (1)...(19): siRNA sense strand
gcguaugugugcugugguu

SEQ ID NO: 266755 - RNA, 19 nt, Homo sapiens
  misc_RNA (1)...(19): siRNA sense strand
cccaugaggccuuuaauau

SEQ ID NO: 266756 - RNA, 19 nt, Homo sapiens
  misc_RNA (1)...(19): siRNA sense strand
gcucaacaucaucgacuuu

SEQ ID NO: 266757 - RNA, 19 nt, Homo sapiens
  misc_RNA (1)...(19): siRNA sense strand
ucaacaacuucggcaugua

SEQ ID NO: 266758 - RNA, 19 nt, Homo sapiens
  misc_RNA (1)...(19): siRNA sense strand
ucgccuacgugcucaacua

SEQ ID NO: 266759 - RNA, 19 nt, Homo sapiens
  misc_RNA (1)...(19): siRNA sense strand
cagcuggagucacccaugu

SEQ ID NO: 266760 - RNA, 19 nt, Homo sapiens
  misc_RNA (1)...(19): siRNA sense strand
gggaagaggguaugaucga

SEQ ID NO: 266761 - RNA, 19 nt, Homo sapiens
  misc_RNA (1)...(19): siRNA sense strand
ggcgggagguagagacaga

SEQ ID NO: 266762 - RNA, 19 nt, Homo sapiens
  misc_RNA (1)...(19): siRNA sense strand
ccaugaggccuuuaauauc

SEQ ID NO: 266763 - RNA, 19 nt, Homo sapiens
  misc_RNA (1)...(19): siRNA sense strand
caacaacuucggcauguac

SEQ ID NO: 266764 - RNA, 19 nt, Homo sapiens
  misc_RNA (1)...(19): siRNA sense strand
gucaacaacuucggcaugu

SEQ ID NO: 266765 - RNA, 19 nt, Homo sapiens
  misc_RNA (1)...(19): siRNA sense strand
aaugaguuccugcugcuua

SEQ ID NO: 266766 - RNA, 19 nt, Homo sapiens
  misc_RNA (1)...(19): siRNA sense strand
gucaagaaccugcucaaca

SEQ ID NO: 266767 - RNA, 19 nt, Homo sapiens
  misc_RNA (1)...(19): siRNA sense strand
cagagcccauccugaccua

SEQ ID NO: 266768 - RNA, 19 nt, Homo sapiens
  misc_RNA (1)...(19): siRNA sense strand
aggaggcgcucgacaucuu

SEQ ID NO: 266769 - RNA, 19 nt, Homo sapiens
  misc_RNA (1)...(19): siRNA sense strand
gaccacaccgacuucaaga

SEQ ID NO: 266770 - RNA, 19 nt, Homo sapiens
  misc_RNA (1)...(19): siRNA sense strand
gaccgcaacgugacagaga

SEQ ID NO: 266771 - RNA, 19 nt, Homo sapiens
  misc_RNA (1)...(19): siRNA sense strand
ugagcggccugucauccaa

SEQ ID NO: 266772 - RNA, 19 nt, Homo sapiens
  misc_RNA (1)...(19): siRNA sense strand
ucaacaucaucgacuuugu

SEQ ID NO: 266773 - RNA, 19 nt, Homo sapiens
  misc_RNA (1)...(19): siRNA sense strand
ggagacauguaccccaaga

SEQ ID NO: 266774 - RNA, 19 nt, Homo sapiens
  misc_RNA (1)...(19): siRNA sense strand
gggcugcgaguucuucuuc

SEQ ID NO: 266775 - RNA, 19 nt, Homo sapiens
  misc_RNA (1)...(19): siRNA sense strand
gcugcgaguucuucuucga

SEQ ID NO: 266776 - RNA, 19 nt, Homo sapiens
  misc_RNA (1)...(19): siRNA sense strand
ggccagcaccaaugaguuc

SEQ ID NO: 266777 - RNA, 19 nt, Homo sapiens
  misc_RNA (1)...(19): siRNA sense strand
ggccuuugccucucucuuc

SEQ ID NO: 266778 - RNA, 19 nt, Homo sapiens
  misc_RNA (1)...(19): siRNA sense strand
acaccgacuucaagaacau

SEQ ID NO: 266779 - RNA, 19 nt, Homo sapiens
  misc_RNA (1)...(19): siRNA sense strand
acacugggcuacggagaca

SEQ ID NO: 266780 - RNA, 19 nt, Homo sapiens
  misc_RNA (1)...(19): siRNA sense strand
gaaccugcucaacaucauc

SEQ ID NO: 266781 - RNA, 19 nt, Homo sapiens
  misc_RNA (1)...(19): siRNA sense strand
ccacaccgacuucaagaac

SEQ ID NO: 266782 - RNA, 19 nt, Homo sapiens
  misc_RNA (1)...(19): siRNA sense strand
caagcucacacgccacuuc

SEQ ID NO: 266783 - RNA, 19 nt, Homo sapiens
  misc_RNA (1)...(19): siRNA sense strand
uugccaccaugaucuacua

SEQ ID NO: 266784 - RNA, 19 nt, Homo sapiens
  misc_RNA (1)...(19): siRNA sense strand
acccaugaggccuuuaaua

SEQ ID NO: 266785 - RNA, 19 nt, Homo sapiens
  misc_RNA (1)...(19): siRNA sense strand
ugagggccagcaccaauga

SEQ ID NO: 266786 - RNA, 19 nt, Homo sapiens
  misc_RNA (1)...(19): siRNA sense strand
gagcccauccugaccuaca

SEQ ID NO: 266787 - RNA, 19 nt, Homo sapiens
  misc_RNA (1)...(19): siRNA sense strand
gcaugugggcgcucuucga

SEQ ID NO: 266788 - RNA, 19 nt, Homo sapiens
  misc_RNA (1)...(19): siRNA sense strand
gcgaggcgucggagaagau

SEQ ID NO: 266789 - RNA, 19 nt, Homo sapiens
  misc_RNA (1)...(19): siRNA sense strand
caagaaccugcucaacauc

SEQ ID NO: 266790 - RNA, 19 nt, Homo sapiens
  misc_RNA (1)...(19): siRNA sense strand
acgcuggacuucgucaaga

SEQ ID NO: 266791 - RNA, 19 nt, Homo sapiens
  misc_RNA (1)...(19): siRNA sense strand
gguaugaucgagaggaaac

SEQ ID NO: 266792 - RNA, 19 nt, Homo sapiens
  misc_RNA (1)...(19): siRNA sense strand
ccauguacugcaagucuga

SEQ ID NO: 266793 - RNA, 19 nt, Homo sapiens
  misc_RNA (1)...(19): siRNA sense strand
caacuucggcauguacuac

SEQ ID NO: 266794 - RNA, 19 nt, Homo sapiens
  misc_RNA (1)...(19): siRNA sense strand
agaagaucaucaucaacgu

SEQ ID NO: 266795 - RNA, 19 nt, Homo sapiens
  misc_RNA (1)...(19): siRNA sense strand
ucgaagaggagcucaccuu

SEQ ID NO: 266796 - RNA, 19 nt, Homo sapiens
  misc_RNA (1)...(19): siRNA sense strand
gcgcagacguugcuguuca

SEQ ID NO: 266797 - RNA, 19 nt, Homo sapiens
  misc_RNA (1)...(19): siRNA sense strand
agaacgagcuggcccuuau

SEQ ID NO: 266798 - RNA, 19 nt, Homo sapiens
  misc_RNA (1)...(19): siRNA sense strand
gaggacagcccgcuuuaug

SEQ ID NO: 266799 - RNA, 19 nt, Homo sapiens
  misc_RNA (1)...(19): siRNA sense strand
cagggagucugccaucuga

SEQ ID NO: 266800 - RNA, 19 nt, Homo sapiens
  misc_RNA (1)...(19): siRNA sense strand
caucgacuccuucaugauu

SEQ ID NO: 266801 - RNA, 19 nt, Homo sapiens
  misc_RNA (1)...(19): siRNA sense strand
gcaaccgcuucgucaagaa

SEQ ID NO: 266802 - RNA, 19 nt, Homo sapiens
  misc_RNA (1)...(19): siRNA sense strand
caacgugggcuaugacauc

SEQ ID NO: 266803 - RNA, 19 nt, Homo sapiens
  misc_RNA (1)...(19): siRNA sense strand
cuacauggcggacaucuuc

SEQ ID NO: 266804 - RNA, 19 nt, Homo sapiens
  misc_RNA (1)...(19): siRNA sense strand
ggccuccucuucuggugua

SEQ ID NO: 266805 - RNA, 19 nt, Homo sapiens
  misc_RNA (1)...(19): siRNA sense strand
ggagaagagccacuacaag

SEQ ID NO: 266806 - RNA, 19 nt, Homo sapiens
  misc_RNA (1)...(19): siRNA sense strand
gagaacgagcuggcccuua

SEQ ID NO: 266807 - RNA, 19 nt, Homo sapiens
  misc_RNA (1)...(19): siRNA sense strand
gaacgagcuggcccuuaug

SEQ ID NO: 266808 - RNA, 19 nt, Homo sapiens
  misc_RNA (1)...(19): siRNA sense strand
gcagacgaccaucggcuau

SEQ ID NO: 266809 - RNA, 19 nt, Homo sapiens
  misc_RNA (1)...(19): siRNA sense strand
cgucaucgacuccuucaug

SEQ ID NO: 266810 - RNA, 19 nt, Homo sapiens
  misc_RNA (1)...(19): siRNA sense strand
caagaagaacggccaaugc

SEQ ID NO: 266811 - RNA, 19 nt, Homo sapiens
  misc_RNA (1)...(19): siRNA sense strand
gacgaggacagcccgcuuu

SEQ ID NO: 266812 - RNA, 19 nt, Homo sapiens
  misc_RNA (1)...(19): siRNA sense strand
gcucaucaagcccuacaug

SEQ ID NO: 266813 - RNA, 19 nt, Homo sapiens
  misc_RNA (1)...(19): siRNA sense strand
gggagcugcaggagaguaa

SEQ ID NO: 266814 - RNA, 19 nt, Homo sapiens
  misc_RNA (1)...(19): siRNA sense strand
gcuuugagccuguggucuu

SEQ ID NO: 266815 - RNA, 19 nt, Homo sapiens
  misc_RNA (1)...(19): siRNA sense strand
gagcugcaggagaguaaga

SEQ ID NO: 266816 - RNA, 19 nt, Homo sapiens
  misc_RNA (1)...(19): siRNA sense strand
gggcgcagacguugcuguu

SEQ ID NO: 266817 - RNA, 19 nt, Homo sapiens
  misc_RNA (1)...(19): siRNA sense strand
cgcaaccgcuucgucaaga

SEQ ID NO: 266818 - RNA, 19 nt, Homo sapiens
  misc_RNA (1)...(19): siRNA sense strand
ucaagaagaacggccaaug

SEQ ID NO: 266819 - RNA, 19 nt, Homo sapiens
  misc_RNA (1)...(19): siRNA sense strand
ucgccaaccugagcaacaa

SEQ ID NO: 266820 - RNA, 19 nt, Homo sapiens
  misc_RNA (1)...(19): siRNA sense strand
gaggagaagagccacuaca

SEQ ID NO: 266821 - RNA, 19 nt, Homo sapiens
  misc_RNA (1)...(19): siRNA sense strand
ccaaugcaacguguacuuc

SEQ ID NO: 266822 - RNA, 19 nt, Homo sapiens
  misc_RNA (1)...(19): siRNA sense strand
gccaaugcaacguguacuu

SEQ ID NO: 266823 - RNA, 19 nt, Homo sapiens
  misc_RNA (1)...(19): siRNA sense strand
agaagaacggccaaugcaa

SEQ ID NO: 266824 - RNA, 19 nt, Homo sapiens
  misc_RNA (1)...(19): siRNA sense strand
acuacaagguggacuacuc

SEQ ID NO: 266825 - RNA, 19 nt, Homo sapiens
  misc_RNA (1)...(19): siRNA sense strand
ggugucgcccaucaucauu

SEQ ID NO: 266826 - RNA, 19 nt, Homo sapiens
  misc_RNA (1)...(19): siRNA sense strand
caucgugggcugcgucauc

SEQ ID NO: 266827 - RNA, 19 nt, Homo sapiens
  misc_RNA (1)...(19): siRNA sense strand
aagaagaacggccaaugca

SEQ ID NO: 266828 - RNA, 19 nt, Homo sapiens
  misc_RNA (1)...(19): siRNA sense strand
gcgcagacguugcuguuca

SEQ ID NO: 266829 - RNA, 19 nt, Homo sapiens
  misc_RNA (1)...(19): siRNA sense strand
agaacgagcuggcccuuau

SEQ ID NO: 266830 - RNA, 19 nt, Homo sapiens
  misc_RNA (1)...(19): siRNA sense strand
gaggacagcccgcuuuaug

SEQ ID NO: 266831 - RNA, 19 nt, Homo sapiens
  misc_RNA (1)...(19): siRNA sense strand
cagggagucugccaucuga

SEQ ID NO: 266832 - RNA, 19 nt, Homo sapiens
  misc_RNA (1)...(19): siRNA sense strand
caucgacuccuucaugauu

SEQ ID NO: 266833 - RNA, 19 nt, Homo sapiens
  misc_RNA (1)...(19): siRNA sense strand
gcaaccgcuucgucaagaa

SEQ ID NO: 266834 - RNA, 19 nt, Homo sapiens
  misc_RNA (1)...(19): siRNA sense strand
caacgugggcuaugacauc

SEQ ID NO: 266835 - RNA, 19 nt, Homo sapiens
  misc_RNA (1)...(19): siRNA sense strand
cuacauggcggacaucuuc

SEQ ID NO: 266836 - RNA, 19 nt, Homo sapiens
  misc_RNA (1)...(19): siRNA sense strand
ggccuccucuucuggugua

SEQ ID NO: 266837 - RNA, 19 nt, Homo sapiens
  misc_RNA (1)...(19): siRNA sense strand
ggagaagagccacuacaag

SEQ ID NO: 266838 - RNA, 19 nt, Homo sapiens
  misc_RNA (1)...(19): siRNA sense strand
gagaacgagcuggcccuua

SEQ ID NO: 266839 - RNA, 19 nt, Homo sapiens
  misc_RNA (1)...(19): siRNA sense strand
gaacgagcuggcccuuaug

SEQ ID NO: 266840 - RNA, 19 nt, Homo sapiens
  misc_RNA (1)...(19): siRNA sense strand
gcagacgaccaucggcuau

SEQ ID NO: 266841 - RNA, 19 nt, Homo sapiens
  misc_RNA (1)...(19): siRNA sense strand
cgucaucgacuccuucaug

SEQ ID NO: 266842 - RNA, 19 nt, Homo sapiens
  misc_RNA (1)...(19): siRNA sense strand
caagaagaacggccaaugc

SEQ ID NO: 266843 - RNA, 19 nt, Homo sapiens
  misc_RNA (1)...(19): siRNA sense strand
gacgaggacagcccgcuuu

SEQ ID NO: 266844 - RNA, 19 nt, Homo sapiens
  misc_RNA (1)...(19): siRNA sense strand
gcucaucaagcccuacaug

SEQ ID NO: 266845 - RNA, 19 nt, Homo sapiens
  misc_RNA (1)...(19): siRNA sense strand
gggagcugcaggagaguaa

SEQ ID NO: 266846 - RNA, 19 nt, Homo sapiens
  misc_RNA (1)...(19): siRNA sense strand
gcuuugagccuguggucuu

SEQ ID NO: 266847 - RNA, 19 nt, Homo sapiens
  misc_RNA (1)...(19): siRNA sense strand
gagcugcaggagaguaaga

SEQ ID NO: 266848 - RNA, 19 nt, Homo sapiens
  misc_RNA (1)...(19): siRNA sense strand
gggcgcagacguugcuguu

SEQ ID NO: 266849 - RNA, 19 nt, Homo sapiens
  misc_RNA (1)...(19): siRNA sense strand
cgcaaccgcuucgucaaga

SEQ ID NO: 266850 - RNA, 19 nt, Homo sapiens
  misc_RNA (1)...(19): siRNA sense strand
ucaagaagaacggccaaug

SEQ ID NO: 266851 - RNA, 19 nt, Homo sapiens
  misc_RNA (1)...(19): siRNA sense strand
ucgccaaccugagcaacaa

SEQ ID NO: 266852 - RNA, 19 nt, Homo sapiens
  misc_RNA (1)...(19): siRNA sense strand
gaggagaagagccacuaca

SEQ ID NO: 266853 - RNA, 19 nt, Homo sapiens
  misc_RNA (1)...(19): siRNA sense strand
ccaaugcaacguguacuuc

SEQ ID NO: 266854 - RNA, 19 nt, Homo sapiens
  misc_RNA (1)...(19): siRNA sense strand
gccaaugcaacguguacuu

SEQ ID NO: 266855 - RNA, 19 nt, Homo sapiens
  misc_RNA (1)...(19): siRNA sense strand
agaagaacggccaaugcaa

SEQ ID NO: 266856 - RNA, 19 nt, Homo sapiens
  misc_RNA (1)...(19): siRNA sense strand
acuacaagguggacuacuc

SEQ ID NO: 266857 - RNA, 19 nt, Homo sapiens
  misc_RNA (1)...(19): siRNA sense strand
ggugucgcccaucaucauu

SEQ ID NO: 266858 - RNA, 19 nt, Homo sapiens
  misc_RNA (1)...(19): siRNA sense strand
caucgugggcugcgucauc

SEQ ID NO: 266859 - RNA, 19 nt, Homo sapiens
  misc_RNA (1)...(19): siRNA sense strand
aagaagaacggccaaugca

SEQ ID NO: 266860 - RNA, 19 nt, Homo sapiens
  misc_RNA (1)...(19): siRNA sense strand
gcaacgugcgcgagacaua

SEQ ID NO: 266861 - RNA, 19 nt, Homo sapiens
  misc_RNA (1)...(19): siRNA sense strand
ggaggacggcuucuacgaa

SEQ ID NO: 266862 - RNA, 19 nt, Homo sapiens
  misc_RNA (1)...(19): siRNA sense strand
gacuugcgcuccucacaca

SEQ ID NO: 266863 - RNA, 19 nt, Homo sapiens
  misc_RNA (1)...(19): siRNA sense strand
gcgcucaccuggcucuucu

SEQ ID NO: 266864 - RNA, 19 nt, Homo sapiens
  misc_RNA (1)...(19): siRNA sense strand
ggaagccacgggaaugaca

SEQ ID NO: 266865 - RNA, 19 nt, Homo sapiens
  misc_RNA (1)...(19): siRNA sense strand
gagggacgacuucgagauc

SEQ ID NO: 266866 - RNA, 19 nt, Homo sapiens
  misc_RNA (1)...(19): siRNA sense strand
gggcugacaaggagcagaa

SEQ ID NO: 266867 - RNA, 19 nt, Homo sapiens
  misc_RNA (1)...(19): siRNA sense strand
cagccacgcucgucuucuc

SEQ ID NO: 266868 - RNA, 19 nt, Homo sapiens
  misc_RNA (1)...(19): siRNA sense strand
aguggacuaugccagcuuu

SEQ ID NO: 266869 - RNA, 19 nt, Homo sapiens
  misc_RNA (1)...(19): siRNA sense strand
gggaaugacaugccaagcu

SEQ ID NO: 266870 - RNA, 19 nt, Homo sapiens
  misc_RNA (1)...(19): siRNA sense strand
ccagcuuucacgagacuuu

SEQ ID NO: 266871 - RNA, 19 nt, Homo sapiens
  misc_RNA (1)...(19): siRNA sense strand
ucuacgaaguggacuaugc

SEQ ID NO: 266872 - RNA, 19 nt, Homo sapiens
  misc_RNA (1)...(19): siRNA sense strand
gcauguucgucaagaucuc

SEQ ID NO: 266873 - RNA, 19 nt, Homo sapiens
  misc_RNA (1)...(19): siRNA sense strand
gcgcuccucacacauagug

SEQ ID NO: 266874 - RNA, 19 nt, Homo sapiens
  misc_RNA (1)...(19): siRNA sense strand
gaaacuagcugagaccuua

SEQ ID NO: 266875 - RNA, 19 nt, Homo sapiens
  misc_RNA (1)...(19): siRNA sense strand
ggaaaggccuggcauauug

SEQ ID NO: 266876 - RNA, 19 nt, Homo sapiens
  misc_RNA (1)...(19): siRNA sense strand
gaagugcuaugagaaauuu

SEQ ID NO: 266877 - RNA, 19 nt, Homo sapiens
  misc_RNA (1)...(19): siRNA sense strand
gagaagaucgugaacagua

SEQ ID NO: 266878 - RNA, 19 nt, Homo sapiens
  misc_RNA (1)...(19): siRNA sense strand
gaaaugccaugcuaucauc

SEQ ID NO: 266879 - RNA, 19 nt, Homo sapiens
  misc_RNA (1)...(19): siRNA sense strand
ccacugcaaucguguuaua

SEQ ID NO: 266880 - RNA, 19 nt, Homo sapiens
  misc_RNA (1)...(19): siRNA sense strand
gauguggucucugcucuua

SEQ ID NO: 266881 - RNA, 19 nt, Homo sapiens
  misc_RNA (1)...(19): siRNA sense strand
ccagaggccuugggaaaua

SEQ ID NO: 266882 - RNA, 19 nt, Homo sapiens
  misc_RNA (1)...(19): siRNA sense strand
ggacaucgccauuaugaga

SEQ ID NO: 266883 - RNA, 19 nt, Homo sapiens
  misc_RNA (1)...(19): siRNA sense strand
gaauaaguuuguggaguuu

SEQ ID NO: 266884 - RNA, 19 nt, Homo sapiens
  misc_RNA (1)...(19): siRNA sense strand
gaaaguacugugaacauga

SEQ ID NO: 266885 - RNA, 19 nt, Homo sapiens
  misc_RNA (1)...(19): siRNA sense strand
gcagauaucggguuuguca

SEQ ID NO: 266886 - RNA, 19 nt, Homo sapiens
  misc_RNA (1)...(19): siRNA sense strand
agaauaaguuuguggaguu

SEQ ID NO: 266887 - RNA, 19 nt, Homo sapiens
  misc_RNA (1)...(19): siRNA sense strand
ggaagaaaguacugugaac

SEQ ID NO: 266888 - RNA, 19 nt, Homo sapiens
  misc_RNA (1)...(19): siRNA sense strand
uguaagaagugcuaugaga

SEQ ID NO: 266889 - RNA, 19 nt, Homo sapiens
  misc_RNA (1)...(19): siRNA sense strand
uaagaagugcuaugagaaa

SEQ ID NO: 266890 - RNA, 19 nt, Homo sapiens
  misc_RNA (1)...(19): siRNA sense strand
agaagaucgugaacaguaa

SEQ ID NO: 266891 - RNA, 19 nt, Homo sapiens
  misc_RNA (1)...(19): siRNA sense strand
gauaucggguuugucaaga

SEQ ID NO: 266892 - RNA, 19 nt, Homo sapiens
  misc_RNA (1)...(19): siRNA sense strand
guaagaagugcuaugagaa

SEQ ID NO: 266893 - RNA, 19 nt, Homo sapiens
  misc_RNA (1)...(19): siRNA sense strand
guacugugaacaugacuuu

SEQ ID NO: 266894 - RNA, 19 nt, Homo sapiens
  misc_RNA (1)...(19): siRNA sense strand
uaugagaaauuuccauugg

SEQ ID NO: 266895 - RNA, 19 nt, Homo sapiens
  misc_RNA (1)...(19): siRNA sense strand
gaggaaaggccuggcauau

SEQ ID NO: 266896 - RNA, 19 nt, Homo sapiens
  misc_RNA (1)...(19): siRNA sense strand
ucaaagccaugaauaacag

SEQ ID NO: 266897 - RNA, 19 nt, Homo sapiens
  misc_RNA (1)...(19): siRNA sense strand
gaagaaaguacugugaaca

SEQ ID NO: 266898 - RNA, 19 nt, Homo sapiens
  misc_RNA (1)...(19): siRNA sense strand
gaugagcagccucugauau

SEQ ID NO: 266899 - RNA, 19 nt, Homo sapiens
  misc_RNA (1)...(19): siRNA sense strand
ugccagaaaugccaugcua

SEQ ID NO: 266900 - RNA, 19 nt, Homo sapiens
  misc_RNA (1)...(19): siRNA sense strand
gcuaugagaaauuuccauu

SEQ ID NO: 266901 - RNA, 19 nt, Homo sapiens
  misc_RNA (1)...(19): siRNA sense strand
acaugaagccagucuguaa

SEQ ID NO: 266902 - RNA, 19 nt, Homo sapiens
  misc_RNA (1)...(19): siRNA sense strand
cugcaacacuaaauuaaca

SEQ ID NO: 266903 - RNA, 19 nt, Homo sapiens
  misc_RNA (1)...(19): siRNA sense strand
agaaaguacugugaacaug

SEQ ID NO: 266904 - RNA, 19 nt, Homo sapiens
  misc_RNA (1)...(19): siRNA sense strand
guuaucaaagccaugaaua

SEQ ID NO: 266905 - RNA, 19 nt, Homo sapiens
  misc_RNA (1)...(19): siRNA sense strand
ccagcuauuuggugauguu

SEQ ID NO: 266906 - RNA, 19 nt, Homo sapiens
  misc_RNA (1)...(19): siRNA sense strand
ggagcugacugccgaugca

SEQ ID NO: 266907 - RNA, 19 nt, Homo sapiens
  misc_RNA (1)...(19): siRNA sense strand
ggccuggcauauugugaaa

SEQ ID NO: 266908 - RNA, 19 nt, Homo sapiens
  misc_RNA (1)...(19): siRNA sense strand
gagcagccucugauauuca

SEQ ID NO: 266909 - RNA, 19 nt, Homo sapiens
  misc_RNA (1)...(19): siRNA sense strand
uaccugcaacacuaaauua

SEQ ID NO: 266910 - RNA, 19 nt, Homo sapiens
  misc_RNA (1)...(19): siRNA sense strand
gaaaggccuggcauauugu

SEQ ID NO: 266911 - RNA, 19 nt, Homo sapiens
  misc_RNA (1)...(19): siRNA sense strand
gaagaucgugaacaguaau

SEQ ID NO: 266912 - RNA, 19 nt, Homo sapiens
  misc_RNA (1)...(19): siRNA sense strand
uguggugaauucaucauug

SEQ ID NO: 266913 - RNA, 19 nt, Homo sapiens
  misc_RNA (1)...(19): siRNA sense strand
auaaguuuguggaguuuga

SEQ ID NO: 266914 - RNA, 19 nt, Homo sapiens
  misc_RNA (1)...(19): siRNA sense strand
cugcaaucguguuauagaa

SEQ ID NO: 266915 - RNA, 19 nt, Homo sapiens
  misc_RNA (1)...(19): siRNA sense strand
gcuauuuggugauguuugc

SEQ ID NO: 266916 - RNA, 19 nt, Homo sapiens
  misc_RNA (1)...(19): siRNA sense strand
ugaagccagucuguaagaa

SEQ ID NO: 266917 - RNA, 19 nt, Homo sapiens
  misc_RNA (1)...(19): siRNA sense strand
ucaguguggugaauucauc

SEQ ID NO: 266918 - RNA, 19 nt, Homo sapiens
  misc_RNA (1)...(19): siRNA sense strand
ugagcagccucugauauuc

SEQ ID NO: 266919 - RNA, 19 nt, Homo sapiens
  misc_RNA (1)...(19): siRNA sense strand
ccagaaaugccaugcuauc

SEQ ID NO: 266920 - RNA, 19 nt, Homo sapiens
  misc_RNA (1)...(19): siRNA sense strand
gagcugaagaaaagacuua

SEQ ID NO: 266921 - RNA, 19 nt, Homo sapiens
  misc_RNA (1)...(19): siRNA sense strand
uaucggguuugucaagaau

SEQ ID NO: 266922 - RNA, 19 nt, Homo sapiens
  misc_RNA (1)...(19): siRNA sense strand
gaagccagucuguaagaag

SEQ ID NO: 266923 - RNA, 19 nt, Homo sapiens
  misc_RNA (1)...(19): siRNA sense strand
gacaugaagccagucugua

SEQ ID NO: 266924 - RNA, 19 nt, Homo sapiens
  misc_RNA (1)...(19): siRNA sense strand
uguggucucugcucuuaau

SEQ ID NO: 266925 - RNA, 19 nt, Homo sapiens
  misc_RNA (1)...(19): siRNA sense strand
ucacuauaaccagcuauuu

SEQ ID NO: 266926 - RNA, 19 nt, Homo sapiens
  misc_RNA (1)...(19): siRNA sense strand
uggcagauaucggguuugu

SEQ ID NO: 266927 - RNA, 19 nt, Homo sapiens
  misc_RNA (1)...(19): siRNA sense strand
ucaucaguguggugaauuc

SEQ ID NO: 266928 - RNA, 19 nt, Homo sapiens
  misc_RNA (1)...(19): siRNA sense strand
aagaagugcuaugagaaau

SEQ ID NO: 266929 - RNA, 19 nt, Homo sapiens
  misc_RNA (1)...(19): siRNA sense strand
cacuauaaccagcuauuug

SEQ ID NO: 266930 - RNA, 19 nt, Homo sapiens
  misc_RNA (1)...(19): siRNA sense strand
aguggcauguggagcauuu

SEQ ID NO: 266931 - RNA, 19 nt, Homo sapiens
  misc_RNA (1)...(19): siRNA sense strand
cugagaagaucgugaacag

SEQ ID NO: 266932 - RNA, 19 nt, Homo sapiens
  misc_RNA (1)...(19): siRNA sense strand
guggugaauucaucauugg

SEQ ID NO: 266933 - RNA, 19 nt, Homo sapiens
  misc_RNA (1)...(19): siRNA sense strand
ucuuggacaucgccauuau

SEQ ID NO: 266934 - RNA, 19 nt, Homo sapiens
  misc_RNA (1)...(19): siRNA sense strand
cgaguuaucaaagccauga

SEQ ID NO: 266935 - RNA, 19 nt, Homo sapiens
  misc_RNA (1)...(19): siRNA sense strand
cagaaaugccaugcuauca

SEQ ID NO: 266936 - RNA, 19 nt, Homo sapiens
  misc_RNA (1)...(19): siRNA sense strand
cauuggagcugaagaaaag

SEQ ID NO: 266937 - RNA, 19 nt, Homo sapiens
  misc_RNA (1)...(19): siRNA sense strand
agaagugcuaugagaaauu

SEQ ID NO: 266938 - RNA, 19 nt, Homo sapiens
  misc_RNA (1)...(19): siRNA sense strand
aagccagucuguaagaagu

SEQ ID NO: 266939 - RNA, 19 nt, Homo sapiens
  misc_RNA (1)...(19): siRNA sense strand
ugacaugaagccagucugu

SEQ ID NO: 266940 - RNA, 19 nt, Homo sapiens
  misc_RNA (1)...(19): siRNA sense strand
gugaacugcuuugccuguu

SEQ ID NO: 266941 - RNA, 19 nt, Homo sapiens
  misc_RNA (1)...(19): siRNA sense strand
gcaguggcauguggagcau

SEQ ID NO: 266942 - RNA, 19 nt, Homo sapiens
  misc_RNA (1)...(19): siRNA sense strand
agaggaaaggccuggcaua

SEQ ID NO: 266943 - RNA, 19 nt, Homo sapiens
  misc_RNA (1)...(19): siRNA sense strand
caagugugagaaacccuuu

SEQ ID NO: 266944 - RNA, 19 nt, Homo sapiens
  misc_RNA (1)...(19): siRNA sense strand
uaucaaagccaugaauaac

SEQ ID NO: 266945 - RNA, 19 nt, Homo sapiens
  misc_RNA (1)...(19): siRNA sense strand
cuaugaguuugaaggaaga

SEQ ID NO: 266946 - RNA, 19 nt, Homo sapiens
  misc_RNA (1)...(19): siRNA sense strand
aaaguacugugaacaugac

SEQ ID NO: 266947 - RNA, 19 nt, Homo sapiens
  misc_RNA (1)...(19): siRNA sense strand
cuaccugcaacacuaaauu

SEQ ID NO: 266948 - RNA, 19 nt, Homo sapiens
  misc_RNA (1)...(19): siRNA sense strand
aggaaaggccuggcauauu

SEQ ID NO: 266949 - RNA, 19 nt, Homo sapiens
  misc_RNA (1)...(19): siRNA sense strand
cgaugagcagccucugaua

SEQ ID NO: 266950 - RNA, 19 nt, Homo sapiens
  misc_RNA (1)...(19): siRNA sense strand
gcuguaccaugagcagugu

SEQ ID NO: 266951 - RNA, 19 nt, Homo sapiens
  misc_RNA (1)...(19): siRNA sense strand
caucauuggccgaguuauc

SEQ ID NO: 266952 - RNA, 19 nt, Homo sapiens
  misc_RNA (1)...(19): siRNA sense strand
ugucaucaguguggugaau

SEQ ID NO: 266953 - RNA, 19 nt, Homo sapiens
  misc_RNA (1)...(19): siRNA sense strand
augagcagccucugauauu

SEQ ID NO: 266954 - RNA, 19 nt, Homo sapiens
  misc_RNA (1)...(19): siRNA sense strand
guucuaccugcaacacuaa

SEQ ID NO: 266955 - RNA, 19 nt, Homo sapiens
  misc_RNA (1)...(19): siRNA sense strand
ccuaccauccagaccauuu

SEQ ID NO: 266956 - RNA, 19 nt, Homo sapiens
  misc_RNA (1)...(19): siRNA sense strand
agaaaugccaugcuaucau

SEQ ID NO: 266957 - RNA, 19 nt, Homo sapiens
  misc_RNA (1)...(19): siRNA sense strand
gcuggcauccggagugcuu

SEQ ID NO: 266958 - RNA, 19 nt, Homo sapiens
  misc_RNA (1)...(19): siRNA sense strand
uuggacaucgccauuauga

SEQ ID NO: 266959 - RNA, 19 nt, Homo sapiens
  misc_RNA (1)...(19): siRNA sense strand
gccagaggccuugggaaau

SEQ ID NO: 266960 - RNA, 19 nt, Homo sapiens
  misc_RNA (1)...(19): siRNA sense strand
ccgcugagaagaucgugaa

SEQ ID NO: 266961 - RNA, 19 nt, Homo sapiens
  misc_RNA (1)...(19): siRNA sense strand
ucuguaagaagugcuauga

SEQ ID NO: 266962 - RNA, 19 nt, Homo sapiens
  misc_RNA (1)...(19): siRNA sense strand
aagaaaguacugugaacau

SEQ ID NO: 266963 - RNA, 19 nt, Homo sapiens
  misc_RNA (1)...(19): siRNA sense strand
ccuggcauauugugaaacu

SEQ ID NO: 266964 - RNA, 19 nt, Homo sapiens
  misc_RNA (1)...(19): siRNA sense strand
ggaaccagcuguauuuguu

SEQ ID NO: 266965 - RNA, 19 nt, Homo sapiens
  misc_RNA (1)...(19): siRNA sense strand
gcgcugggcuuagaucauu

SEQ ID NO: 266966 - RNA, 19 nt, Homo sapiens
  misc_RNA (1)...(19): siRNA sense strand
gaccaaggauacaguuugu

SEQ ID NO: 266967 - RNA, 19 nt, Homo sapiens
  misc_RNA (1)...(19): siRNA sense strand
gugcugggcugcugcuuug

SEQ ID NO: 266968 - RNA, 19 nt, Homo sapiens
  misc_RNA (1)...(19): siRNA sense strand
cggcaaugcugaugggaaa

SEQ ID NO: 266969 - RNA, 19 nt, Homo sapiens
  misc_RNA (1)...(19): siRNA sense strand
ggaagaugcugcuguucag

SEQ ID NO: 266970 - RNA, 19 nt, Homo sapiens
  misc_RNA (1)...(19): siRNA sense strand
ggaccaaggauacaguuug

SEQ ID NO: 266971 - RNA, 19 nt, Homo sapiens
  misc_RNA (1)...(19): siRNA sense strand
gcuaccaccucgaacuuug

SEQ ID NO: 266972 - RNA, 19 nt, Homo sapiens
  misc_RNA (1)...(19): siRNA sense strand
gggcagauuccaaaccuuu

SEQ ID NO: 266973 - RNA, 19 nt, Homo sapiens
  misc_RNA (1)...(19): siRNA sense strand
gcaguaccacggccaacua

SEQ ID NO: 266974 - RNA, 19 nt, Homo sapiens
  misc_RNA (1)...(19): siRNA sense strand
gcagugcccugaggacuag

SEQ ID NO: 266975 - RNA, 19 nt, Homo sapiens
  misc_RNA (1)...(19): siRNA sense strand
gcauaaggacgacgugaau

SEQ ID NO: 266976 - RNA, 19 nt, Homo sapiens
  misc_RNA (1)...(19): siRNA sense strand
aaacuacucggaagacuug

SEQ ID NO: 266977 - RNA, 19 nt, Homo sapiens
  misc_RNA (1)...(19): siRNA sense strand
gggaaguacuggcgauucu

SEQ ID NO: 266978 - RNA, 19 nt, Homo sapiens
  misc_RNA (1)...(19): siRNA sense strand
gcgcucauguacccuaugu

SEQ ID NO: 266979 - RNA, 19 nt, Homo sapiens
  misc_RNA (1)...(19): siRNA sense strand
gaauaccuguaccgcuaug

SEQ ID NO: 266980 - RNA, 19 nt, Homo sapiens
  misc_RNA (1)...(19): siRNA sense strand
gaccugggcagauuccaaa

SEQ ID NO: 266981 - RNA, 19 nt, Homo sapiens
  misc_RNA (1)...(19): siRNA sense strand
ggacacgcacgacgucuuc

SEQ ID NO: 266982 - RNA, 19 nt, Homo sapiens
  misc_RNA (1)...(19): siRNA sense strand
gggaagaugcugcuguuca

SEQ ID NO: 266983 - RNA, 19 nt, Homo sapiens
  misc_RNA (1)...(19): siRNA sense strand
ccaaggauacaguuuguuc

SEQ ID NO: 266984 - RNA, 19 nt, Homo sapiens
  misc_RNA (1)...(19): siRNA sense strand
agacaucgucauccaguuu

SEQ ID NO: 266985 - RNA, 19 nt, Homo sapiens
  misc_RNA (1)...(19): siRNA sense strand
ggcuugcccuggugcagua

SEQ ID NO: 266986 - RNA, 19 nt, Homo sapiens
  misc_RNA (1)...(19): siRNA sense strand
gaacuuugacagcgacaag

SEQ ID NO: 266987 - RNA, 19 nt, Homo sapiens
  misc_RNA (1)...(19): siRNA sense strand
uuucgacgaugacgaguug

SEQ ID NO: 266988 - RNA, 19 nt, Homo sapiens
  misc_RNA (1)...(19): siRNA sense strand
gaaccagguggaccaagug

SEQ ID NO: 266989 - RNA, 19 nt, Homo sapiens
  misc_RNA (1)...(19): siRNA sense strand
gcacgacgucuuccaguac

SEQ ID NO: 266990 - RNA, 19 nt, Homo sapiens
  misc_RNA (1)...(19): siRNA sense strand
ccacuacugugccuuugag

SEQ ID NO: 266991 - RNA, 19 nt, Homo sapiens
  misc_RNA (1)...(19): siRNA sense strand
aaggaguacucgaccugua

SEQ ID NO: 266992 - RNA, 19 nt, Homo sapiens
  misc_RNA (1)...(19): siRNA sense strand
ggugauugacgacgccuuu

SEQ ID NO: 266993 - RNA, 19 nt, Homo sapiens
  misc_RNA (1)...(19): siRNA sense strand
ugaaccagguggaccaagu

SEQ ID NO: 266994 - RNA, 19 nt, Homo sapiens
  misc_RNA (1)...(19): siRNA sense strand
guucaaggaugggaaguac

SEQ ID NO: 266995 - RNA, 19 nt, Homo sapiens
  misc_RNA (1)...(19): siRNA sense strand
ucagggagacgcccauuuc

SEQ ID NO: 266996 - RNA, 19 nt, Homo sapiens
  misc_RNA (1)...(19): siRNA sense strand
ugggcuacgugaccuauga

SEQ ID NO: 266997 - RNA, 19 nt, Homo sapiens
  misc_RNA (1)...(19): siRNA sense strand
gcuccuggcacacgccuuu

SEQ ID NO: 266998 - RNA, 19 nt, Homo sapiens
  misc_RNA (1)...(19): siRNA sense strand
cgcacgacgucuuccagua

SEQ ID NO: 266999 - RNA, 19 nt, Homo sapiens
  misc_RNA (1)...(19): siRNA sense strand
gaaguacuggcgauucucu

SEQ ID NO: 267000 - RNA, 19 nt, Homo sapiens
  misc_RNA (1)...(19): siRNA sense strand
ggaauaccuguaccgcuau

SEQ ID NO: 267001 - RNA, 19 nt, Homo sapiens
  misc_RNA (1)...(19): siRNA sense strand
gcagagaugcguggagagu

SEQ ID NO: 267002 - RNA, 19 nt, Homo sapiens
  misc_RNA (1)...(19): siRNA sense strand
caagcuggacucggucuuu

SEQ ID NO: 267003 - RNA, 19 nt, Homo sapiens
  misc_RNA (1)...(19): siRNA sense strand
accacaacaucaccuauug

SEQ ID NO: 267004 - RNA, 19 nt, Homo sapiens
  misc_RNA (1)...(19): siRNA sense strand
guaccgcuaugguuacacu

SEQ ID NO: 267005 - RNA, 19 nt, Homo sapiens
  misc_RNA (1)...(19): siRNA sense strand
cuacgugaccuaugacauc

SEQ ID NO: 267006 - RNA, 19 nt, Homo sapiens
  misc_RNA (1)...(19): siRNA sense strand
caccacaacaucaccuauu

SEQ ID NO: 267007 - RNA, 19 nt, Homo sapiens
  misc_RNA (1)...(19): siRNA sense strand
cuauguaccgcuucacuga

SEQ ID NO: 267008 - RNA, 19 nt, Homo sapiens
  misc_RNA (1)...(19): siRNA sense strand
gcuuagaucauuccucagu

SEQ ID NO: 267009 - RNA, 19 nt, Homo sapiens
  misc_RNA (1)...(19): siRNA sense strand
guaccacggccaacuacga

SEQ ID NO: 267010 - RNA, 19 nt, Homo sapiens
  misc_RNA (1)...(19): siRNA sense strand
gggaaccagcuguauuugu

SEQ ID NO: 267011 - RNA, 19 nt, Homo sapiens
  misc_RNA (1)...(19): siRNA sense strand
gcgcuaccaccucgaacuu

SEQ ID NO: 267012 - RNA, 19 nt, Homo sapiens
  misc_RNA (1)...(19): siRNA sense strand
aagcuggacucggucuuug

SEQ ID NO: 267013 - RNA, 19 nt, Homo sapiens
  misc_RNA (1)...(19): siRNA sense strand
uugggaaccagcuguauuu

SEQ ID NO: 267014 - RNA, 19 nt, Homo sapiens
  misc_RNA (1)...(19): siRNA sense strand
acacucggguggcagagau

SEQ ID NO: 267015 - RNA, 19 nt, Homo sapiens
  misc_RNA (1)...(19): siRNA sense strand
cuggagaccugagaaccaa

SEQ ID NO: 267016 - RNA, 19 nt, Homo sapiens
  misc_RNA (1)...(19): siRNA sense strand
ucaaggaugggaaguacug

SEQ ID NO: 267017 - RNA, 19 nt, Homo sapiens
  misc_RNA (1)...(19): siRNA sense strand
cacaacaucaccuauugga

SEQ ID NO: 267018 - RNA, 19 nt, Homo sapiens
  misc_RNA (1)...(19): siRNA sense strand
uggcagaggaauaccugua

SEQ ID NO: 267019 - RNA, 19 nt, Homo sapiens
  misc_RNA (1)...(19): siRNA sense strand
caacuacgaccgggacaag

SEQ ID NO: 267020 - RNA, 19 nt, Homo sapiens
  misc_RNA (1)...(19): siRNA sense strand
gacaucgucauccaguuug

SEQ ID NO: 267021 - RNA, 19 nt, Homo sapiens
  misc_RNA (1)...(19): siRNA sense strand
cagacaucgucauccaguu

SEQ ID NO: 267022 - RNA, 19 nt, Homo sapiens
  misc_RNA (1)...(19): siRNA sense strand
ggugcugggcugcugcuuu

SEQ ID NO: 267023 - RNA, 19 nt, Homo sapiens
  misc_RNA (1)...(19): siRNA sense strand
ggagaccugagaaccaauc

SEQ ID NO: 267024 - RNA, 19 nt, Homo sapiens
  misc_RNA (1)...(19): siRNA sense strand
ggagcacggagacggguau

SEQ ID NO: 267025 - RNA, 19 nt, Homo sapiens
  misc_RNA (1)...(19): siRNA sense strand
ccugcaacgugaacaucuu

SEQ ID NO: 267026 - RNA, 19 nt, Homo sapiens
  misc_RNA (1)...(19): siRNA sense strand
ugccggaggcgcucaugua

SEQ ID NO: 267027 - RNA, 19 nt, Homo sapiens
  misc_RNA (1)...(19): siRNA sense strand
ccaguuuccauucaucuuc

SEQ ID NO: 267028 - RNA, 19 nt, Homo sapiens
  misc_RNA (1)...(19): siRNA sense strand
gcagcuggcagaggaauac

SEQ ID NO: 267029 - RNA, 19 nt, Homo sapiens
  misc_RNA (1)...(19): siRNA sense strand
cgaggcgucuggacaagcu

SEQ ID NO: 267030 - RNA, 19 nt, Homo sapiens
  misc_RNA (1)...(19): siRNA sense strand
agacgcccauuucgacgau

SEQ ID NO: 267031 - RNA, 19 nt, Homo sapiens
  misc_RNA (1)...(19): siRNA sense strand
ggccacuacugugccuuug

SEQ ID NO: 267032 - RNA, 19 nt, Homo sapiens
  misc_RNA (1)...(19): siRNA sense strand
gagcugacucgacggugau

SEQ ID NO: 267033 - RNA, 19 nt, Homo sapiens
  misc_RNA (1)...(19): siRNA sense strand
ucaaggcggucaauuagaa

SEQ ID NO: 267034 - RNA, 19 nt, Homo sapiens
  misc_RNA (1)...(19): siRNA sense strand
gaagaccacuggccuugug

SEQ ID NO: 267035 - RNA, 19 nt, Homo sapiens
  misc_RNA (1)...(19): siRNA sense strand
gaagcuggcuaugguuaaa

SEQ ID NO: 267036 - RNA, 19 nt, Homo sapiens
  misc_RNA (1)...(19): siRNA sense strand
gaacuaaaucuggcaagaa

SEQ ID NO: 267037 - RNA, 19 nt, Homo sapiens
  misc_RNA (1)...(19): siRNA sense strand
gaaaguauacagaacagau

SEQ ID NO: 267038 - RNA, 19 nt, Homo sapiens
  misc_RNA (1)...(19): siRNA sense strand
guggaaauggccaauauaa

SEQ ID NO: 267039 - RNA, 19 nt, Homo sapiens
  misc_RNA (1)...(19): siRNA sense strand
aacuaaaucuggcaagaaa

SEQ ID NO: 267040 - RNA, 19 nt, Homo sapiens
  misc_RNA (1)...(19): siRNA sense strand
caguggaaauggccaauau

SEQ ID NO: 267041 - RNA, 19 nt, Homo sapiens
  misc_RNA (1)...(19): siRNA sense strand
cacgagaggcuaagaauau

SEQ ID NO: 267042 - RNA, 19 nt, Homo sapiens
  misc_RNA (1)...(19): siRNA sense strand
ggcugaacaugaacuaaau

SEQ ID NO: 267043 - RNA, 19 nt, Homo sapiens
  misc_RNA (1)...(19): siRNA sense strand
ucacgagaggcuaagaaua

SEQ ID NO: 267044 - RNA, 19 nt, Homo sapiens
  misc_RNA (1)...(19): siRNA sense strand
ugaacuaaaucuggcaaga

SEQ ID NO: 267045 - RNA, 19 nt, Homo sapiens
  misc_RNA (1)...(19): siRNA sense strand
ucaauuagaagaggugauu

SEQ ID NO: 267046 - RNA, 19 nt, Homo sapiens
  misc_RNA (1)...(19): siRNA sense strand
gagaggcuaagaauauugu

SEQ ID NO: 267047 - RNA, 19 nt, Homo sapiens
  misc_RNA (1)...(19): siRNA sense strand
aagcggaaccagauguuaa

SEQ ID NO: 267048 - RNA, 19 nt, Homo sapiens
  misc_RNA (1)...(19): siRNA sense strand
acgagaggcuaagaauauu

SEQ ID NO: 267049 - RNA, 19 nt, Homo sapiens
  misc_RNA (1)...(19): siRNA sense strand
uaaagcggaaccagauguu

SEQ ID NO: 267050 - RNA, 19 nt, Homo sapiens
  misc_RNA (1)...(19): siRNA sense strand
acuucaaggcggucaauua

SEQ ID NO: 267051 - RNA, 19 nt, Homo sapiens
  misc_RNA (1)...(19): siRNA sense strand
uagaaaguauacagaacag

SEQ ID NO: 267052 - RNA, 19 nt, Homo sapiens
  misc_RNA (1)...(19): siRNA sense strand
aaagcggaaccagauguua

SEQ ID NO: 267053 - RNA, 19 nt, Homo sapiens
  misc_RNA (1)...(19): siRNA sense strand
cgagaggcuaagaauauug

SEQ ID NO: 267054 - RNA, 19 nt, Homo sapiens
  misc_RNA (1)...(19): siRNA sense strand
uugauguucuugaggaaau

SEQ ID NO: 267055 - RNA, 19 nt, Homo sapiens
  misc_RNA (1)...(19): siRNA sense strand
aggcugaacaugaacuaaa

SEQ ID NO: 267056 - RNA, 19 nt, Homo sapiens
  misc_RNA (1)...(19): siRNA sense strand
cuucaaggcggucaauuag

SEQ ID NO: 267057 - RNA, 19 nt, Homo sapiens
  misc_RNA (1)...(19): siRNA sense strand
ugcagcauauagaaaguau

SEQ ID NO: 267058 - RNA, 19 nt, Homo sapiens
  misc_RNA (1)...(19): siRNA sense strand
gagggaauggaaacuaugg

SEQ ID NO: 267059 - RNA, 19 nt, Homo sapiens
  misc_RNA (1)...(19): siRNA sense strand
augagggaauggaaacuau

SEQ ID NO: 267060 - RNA, 19 nt, Homo sapiens
  misc_RNA (1)...(19): siRNA sense strand
gggagccauuaguggaaga

SEQ ID NO: 267061 - RNA, 19 nt, Homo sapiens
  misc_RNA (1)...(19): siRNA sense strand
gcgggugugcugaagaaga

SEQ ID NO: 267062 - RNA, 19 nt, Homo sapiens
  misc_RNA (1)...(19): siRNA sense strand
gcuaagaauauuguacaca

SEQ ID NO: 267063 - RNA, 19 nt, Homo sapiens
  misc_RNA (1)...(19): siRNA sense strand
agaagcuggcuaugguuaa

SEQ ID NO: 267064 - RNA, 19 nt, Homo sapiens
  misc_RNA (1)...(19): siRNA sense strand
gaagaagccuccacaucug

SEQ ID NO: 267065 - RNA, 19 nt, Homo sapiens
  misc_RNA (1)...(19): siRNA sense strand
ggugaugccucccaugaaa

SEQ ID NO: 267066 - RNA, 19 nt, Homo sapiens
  misc_RNA (1)...(19): siRNA sense strand
ggaagaagccuccacaucu

SEQ ID NO: 267067 - RNA, 19 nt, Homo sapiens
  misc_RNA (1)...(19): siRNA sense strand
ccaugggaauaaagaauaa

SEQ ID NO: 267068 - RNA, 19 nt, Homo sapiens
  misc_RNA (1)...(19): siRNA sense strand
gagcgggaauggagacaga

SEQ ID NO: 267069 - RNA, 19 nt, Homo sapiens
  misc_RNA (1)...(19): siRNA sense strand
ccagaugccuacaccgauu

SEQ ID NO: 267070 - RNA, 19 nt, Homo sapiens
  misc_RNA (1)...(19): siRNA sense strand
ggagaccccuggccaaauu

SEQ ID NO: 267071 - RNA, 19 nt, Homo sapiens
  misc_RNA (1)...(19): siRNA sense strand
gccaugggaauaaagaaua

SEQ ID NO: 267072 - RNA, 19 nt, Homo sapiens
  misc_RNA (1)...(19): siRNA sense strand
gcucugaggagguacuuga

SEQ ID NO: 267073 - RNA, 19 nt, Homo sapiens
  misc_RNA (1)...(19): siRNA sense strand
ggcagccucuggcgauuug

SEQ ID NO: 267074 - RNA, 19 nt, Homo sapiens
  misc_RNA (1)...(19): siRNA sense strand
gaggaagagcugcgugaga

SEQ ID NO: 267075 - RNA, 19 nt, Homo sapiens
  misc_RNA (1)...(19): siRNA sense strand
gggaacaugcccagaagug

SEQ ID NO: 267076 - RNA, 19 nt, Homo sapiens
  misc_RNA (1)...(19): siRNA sense strand
gggaauaaagaauaaggau

SEQ ID NO: 267077 - RNA, 19 nt, Homo sapiens
  misc_RNA (1)...(19): siRNA sense strand
ugaagaggaggaagaagau

SEQ ID NO: 267078 - RNA, 19 nt, Homo sapiens
  misc_RNA (1)...(19): siRNA sense strand
gaagaggaggaagaagaug

SEQ ID NO: 267079 - RNA, 19 nt, Homo sapiens
  misc_RNA (1)...(19): siRNA sense strand
acacccaggccucgaugua

SEQ ID NO: 267080 - RNA, 19 nt, Homo sapiens
  misc_RNA (1)...(19): siRNA sense strand
cugaagaggaggaagaaga

SEQ ID NO: 267081 - RNA, 19 nt, Homo sapiens
  misc_RNA (1)...(19): siRNA sense strand
ucgcuuucgucguuacuug

SEQ ID NO: 267082 - RNA, 19 nt, Homo sapiens
  misc_RNA (1)...(19): siRNA sense strand
aagaggaggaagaagauga

SEQ ID NO: 267083 - RNA, 19 nt, Homo sapiens
  misc_RNA (1)...(19): siRNA sense strand
aagaugaugccuccaagga

SEQ ID NO: 267084 - RNA, 19 nt, Homo sapiens
  misc_RNA (1)...(19): siRNA sense strand
gagcagugacagcccuuuc

SEQ ID NO: 267085 - RNA, 19 nt, Homo sapiens
  misc_RNA (1)...(19): siRNA sense strand
ggaggacgaguggcaggaa

SEQ ID NO: 267086 - RNA, 19 nt, Homo sapiens
  misc_RNA (1)...(19): siRNA sense strand
gggcagccucuggcgauuu

SEQ ID NO: 267087 - RNA, 19 nt, Homo sapiens
  misc_RNA (1)...(19): siRNA sense strand
cagaugccuacaccgauuu

SEQ ID NO: 267088 - RNA, 19 nt, Homo sapiens
  misc_RNA (1)...(19): siRNA sense strand
acccaggccucgauguaga

SEQ ID NO: 267089 - RNA, 19 nt, Homo sapiens
  misc_RNA (1)...(19): siRNA sense strand
aaggugaugccucccauga

SEQ ID NO: 267090 - RNA, 19 nt, Homo sapiens
  misc_RNA (1)...(19): siRNA sense strand
ccgggaacaugcccagaag

SEQ ID NO: 267091 - RNA, 19 nt, Homo sapiens
  misc_RNA (1)...(19): siRNA sense strand
aagaagaugaugccuccaa

SEQ ID NO: 267092 - RNA, 19 nt, Homo sapiens
  misc_RNA (1)...(19): siRNA sense strand
gaagguggauuaaauguca

SEQ ID NO: 267093 - RNA, 19 nt, Homo sapiens
  misc_RNA (1)...(19): siRNA sense strand
gaaaggaaguuggcaguau

SEQ ID NO: 267094 - RNA, 19 nt, Homo sapiens
  misc_RNA (1)...(19): siRNA sense strand
gagaaucaguuaagaagau

SEQ ID NO: 267095 - RNA, 19 nt, Homo sapiens
  misc_RNA (1)...(19): siRNA sense strand
gauugaagguggauuaaau

SEQ ID NO: 267096 - RNA, 19 nt, Homo sapiens
  misc_RNA (1)...(19): siRNA sense strand
gaagggaauuguccugaga

SEQ ID NO: 267097 - RNA, 19 nt, Homo sapiens
  misc_RNA (1)...(19): siRNA sense strand
guggaaggaucuacugaua

SEQ ID NO: 267098 - RNA, 19 nt, Homo sapiens
  misc_RNA (1)...(19): siRNA sense strand
ugaccaagcugcaccaguu

SEQ ID NO: 267099 - RNA, 19 nt, Homo sapiens
  misc_RNA (1)...(19): siRNA sense strand
gaaaggagaaucaguuaag

SEQ ID NO: 267100 - RNA, 19 nt, Homo sapiens
  misc_RNA (1)...(19): siRNA sense strand
ggaaggaucuacugauagg

SEQ ID NO: 267101 - RNA, 19 nt, Homo sapiens
  misc_RNA (1)...(19): siRNA sense strand
gaugcaagaucaaggaaau

SEQ ID NO: 267102 - RNA, 19 nt, Homo sapiens
  misc_RNA (1)...(19): siRNA sense strand
ggaauuguccugagagaau

SEQ ID NO: 267103 - RNA, 19 nt, Homo sapiens
  misc_RNA (1)...(19): siRNA sense strand
uagcacagcugccaguaga

SEQ ID NO: 267104 - RNA, 19 nt, Homo sapiens
  misc_RNA (1)...(19): siRNA sense strand
aaagguggaugcaagauca

SEQ ID NO: 267105 - RNA, 19 nt, Homo sapiens
  misc_RNA (1)...(19): siRNA sense strand
caguguggcucucucauug

SEQ ID NO: 267106 - RNA, 19 nt, Homo sapiens
  misc_RNA (1)...(19): siRNA sense strand
aaagaaaggagaaucaguu

SEQ ID NO: 267107 - RNA, 19 nt, Homo sapiens
  misc_RNA (1)...(19): siRNA sense strand
ggaaaggaaguuggcagua

SEQ ID NO: 267108 - RNA, 19 nt, Homo sapiens
  misc_RNA (1)...(19): siRNA sense strand
ugagagaauuaucacuuug

SEQ ID NO: 267109 - RNA, 19 nt, Homo sapiens
  misc_RNA (1)...(19): siRNA sense strand
cugagagaauuaucacuuu

SEQ ID NO: 267110 - RNA, 19 nt, Homo sapiens
  misc_RNA (1)...(19): siRNA sense strand
gaaagaaaggagaaucagu

SEQ ID NO: 267111 - RNA, 19 nt, Homo sapiens
  misc_RNA (1)...(19): siRNA sense strand
caacaucucagaagggaau

SEQ ID NO: 267112 - RNA, 19 nt, Homo sapiens
  misc_RNA (1)...(19): siRNA sense strand
ggagaguggugcacguauc

SEQ ID NO: 267113 - RNA, 19 nt, Homo sapiens
  misc_RNA (1)...(19): siRNA sense strand
gcaguaucaucggaaagaa

SEQ ID NO: 267114 - RNA, 19 nt, Homo sapiens
  misc_RNA (1)...(19): siRNA sense strand
ucaaugagauccgucagau

SEQ ID NO: 267115 - RNA, 19 nt, Homo sapiens
  misc_RNA (1)...(19): siRNA sense strand
aagaaaggagaaucaguua

SEQ ID NO: 267116 - RNA, 19 nt, Homo sapiens
  misc_RNA (1)...(19): siRNA sense strand
cuagaggccuauaccauuc

SEQ ID NO: 267117 - RNA, 19 nt, Homo sapiens
  misc_RNA (1)...(19): siRNA sense strand
aaaggagaaucaguuaaga

SEQ ID NO: 267118 - RNA, 19 nt, Homo sapiens
  misc_RNA (1)...(19): siRNA sense strand
gaucauugacaaacuggaa

SEQ ID NO: 267119 - RNA, 19 nt, Homo sapiens
  misc_RNA (1)...(19): siRNA sense strand
ucagacuacuucucaugaa

SEQ ID NO: 267120 - RNA, 19 nt, Homo sapiens
  misc_RNA (1)...(19): siRNA sense strand
ccacuaaugccaucuucaa

SEQ ID NO: 267121 - RNA, 19 nt, Homo sapiens
  misc_RNA (1)...(19): siRNA sense strand
cgauuugauuggcugcaua

SEQ ID NO: 267122 - RNA, 19 nt, Homo sapiens
  misc_RNA (1)...(19): siRNA sense strand
gaacucaccauuccaaacg

SEQ ID NO: 267123 - RNA, 19 nt, Homo sapiens
  misc_RNA (1)...(19): siRNA sense strand
aaaggaaguuggcaguauc

SEQ ID NO: 267124 - RNA, 19 nt, Homo sapiens
  misc_RNA (1)...(19): siRNA sense strand
caaacuggaagaggacaua

SEQ ID NO: 267125 - RNA, 19 nt, Homo sapiens
  misc_RNA (1)...(19): siRNA sense strand
ggagaaucaguuaagaaga

SEQ ID NO: 267126 - RNA, 19 nt, Homo sapiens
  misc_RNA (1)...(19): siRNA sense strand
gaucugcguggucauguug

SEQ ID NO: 267127 - RNA, 19 nt, Homo sapiens
  misc_RNA (1)...(19): siRNA sense strand
caagaucaaggaaauacga

SEQ ID NO: 267128 - RNA, 19 nt, Homo sapiens
  misc_RNA (1)...(19): siRNA sense strand
gauuugauuggcugcauaa

SEQ ID NO: 267129 - RNA, 19 nt, Homo sapiens
  misc_RNA (1)...(19): siRNA sense strand
gaaauacgagagaguacag

SEQ ID NO: 267130 - RNA, 19 nt, Homo sapiens
  misc_RNA (1)...(19): siRNA sense strand
gagaguggugcacguauca

SEQ ID NO: 267131 - RNA, 19 nt, Homo sapiens
  misc_RNA (1)...(19): siRNA sense strand
guggcucucucauuggaaa

SEQ ID NO: 267132 - RNA, 19 nt, Homo sapiens
  misc_RNA (1)...(19): siRNA sense strand
gaggagaguggugcacgua

SEQ ID NO: 267133 - RNA, 19 nt, Homo sapiens
  misc_RNA (1)...(19): siRNA sense strand
aaugagauccgucagaugu

SEQ ID NO: 267134 - RNA, 19 nt, Homo sapiens
  misc_RNA (1)...(19): siRNA sense strand
ucaaggacaguaugccauu

SEQ ID NO: 267135 - RNA, 19 nt, Homo sapiens
  misc_RNA (1)...(19): siRNA sense strand
ucuagaggccuauaccauu

SEQ ID NO: 267136 - RNA, 19 nt, Homo sapiens
  misc_RNA (1)...(19): siRNA sense strand
ggaaauacgagagaguaca

SEQ ID NO: 267137 - RNA, 19 nt, Homo sapiens
  misc_RNA (1)...(19): siRNA sense strand
gggauaugcuacccaacuc

SEQ ID NO: 267138 - RNA, 19 nt, Homo sapiens
  misc_RNA (1)...(19): siRNA sense strand
gcucagacuacuucucaug

SEQ ID NO: 267139 - RNA, 19 nt, Homo sapiens
  misc_RNA (1)...(19): siRNA sense strand
ccuuugcuaugaucauuga

SEQ ID NO: 267140 - RNA, 19 nt, Homo sapiens
  misc_RNA (1)...(19): siRNA sense strand
gauaggcagguuaccauca

SEQ ID NO: 267141 - RNA, 19 nt, Homo sapiens
  misc_RNA (1)...(19): siRNA sense strand
cagcgacagugcgagcuuu

SEQ ID NO: 267142 - RNA, 19 nt, Homo sapiens
  misc_RNA (1)...(19): siRNA sense strand
uaugaucauugacaaacug

SEQ ID NO: 267143 - RNA, 19 nt, Homo sapiens
  misc_RNA (1)...(19): siRNA sense strand
caaggacaguaugccauuc

SEQ ID NO: 267144 - RNA, 19 nt, Homo sapiens
  misc_RNA (1)...(19): siRNA sense strand
gauaugcuacccaacucaa

SEQ ID NO: 267145 - RNA, 19 nt, Homo sapiens
  misc_RNA (1)...(19): siRNA sense strand
ggaaguuggcaguaucauc

SEQ ID NO: 267146 - RNA, 19 nt, Homo sapiens
  misc_RNA (1)...(19): siRNA sense strand
ggauuaaaugucacucuca

SEQ ID NO: 267147 - RNA, 19 nt, Homo sapiens
  misc_RNA (1)...(19): siRNA sense strand
cuaaugccaucuucaaagc

SEQ ID NO: 267148 - RNA, 19 nt, Homo sapiens
  misc_RNA (1)...(19): siRNA sense strand
gaagaugcgcgaggagagu

SEQ ID NO: 267149 - RNA, 19 nt, Homo sapiens
  misc_RNA (1)...(19): siRNA sense strand
gaggacauaagcagcucua

SEQ ID NO: 267150 - RNA, 19 nt, Homo sapiens
  misc_RNA (1)...(19): siRNA sense strand
gagagaauuaucacuuugg

SEQ ID NO: 267151 - RNA, 19 nt, Homo sapiens
  misc_RNA (1)...(19): siRNA sense strand
ugugauugaagguggauua

SEQ ID NO: 267152 - RNA, 19 nt, Homo sapiens
  misc_RNA (1)...(19): siRNA sense strand
agaaaggagaaucaguuaa

SEQ ID NO: 267153 - RNA, 19 nt, Homo sapiens
  misc_RNA (1)...(19): siRNA sense strand
ggcaguaucaucggaaaga

SEQ ID NO: 267154 - RNA, 19 nt, Homo sapiens
  misc_RNA (1)...(19): siRNA sense strand
gcucuccggucaucuuugc

SEQ ID NO: 267155 - RNA, 19 nt, Homo sapiens
  misc_RNA (1)...(19): siRNA sense strand
ggaugcaagaucaaggaaa

SEQ ID NO: 267156 - RNA, 19 nt, Homo sapiens
  misc_RNA (1)...(19): siRNA sense strand
ccugagagaauuaucacuu

SEQ ID NO: 267157 - RNA, 19 nt, Homo sapiens
  misc_RNA (1)...(19): siRNA sense strand
ucaccauuccaaacgauuu

SEQ ID NO: 267158 - RNA, 19 nt, Homo sapiens
  misc_RNA (1)...(19): siRNA sense strand
agaaucaguuaagaagaug

SEQ ID NO: 267159 - RNA, 19 nt, Homo sapiens
  misc_RNA (1)...(19): siRNA sense strand
aaggaaauacgagagagua

SEQ ID NO: 267160 - RNA, 19 nt, Homo sapiens
  misc_RNA (1)...(19): siRNA sense strand
gaacccaguggaaggaucu

SEQ ID NO: 267161 - RNA, 19 nt, Homo sapiens
  misc_RNA (1)...(19): siRNA sense strand
ggaaagaaaggagaaucag

SEQ ID NO: 267162 - RNA, 19 nt, Homo sapiens
  misc_RNA (1)...(19): siRNA sense strand
guguggcucucucauugga

SEQ ID NO: 267163 - RNA, 19 nt, Homo sapiens
  misc_RNA (1)...(19): siRNA sense strand
caugaacucaccauuccaa

SEQ ID NO: 267164 - RNA, 19 nt, Homo sapiens
  misc_RNA (1)...(19): siRNA sense strand
cggaaagaaaggagaauca

SEQ ID NO: 267165 - RNA, 19 nt, Homo sapiens
  misc_RNA (1)...(19): siRNA sense strand
cagguggucaggacaggua

SEQ ID NO: 267166 - RNA, 19 nt, Homo sapiens
  misc_RNA (1)...(19): siRNA sense strand
caucacuauugcuggcauu

SEQ ID NO: 267167 - RNA, 19 nt, Homo sapiens
  misc_RNA (1)...(19): siRNA sense strand
ucaguguggcucucucauu

SEQ ID NO: 267168 - RNA, 19 nt, Homo sapiens
  misc_RNA (1)...(19): siRNA sense strand
ccauuccacagccagauuu

SEQ ID NO: 267169 - RNA, 19 nt, Homo sapiens
  misc_RNA (1)...(19): siRNA sense strand
uaaucaaugucaggcuuuc

SEQ ID NO: 267170 - RNA, 19 nt, Homo sapiens
  misc_RNA (1)...(19): siRNA sense strand
gaccaagcugcaccaguug

SEQ ID NO: 267171 - RNA, 19 nt, Homo sapiens
  misc_RNA (1)...(19): siRNA sense strand
ggaaaagguggaugcaaga

SEQ ID NO: 267172 - RNA, 19 nt, Homo sapiens
  misc_RNA (1)...(19): siRNA sense strand
caucggaaagaaaggagaa

SEQ ID NO: 267173 - RNA, 19 nt, Homo sapiens
  misc_RNA (1)...(19): siRNA sense strand
ugagauccgucagaugucu

SEQ ID NO: 267174 - RNA, 19 nt, Homo sapiens
  misc_RNA (1)...(19): siRNA sense strand
ucucaugaacucaccauuc

SEQ ID NO: 267175 - RNA, 19 nt, Homo sapiens
  misc_RNA (1)...(19): siRNA sense strand
cagacuacuucucaugaac

SEQ ID NO: 267176 - RNA, 19 nt, Homo sapiens
  misc_RNA (1)...(19): siRNA sense strand
ggauaugcuacccaacuca

SEQ ID NO: 267177 - RNA, 19 nt, Homo sapiens
  misc_RNA (1)...(19): siRNA sense strand
ggucccugcuagucagugu

SEQ ID NO: 267178 - RNA, 19 nt, Homo sapiens
  misc_RNA (1)...(19): siRNA sense strand
acuuaugcauggaaaggaa

SEQ ID NO: 267179 - RNA, 19 nt, Homo sapiens
  misc_RNA (1)...(19): siRNA sense strand
caaggaaauacgagagagu

SEQ ID NO: 267180 - RNA, 19 nt, Homo sapiens
  misc_RNA (1)...(19): siRNA sense strand
gcuaugaucauugacaaac

SEQ ID NO: 267181 - RNA, 19 nt, Homo sapiens
  misc_RNA (1)...(19): siRNA sense strand
cagguuaccaucacuggau

SEQ ID NO: 267182 - RNA, 19 nt, Homo sapiens
  misc_RNA (1)...(19): siRNA sense strand
guccagcucuccggucauc

SEQ ID NO: 267183 - RNA, 19 nt, Homo sapiens
  misc_RNA (1)...(19): siRNA sense strand
caguaucaucggaaagaaa

SEQ ID NO: 267184 - RNA, 19 nt, Homo sapiens
  misc_RNA (1)...(19): siRNA sense strand
aaggagaaucaguuaagaa

SEQ ID NO: 267185 - RNA, 19 nt, Homo sapiens
  misc_RNA (1)...(19): siRNA sense strand
aagcagcucuaugaccaau

SEQ ID NO: 267186 - RNA, 19 nt, Homo sapiens
  misc_RNA (1)...(19): siRNA sense strand
uugcuaugaucauugacaa

SEQ ID NO: 267187 - RNA, 19 nt, Homo sapiens
  misc_RNA (1)...(19): siRNA sense strand
gugauugaagguggauuaa

SEQ ID NO: 267188 - RNA, 19 nt, Homo sapiens
  misc_RNA (1)...(19): siRNA sense strand
cucaccauccggcuacuua

SEQ ID NO: 267189 - RNA, 19 nt, Homo sapiens
  misc_RNA (1)...(19): siRNA sense strand
gcagcgacagugcgagcuu

SEQ ID NO: 267190 - RNA, 19 nt, Homo sapiens
  misc_RNA (1)...(19): siRNA sense strand
aaacuggaagaggacauaa

SEQ ID NO: 267191 - RNA, 19 nt, Homo sapiens
  misc_RNA (1)...(19): siRNA sense strand
gaagguggauuaaauguca

SEQ ID NO: 267192 - RNA, 19 nt, Homo sapiens
  misc_RNA (1)...(19): siRNA sense strand
gaaaggaaguuggcaguau

SEQ ID NO: 267193 - RNA, 19 nt, Homo sapiens
  misc_RNA (1)...(19): siRNA sense strand
gagaaucaguuaagaagau

SEQ ID NO: 267194 - RNA, 19 nt, Homo sapiens
  misc_RNA (1)...(19): siRNA sense strand
gauugaagguggauuaaau

SEQ ID NO: 267195 - RNA, 19 nt, Homo sapiens
  misc_RNA (1)...(19): siRNA sense strand
gaagggaauuguccugaga

SEQ ID NO: 267196 - RNA, 19 nt, Homo sapiens
  misc_RNA (1)...(19): siRNA sense strand
guggaaggaucuacugaua

SEQ ID NO: 267197 - RNA, 19 nt, Homo sapiens
  misc_RNA (1)...(19): siRNA sense strand
ugaccaagcugcaccaguu

SEQ ID NO: 267198 - RNA, 19 nt, Homo sapiens
  misc_RNA (1)...(19): siRNA sense strand
gaaaggagaaucaguuaag

SEQ ID NO: 267199 - RNA, 19 nt, Homo sapiens
  misc_RNA (1)...(19): siRNA sense strand
ggaaggaucuacugauagg

SEQ ID NO: 267200 - RNA, 19 nt, Homo sapiens
  misc_RNA (1)...(19): siRNA sense strand
gaugcaagaucaaggaaau

SEQ ID NO: 267201 - RNA, 19 nt, Homo sapiens
  misc_RNA (1)...(19): siRNA sense strand
ggaauuguccugagagaau

SEQ ID NO: 267202 - RNA, 19 nt, Homo sapiens
  misc_RNA (1)...(19): siRNA sense strand
uagcacagcugccaguaga

SEQ ID NO: 267203 - RNA, 19 nt, Homo sapiens
  misc_RNA (1)...(19): siRNA sense strand
aaagguggaugcaagauca

SEQ ID NO: 267204 - RNA, 19 nt, Homo sapiens
  misc_RNA (1)...(19): siRNA sense strand
caguguggcucucucauug

SEQ ID NO: 267205 - RNA, 19 nt, Homo sapiens
  misc_RNA (1)...(19): siRNA sense strand
aaagaaaggagaaucaguu

SEQ ID NO: 267206 - RNA, 19 nt, Homo sapiens
  misc_RNA (1)...(19): siRNA sense strand
ggaaaggaaguuggcagua

SEQ ID NO: 267207 - RNA, 19 nt, Homo sapiens
  misc_RNA (1)...(19): siRNA sense strand
ugagagaauuaucacuuug

SEQ ID NO: 267208 - RNA, 19 nt, Homo sapiens
  misc_RNA (1)...(19): siRNA sense strand
cugagagaauuaucacuuu

SEQ ID NO: 267209 - RNA, 19 nt, Homo sapiens
  misc_RNA (1)...(19): siRNA sense strand
gaaagaaaggagaaucagu

SEQ ID NO: 267210 - RNA, 19 nt, Homo sapiens
  misc_RNA (1)...(19): siRNA sense strand
caacaucucagaagggaau

SEQ ID NO: 267211 - RNA, 19 nt, Homo sapiens
  misc_RNA (1)...(19): siRNA sense strand
ggagaguggugcacguauc

SEQ ID NO: 267212 - RNA, 19 nt, Homo sapiens
  misc_RNA (1)...(19): siRNA sense strand
gcaguaucaucggaaagaa

SEQ ID NO: 267213 - RNA, 19 nt, Homo sapiens
  misc_RNA (1)...(19): siRNA sense strand
ucaaugagauccgucagau

SEQ ID NO: 267214 - RNA, 19 nt, Homo sapiens
  misc_RNA (1)...(19): siRNA sense strand
aagaaaggagaaucaguua

SEQ ID NO: 267215 - RNA, 19 nt, Homo sapiens
  misc_RNA (1)...(19): siRNA sense strand
cuagaggccuauaccauuc

SEQ ID NO: 267216 - RNA, 19 nt, Homo sapiens
  misc_RNA (1)...(19): siRNA sense strand
aaaggagaaucaguuaaga

SEQ ID NO: 267217 - RNA, 19 nt, Homo sapiens
  misc_RNA (1)...(19): siRNA sense strand
gaucauugacaaacuggaa

SEQ ID NO: 267218 - RNA, 19 nt, Homo sapiens
  misc_RNA (1)...(19): siRNA sense strand
ucagacuacuucucaugaa

SEQ ID NO: 267219 - RNA, 19 nt, Homo sapiens
  misc_RNA (1)...(19): siRNA sense strand
ccacuaaugccaucuucaa

SEQ ID NO: 267220 - RNA, 19 nt, Homo sapiens
  misc_RNA (1)...(19): siRNA sense strand
cgauuugauuggcugcaua

SEQ ID NO: 267221 - RNA, 19 nt, Homo sapiens
  misc_RNA (1)...(19): siRNA sense strand
gaacucaccauuccaaacg

SEQ ID NO: 267222 - RNA, 19 nt, Homo sapiens
  misc_RNA (1)...(19): siRNA sense strand
aaaggaaguuggcaguauc

SEQ ID NO: 267223 - RNA, 19 nt, Homo sapiens
  misc_RNA (1)...(19): siRNA sense strand
caaacuggaagaggacaua

SEQ ID NO: 267224 - RNA, 19 nt, Homo sapiens
  misc_RNA (1)...(19): siRNA sense strand
ggagaaucaguuaagaaga

SEQ ID NO: 267225 - RNA, 19 nt, Homo sapiens
  misc_RNA (1)...(19): siRNA sense strand
gaucugcguggucauguug

SEQ ID NO: 267226 - RNA, 19 nt, Homo sapiens
  misc_RNA (1)...(19): siRNA sense strand
caagaucaaggaaauacga

SEQ ID NO: 267227 - RNA, 19 nt, Homo sapiens
  misc_RNA (1)...(19): siRNA sense strand
gauuugauuggcugcauaa

SEQ ID NO: 267228 - RNA, 19 nt, Homo sapiens
  misc_RNA (1)...(19): siRNA sense strand
gaaauacgagagaguacag

SEQ ID NO: 267229 - RNA, 19 nt, Homo sapiens
  misc_RNA (1)...(19): siRNA sense strand
gagaguggugcacguauca

SEQ ID NO: 267230 - RNA, 19 nt, Homo sapiens
  misc_RNA (1)...(19): siRNA sense strand
guggcucucucauuggaaa

SEQ ID NO: 267231 - RNA, 19 nt, Homo sapiens
  misc_RNA (1)...(19): siRNA sense strand
gaggagaguggugcacgua

SEQ ID NO: 267232 - RNA, 19 nt, Homo sapiens
  misc_RNA (1)...(19): siRNA sense strand
aaugagauccgucagaugu

SEQ ID NO: 267233 - RNA, 19 nt, Homo sapiens
  misc_RNA (1)...(19): siRNA sense strand
ucaaggacaguaugccauu

SEQ ID NO: 267234 - RNA, 19 nt, Homo sapiens
  misc_RNA (1)...(19): siRNA sense strand
ucuagaggccuauaccauu

SEQ ID NO: 267235 - RNA, 19 nt, Homo sapiens
  misc_RNA (1)...(19): siRNA sense strand
ggaaauacgagagaguaca

SEQ ID NO: 267236 - RNA, 19 nt, Homo sapiens
  misc_RNA (1)...(19): siRNA sense strand
gggauaugcuacccaacuc

SEQ ID NO: 267237 - RNA, 19 nt, Homo sapiens
  misc_RNA (1)...(19): siRNA sense strand
gcucagacuacuucucaug

SEQ ID NO: 267238 - RNA, 19 nt, Homo sapiens
  misc_RNA (1)...(19): siRNA sense strand
ccuuugcuaugaucauuga

SEQ ID NO: 267239 - RNA, 19 nt, Homo sapiens
  misc_RNA (1)...(19): siRNA sense strand
gauaggcagguuaccauca

SEQ ID NO: 267240 - RNA, 19 nt, Homo sapiens
  misc_RNA (1)...(19): siRNA sense strand
cagcgacagugcgagcuuu

SEQ ID NO: 267241 - RNA, 19 nt, Homo sapiens
  misc_RNA (1)...(19): siRNA sense strand
uaugaucauugacaaacug

SEQ ID NO: 267242 - RNA, 19 nt, Homo sapiens
  misc_RNA (1)...(19): siRNA sense strand
caaggacaguaugccauuc

SEQ ID NO: 267243 - RNA, 19 nt, Homo sapiens
  misc_RNA (1)...(19): siRNA sense strand
gauaugcuacccaacucaa

SEQ ID NO: 267244 - RNA, 19 nt, Homo sapiens
  misc_RNA (1)...(19): siRNA sense strand
ggaaguuggcaguaucauc

SEQ ID NO: 267245 - RNA, 19 nt, Homo sapiens
  misc_RNA (1)...(19): siRNA sense strand
ggauuaaaugucacucuca

SEQ ID NO: 267246 - RNA, 19 nt, Homo sapiens
  misc_RNA (1)...(19): siRNA sense strand
cuaaugccaucuucaaagc

SEQ ID NO: 267247 - RNA, 19 nt, Homo sapiens
  misc_RNA (1)...(19): siRNA sense strand
gaagaugcgcgaggagagu

SEQ ID NO: 267248 - RNA, 19 nt, Homo sapiens
  misc_RNA (1)...(19): siRNA sense strand
gaggacauaagcagcucua

SEQ ID NO: 267249 - RNA, 19 nt, Homo sapiens
  misc_RNA (1)...(19): siRNA sense strand
gagagaauuaucacuuugg

SEQ ID NO: 267250 - RNA, 19 nt, Homo sapiens
  misc_RNA (1)...(19): siRNA sense strand
ugugauugaagguggauua

SEQ ID NO: 267251 - RNA, 19 nt, Homo sapiens
  misc_RNA (1)...(19): siRNA sense strand
agaaaggagaaucaguuaa

SEQ ID NO: 267252 - RNA, 19 nt, Homo sapiens
  misc_RNA (1)...(19): siRNA sense strand
ggcaguaucaucggaaaga

SEQ ID NO: 267253 - RNA, 19 nt, Homo sapiens
  misc_RNA (1)...(19): siRNA sense strand
gcucuccggucaucuuugc

SEQ ID NO: 267254 - RNA, 19 nt, Homo sapiens
  misc_RNA (1)...(19): siRNA sense strand
ggaugcaagaucaaggaaa

SEQ ID NO: 267255 - RNA, 19 nt, Homo sapiens
  misc_RNA (1)...(19): siRNA sense strand
ccugagagaauuaucacuu

SEQ ID NO: 267256 - RNA, 19 nt, Homo sapiens
  misc_RNA (1)...(19): siRNA sense strand
ucaccauuccaaacgauuu

SEQ ID NO: 267257 - RNA, 19 nt, Homo sapiens
  misc_RNA (1)...(19): siRNA sense strand
agaaucaguuaagaagaug

SEQ ID NO: 267258 - RNA, 19 nt, Homo sapiens
  misc_RNA (1)...(19): siRNA sense strand
aaggaaauacgagagagua

SEQ ID NO: 267259 - RNA, 19 nt, Homo sapiens
  misc_RNA (1)...(19): siRNA sense strand
gaacccaguggaaggaucu

SEQ ID NO: 267260 - RNA, 19 nt, Homo sapiens
  misc_RNA (1)...(19): siRNA sense strand
ggaaagaaaggagaaucag

SEQ ID NO: 267261 - RNA, 19 nt, Homo sapiens
  misc_RNA (1)...(19): siRNA sense strand
guguggcucucucauugga

SEQ ID NO: 267262 - RNA, 19 nt, Homo sapiens
  misc_RNA (1)...(19): siRNA sense strand
caugaacucaccauuccaa

SEQ ID NO: 267263 - RNA, 19 nt, Homo sapiens
  misc_RNA (1)...(19): siRNA sense strand
cggaaagaaaggagaauca

SEQ ID NO: 267264 - RNA, 19 nt, Homo sapiens
  misc_RNA (1)...(19): siRNA sense strand
cagguggucaggacaggua

SEQ ID NO: 267265 - RNA, 19 nt, Homo sapiens
  misc_RNA (1)...(19): siRNA sense strand
caucacuauugcuggcauu

SEQ ID NO: 267266 - RNA, 19 nt, Homo sapiens
  misc_RNA (1)...(19): siRNA sense strand
ucaguguggcucucucauu

SEQ ID NO: 267267 - RNA, 19 nt, Homo sapiens
  misc_RNA (1)...(19): siRNA sense strand
ccauuccacagccagauuu

SEQ ID NO: 267268 - RNA, 19 nt, Homo sapiens
  misc_RNA (1)...(19): siRNA sense strand
uaaucaaugucaggcuuuc

SEQ ID NO: 267269 - RNA, 19 nt, Homo sapiens
  misc_RNA (1)...(19): siRNA sense strand
gaccaagcugcaccaguug

SEQ ID NO: 267270 - RNA, 19 nt, Homo sapiens
  misc_RNA (1)...(19): siRNA sense strand
ggaaaagguggaugcaaga

SEQ ID NO: 267271 - RNA, 19 nt, Homo sapiens
  misc_RNA (1)...(19): siRNA sense strand
caucggaaagaaaggagaa

SEQ ID NO: 267272 - RNA, 19 nt, Homo sapiens
  misc_RNA (1)...(19): siRNA sense strand
ugagauccgucagaugucu

SEQ ID NO: 267273 - RNA, 19 nt, Homo sapiens
  misc_RNA (1)...(19): siRNA sense strand
ucucaugaacucaccauuc

SEQ ID NO: 267274 - RNA, 19 nt, Homo sapiens
  misc_RNA (1)...(19): siRNA sense strand
cagacuacuucucaugaac

SEQ ID NO: 267275 - RNA, 19 nt, Homo sapiens
  misc_RNA (1)...(19): siRNA sense strand
ggauaugcuacccaacuca

SEQ ID NO: 267276 - RNA, 19 nt, Homo sapiens
  misc_RNA (1)...(19): siRNA sense strand
ggucccugcuagucagugu

SEQ ID NO: 267277 - RNA, 19 nt, Homo sapiens
  misc_RNA (1)...(19): siRNA sense strand
acuuaugcauggaaaggaa

SEQ ID NO: 267278 - RNA, 19 nt, Homo sapiens
  misc_RNA (1)...(19): siRNA sense strand
caaggaaauacgagagagu

SEQ ID NO: 267279 - RNA, 19 nt, Homo sapiens
  misc_RNA (1)...(19): siRNA sense strand
gcuaugaucauugacaaac

SEQ ID NO: 267280 - RNA, 19 nt, Homo sapiens
  misc_RNA (1)...(19): siRNA sense strand
cagguuaccaucacuggau

SEQ ID NO: 267281 - RNA, 19 nt, Homo sapiens
  misc_RNA (1)...(19): siRNA sense strand
guccagcucuccggucauc

SEQ ID NO: 267282 - RNA, 19 nt, Homo sapiens
  misc_RNA (1)...(19): siRNA sense strand
caguaucaucggaaagaaa

SEQ ID NO: 267283 - RNA, 19 nt, Homo sapiens
  misc_RNA (1)...(19): siRNA sense strand
aaggagaaucaguuaagaa

SEQ ID NO: 267284 - RNA, 19 nt, Homo sapiens
  misc_RNA (1)...(19): siRNA sense strand
aagcagcucuaugaccaau

SEQ ID NO: 267285 - RNA, 19 nt, Homo sapiens
  misc_RNA (1)...(19): siRNA sense strand
uugcuaugaucauugacaa

SEQ ID NO: 267286 - RNA, 19 nt, Homo sapiens
  misc_RNA (1)...(19): siRNA sense strand
gugauugaagguggauuaa

SEQ ID NO: 267287 - RNA, 19 nt, Homo sapiens
  misc_RNA (1)...(19): siRNA sense strand
cucaccauccggcuacuua

SEQ ID NO: 267288 - RNA, 19 nt, Homo sapiens
  misc_RNA (1)...(19): siRNA sense strand
gcagcgacagugcgagcuu

SEQ ID NO: 267289 - RNA, 19 nt, Homo sapiens
  misc_RNA (1)...(19): siRNA sense strand
aaacuggaagaggacauaa

SEQ ID NO: 267290 - RNA, 19 nt, Homo sapiens
  misc_RNA (1)...(19): siRNA sense strand
gggcgugacuuccacauga

SEQ ID NO: 267291 - RNA, 19 nt, Homo sapiens
  misc_RNA (1)...(19): siRNA sense strand
ucggagagcuucgugcuaa

SEQ ID NO: 267292 - RNA, 19 nt, Homo sapiens
  misc_RNA (1)...(19): siRNA sense strand
ccaaggcgcagaucaaaga

SEQ ID NO: 267293 - RNA, 19 nt, Homo sapiens
  misc_RNA (1)...(19): siRNA sense strand
gacggaguaugccaccauu

SEQ ID NO: 267294 - RNA, 19 nt, Homo sapiens
  misc_RNA (1)...(19): siRNA sense strand
cuaaacugguaccgcauga

SEQ ID NO: 267295 - RNA, 19 nt, Homo sapiens
  misc_RNA (1)...(19): siRNA sense strand
gagcucagggugacagaga

SEQ ID NO: 267296 - RNA, 19 nt, Homo sapiens
  misc_RNA (1)...(19): siRNA sense strand
gcaaugacagcggcaccua

SEQ ID NO: 267297 - RNA, 19 nt, Homo sapiens
  misc_RNA (1)...(19): siRNA sense strand
gcuucgugcuaaacuggua

SEQ ID NO: 267298 - RNA, 19 nt, Homo sapiens
  misc_RNA (1)...(19): siRNA sense strand
gacugccgcuuccguguca

SEQ ID NO: 267299 - RNA, 19 nt, Homo sapiens
  misc_RNA (1)...(19): siRNA sense strand
gauuuccaguggcgagaga

SEQ ID NO: 267300 - RNA, 19 nt, Homo sapiens
  misc_RNA (1)...(19): siRNA sense strand
guaugccaccauugucuuu

SEQ ID NO: 267301 - RNA, 19 nt, Homo sapiens
  misc_RNA (1)...(19): siRNA sense strand
ucccugagcagacggagua

SEQ ID NO: 267302 - RNA, 19 nt, Homo sapiens
  misc_RNA (1)...(19): siRNA sense strand
cggagagcuucgugcuaaa

SEQ ID NO: 267303 - RNA, 19 nt, Homo sapiens
  misc_RNA (1)...(19): siRNA sense strand
ccaggaugguucuuagacu

SEQ ID NO: 267304 - RNA, 19 nt, Homo sapiens
  misc_RNA (1)...(19): siRNA sense strand
uguguucucuguggacuau

SEQ ID NO: 267305 - RNA, 19 nt, Homo sapiens
  misc_RNA (1)...(19): siRNA sense strand
cagcggcaccuaccucugu

SEQ ID NO: 267306 - RNA, 19 nt, Homo sapiens
  misc_RNA (1)...(19): siRNA sense strand
gcaaccagacggacaagcu

SEQ ID NO: 267307 - RNA, 19 nt, Homo sapiens
  misc_RNA (1)...(19): siRNA sense strand
ggaguaugccaccauuguc

SEQ ID NO: 267308 - RNA, 19 nt, Homo sapiens
  misc_RNA (1)...(19): siRNA sense strand
gaggauggacacugcucuu

SEQ ID NO: 267309 - RNA, 19 nt, Homo sapiens
  misc_RNA (1)...(19): siRNA sense strand
agagagaagggcagaagug

SEQ ID NO: 267310 - RNA, 19 nt, Homo sapiens
  misc_RNA (1)...(19): siRNA sense strand
cggaguaugccaccauugu

SEQ ID NO: 267311 - RNA, 19 nt, Homo sapiens
  misc_RNA (1)...(19): siRNA sense strand
gaguaugccaccauugucu

SEQ ID NO: 267312 - RNA, 19 nt, Homo sapiens
  misc_RNA (1)...(19): siRNA sense strand
cggccaggaugguucuuag

SEQ ID NO: 267313 - RNA, 19 nt, Homo sapiens
  misc_RNA (1)...(19): siRNA sense strand
gcggccaggaugguucuua

SEQ ID NO: 267314 - RNA, 19 nt, Homo sapiens
  misc_RNA (1)...(19): siRNA sense strand
gaauauggaugugcaauaa

SEQ ID NO: 267315 - RNA, 19 nt, Homo sapiens
  misc_RNA (1)...(19): siRNA sense strand
gaucagaaguggcuauaaa

SEQ ID NO: 267316 - RNA, 19 nt, Homo sapiens
  misc_RNA (1)...(19): siRNA sense strand
cauccgagcucauaauaua

SEQ ID NO: 267317 - RNA, 19 nt, Homo sapiens
  misc_RNA (1)...(19): siRNA sense strand
caacggaagugucccauuu

SEQ ID NO: 267318 - RNA, 19 nt, Homo sapiens
  misc_RNA (1)...(19): siRNA sense strand
gaucaugucacuuggauua

SEQ ID NO: 267319 - RNA, 19 nt, Homo sapiens
  misc_RNA (1)...(19): siRNA sense strand
uggaauacaugacugauua

SEQ ID NO: 267320 - RNA, 19 nt, Homo sapiens
  misc_RNA (1)...(19): siRNA sense strand
ggaaucaacucgaauaugg

SEQ ID NO: 267321 - RNA, 19 nt, Homo sapiens
  misc_RNA (1)...(19): siRNA sense strand
gaggauuucuacacuguua

SEQ ID NO: 267322 - RNA, 19 nt, Homo sapiens
  misc_RNA (1)...(19): siRNA sense strand
gaaauaacagcaacaguga

SEQ ID NO: 267323 - RNA, 19 nt, Homo sapiens
  misc_RNA (1)...(19): siRNA sense strand
gcaauuugguaccuaugua

SEQ ID NO: 267324 - RNA, 19 nt, Homo sapiens
  misc_RNA (1)...(19): siRNA sense strand
ccacaguguucuucuuaua

SEQ ID NO: 267325 - RNA, 19 nt, Homo sapiens
  misc_RNA (1)...(19): siRNA sense strand
ucacugggcuugacuucua

SEQ ID NO: 267326 - RNA, 19 nt, Homo sapiens
  misc_RNA (1)...(19): siRNA sense strand
caaggcagcugcaggaaga

SEQ ID NO: 267327 - RNA, 19 nt, Homo sapiens
  misc_RNA (1)...(19): siRNA sense strand
cagaggaggugucaaaguu

SEQ ID NO: 267328 - RNA, 19 nt, Homo sapiens
  misc_RNA (1)...(19): siRNA sense strand
gaauggaccagacuuauug

SEQ ID NO: 267329 - RNA, 19 nt, Homo sapiens
  misc_RNA (1)...(19): siRNA sense strand
guacucagcuggaacaagu

SEQ ID NO: 267330 - RNA, 19 nt, Homo sapiens
  misc_RNA (1)...(19): siRNA sense strand
ggugugauguggcauguaa

SEQ ID NO: 267331 - RNA, 19 nt, Homo sapiens
  misc_RNA (1)...(19): siRNA sense strand
gaaguugaaccauuugaaa

SEQ ID NO: 267332 - RNA, 19 nt, Homo sapiens
  misc_RNA (1)...(19): siRNA sense strand
gaacaucagauagccaaua

SEQ ID NO: 267333 - RNA, 19 nt, Homo sapiens
  misc_RNA (1)...(19): siRNA sense strand
guaacaagauggaauacau

SEQ ID NO: 267334 - RNA, 19 nt, Homo sapiens
  misc_RNA (1)...(19): siRNA sense strand
gcauuguucuucuugcuuu

SEQ ID NO: 267335 - RNA, 19 nt, Homo sapiens
  misc_RNA (1)...(19): siRNA sense strand
uagccaauaugaugcuuua

SEQ ID NO: 267336 - RNA, 19 nt, Homo sapiens
  misc_RNA (1)...(19): siRNA sense strand
cagaguaauuaaagccuua

SEQ ID NO: 267337 - RNA, 19 nt, Homo sapiens
  misc_RNA (1)...(19): siRNA sense strand
gagcauggaggcuaucuuu

SEQ ID NO: 267338 - RNA, 19 nt, Homo sapiens
  misc_RNA (1)...(19): siRNA sense strand
gaaucuacguugacuuuag

SEQ ID NO: 267339 - RNA, 19 nt, Homo sapiens
  misc_RNA (1)...(19): siRNA sense strand
cagaugaaauuaccaaaca

SEQ ID NO: 267340 - RNA, 19 nt, Homo sapiens
  misc_RNA (1)...(19): siRNA sense strand
ccauauacaugccuuacaa

SEQ ID NO: 267341 - RNA, 19 nt, Homo sapiens
  misc_RNA (1)...(19): siRNA sense strand
gacugaaguugaaccauuu

SEQ ID NO: 267342 - RNA, 19 nt, Homo sapiens
  misc_RNA (1)...(19): siRNA sense strand
gcacauggacccaguuuua

SEQ ID NO: 267343 - RNA, 19 nt, Homo sapiens
  misc_RNA (1)...(19): siRNA sense strand
gagaggauuucuacacugu

SEQ ID NO: 267344 - RNA, 19 nt, Homo sapiens
  misc_RNA (1)...(19): siRNA sense strand
ggaauggaccagacuuauu

SEQ ID NO: 267345 - RNA, 19 nt, Homo sapiens
  misc_RNA (1)...(19): siRNA sense strand
agagaagacugaaguugaa

SEQ ID NO: 267346 - RNA, 19 nt, Homo sapiens
  misc_RNA (1)...(19): siRNA sense strand
gagcuguccugaagguaaa

SEQ ID NO: 267347 - RNA, 19 nt, Homo sapiens
  misc_RNA (1)...(19): siRNA sense strand
gggaauaugucaguggauu

SEQ ID NO: 267348 - RNA, 19 nt, Homo sapiens
  misc_RNA (1)...(19): siRNA sense strand
cagcaacagugaaaguaaa

SEQ ID NO: 267349 - RNA, 19 nt, Homo sapiens
  misc_RNA (1)...(19): siRNA sense strand
auaaauggcuccuuuccuu

SEQ ID NO: 267350 - RNA, 19 nt, Homo sapiens
  misc_RNA (1)...(19): siRNA sense strand
ucuauaaccuaauguguga

SEQ ID NO: 267351 - RNA, 19 nt, Homo sapiens
  misc_RNA (1)...(19): siRNA sense strand
agacugaaguugaaccauu

SEQ ID NO: 267352 - RNA, 19 nt, Homo sapiens
  misc_RNA (1)...(19): siRNA sense strand
ggugauugcugcugggauu

SEQ ID NO: 267353 - RNA, 19 nt, Homo sapiens
  misc_RNA (1)...(19): siRNA sense strand
ccaaaucauuacaccauug

SEQ ID NO: 267354 - RNA, 19 nt, Homo sapiens
  misc_RNA (1)...(19): siRNA sense strand
caucagauagccaauauga

SEQ ID NO: 267355 - RNA, 19 nt, Homo sapiens
  misc_RNA (1)...(19): siRNA sense strand
ucagauagccaauaugaug

SEQ ID NO: 267356 - RNA, 19 nt, Homo sapiens
  misc_RNA (1)...(19): siRNA sense strand
guggagagcuguccugaag

SEQ ID NO: 267357 - RNA, 19 nt, Homo sapiens
  misc_RNA (1)...(19): siRNA sense strand
ccuaaugugugaucuucua

SEQ ID NO: 267358 - RNA, 19 nt, Homo sapiens
  misc_RNA (1)...(19): siRNA sense strand
cagccugucucugaaauuu

SEQ ID NO: 267359 - RNA, 19 nt, Homo sapiens
  misc_RNA (1)...(19): siRNA sense strand
ggagagcuguccugaaggu

SEQ ID NO: 267360 - RNA, 19 nt, Homo sapiens
  misc_RNA (1)...(19): siRNA sense strand
guggaccaauauuugauua

SEQ ID NO: 267361 - RNA, 19 nt, Homo sapiens
  misc_RNA (1)...(19): siRNA sense strand
gaaagacccagguuuuaua

SEQ ID NO: 267362 - RNA, 19 nt, Homo sapiens
  misc_RNA (1)...(19): siRNA sense strand
gaaagaaauggaguaaaug

SEQ ID NO: 267363 - RNA, 19 nt, Homo sapiens
  misc_RNA (1)...(19): siRNA sense strand
ugaagucuauaaccuaaug

SEQ ID NO: 267364 - RNA, 19 nt, Homo sapiens
  misc_RNA (1)...(19): siRNA sense strand
gaccagacuuauuguaaca

SEQ ID NO: 267365 - RNA, 19 nt, Homo sapiens
  misc_RNA (1)...(19): siRNA sense strand
gguaguagaucaugcuuuu

SEQ ID NO: 267366 - RNA, 19 nt, Homo sapiens
  misc_RNA (1)...(19): siRNA sense strand
aauuaaagccuuacaggua

SEQ ID NO: 267367 - RNA, 19 nt, Homo sapiens
  misc_RNA (1)...(19): siRNA sense strand
ggcuauaaauggcuccuuu

SEQ ID NO: 267368 - RNA, 19 nt, Homo sapiens
  misc_RNA (1)...(19): siRNA sense strand
cugaggaaauuguuagaaa

SEQ ID NO: 267369 - RNA, 19 nt, Homo sapiens
  misc_RNA (1)...(19): siRNA sense strand
ggaagugucccauuugaag

SEQ ID NO: 267370 - RNA, 19 nt, Homo sapiens
  misc_RNA (1)...(19): siRNA sense strand
caaagcgacugcacuaugc

SEQ ID NO: 267371 - RNA, 19 nt, Homo sapiens
  misc_RNA (1)...(19): siRNA sense strand
cagaagcucuuuggguuga

SEQ ID NO: 267372 - RNA, 19 nt, Homo sapiens
  misc_RNA (1)...(19): siRNA sense strand
ccaguuaucuuguuuucua

SEQ ID NO: 267373 - RNA, 19 nt, Homo sapiens
  misc_RNA (1)...(19): siRNA sense strand
gaacgucagaaucgacaaa

SEQ ID NO: 267374 - RNA, 19 nt, Homo sapiens
  misc_RNA (1)...(19): siRNA sense strand
ggaccagacuuauuguaac

SEQ ID NO: 267375 - RNA, 19 nt, Homo sapiens
  misc_RNA (1)...(19): siRNA sense strand
cuauuugacuccugauuug

SEQ ID NO: 267376 - RNA, 19 nt, Homo sapiens
  misc_RNA (1)...(19): siRNA sense strand
gaauaugucaguggauuug

SEQ ID NO: 267377 - RNA, 19 nt, Homo sapiens
  misc_RNA (1)...(19): siRNA sense strand
uaagaguguuugccaagga

SEQ ID NO: 267378 - RNA, 19 nt, Homo sapiens
  misc_RNA (1)...(19): siRNA sense strand
ggaauaugucaguggauuu

SEQ ID NO: 267379 - RNA, 19 nt, Homo sapiens
  misc_RNA (1)...(19): siRNA sense strand
uggaacccaugguaguuua

SEQ ID NO: 267380 - RNA, 19 nt, Homo sapiens
  misc_RNA (1)...(19): siRNA sense strand
gaagagaggauuucuacac

SEQ ID NO: 267381 - RNA, 19 nt, Homo sapiens
  misc_RNA (1)...(19): siRNA sense strand
agcaauguaucaagguuua

SEQ ID NO: 267382 - RNA, 19 nt, Homo sapiens
  misc_RNA (1)...(19): siRNA sense strand
gggcuuguauccagaguca

SEQ ID NO: 267383 - RNA, 19 nt, Homo sapiens
  misc_RNA (1)...(19): siRNA sense strand
cgaauauggaugugcaaua

SEQ ID NO: 267384 - RNA, 19 nt, Homo sapiens
  misc_RNA (1)...(19): siRNA sense strand
gaaaacauguggaauucau

SEQ ID NO: 267385 - RNA, 19 nt, Homo sapiens
  misc_RNA (1)...(19): siRNA sense strand
gaagaagugcuuugaugca

SEQ ID NO: 267386 - RNA, 19 nt, Homo sapiens
  misc_RNA (1)...(19): siRNA sense strand
cacaugggauacuuuaaug

SEQ ID NO: 267387 - RNA, 19 nt, Homo sapiens
  misc_RNA (1)...(19): siRNA sense strand
ggaccacugucuccuuuac

SEQ ID NO: 267388 - RNA, 19 nt, Homo sapiens
  misc_RNA (1)...(19): siRNA sense strand
gcaggaagaagugcuuuga

SEQ ID NO: 267389 - RNA, 19 nt, Homo sapiens
  misc_RNA (1)...(19): siRNA sense strand
aggaagaagugcuuugaug

SEQ ID NO: 267390 - RNA, 19 nt, Homo sapiens
  misc_RNA (1)...(19): siRNA sense strand
guaaagaccgaggugauug

SEQ ID NO: 267391 - RNA, 19 nt, Homo sapiens
  misc_RNA (1)...(19): siRNA sense strand
gcaauagaacaucagauag

SEQ ID NO: 267392 - RNA, 19 nt, Homo sapiens
  misc_RNA (1)...(19): siRNA sense strand
gaagugucccauuugaaga

SEQ ID NO: 267393 - RNA, 19 nt, Homo sapiens
  misc_RNA (1)...(19): siRNA sense strand
gauguaaaucucaacaaga

SEQ ID NO: 267394 - RNA, 19 nt, Homo sapiens
  misc_RNA (1)...(19): siRNA sense strand
ggauuuagagcugaauauu

SEQ ID NO: 267395 - RNA, 19 nt, Homo sapiens
  misc_RNA (1)...(19): siRNA sense strand
caaaauacaugagagcuau

SEQ ID NO: 267396 - RNA, 19 nt, Homo sapiens
  misc_RNA (1)...(19): siRNA sense strand
guuaguggaccaauauuug

SEQ ID NO: 267397 - RNA, 19 nt, Homo sapiens
  misc_RNA (1)...(19): siRNA sense strand
ccaaagcgacugcacuaug

SEQ ID NO: 267398 - RNA, 19 nt, Homo sapiens
  misc_RNA (1)...(19): siRNA sense strand
ucacauggcaucauugaca

SEQ ID NO: 267399 - RNA, 19 nt, Homo sapiens
  misc_RNA (1)...(19): siRNA sense strand
agagucacauggcaucauu

SEQ ID NO: 267400 - RNA, 19 nt, Homo sapiens
  misc_RNA (1)...(19): siRNA sense strand
aaaccuucccaaaucauua

SEQ ID NO: 267401 - RNA, 19 nt, Homo sapiens
  misc_RNA (1)...(19): siRNA sense strand
gaugacuguuugcagaaga

SEQ ID NO: 267402 - RNA, 19 nt, Homo sapiens
  misc_RNA (1)...(19): siRNA sense strand
ggacucaggaaacuggaaa

SEQ ID NO: 267403 - RNA, 19 nt, Homo sapiens
  misc_RNA (1)...(19): siRNA sense strand
cuaggguacugcagaagaa

SEQ ID NO: 267404 - RNA, 19 nt, Homo sapiens
  misc_RNA (1)...(19): siRNA sense strand
ccucauggcuggaagaaaa

SEQ ID NO: 267405 - RNA, 19 nt, Homo sapiens
  misc_RNA (1)...(19): siRNA sense strand
ggaaucuacguugacuuua

SEQ ID NO: 267406 - RNA, 19 nt, Homo sapiens
  misc_RNA (1)...(19): siRNA sense strand
caagugaaucagaugcuaa

SEQ ID NO: 267407 - RNA, 19 nt, Homo sapiens
  misc_RNA (1)...(19): siRNA sense strand
uuagaggacuggagaacug

SEQ ID NO: 267408 - RNA, 19 nt, Homo sapiens
  misc_RNA (1)...(19): siRNA sense strand
gcuccuuuccuuccauaua

SEQ ID NO: 267409 - RNA, 19 nt, Homo sapiens
  misc_RNA (1)...(19): siRNA sense strand
gagaacugccggugugaug

SEQ ID NO: 267410 - RNA, 19 nt, Homo sapiens
  misc_RNA (1)...(19): siRNA sense strand
gggauacuuuaaugccaaa

SEQ ID NO: 267411 - RNA, 19 nt, Homo sapiens
  misc_RNA (1)...(19): siRNA sense strand
aaacaugccacagaaagaa

SEQ ID NO: 267412 - RNA, 19 nt, Homo sapiens
  misc_RNA (1)...(19): siRNA sense strand
guaccuauguaugaagaau

SEQ ID NO: 267413 - RNA, 19 nt, Homo sapiens
  misc_RNA (1)...(19): siRNA sense strand
cgacugcacuaugccaaga

SEQ ID NO: 267414 - RNA, 19 nt, Homo sapiens
  misc_RNA (1)...(19): siRNA sense strand
gaauuuagcauggaucuuc

SEQ ID NO: 267415 - RNA, 19 nt, Homo sapiens
  misc_RNA (1)...(19): siRNA sense strand
gcauggaucuucguaccaa

SEQ ID NO: 267416 - RNA, 19 nt, Homo sapiens
  misc_RNA (1)...(19): siRNA sense strand
ccagaaauguucggugauc

SEQ ID NO: 267417 - RNA, 19 nt, Homo sapiens
  misc_RNA (1)...(19): siRNA sense strand
ugagguggguguccugguu

SEQ ID NO: 267418 - RNA, 19 nt, Homo sapiens
  misc_RNA (1)...(19): siRNA sense strand
gugguuugaucaacaagaa

SEQ ID NO: 267419 - RNA, 19 nt, Homo sapiens
  misc_RNA (1)...(19): siRNA sense strand
gugaaugggcugacacuug

SEQ ID NO: 267420 - RNA, 19 nt, Homo sapiens
  misc_RNA (1)...(19): siRNA sense strand
ggaaaacguucgucaacau

SEQ ID NO: 267421 - RNA, 19 nt, Homo sapiens
  misc_RNA (1)...(19): siRNA sense strand
cuacaucgacaaccucaug

SEQ ID NO: 267422 - RNA, 19 nt, Homo sapiens
  misc_RNA (1)...(19): siRNA sense strand
ucacugucaccaagacuga

SEQ ID NO: 267423 - RNA, 19 nt, Homo sapiens
  misc_RNA (1)...(19): siRNA sense strand
gguuugaucaacaagaaau

SEQ ID NO: 267424 - RNA, 19 nt, Homo sapiens
  misc_RNA (1)...(19): siRNA sense strand
ucaccaagacugacaagac

SEQ ID NO: 267425 - RNA, 19 nt, Homo sapiens
  misc_RNA (1)...(19): siRNA sense strand
gaacgccuacaucgacaac

SEQ ID NO: 267426 - RNA, 19 nt, Homo sapiens
  misc_RNA (1)...(19): siRNA sense strand
cacggugguuugaucaaca

SEQ ID NO: 267427 - RNA, 19 nt, Homo sapiens
  misc_RNA (1)...(19): siRNA sense strand
gcugaugggcaaagaaggu

SEQ ID NO: 267428 - RNA, 19 nt, Homo sapiens
  misc_RNA (1)...(19): siRNA sense strand
gcaacggccugcagcauua

SEQ ID NO: 267429 - RNA, 19 nt, Homo sapiens
  misc_RNA (1)...(19): siRNA sense strand
ucaaggagcugguauaugu

SEQ ID NO: 267430 - RNA, 19 nt, Homo sapiens
  misc_RNA (1)...(19): siRNA sense strand
gcaaauaggagguggaauu

SEQ ID NO: 267431 - RNA, 19 nt, Homo sapiens
  misc_RNA (1)...(19): siRNA sense strand
gggcaaagauacuggagaa

SEQ ID NO: 267432 - RNA, 19 nt, Homo sapiens
  misc_RNA (1)...(19): siRNA sense strand
caaagauacuggagaagga

SEQ ID NO: 267433 - RNA, 19 nt, Homo sapiens
  misc_RNA (1)...(19): siRNA sense strand
cggaggaggugauggauga

SEQ ID NO: 267434 - RNA, 19 nt, Homo sapiens
  misc_RNA (1)...(19): siRNA sense strand
ggacguguaugccaaggau

SEQ ID NO: 267435 - RNA, 19 nt, Homo sapiens
  misc_RNA (1)...(19): siRNA sense strand
gcugaugucuccgucauga

SEQ ID NO: 267436 - RNA, 19 nt, Homo sapiens
  misc_RNA (1)...(19): siRNA sense strand
gcugguauauguguuauuc

SEQ ID NO: 267437 - RNA, 19 nt, Homo sapiens
  misc_RNA (1)...(19): siRNA sense strand
ggagcugguauauguguua

SEQ ID NO: 267438 - RNA, 19 nt, Homo sapiens
  misc_RNA (1)...(19): siRNA sense strand
ugaagacccugcagugcuu

SEQ ID NO: 267439 - RNA, 19 nt, Homo sapiens
  misc_RNA (1)...(19): siRNA sense strand
gaauucagagcaucaccua

SEQ ID NO: 267440 - RNA, 19 nt, Homo sapiens
  misc_RNA (1)...(19): siRNA sense strand
gcaagcugcuggcggagau

SEQ ID NO: 267441 - RNA, 19 nt, Homo sapiens
  misc_RNA (1)...(19): siRNA sense strand
ggaaguaccucugcuugcu

SEQ ID NO: 267442 - RNA, 19 nt, Homo sapiens
  misc_RNA (1)...(19): siRNA sense strand
gaaagcccaacacacguaa

SEQ ID NO: 267443 - RNA, 19 nt, Homo sapiens
  misc_RNA (1)...(19): siRNA sense strand
cacaggugcuggaagguuu

SEQ ID NO: 267444 - RNA, 19 nt, Homo sapiens
  misc_RNA (1)...(19): siRNA sense strand
ggacuccucccacaugaug

SEQ ID NO: 267445 - RNA, 19 nt, Homo sapiens
  misc_RNA (1)...(19): siRNA sense strand
guacaacgccgugaugcuu

SEQ ID NO: 267446 - RNA, 19 nt, Homo sapiens
  misc_RNA (1)...(19): siRNA sense strand
ucaccgcccugcacugcua

SEQ ID NO: 267447 - RNA, 19 nt, Homo sapiens
  misc_RNA (1)...(19): siRNA sense strand
cgaaagcccaacacacgua

SEQ ID NO: 267448 - RNA, 19 nt, Homo sapiens
  misc_RNA (1)...(19): siRNA sense strand
ggacccagcagaugcguau

SEQ ID NO: 267449 - RNA, 19 nt, Homo sapiens
  misc_RNA (1)...(19): siRNA sense strand
cugcagugcuucuuugaga

SEQ ID NO: 267450 - RNA, 19 nt, Homo sapiens
  misc_RNA (1)...(19): siRNA sense strand
ucaagagucuacaggagau

SEQ ID NO: 267451 - RNA, 19 nt, Homo sapiens
  misc_RNA (1)...(19): siRNA sense strand
caaauaggagguggaauuc

SEQ ID NO: 267452 - RNA, 19 nt, Homo sapiens
  misc_RNA (1)...(19): siRNA sense strand
gagcugguauauguguuau

SEQ ID NO: 267453 - RNA, 19 nt, Homo sapiens
  misc_RNA (1)...(19): siRNA sense strand
ugucggaggugguggugaa

SEQ ID NO: 267454 - RNA, 19 nt, Homo sapiens
  misc_RNA (1)...(19): siRNA sense strand
caacacacguaagcagaag

SEQ ID NO: 267455 - RNA, 19 nt, Homo sapiens
  misc_RNA (1)...(19): siRNA sense strand
ggaggccucucacuaucuc

SEQ ID NO: 267456 - RNA, 19 nt, Homo sapiens
  misc_RNA (1)...(19): siRNA sense strand
gaauguggcaguggagaug

SEQ ID NO: 267457 - RNA, 19 nt, Homo sapiens
  misc_RNA (1)...(19): siRNA sense strand
gagguggaauucagagcau

SEQ ID NO: 267458 - RNA, 19 nt, Homo sapiens
  misc_RNA (1)...(19): siRNA sense strand
cagaaccacuacaggaagu

SEQ ID NO: 267459 - RNA, 19 nt, Homo sapiens
  misc_RNA (1)...(19): siRNA sense strand
ucucugugcacgacuguua

SEQ ID NO: 267460 - RNA, 19 nt, Homo sapiens
  misc_RNA (1)...(19): siRNA sense strand
gaggaucgggccacuguuc

SEQ ID NO: 267461 - RNA, 19 nt, Homo sapiens
  misc_RNA (1)...(19): siRNA sense strand
ugaaggccgugcacaaggu

SEQ ID NO: 267462 - RNA, 19 nt, Homo sapiens
  misc_RNA (1)...(19): siRNA sense strand
ggacucacgcagcugaugu

SEQ ID NO: 267463 - RNA, 19 nt, Homo sapiens
  misc_RNA (1)...(19): siRNA sense strand
caaggucaagcaaauagga

SEQ ID NO: 267464 - RNA, 19 nt, Homo sapiens
  misc_RNA (1)...(19): siRNA sense strand
acuccaaggucaagcaaau

SEQ ID NO: 267465 - RNA, 19 nt, Homo sapiens
  misc_RNA (1)...(19): siRNA sense strand
gaucgggccacuguucuga

SEQ ID NO: 267466 - RNA, 19 nt, Homo sapiens
  misc_RNA (1)...(19): siRNA sense strand
gugggaggccucucacuau

SEQ ID NO: 267467 - RNA, 19 nt, Homo sapiens
  misc_RNA (1)...(19): siRNA sense strand
gccuagagcgcgaggugua

SEQ ID NO: 267468 - RNA, 19 nt, Homo sapiens
  misc_RNA (1)...(19): siRNA sense strand
ccaacacacguaagcagaa

SEQ ID NO: 267469 - RNA, 19 nt, Homo sapiens
  misc_RNA (1)...(19): siRNA sense strand
ggagacaucagccgaaagc

SEQ ID NO: 267470 - RNA, 19 nt, Homo sapiens
  misc_RNA (1)...(19): siRNA sense strand
aauaggagguggaauucag

SEQ ID NO: 267471 - RNA, 19 nt, Homo sapiens
  misc_RNA (1)...(19): siRNA sense strand
caucgaaaggugucuggaa

SEQ ID NO: 267472 - RNA, 19 nt, Homo sapiens
  misc_RNA (1)...(19): siRNA sense strand
guggauguacccaugcuuu

SEQ ID NO: 267473 - RNA, 19 nt, Homo sapiens
  misc_RNA (1)...(19): siRNA sense strand
cgaaaggugucuggaacag

SEQ ID NO: 267474 - RNA, 19 nt, Homo sapiens
  misc_RNA (1)...(19): siRNA sense strand
gaagcugagccucgaugug

SEQ ID NO: 267475 - RNA, 19 nt, Homo sapiens
  misc_RNA (1)...(19): siRNA sense strand
cagcugaugucuccgucau

SEQ ID NO: 267476 - RNA, 19 nt, Homo sapiens
  misc_RNA (1)...(19): siRNA sense strand
ggccuggauuggcucaaga

SEQ ID NO: 267477 - RNA, 19 nt, Homo sapiens
  misc_RNA (1)...(19): siRNA sense strand
gcuccuggccuucuucaag

SEQ ID NO: 267478 - RNA, 19 nt, Homo sapiens
  misc_RNA (1)...(19): siRNA sense strand
gcuggacuccucccacaug

SEQ ID NO: 267479 - RNA, 19 nt, Homo sapiens
  misc_RNA (1)...(19): siRNA sense strand
gcgcggaagacccugaaga

SEQ ID NO: 267480 - RNA, 19 nt, Homo sapiens
  misc_RNA (1)...(19): siRNA sense strand
caagauccaccuggucaau

SEQ ID NO: 267481 - RNA, 19 nt, Homo sapiens
  misc_RNA (1)...(19): siRNA sense strand
ccgccguucugcugucuga

SEQ ID NO: 267482 - RNA, 19 nt, Homo sapiens
  misc_RNA (1)...(19): siRNA sense strand
caagcaaggaggucaagca

SEQ ID NO: 267483 - RNA, 19 nt, Homo sapiens
  misc_RNA (1)...(19): siRNA sense strand
ggacuccaaggucaagcaa

SEQ ID NO: 267484 - RNA, 19 nt, Homo sapiens
  misc_RNA (1)...(19): siRNA sense strand
gacccugcagugcuucuuu

SEQ ID NO: 267485 - RNA, 19 nt, Homo sapiens
  misc_RNA (1)...(19): siRNA sense strand
acgcuggccugcuguaugg

SEQ ID NO: 267486 - RNA, 19 nt, Homo sapiens
  misc_RNA (1)...(19): siRNA sense strand
gaccaagaaccgccuagag

SEQ ID NO: 267487 - RNA, 19 nt, Homo sapiens
  misc_RNA (1)...(19): siRNA sense strand
gguauauguguuauucaug

SEQ ID NO: 267488 - RNA, 19 nt, Homo sapiens
  misc_RNA (1)...(19): siRNA sense strand
acacacguaagcagaagaa

SEQ ID NO: 267489 - RNA, 19 nt, Homo sapiens
  misc_RNA (1)...(19): siRNA sense strand
cgaagcugcagaugccauu

SEQ ID NO: 267490 - RNA, 19 nt, Homo sapiens
  misc_RNA (1)...(19): siRNA sense strand
ggaagcugagccucgaugu

SEQ ID NO: 267491 - RNA, 19 nt, Homo sapiens
  misc_RNA (1)...(19): siRNA sense strand
ugggaggccucucacuauc

SEQ ID NO: 267492 - RNA, 19 nt, Homo sapiens
  misc_RNA (1)...(19): siRNA sense strand
ggugcaggcuacgcagaug

SEQ ID NO: 267493 - RNA, 19 nt, Homo sapiens
  misc_RNA (1)...(19): siRNA sense strand
ugugggaggccucucacua

SEQ ID NO: 267494 - RNA, 19 nt, Homo sapiens
  misc_RNA (1)...(19): siRNA sense strand
gugaagcguuccaccuacu

SEQ ID NO: 267495 - RNA, 19 nt, Homo sapiens
  misc_RNA (1)...(19): siRNA sense strand
ugcucacgcuggacaugua

SEQ ID NO: 267496 - RNA, 19 nt, Homo sapiens
  misc_RNA (1)...(19): siRNA sense strand
aagcugcaccugcccuuga

SEQ ID NO: 267497 - RNA, 19 nt, Homo sapiens
  misc_RNA (1)...(19): siRNA sense strand
gaagauggcuugcgcaugu

SEQ ID NO: 267498 - RNA, 19 nt, Homo sapiens
  misc_RNA (1)...(19): siRNA sense strand
gcaaaucucucuacuucaa

SEQ ID NO: 267499 - RNA, 19 nt, Homo sapiens
  misc_RNA (1)...(19): siRNA sense strand
cauauaagguuccgucuuu

SEQ ID NO: 267500 - RNA, 19 nt, Homo sapiens
  misc_RNA (1)...(19): siRNA sense strand
gaauuuacaucagcaagua

SEQ ID NO: 267501 - RNA, 19 nt, Homo sapiens
  misc_RNA (1)...(19): siRNA sense strand
ggagaucgauuugcaguaa

SEQ ID NO: 267502 - RNA, 19 nt, Homo sapiens
  misc_RNA (1)...(19): siRNA sense strand
gaagauguaugggcuauug

SEQ ID NO: 267503 - RNA, 19 nt, Homo sapiens
  misc_RNA (1)...(19): siRNA sense strand
gagacucacuguacuuuaa

SEQ ID NO: 267504 - RNA, 19 nt, Homo sapiens
  misc_RNA (1)...(19): siRNA sense strand
ggacaagaauaccauguga

SEQ ID NO: 267505 - RNA, 19 nt, Homo sapiens
  misc_RNA (1)...(19): siRNA sense strand
gaaaccaucucgaaagugu

SEQ ID NO: 267506 - RNA, 19 nt, Homo sapiens
  misc_RNA (1)...(19): siRNA sense strand
caaauuugauggcucuaua

SEQ ID NO: 267507 - RNA, 19 nt, Homo sapiens
  misc_RNA (1)...(19): siRNA sense strand
gcaauggucagaagaauuu

SEQ ID NO: 267508 - RNA, 19 nt, Homo sapiens
  misc_RNA (1)...(19): siRNA sense strand
gaaggucacuuaggcgaua

SEQ ID NO: 267509 - RNA, 19 nt, Homo sapiens
  misc_RNA (1)...(19): siRNA sense strand
uaacaucggucuuuauugu

SEQ ID NO: 267510 - RNA, 19 nt, Homo sapiens
  misc_RNA (1)...(19): siRNA sense strand
ggaaacaugugggcaauug

SEQ ID NO: 267511 - RNA, 19 nt, Homo sapiens
  misc_RNA (1)...(19): siRNA sense strand
aaagacagcuggugaguug

SEQ ID NO: 267512 - RNA, 19 nt, Homo sapiens
  misc_RNA (1)...(19): siRNA sense strand
gaacaagggugugguguca

SEQ ID NO: 267513 - RNA, 19 nt, Homo sapiens
  misc_RNA (1)...(19): siRNA sense strand
gcacagacguugccgugaa

SEQ ID NO: 267514 - RNA, 19 nt, Homo sapiens
  misc_RNA (1)...(19): siRNA sense strand
ggugaugacugcucuguuu

SEQ ID NO: 267515 - RNA, 19 nt, Homo sapiens
  misc_RNA (1)...(19): siRNA sense strand
gaaggaaacuccagagaac

SEQ ID NO: 267516 - RNA, 19 nt, Homo sapiens
  misc_RNA (1)...(19): siRNA sense strand
ggaauuaccuggacuuugc

SEQ ID NO: 267517 - RNA, 19 nt, Homo sapiens
  misc_RNA (1)...(19): siRNA sense strand
gaucuaaaccucacuaaug

SEQ ID NO: 267518 - RNA, 19 nt, Homo sapiens
  misc_RNA (1)...(19): siRNA sense strand
gauauugacugucucucua

SEQ ID NO: 267519 - RNA, 19 nt, Homo sapiens
  misc_RNA (1)...(19): siRNA sense strand
gauaacaggugcccagguu

SEQ ID NO: 267520 - RNA, 19 nt, Homo sapiens
  misc_RNA (1)...(19): siRNA sense strand
gaaccugugugucaaaugu

SEQ ID NO: 267521 - RNA, 19 nt, Homo sapiens
  misc_RNA (1)...(19): siRNA sense strand
ccacaauuaugucagauuu

SEQ ID NO: 267522 - RNA, 19 nt, Homo sapiens
  misc_RNA (1)...(19): siRNA sense strand
aaacauagguugugccaau

SEQ ID NO: 267523 - RNA, 19 nt, Homo sapiens
  misc_RNA (1)...(19): siRNA sense strand
guuccaggcucuccucuua

SEQ ID NO: 267524 - RNA, 19 nt, Homo sapiens
  misc_RNA (1)...(19): siRNA sense strand
gaacaggucaugaucaaug

SEQ ID NO: 267525 - RNA, 19 nt, Homo sapiens
  misc_RNA (1)...(19): siRNA sense strand
gaaauugaguacagugugu

SEQ ID NO: 267526 - RNA, 19 nt, Homo sapiens
  misc_RNA (1)...(19): siRNA sense strand
ggaaauccgguaagguuua

SEQ ID NO: 267527 - RNA, 19 nt, Homo sapiens
  misc_RNA (1)...(19): siRNA sense strand
gaaucaggcuuaucaaugg

SEQ ID NO: 267528 - RNA, 19 nt, Homo sapiens
  misc_RNA (1)...(19): siRNA sense strand
ugagauggauuaccagaaa

SEQ ID NO: 267529 - RNA, 19 nt, Homo sapiens
  misc_RNA (1)...(19): siRNA sense strand
caagagaucuagauuguac

SEQ ID NO: 267530 - RNA, 19 nt, Homo sapiens
  misc_RNA (1)...(19): siRNA sense strand
gaaaugagcaugggcugua

SEQ ID NO: 267531 - RNA, 19 nt, Homo sapiens
  misc_RNA (1)...(19): siRNA sense strand
gaagucagcuuugguugug

SEQ ID NO: 267532 - RNA, 19 nt, Homo sapiens
  misc_RNA (1)...(19): siRNA sense strand
gaccuucccaguuauauua

SEQ ID NO: 267533 - RNA, 19 nt, Homo sapiens
  misc_RNA (1)...(19): siRNA sense strand
aagcaaagcugggcaauug

SEQ ID NO: 267534 - RNA, 19 nt, Homo sapiens
  misc_RNA (1)...(19): siRNA sense strand
gauacaugaugcaguuuaa

SEQ ID NO: 267535 - RNA, 19 nt, Homo sapiens
  misc_RNA (1)...(19): siRNA sense strand
ggaauauucugucaaugga

SEQ ID NO: 267536 - RNA, 19 nt, Homo sapiens
  misc_RNA (1)...(19): siRNA sense strand
gaauuuacauccugaccuu

SEQ ID NO: 267537 - RNA, 19 nt, Homo sapiens
  misc_RNA (1)...(19): siRNA sense strand
ccucugcccucgauucuua

SEQ ID NO: 267538 - RNA, 19 nt, Homo sapiens
  misc_RNA (1)...(19): siRNA sense strand
uaagugagcccaccaugua

SEQ ID NO: 267539 - RNA, 19 nt, Homo sapiens
  misc_RNA (1)...(19): siRNA sense strand
gcccuuccguccacaauua

SEQ ID NO: 267540 - RNA, 19 nt, Homo sapiens
  misc_RNA (1)...(19): siRNA sense strand
gagaugacuuugacuccua

SEQ ID NO: 267541 - RNA, 19 nt, Homo sapiens
  misc_RNA (1)...(19): siRNA sense strand
ggacuuugcuccaugagau

SEQ ID NO: 267542 - RNA, 19 nt, Homo sapiens
  misc_RNA (1)...(19): siRNA sense strand
gacaagcgguuacacaaga

SEQ ID NO: 267543 - RNA, 19 nt, Homo sapiens
  misc_RNA (1)...(19): siRNA sense strand
ggagaugcauccagggaaa

SEQ ID NO: 267544 - RNA, 19 nt, Homo sapiens
  misc_RNA (1)...(19): siRNA sense strand
caucaaaucuggaacaucu

SEQ ID NO: 267545 - RNA, 19 nt, Homo sapiens
  misc_RNA (1)...(19): siRNA sense strand
gagcauauaacacuggaua

SEQ ID NO: 267546 - RNA, 19 nt, Homo sapiens
  misc_RNA (1)...(19): siRNA sense strand
caacaugggcucagacauu

SEQ ID NO: 267547 - RNA, 19 nt, Homo sapiens
  misc_RNA (1)...(19): siRNA sense strand
ucacaacccuugauaguag

SEQ ID NO: 267548 - RNA, 19 nt, Homo sapiens
  misc_RNA (1)...(19): siRNA sense strand
ucucaaagaugauuucgaa

SEQ ID NO: 267549 - RNA, 19 nt, Homo sapiens
  misc_RNA (1)...(19): siRNA sense strand
caacugcaauuaaauccaa

SEQ ID NO: 267550 - RNA, 19 nt, Homo sapiens
  misc_RNA (1)...(19): siRNA sense strand
gaccaugucuccucuagug

SEQ ID NO: 267551 - RNA, 19 nt, Homo sapiens
  misc_RNA (1)...(19): siRNA sense strand
gaacaccaucauacaauuu

SEQ ID NO: 267552 - RNA, 19 nt, Homo sapiens
  misc_RNA (1)...(19): siRNA sense strand
ccacagaucauuuccauug

SEQ ID NO: 267553 - RNA, 19 nt, Homo sapiens
  misc_RNA (1)...(19): siRNA sense strand
gauguuggcuaaugaagga

SEQ ID NO: 267554 - RNA, 19 nt, Homo sapiens
  misc_RNA (1)...(19): siRNA sense strand
gaugggauguggccagaaa

SEQ ID NO: 267555 - RNA, 19 nt, Homo sapiens
  misc_RNA (1)...(19): siRNA sense strand
gaacgcaucagccugguaa

SEQ ID NO: 267556 - RNA, 19 nt, Homo sapiens
  misc_RNA (1)...(19): siRNA sense strand
ggagggaggucgugcacuu

SEQ ID NO: 267557 - RNA, 19 nt, Homo sapiens
  misc_RNA (1)...(19): siRNA sense strand
ccaaauauauggguugaau

SEQ ID NO: 267558 - RNA, 19 nt, Homo sapiens
  misc_RNA (1)...(19): siRNA sense strand
ccaaaggacuucacacaag

SEQ ID NO: 267559 - RNA, 19 nt, Homo sapiens
  misc_RNA (1)...(19): siRNA sense strand
aaucaaaccugacuuaugg

SEQ ID NO: 267560 - RNA, 19 nt, Homo sapiens
  misc_RNA (1)...(19): siRNA sense strand
acaaugagauguucgauag

SEQ ID NO: 267561 - RNA, 19 nt, Homo sapiens
  misc_RNA (1)...(19): siRNA sense strand
gccaaucaauucagcagua

SEQ ID NO: 267562 - RNA, 19 nt, Homo sapiens
  misc_RNA (1)...(19): siRNA sense strand
ucaugucgcuuuaguuauu

SEQ ID NO: 267563 - RNA, 19 nt, Homo sapiens
  misc_RNA (1)...(19): siRNA sense strand
guucaugucgcuuuaguua

SEQ ID NO: 267564 - RNA, 19 nt, Homo sapiens
  misc_RNA (1)...(19): siRNA sense strand
gucacgaccuucccaguua

SEQ ID NO: 267565 - RNA, 19 nt, Homo sapiens
  misc_RNA (1)...(19): siRNA sense strand
ggacaagacucacaaugcu

SEQ ID NO: 267566 - RNA, 19 nt, Homo sapiens
  misc_RNA (1)...(19): siRNA sense strand
ggaagcggaucacugucua

SEQ ID NO: 267567 - RNA, 19 nt, Homo sapiens
  misc_RNA (1)...(19): siRNA sense strand
gaaaugaagggcuuauugu

SEQ ID NO: 267568 - RNA, 19 nt, Homo sapiens
  misc_RNA (1)...(19): siRNA sense strand
gggagaauguccaauuuca

SEQ ID NO: 267569 - RNA, 19 nt, Homo sapiens
  misc_RNA (1)...(19): siRNA sense strand
gauuugggaucaugucuga

SEQ ID NO: 267570 - RNA, 19 nt, Homo sapiens
  misc_RNA (1)...(19): siRNA sense strand
ggacuacucuaccgaugga

SEQ ID NO: 267571 - RNA, 19 nt, Homo sapiens
  misc_RNA (1)...(19): siRNA sense strand
gaaacugcgucugugauga

SEQ ID NO: 267572 - RNA, 19 nt, Homo sapiens
  misc_RNA (1)...(19): siRNA sense strand
uggcaaaucucucuacuuc

SEQ ID NO: 267573 - RNA, 19 nt, Homo sapiens
  misc_RNA (1)...(19): siRNA sense strand
ggucaucaauccugaacuu

SEQ ID NO: 267574 - RNA, 19 nt, Homo sapiens
  misc_RNA (1)...(19): siRNA sense strand
caauucagcucacagacaa

SEQ ID NO: 267575 - RNA, 19 nt, Homo sapiens
  misc_RNA (1)...(19): siRNA sense strand
acaaggagcuccaacagau

SEQ ID NO: 267576 - RNA, 19 nt, Homo sapiens
  misc_RNA (1)...(19): siRNA sense strand
caacccaacucaaagacaa

SEQ ID NO: 267577 - RNA, 19 nt, Homo sapiens
  misc_RNA (1)...(19): siRNA sense strand
ggaaguacuugcacugagu

SEQ ID NO: 267578 - RNA, 19 nt, Homo sapiens
  misc_RNA (1)...(19): siRNA sense strand
gggccaaacugcuacuuga

SEQ ID NO: 267579 - RNA, 19 nt, Homo sapiens
  misc_RNA (1)...(19): siRNA sense strand
gagcuacaguuaagcauag

SEQ ID NO: 267580 - RNA, 19 nt, Homo sapiens
  misc_RNA (1)...(19): siRNA sense strand
gagagugucuuacaauguc

SEQ ID NO: 267581 - RNA, 19 nt, Homo sapiens
  misc_RNA (1)...(19): siRNA sense strand
gccaauugguggacacuuu

SEQ ID NO: 267582 - RNA, 19 nt, Homo sapiens
  misc_RNA (1)...(19): siRNA sense strand
ucagccaucuguauucuuu

SEQ ID NO: 267583 - RNA, 19 nt, Homo sapiens
  misc_RNA (1)...(19): siRNA sense strand
ucuggaacaucucuaauuu

SEQ ID NO: 267584 - RNA, 19 nt, Homo sapiens
  misc_RNA (1)...(19): siRNA sense strand
caacugguaucgaauccaa

SEQ ID NO: 267585 - RNA, 19 nt, Homo sapiens
  misc_RNA (1)...(19): siRNA sense strand
caaacuggauuucaagaca

SEQ ID NO: 267586 - RNA, 19 nt, Homo sapiens
  misc_RNA (1)...(19): siRNA sense strand
aagcagaucaucccaguua

SEQ ID NO: 267587 - RNA, 19 nt, Homo sapiens
  misc_RNA (1)...(19): siRNA sense strand
aagaaugccuuccaaguau

SEQ ID NO: 267588 - RNA, 19 nt, Homo sapiens
  misc_RNA (1)...(19): siRNA sense strand
gaaggcagcgaguucaauu

SEQ ID NO: 267589 - RNA, 19 nt, Homo sapiens
  misc_RNA (1)...(19): siRNA sense strand
gaagaugcccucaccaaca

SEQ ID NO: 267590 - RNA, 19 nt, Homo sapiens
  misc_RNA (1)...(19): siRNA sense strand
guacauugcccuggagaua

SEQ ID NO: 267591 - RNA, 19 nt, Homo sapiens
  misc_RNA (1)...(19): siRNA sense strand
gguccaaccuguaaaauaa

SEQ ID NO: 267592 - RNA, 19 nt, Homo sapiens
  misc_RNA (1)...(19): siRNA sense strand
gaaccaaauguauauguga

SEQ ID NO: 267593 - RNA, 19 nt, Homo sapiens
  misc_RNA (1)...(19): siRNA sense strand
ggaaccaaauguauaugug

SEQ ID NO: 267594 - RNA, 19 nt, Homo sapiens
  misc_RNA (1)...(19): siRNA sense strand
cgaggacacugcacucuau

SEQ ID NO: 267595 - RNA, 19 nt, Homo sapiens
  misc_RNA (1)...(19): siRNA sense strand
caggauacaugaugcaguu

SEQ ID NO: 267596 - RNA, 19 nt, Homo sapiens
  misc_RNA (1)...(19): siRNA sense strand
caaaguuccugcaauacug

SEQ ID NO: 267597 - RNA, 19 nt, Homo sapiens
  misc_RNA (1)...(19): siRNA sense strand
gaagauggcuugcgcaugu

SEQ ID NO: 267598 - RNA, 19 nt, Homo sapiens
  misc_RNA (1)...(19): siRNA sense strand
gcaaaucucucuacuucaa

SEQ ID NO: 267599 - RNA, 19 nt, Homo sapiens
  misc_RNA (1)...(19): siRNA sense strand
cauauaagguuccgucuuu

SEQ ID NO: 267600 - RNA, 19 nt, Homo sapiens
  misc_RNA (1)...(19): siRNA sense strand
gaauuuacaucagcaagua

SEQ ID NO: 267601 - RNA, 19 nt, Homo sapiens
  misc_RNA (1)...(19): siRNA sense strand
ggagaucgauuugcaguaa

SEQ ID NO: 267602 - RNA, 19 nt, Homo sapiens
  misc_RNA (1)...(19): siRNA sense strand
gaagauguaugggcuauug

SEQ ID NO: 267603 - RNA, 19 nt, Homo sapiens
  misc_RNA (1)...(19): siRNA sense strand
gagacucacuguacuuuaa

SEQ ID NO: 267604 - RNA, 19 nt, Homo sapiens
  misc_RNA (1)...(19): siRNA sense strand
ggacaagaauaccauguga

SEQ ID NO: 267605 - RNA, 19 nt, Homo sapiens
  misc_RNA (1)...(19): siRNA sense strand
gaaaccaucucgaaagugu

SEQ ID NO: 267606 - RNA, 19 nt, Homo sapiens
  misc_RNA (1)...(19): siRNA sense strand
caaauuugauggcucuaua

SEQ ID NO: 267607 - RNA, 19 nt, Homo sapiens
  misc_RNA (1)...(19): siRNA sense strand
gcaauggucagaagaauuu

SEQ ID NO: 267608 - RNA, 19 nt, Homo sapiens
  misc_RNA (1)...(19): siRNA sense strand
gaaggucacuuaggcgaua

SEQ ID NO: 267609 - RNA, 19 nt, Homo sapiens
  misc_RNA (1)...(19): siRNA sense strand
uaacaucggucuuuauugu

SEQ ID NO: 267610 - RNA, 19 nt, Homo sapiens
  misc_RNA (1)...(19): siRNA sense strand
ggaaacaugugggcaauug

SEQ ID NO: 267611 - RNA, 19 nt, Homo sapiens
  misc_RNA (1)...(19): siRNA sense strand
aaagacagcuggugaguug

SEQ ID NO: 267612 - RNA, 19 nt, Homo sapiens
  misc_RNA (1)...(19): siRNA sense strand
gaacaagggugugguguca

SEQ ID NO: 267613 - RNA, 19 nt, Homo sapiens
  misc_RNA (1)...(19): siRNA sense strand
gcacagacguugccgugaa

SEQ ID NO: 267614 - RNA, 19 nt, Homo sapiens
  misc_RNA (1)...(19): siRNA sense strand
ggugaugacugcucuguuu

SEQ ID NO: 267615 - RNA, 19 nt, Homo sapiens
  misc_RNA (1)...(19): siRNA sense strand
gaaggaaacuccagagaac

SEQ ID NO: 267616 - RNA, 19 nt, Homo sapiens
  misc_RNA (1)...(19): siRNA sense strand
ggaauuaccuggacuuugc

SEQ ID NO: 267617 - RNA, 19 nt, Homo sapiens
  misc_RNA (1)...(19): siRNA sense strand
gaucuaaaccucacuaaug

SEQ ID NO: 267618 - RNA, 19 nt, Homo sapiens
  misc_RNA (1)...(19): siRNA sense strand
gauauugacugucucucua

SEQ ID NO: 267619 - RNA, 19 nt, Homo sapiens
  misc_RNA (1)...(19): siRNA sense strand
gauaacaggugcccagguu

SEQ ID NO: 267620 - RNA, 19 nt, Homo sapiens
  misc_RNA (1)...(19): siRNA sense strand
gaaccugugugucaaaugu

SEQ ID NO: 267621 - RNA, 19 nt, Homo sapiens
  misc_RNA (1)...(19): siRNA sense strand
ccacaauuaugucagauuu

SEQ ID NO: 267622 - RNA, 19 nt, Homo sapiens
  misc_RNA (1)...(19): siRNA sense strand
aaacauagguugugccaau

SEQ ID NO: 267623 - RNA, 19 nt, Homo sapiens
  misc_RNA (1)...(19): siRNA sense strand
guuccaggcucuccucuua

SEQ ID NO: 267624 - RNA, 19 nt, Homo sapiens
  misc_RNA (1)...(19): siRNA sense strand
gaacaggucaugaucaaug

SEQ ID NO: 267625 - RNA, 19 nt, Homo sapiens
  misc_RNA (1)...(19): siRNA sense strand
gaaauugaguacagugugu

SEQ ID NO: 267626 - RNA, 19 nt, Homo sapiens
  misc_RNA (1)...(19): siRNA sense strand
ggaaauccgguaagguuua

SEQ ID NO: 267627 - RNA, 19 nt, Homo sapiens
  misc_RNA (1)...(19): siRNA sense strand
gaaucaggcuuaucaaugg

SEQ ID NO: 267628 - RNA, 19 nt, Homo sapiens
  misc_RNA (1)...(19): siRNA sense strand
ugagauggauuaccagaaa

SEQ ID NO: 267629 - RNA, 19 nt, Homo sapiens
  misc_RNA (1)...(19): siRNA sense strand
caagagaucuagauuguac

SEQ ID NO: 267630 - RNA, 19 nt, Homo sapiens
  misc_RNA (1)...(19): siRNA sense strand
gaaaugagcaugggcugua

SEQ ID NO: 267631 - RNA, 19 nt, Homo sapiens
  misc_RNA (1)...(19): siRNA sense strand
gaagucagcuuugguugug

SEQ ID NO: 267632 - RNA, 19 nt, Homo sapiens
  misc_RNA (1)...(19): siRNA sense strand
gaccuucccaguuauauua

SEQ ID NO: 267633 - RNA, 19 nt, Homo sapiens
  misc_RNA (1)...(19): siRNA sense strand
aagcaaagcugggcaauug

SEQ ID NO: 267634 - RNA, 19 nt, Homo sapiens
  misc_RNA (1)...(19): siRNA sense strand
gauacaugaugcaguuuaa

SEQ ID NO: 267635 - RNA, 19 nt, Homo sapiens
  misc_RNA (1)...(19): siRNA sense strand
ggaauauucugucaaugga

SEQ ID NO: 267636 - RNA, 19 nt, Homo sapiens
  misc_RNA (1)...(19): siRNA sense strand
gaauuuacauccugaccuu

SEQ ID NO: 267637 - RNA, 19 nt, Homo sapiens
  misc_RNA (1)...(19): siRNA sense strand
ccucugcccucgauucuua

SEQ ID NO: 267638 - RNA, 19 nt, Homo sapiens
  misc_RNA (1)...(19): siRNA sense strand
uaagugagcccaccaugua

SEQ ID NO: 267639 - RNA, 19 nt, Homo sapiens
  misc_RNA (1)...(19): siRNA sense strand
gcccuuccguccacaauua

SEQ ID NO: 267640 - RNA, 19 nt, Homo sapiens
  misc_RNA (1)...(19): siRNA sense strand
gagaugacuuugacuccua

SEQ ID NO: 267641 - RNA, 19 nt, Homo sapiens
  misc_RNA (1)...(19): siRNA sense strand
ggacuuugcuccaugagau

SEQ ID NO: 267642 - RNA, 19 nt, Homo sapiens
  misc_RNA (1)...(19): siRNA sense strand
gacaagcgguuacacaaga

SEQ ID NO: 267643 - RNA, 19 nt, Homo sapiens
  misc_RNA (1)...(19): siRNA sense strand
ggagaugcauccagggaaa

SEQ ID NO: 267644 - RNA, 19 nt, Homo sapiens
  misc_RNA (1)...(19): siRNA sense strand
caucaaaucuggaacaucu

SEQ ID NO: 267645 - RNA, 19 nt, Homo sapiens
  misc_RNA (1)...(19): siRNA sense strand
gagcauauaacacuggaua

SEQ ID NO: 267646 - RNA, 19 nt, Homo sapiens
  misc_RNA (1)...(19): siRNA sense strand
caacaugggcucagacauu

SEQ ID NO: 267647 - RNA, 19 nt, Homo sapiens
  misc_RNA (1)...(19): siRNA sense strand
ucacaacccuugauaguag

SEQ ID NO: 267648 - RNA, 19 nt, Homo sapiens
  misc_RNA (1)...(19): siRNA sense strand
ucucaaagaugauuucgaa

SEQ ID NO: 267649 - RNA, 19 nt, Homo sapiens
  misc_RNA (1)...(19): siRNA sense strand
caacugcaauuaaauccaa

SEQ ID NO: 267650 - RNA, 19 nt, Homo sapiens
  misc_RNA (1)...(19): siRNA sense strand
gaccaugucuccucuagug

SEQ ID NO: 267651 - RNA, 19 nt, Homo sapiens
  misc_RNA (1)...(19): siRNA sense strand
gaacaccaucauacaauuu

SEQ ID NO: 267652 - RNA, 19 nt, Homo sapiens
  misc_RNA (1)...(19): siRNA sense strand
ccacagaucauuuccauug

SEQ ID NO: 267653 - RNA, 19 nt, Homo sapiens
  misc_RNA (1)...(19): siRNA sense strand
gauguuggcuaaugaagga

SEQ ID NO: 267654 - RNA, 19 nt, Homo sapiens
  misc_RNA (1)...(19): siRNA sense strand
gaugggauguggccagaaa

SEQ ID NO: 267655 - RNA, 19 nt, Homo sapiens
  misc_RNA (1)...(19): siRNA sense strand
gaacgcaucagccugguaa

SEQ ID NO: 267656 - RNA, 19 nt, Homo sapiens
  misc_RNA (1)...(19): siRNA sense strand
ggagggaggucgugcacuu

SEQ ID NO: 267657 - RNA, 19 nt, Homo sapiens
  misc_RNA (1)...(19): siRNA sense strand
ccaaauauauggguugaau

SEQ ID NO: 267658 - RNA, 19 nt, Homo sapiens
  misc_RNA (1)...(19): siRNA sense strand
ccaaaggacuucacacaag

SEQ ID NO: 267659 - RNA, 19 nt, Homo sapiens
  misc_RNA (1)...(19): siRNA sense strand
aaucaaaccugacuuaugg

SEQ ID NO: 267660 - RNA, 19 nt, Homo sapiens
  misc_RNA (1)...(19): siRNA sense strand
acaaugagauguucgauag

SEQ ID NO: 267661 - RNA, 19 nt, Homo sapiens
  misc_RNA (1)...(19): siRNA sense strand
gccaaucaauucagcagua

SEQ ID NO: 267662 - RNA, 19 nt, Homo sapiens
  misc_RNA (1)...(19): siRNA sense strand
ucaugucgcuuuaguuauu

SEQ ID NO: 267663 - RNA, 19 nt, Homo sapiens
  misc_RNA (1)...(19): siRNA sense strand
guucaugucgcuuuaguua

SEQ ID NO: 267664 - RNA, 19 nt, Homo sapiens
  misc_RNA (1)...(19): siRNA sense strand
gucacgaccuucccaguua

SEQ ID NO: 267665 - RNA, 19 nt, Homo sapiens
  misc_RNA (1)...(19): siRNA sense strand
ggacaagacucacaaugcu

SEQ ID NO: 267666 - RNA, 19 nt, Homo sapiens
  misc_RNA (1)...(19): siRNA sense strand
ggaagcggaucacugucua

SEQ ID NO: 267667 - RNA, 19 nt, Homo sapiens
  misc_RNA (1)...(19): siRNA sense strand
gaaaugaagggcuuauugu

SEQ ID NO: 267668 - RNA, 19 nt, Homo sapiens
  misc_RNA (1)...(19): siRNA sense strand
gggagaauguccaauuuca

SEQ ID NO: 267669 - RNA, 19 nt, Homo sapiens
  misc_RNA (1)...(19): siRNA sense strand
gauuugggaucaugucuga

SEQ ID NO: 267670 - RNA, 19 nt, Homo sapiens
  misc_RNA (1)...(19): siRNA sense strand
ggacuacucuaccgaugga

SEQ ID NO: 267671 - RNA, 19 nt, Homo sapiens
  misc_RNA (1)...(19): siRNA sense strand
gaaacugcgucugugauga

SEQ ID NO: 267672 - RNA, 19 nt, Homo sapiens
  misc_RNA (1)...(19): siRNA sense strand
uggcaaaucucucuacuuc

SEQ ID NO: 267673 - RNA, 19 nt, Homo sapiens
  misc_RNA (1)...(19): siRNA sense strand
ggucaucaauccugaacuu

SEQ ID NO: 267674 - RNA, 19 nt, Homo sapiens
  misc_RNA (1)...(19): siRNA sense strand
caauucagcucacagacaa

SEQ ID NO: 267675 - RNA, 19 nt, Homo sapiens
  misc_RNA (1)...(19): siRNA sense strand
acaaggagcuccaacagau

SEQ ID NO: 267676 - RNA, 19 nt, Homo sapiens
  misc_RNA (1)...(19): siRNA sense strand
caacccaacucaaagacaa

SEQ ID NO: 267677 - RNA, 19 nt, Homo sapiens
  misc_RNA (1)...(19): siRNA sense strand
ggaaguacuugcacugagu

SEQ ID NO: 267678 - RNA, 19 nt, Homo sapiens
  misc_RNA (1)...(19): siRNA sense strand
gggccaaacugcuacuuga

SEQ ID NO: 267679 - RNA, 19 nt, Homo sapiens
  misc_RNA (1)...(19): siRNA sense strand
gagcuacaguuaagcauag

SEQ ID NO: 267680 - RNA, 19 nt, Homo sapiens
  misc_RNA (1)...(19): siRNA sense strand
gagagugucuuacaauguc

SEQ ID NO: 267681 - RNA, 19 nt, Homo sapiens
  misc_RNA (1)...(19): siRNA sense strand
gccaauugguggacacuuu

SEQ ID NO: 267682 - RNA, 19 nt, Homo sapiens
  misc_RNA (1)...(19): siRNA sense strand
ucagccaucuguauucuuu

SEQ ID NO: 267683 - RNA, 19 nt, Homo sapiens
  misc_RNA (1)...(19): siRNA sense strand
ucuggaacaucucuaauuu

SEQ ID NO: 267684 - RNA, 19 nt, Homo sapiens
  misc_RNA (1)...(19): siRNA sense strand
caacugguaucgaauccaa

SEQ ID NO: 267685 - RNA, 19 nt, Homo sapiens
  misc_RNA (1)...(19): siRNA sense strand
caaacuggauuucaagaca

SEQ ID NO: 267686 - RNA, 19 nt, Homo sapiens
  misc_RNA (1)...(19): siRNA sense strand
aagcagaucaucccaguua

SEQ ID NO: 267687 - RNA, 19 nt, Homo sapiens
  misc_RNA (1)...(19): siRNA sense strand
aagaaugccuuccaaguau

SEQ ID NO: 267688 - RNA, 19 nt, Homo sapiens
  misc_RNA (1)...(19): siRNA sense strand
gaaggcagcgaguucaauu

SEQ ID NO: 267689 - RNA, 19 nt, Homo sapiens
  misc_RNA (1)...(19): siRNA sense strand
gaagaugcccucaccaaca

SEQ ID NO: 267690 - RNA, 19 nt, Homo sapiens
  misc_RNA (1)...(19): siRNA sense strand
guacauugcccuggagaua

SEQ ID NO: 267691 - RNA, 19 nt, Homo sapiens
  misc_RNA (1)...(19): siRNA sense strand
gguccaaccuguaaaauaa

SEQ ID NO: 267692 - RNA, 19 nt, Homo sapiens
  misc_RNA (1)...(19): siRNA sense strand
gaaccaaauguauauguga

SEQ ID NO: 267693 - RNA, 19 nt, Homo sapiens
  misc_RNA (1)...(19): siRNA sense strand
ggaaccaaauguauaugug

SEQ ID NO: 267694 - RNA, 19 nt, Homo sapiens
  misc_RNA (1)...(19): siRNA sense strand
cgaggacacugcacucuau

SEQ ID NO: 267695 - RNA, 19 nt, Homo sapiens
  misc_RNA (1)...(19): siRNA sense strand
caggauacaugaugcaguu

SEQ ID NO: 267696 - RNA, 19 nt, Homo sapiens
  misc_RNA (1)...(19): siRNA sense strand
caaaguuccugcaauacug

SEQ ID NO: 267697 - RNA, 19 nt, Homo sapiens
  misc_RNA (1)...(19): siRNA sense strand
ggacaucaaucaaagaaug

SEQ ID NO: 267698 - RNA, 19 nt, Homo sapiens
  misc_RNA (1)...(19): siRNA sense strand
ugacaaagcuucaaaggau

SEQ ID NO: 267699 - RNA, 19 nt, Homo sapiens
  misc_RNA (1)...(19): siRNA sense strand
ugaaagcacuugccaauuc

SEQ ID NO: 267700 - RNA, 19 nt, Homo sapiens
  misc_RNA (1)...(19): siRNA sense strand
caaaggaugccaaauauga

SEQ ID NO: 267701 - RNA, 19 nt, Homo sapiens
  misc_RNA (1)...(19): siRNA sense strand
gagaauaggacaucaauca

SEQ ID NO: 267702 - RNA, 19 nt, Homo sapiens
  misc_RNA (1)...(19): siRNA sense strand
ucaaaucccugucaagaau

SEQ ID NO: 267703 - RNA, 19 nt, Homo sapiens
  misc_RNA (1)...(19): siRNA sense strand
ggucagagccaccuguaua

SEQ ID NO: 267704 - RNA, 19 nt, Homo sapiens
  misc_RNA (1)...(19): siRNA sense strand
gauccaauguugaaggaaa

SEQ ID NO: 267705 - RNA, 19 nt, Homo sapiens
  misc_RNA (1)...(19): siRNA sense strand
gaauaggacaucaaucaaa

SEQ ID NO: 267706 - RNA, 19 nt, Homo sapiens
  misc_RNA (1)...(19): siRNA sense strand
ugacaucacuggcauauac

SEQ ID NO: 267707 - RNA, 19 nt, Homo sapiens
  misc_RNA (1)...(19): siRNA sense strand
uaacccagcuccugagaga

SEQ ID NO: 267708 - RNA, 19 nt, Homo sapiens
  misc_RNA (1)...(19): siRNA sense strand
gcaauuucaucucuucugu

SEQ ID NO: 267709 - RNA, 19 nt, Homo sapiens
  misc_RNA (1)...(19): siRNA sense strand
agacacaguuggaaucuug

SEQ ID NO: 267710 - RNA, 19 nt, Homo sapiens
  misc_RNA (1)...(19): siRNA sense strand
gacaauugcagaaaucuuu

SEQ ID NO: 267711 - RNA, 19 nt, Homo sapiens
  misc_RNA (1)...(19): siRNA sense strand
uuugaacgcuugcuuauga

SEQ ID NO: 267712 - RNA, 19 nt, Homo sapiens
  misc_RNA (1)...(19): siRNA sense strand
caagacaauugcagaaauc

SEQ ID NO: 267713 - RNA, 19 nt, Homo sapiens
  misc_RNA (1)...(19): siRNA sense strand
guauagaaauggugacauc

SEQ ID NO: 267714 - RNA, 19 nt, Homo sapiens
  misc_RNA (1)...(19): siRNA sense strand
gaaucuaucuguagcaaaa

SEQ ID NO: 267715 - RNA, 19 nt, Homo sapiens
  misc_RNA (1)...(19): siRNA sense strand
ccaagacaauugcagaaau

SEQ ID NO: 267716 - RNA, 19 nt, Homo sapiens
  misc_RNA (1)...(19): siRNA sense strand
gagaaucuaucuguagcaa

SEQ ID NO: 267717 - RNA, 19 nt, Homo sapiens
  misc_RNA (1)...(19): siRNA sense strand
cuucaaaggaugccaaaua

SEQ ID NO: 267718 - RNA, 19 nt, Homo sapiens
  misc_RNA (1)...(19): siRNA sense strand
gcagcagacugaugaccuu

SEQ ID NO: 267719 - RNA, 19 nt, Homo sapiens
  misc_RNA (1)...(19): siRNA sense strand
ggagagaaucuaucuguag

SEQ ID NO: 267720 - RNA, 19 nt, Homo sapiens
  misc_RNA (1)...(19): siRNA sense strand
ggauaguccucaacagauc

SEQ ID NO: 267721 - RNA, 19 nt, Homo sapiens
  misc_RNA (1)...(19): siRNA sense strand
gaugacagaauccugguuu

SEQ ID NO: 267722 - RNA, 19 nt, Homo sapiens
  misc_RNA (1)...(19): siRNA sense strand
agagauugcuccaagcuau

SEQ ID NO: 267723 - RNA, 19 nt, Homo sapiens
  misc_RNA (1)...(19): siRNA sense strand
aaaccuggcugucauggau

SEQ ID NO: 267724 - RNA, 19 nt, Homo sapiens
  misc_RNA (1)...(19): siRNA sense strand
ggacuggaggcuuuauuug

SEQ ID NO: 267725 - RNA, 19 nt, Homo sapiens
  misc_RNA (1)...(19): siRNA sense strand
aacaggaacucgcuuugaa

SEQ ID NO: 267726 - RNA, 19 nt, Homo sapiens
  misc_RNA (1)...(19): siRNA sense strand
uuucaucucuucuguacuu

SEQ ID NO: 267727 - RNA, 19 nt, Homo sapiens
  misc_RNA (1)...(19): siRNA sense strand
agagccaccuguauagaaa

SEQ ID NO: 267728 - RNA, 19 nt, Homo sapiens
  misc_RNA (1)...(19): siRNA sense strand
uaugauugguguagcugua

SEQ ID NO: 267729 - RNA, 19 nt, Homo sapiens
  misc_RNA (1)...(19): siRNA sense strand
uauccuaucuuuguggaaa

SEQ ID NO: 267730 - RNA, 19 nt, Homo sapiens
  misc_RNA (1)...(19): siRNA sense strand
gcuucuaucugccaggauu

SEQ ID NO: 267731 - RNA, 19 nt, Homo sapiens
  misc_RNA (1)...(19): siRNA sense strand
caccagaaucuuuaaacua

SEQ ID NO: 267732 - RNA, 19 nt, Homo sapiens
  misc_RNA (1)...(19): siRNA sense strand
ugccaaauaugaacuagug

SEQ ID NO: 267733 - RNA, 19 nt, Homo sapiens
  misc_RNA (1)...(19): siRNA sense strand
uucaaaggaugccaaauau

SEQ ID NO: 267734 - RNA, 19 nt, Homo sapiens
  misc_RNA (1)...(19): siRNA sense strand
agagauuucuuccguguca

SEQ ID NO: 267735 - RNA, 19 nt, Homo sapiens
  misc_RNA (1)...(19): siRNA sense strand
gaaagcacuugccaauucc

SEQ ID NO: 267736 - RNA, 19 nt, Homo sapiens
  misc_RNA (1)...(19): siRNA sense strand
gggauccaauguugaagga

SEQ ID NO: 267737 - RNA, 19 nt, Homo sapiens
  misc_RNA (1)...(19): siRNA sense strand
ggacuaauucacccugaug

SEQ ID NO: 267738 - RNA, 19 nt, Homo sapiens
  misc_RNA (1)...(19): siRNA sense strand
caacgagcuucgccagcaa

SEQ ID NO: 267739 - RNA, 19 nt, Homo sapiens
  misc_RNA (1)...(19): siRNA sense strand
gcgacaauaucuugcucaa

SEQ ID NO: 267740 - RNA, 19 nt, Homo sapiens
  misc_RNA (1)...(19): siRNA sense strand
acuggaggcuuuauuugaa

SEQ ID NO: 267741 - RNA, 19 nt, Homo sapiens
  misc_RNA (1)...(19): siRNA sense strand
gacuggaggcuuuauuuga

SEQ ID NO: 267742 - RNA, 19 nt, Homo sapiens
  misc_RNA (1)...(19): siRNA sense strand
gcuaucaaaucccugucaa

SEQ ID NO: 267743 - RNA, 19 nt, Homo sapiens
  misc_RNA (1)...(19): siRNA sense strand
uaucaaaucccugucaaga

SEQ ID NO: 267744 - RNA, 19 nt, Homo sapiens
  misc_RNA (1)...(19): siRNA sense strand
aauaggacaucaaucaaag

SEQ ID NO: 267745 - RNA, 19 nt, Homo sapiens
  misc_RNA (1)...(19): siRNA sense strand
gaacgcuugcuuaugagaa

SEQ ID NO: 267746 - RNA, 19 nt, Homo sapiens
  misc_RNA (1)...(19): siRNA sense strand
uggagagaaucuaucugua

SEQ ID NO: 267747 - RNA, 19 nt, Homo sapiens
  misc_RNA (1)...(19): siRNA sense strand
caaaucccugucaagaaua

SEQ ID NO: 267748 - RNA, 19 nt, Homo sapiens
  misc_RNA (1)...(19): siRNA sense strand
cagauuggaagaauuguug

SEQ ID NO: 267749 - RNA, 19 nt, Homo sapiens
  misc_RNA (1)...(19): siRNA sense strand
caccugagcagcagacuga

SEQ ID NO: 267750 - RNA, 19 nt, Homo sapiens
  misc_RNA (1)...(19): siRNA sense strand
gguguaugagcuaauuaua

SEQ ID NO: 267751 - RNA, 19 nt, Homo sapiens
  misc_RNA (1)...(19): siRNA sense strand
caggguguaugagcuaauu

SEQ ID NO: 267752 - RNA, 19 nt, Homo sapiens
  misc_RNA (1)...(19): siRNA sense strand
ccaaauaugaacuagugaa

SEQ ID NO: 267753 - RNA, 19 nt, Homo sapiens
  misc_RNA (1)...(19): siRNA sense strand
gcucuuccguggcauuagu

SEQ ID NO: 267754 - RNA, 19 nt, Homo sapiens
  misc_RNA (1)...(19): siRNA sense strand
ccgcucuucucccugcuua

SEQ ID NO: 267755 - RNA, 19 nt, Homo sapiens
  misc_RNA (1)...(19): siRNA sense strand
uuaaacuacuguaccacaa

SEQ ID NO: 267756 - RNA, 19 nt, Homo sapiens
  misc_RNA (1)...(19): siRNA sense strand
gagugaagggccauacuau

SEQ ID NO: 267757 - RNA, 19 nt, Homo sapiens
  misc_RNA (1)...(19): siRNA sense strand
gagcucuuccguggcauua

SEQ ID NO: 267758 - RNA, 19 nt, Homo sapiens
  misc_RNA (1)...(19): siRNA sense strand
cugaugaccuucugaggau

SEQ ID NO: 267759 - RNA, 19 nt, Homo sapiens
  misc_RNA (1)...(19): siRNA sense strand
gaaaacaggaacucgcuuu

SEQ ID NO: 267760 - RNA, 19 nt, Homo sapiens
  misc_RNA (1)...(19): siRNA sense strand
ugagcguuauccuaucuuu

SEQ ID NO: 267761 - RNA, 19 nt, Homo sapiens
  misc_RNA (1)...(19): siRNA sense strand
uaauucacccugaugauuc

SEQ ID NO: 267762 - RNA, 19 nt, Homo sapiens
  misc_RNA (1)...(19): siRNA sense strand
acacugugcugccuuaaaa

SEQ ID NO: 267763 - RNA, 19 nt, Homo sapiens
  misc_RNA (1)...(19): siRNA sense strand
gggcagauucagacccuuu

SEQ ID NO: 267764 - RNA, 19 nt, Homo sapiens
  misc_RNA (1)...(19): siRNA sense strand
aaacuacuguaccacaagu

SEQ ID NO: 267765 - RNA, 19 nt, Homo sapiens
  misc_RNA (1)...(19): siRNA sense strand
cagaaucuuuaaacuacug

SEQ ID NO: 267766 - RNA, 19 nt, Homo sapiens
  misc_RNA (1)...(19): siRNA sense strand
aagacuacuuuguguguau

SEQ ID NO: 267767 - RNA, 19 nt, Homo sapiens
  misc_RNA (1)...(19): siRNA sense strand
aauaugaacuagugaaagc

SEQ ID NO: 267768 - RNA, 19 nt, Homo sapiens
  misc_RNA (1)...(19): siRNA sense strand
aaacaggaacucgcuuuga

SEQ ID NO: 267769 - RNA, 19 nt, Homo sapiens
  misc_RNA (1)...(19): siRNA sense strand
gaaggaguaauugaccaaa

SEQ ID NO: 267770 - RNA, 19 nt, Homo sapiens
  misc_RNA (1)...(19): siRNA sense strand
gcucaagaaggaguaauug

SEQ ID NO: 267771 - RNA, 19 nt, Homo sapiens
  misc_RNA (1)...(19): siRNA sense strand
caucaugggcgacaauauc

SEQ ID NO: 267772 - RNA, 19 nt, Homo sapiens
  misc_RNA (1)...(19): siRNA sense strand
ucugcuggaugauuugaaa

SEQ ID NO: 267773 - RNA, 19 nt, Homo sapiens
  misc_RNA (1)...(19): siRNA sense strand
ucacuggcauauacucauc

SEQ ID NO: 267774 - RNA, 19 nt, Homo sapiens
  misc_RNA (1)...(19): siRNA sense strand
cagagccaccuguauagaa

SEQ ID NO: 267775 - RNA, 19 nt, Homo sapiens
  misc_RNA (1)...(19): siRNA sense strand
accagaaucuuuaaacuac

SEQ ID NO: 267776 - RNA, 19 nt, Homo sapiens
  misc_RNA (1)...(19): siRNA sense strand
ucaccagaaucuuuaaacu

SEQ ID NO: 267777 - RNA, 19 nt, Homo sapiens
  misc_RNA (1)...(19): siRNA sense strand
cuaauucacccugaugauu

SEQ ID NO: 267778 - RNA, 19 nt, Homo sapiens
  misc_RNA (1)...(19): siRNA sense strand
caaaagcggcuaucaaauc

SEQ ID NO: 267779 - RNA, 19 nt, Homo sapiens
  misc_RNA (1)...(19): siRNA sense strand
ugagugaagggccauacua

SEQ ID NO: 267780 - RNA, 19 nt, Homo sapiens
  misc_RNA (1)...(19): siRNA sense strand
gagagauugcuccaagcua

SEQ ID NO: 267781 - RNA, 19 nt, Homo sapiens
  misc_RNA (1)...(19): siRNA sense strand
guggagagaaucuaucugu

SEQ ID NO: 267782 - RNA, 19 nt, Homo sapiens
  misc_RNA (1)...(19): siRNA sense strand
acuacacugugcugccuua

SEQ ID NO: 267783 - RNA, 19 nt, Homo sapiens
  misc_RNA (1)...(19): siRNA sense strand
cgugucaccagaaucuuua

SEQ ID NO: 267784 - RNA, 19 nt, Homo sapiens
  misc_RNA (1)...(19): siRNA sense strand
ucacccugaugauucugua

SEQ ID NO: 267785 - RNA, 19 nt, Homo sapiens
  misc_RNA (1)...(19): siRNA sense strand
ggaccggucuguggagcau

SEQ ID NO: 267786 - RNA, 19 nt, Homo sapiens
  misc_RNA (1)...(19): siRNA sense strand
aaaucccugucaagaauau

SEQ ID NO: 267787 - RNA, 19 nt, Homo sapiens
  misc_RNA (1)...(19): siRNA sense strand
ggaugccaaauaugaacua

SEQ ID NO: 267788 - RNA, 19 nt, Homo sapiens
  misc_RNA (1)...(19): siRNA sense strand
aaaggaugccaaauaugaa

SEQ ID NO: 267789 - RNA, 19 nt, Homo sapiens
  misc_RNA (1)...(19): siRNA sense strand
gaugaccuucugaggauga

SEQ ID NO: 267790 - RNA, 19 nt, Homo sapiens
  misc_RNA (1)...(19): siRNA sense strand
caauuucaucucuucugua

SEQ ID NO: 267791 - RNA, 19 nt, Homo sapiens
  misc_RNA (1)...(19): siRNA sense strand
cuggaggcuuuauuugaaa

SEQ ID NO: 267792 - RNA, 19 nt, Homo sapiens
  misc_RNA (1)...(19): siRNA sense strand
aguagaaggagccgaauga

SEQ ID NO: 267793 - RNA, 19 nt, Homo sapiens
  misc_RNA (1)...(19): siRNA sense strand
gcuguuacugagauucuaa

SEQ ID NO: 267794 - RNA, 19 nt, Homo sapiens
  misc_RNA (1)...(19): siRNA sense strand
gcuuugaacgcuugcuuau

SEQ ID NO: 267795 - RNA, 19 nt, Homo sapiens
  misc_RNA (1)...(19): siRNA sense strand
uuagauguuuggaugcaau

SEQ ID NO: 267796 - RNA, 19 nt, Homo sapiens
  misc_RNA (1)...(19): siRNA sense strand
uaggacaucaaucaaagaa

SEQ ID NO: 267797 - RNA, 19 nt, Homo sapiens
  misc_RNA (1)...(19): siRNA sense strand
gaugggagcugaugagaau

SEQ ID NO: 267798 - RNA, 19 nt, Homo sapiens
  misc_RNA (1)...(19): siRNA sense strand
ccaaggagcucuggcugua

SEQ ID NO: 267799 - RNA, 19 nt, Homo sapiens
  misc_RNA (1)...(19): siRNA sense strand
cagguuagaucugcaauuu

SEQ ID NO: 267800 - RNA, 19 nt, Homo sapiens
  misc_RNA (1)...(19): siRNA sense strand
ccacgacgcucucagaugu

SEQ ID NO: 267801 - RNA, 19 nt, Homo sapiens
  misc_RNA (1)...(19): siRNA sense strand
gagaggaucuugagguucu

SEQ ID NO: 267802 - RNA, 19 nt, Homo sapiens
  misc_RNA (1)...(19): siRNA sense strand
ucaaggaucugagccuaaa

SEQ ID NO: 267803 - RNA, 19 nt, Homo sapiens
  misc_RNA (1)...(19): siRNA sense strand
gguuagaucugcaauuucu

SEQ ID NO: 267804 - RNA, 19 nt, Homo sapiens
  misc_RNA (1)...(19): siRNA sense strand
cuacagagcugggcaugug

SEQ ID NO: 267805 - RNA, 19 nt, Homo sapiens
  misc_RNA (1)...(19): siRNA sense strand
gcacagaauugggcagcuu

SEQ ID NO: 267806 - RNA, 19 nt, Homo sapiens
  misc_RNA (1)...(19): siRNA sense strand
agagggagcugauguccaa

SEQ ID NO: 267807 - RNA, 19 nt, Homo sapiens
  misc_RNA (1)...(19): siRNA sense strand
gacuggaacugguaugaug

SEQ ID NO: 267808 - RNA, 19 nt, Homo sapiens
  misc_RNA (1)...(19): siRNA sense strand
gggagacgcuucuggacau

SEQ ID NO: 267809 - RNA, 19 nt, Homo sapiens
  misc_RNA (1)...(19): siRNA sense strand
gguggccucuggacgagua

SEQ ID NO: 267810 - RNA, 19 nt, Homo sapiens
  misc_RNA (1)...(19): siRNA sense strand
cagcaagaaugccuuugug

SEQ ID NO: 267811 - RNA, 19 nt, Homo sapiens
  misc_RNA (1)...(19): siRNA sense strand
gagaaucaaaguggaauga

SEQ ID NO: 267812 - RNA, 19 nt, Homo sapiens
  misc_RNA (1)...(19): siRNA sense strand
acacagcauuucuccuuga

SEQ ID NO: 267813 - RNA, 19 nt, Homo sapiens
  misc_RNA (1)...(19): siRNA sense strand
gccaggacguggagcgauu

SEQ ID NO: 267814 - RNA, 19 nt, Homo sapiens
  misc_RNA (1)...(19): siRNA sense strand
ccagcaagcucaucaucuc

SEQ ID NO: 267815 - RNA, 19 nt, Homo sapiens
  misc_RNA (1)...(19): siRNA sense strand
uggcaggccuguccaacuu

SEQ ID NO: 267816 - RNA, 19 nt, Homo sapiens
  misc_RNA (1)...(19): siRNA sense strand
caacaccuuugacuaucug

SEQ ID NO: 267817 - RNA, 19 nt, Homo sapiens
  misc_RNA (1)...(19): siRNA sense strand
gaagaugggagcugaugag

SEQ ID NO: 267818 - RNA, 19 nt, Homo sapiens
  misc_RNA (1)...(19): siRNA sense strand
gaugagaaucaaaguggaa

SEQ ID NO: 267819 - RNA, 19 nt, Homo sapiens
  misc_RNA (1)...(19): siRNA sense strand
agacacagcauuucuccuu

SEQ ID NO: 267820 - RNA, 19 nt, Homo sapiens
  misc_RNA (1)...(19): siRNA sense strand
gugagcaucuucggguauu

SEQ ID NO: 267821 - RNA, 19 nt, Homo sapiens
  misc_RNA (1)...(19): siRNA sense strand
gaaguacgcagugcuugau

SEQ ID NO: 267822 - RNA, 19 nt, Homo sapiens
  misc_RNA (1)...(19): siRNA sense strand
gaucuugagguucuuggaa

SEQ ID NO: 267823 - RNA, 19 nt, Homo sapiens
  misc_RNA (1)...(19): siRNA sense strand
gaugaugagaggaucuuga

SEQ ID NO: 267824 - RNA, 19 nt, Homo sapiens
  misc_RNA (1)...(19): siRNA sense strand
cugcagauacugaagguuu

SEQ ID NO: 267825 - RNA, 19 nt, Homo sapiens
  misc_RNA (1)...(19): siRNA sense strand
ggaagaugggagcugauga

SEQ ID NO: 267826 - RNA, 19 nt, Homo sapiens
  misc_RNA (1)...(19): siRNA sense strand
ggagccugcugcuuucuac

SEQ ID NO: 267827 - RNA, 19 nt, Homo sapiens
  misc_RNA (1)...(19): siRNA sense strand
cgaaguacgcagugcuuga

SEQ ID NO: 267828 - RNA, 19 nt, Homo sapiens
  misc_RNA (1)...(19): siRNA sense strand
gcacccuggucagcaagaa

SEQ ID NO: 267829 - RNA, 19 nt, Homo sapiens
  misc_RNA (1)...(19): siRNA sense strand
gggagcugauguccaagga

SEQ ID NO: 267830 - RNA, 19 nt, Homo sapiens
  misc_RNA (1)...(19): siRNA sense strand
ugggcagcauccugaguua

SEQ ID NO: 267831 - RNA, 19 nt, Homo sapiens
  misc_RNA (1)...(19): siRNA sense strand
cugcagagacuccuucaga

SEQ ID NO: 267832 - RNA, 19 nt, Homo sapiens
  misc_RNA (1)...(19): siRNA sense strand
guacgcagugcuugaugaa

SEQ ID NO: 267833 - RNA, 19 nt, Homo sapiens
  misc_RNA (1)...(19): siRNA sense strand
gccagcagacacagcauuu

SEQ ID NO: 267834 - RNA, 19 nt, Homo sapiens
  misc_RNA (1)...(19): siRNA sense strand
ggagacgcuucuggacaug

SEQ ID NO: 267835 - RNA, 19 nt, Homo sapiens
  misc_RNA (1)...(19): siRNA sense strand
ggucagcaagaaugccuuu

SEQ ID NO: 267836 - RNA, 19 nt, Homo sapiens
  misc_RNA (1)...(19): siRNA sense strand
ucaagcacaugcagauucg

SEQ ID NO: 267837 - RNA, 19 nt, Homo sapiens
  misc_RNA (1)...(19): siRNA sense strand
gaugcaacggcucuccuuu

SEQ ID NO: 267838 - RNA, 19 nt, Homo sapiens
  misc_RNA (1)...(19): siRNA sense strand
gcacuggcaagaccuccuu

SEQ ID NO: 267839 - RNA, 19 nt, Homo sapiens
  misc_RNA (1)...(19): siRNA sense strand
gugcuauuccugccacaaa

SEQ ID NO: 267840 - RNA, 19 nt, Homo sapiens
  misc_RNA (1)...(19): siRNA sense strand
cguucacccucgucuacua

SEQ ID NO: 267841 - RNA, 19 nt, Homo sapiens
  misc_RNA (1)...(19): siRNA sense strand
acaugucccugaagucaca

SEQ ID NO: 267842 - RNA, 19 nt, Homo sapiens
  misc_RNA (1)...(19): siRNA sense strand
ggacuggaacugguaugau

SEQ ID NO: 267843 - RNA, 19 nt, Homo sapiens
  misc_RNA (1)...(19): siRNA sense strand
uuucauuccuugguucuga

SEQ ID NO: 267844 - RNA, 19 nt, Homo sapiens
  misc_RNA (1)...(19): siRNA sense strand
gagcaucuucggguauuuc

SEQ ID NO: 267845 - RNA, 19 nt, Homo sapiens
  misc_RNA (1)...(19): siRNA sense strand
augagaggaucuugagguu

SEQ ID NO: 267846 - RNA, 19 nt, Homo sapiens
  misc_RNA (1)...(19): siRNA sense strand
aaggagcucuggcuguaca

SEQ ID NO: 267847 - RNA, 19 nt, Homo sapiens
  misc_RNA (1)...(19): siRNA sense strand
augcggagccugcugcuuu

SEQ ID NO: 267848 - RNA, 19 nt, Homo sapiens
  misc_RNA (1)...(19): siRNA sense strand
gaagcuggagggagauuuu

SEQ ID NO: 267849 - RNA, 19 nt, Homo sapiens
  misc_RNA (1)...(19): siRNA sense strand
ucuugagguucuuggaauu

SEQ ID NO: 267850 - RNA, 19 nt, Homo sapiens
  misc_RNA (1)...(19): siRNA sense strand
caucuucggguauuucauc

SEQ ID NO: 267851 - RNA, 19 nt, Homo sapiens
  misc_RNA (1)...(19): siRNA sense strand
cagguucugccgaugauga

SEQ ID NO: 267852 - RNA, 19 nt, Homo sapiens
  misc_RNA (1)...(19): siRNA sense strand
gugugcaucuaccucauca

SEQ ID NO: 267853 - RNA, 19 nt, Homo sapiens
  misc_RNA (1)...(19): siRNA sense strand
ggugauauauccccugaag

SEQ ID NO: 267854 - RNA, 19 nt, Homo sapiens
  misc_RNA (1)...(19): siRNA sense strand
aguacgcagugcuugauga

SEQ ID NO: 267855 - RNA, 19 nt, Homo sapiens
  misc_RNA (1)...(19): siRNA sense strand
uuagcacccuggucagcaa

SEQ ID NO: 267856 - RNA, 19 nt, Homo sapiens
  misc_RNA (1)...(19): siRNA sense strand
ugacaaaccccuaaucaag

SEQ ID NO: 267857 - RNA, 19 nt, Homo sapiens
  misc_RNA (1)...(19): siRNA sense strand
cagcagacacagcauuucu

SEQ ID NO: 267858 - RNA, 19 nt, Homo sapiens
  misc_RNA (1)...(19): siRNA sense strand
gagaagcuggagggagauu

SEQ ID NO: 267859 - RNA, 19 nt, Homo sapiens
  misc_RNA (1)...(19): siRNA sense strand
gcagaugcugacggacuuu

SEQ ID NO: 267860 - RNA, 19 nt, Homo sapiens
  misc_RNA (1)...(19): siRNA sense strand
uggcuacacgcacagaauu

SEQ ID NO: 267861 - RNA, 19 nt, Homo sapiens
  misc_RNA (1)...(19): siRNA sense strand
ucagcaagaaugccuuugu

SEQ ID NO: 267862 - RNA, 19 nt, Homo sapiens
  misc_RNA (1)...(19): siRNA sense strand
gccugcugcuuucuacaga

SEQ ID NO: 267863 - RNA, 19 nt, Homo sapiens
  misc_RNA (1)...(19): siRNA sense strand
ccacaaaagccauucuuca

SEQ ID NO: 267864 - RNA, 19 nt, Homo sapiens
  misc_RNA (1)...(19): siRNA sense strand
gaugggagcugaugagaau

SEQ ID NO: 267865 - RNA, 19 nt, Homo sapiens
  misc_RNA (1)...(19): siRNA sense strand
ccaaggagcucuggcugua

SEQ ID NO: 267866 - RNA, 19 nt, Homo sapiens
  misc_RNA (1)...(19): siRNA sense strand
cagguuagaucugcaauuu

SEQ ID NO: 267867 - RNA, 19 nt, Homo sapiens
  misc_RNA (1)...(19): siRNA sense strand
ccacgacgcucucagaugu

SEQ ID NO: 267868 - RNA, 19 nt, Homo sapiens
  misc_RNA (1)...(19): siRNA sense strand
gagaggaucuugagguucu

SEQ ID NO: 267869 - RNA, 19 nt, Homo sapiens
  misc_RNA (1)...(19): siRNA sense strand
ucaaggaucugagccuaaa

SEQ ID NO: 267870 - RNA, 19 nt, Homo sapiens
  misc_RNA (1)...(19): siRNA sense strand
gguuagaucugcaauuucu

SEQ ID NO: 267871 - RNA, 19 nt, Homo sapiens
  misc_RNA (1)...(19): siRNA sense strand
cuacagagcugggcaugug

SEQ ID NO: 267872 - RNA, 19 nt, Homo sapiens
  misc_RNA (1)...(19): siRNA sense strand
gcacagaauugggcagcuu

SEQ ID NO: 267873 - RNA, 19 nt, Homo sapiens
  misc_RNA (1)...(19): siRNA sense strand
agagggagcugauguccaa

SEQ ID NO: 267874 - RNA, 19 nt, Homo sapiens
  misc_RNA (1)...(19): siRNA sense strand
gacuggaacugguaugaug

SEQ ID NO: 267875 - RNA, 19 nt, Homo sapiens
  misc_RNA (1)...(19): siRNA sense strand
gggagacgcuucuggacau

SEQ ID NO: 267876 - RNA, 19 nt, Homo sapiens
  misc_RNA (1)...(19): siRNA sense strand
gguggccucuggacgagua

SEQ ID NO: 267877 - RNA, 19 nt, Homo sapiens
  misc_RNA (1)...(19): siRNA sense strand
cagcaagaaugccuuugug

SEQ ID NO: 267878 - RNA, 19 nt, Homo sapiens
  misc_RNA (1)...(19): siRNA sense strand
gagaaucaaaguggaauga

SEQ ID NO: 267879 - RNA, 19 nt, Homo sapiens
  misc_RNA (1)...(19): siRNA sense strand
acacagcauuucuccuuga

SEQ ID NO: 267880 - RNA, 19 nt, Homo sapiens
  misc_RNA (1)...(19): siRNA sense strand
gccaggacguggagcgauu

SEQ ID NO: 267881 - RNA, 19 nt, Homo sapiens
  misc_RNA (1)...(19): siRNA sense strand
ccagcaagcucaucaucuc

SEQ ID NO: 267882 - RNA, 19 nt, Homo sapiens
  misc_RNA (1)...(19): siRNA sense strand
uggcaggccuguccaacuu

SEQ ID NO: 267883 - RNA, 19 nt, Homo sapiens
  misc_RNA (1)...(19): siRNA sense strand
caacaccuuugacuaucug

SEQ ID NO: 267884 - RNA, 19 nt, Homo sapiens
  misc_RNA (1)...(19): siRNA sense strand
gaagaugggagcugaugag

SEQ ID NO: 267885 - RNA, 19 nt, Homo sapiens
  misc_RNA (1)...(19): siRNA sense strand
gaugagaaucaaaguggaa

SEQ ID NO: 267886 - RNA, 19 nt, Homo sapiens
  misc_RNA (1)...(19): siRNA sense strand
agacacagcauuucuccuu

SEQ ID NO: 267887 - RNA, 19 nt, Homo sapiens
  misc_RNA (1)...(19): siRNA sense strand
gugagcaucuucggguauu

SEQ ID NO: 267888 - RNA, 19 nt, Homo sapiens
  misc_RNA (1)...(19): siRNA sense strand
gaaguacgcagugcuugau

SEQ ID NO: 267889 - RNA, 19 nt, Homo sapiens
  misc_RNA (1)...(19): siRNA sense strand
gaucuugagguucuuggaa

SEQ ID NO: 267890 - RNA, 19 nt, Homo sapiens
  misc_RNA (1)...(19): siRNA sense strand
gaugaugagaggaucuuga

SEQ ID NO: 267891 - RNA, 19 nt, Homo sapiens
  misc_RNA (1)...(19): siRNA sense strand
cugcagauacugaagguuu

SEQ ID NO: 267892 - RNA, 19 nt, Homo sapiens
  misc_RNA (1)...(19): siRNA sense strand
ggaagaugggagcugauga

SEQ ID NO: 267893 - RNA, 19 nt, Homo sapiens
  misc_RNA (1)...(19): siRNA sense strand
ggagccugcugcuuucuac

SEQ ID NO: 267894 - RNA, 19 nt, Homo sapiens
  misc_RNA (1)...(19): siRNA sense strand
cgaaguacgcagugcuuga

SEQ ID NO: 267895 - RNA, 19 nt, Homo sapiens
  misc_RNA (1)...(19): siRNA sense strand
gcacccuggucagcaagaa

SEQ ID NO: 267896 - RNA, 19 nt, Homo sapiens
  misc_RNA (1)...(19): siRNA sense strand
gggagcugauguccaagga

SEQ ID NO: 267897 - RNA, 19 nt, Homo sapiens
  misc_RNA (1)...(19): siRNA sense strand
ugggcagcauccugaguua

SEQ ID NO: 267898 - RNA, 19 nt, Homo sapiens
  misc_RNA (1)...(19): siRNA sense strand
cugcagagacuccuucaga

SEQ ID NO: 267899 - RNA, 19 nt, Homo sapiens
  misc_RNA (1)...(19): siRNA sense strand
guacgcagugcuugaugaa

SEQ ID NO: 267900 - RNA, 19 nt, Homo sapiens
  misc_RNA (1)...(19): siRNA sense strand
gccagcagacacagcauuu

SEQ ID NO: 267901 - RNA, 19 nt, Homo sapiens
  misc_RNA (1)...(19): siRNA sense strand
ggagacgcuucuggacaug

SEQ ID NO: 267902 - RNA, 19 nt, Homo sapiens
  misc_RNA (1)...(19): siRNA sense strand
ggucagcaagaaugccuuu

SEQ ID NO: 267903 - RNA, 19 nt, Homo sapiens
  misc_RNA (1)...(19): siRNA sense strand
ucaagcacaugcagauucg

SEQ ID NO: 267904 - RNA, 19 nt, Homo sapiens
  misc_RNA (1)...(19): siRNA sense strand
gaugcaacggcucuccuuu

SEQ ID NO: 267905 - RNA, 19 nt, Homo sapiens
  misc_RNA (1)...(19): siRNA sense strand
gcacuggcaagaccuccuu

SEQ ID NO: 267906 - RNA, 19 nt, Homo sapiens
  misc_RNA (1)...(19): siRNA sense strand
gugcuauuccugccacaaa

SEQ ID NO: 267907 - RNA, 19 nt, Homo sapiens
  misc_RNA (1)...(19): siRNA sense strand
cguucacccucgucuacua

SEQ ID NO: 267908 - RNA, 19 nt, Homo sapiens
  misc_RNA (1)...(19): siRNA sense strand
acaugucccugaagucaca

SEQ ID NO: 267909 - RNA, 19 nt, Homo sapiens
  misc_RNA (1)...(19): siRNA sense strand
ggacuggaacugguaugau

SEQ ID NO: 267910 - RNA, 19 nt, Homo sapiens
  misc_RNA (1)...(19): siRNA sense strand
uuucauuccuugguucuga

SEQ ID NO: 267911 - RNA, 19 nt, Homo sapiens
  misc_RNA (1)...(19): siRNA sense strand
gagcaucuucggguauuuc

SEQ ID NO: 267912 - RNA, 19 nt, Homo sapiens
  misc_RNA (1)...(19): siRNA sense strand
augagaggaucuugagguu

SEQ ID NO: 267913 - RNA, 19 nt, Homo sapiens
  misc_RNA (1)...(19): siRNA sense strand
aaggagcucuggcuguaca

SEQ ID NO: 267914 - RNA, 19 nt, Homo sapiens
  misc_RNA (1)...(19): siRNA sense strand
augcggagccugcugcuuu

SEQ ID NO: 267915 - RNA, 19 nt, Homo sapiens
  misc_RNA (1)...(19): siRNA sense strand
gaagcuggagggagauuuu

SEQ ID NO: 267916 - RNA, 19 nt, Homo sapiens
  misc_RNA (1)...(19): siRNA sense strand
ucuugagguucuuggaauu

SEQ ID NO: 267917 - RNA, 19 nt, Homo sapiens
  misc_RNA (1)...(19): siRNA sense strand
caucuucggguauuucauc

SEQ ID NO: 267918 - RNA, 19 nt, Homo sapiens
  misc_RNA (1)...(19): siRNA sense strand
cagguucugccgaugauga

SEQ ID NO: 267919 - RNA, 19 nt, Homo sapiens
  misc_RNA (1)...(19): siRNA sense strand
gugugcaucuaccucauca

SEQ ID NO: 267920 - RNA, 19 nt, Homo sapiens
  misc_RNA (1)...(19): siRNA sense strand
ggugauauauccccugaag

SEQ ID NO: 267921 - RNA, 19 nt, Homo sapiens
  misc_RNA (1)...(19): siRNA sense strand
aguacgcagugcuugauga

SEQ ID NO: 267922 - RNA, 19 nt, Homo sapiens
  misc_RNA (1)...(19): siRNA sense strand
uuagcacccuggucagcaa

SEQ ID NO: 267923 - RNA, 19 nt, Homo sapiens
  misc_RNA (1)...(19): siRNA sense strand
ugacaaaccccuaaucaag

SEQ ID NO: 267924 - RNA, 19 nt, Homo sapiens
  misc_RNA (1)...(19): siRNA sense strand
cagcagacacagcauuucu

SEQ ID NO: 267925 - RNA, 19 nt, Homo sapiens
  misc_RNA (1)...(19): siRNA sense strand
gagaagcuggagggagauu

SEQ ID NO: 267926 - RNA, 19 nt, Homo sapiens
  misc_RNA (1)...(19): siRNA sense strand
gcagaugcugacggacuuu

SEQ ID NO: 267927 - RNA, 19 nt, Homo sapiens
  misc_RNA (1)...(19): siRNA sense strand
uggcuacacgcacagaauu

SEQ ID NO: 267928 - RNA, 19 nt, Homo sapiens
  misc_RNA (1)...(19): siRNA sense strand
ucagcaagaaugccuuugu

SEQ ID NO: 267929 - RNA, 19 nt, Homo sapiens
  misc_RNA (1)...(19): siRNA sense strand
gccugcugcuuucuacaga

SEQ ID NO: 267930 - RNA, 19 nt, Homo sapiens
  misc_RNA (1)...(19): siRNA sense strand
ccacaaaagccauucuuca

SEQ ID NO: 267931 - RNA, 19 nt, Homo sapiens
  misc_RNA (1)...(19): siRNA sense strand
gaugggagcugaugagaau

SEQ ID NO: 267932 - RNA, 19 nt, Homo sapiens
  misc_RNA (1)...(19): siRNA sense strand
ccaaggagcucuggcugua

SEQ ID NO: 267933 - RNA, 19 nt, Homo sapiens
  misc_RNA (1)...(19): siRNA sense strand
ccacgacgcucucagaugu

SEQ ID NO: 267934 - RNA, 19 nt, Homo sapiens
  misc_RNA (1)...(19): siRNA sense strand
gagaggaucuugagguucu

SEQ ID NO: 267935 - RNA, 19 nt, Homo sapiens
  misc_RNA (1)...(19): siRNA sense strand
ucaaggaucugagccuaaa

SEQ ID NO: 267936 - RNA, 19 nt, Homo sapiens
  misc_RNA (1)...(19): siRNA sense strand
cuacagagcugggcaugug

SEQ ID NO: 267937 - RNA, 19 nt, Homo sapiens
  misc_RNA (1)...(19): siRNA sense strand
gcacagaauugggcagcuu

SEQ ID NO: 267938 - RNA, 19 nt, Homo sapiens
  misc_RNA (1)...(19): siRNA sense strand
agagggagcugauguccaa

SEQ ID NO: 267939 - RNA, 19 nt, Homo sapiens
  misc_RNA (1)...(19): siRNA sense strand
gacuggaacugguaugaug

SEQ ID NO: 267940 - RNA, 19 nt, Homo sapiens
  misc_RNA (1)...(19): siRNA sense strand
gggagacgcuucuggacau

SEQ ID NO: 267941 - RNA, 19 nt, Homo sapiens
  misc_RNA (1)...(19): siRNA sense strand
gguggccucuggacgagua

SEQ ID NO: 267942 - RNA, 19 nt, Homo sapiens
  misc_RNA (1)...(19): siRNA sense strand
cagcaagaaugccuuugug

SEQ ID NO: 267943 - RNA, 19 nt, Homo sapiens
  misc_RNA (1)...(19): siRNA sense strand
gagaaucaaaguggaauga

SEQ ID NO: 267944 - RNA, 19 nt, Homo sapiens
  misc_RNA (1)...(19): siRNA sense strand
acacagcauuucuccuuga

SEQ ID NO: 267945 - RNA, 19 nt, Homo sapiens
  misc_RNA (1)...(19): siRNA sense strand
ccagcaagcucaucaucuc

SEQ ID NO: 267946 - RNA, 19 nt, Homo sapiens
  misc_RNA (1)...(19): siRNA sense strand
uggcaggccuguccaacuu

SEQ ID NO: 267947 - RNA, 19 nt, Homo sapiens
  misc_RNA (1)...(19): siRNA sense strand
caacaccuuugacuaucug

SEQ ID NO: 267948 - RNA, 19 nt, Homo sapiens
  misc_RNA (1)...(19): siRNA sense strand
gaagaugggagcugaugag

SEQ ID NO: 267949 - RNA, 19 nt, Homo sapiens
  misc_RNA (1)...(19): siRNA sense strand
gaugagaaucaaaguggaa

SEQ ID NO: 267950 - RNA, 19 nt, Homo sapiens
  misc_RNA (1)...(19): siRNA sense strand
agacacagcauuucuccuu

SEQ ID NO: 267951 - RNA, 19 nt, Homo sapiens
  misc_RNA (1)...(19): siRNA sense strand
gugagcaucuucggguauu

SEQ ID NO: 267952 - RNA, 19 nt, Homo sapiens
  misc_RNA (1)...(19): siRNA sense strand
gaaguacgcagugcuugau

SEQ ID NO: 267953 - RNA, 19 nt, Homo sapiens
  misc_RNA (1)...(19): siRNA sense strand
gaucuugagguucuuggaa

SEQ ID NO: 267954 - RNA, 19 nt, Homo sapiens
  misc_RNA (1)...(19): siRNA sense strand
gaugaugagaggaucuuga

SEQ ID NO: 267955 - RNA, 19 nt, Homo sapiens
  misc_RNA (1)...(19): siRNA sense strand
ggaagaugggagcugauga

SEQ ID NO: 267956 - RNA, 19 nt, Homo sapiens
  misc_RNA (1)...(19): siRNA sense strand
ggagccugcugcuuucuac

SEQ ID NO: 267957 - RNA, 19 nt, Homo sapiens
  misc_RNA (1)...(19): siRNA sense strand
cgaaguacgcagugcuuga

SEQ ID NO: 267958 - RNA, 19 nt, Homo sapiens
  misc_RNA (1)...(19): siRNA sense strand
gcacccuggucagcaagaa

SEQ ID NO: 267959 - RNA, 19 nt, Homo sapiens
  misc_RNA (1)...(19): siRNA sense strand
gggagcugauguccaagga

SEQ ID NO: 267960 - RNA, 19 nt, Homo sapiens
  misc_RNA (1)...(19): siRNA sense strand
ugggcagcauccugaguua

SEQ ID NO: 267961 - RNA, 19 nt, Homo sapiens
  misc_RNA (1)...(19): siRNA sense strand
cugcagagacuccuucaga

SEQ ID NO: 267962 - RNA, 19 nt, Homo sapiens
  misc_RNA (1)...(19): siRNA sense strand
guacgcagugcuugaugaa

SEQ ID NO: 267963 - RNA, 19 nt, Homo sapiens
  misc_RNA (1)...(19): siRNA sense strand
gccagcagacacagcauuu

SEQ ID NO: 267964 - RNA, 19 nt, Homo sapiens
  misc_RNA (1)...(19): siRNA sense strand
ggagacgcuucuggacaug

SEQ ID NO: 267965 - RNA, 19 nt, Homo sapiens
  misc_RNA (1)...(19): siRNA sense strand
ggucagcaagaaugccuuu

SEQ ID NO: 267966 - RNA, 19 nt, Homo sapiens
  misc_RNA (1)...(19): siRNA sense strand
ucaagcacaugcagauucg

SEQ ID NO: 267967 - RNA, 19 nt, Homo sapiens
  misc_RNA (1)...(19): siRNA sense strand
gaugcaacggcucuccuuu

SEQ ID NO: 267968 - RNA, 19 nt, Homo sapiens
  misc_RNA (1)...(19): siRNA sense strand
gcacuggcaagaccuccuu

SEQ ID NO: 267969 - RNA, 19 nt, Homo sapiens
  misc_RNA (1)...(19): siRNA sense strand
gugcuauuccugccacaaa

SEQ ID NO: 267970 - RNA, 19 nt, Homo sapiens
  misc_RNA (1)...(19): siRNA sense strand
acaugucccugaagucaca

SEQ ID NO: 267971 - RNA, 19 nt, Homo sapiens
  misc_RNA (1)...(19): siRNA sense strand
cguucacccucgucuacua

SEQ ID NO: 267972 - RNA, 19 nt, Homo sapiens
  misc_RNA (1)...(19): siRNA sense strand
ggacuggaacugguaugau

SEQ ID NO: 267973 - RNA, 19 nt, Homo sapiens
  misc_RNA (1)...(19): siRNA sense strand
uuucauuccuugguucuga

SEQ ID NO: 267974 - RNA, 19 nt, Homo sapiens
  misc_RNA (1)...(19): siRNA sense strand
augcggagccugcugcuuu

SEQ ID NO: 267975 - RNA, 19 nt, Homo sapiens
  misc_RNA (1)...(19): siRNA sense strand
augagaggaucuugagguu

SEQ ID NO: 267976 - RNA, 19 nt, Homo sapiens
  misc_RNA (1)...(19): siRNA sense strand
gagcaucuucggguauuuc

SEQ ID NO: 267977 - RNA, 19 nt, Homo sapiens
  misc_RNA (1)...(19): siRNA sense strand
aaggagcucuggcuguaca

SEQ ID NO: 267978 - RNA, 19 nt, Homo sapiens
  misc_RNA (1)...(19): siRNA sense strand
gaagcuggagggagauuuu

SEQ ID NO: 267979 - RNA, 19 nt, Homo sapiens
  misc_RNA (1)...(19): siRNA sense strand
ucuugagguucuuggaauu

SEQ ID NO: 267980 - RNA, 19 nt, Homo sapiens
  misc_RNA (1)...(19): siRNA sense strand
caucuucggguauuucauc

SEQ ID NO: 267981 - RNA, 19 nt, Homo sapiens
  misc_RNA (1)...(19): siRNA sense strand
cagguucugccgaugauga

SEQ ID NO: 267982 - RNA, 19 nt, Homo sapiens
  misc_RNA (1)...(19): siRNA sense strand
gugugcaucuaccucauca

SEQ ID NO: 267983 - RNA, 19 nt, Homo sapiens
  misc_RNA (1)...(19): siRNA sense strand
ggugauauauccccugaag

SEQ ID NO: 267984 - RNA, 19 nt, Homo sapiens
  misc_RNA (1)...(19): siRNA sense strand
aguacgcagugcuugauga

SEQ ID NO: 267985 - RNA, 19 nt, Homo sapiens
  misc_RNA (1)...(19): siRNA sense strand
uuagcacccuggucagcaa

SEQ ID NO: 267986 - RNA, 19 nt, Homo sapiens
  misc_RNA (1)...(19): siRNA sense strand
ugacaaaccccuaaucaag

SEQ ID NO: 267987 - RNA, 19 nt, Homo sapiens
  misc_RNA (1)...(19): siRNA sense strand
cagcagacacagcauuucu

SEQ ID NO: 267988 - RNA, 19 nt, Homo sapiens
  misc_RNA (1)...(19): siRNA sense strand
gagaagcuggagggagauu

SEQ ID NO: 267989 - RNA, 19 nt, Homo sapiens
  misc_RNA (1)...(19): siRNA sense strand
gcagaugcugacggacuuu

SEQ ID NO: 267990 - RNA, 19 nt, Homo sapiens
  misc_RNA (1)...(19): siRNA sense strand
uggcuacacgcacagaauu

SEQ ID NO: 267991 - RNA, 19 nt, Homo sapiens
  misc_RNA (1)...(19): siRNA sense strand
ucagcaagaaugccuuugu

SEQ ID NO: 267992 - RNA, 19 nt, Homo sapiens
  misc_RNA (1)...(19): siRNA sense strand
gccugcugcuuucuacaga

SEQ ID NO: 267993 - RNA, 19 nt, Homo sapiens
  misc_RNA (1)...(19): siRNA sense strand
ccacaaaagccauucuuca

SEQ ID NO: 267994 - RNA, 19 nt, Homo sapiens
  misc_RNA (1)...(19): siRNA sense strand
ccaaggagcucuggcugua

SEQ ID NO: 267995 - RNA, 19 nt, Homo sapiens
  misc_RNA (1)...(19): siRNA sense strand
cagguuagaucugcaauuu

SEQ ID NO: 267996 - RNA, 19 nt, Homo sapiens
  misc_RNA (1)...(19): siRNA sense strand
ccacgacgcucucagaugu

SEQ ID NO: 267997 - RNA, 19 nt, Homo sapiens
  misc_RNA (1)...(19): siRNA sense strand
gagaggaucuugagguucu

SEQ ID NO: 267998 - RNA, 19 nt, Homo sapiens
  misc_RNA (1)...(19): siRNA sense strand
ucaaggaucugagccuaaa

SEQ ID NO: 267999 - RNA, 19 nt, Homo sapiens
  misc_RNA (1)...(19): siRNA sense strand
gguuagaucugcaauuucu

SEQ ID NO: 268000 - RNA, 19 nt, Homo sapiens
  misc_RNA (1)...(19): siRNA sense strand
cuacagagcugggcaugug

SEQ ID NO: 268001 - RNA, 19 nt, Homo sapiens
  misc_RNA (1)...(19): siRNA sense strand
gcacagaauugggcagcuu

SEQ ID NO: 268002 - RNA, 19 nt, Homo sapiens
  misc_RNA (1)...(19): siRNA sense strand
agagggagcugauguccaa

SEQ ID NO: 268003 - RNA, 19 nt, Homo sapiens
  misc_RNA (1)...(19): siRNA sense strand
gacuggaacugguaugaug

SEQ ID NO: 268004 - RNA, 19 nt, Homo sapiens
  misc_RNA (1)...(19): siRNA sense strand
gggagacgcuucuggacau

SEQ ID NO: 268005 - RNA, 19 nt, Homo sapiens
  misc_RNA (1)...(19): siRNA sense strand
gguggccucuggacgagua

SEQ ID NO: 268006 - RNA, 19 nt, Homo sapiens
  misc_RNA (1)...(19): siRNA sense strand
cagcaagaaugccuuugug

SEQ ID NO: 268007 - RNA, 19 nt, Homo sapiens
  misc_RNA (1)...(19): siRNA sense strand
acacagcauuucuccuuga

SEQ ID NO: 268008 - RNA, 19 nt, Homo sapiens
  misc_RNA (1)...(19): siRNA sense strand
gccaggacguggagcgauu

SEQ ID NO: 268009 - RNA, 19 nt, Homo sapiens
  misc_RNA (1)...(19): siRNA sense strand
ccagcaagcucaucaucuc

SEQ ID NO: 268010 - RNA, 19 nt, Homo sapiens
  misc_RNA (1)...(19): siRNA sense strand
uggcaggccuguccaacuu

SEQ ID NO: 268011 - RNA, 19 nt, Homo sapiens
  misc_RNA (1)...(19): siRNA sense strand
caacaccuuugacuaucug

SEQ ID NO: 268012 - RNA, 19 nt, Homo sapiens
  misc_RNA (1)...(19): siRNA sense strand
agacacagcauuucuccuu

SEQ ID NO: 268013 - RNA, 19 nt, Homo sapiens
  misc_RNA (1)...(19): siRNA sense strand
gugagcaucuucggguauu

SEQ ID NO: 268014 - RNA, 19 nt, Homo sapiens
  misc_RNA (1)...(19): siRNA sense strand
gaaguacgcagugcuugau

SEQ ID NO: 268015 - RNA, 19 nt, Homo sapiens
  misc_RNA (1)...(19): siRNA sense strand
gaucuugagguucuuggaa

SEQ ID NO: 268016 - RNA, 19 nt, Homo sapiens
  misc_RNA (1)...(19): siRNA sense strand
gaugaugagaggaucuuga

SEQ ID NO: 268017 - RNA, 19 nt, Homo sapiens
  misc_RNA (1)...(19): siRNA sense strand
cugcagauacugaagguuu

SEQ ID NO: 268018 - RNA, 19 nt, Homo sapiens
  misc_RNA (1)...(19): siRNA sense strand
ggagccugcugcuuucuac

SEQ ID NO: 268019 - RNA, 19 nt, Homo sapiens
  misc_RNA (1)...(19): siRNA sense strand
cgaaguacgcagugcuuga

SEQ ID NO: 268020 - RNA, 19 nt, Homo sapiens
  misc_RNA (1)...(19): siRNA sense strand
gcacccuggucagcaagaa

SEQ ID NO: 268021 - RNA, 19 nt, Homo sapiens
  misc_RNA (1)...(19): siRNA sense strand
gggagcugauguccaagga

SEQ ID NO: 268022 - RNA, 19 nt, Homo sapiens
  misc_RNA (1)...(19): siRNA sense strand
ugggcagcauccugaguua

SEQ ID NO: 268023 - RNA, 19 nt, Homo sapiens
  misc_RNA (1)...(19): siRNA sense strand
cugcagagacuccuucaga

SEQ ID NO: 268024 - RNA, 19 nt, Homo sapiens
  misc_RNA (1)...(19): siRNA sense strand
guacgcagugcuugaugaa

SEQ ID NO: 268025 - RNA, 19 nt, Homo sapiens
  misc_RNA (1)...(19): siRNA sense strand
gccagcagacacagcauuu

SEQ ID NO: 268026 - RNA, 19 nt, Homo sapiens
  misc_RNA (1)...(19): siRNA sense strand
ggagacgcuucuggacaug

SEQ ID NO: 268027 - RNA, 19 nt, Homo sapiens
  misc_RNA (1)...(19): siRNA sense strand
ggucagcaagaaugccuuu

SEQ ID NO: 268028 - RNA, 19 nt, Homo sapiens
  misc_RNA (1)...(19): siRNA sense strand
ucaagcacaugcagauucg

SEQ ID NO: 268029 - RNA, 19 nt, Homo sapiens
  misc_RNA (1)...(19): siRNA sense strand
gaugcaacggcucuccuuu

SEQ ID NO: 268030 - RNA, 19 nt, Homo sapiens
  misc_RNA (1)...(19): siRNA sense strand
gcacuggcaagaccuccuu

SEQ ID NO: 268031 - RNA, 19 nt, Homo sapiens
  misc_RNA (1)...(19): siRNA sense strand
gugcuauuccugccacaaa

SEQ ID NO: 268032 - RNA, 19 nt, Homo sapiens
  misc_RNA (1)...(19): siRNA sense strand
cguucacccucgucuacua

SEQ ID NO: 268033 - RNA, 19 nt, Homo sapiens
  misc_RNA (1)...(19): siRNA sense strand
acaugucccugaagucaca

SEQ ID NO: 268034 - RNA, 19 nt, Homo sapiens
  misc_RNA (1)...(19): siRNA sense strand
ggacuggaacugguaugau

SEQ ID NO: 268035 - RNA, 19 nt, Homo sapiens
  misc_RNA (1)...(19): siRNA sense strand
gagcaucuucggguauuuc

SEQ ID NO: 268036 - RNA, 19 nt, Homo sapiens
  misc_RNA (1)...(19): siRNA sense strand
augagaggaucuugagguu

SEQ ID NO: 268037 - RNA, 19 nt, Homo sapiens
  misc_RNA (1)...(19): siRNA sense strand
aaggagcucuggcuguaca

SEQ ID NO: 268038 - RNA, 19 nt, Homo sapiens
  misc_RNA (1)...(19): siRNA sense strand
augcggagccugcugcuuu

SEQ ID NO: 268039 - RNA, 19 nt, Homo sapiens
  misc_RNA (1)...(19): siRNA sense strand
gaagcuggagggagauuuu

SEQ ID NO: 268040 - RNA, 19 nt, Homo sapiens
  misc_RNA (1)...(19): siRNA sense strand
ucuugagguucuuggaauu

SEQ ID NO: 268041 - RNA, 19 nt, Homo sapiens
  misc_RNA (1)...(19): siRNA sense strand
caucuucggguauuucauc

SEQ ID NO: 268042 - RNA, 19 nt, Homo sapiens
  misc_RNA (1)...(19): siRNA sense strand
cagguucugccgaugauga

SEQ ID NO: 268043 - RNA, 19 nt, Homo sapiens
  misc_RNA (1)...(19): siRNA sense strand
gugugcaucuaccucauca

SEQ ID NO: 268044 - RNA, 19 nt, Homo sapiens
  misc_RNA (1)...(19): siRNA sense strand
ggugauauauccccugaag

SEQ ID NO: 268045 - RNA, 19 nt, Homo sapiens
  misc_RNA (1)...(19): siRNA sense strand
aguacgcagugcuugauga

SEQ ID NO: 268046 - RNA, 19 nt, Homo sapiens
  misc_RNA (1)...(19): siRNA sense strand
uuagcacccuggucagcaa

SEQ ID NO: 268047 - RNA, 19 nt, Homo sapiens
  misc_RNA (1)...(19): siRNA sense strand
ugacaaaccccuaaucaag

SEQ ID NO: 268048 - RNA, 19 nt, Homo sapiens
  misc_RNA (1)...(19): siRNA sense strand
cagcagacacagcauuucu

SEQ ID NO: 268049 - RNA, 19 nt, Homo sapiens
  misc_RNA (1)...(19): siRNA sense strand
gagaagcuggagggagauu

SEQ ID NO: 268050 - RNA, 19 nt, Homo sapiens
  misc_RNA (1)...(19): siRNA sense strand
gcagaugcugacggacuuu

SEQ ID NO: 268051 - RNA, 19 nt, Homo sapiens
  misc_RNA (1)...(19): siRNA sense strand
uggcuacacgcacagaauu

SEQ ID NO: 268052 - RNA, 19 nt, Homo sapiens
  misc_RNA (1)...(19): siRNA sense strand
ucagcaagaaugccuuugu

SEQ ID NO: 268053 - RNA, 19 nt, Homo sapiens
  misc_RNA (1)...(19): siRNA sense strand
gccugcugcuuucuacaga

SEQ ID NO: 268054 - RNA, 19 nt, Homo sapiens
  misc_RNA (1)...(19): siRNA sense strand
ccacaaaagccauucuuca

SEQ ID NO: 268055 - RNA, 19 nt, Homo sapiens
  misc_RNA (1)...(19): siRNA sense strand
ccaaggagcucuggcugua

SEQ ID NO: 268056 - RNA, 19 nt, Homo sapiens
  misc_RNA (1)...(19): siRNA sense strand
cagguuagaucugcaauuu

SEQ ID NO: 268057 - RNA, 19 nt, Homo sapiens
  misc_RNA (1)...(19): siRNA sense strand
ccacgacgcucucagaugu

SEQ ID NO: 268058 - RNA, 19 nt, Homo sapiens
  misc_RNA (1)...(19): siRNA sense strand
ucaaggaucugagccuaaa

SEQ ID NO: 268059 - RNA, 19 nt, Homo sapiens
  misc_RNA (1)...(19): siRNA sense strand
gguuagaucugcaauuucu

SEQ ID NO: 268060 - RNA, 19 nt, Homo sapiens
  misc_RNA (1)...(19): siRNA sense strand
cuacagagcugggcaugug

SEQ ID NO: 268061 - RNA, 19 nt, Homo sapiens
  misc_RNA (1)...(19): siRNA sense strand
gcacagaauugggcagcuu

SEQ ID NO: 268062 - RNA, 19 nt, Homo sapiens
  misc_RNA (1)...(19): siRNA sense strand
agagggagcugauguccaa

SEQ ID NO: 268063 - RNA, 19 nt, Homo sapiens
  misc_RNA (1)...(19): siRNA sense strand
gggagacgcuucuggacau

SEQ ID NO: 268064 - RNA, 19 nt, Homo sapiens
  misc_RNA (1)...(19): siRNA sense strand
gguggccucuggacgagua

SEQ ID NO: 268065 - RNA, 19 nt, Homo sapiens
  misc_RNA (1)...(19): siRNA sense strand
cagcaagaaugccuuugug

SEQ ID NO: 268066 - RNA, 19 nt, Homo sapiens
  misc_RNA (1)...(19): siRNA sense strand
acacagcauuucuccuuga

SEQ ID NO: 268067 - RNA, 19 nt, Homo sapiens
  misc_RNA (1)...(19): siRNA sense strand
gccaggacguggagcgauu

SEQ ID NO: 268068 - RNA, 19 nt, Homo sapiens
  misc_RNA (1)...(19): siRNA sense strand
ccagcaagcucaucaucuc

SEQ ID NO: 268069 - RNA, 19 nt, Homo sapiens
  misc_RNA (1)...(19): siRNA sense strand
caacaccuuugacuaucug

SEQ ID NO: 268070 - RNA, 19 nt, Homo sapiens
  misc_RNA (1)...(19): siRNA sense strand
agacacagcauuucuccuu

SEQ ID NO: 268071 - RNA, 19 nt, Homo sapiens
  misc_RNA (1)...(19): siRNA sense strand
gugagcaucuucggguauu

SEQ ID NO: 268072 - RNA, 19 nt, Homo sapiens
  misc_RNA (1)...(19): siRNA sense strand
cugcagauacugaagguuu

SEQ ID NO: 268073 - RNA, 19 nt, Homo sapiens
  misc_RNA (1)...(19): siRNA sense strand
ggagccugcugcuuucuac

SEQ ID NO: 268074 - RNA, 19 nt, Homo sapiens
  misc_RNA (1)...(19): siRNA sense strand
gcacccuggucagcaagaa

SEQ ID NO: 268075 - RNA, 19 nt, Homo sapiens
  misc_RNA (1)...(19): siRNA sense strand
gggagcugauguccaagga

SEQ ID NO: 268076 - RNA, 19 nt, Homo sapiens
  misc_RNA (1)...(19): siRNA sense strand
ugggcagcauccugaguua

SEQ ID NO: 268077 - RNA, 19 nt, Homo sapiens
  misc_RNA (1)...(19): siRNA sense strand
cugcagagacuccuucaga

SEQ ID NO: 268078 - RNA, 19 nt, Homo sapiens
  misc_RNA (1)...(19): siRNA sense strand
gccagcagacacagcauuu

SEQ ID NO: 268079 - RNA, 19 nt, Homo sapiens
  misc_RNA (1)...(19): siRNA sense strand
ggagacgcuucuggacaug

SEQ ID NO: 268080 - RNA, 19 nt, Homo sapiens
  misc_RNA (1)...(19): siRNA sense strand
ggucagcaagaaugccuuu

SEQ ID NO: 268081 - RNA, 19 nt, Homo sapiens
  misc_RNA (1)...(19): siRNA sense strand
ucaagcacaugcagauucg

SEQ ID NO: 268082 - RNA, 19 nt, Homo sapiens
  misc_RNA (1)...(19): siRNA sense strand
gcacuggcaagaccuccuu

SEQ ID NO: 268083 - RNA, 19 nt, Homo sapiens
  misc_RNA (1)...(19): siRNA sense strand
gugcuauuccugccacaaa

SEQ ID NO: 268084 - RNA, 19 nt, Homo sapiens
  misc_RNA (1)...(19): siRNA sense strand
cguucacccucgucuacua

SEQ ID NO: 268085 - RNA, 19 nt, Homo sapiens
  misc_RNA (1)...(19): siRNA sense strand
acaugucccugaagucaca

SEQ ID NO: 268086 - RNA, 19 nt, Homo sapiens
  misc_RNA (1)...(19): siRNA sense strand
gagcaucuucggguauuuc

SEQ ID NO: 268087 - RNA, 19 nt, Homo sapiens
  misc_RNA (1)...(19): siRNA sense strand
aaggagcucuggcuguaca

SEQ ID NO: 268088 - RNA, 19 nt, Homo sapiens
  misc_RNA (1)...(19): siRNA sense strand
augcggagccugcugcuuu

SEQ ID NO: 268089 - RNA, 19 nt, Homo sapiens
  misc_RNA (1)...(19): siRNA sense strand
gaagcuggagggagauuuu

SEQ ID NO: 268090 - RNA, 19 nt, Homo sapiens
  misc_RNA (1)...(19): siRNA sense strand
caucuucggguauuucauc

SEQ ID NO: 268091 - RNA, 19 nt, Homo sapiens
  misc_RNA (1)...(19): siRNA sense strand
gugugcaucuaccucauca

SEQ ID NO: 268092 - RNA, 19 nt, Homo sapiens
  misc_RNA (1)...(19): siRNA sense strand
uuagcacccuggucagcaa

SEQ ID NO: 268093 - RNA, 19 nt, Homo sapiens
  misc_RNA (1)...(19): siRNA sense strand
ugacaaaccccuaaucaag

SEQ ID NO: 268094 - RNA, 19 nt, Homo sapiens
  misc_RNA (1)...(19): siRNA sense strand
cagcagacacagcauuucu

SEQ ID NO: 268095 - RNA, 19 nt, Homo sapiens
  misc_RNA (1)...(19): siRNA sense strand
gagaagcuggagggagauu

SEQ ID NO: 268096 - RNA, 19 nt, Homo sapiens
  misc_RNA (1)...(19): siRNA sense strand
gcagaugcugacggacuuu

SEQ ID NO: 268097 - RNA, 19 nt, Homo sapiens
  misc_RNA (1)...(19): siRNA sense strand
uggcuacacgcacagaauu

SEQ ID NO: 268098 - RNA, 19 nt, Homo sapiens
  misc_RNA (1)...(19): siRNA sense strand
ucagcaagaaugccuuugu

SEQ ID NO: 268099 - RNA, 19 nt, Homo sapiens
  misc_RNA (1)...(19): siRNA sense strand
gccugcugcuuucuacaga

SEQ ID NO: 268100 - RNA, 19 nt, Homo sapiens
  misc_RNA (1)...(19): siRNA sense strand
ccacaaaagccauucuuca

SEQ ID NO: 268101 - RNA, 19 nt, Homo sapiens
  misc_RNA (1)...(19): siRNA sense strand
guaagaagauccacacuga

SEQ ID NO: 268102 - RNA, 19 nt, Homo sapiens
  misc_RNA (1)...(19): siRNA sense strand
gcaaugcacuggacgucua

SEQ ID NO: 268103 - RNA, 19 nt, Homo sapiens
  misc_RNA (1)...(19): siRNA sense strand
caaaggaugugguggagaa

SEQ ID NO: 268104 - RNA, 19 nt, Homo sapiens
  misc_RNA (1)...(19): siRNA sense strand
ggaugaagcuggugaugga

SEQ ID NO: 268105 - RNA, 19 nt, Homo sapiens
  misc_RNA (1)...(19): siRNA sense strand
gcaaaaugaucaagaauga

SEQ ID NO: 268106 - RNA, 19 nt, Homo sapiens
  misc_RNA (1)...(19): siRNA sense strand
ggacaaauggugcaucuau

SEQ ID NO: 268107 - RNA, 19 nt, Homo sapiens
  misc_RNA (1)...(19): siRNA sense strand
gcacuaugcuguugucucu

SEQ ID NO: 268108 - RNA, 19 nt, Homo sapiens
  misc_RNA (1)...(19): siRNA sense strand
ccaaagccaucaauuucaa

SEQ ID NO: 268109 - RNA, 19 nt, Homo sapiens
  misc_RNA (1)...(19): siRNA sense strand
ccacggcucuuuacacuca

SEQ ID NO: 268110 - RNA, 19 nt, Homo sapiens
  misc_RNA (1)...(19): siRNA sense strand
ccaauggaauccugcauau

SEQ ID NO: 268111 - RNA, 19 nt, Homo sapiens
  misc_RNA (1)...(19): siRNA sense strand
ugaggugccugguggauuu

SEQ ID NO: 268112 - RNA, 19 nt, Homo sapiens
  misc_RNA (1)...(19): siRNA sense strand
gcgcugcccuugaguaugu

SEQ ID NO: 268113 - RNA, 19 nt, Homo sapiens
  misc_RNA (1)...(19): siRNA sense strand
gaagugggcagauggcaaa

SEQ ID NO: 268114 - RNA, 19 nt, Homo sapiens
  misc_RNA (1)...(19): siRNA sense strand
cuaccgggauccuguuaua

SEQ ID NO: 268115 - RNA, 19 nt, Homo sapiens
  misc_RNA (1)...(19): siRNA sense strand
ggagccacaucuucuagaa

SEQ ID NO: 268116 - RNA, 19 nt, Homo sapiens
  misc_RNA (1)...(19): siRNA sense strand
gagcucaaaggccauaaua

SEQ ID NO: 268117 - RNA, 19 nt, Homo sapiens
  misc_RNA (1)...(19): siRNA sense strand
cuacacaccuuacaaaguc

SEQ ID NO: 268118 - RNA, 19 nt, Homo sapiens
  misc_RNA (1)...(19): siRNA sense strand
gauggaggauggcaagaug

SEQ ID NO: 268119 - RNA, 19 nt, Homo sapiens
  misc_RNA (1)...(19): siRNA sense strand
gauggacccuguagccuau

SEQ ID NO: 268120 - RNA, 19 nt, Homo sapiens
  misc_RNA (1)...(19): siRNA sense strand
gaaggaagacccaggaaag

SEQ ID NO: 268121 - RNA, 19 nt, Homo sapiens
  misc_RNA (1)...(19): siRNA sense strand
ucauugagcugcagcaugu

SEQ ID NO: 268122 - RNA, 19 nt, Homo sapiens
  misc_RNA (1)...(19): siRNA sense strand
ggaagauccuccagcuugu

SEQ ID NO: 268123 - RNA, 19 nt, Homo sapiens
  misc_RNA (1)...(19): siRNA sense strand
gcauacaggcuacgucauu

SEQ ID NO: 268124 - RNA, 19 nt, Homo sapiens
  misc_RNA (1)...(19): siRNA sense strand
gcacaagaacccugaagau

SEQ ID NO: 268125 - RNA, 19 nt, Homo sapiens
  misc_RNA (1)...(19): siRNA sense strand
gcuaagcgcugcccuugag

SEQ ID NO: 268126 - RNA, 19 nt, Homo sapiens
  misc_RNA (1)...(19): siRNA sense strand
ucacauaugcgucugacua

SEQ ID NO: 268127 - RNA, 19 nt, Homo sapiens
  misc_RNA (1)...(19): siRNA sense strand
gguggaacguuaccauuuc

SEQ ID NO: 268128 - RNA, 19 nt, Homo sapiens
  misc_RNA (1)...(19): siRNA sense strand
gcgagacgcucaagaacuc

SEQ ID NO: 268129 - RNA, 19 nt, Homo sapiens
  misc_RNA (1)...(19): siRNA sense strand
aggcugaucuggagaagaa

SEQ ID NO: 268130 - RNA, 19 nt, Homo sapiens
  misc_RNA (1)...(19): siRNA sense strand
ccacaagccuggugagaac

SEQ ID NO: 268131 - RNA, 19 nt, Homo sapiens
  misc_RNA (1)...(19): siRNA sense strand
cauaugcgucugacuauuu

SEQ ID NO: 268132 - RNA, 19 nt, Homo sapiens
  misc_RNA (1)...(19): siRNA sense strand
gaaggaggaagcaaaguuc

SEQ ID NO: 268133 - RNA, 19 nt, Homo sapiens
  misc_RNA (1)...(19): siRNA sense strand
ggagagaccgucccaugga

SEQ ID NO: 268134 - RNA, 19 nt, Homo sapiens
  misc_RNA (1)...(19): siRNA sense strand
ugagaggacugacuucaag

SEQ ID NO: 268135 - RNA, 19 nt, Homo sapiens
  misc_RNA (1)...(19): siRNA sense strand
cuacauagccaguaagaag

SEQ ID NO: 268136 - RNA, 19 nt, Homo sapiens
  misc_RNA (1)...(19): siRNA sense strand
gaagauccuccagcuugua

SEQ ID NO: 268137 - RNA, 19 nt, Homo sapiens
  misc_RNA (1)...(19): siRNA sense strand
ccaugaaucuacuaaagca

SEQ ID NO: 268138 - RNA, 19 nt, Homo sapiens
  misc_RNA (1)...(19): siRNA sense strand
gaacguuaccauuucaaca

SEQ ID NO: 268139 - RNA, 19 nt, Homo sapiens
  misc_RNA (1)...(19): siRNA sense strand
caccaugaaucuacuaaag

SEQ ID NO: 268140 - RNA, 19 nt, Homo sapiens
  misc_RNA (1)...(19): siRNA sense strand
gaugacccacggcucuuua

SEQ ID NO: 268141 - RNA, 19 nt, Homo sapiens
  misc_RNA (1)...(19): siRNA sense strand
aauggaauccugcauauug

SEQ ID NO: 268142 - RNA, 19 nt, Homo sapiens
  misc_RNA (1)...(19): siRNA sense strand
agccaucaauuucaacuuu

SEQ ID NO: 268143 - RNA, 19 nt, Homo sapiens
  misc_RNA (1)...(19): siRNA sense strand
acuaugcuguugucucuaa

SEQ ID NO: 268144 - RNA, 19 nt, Homo sapiens
  misc_RNA (1)...(19): siRNA sense strand
gacaaauggugcaucuauc

SEQ ID NO: 268145 - RNA, 19 nt, Homo sapiens
  misc_RNA (1)...(19): siRNA sense strand
gcucaaaggccauaauacu

SEQ ID NO: 268146 - RNA, 19 nt, Homo sapiens
  misc_RNA (1)...(19): siRNA sense strand
aagcagcaccuggagauua

SEQ ID NO: 268147 - RNA, 19 nt, Homo sapiens
  misc_RNA (1)...(19): siRNA sense strand
cccauugucuucauugaga

SEQ ID NO: 268148 - RNA, 19 nt, Homo sapiens
  misc_RNA (1)...(19): siRNA sense strand
ggagccagagccaggauuu

SEQ ID NO: 268149 - RNA, 19 nt, Homo sapiens
  misc_RNA (1)...(19): siRNA sense strand
caagaacccugaagauccu

SEQ ID NO: 268150 - RNA, 19 nt, Homo sapiens
  misc_RNA (1)...(19): siRNA sense strand
agaaugaaguggacaugca

SEQ ID NO: 268151 - RNA, 19 nt, Homo sapiens
  misc_RNA (1)...(19): siRNA sense strand
ucgacaaguuccaguuuga

SEQ ID NO: 268152 - RNA, 19 nt, Homo sapiens
  misc_RNA (1)...(19): siRNA sense strand
cgucucuccuuccuuguaa

SEQ ID NO: 268153 - RNA, 19 nt, Homo sapiens
  misc_RNA (1)...(19): siRNA sense strand
gcaggggucuggcuuaugu

SEQ ID NO: 268154 - RNA, 19 nt, Homo sapiens
  misc_RNA (1)...(19): siRNA sense strand
ggcaaaagcucggcuagaa

SEQ ID NO: 268155 - RNA, 19 nt, Homo sapiens
  misc_RNA (1)...(19): siRNA sense strand
caucgacacuguggacuuc

SEQ ID NO: 268156 - RNA, 19 nt, Homo sapiens
  misc_RNA (1)...(19): siRNA sense strand
gccaucaauuucaacuuug

SEQ ID NO: 268157 - RNA, 19 nt, Homo sapiens
  misc_RNA (1)...(19): siRNA sense strand
uaaagcagcaccuggagau

SEQ ID NO: 268158 - RNA, 19 nt, Homo sapiens
  misc_RNA (1)...(19): siRNA sense strand
gaacugucacacugaagga

SEQ ID NO: 268159 - RNA, 19 nt, Homo sapiens
  misc_RNA (1)...(19): siRNA sense strand
cauacaggcuacgucauug

SEQ ID NO: 268160 - RNA, 19 nt, Homo sapiens
  misc_RNA (1)...(19): siRNA sense strand
ggucaucaucaccaacuuu

SEQ ID NO: 268161 - RNA, 19 nt, Homo sapiens
  misc_RNA (1)...(19): siRNA sense strand
agucacugcugcucuuuga

SEQ ID NO: 268162 - RNA, 19 nt, Homo sapiens
  misc_RNA (1)...(19): siRNA sense strand
gagccagagccaggauuua

SEQ ID NO: 268163 - RNA, 19 nt, Homo sapiens
  misc_RNA (1)...(19): siRNA sense strand
cucaagaacucggcucuga

SEQ ID NO: 268164 - RNA, 19 nt, Homo sapiens
  misc_RNA (1)...(19): siRNA sense strand
ugcgugaugugcugaauga

SEQ ID NO: 268165 - RNA, 19 nt, Homo sapiens
  misc_RNA (1)...(19): siRNA sense strand
ccacacaccaugaaucuac

SEQ ID NO: 268166 - RNA, 19 nt, Homo sapiens
  misc_RNA (1)...(19): siRNA sense strand
gggaggcccuuaaguucca

SEQ ID NO: 268167 - RNA, 19 nt, Homo sapiens
  misc_RNA (1)...(19): siRNA sense strand
gcaaaacccuucgacaagu

SEQ ID NO: 268168 - RNA, 19 nt, Homo sapiens
  misc_RNA (1)...(19): siRNA sense strand
caaaggcuuccaucagguu

SEQ ID NO: 268169 - RNA, 19 nt, Homo sapiens
  misc_RNA (1)...(19): siRNA sense strand
ggacuucgagcgggaaugu

SEQ ID NO: 268170 - RNA, 19 nt, Homo sapiens
  misc_RNA (1)...(19): siRNA sense strand
gcaucuaucccaccuacga

SEQ ID NO: 268171 - RNA, 19 nt, Homo sapiens
  misc_RNA (1)...(19): siRNA sense strand
gaggagaggagcucaaagg

SEQ ID NO: 268172 - RNA, 19 nt, Homo sapiens
  misc_RNA (1)...(19): siRNA sense strand
gccaaagccaucaauuuca

SEQ ID NO: 268173 - RNA, 19 nt, Homo sapiens
  misc_RNA (1)...(19): siRNA sense strand
ggcagaugcuggagagaag

SEQ ID NO: 268174 - RNA, 19 nt, Homo sapiens
  misc_RNA (1)...(19): siRNA sense strand
ggaggacggcaaaggaugu

SEQ ID NO: 268175 - RNA, 19 nt, Homo sapiens
  misc_RNA (1)...(19): siRNA sense strand
gaaccuggcaucacuacac

SEQ ID NO: 268176 - RNA, 19 nt, Homo sapiens
  misc_RNA (1)...(19): siRNA sense strand
ucaaaggccauaauacucu

SEQ ID NO: 268177 - RNA, 19 nt, Homo sapiens
  misc_RNA (1)...(19): siRNA sense strand
gcuacacaccuuacaaagu

SEQ ID NO: 268178 - RNA, 19 nt, Homo sapiens
  misc_RNA (1)...(19): siRNA sense strand
ggacaugccaaagccauca

SEQ ID NO: 268179 - RNA, 19 nt, Homo sapiens
  misc_RNA (1)...(19): siRNA sense strand
guggaacguuaccauuuca

SEQ ID NO: 268180 - RNA, 19 nt, Homo sapiens
  misc_RNA (1)...(19): siRNA sense strand
gggcagaugcuggagagaa

SEQ ID NO: 268181 - RNA, 19 nt, Homo sapiens
  misc_RNA (1)...(19): siRNA sense strand
caccugaggccaucaacaa

SEQ ID NO: 268182 - RNA, 19 nt, Homo sapiens
  misc_RNA (1)...(19): siRNA sense strand
ccgacgcucuuccuacuuc

SEQ ID NO: 268183 - RNA, 19 nt, Homo sapiens
  misc_RNA (1)...(19): siRNA sense strand
gaauguggcguggguguca

SEQ ID NO: 268184 - RNA, 19 nt, Homo sapiens
  misc_RNA (1)...(19): siRNA sense strand
uagccuaucgagucaagua

SEQ ID NO: 268185 - RNA, 19 nt, Homo sapiens
  misc_RNA (1)...(19): siRNA sense strand
agaaggaggaagcaaaguu

SEQ ID NO: 268186 - RNA, 19 nt, Homo sapiens
  misc_RNA (1)...(19): siRNA sense strand
acaccaacccugagaagga

SEQ ID NO: 268187 - RNA, 19 nt, Homo sapiens
  misc_RNA (1)...(19): siRNA sense strand
caauuucaacuuuggcuau

SEQ ID NO: 268188 - RNA, 19 nt, Homo sapiens
  misc_RNA (1)...(19): siRNA sense strand
gugcugaagugggcagaug

SEQ ID NO: 268189 - RNA, 19 nt, Homo sapiens
  misc_RNA (1)...(19): siRNA sense strand
ugaaggaagacccaggaaa

SEQ ID NO: 268190 - RNA, 19 nt, Homo sapiens
  misc_RNA (1)...(19): siRNA sense strand
uugagcgucuuggauauuu

SEQ ID NO: 268191 - RNA, 19 nt, Homo sapiens
  misc_RNA (1)...(19): siRNA sense strand
caaaacccuucgacaaguu

SEQ ID NO: 268192 - RNA, 19 nt, Homo sapiens
  misc_RNA (1)...(19): siRNA sense strand
gcacccauugucuucauug

SEQ ID NO: 268193 - RNA, 19 nt, Homo sapiens
  misc_RNA (1)...(19): siRNA sense strand
gaccaaaggcuuccaucag

SEQ ID NO: 268194 - RNA, 19 nt, Homo sapiens
  misc_RNA (1)...(19): siRNA sense strand
gcgaggagaggagcucaaa

SEQ ID NO: 268195 - RNA, 19 nt, Homo sapiens
  misc_RNA (1)...(19): siRNA sense strand
gaugacaccaacccugaga

SEQ ID NO: 268196 - RNA, 19 nt, Homo sapiens
  misc_RNA (1)...(19): siRNA sense strand
ugccaaagccaucaauuuc

SEQ ID NO: 268197 - RNA, 19 nt, Homo sapiens
  misc_RNA (1)...(19): siRNA sense strand
gauuacuggugggcaggua

SEQ ID NO: 268198 - RNA, 19 nt, Homo sapiens
  misc_RNA (1)...(19): siRNA sense strand
gcuguggaggcugcuauua

SEQ ID NO: 268199 - RNA, 19 nt, Homo sapiens
  misc_RNA (1)...(19): siRNA sense strand
caccuuacaaagucacaua

SEQ ID NO: 268200 - RNA, 19 nt, Homo sapiens
  misc_RNA (1)...(19): siRNA sense strand
uggcuaggcuacacaccuu

SEQ ID NO: 268201 - RNA, 19 nt, Homo sapiens
  misc_RNA (1)...(19): siRNA sense strand
gaacuuugaugacgaguga

SEQ ID NO: 268202 - RNA, 19 nt, Homo sapiens
  misc_RNA (1)...(19): siRNA sense strand
ggacagaaacucaucuaug

SEQ ID NO: 268203 - RNA, 19 nt, Homo sapiens
  misc_RNA (1)...(19): siRNA sense strand
gacagaaacucaucuaugc

SEQ ID NO: 268204 - RNA, 19 nt, Homo sapiens
  misc_RNA (1)...(19): siRNA sense strand
gaagauagaagcugagaag

SEQ ID NO: 268205 - RNA, 19 nt, Homo sapiens
  misc_RNA (1)...(19): siRNA sense strand
ggagaacccucagcuuuua

SEQ ID NO: 268206 - RNA, 19 nt, Homo sapiens
  misc_RNA (1)...(19): siRNA sense strand
ggagaaagaagcuauagag

SEQ ID NO: 268207 - RNA, 19 nt, Homo sapiens
  misc_RNA (1)...(19): siRNA sense strand
caggagaacccucagcuuu

SEQ ID NO: 268208 - RNA, 19 nt, Homo sapiens
  misc_RNA (1)...(19): siRNA sense strand
ugaaggugcuaaaggagaa

SEQ ID NO: 268209 - RNA, 19 nt, Homo sapiens
  misc_RNA (1)...(19): siRNA sense strand
ugacggagaucauguccau

SEQ ID NO: 268210 - RNA, 19 nt, Homo sapiens
  misc_RNA (1)...(19): siRNA sense strand
gaacaugcggcaggugauu

SEQ ID NO: 268211 - RNA, 19 nt, Homo sapiens
  misc_RNA (1)...(19): siRNA sense strand
gagaaagaagcuauagaga

SEQ ID NO: 268212 - RNA, 19 nt, Homo sapiens
  misc_RNA (1)...(19): siRNA sense strand
gcaggagaaagaagcuaua

SEQ ID NO: 268213 - RNA, 19 nt, Homo sapiens
  misc_RNA (1)...(19): siRNA sense strand
gaucuugagugacgauguc

SEQ ID NO: 268214 - RNA, 19 nt, Homo sapiens
  misc_RNA (1)...(19): siRNA sense strand
caagagcccaucagaggaa

SEQ ID NO: 268215 - RNA, 19 nt, Homo sapiens
  misc_RNA (1)...(19): siRNA sense strand
ucuguucccucuucaggua

SEQ ID NO: 268216 - RNA, 19 nt, Homo sapiens
  misc_RNA (1)...(19): siRNA sense strand
ccaacuuccuccugaguca

SEQ ID NO: 268217 - RNA, 19 nt, Homo sapiens
  misc_RNA (1)...(19): siRNA sense strand
gaacuuuguggucgucaug

SEQ ID NO: 268218 - RNA, 19 nt, Homo sapiens
  misc_RNA (1)...(19): siRNA sense strand
ggaagcagcaggagagaac

SEQ ID NO: 268219 - RNA, 19 nt, Homo sapiens
  misc_RNA (1)...(19): siRNA sense strand
agacgaugcugacggagau

SEQ ID NO: 268220 - RNA, 19 nt, Homo sapiens
  misc_RNA (1)...(19): siRNA sense strand
gaagcuauagagagguuga

SEQ ID NO: 268221 - RNA, 19 nt, Homo sapiens
  misc_RNA (1)...(19): siRNA sense strand
ggcaggugauucagcagaa

SEQ ID NO: 268222 - RNA, 19 nt, Homo sapiens
  misc_RNA (1)...(19): siRNA sense strand
cggugaaggugcuaaagga

SEQ ID NO: 268223 - RNA, 19 nt, Homo sapiens
  misc_RNA (1)...(19): siRNA sense strand
aagaagcuauagagagguu

SEQ ID NO: 268224 - RNA, 19 nt, Homo sapiens
  misc_RNA (1)...(19): siRNA sense strand
ggagcuggcggacaucuca

SEQ ID NO: 268225 - RNA, 19 nt, Homo sapiens
  misc_RNA (1)...(19): siRNA sense strand
ugagucagaacuuugauga

SEQ ID NO: 268226 - RNA, 19 nt, Homo sapiens
  misc_RNA (1)...(19): siRNA sense strand
gagugacgaugucccuauc

SEQ ID NO: 268227 - RNA, 19 nt, Homo sapiens
  misc_RNA (1)...(19): siRNA sense strand
gcagcagaccuucaagauc

SEQ ID NO: 268228 - RNA, 19 nt, Homo sapiens
  misc_RNA (1)...(19): siRNA sense strand
gagaagauagaagcugaga

SEQ ID NO: 268229 - RNA, 19 nt, Homo sapiens
  misc_RNA (1)...(19): siRNA sense strand
ugacgccgcaggagaaaga

SEQ ID NO: 268230 - RNA, 19 nt, Homo sapiens
  misc_RNA (1)...(19): siRNA sense strand
gcuaaaggagaagauagaa

SEQ ID NO: 268231 - RNA, 19 nt, Homo sapiens
  misc_RNA (1)...(19): siRNA sense strand
ugacgggcucugaguauga

SEQ ID NO: 268232 - RNA, 19 nt, Homo sapiens
  misc_RNA (1)...(19): siRNA sense strand
gcugagaagggucgugaug

SEQ ID NO: 268233 - RNA, 19 nt, Homo sapiens
  misc_RNA (1)...(19): siRNA sense strand
ggucauccaggccuauuuc

SEQ ID NO: 268234 - RNA, 19 nt, Homo sapiens
  misc_RNA (1)...(19): siRNA sense strand
cagagagccuggucaucca

SEQ ID NO: 268235 - RNA, 19 nt, Homo sapiens
  misc_RNA (1)...(19): siRNA sense strand
gcaucgaugagaagaacuu

SEQ ID NO: 268236 - RNA, 19 nt, Homo sapiens
  misc_RNA (1)...(19): siRNA sense strand
gugacgggcucugaguaug

SEQ ID NO: 268237 - RNA, 19 nt, Homo sapiens
  misc_RNA (1)...(19): siRNA sense strand
gcucugaguaugagacgau

SEQ ID NO: 268238 - RNA, 19 nt, Homo sapiens
  misc_RNA (1)...(19): siRNA sense strand
ucgaugagaagaacuuugu

SEQ ID NO: 268239 - RNA, 19 nt, Homo sapiens
  misc_RNA (1)...(19): siRNA sense strand
ggugcuaaaggagaagaua

SEQ ID NO: 268240 - RNA, 19 nt, Homo sapiens
  misc_RNA (1)...(19): siRNA sense strand
cagcagcagaccuucaaga

SEQ ID NO: 268241 - RNA, 19 nt, Homo sapiens
  misc_RNA (1)...(19): siRNA sense strand
caggcucuguucccucuuc

SEQ ID NO: 268242 - RNA, 19 nt, Homo sapiens
  misc_RNA (1)...(19): siRNA sense strand
aggccuauuucgcguguga

SEQ ID NO: 268243 - RNA, 19 nt, Homo sapiens
  misc_RNA (1)...(19): siRNA sense strand
ugagugacgaugucccuau

SEQ ID NO: 268244 - RNA, 19 nt, Homo sapiens
  misc_RNA (1)...(19): siRNA sense strand
gcaggugauucagcagaac

SEQ ID NO: 268245 - RNA, 19 nt, Homo sapiens
  misc_RNA (1)...(19): siRNA sense strand
gaaauuaucugacaaagac

SEQ ID NO: 268246 - RNA, 19 nt, Homo sapiens
  misc_RNA (1)...(19): siRNA sense strand
gagaauuacuggaaaguuu

SEQ ID NO: 268247 - RNA, 19 nt, Homo sapiens
  misc_RNA (1)...(19): siRNA sense strand
ggagaaguguucauuauug

SEQ ID NO: 268248 - RNA, 19 nt, Homo sapiens
  misc_RNA (1)...(19): siRNA sense strand
caagaagaaugcagaaauu

SEQ ID NO: 268249 - RNA, 19 nt, Homo sapiens
  misc_RNA (1)...(19): siRNA sense strand
gaagauggauggaauaaac

SEQ ID NO: 268250 - RNA, 19 nt, Homo sapiens
  misc_RNA (1)...(19): siRNA sense strand
uugcaaagcuguauuauga

SEQ ID NO: 268251 - RNA, 19 nt, Homo sapiens
  misc_RNA (1)...(19): siRNA sense strand
guaaacagcuuuguacaga

SEQ ID NO: 268252 - RNA, 19 nt, Homo sapiens
  misc_RNA (1)...(19): siRNA sense strand
agaaagccguugaauguua

SEQ ID NO: 268253 - RNA, 19 nt, Homo sapiens
  misc_RNA (1)...(19): siRNA sense strand
aaccagagcuugaagauuu

SEQ ID NO: 268254 - RNA, 19 nt, Homo sapiens
  misc_RNA (1)...(19): siRNA sense strand
gaagaagacgcacacauaa

SEQ ID NO: 268255 - RNA, 19 nt, Homo sapiens
  misc_RNA (1)...(19): siRNA sense strand
gcagcggucuuaauucuuu

SEQ ID NO: 268256 - RNA, 19 nt, Homo sapiens
  misc_RNA (1)...(19): siRNA sense strand
gaauuaaacccaacacaaa

SEQ ID NO: 268257 - RNA, 19 nt, Homo sapiens
  misc_RNA (1)...(19): siRNA sense strand
gaucggaauucuuuacuga

SEQ ID NO: 268258 - RNA, 19 nt, Homo sapiens
  misc_RNA (1)...(19): siRNA sense strand
ucccaaagcucacagauuu

SEQ ID NO: 268259 - RNA, 19 nt, Homo sapiens
  misc_RNA (1)...(19): siRNA sense strand
aggaauaucuggagucuuu

SEQ ID NO: 268260 - RNA, 19 nt, Homo sapiens
  misc_RNA (1)...(19): siRNA sense strand
gcaggaaaauagagaauua

SEQ ID NO: 268261 - RNA, 19 nt, Homo sapiens
  misc_RNA (1)...(19): siRNA sense strand
gaccagggacuaccuaaua

SEQ ID NO: 268262 - RNA, 19 nt, Homo sapiens
  misc_RNA (1)...(19): siRNA sense strand
ggaauucauugccugcuuu

SEQ ID NO: 268263 - RNA, 19 nt, Homo sapiens
  misc_RNA (1)...(19): siRNA sense strand
gaagaacaguauuccugaa

SEQ ID NO: 268264 - RNA, 19 nt, Homo sapiens
  misc_RNA (1)...(19): siRNA sense strand
gaauaugauuugccaacaa

SEQ ID NO: 268265 - RNA, 19 nt, Homo sapiens
  misc_RNA (1)...(19): siRNA sense strand
ugaagaagacgcacacaua

SEQ ID NO: 268266 - RNA, 19 nt, Homo sapiens
  misc_RNA (1)...(19): siRNA sense strand
cgacagaagucaaugaaag

SEQ ID NO: 268267 - RNA, 19 nt, Homo sapiens
  misc_RNA (1)...(19): siRNA sense strand
agaaagaaaugcaggaguu

SEQ ID NO: 268268 - RNA, 19 nt, Homo sapiens
  misc_RNA (1)...(19): siRNA sense strand
aaacagcuuuguacagaaa

SEQ ID NO: 268269 - RNA, 19 nt, Homo sapiens
  misc_RNA (1)...(19): siRNA sense strand
gcaaagcuguauuaugaag

SEQ ID NO: 268270 - RNA, 19 nt, Homo sapiens
  misc_RNA (1)...(19): siRNA sense strand
gcacauguugcuaagcuua

SEQ ID NO: 268271 - RNA, 19 nt, Homo sapiens
  misc_RNA (1)...(19): siRNA sense strand
caaaugcgccugaaucaau

SEQ ID NO: 268272 - RNA, 19 nt, Homo sapiens
  misc_RNA (1)...(19): siRNA sense strand
aggaacagcuucuagauug

SEQ ID NO: 268273 - RNA, 19 nt, Homo sapiens
  misc_RNA (1)...(19): siRNA sense strand
uacagacccuuaaggaaua

SEQ ID NO: 268274 - RNA, 19 nt, Homo sapiens
  misc_RNA (1)...(19): siRNA sense strand
guacagacccuuaaggaau

SEQ ID NO: 268275 - RNA, 19 nt, Homo sapiens
  misc_RNA (1)...(19): siRNA sense strand
ggaauuaaacccaacacaa

SEQ ID NO: 268276 - RNA, 19 nt, Homo sapiens
  misc_RNA (1)...(19): siRNA sense strand
guuccaagaccaaagauua

SEQ ID NO: 268277 - RNA, 19 nt, Homo sapiens
  misc_RNA (1)...(19): siRNA sense strand
gaaguccugcaauuuauaa

SEQ ID NO: 268278 - RNA, 19 nt, Homo sapiens
  misc_RNA (1)...(19): siRNA sense strand
gaaacuaaauagcaguaag

SEQ ID NO: 268279 - RNA, 19 nt, Homo sapiens
  misc_RNA (1)...(19): siRNA sense strand
caaaauaccuucagaaaac

SEQ ID NO: 268280 - RNA, 19 nt, Homo sapiens
  misc_RNA (1)...(19): siRNA sense strand
guuauaugaugcucuguuu

SEQ ID NO: 268281 - RNA, 19 nt, Homo sapiens
  misc_RNA (1)...(19): siRNA sense strand
agagaaagccguugaaugu

SEQ ID NO: 268282 - RNA, 19 nt, Homo sapiens
  misc_RNA (1)...(19): siRNA sense strand
gaagaaugcagaaauuauc

SEQ ID NO: 268283 - RNA, 19 nt, Homo sapiens
  misc_RNA (1)...(19): siRNA sense strand
gaaauguaauucucaccau

SEQ ID NO: 268284 - RNA, 19 nt, Homo sapiens
  misc_RNA (1)...(19): siRNA sense strand
gauuauagaugacggugau

SEQ ID NO: 268285 - RNA, 19 nt, Homo sapiens
  misc_RNA (1)...(19): siRNA sense strand
gaagauugcagaauugcuu

SEQ ID NO: 268286 - RNA, 19 nt, Homo sapiens
  misc_RNA (1)...(19): siRNA sense strand
gaagaaaguuuugccauug

SEQ ID NO: 268287 - RNA, 19 nt, Homo sapiens
  misc_RNA (1)...(19): siRNA sense strand
ggaaguccugcaauuuaua

SEQ ID NO: 268288 - RNA, 19 nt, Homo sapiens
  misc_RNA (1)...(19): siRNA sense strand
gaacaagaagaaugcagaa

SEQ ID NO: 268289 - RNA, 19 nt, Homo sapiens
  misc_RNA (1)...(19): siRNA sense strand
ggaagaaaguuuugccauu

SEQ ID NO: 268290 - RNA, 19 nt, Homo sapiens
  misc_RNA (1)...(19): siRNA sense strand
aaaugcgccugaaucaaua

SEQ ID NO: 268291 - RNA, 19 nt, Homo sapiens
  misc_RNA (1)...(19): siRNA sense strand
acugucagcuacuuucuua

SEQ ID NO: 268292 - RNA, 19 nt, Homo sapiens
  misc_RNA (1)...(19): siRNA sense strand
gcuaaucuuaugcuucuua

SEQ ID NO: 268293 - RNA, 19 nt, Homo sapiens
  misc_RNA (1)...(19): siRNA sense strand
gcacauaaugguagucuuc

SEQ ID NO: 268294 - RNA, 19 nt, Homo sapiens
  misc_RNA (1)...(19): siRNA sense strand
caaguauucucccgaaaca

SEQ ID NO: 268295 - RNA, 19 nt, Homo sapiens
  misc_RNA (1)...(19): siRNA sense strand
gaaaugcagauucagaaau

SEQ ID NO: 268296 - RNA, 19 nt, Homo sapiens
  misc_RNA (1)...(19): siRNA sense strand
gggacuaccuaauaaagau

SEQ ID NO: 268297 - RNA, 19 nt, Homo sapiens
  misc_RNA (1)...(19): siRNA sense strand
gcgccugaaucaauaugua

SEQ ID NO: 268298 - RNA, 19 nt, Homo sapiens
  misc_RNA (1)...(19): siRNA sense strand
gaaagccguugaauguuac

SEQ ID NO: 268299 - RNA, 19 nt, Homo sapiens
  misc_RNA (1)...(19): siRNA sense strand
gaaggcagaagacauugaa

SEQ ID NO: 268300 - RNA, 19 nt, Homo sapiens
  misc_RNA (1)...(19): siRNA sense strand
uugaagauuuggcuagaua

SEQ ID NO: 268301 - RNA, 19 nt, Homo sapiens
  misc_RNA (1)...(19): siRNA sense strand
gaagaugggucagcauggu

SEQ ID NO: 268302 - RNA, 19 nt, Homo sapiens
  misc_RNA (1)...(19): siRNA sense strand
gggcagcggucuuaauucu

SEQ ID NO: 268303 - RNA, 19 nt, Homo sapiens
  misc_RNA (1)...(19): siRNA sense strand
uaccagccacuuacaauua

SEQ ID NO: 268304 - RNA, 19 nt, Homo sapiens
  misc_RNA (1)...(19): siRNA sense strand
gagaaguguucauuauugg

SEQ ID NO: 268305 - RNA, 19 nt, Homo sapiens
  misc_RNA (1)...(19): siRNA sense strand
ggacagaagaucggaauuc

SEQ ID NO: 268306 - RNA, 19 nt, Homo sapiens
  misc_RNA (1)...(19): siRNA sense strand
agaagucaaugaaaggauu

SEQ ID NO: 268307 - RNA, 19 nt, Homo sapiens
  misc_RNA (1)...(19): siRNA sense strand
uagaggccauuaagaaaga

SEQ ID NO: 268308 - RNA, 19 nt, Homo sapiens
  misc_RNA (1)...(19): siRNA sense strand
gaaguguucauuauuggaa

SEQ ID NO: 268309 - RNA, 19 nt, Homo sapiens
  misc_RNA (1)...(19): siRNA sense strand
gacaaaaucugcuggaaau

SEQ ID NO: 268310 - RNA, 19 nt, Homo sapiens
  misc_RNA (1)...(19): siRNA sense strand
uugcagaauugcuuuguaa

SEQ ID NO: 268311 - RNA, 19 nt, Homo sapiens
  misc_RNA (1)...(19): siRNA sense strand
guugaagauugcagaauug

SEQ ID NO: 268312 - RNA, 19 nt, Homo sapiens
  misc_RNA (1)...(19): siRNA sense strand
ggaacagcuucuagauugu

SEQ ID NO: 268313 - RNA, 19 nt, Homo sapiens
  misc_RNA (1)...(19): siRNA sense strand
caccgucuccuaccaaaua

SEQ ID NO: 268314 - RNA, 19 nt, Homo sapiens
  misc_RNA (1)...(19): siRNA sense strand
uauguuggaugcaguaaau

SEQ ID NO: 268315 - RNA, 19 nt, Homo sapiens
  misc_RNA (1)...(19): siRNA sense strand
cuauugauccucuguuuaa

SEQ ID NO: 268316 - RNA, 19 nt, Homo sapiens
  misc_RNA (1)...(19): siRNA sense strand
gaaaagcaguaccuggaaa

SEQ ID NO: 268317 - RNA, 19 nt, Homo sapiens
  misc_RNA (1)...(19): siRNA sense strand
gaguggaauucguguguug

SEQ ID NO: 268318 - RNA, 19 nt, Homo sapiens
  misc_RNA (1)...(19): siRNA sense strand
uaaaggaacagcuucuaga

SEQ ID NO: 268319 - RNA, 19 nt, Homo sapiens
  misc_RNA (1)...(19): siRNA sense strand
cgaagacuauagugaagga

SEQ ID NO: 268320 - RNA, 19 nt, Homo sapiens
  misc_RNA (1)...(19): siRNA sense strand
ugaaguauuucuccuugga

SEQ ID NO: 268321 - RNA, 19 nt, Homo sapiens
  misc_RNA (1)...(19): siRNA sense strand
gaagguaaagcuggacaaa

SEQ ID NO: 268322 - RNA, 19 nt, Homo sapiens
  misc_RNA (1)...(19): siRNA sense strand
uuucugagcuggcugcauu

SEQ ID NO: 268323 - RNA, 19 nt, Homo sapiens
  misc_RNA (1)...(19): siRNA sense strand
gucagaacuuuauguaaga

SEQ ID NO: 268324 - RNA, 19 nt, Homo sapiens
  misc_RNA (1)...(19): siRNA sense strand
gaaagaaaugcaggaguug

SEQ ID NO: 268325 - RNA, 19 nt, Homo sapiens
  misc_RNA (1)...(19): siRNA sense strand
gcaguaaauggaaauauag

SEQ ID NO: 268326 - RNA, 19 nt, Homo sapiens
  misc_RNA (1)...(19): siRNA sense strand
gaugaacugucagcuacuu

SEQ ID NO: 268327 - RNA, 19 nt, Homo sapiens
  misc_RNA (1)...(19): siRNA sense strand
gaauucauugccugcuuua

SEQ ID NO: 268328 - RNA, 19 nt, Homo sapiens
  misc_RNA (1)...(19): siRNA sense strand
caacaaguagaggccauua

SEQ ID NO: 268329 - RNA, 19 nt, Homo sapiens
  misc_RNA (1)...(19): siRNA sense strand
gcaggaacucgaagacuau

SEQ ID NO: 268330 - RNA, 19 nt, Homo sapiens
  misc_RNA (1)...(19): siRNA sense strand
uaaacagcuuuguacagaa

SEQ ID NO: 268331 - RNA, 19 nt, Homo sapiens
  misc_RNA (1)...(19): siRNA sense strand
uuacaggcguucaguggaa

SEQ ID NO: 268332 - RNA, 19 nt, Homo sapiens
  misc_RNA (1)...(19): siRNA sense strand
ugacaaagaccagggacua

SEQ ID NO: 268333 - RNA, 19 nt, Homo sapiens
  misc_RNA (1)...(19): siRNA sense strand
gggagaaguguucauuauu

SEQ ID NO: 268334 - RNA, 19 nt, Homo sapiens
  misc_RNA (1)...(19): siRNA sense strand
gauacgauguuggugcuau

SEQ ID NO: 268335 - RNA, 19 nt, Homo sapiens
  misc_RNA (1)...(19): siRNA sense strand
uguugaagauugcagaauu

SEQ ID NO: 268336 - RNA, 19 nt, Homo sapiens
  misc_RNA (1)...(19): siRNA sense strand
ucucauagcauuucagguu

SEQ ID NO: 268337 - RNA, 19 nt, Homo sapiens
  misc_RNA (1)...(19): siRNA sense strand
agucagaacuuuauguaag

SEQ ID NO: 268338 - RNA, 19 nt, Homo sapiens
  misc_RNA (1)...(19): siRNA sense strand
ugcaggaacucgaagacua

SEQ ID NO: 268339 - RNA, 19 nt, Homo sapiens
  misc_RNA (1)...(19): siRNA sense strand
aaacaaaugcgccugaauc

SEQ ID NO: 268340 - RNA, 19 nt, Homo sapiens
  misc_RNA (1)...(19): siRNA sense strand
caccuaaggauacaucuuu

SEQ ID NO: 268341 - RNA, 19 nt, Homo sapiens
  misc_RNA (1)...(19): siRNA sense strand
uaaaagagguuguugaaac

SEQ ID NO: 268342 - RNA, 19 nt, Homo sapiens
  misc_RNA (1)...(19): siRNA sense strand
gaauacauagggagaagug

SEQ ID NO: 268343 - RNA, 19 nt, Homo sapiens
  misc_RNA (1)...(19): siRNA sense strand
gcgaaaugcagauucagaa

SEQ ID NO: 268344 - RNA, 19 nt, Homo sapiens
  misc_RNA (1)...(19): siRNA sense strand
uauagaagaugcugugacu

SEQ ID NO: 268345 - RNA, 19 nt, Homo sapiens
  misc_RNA (1)...(19): siRNA sense strand
gaaauuaucugacaaagac

SEQ ID NO: 268346 - RNA, 19 nt, Homo sapiens
  misc_RNA (1)...(19): siRNA sense strand
gagaauuacuggaaaguuu

SEQ ID NO: 268347 - RNA, 19 nt, Homo sapiens
  misc_RNA (1)...(19): siRNA sense strand
ggagaaguguucauuauug

SEQ ID NO: 268348 - RNA, 19 nt, Homo sapiens
  misc_RNA (1)...(19): siRNA sense strand
caagaagaaugcagaaauu

SEQ ID NO: 268349 - RNA, 19 nt, Homo sapiens
  misc_RNA (1)...(19): siRNA sense strand
gaagauggauggaauaaac

SEQ ID NO: 268350 - RNA, 19 nt, Homo sapiens
  misc_RNA (1)...(19): siRNA sense strand
uugcaaagcuguauuauga

SEQ ID NO: 268351 - RNA, 19 nt, Homo sapiens
  misc_RNA (1)...(19): siRNA sense strand
guaaacagcuuuguacaga

SEQ ID NO: 268352 - RNA, 19 nt, Homo sapiens
  misc_RNA (1)...(19): siRNA sense strand
agaaagccguugaauguua

SEQ ID NO: 268353 - RNA, 19 nt, Homo sapiens
  misc_RNA (1)...(19): siRNA sense strand
aaccagagcuugaagauuu

SEQ ID NO: 268354 - RNA, 19 nt, Homo sapiens
  misc_RNA (1)...(19): siRNA sense strand
gaagaagacgcacacauaa

SEQ ID NO: 268355 - RNA, 19 nt, Homo sapiens
  misc_RNA (1)...(19): siRNA sense strand
gcagcggucuuaauucuuu

SEQ ID NO: 268356 - RNA, 19 nt, Homo sapiens
  misc_RNA (1)...(19): siRNA sense strand
gaauuaaacccaacacaaa

SEQ ID NO: 268357 - RNA, 19 nt, Homo sapiens
  misc_RNA (1)...(19): siRNA sense strand
gaucggaauucuuuacuga

SEQ ID NO: 268358 - RNA, 19 nt, Homo sapiens
  misc_RNA (1)...(19): siRNA sense strand
ucccaaagcucacagauuu

SEQ ID NO: 268359 - RNA, 19 nt, Homo sapiens
  misc_RNA (1)...(19): siRNA sense strand
aggaauaucuggagucuuu

SEQ ID NO: 268360 - RNA, 19 nt, Homo sapiens
  misc_RNA (1)...(19): siRNA sense strand
gcaggaaaauagagaauua

SEQ ID NO: 268361 - RNA, 19 nt, Homo sapiens
  misc_RNA (1)...(19): siRNA sense strand
gaccagggacuaccuaaua

SEQ ID NO: 268362 - RNA, 19 nt, Homo sapiens
  misc_RNA (1)...(19): siRNA sense strand
ggaauucauugccugcuuu

SEQ ID NO: 268363 - RNA, 19 nt, Homo sapiens
  misc_RNA (1)...(19): siRNA sense strand
gaagaacaguauuccugaa

SEQ ID NO: 268364 - RNA, 19 nt, Homo sapiens
  misc_RNA (1)...(19): siRNA sense strand
gaauaugauuugccaacaa

SEQ ID NO: 268365 - RNA, 19 nt, Homo sapiens
  misc_RNA (1)...(19): siRNA sense strand
ugaagaagacgcacacaua

SEQ ID NO: 268366 - RNA, 19 nt, Homo sapiens
  misc_RNA (1)...(19): siRNA sense strand
cgacagaagucaaugaaag

SEQ ID NO: 268367 - RNA, 19 nt, Homo sapiens
  misc_RNA (1)...(19): siRNA sense strand
agaaagaaaugcaggaguu

SEQ ID NO: 268368 - RNA, 19 nt, Homo sapiens
  misc_RNA (1)...(19): siRNA sense strand
aaacagcuuuguacagaaa

SEQ ID NO: 268369 - RNA, 19 nt, Homo sapiens
  misc_RNA (1)...(19): siRNA sense strand
gcaaagcuguauuaugaag

SEQ ID NO: 268370 - RNA, 19 nt, Homo sapiens
  misc_RNA (1)...(19): siRNA sense strand
gcacauguugcuaagcuua

SEQ ID NO: 268371 - RNA, 19 nt, Homo sapiens
  misc_RNA (1)...(19): siRNA sense strand
caaaugcgccugaaucaau

SEQ ID NO: 268372 - RNA, 19 nt, Homo sapiens
  misc_RNA (1)...(19): siRNA sense strand
aggaacagcuucuagauug

SEQ ID NO: 268373 - RNA, 19 nt, Homo sapiens
  misc_RNA (1)...(19): siRNA sense strand
uacagacccuuaaggaaua

SEQ ID NO: 268374 - RNA, 19 nt, Homo sapiens
  misc_RNA (1)...(19): siRNA sense strand
guacagacccuuaaggaau

SEQ ID NO: 268375 - RNA, 19 nt, Homo sapiens
  misc_RNA (1)...(19): siRNA sense strand
ggaauuaaacccaacacaa

SEQ ID NO: 268376 - RNA, 19 nt, Homo sapiens
  misc_RNA (1)...(19): siRNA sense strand
guuccaagaccaaagauua

SEQ ID NO: 268377 - RNA, 19 nt, Homo sapiens
  misc_RNA (1)...(19): siRNA sense strand
gaaguccugcaauuuauaa

SEQ ID NO: 268378 - RNA, 19 nt, Homo sapiens
  misc_RNA (1)...(19): siRNA sense strand
gaaacuaaauagcaguaag

SEQ ID NO: 268379 - RNA, 19 nt, Homo sapiens
  misc_RNA (1)...(19): siRNA sense strand
caaaauaccuucagaaaac

SEQ ID NO: 268380 - RNA, 19 nt, Homo sapiens
  misc_RNA (1)...(19): siRNA sense strand
guuauaugaugcucuguuu

SEQ ID NO: 268381 - RNA, 19 nt, Homo sapiens
  misc_RNA (1)...(19): siRNA sense strand
agagaaagccguugaaugu

SEQ ID NO: 268382 - RNA, 19 nt, Homo sapiens
  misc_RNA (1)...(19): siRNA sense strand
gaagaaugcagaaauuauc

SEQ ID NO: 268383 - RNA, 19 nt, Homo sapiens
  misc_RNA (1)...(19): siRNA sense strand
gaaauguaauucucaccau

SEQ ID NO: 268384 - RNA, 19 nt, Homo sapiens
  misc_RNA (1)...(19): siRNA sense strand
gauuauagaugacggugau

SEQ ID NO: 268385 - RNA, 19 nt, Homo sapiens
  misc_RNA (1)...(19): siRNA sense strand
gaagauugcagaauugcuu

SEQ ID NO: 268386 - RNA, 19 nt, Homo sapiens
  misc_RNA (1)...(19): siRNA sense strand
gaagaaaguuuugccauug

SEQ ID NO: 268387 - RNA, 19 nt, Homo sapiens
  misc_RNA (1)...(19): siRNA sense strand
ggaaguccugcaauuuaua

SEQ ID NO: 268388 - RNA, 19 nt, Homo sapiens
  misc_RNA (1)...(19): siRNA sense strand
gaacaagaagaaugcagaa

SEQ ID NO: 268389 - RNA, 19 nt, Homo sapiens
  misc_RNA (1)...(19): siRNA sense strand
ggaagaaaguuuugccauu

SEQ ID NO: 268390 - RNA, 19 nt, Homo sapiens
  misc_RNA (1)...(19): siRNA sense strand
aaaugcgccugaaucaaua

SEQ ID NO: 268391 - RNA, 19 nt, Homo sapiens
  misc_RNA (1)...(19): siRNA sense strand
acugucagcuacuuucuua

SEQ ID NO: 268392 - RNA, 19 nt, Homo sapiens
  misc_RNA (1)...(19): siRNA sense strand
gcuaaucuuaugcuucuua

SEQ ID NO: 268393 - RNA, 19 nt, Homo sapiens
  misc_RNA (1)...(19): siRNA sense strand
gcacauaaugguagucuuc

SEQ ID NO: 268394 - RNA, 19 nt, Homo sapiens
  misc_RNA (1)...(19): siRNA sense strand
caaguauucucccgaaaca

SEQ ID NO: 268395 - RNA, 19 nt, Homo sapiens
  misc_RNA (1)...(19): siRNA sense strand
gaaaugcagauucagaaau

SEQ ID NO: 268396 - RNA, 19 nt, Homo sapiens
  misc_RNA (1)...(19): siRNA sense strand
gggacuaccuaauaaagau

SEQ ID NO: 268397 - RNA, 19 nt, Homo sapiens
  misc_RNA (1)...(19): siRNA sense strand
gcgccugaaucaauaugua

SEQ ID NO: 268398 - RNA, 19 nt, Homo sapiens
  misc_RNA (1)...(19): siRNA sense strand
gaaagccguugaauguuac

SEQ ID NO: 268399 - RNA, 19 nt, Homo sapiens
  misc_RNA (1)...(19): siRNA sense strand
gaaggcagaagacauugaa

SEQ ID NO: 268400 - RNA, 19 nt, Homo sapiens
  misc_RNA (1)...(19): siRNA sense strand
uugaagauuuggcuagaua

SEQ ID NO: 268401 - RNA, 19 nt, Homo sapiens
  misc_RNA (1)...(19): siRNA sense strand
gaagaugggucagcauggu

SEQ ID NO: 268402 - RNA, 19 nt, Homo sapiens
  misc_RNA (1)...(19): siRNA sense strand
gggcagcggucuuaauucu

SEQ ID NO: 268403 - RNA, 19 nt, Homo sapiens
  misc_RNA (1)...(19): siRNA sense strand
uaccagccacuuacaauua

SEQ ID NO: 268404 - RNA, 19 nt, Homo sapiens
  misc_RNA (1)...(19): siRNA sense strand
gagaaguguucauuauugg

SEQ ID NO: 268405 - RNA, 19 nt, Homo sapiens
  misc_RNA (1)...(19): siRNA sense strand
ggacagaagaucggaauuc

SEQ ID NO: 268406 - RNA, 19 nt, Homo sapiens
  misc_RNA (1)...(19): siRNA sense strand
agaagucaaugaaaggauu

SEQ ID NO: 268407 - RNA, 19 nt, Homo sapiens
  misc_RNA (1)...(19): siRNA sense strand
uagaggccauuaagaaaga

SEQ ID NO: 268408 - RNA, 19 nt, Homo sapiens
  misc_RNA (1)...(19): siRNA sense strand
gaaguguucauuauuggaa

SEQ ID NO: 268409 - RNA, 19 nt, Homo sapiens
  misc_RNA (1)...(19): siRNA sense strand
gacaaaaucugcuggaaau

SEQ ID NO: 268410 - RNA, 19 nt, Homo sapiens
  misc_RNA (1)...(19): siRNA sense strand
uugcagaauugcuuuguaa

SEQ ID NO: 268411 - RNA, 19 nt, Homo sapiens
  misc_RNA (1)...(19): siRNA sense strand
guugaagauugcagaauug

SEQ ID NO: 268412 - RNA, 19 nt, Homo sapiens
  misc_RNA (1)...(19): siRNA sense strand
ggaacagcuucuagauugu

SEQ ID NO: 268413 - RNA, 19 nt, Homo sapiens
  misc_RNA (1)...(19): siRNA sense strand
caccgucuccuaccaaaua

SEQ ID NO: 268414 - RNA, 19 nt, Homo sapiens
  misc_RNA (1)...(19): siRNA sense strand
uauguuggaugcaguaaau

SEQ ID NO: 268415 - RNA, 19 nt, Homo sapiens
  misc_RNA (1)...(19): siRNA sense strand
cuauugauccucuguuuaa

SEQ ID NO: 268416 - RNA, 19 nt, Homo sapiens
  misc_RNA (1)...(19): siRNA sense strand
gaaaagcaguaccuggaaa

SEQ ID NO: 268417 - RNA, 19 nt, Homo sapiens
  misc_RNA (1)...(19): siRNA sense strand
gaguggaauucguguguug

SEQ ID NO: 268418 - RNA, 19 nt, Homo sapiens
  misc_RNA (1)...(19): siRNA sense strand
uaaaggaacagcuucuaga

SEQ ID NO: 268419 - RNA, 19 nt, Homo sapiens
  misc_RNA (1)...(19): siRNA sense strand
cgaagacuauagugaagga

SEQ ID NO: 268420 - RNA, 19 nt, Homo sapiens
  misc_RNA (1)...(19): siRNA sense strand
ugaaguauuucuccuugga

SEQ ID NO: 268421 - RNA, 19 nt, Homo sapiens
  misc_RNA (1)...(19): siRNA sense strand
gaagguaaagcuggacaaa

SEQ ID NO: 268422 - RNA, 19 nt, Homo sapiens
  misc_RNA (1)...(19): siRNA sense strand
uuucugagcuggcugcauu

SEQ ID NO: 268423 - RNA, 19 nt, Homo sapiens
  misc_RNA (1)...(19): siRNA sense strand
gucagaacuuuauguaaga

SEQ ID NO: 268424 - RNA, 19 nt, Homo sapiens
  misc_RNA (1)...(19): siRNA sense strand
gaaagaaaugcaggaguug

SEQ ID NO: 268425 - RNA, 19 nt, Homo sapiens
  misc_RNA (1)...(19): siRNA sense strand
gcaguaaauggaaauauag

SEQ ID NO: 268426 - RNA, 19 nt, Homo sapiens
  misc_RNA (1)...(19): siRNA sense strand
gaugaacugucagcuacuu

SEQ ID NO: 268427 - RNA, 19 nt, Homo sapiens
  misc_RNA (1)...(19): siRNA sense strand
gaauucauugccugcuuua

SEQ ID NO: 268428 - RNA, 19 nt, Homo sapiens
  misc_RNA (1)...(19): siRNA sense strand
caacaaguagaggccauua

SEQ ID NO: 268429 - RNA, 19 nt, Homo sapiens
  misc_RNA (1)...(19): siRNA sense strand
gcaggaacucgaagacuau

SEQ ID NO: 268430 - RNA, 19 nt, Homo sapiens
  misc_RNA (1)...(19): siRNA sense strand
uaaacagcuuuguacagaa

SEQ ID NO: 268431 - RNA, 19 nt, Homo sapiens
  misc_RNA (1)...(19): siRNA sense strand
uuacaggcguucaguggaa

SEQ ID NO: 268432 - RNA, 19 nt, Homo sapiens
  misc_RNA (1)...(19): siRNA sense strand
ugacaaagaccagggacua

SEQ ID NO: 268433 - RNA, 19 nt, Homo sapiens
  misc_RNA (1)...(19): siRNA sense strand
gggagaaguguucauuauu

SEQ ID NO: 268434 - RNA, 19 nt, Homo sapiens
  misc_RNA (1)...(19): siRNA sense strand
gauacgauguuggugcuau

SEQ ID NO: 268435 - RNA, 19 nt, Homo sapiens
  misc_RNA (1)...(19): siRNA sense strand
uguugaagauugcagaauu

SEQ ID NO: 268436 - RNA, 19 nt, Homo sapiens
  misc_RNA (1)...(19): siRNA sense strand
ucucauagcauuucagguu

SEQ ID NO: 268437 - RNA, 19 nt, Homo sapiens
  misc_RNA (1)...(19): siRNA sense strand
agucagaacuuuauguaag

SEQ ID NO: 268438 - RNA, 19 nt, Homo sapiens
  misc_RNA (1)...(19): siRNA sense strand
ugcaggaacucgaagacua

SEQ ID NO: 268439 - RNA, 19 nt, Homo sapiens
  misc_RNA (1)...(19): siRNA sense strand
aaacaaaugcgccugaauc

SEQ ID NO: 268440 - RNA, 19 nt, Homo sapiens
  misc_RNA (1)...(19): siRNA sense strand
caccuaaggauacaucuuu

SEQ ID NO: 268441 - RNA, 19 nt, Homo sapiens
  misc_RNA (1)...(19): siRNA sense strand
uaaaagagguuguugaaac

SEQ ID NO: 268442 - RNA, 19 nt, Homo sapiens
  misc_RNA (1)...(19): siRNA sense strand
gaauacauagggagaagug

SEQ ID NO: 268443 - RNA, 19 nt, Homo sapiens
  misc_RNA (1)...(19): siRNA sense strand
gcgaaaugcagauucagaa

SEQ ID NO: 268444 - RNA, 19 nt, Homo sapiens
  misc_RNA (1)...(19): siRNA sense strand
uauagaagaugcugugacu

SEQ ID NO: 268445 - RNA, 19 nt, Homo sapiens
  misc_RNA (1)...(19): siRNA sense strand
ggacaaaggugcuggagaa

SEQ ID NO: 268446 - RNA, 19 nt, Homo sapiens
  misc_RNA (1)...(19): siRNA sense strand
acaaggagaugcugaaguu

SEQ ID NO: 268447 - RNA, 19 nt, Homo sapiens
  misc_RNA (1)...(19): siRNA sense strand
gcagugccauggaguguug

SEQ ID NO: 268448 - RNA, 19 nt, Homo sapiens
  misc_RNA (1)...(19): siRNA sense strand
caaaggugcuggagaagag

SEQ ID NO: 268449 - RNA, 19 nt, Homo sapiens
  misc_RNA (1)...(19): siRNA sense strand
ggucaaggacuacgagaaa

SEQ ID NO: 268450 - RNA, 19 nt, Homo sapiens
  misc_RNA (1)...(19): siRNA sense strand
gaagagcucggaccucaug

SEQ ID NO: 268451 - RNA, 19 nt, Homo sapiens
  misc_RNA (1)...(19): siRNA sense strand
gcuaugcccacaacaauga

SEQ ID NO: 268452 - RNA, 19 nt, Homo sapiens
  misc_RNA (1)...(19): siRNA sense strand
ccaagcagcagaucgagaa

SEQ ID NO: 268453 - RNA, 19 nt, Homo sapiens
  misc_RNA (1)...(19): siRNA sense strand
gcuggaggaugccgacuuc

SEQ ID NO: 268454 - RNA, 19 nt, Homo sapiens
  misc_RNA (1)...(19): siRNA sense strand
gagaaggcccugcgcuaug

SEQ ID NO: 268455 - RNA, 19 nt, Homo sapiens
  misc_RNA (1)...(19): siRNA sense strand
gagaagcugugcgaguuuc

SEQ ID NO: 268456 - RNA, 19 nt, Homo sapiens
  misc_RNA (1)...(19): siRNA sense strand
gggcgcacguugugagguu

SEQ ID NO: 268457 - RNA, 19 nt, Homo sapiens
  misc_RNA (1)...(19): siRNA sense strand
agaaggcccuggagagcuu

SEQ ID NO: 268458 - RNA, 19 nt, Homo sapiens
  misc_RNA (1)...(19): siRNA sense strand
gagcauuuaccgcagcaaa

SEQ ID NO: 268459 - RNA, 19 nt, Homo sapiens
  misc_RNA (1)...(19): siRNA sense strand
acgagaagcugugcgaguu

SEQ ID NO: 268460 - RNA, 19 nt, Homo sapiens
  misc_RNA (1)...(19): siRNA sense strand
ugucugagcgagagcauuu

SEQ ID NO: 268461 - RNA, 19 nt, Homo sapiens
  misc_RNA (1)...(19): siRNA sense strand
acaagaccaucuccuacug

SEQ ID NO: 268462 - RNA, 19 nt, Homo sapiens
  misc_RNA (1)...(19): siRNA sense strand
gcgcuaugcccacaacaau

SEQ ID NO: 268463 - RNA, 19 nt, Homo sapiens
  misc_RNA (1)...(19): siRNA sense strand
ugugaggagucuaugaaga

SEQ ID NO: 268464 - RNA, 19 nt, Homo sapiens
  misc_RNA (1)...(19): siRNA sense strand
gugaggagucuaugaagau

SEQ ID NO: 268465 - RNA, 19 nt, Homo sapiens
  misc_RNA (1)...(19): siRNA sense strand
cgagaaggcccugcgcuau

SEQ ID NO: 268466 - RNA, 19 nt, Homo sapiens
  misc_RNA (1)...(19): siRNA sense strand
agaaggggcuccagcugua

SEQ ID NO: 268467 - RNA, 19 nt, Homo sapiens
  misc_RNA (1)...(19): siRNA sense strand
cgagaagcugugcgaguuu

SEQ ID NO: 268468 - RNA, 19 nt, Homo sapiens
  misc_RNA (1)...(19): siRNA sense strand
cauugcagguguggacaaa

SEQ ID NO: 268469 - RNA, 19 nt, Homo sapiens
  misc_RNA (1)...(19): siRNA sense strand
gcuacaaggagaugcugaa

SEQ ID NO: 268470 - RNA, 19 nt, Homo sapiens
  misc_RNA (1)...(19): siRNA sense strand
cuaccuugcucccacaucu

SEQ ID NO: 268471 - RNA, 19 nt, Homo sapiens
  misc_RNA (1)...(19): siRNA sense strand
guugugaggagucuaugaa

SEQ ID NO: 268472 - RNA, 19 nt, Homo sapiens
  misc_RNA (1)...(19): siRNA sense strand
ugucaacaacuauggcaaa

SEQ ID NO: 268473 - RNA, 19 nt, Homo sapiens
  misc_RNA (1)...(19): siRNA sense strand
agacagagaaggcauugca

SEQ ID NO: 268474 - RNA, 19 nt, Homo sapiens
  misc_RNA (1)...(19): siRNA sense strand
ucacagcccacucggagau

SEQ ID NO: 268475 - RNA, 19 nt, Homo sapiens
  misc_RNA (1)...(19): siRNA sense strand
gcgaguccauaggcgagaa

SEQ ID NO: 268476 - RNA, 19 nt, Homo sapiens
  misc_RNA (1)...(19): siRNA sense strand
ugaggagucuaugaagauc

SEQ ID NO: 268477 - RNA, 19 nt, Homo sapiens
  misc_RNA (1)...(19): siRNA sense strand
ggaguguugugaggagucu

SEQ ID NO: 268478 - RNA, 19 nt, Homo sapiens
  misc_RNA (1)...(19): siRNA sense strand
uggaggagacggagcucua

SEQ ID NO: 268479 - RNA, 19 nt, Homo sapiens
  misc_RNA (1)...(19): siRNA sense strand
agaaggcccugcgcuaugc

SEQ ID NO: 268480 - RNA, 19 nt, Homo sapiens
  misc_RNA (1)...(19): siRNA sense strand
guaccaguccaaccagaca

SEQ ID NO: 268481 - RNA, 19 nt, Homo sapiens
  misc_RNA (1)...(19): siRNA sense strand
gucaacaacuauggcaaag

SEQ ID NO: 268482 - RNA, 19 nt, Homo sapiens
  misc_RNA (1)...(19): siRNA sense strand
gcauuuaccgcagcaaagg

SEQ ID NO: 268483 - RNA, 19 nt, Homo sapiens
  misc_RNA (1)...(19): siRNA sense strand
ggacaaaggugcuggagaa

SEQ ID NO: 268484 - RNA, 19 nt, Homo sapiens
  misc_RNA (1)...(19): siRNA sense strand
acaaggagaugcugaaguu

SEQ ID NO: 268485 - RNA, 19 nt, Homo sapiens
  misc_RNA (1)...(19): siRNA sense strand
gcagugccauggaguguug

SEQ ID NO: 268486 - RNA, 19 nt, Homo sapiens
  misc_RNA (1)...(19): siRNA sense strand
caaaggugcuggagaagag

SEQ ID NO: 268487 - RNA, 19 nt, Homo sapiens
  misc_RNA (1)...(19): siRNA sense strand
ggucaaggacuacgagaaa

SEQ ID NO: 268488 - RNA, 19 nt, Homo sapiens
  misc_RNA (1)...(19): siRNA sense strand
gaagagcucggaccucaug

SEQ ID NO: 268489 - RNA, 19 nt, Homo sapiens
  misc_RNA (1)...(19): siRNA sense strand
gcuaugcccacaacaauga

SEQ ID NO: 268490 - RNA, 19 nt, Homo sapiens
  misc_RNA (1)...(19): siRNA sense strand
ccaagcagcagaucgagaa

SEQ ID NO: 268491 - RNA, 19 nt, Homo sapiens
  misc_RNA (1)...(19): siRNA sense strand
gcuggaggaugccgacuuc

SEQ ID NO: 268492 - RNA, 19 nt, Homo sapiens
  misc_RNA (1)...(19): siRNA sense strand
gagaaggcccugcgcuaug

SEQ ID NO: 268493 - RNA, 19 nt, Homo sapiens
  misc_RNA (1)...(19): siRNA sense strand
gagaagcugugcgaguuuc

SEQ ID NO: 268494 - RNA, 19 nt, Homo sapiens
  misc_RNA (1)...(19): siRNA sense strand
gggcgcacguugugagguu

SEQ ID NO: 268495 - RNA, 19 nt, Homo sapiens
  misc_RNA (1)...(19): siRNA sense strand
agaaggcccuggagagcuu

SEQ ID NO: 268496 - RNA, 19 nt, Homo sapiens
  misc_RNA (1)...(19): siRNA sense strand
gagcauuuaccgcagcaaa

SEQ ID NO: 268497 - RNA, 19 nt, Homo sapiens
  misc_RNA (1)...(19): siRNA sense strand
acgagaagcugugcgaguu

SEQ ID NO: 268498 - RNA, 19 nt, Homo sapiens
  misc_RNA (1)...(19): siRNA sense strand
ugucugagcgagagcauuu

SEQ ID NO: 268499 - RNA, 19 nt, Homo sapiens
  misc_RNA (1)...(19): siRNA sense strand
acaagaccaucuccuacug

SEQ ID NO: 268500 - RNA, 19 nt, Homo sapiens
  misc_RNA (1)...(19): siRNA sense strand
gcgcuaugcccacaacaau

SEQ ID NO: 268501 - RNA, 19 nt, Homo sapiens
  misc_RNA (1)...(19): siRNA sense strand
ugugaggagucuaugaaga

SEQ ID NO: 268502 - RNA, 19 nt, Homo sapiens
  misc_RNA (1)...(19): siRNA sense strand
gugaggagucuaugaagau

SEQ ID NO: 268503 - RNA, 19 nt, Homo sapiens
  misc_RNA (1)...(19): siRNA sense strand
cgagaaggcccugcgcuau

SEQ ID NO: 268504 - RNA, 19 nt, Homo sapiens
  misc_RNA (1)...(19): siRNA sense strand
agaaggggcuccagcugua

SEQ ID NO: 268505 - RNA, 19 nt, Homo sapiens
  misc_RNA (1)...(19): siRNA sense strand
cgagaagcugugcgaguuu

SEQ ID NO: 268506 - RNA, 19 nt, Homo sapiens
  misc_RNA (1)...(19): siRNA sense strand
cauugcagguguggacaaa

SEQ ID NO: 268507 - RNA, 19 nt, Homo sapiens
  misc_RNA (1)...(19): siRNA sense strand
gcuacaaggagaugcugaa

SEQ ID NO: 268508 - RNA, 19 nt, Homo sapiens
  misc_RNA (1)...(19): siRNA sense strand
cuaccuugcucccacaucu

SEQ ID NO: 268509 - RNA, 19 nt, Homo sapiens
  misc_RNA (1)...(19): siRNA sense strand
guugugaggagucuaugaa

SEQ ID NO: 268510 - RNA, 19 nt, Homo sapiens
  misc_RNA (1)...(19): siRNA sense strand
ugucaacaacuauggcaaa

SEQ ID NO: 268511 - RNA, 19 nt, Homo sapiens
  misc_RNA (1)...(19): siRNA sense strand
agacagagaaggcauugca

SEQ ID NO: 268512 - RNA, 19 nt, Homo sapiens
  misc_RNA (1)...(19): siRNA sense strand
ucacagcccacucggagau

SEQ ID NO: 268513 - RNA, 19 nt, Homo sapiens
  misc_RNA (1)...(19): siRNA sense strand
gcgaguccauaggcgagaa

SEQ ID NO: 268514 - RNA, 19 nt, Homo sapiens
  misc_RNA (1)...(19): siRNA sense strand
ugaggagucuaugaagauc

SEQ ID NO: 268515 - RNA, 19 nt, Homo sapiens
  misc_RNA (1)...(19): siRNA sense strand
ggaguguugugaggagucu

SEQ ID NO: 268516 - RNA, 19 nt, Homo sapiens
  misc_RNA (1)...(19): siRNA sense strand
uggaggagacggagcucua

SEQ ID NO: 268517 - RNA, 19 nt, Homo sapiens
  misc_RNA (1)...(19): siRNA sense strand
agaaggcccugcgcuaugc

SEQ ID NO: 268518 - RNA, 19 nt, Homo sapiens
  misc_RNA (1)...(19): siRNA sense strand
guaccaguccaaccagaca

SEQ ID NO: 268519 - RNA, 19 nt, Homo sapiens
  misc_RNA (1)...(19): siRNA sense strand
gucaacaacuauggcaaag

SEQ ID NO: 268520 - RNA, 19 nt, Homo sapiens
  misc_RNA (1)...(19): siRNA sense strand
gcauuuaccgcagcaaagg

SEQ ID NO: 268521 - RNA, 19 nt, Homo sapiens
  misc_RNA (1)...(19): siRNA sense strand
ggacaucucugguaugaaa

SEQ ID NO: 268522 - RNA, 19 nt, Homo sapiens
  misc_RNA (1)...(19): siRNA sense strand
ggacgagacucaacacaua

SEQ ID NO: 268523 - RNA, 19 nt, Homo sapiens
  misc_RNA (1)...(19): siRNA sense strand
caaagaagcugaauaaacu

SEQ ID NO: 268524 - RNA, 19 nt, Homo sapiens
  misc_RNA (1)...(19): siRNA sense strand
gagcagauaucuccucaaa

SEQ ID NO: 268525 - RNA, 19 nt, Homo sapiens
  misc_RNA (1)...(19): siRNA sense strand
ggaaauacccagagaauga

SEQ ID NO: 268526 - RNA, 19 nt, Homo sapiens
  misc_RNA (1)...(19): siRNA sense strand
caacacauauggcggauuu

SEQ ID NO: 268527 - RNA, 19 nt, Homo sapiens
  misc_RNA (1)...(19): siRNA sense strand
gaagucacauuaugaaaga

SEQ ID NO: 268528 - RNA, 19 nt, Homo sapiens
  misc_RNA (1)...(19): siRNA sense strand
gaaaggcacucucucuguu

SEQ ID NO: 268529 - RNA, 19 nt, Homo sapiens
  misc_RNA (1)...(19): siRNA sense strand
ugaauaaacuggccaagaa

SEQ ID NO: 268530 - RNA, 19 nt, Homo sapiens
  misc_RNA (1)...(19): siRNA sense strand
ggacaaaccuagaaagaag

SEQ ID NO: 268531 - RNA, 19 nt, Homo sapiens
  misc_RNA (1)...(19): siRNA sense strand
gcuaugaguuggcaagaua

SEQ ID NO: 268532 - RNA, 19 nt, Homo sapiens
  misc_RNA (1)...(19): siRNA sense strand
caagggaguuguauuugua

SEQ ID NO: 268533 - RNA, 19 nt, Homo sapiens
  misc_RNA (1)...(19): siRNA sense strand
gagaagaaauggucuaaag

SEQ ID NO: 268534 - RNA, 19 nt, Homo sapiens
  misc_RNA (1)...(19): siRNA sense strand
ggacuaugaugaugaagaa

SEQ ID NO: 268535 - RNA, 19 nt, Homo sapiens
  misc_RNA (1)...(19): siRNA sense strand
gaggaucacuggaguuauu

SEQ ID NO: 268536 - RNA, 19 nt, Homo sapiens
  misc_RNA (1)...(19): siRNA sense strand
ugacagcuaucauacauuu

SEQ ID NO: 268537 - RNA, 19 nt, Homo sapiens
  misc_RNA (1)...(19): siRNA sense strand
gacaaacaauggacuauga

SEQ ID NO: 268538 - RNA, 19 nt, Homo sapiens
  misc_RNA (1)...(19): siRNA sense strand
gagaggcccugcaguguuu

SEQ ID NO: 268539 - RNA, 19 nt, Homo sapiens
  misc_RNA (1)...(19): siRNA sense strand
gcacaaggaugaacauucu

SEQ ID NO: 268540 - RNA, 19 nt, Homo sapiens
  misc_RNA (1)...(19): siRNA sense strand
uaacaugccuguccuggaa

SEQ ID NO: 268541 - RNA, 19 nt, Homo sapiens
  misc_RNA (1)...(19): siRNA sense strand
gggaaacaaugaagauaaa

SEQ ID NO: 268542 - RNA, 19 nt, Homo sapiens
  misc_RNA (1)...(19): siRNA sense strand
gaagaggaauaugcacuuu

SEQ ID NO: 268543 - RNA, 19 nt, Homo sapiens
  misc_RNA (1)...(19): siRNA sense strand
agaaugaucucuuucgaaa

SEQ ID NO: 268544 - RNA, 19 nt, Homo sapiens
  misc_RNA (1)...(19): siRNA sense strand
gaaacacgauuaagagagu

SEQ ID NO: 268545 - RNA, 19 nt, Homo sapiens
  misc_RNA (1)...(19): siRNA sense strand
ggaaugugcuucucuucuu

SEQ ID NO: 268546 - RNA, 19 nt, Homo sapiens
  misc_RNA (1)...(19): siRNA sense strand
gaagaagaaacacgauuaa

SEQ ID NO: 268547 - RNA, 19 nt, Homo sapiens
  misc_RNA (1)...(19): siRNA sense strand
gaaugugcuucucuucuuu

SEQ ID NO: 268548 - RNA, 19 nt, Homo sapiens
  misc_RNA (1)...(19): siRNA sense strand
uaagaguuguucucaagua

SEQ ID NO: 268549 - RNA, 19 nt, Homo sapiens
  misc_RNA (1)...(19): siRNA sense strand
aaagaauucucuacccaua

SEQ ID NO: 268550 - RNA, 19 nt, Homo sapiens
  misc_RNA (1)...(19): siRNA sense strand
gaguuguucucaaguauuu

SEQ ID NO: 268551 - RNA, 19 nt, Homo sapiens
  misc_RNA (1)...(19): siRNA sense strand
gcaaagacugguuccauaa

SEQ ID NO: 268552 - RNA, 19 nt, Homo sapiens
  misc_RNA (1)...(19): siRNA sense strand
ugaagaagauguuauugug

SEQ ID NO: 268553 - RNA, 19 nt, Homo sapiens
  misc_RNA (1)...(19): siRNA sense strand
gauaugggcucuagucucu

SEQ ID NO: 268554 - RNA, 19 nt, Homo sapiens
  misc_RNA (1)...(19): siRNA sense strand
gaagaaauggucuaaagug

SEQ ID NO: 268555 - RNA, 19 nt, Homo sapiens
  misc_RNA (1)...(19): siRNA sense strand
caacaggucagacgcauuu

SEQ ID NO: 268556 - RNA, 19 nt, Homo sapiens
  misc_RNA (1)...(19): siRNA sense strand
gggcggacguuucuuaaga

SEQ ID NO: 268557 - RNA, 19 nt, Homo sapiens
  misc_RNA (1)...(19): siRNA sense strand
ggaccgacauugguguaua

SEQ ID NO: 268558 - RNA, 19 nt, Homo sapiens
  misc_RNA (1)...(19): siRNA sense strand
ugaaugaacuugaggcaau

SEQ ID NO: 268559 - RNA, 19 nt, Homo sapiens
  misc_RNA (1)...(19): siRNA sense strand
gaagaaacacgauuaagag

SEQ ID NO: 268560 - RNA, 19 nt, Homo sapiens
  misc_RNA (1)...(19): siRNA sense strand
gagauuggauuucuuggau

SEQ ID NO: 268561 - RNA, 19 nt, Homo sapiens
  misc_RNA (1)...(19): siRNA sense strand
gauaggaaauacccagaga

SEQ ID NO: 268562 - RNA, 19 nt, Homo sapiens
  misc_RNA (1)...(19): siRNA sense strand
caagaacauuccagccuuu

SEQ ID NO: 268563 - RNA, 19 nt, Homo sapiens
  misc_RNA (1)...(19): siRNA sense strand
gaacauuccagccuuucua

SEQ ID NO: 268564 - RNA, 19 nt, Homo sapiens
  misc_RNA (1)...(19): siRNA sense strand
gaagaucccugugguagag

SEQ ID NO: 268565 - RNA, 19 nt, Homo sapiens
  misc_RNA (1)...(19): siRNA sense strand
gaagagauucccaucaaau

SEQ ID NO: 268566 - RNA, 19 nt, Homo sapiens
  misc_RNA (1)...(19): siRNA sense strand
gcaaguggaaucacaggua

SEQ ID NO: 268567 - RNA, 19 nt, Homo sapiens
  misc_RNA (1)...(19): siRNA sense strand
cagccaagcucggcaagua

SEQ ID NO: 268568 - RNA, 19 nt, Homo sapiens
  misc_RNA (1)...(19): siRNA sense strand
ugaagaagaaacacgauua

SEQ ID NO: 268569 - RNA, 19 nt, Homo sapiens
  misc_RNA (1)...(19): siRNA sense strand
ucucaugacugaagaagaa

SEQ ID NO: 268570 - RNA, 19 nt, Homo sapiens
  misc_RNA (1)...(19): siRNA sense strand
gcacugauacccaaacuuc

SEQ ID NO: 268571 - RNA, 19 nt, Homo sapiens
  misc_RNA (1)...(19): siRNA sense strand
ggguguaucuccagaaaug

SEQ ID NO: 268572 - RNA, 19 nt, Homo sapiens
  misc_RNA (1)...(19): siRNA sense strand
gcaauuacgcuuauuugga

SEQ ID NO: 268573 - RNA, 19 nt, Homo sapiens
  misc_RNA (1)...(19): siRNA sense strand
gaaagaagccuuacaaaag

SEQ ID NO: 268574 - RNA, 19 nt, Homo sapiens
  misc_RNA (1)...(19): siRNA sense strand
gcaaagaauugacucucau

SEQ ID NO: 268575 - RNA, 19 nt, Homo sapiens
  misc_RNA (1)...(19): siRNA sense strand
gcagauaucuccucaaaag

SEQ ID NO: 268576 - RNA, 19 nt, Homo sapiens
  misc_RNA (1)...(19): siRNA sense strand
gacagauucuugcauauca

SEQ ID NO: 268577 - RNA, 19 nt, Homo sapiens
  misc_RNA (1)...(19): siRNA sense strand
gaacaggcggcucgagaaa

SEQ ID NO: 268578 - RNA, 19 nt, Homo sapiens
  misc_RNA (1)...(19): siRNA sense strand
cgagaagccuuuggauuug

SEQ ID NO: 268579 - RNA, 19 nt, Homo sapiens
  misc_RNA (1)...(19): siRNA sense strand
caagacagccaguggguuu

SEQ ID NO: 268580 - RNA, 19 nt, Homo sapiens
  misc_RNA (1)...(19): siRNA sense strand
ggacgucaauguguaaauc

SEQ ID NO: 268581 - RNA, 19 nt, Homo sapiens
  misc_RNA (1)...(19): siRNA sense strand
gcugugaacuucuguacug

SEQ ID NO: 268582 - RNA, 19 nt, Homo sapiens
  misc_RNA (1)...(19): siRNA sense strand
ucagugugcuggcgaguuu

SEQ ID NO: 268583 - RNA, 19 nt, Homo sapiens
  misc_RNA (1)...(19): siRNA sense strand
ucgagaagccuuuggauuu

SEQ ID NO: 268584 - RNA, 19 nt, Homo sapiens
  misc_RNA (1)...(19): siRNA sense strand
gugcagagcaugcuuauuc

SEQ ID NO: 268585 - RNA, 19 nt, Homo sapiens
  misc_RNA (1)...(19): siRNA sense strand
cuccagauguugauagaua

SEQ ID NO: 268586 - RNA, 19 nt, Homo sapiens
  misc_RNA (1)...(19): siRNA sense strand
ccacagaacuaguagaaaa

SEQ ID NO: 268587 - RNA, 19 nt, Homo sapiens
  misc_RNA (1)...(19): siRNA sense strand
gcucucacauguuccugua

SEQ ID NO: 268588 - RNA, 19 nt, Homo sapiens
  misc_RNA (1)...(19): siRNA sense strand
gaaaggaaaggacucuuca

SEQ ID NO: 268589 - RNA, 19 nt, Homo sapiens
  misc_RNA (1)...(19): siRNA sense strand
gaggaaggauuggaggaaa

SEQ ID NO: 268590 - RNA, 19 nt, Homo sapiens
  misc_RNA (1)...(19): siRNA sense strand
ggaacucccugaauuacca

SEQ ID NO: 268591 - RNA, 19 nt, Homo sapiens
  misc_RNA (1)...(19): siRNA sense strand
gagaagccuuuggauuuga

SEQ ID NO: 268592 - RNA, 19 nt, Homo sapiens
  misc_RNA (1)...(19): siRNA sense strand
gaauaaacuggccaagaaa

SEQ ID NO: 268593 - RNA, 19 nt, Homo sapiens
  misc_RNA (1)...(19): siRNA sense strand
aaaauuaggugcagacaaa

SEQ ID NO: 268594 - RNA, 19 nt, Homo sapiens
  misc_RNA (1)...(19): siRNA sense strand
gcuagagacuauucuguca

SEQ ID NO: 268595 - RNA, 19 nt, Homo sapiens
  misc_RNA (1)...(19): siRNA sense strand
gagcuugucugcgaaagga

SEQ ID NO: 268596 - RNA, 19 nt, Homo sapiens
  misc_RNA (1)...(19): siRNA sense strand
gaaagcaauggcugaacua

SEQ ID NO: 268597 - RNA, 19 nt, Homo sapiens
  misc_RNA (1)...(19): siRNA sense strand
gccuaucacucuggauuua

SEQ ID NO: 268598 - RNA, 19 nt, Homo sapiens
  misc_RNA (1)...(19): siRNA sense strand
gaauaugcacuuucugguu

SEQ ID NO: 268599 - RNA, 19 nt, Homo sapiens
  misc_RNA (1)...(19): siRNA sense strand
gaaguggauuuccggugaa

SEQ ID NO: 268600 - RNA, 19 nt, Homo sapiens
  misc_RNA (1)...(19): siRNA sense strand
uuggagagauggcagauaa

SEQ ID NO: 268601 - RNA, 19 nt, Homo sapiens
  misc_RNA (1)...(19): siRNA sense strand
cuucaaggaucuacucuga

SEQ ID NO: 268602 - RNA, 19 nt, Homo sapiens
  misc_RNA (1)...(19): siRNA sense strand
gcacaacuggaagaacuua

SEQ ID NO: 268603 - RNA, 19 nt, Homo sapiens
  misc_RNA (1)...(19): siRNA sense strand
cagggacacuuaccuaguu

SEQ ID NO: 268604 - RNA, 19 nt, Homo sapiens
  misc_RNA (1)...(19): siRNA sense strand
gaucaucagugcagaacuc

SEQ ID NO: 268605 - RNA, 19 nt, Homo sapiens
  misc_RNA (1)...(19): siRNA sense strand
gagaauggaccgcuaaagu

SEQ ID NO: 268606 - RNA, 19 nt, Homo sapiens
  misc_RNA (1)...(19): siRNA sense strand
uagaugauguggaagaguu

SEQ ID NO: 268607 - RNA, 19 nt, Homo sapiens
  misc_RNA (1)...(19): siRNA sense strand
ggagagauggcagauaauu

SEQ ID NO: 268608 - RNA, 19 nt, Homo sapiens
  misc_RNA (1)...(19): siRNA sense strand
gcaaaugagacaacggaaa

SEQ ID NO: 268609 - RNA, 19 nt, Homo sapiens
  misc_RNA (1)...(19): siRNA sense strand
gugugcagaugccuaauuu

SEQ ID NO: 268610 - RNA, 19 nt, Homo sapiens
  misc_RNA (1)...(19): siRNA sense strand
acacggaacugaagaaacu

SEQ ID NO: 268611 - RNA, 19 nt, Homo sapiens
  misc_RNA (1)...(19): siRNA sense strand
cauaaugagcuacaaacua

SEQ ID NO: 268612 - RNA, 19 nt, Homo sapiens
  misc_RNA (1)...(19): siRNA sense strand
uguauaaacugugcaaaga

SEQ ID NO: 268613 - RNA, 19 nt, Homo sapiens
  misc_RNA (1)...(19): siRNA sense strand
ggaagaacuuaugaugguu

SEQ ID NO: 268614 - RNA, 19 nt, Homo sapiens
  misc_RNA (1)...(19): siRNA sense strand
ugcaaagacugguuccaua

SEQ ID NO: 268615 - RNA, 19 nt, Homo sapiens
  misc_RNA (1)...(19): siRNA sense strand
gaccgacauugguguauau

SEQ ID NO: 268616 - RNA, 19 nt, Homo sapiens
  misc_RNA (1)...(19): siRNA sense strand
gcaaguaaagaaucugcua

SEQ ID NO: 268617 - RNA, 19 nt, Homo sapiens
  misc_RNA (1)...(19): siRNA sense strand
gauccagaaugcuuagaug

SEQ ID NO: 268618 - RNA, 19 nt, Homo sapiens
  misc_RNA (1)...(19): siRNA sense strand
gagagauggcagauaauuu

SEQ ID NO: 268619 - RNA, 19 nt, Homo sapiens
  misc_RNA (1)...(19): siRNA sense strand
gacuggagguguccuaaau

SEQ ID NO: 268620 - RNA, 19 nt, Homo sapiens
  misc_RNA (1)...(19): siRNA sense strand
ggaaaggcacucucucugu

SEQ ID NO: 268621 - RNA, 19 nt, Homo sapiens
  misc_RNA (1)...(19): siRNA sense strand
caaaggcucuauuguauuu

SEQ ID NO: 268622 - RNA, 19 nt, Homo sapiens
  misc_RNA (1)...(19): siRNA sense strand
gcagagaaaucuuaacaug

SEQ ID NO: 268623 - RNA, 19 nt, Homo sapiens
  misc_RNA (1)...(19): siRNA sense strand
gcaguuggcuguaaugaug

SEQ ID NO: 268624 - RNA, 19 nt, Homo sapiens
  misc_RNA (1)...(19): siRNA sense strand
gaaaucugcuccugucaug

SEQ ID NO: 268625 - RNA, 19 nt, Homo sapiens
  misc_RNA (1)...(19): siRNA sense strand
gagccgagauggucauaaa

SEQ ID NO: 268626 - RNA, 19 nt, Homo sapiens
  misc_RNA (1)...(19): siRNA sense strand
gcagaacuauccagaggaa

SEQ ID NO: 268627 - RNA, 19 nt, Homo sapiens
  misc_RNA (1)...(19): siRNA sense strand
gcaccagacuucaaagaau

SEQ ID NO: 268628 - RNA, 19 nt, Homo sapiens
  misc_RNA (1)...(19): siRNA sense strand
uaacacggcagaucgaaua

SEQ ID NO: 268629 - RNA, 19 nt, Homo sapiens
  misc_RNA (1)...(19): siRNA sense strand
agagaaaucuuaacaugug

SEQ ID NO: 268630 - RNA, 19 nt, Homo sapiens
  misc_RNA (1)...(19): siRNA sense strand
gaucgaauaaucagaguuu

SEQ ID NO: 268631 - RNA, 19 nt, Homo sapiens
  misc_RNA (1)...(19): siRNA sense strand
gaacucagccagcccuuga

SEQ ID NO: 268632 - RNA, 19 nt, Homo sapiens
  misc_RNA (1)...(19): siRNA sense strand
gaaagggaaucaggguuug

SEQ ID NO: 268633 - RNA, 19 nt, Homo sapiens
  misc_RNA (1)...(19): siRNA sense strand
ccacagccauuaagucaau

SEQ ID NO: 268634 - RNA, 19 nt, Homo sapiens
  misc_RNA (1)...(19): siRNA sense strand
gaacuccucuuggauguag

SEQ ID NO: 268635 - RNA, 19 nt, Homo sapiens
  misc_RNA (1)...(19): siRNA sense strand
gguuugauauugaagauga

SEQ ID NO: 268636 - RNA, 19 nt, Homo sapiens
  misc_RNA (1)...(19): siRNA sense strand
gguagaagacccagaagaa

SEQ ID NO: 268637 - RNA, 19 nt, Homo sapiens
  misc_RNA (1)...(19): siRNA sense strand
uauagaacuucaaggagua

SEQ ID NO: 268638 - RNA, 19 nt, Homo sapiens
  misc_RNA (1)...(19): siRNA sense strand
ggaagcugauggaacuuug

SEQ ID NO: 268639 - RNA, 19 nt, Homo sapiens
  misc_RNA (1)...(19): siRNA sense strand
gcaauaccacagccauuaa

SEQ ID NO: 268640 - RNA, 19 nt, Homo sapiens
  misc_RNA (1)...(19): siRNA sense strand
caccagacuucaaagaauu

SEQ ID NO: 268641 - RNA, 19 nt, Homo sapiens
  misc_RNA (1)...(19): siRNA sense strand
ggagcaaucucagaacugu

SEQ ID NO: 268642 - RNA, 19 nt, Homo sapiens
  misc_RNA (1)...(19): siRNA sense strand
gauggcaaauccaagaaga

SEQ ID NO: 268643 - RNA, 19 nt, Homo sapiens
  misc_RNA (1)...(19): siRNA sense strand
gauggaacuuuggauugua

SEQ ID NO: 268644 - RNA, 19 nt, Homo sapiens
  misc_RNA (1)...(19): siRNA sense strand
gcuuugacuugcaccuuua

SEQ ID NO: 268645 - RNA, 19 nt, Homo sapiens
  misc_RNA (1)...(19): siRNA sense strand
gacgaugacuccgauuuga

SEQ ID NO: 268646 - RNA, 19 nt, Homo sapiens
  misc_RNA (1)...(19): siRNA sense strand
caauauagaacuucaagga

SEQ ID NO: 268647 - RNA, 19 nt, Homo sapiens
  misc_RNA (1)...(19): siRNA sense strand
caaccaauauagaacuuca

SEQ ID NO: 268648 - RNA, 19 nt, Homo sapiens
  misc_RNA (1)...(19): siRNA sense strand
augaagagcuggaagauuc

SEQ ID NO: 268649 - RNA, 19 nt, Homo sapiens
  misc_RNA (1)...(19): siRNA sense strand
gagaacuccucuuggaugu

SEQ ID NO: 268650 - RNA, 19 nt, Homo sapiens
  misc_RNA (1)...(19): siRNA sense strand
gaauugucaucugggauuu

SEQ ID NO: 268651 - RNA, 19 nt, Homo sapiens
  misc_RNA (1)...(19): siRNA sense strand
gacaagaggcauugcuaaa

SEQ ID NO: 268652 - RNA, 19 nt, Homo sapiens
  misc_RNA (1)...(19): siRNA sense strand
ggacgaugacuccgauuug

SEQ ID NO: 268653 - RNA, 19 nt, Homo sapiens
  misc_RNA (1)...(19): siRNA sense strand
ccaguggagugguaucuau

SEQ ID NO: 268654 - RNA, 19 nt, Homo sapiens
  misc_RNA (1)...(19): siRNA sense strand
caucugggauuucuugaca

SEQ ID NO: 268655 - RNA, 19 nt, Homo sapiens
  misc_RNA (1)...(19): siRNA sense strand
uucaaaggcucuauuguau

SEQ ID NO: 268656 - RNA, 19 nt, Homo sapiens
  misc_RNA (1)...(19): siRNA sense strand
gcacagaaucaaguagaaa

SEQ ID NO: 268657 - RNA, 19 nt, Homo sapiens
  misc_RNA (1)...(19): siRNA sense strand
gaccagagguuucgauucc

SEQ ID NO: 268658 - RNA, 19 nt, Homo sapiens
  misc_RNA (1)...(19): siRNA sense strand
gccauuaagucaauugagu

SEQ ID NO: 268659 - RNA, 19 nt, Homo sapiens
  misc_RNA (1)...(19): siRNA sense strand
guagaagacccagaagaaa

SEQ ID NO: 268660 - RNA, 19 nt, Homo sapiens
  misc_RNA (1)...(19): siRNA sense strand
agaggaagcugauggaacu

SEQ ID NO: 268661 - RNA, 19 nt, Homo sapiens
  misc_RNA (1)...(19): siRNA sense strand
gcaaauccaagaagaagca

SEQ ID NO: 268662 - RNA, 19 nt, Homo sapiens
  misc_RNA (1)...(19): siRNA sense strand
acagugggauguucuuuca

SEQ ID NO: 268663 - RNA, 19 nt, Homo sapiens
  misc_RNA (1)...(19): siRNA sense strand
cauccaguguguucuuuau

SEQ ID NO: 268664 - RNA, 19 nt, Homo sapiens
  misc_RNA (1)...(19): siRNA sense strand
ggcuuugacuugcaccuuu

SEQ ID NO: 268665 - RNA, 19 nt, Homo sapiens
  misc_RNA (1)...(19): siRNA sense strand
aaaccuccuugauggauga

SEQ ID NO: 268666 - RNA, 19 nt, Homo sapiens
  misc_RNA (1)...(19): siRNA sense strand
ggcacagaaucaaguagaa

SEQ ID NO: 268667 - RNA, 19 nt, Homo sapiens
  misc_RNA (1)...(19): siRNA sense strand
ugaacguuguggcaucuuu

SEQ ID NO: 268668 - RNA, 19 nt, Homo sapiens
  misc_RNA (1)...(19): siRNA sense strand
cgaauugucaucugggauu

SEQ ID NO: 268669 - RNA, 19 nt, Homo sapiens
  misc_RNA (1)...(19): siRNA sense strand
gaggagcaaucucagaacu

SEQ ID NO: 268670 - RNA, 19 nt, Homo sapiens
  misc_RNA (1)...(19): siRNA sense strand
ccuaaaggaucaaaaggua

SEQ ID NO: 268671 - RNA, 19 nt, Homo sapiens
  misc_RNA (1)...(19): siRNA sense strand
ugaaguccauccacuacug

SEQ ID NO: 268672 - RNA, 19 nt, Homo sapiens
  misc_RNA (1)...(19): siRNA sense strand
agaaagggaaucaggguuu

SEQ ID NO: 268673 - RNA, 19 nt, Homo sapiens
  misc_RNA (1)...(19): siRNA sense strand
caagaggcauugcuaaaau

SEQ ID NO: 268674 - RNA, 19 nt, Homo sapiens
  misc_RNA (1)...(19): siRNA sense strand
ugacaagaggcauugcuaa

SEQ ID NO: 268675 - RNA, 19 nt, Homo sapiens
  misc_RNA (1)...(19): siRNA sense strand
auucaaaggcucuauugua

SEQ ID NO: 268676 - RNA, 19 nt, Homo sapiens
  misc_RNA (1)...(19): siRNA sense strand
ugauggaacuuuggauugu

SEQ ID NO: 268677 - RNA, 19 nt, Homo sapiens
  misc_RNA (1)...(19): siRNA sense strand
caaggaguaccaaaugaug

SEQ ID NO: 268678 - RNA, 19 nt, Homo sapiens
  misc_RNA (1)...(19): siRNA sense strand
gaaaucuuaacauguggaa

SEQ ID NO: 268679 - RNA, 19 nt, Homo sapiens
  misc_RNA (1)...(19): siRNA sense strand
gggcugaugcugcagaaga

SEQ ID NO: 268680 - RNA, 19 nt, Homo sapiens
  misc_RNA (1)...(19): siRNA sense strand
gaauacaucguggcagguu

SEQ ID NO: 268681 - RNA, 19 nt, Homo sapiens
  misc_RNA (1)...(19): siRNA sense strand
gauaacauagugucacagu

SEQ ID NO: 268682 - RNA, 19 nt, Homo sapiens
  misc_RNA (1)...(19): siRNA sense strand
ggaugaaaauguagaauac

SEQ ID NO: 268683 - RNA, 19 nt, Homo sapiens
  misc_RNA (1)...(19): siRNA sense strand
gauggcagagaaaucuuaa

SEQ ID NO: 268684 - RNA, 19 nt, Homo sapiens
  misc_RNA (1)...(19): siRNA sense strand
ucucgugugucccaugaaa

SEQ ID NO: 268685 - RNA, 19 nt, Homo sapiens
  misc_RNA (1)...(19): siRNA sense strand
ccaauaucauccacgagau

SEQ ID NO: 268686 - RNA, 19 nt, Homo sapiens
  misc_RNA (1)...(19): siRNA sense strand
aaccgaaacucuacaaagg

SEQ ID NO: 268687 - RNA, 19 nt, Homo sapiens
  misc_RNA (1)...(19): siRNA sense strand
gcugauggaacuuuggauu

SEQ ID NO: 268688 - RNA, 19 nt, Homo sapiens
  misc_RNA (1)...(19): siRNA sense strand
ucaaaggcucuauuguauu

SEQ ID NO: 268689 - RNA, 19 nt, Homo sapiens
  misc_RNA (1)...(19): siRNA sense strand
gaugaagagcuggaagauu

SEQ ID NO: 268690 - RNA, 19 nt, Homo sapiens
  misc_RNA (1)...(19): siRNA sense strand
guagaaaacuggagugcau

SEQ ID NO: 268691 - RNA, 19 nt, Homo sapiens
  misc_RNA (1)...(19): siRNA sense strand
acaacuggaacaagcaaua

SEQ ID NO: 268692 - RNA, 19 nt, Homo sapiens
  misc_RNA (1)...(19): siRNA sense strand
ugacuccgauuugaacguu

SEQ ID NO: 268693 - RNA, 19 nt, Homo sapiens
  misc_RNA (1)...(19): siRNA sense strand
guucucgugugucccauga

SEQ ID NO: 268694 - RNA, 19 nt, Homo sapiens
  misc_RNA (1)...(19): siRNA sense strand
aaugauggccgaauuguca

SEQ ID NO: 268695 - RNA, 19 nt, Homo sapiens
  misc_RNA (1)...(19): siRNA sense strand
agcaaucucagaacuguua

SEQ ID NO: 268696 - RNA, 19 nt, Homo sapiens
  misc_RNA (1)...(19): siRNA sense strand
cauuuaaaccgaaacucua

SEQ ID NO: 268697 - RNA, 19 nt, Homo sapiens
  misc_RNA (1)...(19): siRNA sense strand
gggcacagaaucaaguaga

SEQ ID NO: 268698 - RNA, 19 nt, Homo sapiens
  misc_RNA (1)...(19): siRNA sense strand
cacggcagaucgaauaauc

SEQ ID NO: 268699 - RNA, 19 nt, Homo sapiens
  misc_RNA (1)...(19): siRNA sense strand
gcaaccuggugaagauucu

SEQ ID NO: 268700 - RNA, 19 nt, Homo sapiens
  misc_RNA (1)...(19): siRNA sense strand
gaacuucaaggaguaccaa

SEQ ID NO: 268701 - RNA, 19 nt, Homo sapiens
  misc_RNA (1)...(19): siRNA sense strand
ggucccagccaccuaagaa

SEQ ID NO: 268702 - RNA, 19 nt, Homo sapiens
  misc_RNA (1)...(19): siRNA sense strand
cagagaaaucuuaacaugu

SEQ ID NO: 268703 - RNA, 19 nt, Homo sapiens
  misc_RNA (1)...(19): siRNA sense strand
cugaaccuaugcaggaauu

SEQ ID NO: 268704 - RNA, 19 nt, Homo sapiens
  misc_RNA (1)...(19): siRNA sense strand
ugauggcagagaaaucuua

SEQ ID NO: 268705 - RNA, 19 nt, Homo sapiens
  misc_RNA (1)...(19): siRNA sense strand
ugagguagaagacccagaa

SEQ ID NO: 268706 - RNA, 19 nt, Homo sapiens
  misc_RNA (1)...(19): siRNA sense strand
caucauagcauccauuucc

SEQ ID NO: 268707 - RNA, 19 nt, Homo sapiens
  misc_RNA (1)...(19): siRNA sense strand
uggagagccugaaccuaug

SEQ ID NO: 268708 - RNA, 19 nt, Homo sapiens
  misc_RNA (1)...(19): siRNA sense strand
gaucagcgaaggguaaagu

SEQ ID NO: 268709 - RNA, 19 nt, Homo sapiens
  misc_RNA (1)...(19): siRNA sense strand
gaucaaaagguaaagagaa

SEQ ID NO: 268710 - RNA, 19 nt, Homo sapiens
  misc_RNA (1)...(19): siRNA sense strand
ccagccaccuaagaagaaa

SEQ ID NO: 268711 - RNA, 19 nt, Homo sapiens
  misc_RNA (1)...(19): siRNA sense strand
aagaugaagauaagaguga

SEQ ID NO: 268712 - RNA, 19 nt, Homo sapiens
  misc_RNA (1)...(19): siRNA sense strand
guugcuuccuucagaguga

SEQ ID NO: 268713 - RNA, 19 nt, Homo sapiens
  misc_RNA (1)...(19): siRNA sense strand
caaaggggacagagguuua

SEQ ID NO: 268714 - RNA, 19 nt, Homo sapiens
  misc_RNA (1)...(19): siRNA sense strand
cagcaugcccuguacaucu

SEQ ID NO: 268715 - RNA, 19 nt, Homo sapiens
  misc_RNA (1)...(19): siRNA sense strand
cuuaacauguggaagagau

SEQ ID NO: 268716 - RNA, 19 nt, Homo sapiens
  misc_RNA (1)...(19): siRNA sense strand
aauaauuagugcacacauc

SEQ ID NO: 268717 - RNA, 19 nt, Homo sapiens
  misc_RNA (1)...(19): siRNA sense strand
uaccacagccauuaaguca

SEQ ID NO: 268718 - RNA, 19 nt, Homo sapiens
  misc_RNA (1)...(19): siRNA sense strand
ucaccagcguggacccuau

SEQ ID NO: 268719 - RNA, 19 nt, Homo sapiens
  misc_RNA (1)...(19): siRNA sense strand
uuaagucaauugaguuugc

SEQ ID NO: 268720 - RNA, 19 nt, Homo sapiens
  misc_RNA (1)...(19): siRNA sense strand
ucgaguugcuggaguccuu

SEQ ID NO: 268721 - RNA, 19 nt, Homo sapiens
  misc_RNA (1)...(19): siRNA sense strand
uagaacagcugcaguacaa

SEQ ID NO: 268722 - RNA, 19 nt, Homo sapiens
  misc_RNA (1)...(19): siRNA sense strand
agagagagcuucuauagca

SEQ ID NO: 268723 - RNA, 19 nt, Homo sapiens
  misc_RNA (1)...(19): siRNA sense strand
gcagagagagcuucuauag

SEQ ID NO: 268724 - RNA, 19 nt, Homo sapiens
  misc_RNA (1)...(19): siRNA sense strand
ggccagggcuccaagagaa

SEQ ID NO: 268725 - RNA, 19 nt, Homo sapiens
  misc_RNA (1)...(19): siRNA sense strand
gagcuggccuuucaucauc

SEQ ID NO: 268726 - RNA, 19 nt, Homo sapiens
  misc_RNA (1)...(19): siRNA sense strand
gagcagauacccucaccua

SEQ ID NO: 268727 - RNA, 19 nt, Homo sapiens
  misc_RNA (1)...(19): siRNA sense strand
gcagauacccucaccuaca

SEQ ID NO: 268728 - RNA, 19 nt, Homo sapiens
  misc_RNA (1)...(19): siRNA sense strand
gcucaucagcuccaucuuu

SEQ ID NO: 268729 - RNA, 19 nt, Homo sapiens
  misc_RNA (1)...(19): siRNA sense strand
gcucugggcccucauauuc

SEQ ID NO: 268730 - RNA, 19 nt, Homo sapiens
  misc_RNA (1)...(19): siRNA sense strand
gaagugaucccuugcaaaa

SEQ ID NO: 268731 - RNA, 19 nt, Homo sapiens
  misc_RNA (1)...(19): siRNA sense strand
gaacagcugcaguacaauc

SEQ ID NO: 268732 - RNA, 19 nt, Homo sapiens
  misc_RNA (1)...(19): siRNA sense strand
uggaaaggcugcagaucuu

SEQ ID NO: 268733 - RNA, 19 nt, Homo sapiens
  misc_RNA (1)...(19): siRNA sense strand
acccacaccucacaaauug

SEQ ID NO: 268734 - RNA, 19 nt, Homo sapiens
  misc_RNA (1)...(19): siRNA sense strand
ucaccgaggccauucagua

SEQ ID NO: 268735 - RNA, 19 nt, Homo sapiens
  misc_RNA (1)...(19): siRNA sense strand
ccucaugccaccuugaaua

SEQ ID NO: 268736 - RNA, 19 nt, Homo sapiens
  misc_RNA (1)...(19): siRNA sense strand
caaagcaggagcaauggaa

SEQ ID NO: 268737 - RNA, 19 nt, Homo sapiens
  misc_RNA (1)...(19): siRNA sense strand
cggcagcgcuccaacaucu

SEQ ID NO: 268738 - RNA, 19 nt, Homo sapiens
  misc_RNA (1)...(19): siRNA sense strand
gacccacaccucacaaauu

SEQ ID NO: 268739 - RNA, 19 nt, Homo sapiens
  misc_RNA (1)...(19): siRNA sense strand
ggaaguccaugugggagau

SEQ ID NO: 268740 - RNA, 19 nt, Homo sapiens
  misc_RNA (1)...(19): siRNA sense strand
ccgagaugcugucaaguuc

SEQ ID NO: 268741 - RNA, 19 nt, Homo sapiens
  misc_RNA (1)...(19): siRNA sense strand
gggagcugcuggcugcaaa

SEQ ID NO: 268742 - RNA, 19 nt, Homo sapiens
  misc_RNA (1)...(19): siRNA sense strand
gggcagagagagcuucuau

SEQ ID NO: 268743 - RNA, 19 nt, Homo sapiens
  misc_RNA (1)...(19): siRNA sense strand
ucucaaagcaggagcaaug

SEQ ID NO: 268744 - RNA, 19 nt, Homo sapiens
  misc_RNA (1)...(19): siRNA sense strand
aggaugagauugcccucua

SEQ ID NO: 268745 - RNA, 19 nt, Homo sapiens
  misc_RNA (1)...(19): siRNA sense strand
ccacaccucacaaauugaa

SEQ ID NO: 268746 - RNA, 19 nt, Homo sapiens
  misc_RNA (1)...(19): siRNA sense strand
gcaaauacgguggcaugga

SEQ ID NO: 268747 - RNA, 19 nt, Homo sapiens
  misc_RNA (1)...(19): siRNA sense strand
gcugcuggcugcaaagaag

SEQ ID NO: 268748 - RNA, 19 nt, Homo sapiens
  misc_RNA (1)...(19): siRNA sense strand
acacagcccuuguucucau

SEQ ID NO: 268749 - RNA, 19 nt, Homo sapiens
  misc_RNA (1)...(19): siRNA sense strand
cucaucagcuccaucuuug

SEQ ID NO: 268750 - RNA, 19 nt, Homo sapiens
  misc_RNA (1)...(19): siRNA sense strand
gaaguggugcugguuagga

SEQ ID NO: 268751 - RNA, 19 nt, Homo sapiens
  misc_RNA (1)...(19): siRNA sense strand
ccucauauuccaacaacuu

SEQ ID NO: 268752 - RNA, 19 nt, Homo sapiens
  misc_RNA (1)...(19): siRNA sense strand
ggagcuggccuuucaucau

SEQ ID NO: 268753 - RNA, 19 nt, Homo sapiens
  misc_RNA (1)...(19): siRNA sense strand
gcaacagcagcaacaggaa

SEQ ID NO: 268754 - RNA, 19 nt, Homo sapiens
  misc_RNA (1)...(19): siRNA sense strand
gaccagauugugcuucuca

SEQ ID NO: 268755 - RNA, 19 nt, Homo sapiens
  misc_RNA (1)...(19): siRNA sense strand
gaagacccacaccucacaa

SEQ ID NO: 268756 - RNA, 19 nt, Homo sapiens
  misc_RNA (1)...(19): siRNA sense strand
ggaugagauugcccucuac

SEQ ID NO: 268757 - RNA, 19 nt, Homo sapiens
  misc_RNA (1)...(19): siRNA sense strand
cagauacccucaccuacac

SEQ ID NO: 268758 - RNA, 19 nt, Homo sapiens
  misc_RNA (1)...(19): siRNA sense strand
caucaucaucucugcaaga

SEQ ID NO: 268759 - RNA, 19 nt, Homo sapiens
  misc_RNA (1)...(19): siRNA sense strand
aaguagaacagcugcagua

SEQ ID NO: 268760 - RNA, 19 nt, Homo sapiens
  misc_RNA (1)...(19): siRNA sense strand
cuacacagcccuuguucuc

SEQ ID NO: 268761 - RNA, 19 nt, Homo sapiens
  misc_RNA (1)...(19): siRNA sense strand
ugagauugcccucuacaca

SEQ ID NO: 268762 - RNA, 19 nt, Homo sapiens
  misc_RNA (1)...(19): siRNA sense strand
gauguggacuucguuuuga

SEQ ID NO: 268763 - RNA, 19 nt, Homo sapiens
  misc_RNA (1)...(19): siRNA sense strand
gcagcgcuccaacaucuuc

SEQ ID NO: 268764 - RNA, 19 nt, Homo sapiens
  misc_RNA (1)...(19): siRNA sense strand
gacagggcccagacagcua

SEQ ID NO: 268765 - RNA, 19 nt, Homo sapiens
  misc_RNA (1)...(19): siRNA sense strand
ccagauugugcuucucaaa

SEQ ID NO: 268766 - RNA, 19 nt, Homo sapiens
  misc_RNA (1)...(19): siRNA sense strand
guggaaaggcugcagaucu

SEQ ID NO: 268767 - RNA, 19 nt, Homo sapiens
  misc_RNA (1)...(19): siRNA sense strand
gcaagacucaucgccaaag

SEQ ID NO: 268768 - RNA, 19 nt, Homo sapiens
  misc_RNA (1)...(19): siRNA sense strand
ucagcuccaucuuugacuu

SEQ ID NO: 268769 - RNA, 19 nt, Homo sapiens
  misc_RNA (1)...(19): siRNA sense strand
gcccucauauuccaacaac

SEQ ID NO: 268770 - RNA, 19 nt, Homo sapiens
  misc_RNA (1)...(19): siRNA sense strand
ggaaaggcugcagaucuuc

SEQ ID NO: 268771 - RNA, 19 nt, Homo sapiens
  misc_RNA (1)...(19): siRNA sense strand
guagaacagcugcaguaca

SEQ ID NO: 268772 - RNA, 19 nt, Homo sapiens
  misc_RNA (1)...(19): siRNA sense strand
ugaagugaucccuugcaaa

SEQ ID NO: 268773 - RNA, 19 nt, Homo sapiens
  misc_RNA (1)...(19): siRNA sense strand
gucccgagaugcugucaag

SEQ ID NO: 268774 - RNA, 19 nt, Homo sapiens
  misc_RNA (1)...(19): siRNA sense strand
ggcagagagagcuucuaua

SEQ ID NO: 268775 - RNA, 19 nt, Homo sapiens
  misc_RNA (1)...(19): siRNA sense strand
cugccagaaugaccagauu

SEQ ID NO: 268776 - RNA, 19 nt, Homo sapiens
  misc_RNA (1)...(19): siRNA sense strand
ggccuacaaugcugacaac

SEQ ID NO: 268777 - RNA, 19 nt, Homo sapiens
  misc_RNA (1)...(19): siRNA sense strand
uggaaguggugcugguuag

SEQ ID NO: 268778 - RNA, 19 nt, Homo sapiens
  misc_RNA (1)...(19): siRNA sense strand
caugccaccuugaauacag

SEQ ID NO: 268779 - RNA, 19 nt, Homo sapiens
  misc_RNA (1)...(19): siRNA sense strand
caaagcauccuggcaaagc

SEQ ID NO: 268780 - RNA, 19 nt, Homo sapiens
  misc_RNA (1)...(19): siRNA sense strand
caagacucaucgccaaagc

SEQ ID NO: 268781 - RNA, 19 nt, Homo sapiens
  misc_RNA (1)...(19): siRNA sense strand
uugaagugaucccuugcaa

SEQ ID NO: 268782 - RNA, 19 nt, Homo sapiens
  misc_RNA (1)...(19): siRNA sense strand
cccgagaugcugucaaguu

SEQ ID NO: 268783 - RNA, 19 nt, Homo sapiens
  misc_RNA (1)...(19): siRNA sense strand
gaggcucucaggcuuuaug

SEQ ID NO: 268784 - RNA, 19 nt, Homo sapiens
  misc_RNA (1)...(19): siRNA sense strand
ugaccgauguggacuucgu

SEQ ID NO: 268785 - RNA, 19 nt, Homo sapiens
  misc_RNA (1)...(19): siRNA sense strand
gcaaggcugagggcagaga

SEQ ID NO: 268786 - RNA, 19 nt, Homo sapiens
  misc_RNA (1)...(19): siRNA sense strand
guagccagcauguggaaag

SEQ ID NO: 268787 - RNA, 19 nt, Homo sapiens
  misc_RNA (1)...(19): siRNA sense strand
gccagaaugaccagauugu

SEQ ID NO: 268788 - RNA, 19 nt, Homo sapiens
  misc_RNA (1)...(19): siRNA sense strand
gagcugcuggcugcaaaga

SEQ ID NO: 268789 - RNA, 19 nt, Homo sapiens
  misc_RNA (1)...(19): siRNA sense strand
uucaguacgugguggaguu

SEQ ID NO: 268790 - RNA, 19 nt, Homo sapiens
  misc_RNA (1)...(19): siRNA sense strand
ucccuccacucuacaagga

SEQ ID NO: 268791 - RNA, 19 nt, Homo sapiens
  misc_RNA (1)...(19): siRNA sense strand
gaugagauugcccucuaca

SEQ ID NO: 268792 - RNA, 19 nt, Homo sapiens
  misc_RNA (1)...(19): siRNA sense strand
cagauugugcuucucaaag

SEQ ID NO: 268793 - RNA, 19 nt, Homo sapiens
  misc_RNA (1)...(19): siRNA sense strand
gaaugaccagauugugcuu

SEQ ID NO: 268794 - RNA, 19 nt, Homo sapiens
  misc_RNA (1)...(19): siRNA sense strand
gcacggagcucaacaagaa

SEQ ID NO: 268795 - RNA, 19 nt, Homo sapiens
  misc_RNA (1)...(19): siRNA sense strand
gaagaaggcccacaucaug

SEQ ID NO: 268796 - RNA, 19 nt, Homo sapiens
  misc_RNA (1)...(19): siRNA sense strand
gcagaacaccucagugaug

SEQ ID NO: 268797 - RNA, 19 nt, Homo sapiens
  misc_RNA (1)...(19): siRNA sense strand
cagaacaccucagugauga

SEQ ID NO: 268798 - RNA, 19 nt, Homo sapiens
  misc_RNA (1)...(19): siRNA sense strand
ggaagcuggugaagaacaa

SEQ ID NO: 268799 - RNA, 19 nt, Homo sapiens
  misc_RNA (1)...(19): siRNA sense strand
gccaagccguggagaauau

SEQ ID NO: 268800 - RNA, 19 nt, Homo sapiens
  misc_RNA (1)...(19): siRNA sense strand
agaagcaucuggagaagga

SEQ ID NO: 268801 - RNA, 19 nt, Homo sapiens
  misc_RNA (1)...(19): siRNA sense strand
agagugaggucauugaugu

SEQ ID NO: 268802 - RNA, 19 nt, Homo sapiens
  misc_RNA (1)...(19): siRNA sense strand
acgggaagcuggugaagaa

SEQ ID NO: 268803 - RNA, 19 nt, Homo sapiens
  misc_RNA (1)...(19): siRNA sense strand
uacaaggacuggcacaaga

SEQ ID NO: 268804 - RNA, 19 nt, Homo sapiens
  misc_RNA (1)...(19): siRNA sense strand
gcacaagagcaagaagaaa

SEQ ID NO: 268805 - RNA, 19 nt, Homo sapiens
  misc_RNA (1)...(19): siRNA sense strand
ccaagaagcgggucauuac

SEQ ID NO: 268806 - RNA, 19 nt, Homo sapiens
  misc_RNA (1)...(19): siRNA sense strand
ugaggucauugaugucauu

SEQ ID NO: 268807 - RNA, 19 nt, Homo sapiens
  misc_RNA (1)...(19): siRNA sense strand
ggagaccucgggagacuug

SEQ ID NO: 268808 - RNA, 19 nt, Homo sapiens
  misc_RNA (1)...(19): siRNA sense strand
ccagacagcccaagagaag

SEQ ID NO: 268809 - RNA, 19 nt, Homo sapiens
  misc_RNA (1)...(19): siRNA sense strand
caaggucauucgggucauu

SEQ ID NO: 268810 - RNA, 19 nt, Homo sapiens
  misc_RNA (1)...(19): siRNA sense strand
gucacaagccgcuggcaua

SEQ ID NO: 268811 - RNA, 19 nt, Homo sapiens
  misc_RNA (1)...(19): siRNA sense strand
gaaguacugcaaggucauu

SEQ ID NO: 268812 - RNA, 19 nt, Homo sapiens
  misc_RNA (1)...(19): siRNA sense strand
gcugaaggguuguauugcu

SEQ ID NO: 268813 - RNA, 19 nt, Homo sapiens
  misc_RNA (1)...(19): siRNA sense strand
ugacaccaccuccaaguuc

SEQ ID NO: 268814 - RNA, 19 nt, Homo sapiens
  misc_RNA (1)...(19): siRNA sense strand
aaaagcagcuacagaagga

SEQ ID NO: 268815 - RNA, 19 nt, Homo sapiens
  misc_RNA (1)...(19): siRNA sense strand
ggucauugaugucauugcu

SEQ ID NO: 268816 - RNA, 19 nt, Homo sapiens
  misc_RNA (1)...(19): siRNA sense strand
uggaggcggugacaauugu

SEQ ID NO: 268817 - RNA, 19 nt, Homo sapiens
  misc_RNA (1)...(19): siRNA sense strand
ucauuacgcugagaaaguc

SEQ ID NO: 268818 - RNA, 19 nt, Homo sapiens
  misc_RNA (1)...(19): siRNA sense strand
cagaagaaggcccacauca

SEQ ID NO: 268819 - RNA, 19 nt, Homo sapiens
  misc_RNA (1)...(19): siRNA sense strand
ggcacaagagcaagaagaa

SEQ ID NO: 268820 - RNA, 19 nt, Homo sapiens
  misc_RNA (1)...(19): siRNA sense strand
acaagccgcuggcauacca

SEQ ID NO: 268821 - RNA, 19 nt, Homo sapiens
  misc_RNA (1)...(19): siRNA sense strand
gcagaagaaggcccacauc

SEQ ID NO: 268822 - RNA, 19 nt, Homo sapiens
  misc_RNA (1)...(19): siRNA sense strand
aaaagaagcaucuggagaa

SEQ ID NO: 268823 - RNA, 19 nt, Homo sapiens
  misc_RNA (1)...(19): siRNA sense strand
aaagaagcaucuggagaag

SEQ ID NO: 268824 - RNA, 19 nt, Homo sapiens
  misc_RNA (1)...(19): siRNA sense strand
uugcagaacaccucaguga

SEQ ID NO: 268825 - RNA, 19 nt, Homo sapiens
  misc_RNA (1)...(19): siRNA sense strand
cacaagagcaagaagaaag

SEQ ID NO: 268826 - RNA, 19 nt, Homo sapiens
  misc_RNA (1)...(19): siRNA sense strand
uguccacacucagaugaaa

SEQ ID NO: 268827 - RNA, 19 nt, Homo sapiens
  misc_RNA (1)...(19): siRNA sense strand
ggugacaauuguagaaacg

SEQ ID NO: 268828 - RNA, 19 nt, Homo sapiens
  misc_RNA (1)...(19): siRNA sense strand
ccaugaagaaguacugcaa

SEQ ID NO: 268829 - RNA, 19 nt, Homo sapiens
  misc_RNA (1)...(19): siRNA sense strand
gaccaucuuugcagaacac

SEQ ID NO: 268830 - RNA, 19 nt, Homo sapiens
  misc_RNA (1)...(19): siRNA sense strand
agaagaaggcccacaucau

SEQ ID NO: 268831 - RNA, 19 nt, Homo sapiens
  misc_RNA (1)...(19): siRNA sense strand
guauugcugguaccaagaa

SEQ ID NO: 268832 - RNA, 19 nt, Homo sapiens
  misc_RNA (1)...(19): siRNA sense strand
gagcucaacaagaagaucu

SEQ ID NO: 268833 - RNA, 19 nt, Homo sapiens
  misc_RNA (1)...(19): siRNA sense strand
gcgcaagguggccugcauu

SEQ ID NO: 268834 - RNA, 19 nt, Homo sapiens
  misc_RNA (1)...(19): siRNA sense strand
cagccagagugaggucauu

SEQ ID NO: 268835 - RNA, 19 nt, Homo sapiens
  misc_RNA (1)...(19): siRNA sense strand
accaagaagcgggucauua

SEQ ID NO: 268836 - RNA, 19 nt, Homo sapiens
  misc_RNA (1)...(19): siRNA sense strand
gguggaggcggugacaauu

SEQ ID NO: 268837 - RNA, 19 nt, Homo sapiens
  misc_RNA (1)...(19): siRNA sense strand
cgaggucuccggagcuuca

SEQ ID NO: 268838 - RNA, 19 nt, Homo sapiens
  misc_RNA (1)...(19): siRNA sense strand
gggaagcuggugaagaaca

SEQ ID NO: 268839 - RNA, 19 nt, Homo sapiens
  misc_RNA (1)...(19): siRNA sense strand
ggaggcggugacaauugua

SEQ ID NO: 268840 - RNA, 19 nt, Homo sapiens
  misc_RNA (1)...(19): siRNA sense strand
gcggugacaauuguagaaa

SEQ ID NO: 268841 - RNA, 19 nt, Homo sapiens
  misc_RNA (1)...(19): siRNA sense strand
gucauuacgcugagaaagu

SEQ ID NO: 268842 - RNA, 19 nt, Homo sapiens
  misc_RNA (1)...(19): siRNA sense strand
guggaggcggugacaauug

SEQ ID NO: 268843 - RNA, 19 nt, Homo sapiens
  misc_RNA (1)...(19): siRNA sense strand
agagguggcgggacacaga

SEQ ID NO: 268844 - RNA, 19 nt, Homo sapiens
  misc_RNA (1)...(19): siRNA sense strand
gcgggacacagacgggaaa

SEQ ID NO: 268845 - RNA, 19 nt, Homo sapiens
  misc_RNA (1)...(19): siRNA sense strand
gagaacagauuacagcuaa

SEQ ID NO: 268846 - RNA, 19 nt, Homo sapiens
  misc_RNA (1)...(19): siRNA sense strand
ggacaaagcauccauaauc

SEQ ID NO: 268847 - RNA, 19 nt, Homo sapiens
  misc_RNA (1)...(19): siRNA sense strand
gaagagaggcauuuccaua

SEQ ID NO: 268848 - RNA, 19 nt, Homo sapiens
  misc_RNA (1)...(19): siRNA sense strand
gauccuagcuaaagacuau

SEQ ID NO: 268849 - RNA, 19 nt, Homo sapiens
  misc_RNA (1)...(19): siRNA sense strand
ggaaacagcauuuaugaau

SEQ ID NO: 268850 - RNA, 19 nt, Homo sapiens
  misc_RNA (1)...(19): siRNA sense strand
ggacaacguuggccgagaa

SEQ ID NO: 268851 - RNA, 19 nt, Homo sapiens
  misc_RNA (1)...(19): siRNA sense strand
gacaaagcauccauaauca

SEQ ID NO: 268852 - RNA, 19 nt, Homo sapiens
  misc_RNA (1)...(19): siRNA sense strand
gcuaaagacuaucugcauu

SEQ ID NO: 268853 - RNA, 19 nt, Homo sapiens
  misc_RNA (1)...(19): siRNA sense strand
ugaaucaggugaccgauau

SEQ ID NO: 268854 - RNA, 19 nt, Homo sapiens
  misc_RNA (1)...(19): siRNA sense strand
caacuggcuuccauuaaug

SEQ ID NO: 268855 - RNA, 19 nt, Homo sapiens
  misc_RNA (1)...(19): siRNA sense strand
ccaacuggcuuccauuaau

SEQ ID NO: 268856 - RNA, 19 nt, Homo sapiens
  misc_RNA (1)...(19): siRNA sense strand
gcgaaaccauuagaaacua

SEQ ID NO: 268857 - RNA, 19 nt, Homo sapiens
  misc_RNA (1)...(19): siRNA sense strand
gauaugcccuggagcacuu

SEQ ID NO: 268858 - RNA, 19 nt, Homo sapiens
  misc_RNA (1)...(19): siRNA sense strand
uguaauggcucacacuuug

SEQ ID NO: 268859 - RNA, 19 nt, Homo sapiens
  misc_RNA (1)...(19): siRNA sense strand
cuacacagcaauauguuua

SEQ ID NO: 268860 - RNA, 19 nt, Homo sapiens
  misc_RNA (1)...(19): siRNA sense strand
ggauauaucuccucaucag

SEQ ID NO: 268861 - RNA, 19 nt, Homo sapiens
  misc_RNA (1)...(19): siRNA sense strand
caaaguagcccacaugaac

SEQ ID NO: 268862 - RNA, 19 nt, Homo sapiens
  misc_RNA (1)...(19): siRNA sense strand
agaagaagagaacagauua

SEQ ID NO: 268863 - RNA, 19 nt, Homo sapiens
  misc_RNA (1)...(19): siRNA sense strand
ccacucagcaaaugauuaa

SEQ ID NO: 268864 - RNA, 19 nt, Homo sapiens
  misc_RNA (1)...(19): siRNA sense strand
caccaugacugacaacaga

SEQ ID NO: 268865 - RNA, 19 nt, Homo sapiens
  misc_RNA (1)...(19): siRNA sense strand
ccaguuugauccuagcuaa

SEQ ID NO: 268866 - RNA, 19 nt, Homo sapiens
  misc_RNA (1)...(19): siRNA sense strand
gaccaacuggcuuccauua

SEQ ID NO: 268867 - RNA, 19 nt, Homo sapiens
  misc_RNA (1)...(19): siRNA sense strand
caaagcauccauaaucaga

SEQ ID NO: 268868 - RNA, 19 nt, Homo sapiens
  misc_RNA (1)...(19): siRNA sense strand
gcucucaccggcaguauuu

SEQ ID NO: 268869 - RNA, 19 nt, Homo sapiens
  misc_RNA (1)...(19): siRNA sense strand
ucaacuauguccucacaga

SEQ ID NO: 268870 - RNA, 19 nt, Homo sapiens
  misc_RNA (1)...(19): siRNA sense strand
ucacggagaucaagcuaca

SEQ ID NO: 268871 - RNA, 19 nt, Homo sapiens
  misc_RNA (1)...(19): siRNA sense strand
uaugacagcgaaaccauua

SEQ ID NO: 268872 - RNA, 19 nt, Homo sapiens
  misc_RNA (1)...(19): siRNA sense strand
gaagauaguguggucaguu

SEQ ID NO: 268873 - RNA, 19 nt, Homo sapiens
  misc_RNA (1)...(19): siRNA sense strand
ggguaugggugcagagcua

SEQ ID NO: 268874 - RNA, 19 nt, Homo sapiens
  misc_RNA (1)...(19): siRNA sense strand
gaaggaaaacagugaauuu

SEQ ID NO: 268875 - RNA, 19 nt, Homo sapiens
  misc_RNA (1)...(19): siRNA sense strand
ggacuaggagggagaagga

SEQ ID NO: 268876 - RNA, 19 nt, Homo sapiens
  misc_RNA (1)...(19): siRNA sense strand
ugaacuggcuaaauuacug

SEQ ID NO: 268877 - RNA, 19 nt, Homo sapiens
  misc_RNA (1)...(19): siRNA sense strand
cgaaaccauuagaaacuau

SEQ ID NO: 268878 - RNA, 19 nt, Homo sapiens
  misc_RNA (1)...(19): siRNA sense strand
caauucggaucgcauuuca

SEQ ID NO: 268879 - RNA, 19 nt, Homo sapiens
  misc_RNA (1)...(19): siRNA sense strand
uauaagagccacucagcaa

SEQ ID NO: 268880 - RNA, 19 nt, Homo sapiens
  misc_RNA (1)...(19): siRNA sense strand
gaaaaugacuaugacaaca

SEQ ID NO: 268881 - RNA, 19 nt, Homo sapiens
  misc_RNA (1)...(19): siRNA sense strand
ucacagacacagaauacaa

SEQ ID NO: 268882 - RNA, 19 nt, Homo sapiens
  misc_RNA (1)...(19): siRNA sense strand
uaaagaagaagagaacaga

SEQ ID NO: 268883 - RNA, 19 nt, Homo sapiens
  misc_RNA (1)...(19): siRNA sense strand
ucaggugaccgauaucgua

SEQ ID NO: 268884 - RNA, 19 nt, Homo sapiens
  misc_RNA (1)...(19): siRNA sense strand
agguagagcugaccggaaa

SEQ ID NO: 268885 - RNA, 19 nt, Homo sapiens
  misc_RNA (1)...(19): siRNA sense strand
ggauaaguagucccaauuc

SEQ ID NO: 268886 - RNA, 19 nt, Homo sapiens
  misc_RNA (1)...(19): siRNA sense strand
gcuauggcuuugcgcuuga

SEQ ID NO: 268887 - RNA, 19 nt, Homo sapiens
  misc_RNA (1)...(19): siRNA sense strand
gcagagaagccuaugaaaa

SEQ ID NO: 268888 - RNA, 19 nt, Homo sapiens
  misc_RNA (1)...(19): siRNA sense strand
ucaguccacuugggucuuu

SEQ ID NO: 268889 - RNA, 19 nt, Homo sapiens
  misc_RNA (1)...(19): siRNA sense strand
gauaaguagucccaauucg

SEQ ID NO: 268890 - RNA, 19 nt, Homo sapiens
  misc_RNA (1)...(19): siRNA sense strand
gaaaacagcaugccucaca

SEQ ID NO: 268891 - RNA, 19 nt, Homo sapiens
  misc_RNA (1)...(19): siRNA sense strand
cagaugggaagaucaugua

SEQ ID NO: 268892 - RNA, 19 nt, Homo sapiens
  misc_RNA (1)...(19): siRNA sense strand
caacagucccaccgcacua

SEQ ID NO: 268893 - RNA, 19 nt, Homo sapiens
  misc_RNA (1)...(19): siRNA sense strand
acucgaggcugguggaaga

SEQ ID NO: 268894 - RNA, 19 nt, Homo sapiens
  misc_RNA (1)...(19): siRNA sense strand
gaacagauuacagcuaagg

SEQ ID NO: 268895 - RNA, 19 nt, Homo sapiens
  misc_RNA (1)...(19): siRNA sense strand
gcaaccagacccagcacaa

SEQ ID NO: 268896 - RNA, 19 nt, Homo sapiens
  misc_RNA (1)...(19): siRNA sense strand
gcuuacacauuaacuggau

SEQ ID NO: 268897 - RNA, 19 nt, Homo sapiens
  misc_RNA (1)...(19): siRNA sense strand
ccggaaacagcauuuauga

SEQ ID NO: 268898 - RNA, 19 nt, Homo sapiens
  misc_RNA (1)...(19): siRNA sense strand
gaccagcuaucucaaaaug

SEQ ID NO: 268899 - RNA, 19 nt, Homo sapiens
  misc_RNA (1)...(19): siRNA sense strand
aagaagaagagaacagauu

SEQ ID NO: 268900 - RNA, 19 nt, Homo sapiens
  misc_RNA (1)...(19): siRNA sense strand
cgucaacuauguccucaca

SEQ ID NO: 268901 - RNA, 19 nt, Homo sapiens
  misc_RNA (1)...(19): siRNA sense strand
gaggaugaagugcgucuug

SEQ ID NO: 268902 - RNA, 19 nt, Homo sapiens
  misc_RNA (1)...(19): siRNA sense strand
gaccggaaacagcauuuau

SEQ ID NO: 268903 - RNA, 19 nt, Homo sapiens
  misc_RNA (1)...(19): siRNA sense strand
ucggauauaucuccucauc

SEQ ID NO: 268904 - RNA, 19 nt, Homo sapiens
  misc_RNA (1)...(19): siRNA sense strand
ugccaacacuucaccaugu

SEQ ID NO: 268905 - RNA, 19 nt, Homo sapiens
  misc_RNA (1)...(19): siRNA sense strand
uaagagccacucagcaaau

SEQ ID NO: 268906 - RNA, 19 nt, Homo sapiens
  misc_RNA (1)...(19): siRNA sense strand
gaucgagcgcuccuucuuc

SEQ ID NO: 268907 - RNA, 19 nt, Homo sapiens
  misc_RNA (1)...(19): siRNA sense strand
ugccauggcucugcucuug

SEQ ID NO: 268908 - RNA, 19 nt, Homo sapiens
  misc_RNA (1)...(19): siRNA sense strand
cagauuacagcuaaggaaa

SEQ ID NO: 268909 - RNA, 19 nt, Homo sapiens
  misc_RNA (1)...(19): siRNA sense strand
gaagaagagaacagauuac

SEQ ID NO: 268910 - RNA, 19 nt, Homo sapiens
  misc_RNA (1)...(19): siRNA sense strand
aagauaguguggucaguuc

SEQ ID NO: 268911 - RNA, 19 nt, Homo sapiens
  misc_RNA (1)...(19): siRNA sense strand
acaaaggccuccccagaaa

SEQ ID NO: 268912 - RNA, 19 nt, Homo sapiens
  misc_RNA (1)...(19): siRNA sense strand
ccacugcagcggcuacuug

SEQ ID NO: 268913 - RNA, 19 nt, Homo sapiens
  misc_RNA (1)...(19): siRNA sense strand
ggacacaagggaacaucug

SEQ ID NO: 268914 - RNA, 19 nt, Homo sapiens
  misc_RNA (1)...(19): siRNA sense strand
uggcuaaauuacugccuuu

SEQ ID NO: 268915 - RNA, 19 nt, Homo sapiens
  misc_RNA (1)...(19): siRNA sense strand
cagcaaaugauuaaagaag

SEQ ID NO: 268916 - RNA, 19 nt, Homo sapiens
  misc_RNA (1)...(19): siRNA sense strand
aagcagagaagccuaugaa

SEQ ID NO: 268917 - RNA, 19 nt, Homo sapiens
  misc_RNA (1)...(19): siRNA sense strand
acacagcaauauguuuaug

SEQ ID NO: 268918 - RNA, 19 nt, Homo sapiens
  misc_RNA (1)...(19): siRNA sense strand
gaugugaggcaggcaggua

SEQ ID NO: 268919 - RNA, 19 nt, Homo sapiens
  misc_RNA (1)...(19): siRNA sense strand
gcucugcucuugccaacac

SEQ ID NO: 268920 - RNA, 19 nt, Homo sapiens
  misc_RNA (1)...(19): siRNA sense strand
gauuaaagaagaagagaac

SEQ ID NO: 268921 - RNA, 19 nt, Homo sapiens
  misc_RNA (1)...(19): siRNA sense strand
gaacccagcaaaauugaaa

SEQ ID NO: 268922 - RNA, 19 nt, Homo sapiens
  misc_RNA (1)...(19): siRNA sense strand
gugaaucaggugaccgaua

SEQ ID NO: 268923 - RNA, 19 nt, Homo sapiens
  misc_RNA (1)...(19): siRNA sense strand
gcuacacagcaauauguuu

SEQ ID NO: 268924 - RNA, 19 nt, Homo sapiens
  misc_RNA (1)...(19): siRNA sense strand
uaacuucccaucugaggau

SEQ ID NO: 268925 - RNA, 19 nt, Homo sapiens
  misc_RNA (1)...(19): siRNA sense strand
cuggagcacuuauaugaca

SEQ ID NO: 268926 - RNA, 19 nt, Homo sapiens
  misc_RNA (1)...(19): siRNA sense strand
gauuacagcuaaggaaagc

SEQ ID NO: 268927 - RNA, 19 nt, Homo sapiens
  misc_RNA (1)...(19): siRNA sense strand
cucagcaaaugauuaaaga

SEQ ID NO: 268928 - RNA, 19 nt, Homo sapiens
  misc_RNA (1)...(19): siRNA sense strand
ucagaucucagccuccaaa

SEQ ID NO: 268929 - RNA, 19 nt, Homo sapiens
  misc_RNA (1)...(19): siRNA sense strand
agaucaagcuacacagcaa

SEQ ID NO: 268930 - RNA, 19 nt, Homo sapiens
  misc_RNA (1)...(19): siRNA sense strand
guaauggcucacacuuuga

SEQ ID NO: 268931 - RNA, 19 nt, Homo sapiens
  misc_RNA (1)...(19): siRNA sense strand
cuaaagacuaucugcauuc

SEQ ID NO: 268932 - RNA, 19 nt, Homo sapiens
  misc_RNA (1)...(19): siRNA sense strand
ccucgcagcuggacaaagc

SEQ ID NO: 268933 - RNA, 19 nt, Homo sapiens
  misc_RNA (1)...(19): siRNA sense strand
aaaugacuaugacaacagu

SEQ ID NO: 268934 - RNA, 19 nt, Homo sapiens
  misc_RNA (1)...(19): siRNA sense strand
gccaacacuucaccaugug

SEQ ID NO: 268935 - RNA, 19 nt, Homo sapiens
  misc_RNA (1)...(19): siRNA sense strand
gagagugguguucccagaa

SEQ ID NO: 268936 - RNA, 19 nt, Homo sapiens
  misc_RNA (1)...(19): siRNA sense strand
uaucaaaguagcccacaug

SEQ ID NO: 268937 - RNA, 19 nt, Homo sapiens
  misc_RNA (1)...(19): siRNA sense strand
ggugaccgauaucguacug

SEQ ID NO: 268938 - RNA, 19 nt, Homo sapiens
  misc_RNA (1)...(19): siRNA sense strand
cacagacacagaauacaaa

SEQ ID NO: 268939 - RNA, 19 nt, Homo sapiens
  misc_RNA (1)...(19): siRNA sense strand
ugauugagaagacucugua

SEQ ID NO: 268940 - RNA, 19 nt, Homo sapiens
  misc_RNA (1)...(19): siRNA sense strand
gccacucagcaaaugauua

SEQ ID NO: 268941 - RNA, 19 nt, Homo sapiens
  misc_RNA (1)...(19): siRNA sense strand
gcucacacuuugauguaac

SEQ ID NO: 268942 - RNA, 19 nt, Homo sapiens
  misc_RNA (1)...(19): siRNA sense strand
ugacagcgaaaccauuaga

SEQ ID NO: 268943 - RNA, 19 nt, Homo sapiens
  misc_RNA (1)...(19): siRNA sense strand
uaaagacuaucugcauucg

SEQ ID NO: 268944 - RNA, 19 nt, Homo sapiens
  misc_RNA (1)...(19): siRNA sense strand
caggagaccacccuacugu

SEQ ID NO: 268945 - RNA, 19 nt, Homo sapiens
  misc_RNA (1)...(19): siRNA sense strand
agacaaagcugagaacaaa

SEQ ID NO: 268946 - RNA, 19 nt, Homo sapiens
  misc_RNA (1)...(19): siRNA sense strand
ucacggagauugaauacaa

SEQ ID NO: 268947 - RNA, 19 nt, Homo sapiens
  misc_RNA (1)...(19): siRNA sense strand
ugaccgaggugacggguua

SEQ ID NO: 268948 - RNA, 19 nt, Homo sapiens
  misc_RNA (1)...(19): siRNA sense strand
gaaggaaaauggcgaguuu

SEQ ID NO: 268949 - RNA, 19 nt, Homo sapiens
  misc_RNA (1)...(19): siRNA sense strand
agaucaagcuguacaguaa

SEQ ID NO: 268950 - RNA, 19 nt, Homo sapiens
  misc_RNA (1)...(19): siRNA sense strand
gaccgcuucuguccauuua

SEQ ID NO: 268951 - RNA, 19 nt, Homo sapiens
  misc_RNA (1)...(19): siRNA sense strand
ucaccgagaucaagcugua

SEQ ID NO: 268952 - RNA, 19 nt, Homo sapiens
  misc_RNA (1)...(19): siRNA sense strand
gaaauuagugaaacccaaa

SEQ ID NO: 268953 - RNA, 19 nt, Homo sapiens
  misc_RNA (1)...(19): siRNA sense strand
gggcaacaguauuuaugaa

SEQ ID NO: 268954 - RNA, 19 nt, Homo sapiens
  misc_RNA (1)...(19): siRNA sense strand
gcagugaccuucuguacac

SEQ ID NO: 268955 - RNA, 19 nt, Homo sapiens
  misc_RNA (1)...(19): siRNA sense strand
auaccaagaugaagacaaa

SEQ ID NO: 268956 - RNA, 19 nt, Homo sapiens
  misc_RNA (1)...(19): siRNA sense strand
gagaucaagcuguacagua

SEQ ID NO: 268957 - RNA, 19 nt, Homo sapiens
  misc_RNA (1)...(19): siRNA sense strand
gcuccaagaguaugagaua

SEQ ID NO: 268958 - RNA, 19 nt, Homo sapiens
  misc_RNA (1)...(19): siRNA sense strand
caucgugagugucaauuau

SEQ ID NO: 268959 - RNA, 19 nt, Homo sapiens
  misc_RNA (1)...(19): siRNA sense strand
gagaggucguucuuucuuc

SEQ ID NO: 268960 - RNA, 19 nt, Homo sapiens
  misc_RNA (1)...(19): siRNA sense strand
aagcugauauuccuggauu

SEQ ID NO: 268961 - RNA, 19 nt, Homo sapiens
  misc_RNA (1)...(19): siRNA sense strand
ccaaauggacaaacuggaa

SEQ ID NO: 268962 - RNA, 19 nt, Homo sapiens
  misc_RNA (1)...(19): siRNA sense strand
gacuuuggauggauuuguu

SEQ ID NO: 268963 - RNA, 19 nt, Homo sapiens
  misc_RNA (1)...(19): siRNA sense strand
ggagauugaauacaaggaa

SEQ ID NO: 268964 - RNA, 19 nt, Homo sapiens
  misc_RNA (1)...(19): siRNA sense strand
auagagaggucguucuuuc

SEQ ID NO: 268965 - RNA, 19 nt, Homo sapiens
  misc_RNA (1)...(19): siRNA sense strand
agaagacccuauaccauca

SEQ ID NO: 268966 - RNA, 19 nt, Homo sapiens
  misc_RNA (1)...(19): siRNA sense strand
aaggagaaguccaagaaug

SEQ ID NO: 268967 - RNA, 19 nt, Homo sapiens
  misc_RNA (1)...(19): siRNA sense strand
gcaucgugagugucaauua

SEQ ID NO: 268968 - RNA, 19 nt, Homo sapiens
  misc_RNA (1)...(19): siRNA sense strand
cgagaccgcuucuguccau

SEQ ID NO: 268969 - RNA, 19 nt, Homo sapiens
  misc_RNA (1)...(19): siRNA sense strand
gaaggagaaguccaagaau

SEQ ID NO: 268970 - RNA, 19 nt, Homo sapiens
  misc_RNA (1)...(19): siRNA sense strand
cacaagaaacuaggaaauu

SEQ ID NO: 268971 - RNA, 19 nt, Homo sapiens
  misc_RNA (1)...(19): siRNA sense strand
caagaaacuaggaaauuag

SEQ ID NO: 268972 - RNA, 19 nt, Homo sapiens
  misc_RNA (1)...(19): siRNA sense strand
gaauacauccauccuucug

SEQ ID NO: 268973 - RNA, 19 nt, Homo sapiens
  misc_RNA (1)...(19): siRNA sense strand
gaagaucaggcaguauaug

SEQ ID NO: 268974 - RNA, 19 nt, Homo sapiens
  misc_RNA (1)...(19): siRNA sense strand
gagcucacgggcaacagua

SEQ ID NO: 268975 - RNA, 19 nt, Homo sapiens
  misc_RNA (1)...(19): siRNA sense strand
gaaagcagugaccuucugu

SEQ ID NO: 268976 - RNA, 19 nt, Homo sapiens
  misc_RNA (1)...(19): siRNA sense strand
gggugugggugcagagcua

SEQ ID NO: 268977 - RNA, 19 nt, Homo sapiens
  misc_RNA (1)...(19): siRNA sense strand
gggccagccuugaccugaa

SEQ ID NO: 268978 - RNA, 19 nt, Homo sapiens
  misc_RNA (1)...(19): siRNA sense strand
gaaaugugucuuggcgaaa

SEQ ID NO: 268979 - RNA, 19 nt, Homo sapiens
  misc_RNA (1)...(19): siRNA sense strand
gcuguacaguaacauguuc

SEQ ID NO: 268980 - RNA, 19 nt, Homo sapiens
  misc_RNA (1)...(19): siRNA sense strand
uugaagaucaggcaguaua

SEQ ID NO: 268981 - RNA, 19 nt, Homo sapiens
  misc_RNA (1)...(19): siRNA sense strand
gauagagaggucguucuuu

SEQ ID NO: 268982 - RNA, 19 nt, Homo sapiens
  misc_RNA (1)...(19): siRNA sense strand
cgcacuugcugcagacuuu

SEQ ID NO: 268983 - RNA, 19 nt, Homo sapiens
  misc_RNA (1)...(19): siRNA sense strand
ggcaguauaugcuggacau

SEQ ID NO: 268984 - RNA, 19 nt, Homo sapiens
  misc_RNA (1)...(19): siRNA sense strand
ccaagaguaugagauagag

SEQ ID NO: 268985 - RNA, 19 nt, Homo sapiens
  misc_RNA (1)...(19): siRNA sense strand
ucacaagaaacuaggaaau

SEQ ID NO: 268986 - RNA, 19 nt, Homo sapiens
  misc_RNA (1)...(19): siRNA sense strand
ucacgggcaacaguauuua

SEQ ID NO: 268987 - RNA, 19 nt, Homo sapiens
  misc_RNA (1)...(19): siRNA sense strand
caaauggacaaacuggaau

SEQ ID NO: 268988 - RNA, 19 nt, Homo sapiens
  misc_RNA (1)...(19): siRNA sense strand
gaagacaaagcugagaaca

SEQ ID NO: 268989 - RNA, 19 nt, Homo sapiens
  misc_RNA (1)...(19): siRNA sense strand
ugcaguggcuacuugaaga

SEQ ID NO: 268990 - RNA, 19 nt, Homo sapiens
  misc_RNA (1)...(19): siRNA sense strand
ucacuucgcagcuggacaa

SEQ ID NO: 268991 - RNA, 19 nt, Homo sapiens
  misc_RNA (1)...(19): siRNA sense strand
ccagugccaucaccgagau

SEQ ID NO: 268992 - RNA, 19 nt, Homo sapiens
  misc_RNA (1)...(19): siRNA sense strand
cgagaagacccuauaccau

SEQ ID NO: 268993 - RNA, 19 nt, Homo sapiens
  misc_RNA (1)...(19): siRNA sense strand
cgacuccugcuaccagauu

SEQ ID NO: 268994 - RNA, 19 nt, Homo sapiens
  misc_RNA (1)...(19): siRNA sense strand
gcagacuuuggauggauuu

SEQ ID NO: 268995 - RNA, 19 nt, Homo sapiens
  misc_RNA (1)...(19): siRNA sense strand
ggcaacaguauuuaugaau

SEQ ID NO: 268996 - RNA, 19 nt, Homo sapiens
  misc_RNA (1)...(19): siRNA sense strand
gcucacgggcaacaguauu

SEQ ID NO: 268997 - RNA, 19 nt, Homo sapiens
  misc_RNA (1)...(19): siRNA sense strand
acuugaagaucaggcagua

SEQ ID NO: 268998 - RNA, 19 nt, Homo sapiens
  misc_RNA (1)...(19): siRNA sense strand
gccuugaccugaagcugau

SEQ ID NO: 268999 - RNA, 19 nt, Homo sapiens
  misc_RNA (1)...(19): siRNA sense strand
ggucguucuuucuucgaau

SEQ ID NO: 269000 - RNA, 19 nt, Homo sapiens
  misc_RNA (1)...(19): siRNA sense strand
acacuucccucuggacucu

SEQ ID NO: 269001 - RNA, 19 nt, Homo sapiens
  misc_RNA (1)...(19): siRNA sense strand
ggaggaccgccuugucuac

SEQ ID NO: 269002 - RNA, 19 nt, Homo sapiens
  misc_RNA (1)...(19): siRNA sense strand
ugaucgagaagacccuaua

SEQ ID NO: 269003 - RNA, 19 nt, Homo sapiens
  misc_RNA (1)...(19): siRNA sense strand
ugaagaucaggcaguauau

SEQ ID NO: 269004 - RNA, 19 nt, Homo sapiens
  misc_RNA (1)...(19): siRNA sense strand
ucgaaugaaaugugucuug

SEQ ID NO: 269005 - RNA, 19 nt, Homo sapiens
  misc_RNA (1)...(19): siRNA sense strand
gaugaagacaaagcugaga

SEQ ID NO: 269006 - RNA, 19 nt, Homo sapiens
  misc_RNA (1)...(19): siRNA sense strand
cuucgcagcuggacaaagc

SEQ ID NO: 269007 - RNA, 19 nt, Homo sapiens
  misc_RNA (1)...(19): siRNA sense strand
ccaagaaugcggccaagac

SEQ ID NO: 269008 - RNA, 19 nt, Homo sapiens
  misc_RNA (1)...(19): siRNA sense strand
uauccgagaccgcuucugu

SEQ ID NO: 269009 - RNA, 19 nt, Homo sapiens
  misc_RNA (1)...(19): siRNA sense strand
accacgagcuaccugaaga

SEQ ID NO: 269010 - RNA, 19 nt, Homo sapiens
  misc_RNA (1)...(19): siRNA sense strand
gccaggucaccaccaagua

SEQ ID NO: 269011 - RNA, 19 nt, Homo sapiens
  misc_RNA (1)...(19): siRNA sense strand
ggccagccuugaccugaag

SEQ ID NO: 269012 - RNA, 19 nt, Homo sapiens
  misc_RNA (1)...(19): siRNA sense strand
gcugcagacuuuggaugga

SEQ ID NO: 269013 - RNA, 19 nt, Homo sapiens
  misc_RNA (1)...(19): siRNA sense strand
agagaggucguucuuucuu

SEQ ID NO: 269014 - RNA, 19 nt, Homo sapiens
  misc_RNA (1)...(19): siRNA sense strand
guacucacggagauugaau

SEQ ID NO: 269015 - RNA, 19 nt, Homo sapiens
  misc_RNA (1)...(19): siRNA sense strand
ucgugagugucaauuaugu

SEQ ID NO: 269016 - RNA, 19 nt, Homo sapiens
  misc_RNA (1)...(19): siRNA sense strand
aguauaugcuggacauguc

SEQ ID NO: 269017 - RNA, 19 nt, Homo sapiens
  misc_RNA (1)...(19): siRNA sense strand
gcaguggcuacuugaagau

SEQ ID NO: 269018 - RNA, 19 nt, Homo sapiens
  misc_RNA (1)...(19): siRNA sense strand
agauagagaggucguucuu

SEQ ID NO: 269019 - RNA, 19 nt, Homo sapiens
  misc_RNA (1)...(19): siRNA sense strand
aagacaaagcugagaacaa

SEQ ID NO: 269020 - RNA, 19 nt, Homo sapiens
  misc_RNA (1)...(19): siRNA sense strand
gaucgagaagacccuauac

SEQ ID NO: 269021 - RNA, 19 nt, Homo sapiens
  misc_RNA (1)...(19): siRNA sense strand
caagcuguacaguaacaug

SEQ ID NO: 269022 - RNA, 19 nt, Homo sapiens
  misc_RNA (1)...(19): siRNA sense strand
cgggcaacaguauuuauga

SEQ ID NO: 269023 - RNA, 19 nt, Homo sapiens
  misc_RNA (1)...(19): siRNA sense strand
agacaaagcugagaacaaa

SEQ ID NO: 269024 - RNA, 19 nt, Homo sapiens
  misc_RNA (1)...(19): siRNA sense strand
ucacggagauugaauacaa

SEQ ID NO: 269025 - RNA, 19 nt, Homo sapiens
  misc_RNA (1)...(19): siRNA sense strand
ugaccgaggugacggguua

SEQ ID NO: 269026 - RNA, 19 nt, Homo sapiens
  misc_RNA (1)...(19): siRNA sense strand
gaaggaaaauggcgaguuu

SEQ ID NO: 269027 - RNA, 19 nt, Homo sapiens
  misc_RNA (1)...(19): siRNA sense strand
agaucaagcuguacaguaa

SEQ ID NO: 269028 - RNA, 19 nt, Homo sapiens
  misc_RNA (1)...(19): siRNA sense strand
gaccgcuucuguccauuua

SEQ ID NO: 269029 - RNA, 19 nt, Homo sapiens
  misc_RNA (1)...(19): siRNA sense strand
ucaccgagaucaagcugua

SEQ ID NO: 269030 - RNA, 19 nt, Homo sapiens
  misc_RNA (1)...(19): siRNA sense strand
gaaauuagugaaacccaaa

SEQ ID NO: 269031 - RNA, 19 nt, Homo sapiens
  misc_RNA (1)...(19): siRNA sense strand
gggcaacaguauuuaugaa

SEQ ID NO: 269032 - RNA, 19 nt, Homo sapiens
  misc_RNA (1)...(19): siRNA sense strand
gcagugaccuucuguacac

SEQ ID NO: 269033 - RNA, 19 nt, Homo sapiens
  misc_RNA (1)...(19): siRNA sense strand
auaccaagaugaagacaaa

SEQ ID NO: 269034 - RNA, 19 nt, Homo sapiens
  misc_RNA (1)...(19): siRNA sense strand
gagaucaagcuguacagua

SEQ ID NO: 269035 - RNA, 19 nt, Homo sapiens
  misc_RNA (1)...(19): siRNA sense strand
gcuccaagaguaugagaua

SEQ ID NO: 269036 - RNA, 19 nt, Homo sapiens
  misc_RNA (1)...(19): siRNA sense strand
caucgugagugucaauuau

SEQ ID NO: 269037 - RNA, 19 nt, Homo sapiens
  misc_RNA (1)...(19): siRNA sense strand
gagaggucguucuuucuuc

SEQ ID NO: 269038 - RNA, 19 nt, Homo sapiens
  misc_RNA (1)...(19): siRNA sense strand
aagcugauauuccuggauu

SEQ ID NO: 269039 - RNA, 19 nt, Homo sapiens
  misc_RNA (1)...(19): siRNA sense strand
ccaaauggacaaacuggaa

SEQ ID NO: 269040 - RNA, 19 nt, Homo sapiens
  misc_RNA (1)...(19): siRNA sense strand
gacuuuggauggauuuguu

SEQ ID NO: 269041 - RNA, 19 nt, Homo sapiens
  misc_RNA (1)...(19): siRNA sense strand
ggagauugaauacaaggaa

SEQ ID NO: 269042 - RNA, 19 nt, Homo sapiens
  misc_RNA (1)...(19): siRNA sense strand
auagagaggucguucuuuc

SEQ ID NO: 269043 - RNA, 19 nt, Homo sapiens
  misc_RNA (1)...(19): siRNA sense strand
agaagacccuauaccauca

SEQ ID NO: 269044 - RNA, 19 nt, Homo sapiens
  misc_RNA (1)...(19): siRNA sense strand
aaggagaaguccaagaaug

SEQ ID NO: 269045 - RNA, 19 nt, Homo sapiens
  misc_RNA (1)...(19): siRNA sense strand
gcaucgugagugucaauua

SEQ ID NO: 269046 - RNA, 19 nt, Homo sapiens
  misc_RNA (1)...(19): siRNA sense strand
cgagaccgcuucuguccau

SEQ ID NO: 269047 - RNA, 19 nt, Homo sapiens
  misc_RNA (1)...(19): siRNA sense strand
gaaggagaaguccaagaau

SEQ ID NO: 269048 - RNA, 19 nt, Homo sapiens
  misc_RNA (1)...(19): siRNA sense strand
cacaagaaacuaggaaauu

SEQ ID NO: 269049 - RNA, 19 nt, Homo sapiens
  misc_RNA (1)...(19): siRNA sense strand
caagaaacuaggaaauuag

SEQ ID NO: 269050 - RNA, 19 nt, Homo sapiens
  misc_RNA (1)...(19): siRNA sense strand
gaauacauccauccuucug

SEQ ID NO: 269051 - RNA, 19 nt, Homo sapiens
  misc_RNA (1)...(19): siRNA sense strand
gaagaucaggcaguauaug

SEQ ID NO: 269052 - RNA, 19 nt, Homo sapiens
  misc_RNA (1)...(19): siRNA sense strand
gagcucacgggcaacagua

SEQ ID NO: 269053 - RNA, 19 nt, Homo sapiens
  misc_RNA (1)...(19): siRNA sense strand
gaaagcagugaccuucugu

SEQ ID NO: 269054 - RNA, 19 nt, Homo sapiens
  misc_RNA (1)...(19): siRNA sense strand
gggugugggugcagagcua

SEQ ID NO: 269055 - RNA, 19 nt, Homo sapiens
  misc_RNA (1)...(19): siRNA sense strand
gggccagccuugaccugaa

SEQ ID NO: 269056 - RNA, 19 nt, Homo sapiens
  misc_RNA (1)...(19): siRNA sense strand
gaaaugugucuuggcgaaa

SEQ ID NO: 269057 - RNA, 19 nt, Homo sapiens
  misc_RNA (1)...(19): siRNA sense strand
gcuguacaguaacauguuc

SEQ ID NO: 269058 - RNA, 19 nt, Homo sapiens
  misc_RNA (1)...(19): siRNA sense strand
uugaagaucaggcaguaua

SEQ ID NO: 269059 - RNA, 19 nt, Homo sapiens
  misc_RNA (1)...(19): siRNA sense strand
gauagagaggucguucuuu

SEQ ID NO: 269060 - RNA, 19 nt, Homo sapiens
  misc_RNA (1)...(19): siRNA sense strand
cgcacuugcugcagacuuu

SEQ ID NO: 269061 - RNA, 19 nt, Homo sapiens
  misc_RNA (1)...(19): siRNA sense strand
ggcaguauaugcuggacau

SEQ ID NO: 269062 - RNA, 19 nt, Homo sapiens
  misc_RNA (1)...(19): siRNA sense strand
ccaagaguaugagauagag

SEQ ID NO: 269063 - RNA, 19 nt, Homo sapiens
  misc_RNA (1)...(19): siRNA sense strand
ucacaagaaacuaggaaau

SEQ ID NO: 269064 - RNA, 19 nt, Homo sapiens
  misc_RNA (1)...(19): siRNA sense strand
ucacgggcaacaguauuua

SEQ ID NO: 269065 - RNA, 19 nt, Homo sapiens
  misc_RNA (1)...(19): siRNA sense strand
caaauggacaaacuggaau

SEQ ID NO: 269066 - RNA, 19 nt, Homo sapiens
  misc_RNA (1)...(19): siRNA sense strand
gaagacaaagcugagaaca

SEQ ID NO: 269067 - RNA, 19 nt, Homo sapiens
  misc_RNA (1)...(19): siRNA sense strand
ugcaguggcuacuugaaga

SEQ ID NO: 269068 - RNA, 19 nt, Homo sapiens
  misc_RNA (1)...(19): siRNA sense strand
ucacuucgcagcuggacaa

SEQ ID NO: 269069 - RNA, 19 nt, Homo sapiens
  misc_RNA (1)...(19): siRNA sense strand
ccagugccaucaccgagau

SEQ ID NO: 269070 - RNA, 19 nt, Homo sapiens
  misc_RNA (1)...(19): siRNA sense strand
cgagaagacccuauaccau

SEQ ID NO: 269071 - RNA, 19 nt, Homo sapiens
  misc_RNA (1)...(19): siRNA sense strand
cgacuccugcuaccagauu

SEQ ID NO: 269072 - RNA, 19 nt, Homo sapiens
  misc_RNA (1)...(19): siRNA sense strand
gcagacuuuggauggauuu

SEQ ID NO: 269073 - RNA, 19 nt, Homo sapiens
  misc_RNA (1)...(19): siRNA sense strand
ggcaacaguauuuaugaau

SEQ ID NO: 269074 - RNA, 19 nt, Homo sapiens
  misc_RNA (1)...(19): siRNA sense strand
gcucacgggcaacaguauu

SEQ ID NO: 269075 - RNA, 19 nt, Homo sapiens
  misc_RNA (1)...(19): siRNA sense strand
acuugaagaucaggcagua

SEQ ID NO: 269076 - RNA, 19 nt, Homo sapiens
  misc_RNA (1)...(19): siRNA sense strand
gccuugaccugaagcugau

SEQ ID NO: 269077 - RNA, 19 nt, Homo sapiens
  misc_RNA (1)...(19): siRNA sense strand
ggucguucuuucuucgaau

SEQ ID NO: 269078 - RNA, 19 nt, Homo sapiens
  misc_RNA (1)...(19): siRNA sense strand
acacuucccucuggacucu

SEQ ID NO: 269079 - RNA, 19 nt, Homo sapiens
  misc_RNA (1)...(19): siRNA sense strand
ggaggaccgccuugucuac

SEQ ID NO: 269080 - RNA, 19 nt, Homo sapiens
  misc_RNA (1)...(19): siRNA sense strand
ugaucgagaagacccuaua

SEQ ID NO: 269081 - RNA, 19 nt, Homo sapiens
  misc_RNA (1)...(19): siRNA sense strand
ugaagaucaggcaguauau

SEQ ID NO: 269082 - RNA, 19 nt, Homo sapiens
  misc_RNA (1)...(19): siRNA sense strand
ucgaaugaaaugugucuug

SEQ ID NO: 269083 - RNA, 19 nt, Homo sapiens
  misc_RNA (1)...(19): siRNA sense strand
gaugaagacaaagcugaga

SEQ ID NO: 269084 - RNA, 19 nt, Homo sapiens
  misc_RNA (1)...(19): siRNA sense strand
cuucgcagcuggacaaagc

SEQ ID NO: 269085 - RNA, 19 nt, Homo sapiens
  misc_RNA (1)...(19): siRNA sense strand
ccaagaaugcggccaagac

SEQ ID NO: 269086 - RNA, 19 nt, Homo sapiens
  misc_RNA (1)...(19): siRNA sense strand
uauccgagaccgcuucugu

SEQ ID NO: 269087 - RNA, 19 nt, Homo sapiens
  misc_RNA (1)...(19): siRNA sense strand
accacgagcuaccugaaga

SEQ ID NO: 269088 - RNA, 19 nt, Homo sapiens
  misc_RNA (1)...(19): siRNA sense strand
gccaggucaccaccaagua

SEQ ID NO: 269089 - RNA, 19 nt, Homo sapiens
  misc_RNA (1)...(19): siRNA sense strand
ggccagccuugaccugaag

SEQ ID NO: 269090 - RNA, 19 nt, Homo sapiens
  misc_RNA (1)...(19): siRNA sense strand
gcugcagacuuuggaugga

SEQ ID NO: 269091 - RNA, 19 nt, Homo sapiens
  misc_RNA (1)...(19): siRNA sense strand
agagaggucguucuuucuu

SEQ ID NO: 269092 - RNA, 19 nt, Homo sapiens
  misc_RNA (1)...(19): siRNA sense strand
guacucacggagauugaau

SEQ ID NO: 269093 - RNA, 19 nt, Homo sapiens
  misc_RNA (1)...(19): siRNA sense strand
ucgugagugucaauuaugu

SEQ ID NO: 269094 - RNA, 19 nt, Homo sapiens
  misc_RNA (1)...(19): siRNA sense strand
aguauaugcuggacauguc

SEQ ID NO: 269095 - RNA, 19 nt, Homo sapiens
  misc_RNA (1)...(19): siRNA sense strand
gcaguggcuacuugaagau

SEQ ID NO: 269096 - RNA, 19 nt, Homo sapiens
  misc_RNA (1)...(19): siRNA sense strand
agauagagaggucguucuu

SEQ ID NO: 269097 - RNA, 19 nt, Homo sapiens
  misc_RNA (1)...(19): siRNA sense strand
aagacaaagcugagaacaa

SEQ ID NO: 269098 - RNA, 19 nt, Homo sapiens
  misc_RNA (1)...(19): siRNA sense strand
gaucgagaagacccuauac

SEQ ID NO: 269099 - RNA, 19 nt, Homo sapiens
  misc_RNA (1)...(19): siRNA sense strand
caagcuguacaguaacaug

SEQ ID NO: 269100 - RNA, 19 nt, Homo sapiens
  misc_RNA (1)...(19): siRNA sense strand
cgggcaacaguauuuauga

SEQ ID NO: 269101 - RNA, 19 nt, Homo sapiens
  misc_RNA (1)...(19): siRNA sense strand
caacagcacuggaauccua

SEQ ID NO: 269102 - RNA, 19 nt, Homo sapiens
  misc_RNA (1)...(19): siRNA sense strand
ggcaagaacuggauagaaa

SEQ ID NO: 269103 - RNA, 19 nt, Homo sapiens
  misc_RNA (1)...(19): siRNA sense strand
gauggcaccuugaucauaa

SEQ ID NO: 269104 - RNA, 19 nt, Homo sapiens
  misc_RNA (1)...(19): siRNA sense strand
gcaccuugaucauaagaaa

SEQ ID NO: 269105 - RNA, 19 nt, Homo sapiens
  misc_RNA (1)...(19): siRNA sense strand
gcucuagucuuagcauuaa

SEQ ID NO: 269106 - RNA, 19 nt, Homo sapiens
  misc_RNA (1)...(19): siRNA sense strand
gcacuggaauccuaucugu

SEQ ID NO: 269107 - RNA, 19 nt, Homo sapiens
  misc_RNA (1)...(19): siRNA sense strand
ggucauagccagcaacauu

SEQ ID NO: 269108 - RNA, 19 nt, Homo sapiens
  misc_RNA (1)...(19): siRNA sense strand
caaccuggcugcugaagau

SEQ ID NO: 269109 - RNA, 19 nt, Homo sapiens
  misc_RNA (1)...(19): siRNA sense strand
ggacacagaggcugacauu

SEQ ID NO: 269110 - RNA, 19 nt, Homo sapiens
  misc_RNA (1)...(19): siRNA sense strand
gcuauaagaugcuguacca

SEQ ID NO: 269111 - RNA, 19 nt, Homo sapiens
  misc_RNA (1)...(19): siRNA sense strand
ccucagaccugggcaacua

SEQ ID NO: 269112 - RNA, 19 nt, Homo sapiens
  misc_RNA (1)...(19): siRNA sense strand
ggagggcacuaccggagaa

SEQ ID NO: 269113 - RNA, 19 nt, Homo sapiens
  misc_RNA (1)...(19): siRNA sense strand
ggagcgagacccagugaaa

SEQ ID NO: 269114 - RNA, 19 nt, Homo sapiens
  misc_RNA (1)...(19): siRNA sense strand
ggaagcagguucggaccaa

SEQ ID NO: 269115 - RNA, 19 nt, Homo sapiens
  misc_RNA (1)...(19): siRNA sense strand
ggaccaauccugcaaacau

SEQ ID NO: 269116 - RNA, 19 nt, Homo sapiens
  misc_RNA (1)...(19): siRNA sense strand
ggcaacaucuccuggacuu

SEQ ID NO: 269117 - RNA, 19 nt, Homo sapiens
  misc_RNA (1)...(19): siRNA sense strand
gaccaauccugcaaacauc

SEQ ID NO: 269118 - RNA, 19 nt, Homo sapiens
  misc_RNA (1)...(19): siRNA sense strand
gcagucaccggcuauaaga

SEQ ID NO: 269119 - RNA, 19 nt, Homo sapiens
  misc_RNA (1)...(19): siRNA sense strand
ccggagagcucaucgucaa

SEQ ID NO: 269120 - RNA, 19 nt, Homo sapiens
  misc_RNA (1)...(19): siRNA sense strand
cgaaaugagucugcaguca

SEQ ID NO: 269121 - RNA, 19 nt, Homo sapiens
  misc_RNA (1)...(19): siRNA sense strand
gaugaaugguaccgagaug

SEQ ID NO: 269122 - RNA, 19 nt, Homo sapiens
  misc_RNA (1)...(19): siRNA sense strand
gagauccgcuacuggaaag

SEQ ID NO: 269123 - RNA, 19 nt, Homo sapiens
  misc_RNA (1)...(19): siRNA sense strand
gguaugagauccgcuacug

SEQ ID NO: 269124 - RNA, 19 nt, Homo sapiens
  misc_RNA (1)...(19): siRNA sense strand
cagcaggacaugaauggua

SEQ ID NO: 269125 - RNA, 19 nt, Homo sapiens
  misc_RNA (1)...(19): siRNA sense strand
gagcaaaggcacggagauu

SEQ ID NO: 269126 - RNA, 19 nt, Homo sapiens
  misc_RNA (1)...(19): siRNA sense strand
gcacggagauuuuggucaa

SEQ ID NO: 269127 - RNA, 19 nt, Homo sapiens
  misc_RNA (1)...(19): siRNA sense strand
gccaugcccugguacaaau

SEQ ID NO: 269128 - RNA, 19 nt, Homo sapiens
  misc_RNA (1)...(19): siRNA sense strand
gcaagaacuggauagaaau

SEQ ID NO: 269129 - RNA, 19 nt, Homo sapiens
  misc_RNA (1)...(19): siRNA sense strand
auaagaugcuguaccagaa

SEQ ID NO: 269130 - RNA, 19 nt, Homo sapiens
  misc_RNA (1)...(19): siRNA sense strand
ggagaacuaaugugaagga

SEQ ID NO: 269131 - RNA, 19 nt, Homo sapiens
  misc_RNA (1)...(19): siRNA sense strand
ggucagaugaaggcaaaua

SEQ ID NO: 269132 - RNA, 19 nt, Homo sapiens
  misc_RNA (1)...(19): siRNA sense strand
ccagauggcaccuugauca

SEQ ID NO: 269133 - RNA, 19 nt, Homo sapiens
  misc_RNA (1)...(19): siRNA sense strand
caagcaugaugguggagaa

SEQ ID NO: 269134 - RNA, 19 nt, Homo sapiens
  misc_RNA (1)...(19): siRNA sense strand
ucacugcacucguguacuc

SEQ ID NO: 269135 - RNA, 19 nt, Homo sapiens
  misc_RNA (1)...(19): siRNA sense strand
caacaucuccuggacuuuc

SEQ ID NO: 269136 - RNA, 19 nt, Homo sapiens
  misc_RNA (1)...(19): siRNA sense strand
uaacccaccugcccacuac

SEQ ID NO: 269137 - RNA, 19 nt, Homo sapiens
  misc_RNA (1)...(19): siRNA sense strand
cccagugccugaagacauu

SEQ ID NO: 269138 - RNA, 19 nt, Homo sapiens
  misc_RNA (1)...(19): siRNA sense strand
uucucaagcucuagucuua

SEQ ID NO: 269139 - RNA, 19 nt, Homo sapiens
  misc_RNA (1)...(19): siRNA sense strand
gcaaaggcacggagauuuu

SEQ ID NO: 269140 - RNA, 19 nt, Homo sapiens
  misc_RNA (1)...(19): siRNA sense strand
caacuggacgcccauguca

SEQ ID NO: 269141 - RNA, 19 nt, Homo sapiens
  misc_RNA (1)...(19): siRNA sense strand
gacaucaacuugggugaca

SEQ ID NO: 269142 - RNA, 19 nt, Homo sapiens
  misc_RNA (1)...(19): siRNA sense strand
gggcaacuacuccuguuug

SEQ ID NO: 269143 - RNA, 19 nt, Homo sapiens
  misc_RNA (1)...(19): siRNA sense strand
gcaugaugguggagaacau

SEQ ID NO: 269144 - RNA, 19 nt, Homo sapiens
  misc_RNA (1)...(19): siRNA sense strand
ccggagaacuaaugugaag

SEQ ID NO: 269145 - RNA, 19 nt, Homo sapiens
  misc_RNA (1)...(19): siRNA sense strand
ggaagacucgggcauguac

SEQ ID NO: 269146 - RNA, 19 nt, Homo sapiens
  misc_RNA (1)...(19): siRNA sense strand
gaucaaguggcgcaaagug

SEQ ID NO: 269147 - RNA, 19 nt, Homo sapiens
  misc_RNA (1)...(19): siRNA sense strand
acacagaggcugacauugg

SEQ ID NO: 269148 - RNA, 19 nt, Homo sapiens
  misc_RNA (1)...(19): siRNA sense strand
ggacagccaccaggaggaa

SEQ ID NO: 269149 - RNA, 19 nt, Homo sapiens
  misc_RNA (1)...(19): siRNA sense strand
gucaacagcagcagaguga

SEQ ID NO: 269150 - RNA, 19 nt, Homo sapiens
  misc_RNA (1)...(19): siRNA sense strand
ccggucagaugaaggcaaa

SEQ ID NO: 269151 - RNA, 19 nt, Homo sapiens
  misc_RNA (1)...(19): siRNA sense strand
gagcgucuucagcaaguuu

SEQ ID NO: 269152 - RNA, 19 nt, Homo sapiens
  misc_RNA (1)...(19): siRNA sense strand
gcaaacaucgagggcaaug

SEQ ID NO: 269153 - RNA, 19 nt, Homo sapiens
  misc_RNA (1)...(19): siRNA sense strand
gugacaaccugacccuaca

SEQ ID NO: 269154 - RNA, 19 nt, Homo sapiens
  misc_RNA (1)...(19): siRNA sense strand
gcuguaccagaaugacuua

SEQ ID NO: 269155 - RNA, 19 nt, Homo sapiens
  misc_RNA (1)...(19): siRNA sense strand
cuucgggccugucuuugaa

SEQ ID NO: 269156 - RNA, 19 nt, Homo sapiens
  misc_RNA (1)...(19): siRNA sense strand
gggcacuaccggagaacua

SEQ ID NO: 269157 - RNA, 19 nt, Homo sapiens
  misc_RNA (1)...(19): siRNA sense strand
gggugauguugcccuguaa

SEQ ID NO: 269158 - RNA, 19 nt, Homo sapiens
  misc_RNA (1)...(19): siRNA sense strand
gaagcagguucggaccaau

SEQ ID NO: 269159 - RNA, 19 nt, Homo sapiens
  misc_RNA (1)...(19): siRNA sense strand
caaguuugcucagcucaac

SEQ ID NO: 269160 - RNA, 19 nt, Homo sapiens
  misc_RNA (1)...(19): siRNA sense strand
cauuggccaugcccuggua

SEQ ID NO: 269161 - RNA, 19 nt, Homo sapiens
  misc_RNA (1)...(19): siRNA sense strand
ugugcgagaugcaaccaaa

SEQ ID NO: 269162 - RNA, 19 nt, Homo sapiens
  misc_RNA (1)...(19): siRNA sense strand
ugaaugguaccgagaugaa

SEQ ID NO: 269163 - RNA, 19 nt, Homo sapiens
  misc_RNA (1)...(19): siRNA sense strand
gaggagcgagacccaguga

SEQ ID NO: 269164 - RNA, 19 nt, Homo sapiens
  misc_RNA (1)...(19): siRNA sense strand
caagaacuggauagaaauc

SEQ ID NO: 269165 - RNA, 19 nt, Homo sapiens
  misc_RNA (1)...(19): siRNA sense strand
ccacggaggagcagguguu

SEQ ID NO: 269166 - RNA, 19 nt, Homo sapiens
  misc_RNA (1)...(19): siRNA sense strand
ugagauccgcuacuggaaa

SEQ ID NO: 269167 - RNA, 19 nt, Homo sapiens
  misc_RNA (1)...(19): siRNA sense strand
uaccggagaacuaauguga

SEQ ID NO: 269168 - RNA, 19 nt, Homo sapiens
  misc_RNA (1)...(19): siRNA sense strand
guaacccaccugcccacua

SEQ ID NO: 269169 - RNA, 19 nt, Homo sapiens
  misc_RNA (1)...(19): siRNA sense strand
ggccaugcccugguacaaa

SEQ ID NO: 269170 - RNA, 19 nt, Homo sapiens
  misc_RNA (1)...(19): siRNA sense strand
gagagcucaucgucaacug

SEQ ID NO: 269171 - RNA, 19 nt, Homo sapiens
  misc_RNA (1)...(19): siRNA sense strand
ugggaucccugcagaaguc

SEQ ID NO: 269172 - RNA, 19 nt, Homo sapiens
  misc_RNA (1)...(19): siRNA sense strand
gaaaucccagugccugaag

SEQ ID NO: 269173 - RNA, 19 nt, Homo sapiens
  misc_RNA (1)...(19): siRNA sense strand
guaccagaaugacuuacac

SEQ ID NO: 269174 - RNA, 19 nt, Homo sapiens
  misc_RNA (1)...(19): siRNA sense strand
gcuggcuccucaacgaguu

SEQ ID NO: 269175 - RNA, 19 nt, Homo sapiens
  misc_RNA (1)...(19): siRNA sense strand
caacaccaaguaccaugug

SEQ ID NO: 269176 - RNA, 19 nt, Homo sapiens
  misc_RNA (1)...(19): siRNA sense strand
uaagcacgguaccaucuac

SEQ ID NO: 269177 - RNA, 19 nt, Homo sapiens
  misc_RNA (1)...(19): siRNA sense strand
ggcaacuacuccuguuugg

SEQ ID NO: 269178 - RNA, 19 nt, Homo sapiens
  misc_RNA (1)...(19): siRNA sense strand
gaaccggguggagguguug

SEQ ID NO: 269179 - RNA, 19 nt, Homo sapiens
  misc_RNA (1)...(19): siRNA sense strand
aagaugcuguaccagaaug

SEQ ID NO: 269180 - RNA, 19 nt, Homo sapiens
  misc_RNA (1)...(19): siRNA sense strand
ggaaagcuggggacaaaga

SEQ ID NO: 269181 - RNA, 19 nt, Homo sapiens
  misc_RNA (1)...(19): siRNA sense strand
gcagcagagugacuguaac

SEQ ID NO: 269182 - RNA, 19 nt, Homo sapiens
  misc_RNA (1)...(19): siRNA sense strand
acaccugcuuugcugagaa

SEQ ID NO: 269183 - RNA, 19 nt, Homo sapiens
  misc_RNA (1)...(19): siRNA sense strand
aauggaggcacaagcauga

SEQ ID NO: 269184 - RNA, 19 nt, Homo sapiens
  misc_RNA (1)...(19): siRNA sense strand
gaugggaucccugcagaag

SEQ ID NO: 269185 - RNA, 19 nt, Homo sapiens
  misc_RNA (1)...(19): siRNA sense strand
caccuucgggccugucuuu

SEQ ID NO: 269186 - RNA, 19 nt, Homo sapiens
  misc_RNA (1)...(19): siRNA sense strand
agcaggacaugaaugguau

SEQ ID NO: 269187 - RNA, 19 nt, Homo sapiens
  misc_RNA (1)...(19): siRNA sense strand
ccuggacccuggacgacuu

SEQ ID NO: 269188 - RNA, 19 nt, Homo sapiens
  misc_RNA (1)...(19): siRNA sense strand
ugagggcaccuacgagugu

SEQ ID NO: 269189 - RNA, 19 nt, Homo sapiens
  misc_RNA (1)...(19): siRNA sense strand
ggaauggaggcacaagcau

SEQ ID NO: 269190 - RNA, 19 nt, Homo sapiens
  misc_RNA (1)...(19): siRNA sense strand
gcccuugucuccucuucag

SEQ ID NO: 269191 - RNA, 19 nt, Homo sapiens
  misc_RNA (1)...(19): siRNA sense strand
gucaagauccgcagcuaca

SEQ ID NO: 269192 - RNA, 19 nt, Homo sapiens
  misc_RNA (1)...(19): siRNA sense strand
gcgccgaugcccaguacuu

SEQ ID NO: 269193 - RNA, 19 nt, Homo sapiens
  misc_RNA (1)...(19): siRNA sense strand
ggcacuaccggagaacuaa

SEQ ID NO: 269194 - RNA, 19 nt, Homo sapiens
  misc_RNA (1)...(19): siRNA sense strand
aggcaaauacaccugcuuu

SEQ ID NO: 269195 - RNA, 19 nt, Homo sapiens
  misc_RNA (1)...(19): siRNA sense strand
cuagugggcccuccagcaa

SEQ ID NO: 269196 - RNA, 19 nt, Homo sapiens
  misc_RNA (1)...(19): siRNA sense strand
ggggugauguugcccugua

SEQ ID NO: 269197 - RNA, 19 nt, Homo sapiens
  misc_RNA (1)...(19): siRNA sense strand
gagcgagacccagugaaag

SEQ ID NO: 269198 - RNA, 19 nt, Homo sapiens
  misc_RNA (1)...(19): siRNA sense strand
uaagaugcuguaccagaau

SEQ ID NO: 269199 - RNA, 19 nt, Homo sapiens
  misc_RNA (1)...(19): siRNA sense strand
gccaacgccacgaccauga

SEQ ID NO: 269200 - RNA, 19 nt, Homo sapiens
  misc_RNA (1)...(19): siRNA sense strand
ugcaggaauucuccaagga

SEQ ID NO: 269201 - RNA, 19 nt, Homo sapiens
  misc_RNA (1)...(19): siRNA sense strand
ggagacagauguucacgua

SEQ ID NO: 269202 - RNA, 19 nt, Homo sapiens
  misc_RNA (1)...(19): siRNA sense strand
gaagaaaccuaccaacagu

SEQ ID NO: 269203 - RNA, 19 nt, Homo sapiens
  misc_RNA (1)...(19): siRNA sense strand
gaagagaagcuauuggaaa

SEQ ID NO: 269204 - RNA, 19 nt, Homo sapiens
  misc_RNA (1)...(19): siRNA sense strand
gacgacagcugcaauguga

SEQ ID NO: 269205 - RNA, 19 nt, Homo sapiens
  misc_RNA (1)...(19): siRNA sense strand
gaacaagagagaaaguuaa

SEQ ID NO: 269206 - RNA, 19 nt, Homo sapiens
  misc_RNA (1)...(19): siRNA sense strand
ggaaagugauucaguucaa

SEQ ID NO: 269207 - RNA, 19 nt, Homo sapiens
  misc_RNA (1)...(19): siRNA sense strand
ggaaagaacagcagaggaa

SEQ ID NO: 269208 - RNA, 19 nt, Homo sapiens
  misc_RNA (1)...(19): siRNA sense strand
ucagaaaucccaacaauga

SEQ ID NO: 269209 - RNA, 19 nt, Homo sapiens
  misc_RNA (1)...(19): siRNA sense strand
gcagaaggcacaagaagaa

SEQ ID NO: 269210 - RNA, 19 nt, Homo sapiens
  misc_RNA (1)...(19): siRNA sense strand
ggagaaggaucgagcuaau

SEQ ID NO: 269211 - RNA, 19 nt, Homo sapiens
  misc_RNA (1)...(19): siRNA sense strand
aacaggagcuugcagauuu

SEQ ID NO: 269212 - RNA, 19 nt, Homo sapiens
  misc_RNA (1)...(19): siRNA sense strand
ggaacuugcucgacugaga

SEQ ID NO: 269213 - RNA, 19 nt, Homo sapiens
  misc_RNA (1)...(19): siRNA sense strand
agacagauguucacguaaa

SEQ ID NO: 269214 - RNA, 19 nt, Homo sapiens
  misc_RNA (1)...(19): siRNA sense strand
ccaagcagaggaagaaaua

SEQ ID NO: 269215 - RNA, 19 nt, Homo sapiens
  misc_RNA (1)...(19): siRNA sense strand
gagcauguuuacaacguuu

SEQ ID NO: 269216 - RNA, 19 nt, Homo sapiens
  misc_RNA (1)...(19): siRNA sense strand
guccuacccuucuuauuaa

SEQ ID NO: 269217 - RNA, 19 nt, Homo sapiens
  misc_RNA (1)...(19): siRNA sense strand
guucagaaaucccaacaau

SEQ ID NO: 269218 - RNA, 19 nt, Homo sapiens
  misc_RNA (1)...(19): siRNA sense strand
gaacagcagaggaaagaga

SEQ ID NO: 269219 - RNA, 19 nt, Homo sapiens
  misc_RNA (1)...(19): siRNA sense strand
gcaacuuucuucauguguu

SEQ ID NO: 269220 - RNA, 19 nt, Homo sapiens
  misc_RNA (1)...(19): siRNA sense strand
gagaagaggaggagcagaa

SEQ ID NO: 269221 - RNA, 19 nt, Homo sapiens
  misc_RNA (1)...(19): siRNA sense strand
gggaagaaaucucacaaac

SEQ ID NO: 269222 - RNA, 19 nt, Homo sapiens
  misc_RNA (1)...(19): siRNA sense strand
gaaggagaaacgaaagaaa

SEQ ID NO: 269223 - RNA, 19 nt, Homo sapiens
  misc_RNA (1)...(19): siRNA sense strand
gaaaucccaacaaugaauu

SEQ ID NO: 269224 - RNA, 19 nt, Homo sapiens
  misc_RNA (1)...(19): siRNA sense strand
ggcgauuugugguuuauuu

SEQ ID NO: 269225 - RNA, 19 nt, Homo sapiens
  misc_RNA (1)...(19): siRNA sense strand
ggaagaaaccuaccaacag

SEQ ID NO: 269226 - RNA, 19 nt, Homo sapiens
  misc_RNA (1)...(19): siRNA sense strand
aaagagagagggaaagauu

SEQ ID NO: 269227 - RNA, 19 nt, Homo sapiens
  misc_RNA (1)...(19): siRNA sense strand
caauguauauguucaguac

SEQ ID NO: 269228 - RNA, 19 nt, Homo sapiens
  misc_RNA (1)...(19): siRNA sense strand
gcaggagggaugacuauga

SEQ ID NO: 269229 - RNA, 19 nt, Homo sapiens
  misc_RNA (1)...(19): siRNA sense strand
ggaaagagagagggaaaga

SEQ ID NO: 269230 - RNA, 19 nt, Homo sapiens
  misc_RNA (1)...(19): siRNA sense strand
ggaagucggguaauagaga

SEQ ID NO: 269231 - RNA, 19 nt, Homo sapiens
  misc_RNA (1)...(19): siRNA sense strand
ggaagaagaaugccaagca

SEQ ID NO: 269232 - RNA, 19 nt, Homo sapiens
  misc_RNA (1)...(19): siRNA sense strand
aguccuacccuucuuauua

SEQ ID NO: 269233 - RNA, 19 nt, Homo sapiens
  misc_RNA (1)...(19): siRNA sense strand
gaaauacaacaauguccaa

SEQ ID NO: 269234 - RNA, 19 nt, Homo sapiens
  misc_RNA (1)...(19): siRNA sense strand
gaaggcacaagaagaauuc

SEQ ID NO: 269235 - RNA, 19 nt, Homo sapiens
  misc_RNA (1)...(19): siRNA sense strand
ccaagaagaugacauuucc

SEQ ID NO: 269236 - RNA, 19 nt, Homo sapiens
  misc_RNA (1)...(19): siRNA sense strand
gaaagugauucaguucaag

SEQ ID NO: 269237 - RNA, 19 nt, Homo sapiens
  misc_RNA (1)...(19): siRNA sense strand
gaaagaacagcagaggaaa

SEQ ID NO: 269238 - RNA, 19 nt, Homo sapiens
  misc_RNA (1)...(19): siRNA sense strand
gaagaggacacuuuuauug

SEQ ID NO: 269239 - RNA, 19 nt, Homo sapiens
  misc_RNA (1)...(19): siRNA sense strand
gcagcccuuucucuguuua

SEQ ID NO: 269240 - RNA, 19 nt, Homo sapiens
  misc_RNA (1)...(19): siRNA sense strand
gaaacaacaggagaagaaa

SEQ ID NO: 269241 - RNA, 19 nt, Homo sapiens
  misc_RNA (1)...(19): siRNA sense strand
gaacaacaacuagaagaag

SEQ ID NO: 269242 - RNA, 19 nt, Homo sapiens
  misc_RNA (1)...(19): siRNA sense strand
cagacuggcuccuccuuug

SEQ ID NO: 269243 - RNA, 19 nt, Homo sapiens
  misc_RNA (1)...(19): siRNA sense strand
aagaugacauuuccagaga

SEQ ID NO: 269244 - RNA, 19 nt, Homo sapiens
  misc_RNA (1)...(19): siRNA sense strand
aagagaagcuauuggaaag

SEQ ID NO: 269245 - RNA, 19 nt, Homo sapiens
  misc_RNA (1)...(19): siRNA sense strand
caacuuucuucauguguuc

SEQ ID NO: 269246 - RNA, 19 nt, Homo sapiens
  misc_RNA (1)...(19): siRNA sense strand
uaccaacaguuccuagauu

SEQ ID NO: 269247 - RNA, 19 nt, Homo sapiens
  misc_RNA (1)...(19): siRNA sense strand
gcacaagaagaauucagaa

SEQ ID NO: 269248 - RNA, 19 nt, Homo sapiens
  misc_RNA (1)...(19): siRNA sense strand
gagaagcuauuggaaagag

SEQ ID NO: 269249 - RNA, 19 nt, Homo sapiens
  misc_RNA (1)...(19): siRNA sense strand
aaagaaacgucggcaggaa

SEQ ID NO: 269250 - RNA, 19 nt, Homo sapiens
  misc_RNA (1)...(19): siRNA sense strand
gaaaguuaaaggaacaaug

SEQ ID NO: 269251 - RNA, 19 nt, Homo sapiens
  misc_RNA (1)...(19): siRNA sense strand
agaacaagagagaaaguua

SEQ ID NO: 269252 - RNA, 19 nt, Homo sapiens
  misc_RNA (1)...(19): siRNA sense strand
gcuagaagaacaagagaga

SEQ ID NO: 269253 - RNA, 19 nt, Homo sapiens
  misc_RNA (1)...(19): siRNA sense strand
ugaagaacaacaacuagaa

SEQ ID NO: 269254 - RNA, 19 nt, Homo sapiens
  misc_RNA (1)...(19): siRNA sense strand
ugaagaaggagaaacgaaa

SEQ ID NO: 269255 - RNA, 19 nt, Homo sapiens
  misc_RNA (1)...(19): siRNA sense strand
aagaugacguuucccaaga

SEQ ID NO: 269256 - RNA, 19 nt, Homo sapiens
  misc_RNA (1)...(19): siRNA sense strand
caacaggagaagaaagaaa

SEQ ID NO: 269257 - RNA, 19 nt, Homo sapiens
  misc_RNA (1)...(19): siRNA sense strand
agaaacaacaggagaagaa

SEQ ID NO: 269258 - RNA, 19 nt, Homo sapiens
  misc_RNA (1)...(19): siRNA sense strand
gaagaacaacaacuagaag

SEQ ID NO: 269259 - RNA, 19 nt, Homo sapiens
  misc_RNA (1)...(19): siRNA sense strand
ggaggaggaagucggguaa

SEQ ID NO: 269260 - RNA, 19 nt, Homo sapiens
  misc_RNA (1)...(19): siRNA sense strand
cacaaacgcacaucaaaga

SEQ ID NO: 269261 - RNA, 19 nt, Homo sapiens
  misc_RNA (1)...(19): siRNA sense strand
cauaauuucccaacaucua

SEQ ID NO: 269262 - RNA, 19 nt, Homo sapiens
  misc_RNA (1)...(19): siRNA sense strand
uagaagaacaagagagaaa

SEQ ID NO: 269263 - RNA, 19 nt, Homo sapiens
  misc_RNA (1)...(19): siRNA sense strand
aagcagcccuuucucuguu

SEQ ID NO: 269264 - RNA, 19 nt, Homo sapiens
  misc_RNA (1)...(19): siRNA sense strand
gaggaagucggguaauaga

SEQ ID NO: 269265 - RNA, 19 nt, Homo sapiens
  misc_RNA (1)...(19): siRNA sense strand
caacaauguccaagaggaa

SEQ ID NO: 269266 - RNA, 19 nt, Homo sapiens
  misc_RNA (1)...(19): siRNA sense strand
gaagaacaagagagaaagu

SEQ ID NO: 269267 - RNA, 19 nt, Homo sapiens
  misc_RNA (1)...(19): siRNA sense strand
aggaggaagucggguaaua

SEQ ID NO: 269268 - RNA, 19 nt, Homo sapiens
  misc_RNA (1)...(19): siRNA sense strand
gaagaaggagaaacgaaag

SEQ ID NO: 269269 - RNA, 19 nt, Homo sapiens
  misc_RNA (1)...(19): siRNA sense strand
agagaaaguuaaaggaaca

SEQ ID NO: 269270 - RNA, 19 nt, Homo sapiens
  misc_RNA (1)...(19): siRNA sense strand
agaaggaucgagcuaauug

SEQ ID NO: 269271 - RNA, 19 nt, Homo sapiens
  misc_RNA (1)...(19): siRNA sense strand
caaggucagcugcaauuug

SEQ ID NO: 269272 - RNA, 19 nt, Homo sapiens
  misc_RNA (1)...(19): siRNA sense strand
aauugucccuucuacagua

SEQ ID NO: 269273 - RNA, 19 nt, Homo sapiens
  misc_RNA (1)...(19): siRNA sense strand
uaaaggaacaauggaaaga

SEQ ID NO: 269274 - RNA, 19 nt, Homo sapiens
  misc_RNA (1)...(19): siRNA sense strand
ggaaggagaaacccuaguc

SEQ ID NO: 269275 - RNA, 19 nt, Homo sapiens
  misc_RNA (1)...(19): siRNA sense strand
gcaauguauauguucagua

SEQ ID NO: 269276 - RNA, 19 nt, Homo sapiens
  misc_RNA (1)...(19): siRNA sense strand
accaacaguuccuagauuu

SEQ ID NO: 269277 - RNA, 19 nt, Homo sapiens
  misc_RNA (1)...(19): siRNA sense strand
aacaacaacuagaagaaga

SEQ ID NO: 269278 - RNA, 19 nt, Homo sapiens
  misc_RNA (1)...(19): siRNA sense strand
gagaaggaucgagcuaauu

SEQ ID NO: 269279 - RNA, 19 nt, Homo sapiens
  misc_RNA (1)...(19): siRNA sense strand
caagagagaaaguuaaagg

SEQ ID NO: 269280 - RNA, 19 nt, Homo sapiens
  misc_RNA (1)...(19): siRNA sense strand
guaccagucggaagaagaa

SEQ ID NO: 269281 - RNA, 19 nt, Homo sapiens
  misc_RNA (1)...(19): siRNA sense strand
gagcuaauugucccuucua

SEQ ID NO: 269282 - RNA, 19 nt, Homo sapiens
  misc_RNA (1)...(19): siRNA sense strand
ucagaguaauggagaagga

SEQ ID NO: 269283 - RNA, 19 nt, Homo sapiens
  misc_RNA (1)...(19): siRNA sense strand
guuaaaggaacaauggaaa

SEQ ID NO: 269284 - RNA, 19 nt, Homo sapiens
  misc_RNA (1)...(19): siRNA sense strand
gaauaaagaaggaaaagga

SEQ ID NO: 269285 - RNA, 19 nt, Homo sapiens
  misc_RNA (1)...(19): siRNA sense strand
ggaggaagucggguaauag

SEQ ID NO: 269286 - RNA, 19 nt, Homo sapiens
  misc_RNA (1)...(19): siRNA sense strand
gaccacaccuacaaaagaa

SEQ ID NO: 269287 - RNA, 19 nt, Homo sapiens
  misc_RNA (1)...(19): siRNA sense strand
cuucauguguucagaaauc

SEQ ID NO: 269288 - RNA, 19 nt, Homo sapiens
  misc_RNA (1)...(19): siRNA sense strand
gagcagaaggcacaagaag

SEQ ID NO: 269289 - RNA, 19 nt, Homo sapiens
  misc_RNA (1)...(19): siRNA sense strand
gguaauagagacagaacug

SEQ ID NO: 269290 - RNA, 19 nt, Homo sapiens
  misc_RNA (1)...(19): siRNA sense strand
ggacgacagcugcaaugug

SEQ ID NO: 269291 - RNA, 19 nt, Homo sapiens
  misc_RNA (1)...(19): siRNA sense strand
ugcagaagaugcuggauca

SEQ ID NO: 269292 - RNA, 19 nt, Homo sapiens
  misc_RNA (1)...(19): siRNA sense strand
agaggaagcugugcagaag

SEQ ID NO: 269293 - RNA, 19 nt, Homo sapiens
  misc_RNA (1)...(19): siRNA sense strand
ugugaauucugcccaguga

SEQ ID NO: 269294 - RNA, 19 nt, Homo sapiens
  misc_RNA (1)...(19): siRNA sense strand
uagaagaagagaagcuauu

SEQ ID NO: 269295 - RNA, 19 nt, Homo sapiens
  misc_RNA (1)...(19): siRNA sense strand
ggaagaaaucucacaaacg

SEQ ID NO: 269296 - RNA, 19 nt, Homo sapiens
  misc_RNA (1)...(19): siRNA sense strand
aagagagagggaaagauua

SEQ ID NO: 269297 - RNA, 19 nt, Homo sapiens
  misc_RNA (1)...(19): siRNA sense strand
auacaacaauguccaagag

SEQ ID NO: 269298 - RNA, 19 nt, Homo sapiens
  misc_RNA (1)...(19): siRNA sense strand
agagaaaccaagccacaaa

SEQ ID NO: 269299 - RNA, 19 nt, Homo sapiens
  misc_RNA (1)...(19): siRNA sense strand
gaaagagagagggaaagau

SEQ ID NO: 269300 - RNA, 19 nt, Homo sapiens
  misc_RNA (1)...(19): siRNA sense strand
agagagaaaguuaaaggaa

SEQ ID NO: 269301 - RNA, 19 nt, Homo sapiens
  misc_RNA (1)...(19): siRNA sense strand
ggacaaaucuggugugguu

SEQ ID NO: 269302 - RNA, 19 nt, Homo sapiens
  misc_RNA (1)...(19): siRNA sense strand
ccauacagcuuacuugaua

SEQ ID NO: 269303 - RNA, 19 nt, Homo sapiens
  misc_RNA (1)...(19): siRNA sense strand
guaaacaucuuaagugaca

SEQ ID NO: 269304 - RNA, 19 nt, Homo sapiens
  misc_RNA (1)...(19): siRNA sense strand
gaguaaacaucuuaaguga

SEQ ID NO: 269305 - RNA, 19 nt, Homo sapiens
  misc_RNA (1)...(19): siRNA sense strand
gaaaugaagaggccacuaa

SEQ ID NO: 269306 - RNA, 19 nt, Homo sapiens
  misc_RNA (1)...(19): siRNA sense strand
ucaaagauguucaugaaga

SEQ ID NO: 269307 - RNA, 19 nt, Homo sapiens
  misc_RNA (1)...(19): siRNA sense strand
gagaugaaguagagguaua

SEQ ID NO: 269308 - RNA, 19 nt, Homo sapiens
  misc_RNA (1)...(19): siRNA sense strand
ggaagaggcagaaguguuu

SEQ ID NO: 269309 - RNA, 19 nt, Homo sapiens
  misc_RNA (1)...(19): siRNA sense strand
gcaauaaacggcccaacua

SEQ ID NO: 269310 - RNA, 19 nt, Homo sapiens
  misc_RNA (1)...(19): siRNA sense strand
guacgaaguugaugcuuau

SEQ ID NO: 269311 - RNA, 19 nt, Homo sapiens
  misc_RNA (1)...(19): siRNA sense strand
gaacagcugcgacagauug

SEQ ID NO: 269312 - RNA, 19 nt, Homo sapiens
  misc_RNA (1)...(19): siRNA sense strand
gaaacaacacagcuaauga

SEQ ID NO: 269313 - RNA, 19 nt, Homo sapiens
  misc_RNA (1)...(19): siRNA sense strand
caacacagcuaaugauacu

SEQ ID NO: 269314 - RNA, 19 nt, Homo sapiens
  misc_RNA (1)...(19): siRNA sense strand
gcaauaggaacacauggua

SEQ ID NO: 269315 - RNA, 19 nt, Homo sapiens
  misc_RNA (1)...(19): siRNA sense strand
ugauacagcuucaguuaau

SEQ ID NO: 269316 - RNA, 19 nt, Homo sapiens
  misc_RNA (1)...(19): siRNA sense strand
gacaugcauuugcgaagua

SEQ ID NO: 269317 - RNA, 19 nt, Homo sapiens
  misc_RNA (1)...(19): siRNA sense strand
caaaagaugugauugaaga

SEQ ID NO: 269318 - RNA, 19 nt, Homo sapiens
  misc_RNA (1)...(19): siRNA sense strand
cuaggaaucucguuggaaa

SEQ ID NO: 269319 - RNA, 19 nt, Homo sapiens
  misc_RNA (1)...(19): siRNA sense strand
ccauugagcuagaugaaga

SEQ ID NO: 269320 - RNA, 19 nt, Homo sapiens
  misc_RNA (1)...(19): siRNA sense strand
gaagaggccacuaagcauu

SEQ ID NO: 269321 - RNA, 19 nt, Homo sapiens
  misc_RNA (1)...(19): siRNA sense strand
ugaaggagaugaaguagag

SEQ ID NO: 269322 - RNA, 19 nt, Homo sapiens
  misc_RNA (1)...(19): siRNA sense strand
gaugaugaaaggagaauuu

SEQ ID NO: 269323 - RNA, 19 nt, Homo sapiens
  misc_RNA (1)...(19): siRNA sense strand
ugaagaugcuguucugaug

SEQ ID NO: 269324 - RNA, 19 nt, Homo sapiens
  misc_RNA (1)...(19): siRNA sense strand
cguacgaaguugaugcuua

SEQ ID NO: 269325 - RNA, 19 nt, Homo sapiens
  misc_RNA (1)...(19): siRNA sense strand
ggaaguagaacagcuaaga

SEQ ID NO: 269326 - RNA, 19 nt, Homo sapiens
  misc_RNA (1)...(19): siRNA sense strand
caagggaaacuuuggcuaa

SEQ ID NO: 269327 - RNA, 19 nt, Homo sapiens
  misc_RNA (1)...(19): siRNA sense strand
ggaaugacugaaucugaua

SEQ ID NO: 269328 - RNA, 19 nt, Homo sapiens
  misc_RNA (1)...(19): siRNA sense strand
guaaagacgagcugaguga

SEQ ID NO: 269329 - RNA, 19 nt, Homo sapiens
  misc_RNA (1)...(19): siRNA sense strand
gaagauacuggaacauuca

SEQ ID NO: 269330 - RNA, 19 nt, Homo sapiens
  misc_RNA (1)...(19): siRNA sense strand
gagcaugguccuucagaaa

SEQ ID NO: 269331 - RNA, 19 nt, Homo sapiens
  misc_RNA (1)...(19): siRNA sense strand
cagcgaaucucaucacagu

SEQ ID NO: 269332 - RNA, 19 nt, Homo sapiens
  misc_RNA (1)...(19): siRNA sense strand
cuaauuacaccuccgguua

SEQ ID NO: 269333 - RNA, 19 nt, Homo sapiens
  misc_RNA (1)...(19): siRNA sense strand
gaagacucccuuacaguug

SEQ ID NO: 269334 - RNA, 19 nt, Homo sapiens
  misc_RNA (1)...(19): siRNA sense strand
caaauucugagcugucuaa

SEQ ID NO: 269335 - RNA, 19 nt, Homo sapiens
  misc_RNA (1)...(19): siRNA sense strand
agagagugcugaugcugua

SEQ ID NO: 269336 - RNA, 19 nt, Homo sapiens
  misc_RNA (1)...(19): siRNA sense strand
gaaguagaacagcuaagaa

SEQ ID NO: 269337 - RNA, 19 nt, Homo sapiens
  misc_RNA (1)...(19): siRNA sense strand
uggcaaaguuauucaagaa

SEQ ID NO: 269338 - RNA, 19 nt, Homo sapiens
  misc_RNA (1)...(19): siRNA sense strand
ugaagauacuggaacauuc

SEQ ID NO: 269339 - RNA, 19 nt, Homo sapiens
  misc_RNA (1)...(19): siRNA sense strand
ggcuagagguuucuuggaa

SEQ ID NO: 269340 - RNA, 19 nt, Homo sapiens
  misc_RNA (1)...(19): siRNA sense strand
caagggauuuaucaaagau

SEQ ID NO: 269341 - RNA, 19 nt, Homo sapiens
  misc_RNA (1)...(19): siRNA sense strand
ggaauuuguugugagagaa

SEQ ID NO: 269342 - RNA, 19 nt, Homo sapiens
  misc_RNA (1)...(19): siRNA sense strand
gcaaauccuccaucaguuc

SEQ ID NO: 269343 - RNA, 19 nt, Homo sapiens
  misc_RNA (1)...(19): siRNA sense strand
ucucagagcagacaaagaa

SEQ ID NO: 269344 - RNA, 19 nt, Homo sapiens
  misc_RNA (1)...(19): siRNA sense strand
ucaguucugugcucaaaga

SEQ ID NO: 269345 - RNA, 19 nt, Homo sapiens
  misc_RNA (1)...(19): siRNA sense strand
cuacaagggauuuaucaaa

SEQ ID NO: 269346 - RNA, 19 nt, Homo sapiens
  misc_RNA (1)...(19): siRNA sense strand
acaagggauuuaucaaaga

SEQ ID NO: 269347 - RNA, 19 nt, Homo sapiens
  misc_RNA (1)...(19): siRNA sense strand
ggcaaauccuccaucaguu

SEQ ID NO: 269348 - RNA, 19 nt, Homo sapiens
  misc_RNA (1)...(19): siRNA sense strand
ugaagcaacugugaagaga

SEQ ID NO: 269349 - RNA, 19 nt, Homo sapiens
  misc_RNA (1)...(19): siRNA sense strand
ccagaaacaacacagcuaa

SEQ ID NO: 269350 - RNA, 19 nt, Homo sapiens
  misc_RNA (1)...(19): siRNA sense strand
caucaguucugugcucaaa

SEQ ID NO: 269351 - RNA, 19 nt, Homo sapiens
  misc_RNA (1)...(19): siRNA sense strand
ggaggaagaggcagaagug

SEQ ID NO: 269352 - RNA, 19 nt, Homo sapiens
  misc_RNA (1)...(19): siRNA sense strand
ugaggaauuuguugugaga

SEQ ID NO: 269353 - RNA, 19 nt, Homo sapiens
  misc_RNA (1)...(19): siRNA sense strand
cuagagguuucuuggaauu

SEQ ID NO: 269354 - RNA, 19 nt, Homo sapiens
  misc_RNA (1)...(19): siRNA sense strand
gcagguucuucuagaguau

SEQ ID NO: 269355 - RNA, 19 nt, Homo sapiens
  misc_RNA (1)...(19): siRNA sense strand
gagaguaaacaucuuaagu

SEQ ID NO: 269356 - RNA, 19 nt, Homo sapiens
  misc_RNA (1)...(19): siRNA sense strand
gcgaugacauuucuaagcu

SEQ ID NO: 269357 - RNA, 19 nt, Homo sapiens
  misc_RNA (1)...(19): siRNA sense strand
agaaagaaauggcaaaaga

SEQ ID NO: 269358 - RNA, 19 nt, Homo sapiens
  misc_RNA (1)...(19): siRNA sense strand
cagcuuacuugauaauaca

SEQ ID NO: 269359 - RNA, 19 nt, Homo sapiens
  misc_RNA (1)...(19): siRNA sense strand
gaaguagagguauauucaa

SEQ ID NO: 269360 - RNA, 19 nt, Homo sapiens
  misc_RNA (1)...(19): siRNA sense strand
cagcaauccauacagcuua

SEQ ID NO: 269361 - RNA, 19 nt, Homo sapiens
  misc_RNA (1)...(19): siRNA sense strand
ucaaagauccagacagcaa

SEQ ID NO: 269362 - RNA, 19 nt, Homo sapiens
  misc_RNA (1)...(19): siRNA sense strand
aagacgagcugagugauug

SEQ ID NO: 269363 - RNA, 19 nt, Homo sapiens
  misc_RNA (1)...(19): siRNA sense strand
cuaaagaaagcauuggaaa

SEQ ID NO: 269364 - RNA, 19 nt, Homo sapiens
  misc_RNA (1)...(19): siRNA sense strand
cagagaagacgguaugguu

SEQ ID NO: 269365 - RNA, 19 nt, Homo sapiens
  misc_RNA (1)...(19): siRNA sense strand
uggaauuuguggaggauuu

SEQ ID NO: 269366 - RNA, 19 nt, Homo sapiens
  misc_RNA (1)...(19): siRNA sense strand
gcuagagguuucuuggaau

SEQ ID NO: 269367 - RNA, 19 nt, Homo sapiens
  misc_RNA (1)...(19): siRNA sense strand
caugaggaauuuguuguga

SEQ ID NO: 269368 - RNA, 19 nt, Homo sapiens
  misc_RNA (1)...(19): siRNA sense strand
guagagguauauucaagag

SEQ ID NO: 269369 - RNA, 19 nt, Homo sapiens
  misc_RNA (1)...(19): siRNA sense strand
gagaggcgugugcuaauga

SEQ ID NO: 269370 - RNA, 19 nt, Homo sapiens
  misc_RNA (1)...(19): siRNA sense strand
gaauggaacgccuacagau

SEQ ID NO: 269371 - RNA, 19 nt, Homo sapiens
  misc_RNA (1)...(19): siRNA sense strand
uacaagggauuuaucaaag

SEQ ID NO: 269372 - RNA, 19 nt, Homo sapiens
  misc_RNA (1)...(19): siRNA sense strand
caucuuaagugacaugcau

SEQ ID NO: 269373 - RNA, 19 nt, Homo sapiens
  misc_RNA (1)...(19): siRNA sense strand
gcuaaaguucggaugauga

SEQ ID NO: 269374 - RNA, 19 nt, Homo sapiens
  misc_RNA (1)...(19): siRNA sense strand
gauaauacagaaucagauc

SEQ ID NO: 269375 - RNA, 19 nt, Homo sapiens
  misc_RNA (1)...(19): siRNA sense strand
gaaauuagugaaggagaug

SEQ ID NO: 269376 - RNA, 19 nt, Homo sapiens
  misc_RNA (1)...(19): siRNA sense strand
aaacggaaucugagcguaa

SEQ ID NO: 269377 - RNA, 19 nt, Homo sapiens
  misc_RNA (1)...(19): siRNA sense strand
gaaucucguuggaaaagua

SEQ ID NO: 269378 - RNA, 19 nt, Homo sapiens
  misc_RNA (1)...(19): siRNA sense strand
ugaagacucccuuacaguu

SEQ ID NO: 269379 - RNA, 19 nt, Homo sapiens
  misc_RNA (1)...(19): siRNA sense strand
gaacgacuucggccuguca

SEQ ID NO: 269380 - RNA, 19 nt, Homo sapiens
  misc_RNA (1)...(19): siRNA sense strand
ugacgcuacuuacaaugaa

SEQ ID NO: 269381 - RNA, 19 nt, Homo sapiens
  misc_RNA (1)...(19): siRNA sense strand
gaaaugugcagguucuucu

SEQ ID NO: 269382 - RNA, 19 nt, Homo sapiens
  misc_RNA (1)...(19): siRNA sense strand
acgaaggacugaugaagau

SEQ ID NO: 269383 - RNA, 19 nt, Homo sapiens
  misc_RNA (1)...(19): siRNA sense strand
gcugagugauuggucauug

SEQ ID NO: 269384 - RNA, 19 nt, Homo sapiens
  misc_RNA (1)...(19): siRNA sense strand
uagaacagcuaagaaugga

SEQ ID NO: 269385 - RNA, 19 nt, Homo sapiens
  misc_RNA (1)...(19): siRNA sense strand
cauauugccuaucuaaagg

SEQ ID NO: 269386 - RNA, 19 nt, Homo sapiens
  misc_RNA (1)...(19): siRNA sense strand
cgaaguugaugcuuauguc

SEQ ID NO: 269387 - RNA, 19 nt, Homo sapiens
  misc_RNA (1)...(19): siRNA sense strand
gacgaaggacugaugaaga

SEQ ID NO: 269388 - RNA, 19 nt, Homo sapiens
  misc_RNA (1)...(19): siRNA sense strand
gaacacaugguaguaacau

SEQ ID NO: 269389 - RNA, 19 nt, Homo sapiens
  misc_RNA (1)...(19): siRNA sense strand
agucacaguugcagauuau

SEQ ID NO: 269390 - RNA, 19 nt, Homo sapiens
  misc_RNA (1)...(19): siRNA sense strand
uagucacaguugcagauua

SEQ ID NO: 269391 - RNA, 19 nt, Homo sapiens
  misc_RNA (1)...(19): siRNA sense strand
gguggcaaauccuccauca

SEQ ID NO: 269392 - RNA, 19 nt, Homo sapiens
  misc_RNA (1)...(19): siRNA sense strand
caaagauguucaugaagac

SEQ ID NO: 269393 - RNA, 19 nt, Homo sapiens
  misc_RNA (1)...(19): siRNA sense strand
guagaacagcuaagaaugg

SEQ ID NO: 269394 - RNA, 19 nt, Homo sapiens
  misc_RNA (1)...(19): siRNA sense strand
ccagcaagcuaggaagguu

SEQ ID NO: 269395 - RNA, 19 nt, Homo sapiens
  misc_RNA (1)...(19): siRNA sense strand
gaacgccuacagauugaug

SEQ ID NO: 269396 - RNA, 19 nt, Homo sapiens
  misc_RNA (1)...(19): siRNA sense strand
gauacagcuucaguuaaug

SEQ ID NO: 269397 - RNA, 19 nt, Homo sapiens
  misc_RNA (1)...(19): siRNA sense strand
cgucguaggcggucucgua

SEQ ID NO: 269398 - RNA, 19 nt, Homo sapiens
  misc_RNA (1)...(19): siRNA sense strand
cauacagcuuacuugauaa

SEQ ID NO: 269399 - RNA, 19 nt, Homo sapiens
  misc_RNA (1)...(19): siRNA sense strand
caagagcaaaugaccaaga

SEQ ID NO: 269400 - RNA, 19 nt, Homo sapiens
  misc_RNA (1)...(19): siRNA sense strand
gaugaacagcugcgacaga

SEQ ID NO: 269401 - RNA, 19 nt, Homo sapiens
  misc_RNA (1)...(19): siRNA sense strand
ggagauagauguucacgua

SEQ ID NO: 269402 - RNA, 19 nt, Homo sapiens
  misc_RNA (1)...(19): siRNA sense strand
gaagaaaccuaccaacagu

SEQ ID NO: 269403 - RNA, 19 nt, Homo sapiens
  misc_RNA (1)...(19): siRNA sense strand
gaagagaagcuauuggaaa

SEQ ID NO: 269404 - RNA, 19 nt, Homo sapiens
  misc_RNA (1)...(19): siRNA sense strand
gaacaagagagaaaguuaa

SEQ ID NO: 269405 - RNA, 19 nt, Homo sapiens
  misc_RNA (1)...(19): siRNA sense strand
ggaaagugauucaguucaa

SEQ ID NO: 269406 - RNA, 19 nt, Homo sapiens
  misc_RNA (1)...(19): siRNA sense strand
gacgacagcugcaguguga

SEQ ID NO: 269407 - RNA, 19 nt, Homo sapiens
  misc_RNA (1)...(19): siRNA sense strand
ucagaaaucccaacaauga

SEQ ID NO: 269408 - RNA, 19 nt, Homo sapiens
  misc_RNA (1)...(19): siRNA sense strand
gcagaaggcacaagaagaa

SEQ ID NO: 269409 - RNA, 19 nt, Homo sapiens
  misc_RNA (1)...(19): siRNA sense strand
ggagaaggaucgagcuaau

SEQ ID NO: 269410 - RNA, 19 nt, Homo sapiens
  misc_RNA (1)...(19): siRNA sense strand
aacaggagcuugcagauuu

SEQ ID NO: 269411 - RNA, 19 nt, Homo sapiens
  misc_RNA (1)...(19): siRNA sense strand
ggaacuugcucgacugaga

SEQ ID NO: 269412 - RNA, 19 nt, Homo sapiens
  misc_RNA (1)...(19): siRNA sense strand
gcaagaagaacaagagaga

SEQ ID NO: 269413 - RNA, 19 nt, Homo sapiens
  misc_RNA (1)...(19): siRNA sense strand
gggaagaacuccgaaagga

SEQ ID NO: 269414 - RNA, 19 nt, Homo sapiens
  misc_RNA (1)...(19): siRNA sense strand
cgaagcagaggaagaaaua

SEQ ID NO: 269415 - RNA, 19 nt, Homo sapiens
  misc_RNA (1)...(19): siRNA sense strand
guccuacccuucuuauuaa

SEQ ID NO: 269416 - RNA, 19 nt, Homo sapiens
  misc_RNA (1)...(19): siRNA sense strand
guucagaaaucccaacaau

SEQ ID NO: 269417 - RNA, 19 nt, Homo sapiens
  misc_RNA (1)...(19): siRNA sense strand
gaacagcagaggaaagaga

SEQ ID NO: 269418 - RNA, 19 nt, Homo sapiens
  misc_RNA (1)...(19): siRNA sense strand
gcaacuuucuucauguguu

SEQ ID NO: 269419 - RNA, 19 nt, Homo sapiens
  misc_RNA (1)...(19): siRNA sense strand
gagaagaggaggagcagaa

SEQ ID NO: 269420 - RNA, 19 nt, Homo sapiens
  misc_RNA (1)...(19): siRNA sense strand
gaaaaugaguuggaaaaug

SEQ ID NO: 269421 - RNA, 19 nt, Homo sapiens
  misc_RNA (1)...(19): siRNA sense strand
gggaagaaaucucacaaac

SEQ ID NO: 269422 - RNA, 19 nt, Homo sapiens
  misc_RNA (1)...(19): siRNA sense strand
gaaggagaaacgaaagaaa

SEQ ID NO: 269423 - RNA, 19 nt, Homo sapiens
  misc_RNA (1)...(19): siRNA sense strand
gaaaucccaacaaugaauu

SEQ ID NO: 269424 - RNA, 19 nt, Homo sapiens
  misc_RNA (1)...(19): siRNA sense strand
ggcgauuugugguuuauuu

SEQ ID NO: 269425 - RNA, 19 nt, Homo sapiens
  misc_RNA (1)...(19): siRNA sense strand
ggaagaaaccuaccaacag

SEQ ID NO: 269426 - RNA, 19 nt, Homo sapiens
  misc_RNA (1)...(19): siRNA sense strand
aaagagagaggcaaagauu

SEQ ID NO: 269427 - RNA, 19 nt, Homo sapiens
  misc_RNA (1)...(19): siRNA sense strand
caauguauauguucaguac

SEQ ID NO: 269428 - RNA, 19 nt, Homo sapiens
  misc_RNA (1)...(19): siRNA sense strand
gcaggagggaugacuauga

SEQ ID NO: 269429 - RNA, 19 nt, Homo sapiens
  misc_RNA (1)...(19): siRNA sense strand
ggaaagagagaggcaaaga

SEQ ID NO: 269430 - RNA, 19 nt, Homo sapiens
  misc_RNA (1)...(19): siRNA sense strand
ggaagaagaaugccaagca

SEQ ID NO: 269431 - RNA, 19 nt, Homo sapiens
  misc_RNA (1)...(19): siRNA sense strand
caugaggagugguugcuaa

SEQ ID NO: 269432 - RNA, 19 nt, Homo sapiens
  misc_RNA (1)...(19): siRNA sense strand
gaggaagcuuugcagaaga

SEQ ID NO: 269433 - RNA, 19 nt, Homo sapiens
  misc_RNA (1)...(19): siRNA sense strand
gaaauacaacaauguccaa

SEQ ID NO: 269434 - RNA, 19 nt, Homo sapiens
  misc_RNA (1)...(19): siRNA sense strand
aguccuacccuucuuauua

SEQ ID NO: 269435 - RNA, 19 nt, Homo sapiens
  misc_RNA (1)...(19): siRNA sense strand
gaaggcacaagaagaauuc

SEQ ID NO: 269436 - RNA, 19 nt, Homo sapiens
  misc_RNA (1)...(19): siRNA sense strand
gaaagugauucaguucaag

SEQ ID NO: 269437 - RNA, 19 nt, Homo sapiens
  misc_RNA (1)...(19): siRNA sense strand
agauagauguucacguaaa

SEQ ID NO: 269438 - RNA, 19 nt, Homo sapiens
  misc_RNA (1)...(19): siRNA sense strand
gggaagaacagcagaggaa

SEQ ID NO: 269439 - RNA, 19 nt, Homo sapiens
  misc_RNA (1)...(19): siRNA sense strand
gcagcccuuucucuguuua

SEQ ID NO: 269440 - RNA, 19 nt, Homo sapiens
  misc_RNA (1)...(19): siRNA sense strand
ggaggacacuuuuauugaa

SEQ ID NO: 269441 - RNA, 19 nt, Homo sapiens
  misc_RNA (1)...(19): siRNA sense strand
aggaggaggucggguaaua

SEQ ID NO: 269442 - RNA, 19 nt, Homo sapiens
  misc_RNA (1)...(19): siRNA sense strand
gcuugcagauuuggagaua

SEQ ID NO: 269443 - RNA, 19 nt, Homo sapiens
  misc_RNA (1)...(19): siRNA sense strand
gaaagagagaggcaaagau

SEQ ID NO: 269444 - RNA, 19 nt, Homo sapiens
  misc_RNA (1)...(19): siRNA sense strand
gaacaacaacuagaagaag

SEQ ID NO: 269445 - RNA, 19 nt, Homo sapiens
  misc_RNA (1)...(19): siRNA sense strand
aagagaagcuauuggaaag

SEQ ID NO: 269446 - RNA, 19 nt, Homo sapiens
  misc_RNA (1)...(19): siRNA sense strand
caacuuucuucauguguuc

SEQ ID NO: 269447 - RNA, 19 nt, Homo sapiens
  misc_RNA (1)...(19): siRNA sense strand
gcacaagaagaauucagaa

SEQ ID NO: 269448 - RNA, 19 nt, Homo sapiens
  misc_RNA (1)...(19): siRNA sense strand
gagaagcuauuggaaagag

SEQ ID NO: 269449 - RNA, 19 nt, Homo sapiens
  misc_RNA (1)...(19): siRNA sense strand
gaggaaagcacugcaacuu

SEQ ID NO: 269450 - RNA, 19 nt, Homo sapiens
  misc_RNA (1)...(19): siRNA sense strand
aaagaaacgucggcaggaa

SEQ ID NO: 269451 - RNA, 19 nt, Homo sapiens
  misc_RNA (1)...(19): siRNA sense strand
gaaacgacaggagaagaaa

SEQ ID NO: 269452 - RNA, 19 nt, Homo sapiens
  misc_RNA (1)...(19): siRNA sense strand
gaaaguuaaaggaacaaug

SEQ ID NO: 269453 - RNA, 19 nt, Homo sapiens
  misc_RNA (1)...(19): siRNA sense strand
agaacaagagagaaaguua

SEQ ID NO: 269454 - RNA, 19 nt, Homo sapiens
  misc_RNA (1)...(19): siRNA sense strand
ugaagaacaacaacuagaa

SEQ ID NO: 269455 - RNA, 19 nt, Homo sapiens
  misc_RNA (1)...(19): siRNA sense strand
ugaagaaggagaaacgaaa

SEQ ID NO: 269456 - RNA, 19 nt, Homo sapiens
  misc_RNA (1)...(19): siRNA sense strand
gagcauguuuacgacguuu

SEQ ID NO: 269457 - RNA, 19 nt, Homo sapiens
  misc_RNA (1)...(19): siRNA sense strand
cacaaacgcacaucaaaga

SEQ ID NO: 269458 - RNA, 19 nt, Homo sapiens
  misc_RNA (1)...(19): siRNA sense strand
gaagaacaacaacuagaag

SEQ ID NO: 269459 - RNA, 19 nt, Homo sapiens
  misc_RNA (1)...(19): siRNA sense strand
cgagaaaccaagccacaaa

SEQ ID NO: 269460 - RNA, 19 nt, Homo sapiens
  misc_RNA (1)...(19): siRNA sense strand
gaggagugguugcuaagag

SEQ ID NO: 269461 - RNA, 19 nt, Homo sapiens
  misc_RNA (1)...(19): siRNA sense strand
caacaauguccaagaggaa

SEQ ID NO: 269462 - RNA, 19 nt, Homo sapiens
  misc_RNA (1)...(19): siRNA sense strand
aagcagcccuuucucuguu

SEQ ID NO: 269463 - RNA, 19 nt, Homo sapiens
  misc_RNA (1)...(19): siRNA sense strand
acucaggacucucacagaa

SEQ ID NO: 269464 - RNA, 19 nt, Homo sapiens
  misc_RNA (1)...(19): siRNA sense strand
gaagaacaagagagaaagu

SEQ ID NO: 269465 - RNA, 19 nt, Homo sapiens
  misc_RNA (1)...(19): siRNA sense strand
gcaggaggaggucggguaa

SEQ ID NO: 269466 - RNA, 19 nt, Homo sapiens
  misc_RNA (1)...(19): siRNA sense strand
ucacgaagcagaggaagaa

SEQ ID NO: 269467 - RNA, 19 nt, Homo sapiens
  misc_RNA (1)...(19): siRNA sense strand
gaagaaggagaaacgaaag

SEQ ID NO: 269468 - RNA, 19 nt, Homo sapiens
  misc_RNA (1)...(19): siRNA sense strand
gauagauguucacguaaac

SEQ ID NO: 269469 - RNA, 19 nt, Homo sapiens
  misc_RNA (1)...(19): siRNA sense strand
agagaaaguuaaaggaaca

SEQ ID NO: 269470 - RNA, 19 nt, Homo sapiens
  misc_RNA (1)...(19): siRNA sense strand
agaaggaucgagcuaauug

SEQ ID NO: 269471 - RNA, 19 nt, Homo sapiens
  misc_RNA (1)...(19): siRNA sense strand
ggaggucggguaauagaga

SEQ ID NO: 269472 - RNA, 19 nt, Homo sapiens
  misc_RNA (1)...(19): siRNA sense strand
caaggucagcugcaauuug

SEQ ID NO: 269473 - RNA, 19 nt, Homo sapiens
  misc_RNA (1)...(19): siRNA sense strand
aauugucccuucuacagua

SEQ ID NO: 269474 - RNA, 19 nt, Homo sapiens
  misc_RNA (1)...(19): siRNA sense strand
gagaaggaucgagcuaauu

SEQ ID NO: 269475 - RNA, 19 nt, Homo sapiens
  misc_RNA (1)...(19): siRNA sense strand
gaggaggucggguaauaga

SEQ ID NO: 269476 - RNA, 19 nt, Homo sapiens
  misc_RNA (1)...(19): siRNA sense strand
ggaaggagaaacccuaguc

SEQ ID NO: 269477 - RNA, 19 nt, Homo sapiens
  misc_RNA (1)...(19): siRNA sense strand
aacaacaacuagaagaaga

SEQ ID NO: 269478 - RNA, 19 nt, Homo sapiens
  misc_RNA (1)...(19): siRNA sense strand
gcaauguauauguucagua

SEQ ID NO: 269479 - RNA, 19 nt, Homo sapiens
  misc_RNA (1)...(19): siRNA sense strand
caagagagaaaguuaaagg

SEQ ID NO: 269480 - RNA, 19 nt, Homo sapiens
  misc_RNA (1)...(19): siRNA sense strand
guaccagucggaagaagaa

SEQ ID NO: 269481 - RNA, 19 nt, Homo sapiens
  misc_RNA (1)...(19): siRNA sense strand
gagcuaauugucccuucua

SEQ ID NO: 269482 - RNA, 19 nt, Homo sapiens
  misc_RNA (1)...(19): siRNA sense strand
ucagaguaauggagaagga

SEQ ID NO: 269483 - RNA, 19 nt, Homo sapiens
  misc_RNA (1)...(19): siRNA sense strand
agaggaagcuuugcagaag

SEQ ID NO: 269484 - RNA, 19 nt, Homo sapiens
  misc_RNA (1)...(19): siRNA sense strand
ggaagaacagcagaggaaa

SEQ ID NO: 269485 - RNA, 19 nt, Homo sapiens
  misc_RNA (1)...(19): siRNA sense strand
gagagcagaaggcacaaga

SEQ ID NO: 269486 - RNA, 19 nt, Homo sapiens
  misc_RNA (1)...(19): siRNA sense strand
cuucauguguucagaaauc

SEQ ID NO: 269487 - RNA, 19 nt, Homo sapiens
  misc_RNA (1)...(19): siRNA sense strand
gaagaacagcagaggaaag

SEQ ID NO: 269488 - RNA, 19 nt, Homo sapiens
  misc_RNA (1)...(19): siRNA sense strand
aagaagaacaagagagaaa

SEQ ID NO: 269489 - RNA, 19 nt, Homo sapiens
  misc_RNA (1)...(19): siRNA sense strand
gaauaaagaaggaaaagga

SEQ ID NO: 269490 - RNA, 19 nt, Homo sapiens
  misc_RNA (1)...(19): siRNA sense strand
gagcagaaggcacaagaag

SEQ ID NO: 269491 - RNA, 19 nt, Homo sapiens
  misc_RNA (1)...(19): siRNA sense strand
gguaauagagacagaacug

SEQ ID NO: 269492 - RNA, 19 nt, Homo sapiens
  misc_RNA (1)...(19): siRNA sense strand
cggacuggcuccuccuuug

SEQ ID NO: 269493 - RNA, 19 nt, Homo sapiens
  misc_RNA (1)...(19): siRNA sense strand
gagauagauguucacguaa

SEQ ID NO: 269494 - RNA, 19 nt, Homo sapiens
  misc_RNA (1)...(19): siRNA sense strand
ugcagaagaugcuggauca

SEQ ID NO: 269495 - RNA, 19 nt, Homo sapiens
  misc_RNA (1)...(19): siRNA sense strand
gaagaggaggacacuuuua

SEQ ID NO: 269496 - RNA, 19 nt, Homo sapiens
  misc_RNA (1)...(19): siRNA sense strand
uagaagaagagaagcuauu

SEQ ID NO: 269497 - RNA, 19 nt, Homo sapiens
  misc_RNA (1)...(19): siRNA sense strand
ggaagaaaucucacaaacg

SEQ ID NO: 269498 - RNA, 19 nt, Homo sapiens
  misc_RNA (1)...(19): siRNA sense strand
gcacugcaacuuucuucau

SEQ ID NO: 269499 - RNA, 19 nt, Homo sapiens
  misc_RNA (1)...(19): siRNA sense strand
aggaagaggaggacacuuu

SEQ ID NO: 269500 - RNA, 19 nt, Homo sapiens
  misc_RNA (1)...(19): siRNA sense strand
aaaaugaguuggaaaaugg

SEQ ID NO: 269501 - RNA, 19 nt, Homo sapiens
  misc_RNA (1)...(19): siRNA sense strand
cuaaagcgcuaccugcuaa

SEQ ID NO: 269502 - RNA, 19 nt, Homo sapiens
  misc_RNA (1)...(19): siRNA sense strand
gcacugggcuacuacuaug

SEQ ID NO: 269503 - RNA, 19 nt, Homo sapiens
  misc_RNA (1)...(19): siRNA sense strand
gcagucagcuugcgcuaca

SEQ ID NO: 269504 - RNA, 19 nt, Homo sapiens
  misc_RNA (1)...(19): siRNA sense strand
gggagacgcugcuacuaga

SEQ ID NO: 269505 - RNA, 19 nt, Homo sapiens
  misc_RNA (1)...(19): siRNA sense strand
gagcagagccuggcaccua

SEQ ID NO: 269506 - RNA, 19 nt, Homo sapiens
  misc_RNA (1)...(19): siRNA sense strand
agaagaaguuugacaagug

SEQ ID NO: 269507 - RNA, 19 nt, Homo sapiens
  misc_RNA (1)...(19): siRNA sense strand
ggaaauucagguacggaua

SEQ ID NO: 269508 - RNA, 19 nt, Homo sapiens
  misc_RNA (1)...(19): siRNA sense strand
gagaucguguuuccagaga

SEQ ID NO: 269509 - RNA, 19 nt, Homo sapiens
  misc_RNA (1)...(19): siRNA sense strand
acaacaauguggucacuau

SEQ ID NO: 269510 - RNA, 19 nt, Homo sapiens
  misc_RNA (1)...(19): siRNA sense strand
gguggcagaugacaagaug

SEQ ID NO: 269511 - RNA, 19 nt, Homo sapiens
  misc_RNA (1)...(19): siRNA sense strand
gcgcuuugcuucacugagu

SEQ ID NO: 269512 - RNA, 19 nt, Homo sapiens
  misc_RNA (1)...(19): siRNA sense strand
ugaacugggucaugucuuc

SEQ ID NO: 269513 - RNA, 19 nt, Homo sapiens
  misc_RNA (1)...(19): siRNA sense strand
gagcaccucucgccauguc

SEQ ID NO: 269514 - RNA, 19 nt, Homo sapiens
  misc_RNA (1)...(19): siRNA sense strand
ccaagaagaaguuugacaa

SEQ ID NO: 269515 - RNA, 19 nt, Homo sapiens
  misc_RNA (1)...(19): siRNA sense strand
gcaccgaagagcacagauu

SEQ ID NO: 269516 - RNA, 19 nt, Homo sapiens
  misc_RNA (1)...(19): siRNA sense strand
cuccaggacuucaauauuc

SEQ ID NO: 269517 - RNA, 19 nt, Homo sapiens
  misc_RNA (1)...(19): siRNA sense strand
gaaauucagguacggauac

SEQ ID NO: 269518 - RNA, 19 nt, Homo sapiens
  misc_RNA (1)...(19): siRNA sense strand
ggaggaggagaucguguuu

SEQ ID NO: 269519 - RNA, 19 nt, Homo sapiens
  misc_RNA (1)...(19): siRNA sense strand
uguuaggcguguuacaaua

SEQ ID NO: 269520 - RNA, 19 nt, Homo sapiens
  misc_RNA (1)...(19): siRNA sense strand
gcuccaagaagaaguuuga

SEQ ID NO: 269521 - RNA, 19 nt, Homo sapiens
  misc_RNA (1)...(19): siRNA sense strand
ucacugacuuccuggacaa

SEQ ID NO: 269522 - RNA, 19 nt, Homo sapiens
  misc_RNA (1)...(19): siRNA sense strand
gcuaaagcgcuaccugcua

SEQ ID NO: 269523 - RNA, 19 nt, Homo sapiens
  misc_RNA (1)...(19): siRNA sense strand
gaucguguuuccagagaag

SEQ ID NO: 269524 - RNA, 19 nt, Homo sapiens
  misc_RNA (1)...(19): siRNA sense strand
ugugauggcucauguggau

SEQ ID NO: 269525 - RNA, 19 nt, Homo sapiens
  misc_RNA (1)...(19): siRNA sense strand
ggacacacgccuccgauac

SEQ ID NO: 269526 - RNA, 19 nt, Homo sapiens
  misc_RNA (1)...(19): siRNA sense strand
gcuccaggacuucaauauu

SEQ ID NO: 269527 - RNA, 19 nt, Homo sapiens
  misc_RNA (1)...(19): siRNA sense strand
caaaccagaggcuccauug

SEQ ID NO: 269528 - RNA, 19 nt, Homo sapiens
  misc_RNA (1)...(19): siRNA sense strand
guacggauacaacaaugug

SEQ ID NO: 269529 - RNA, 19 nt, Homo sapiens
  misc_RNA (1)...(19): siRNA sense strand
aagaagaaguuugacaagu

SEQ ID NO: 269530 - RNA, 19 nt, Homo sapiens
  misc_RNA (1)...(19): siRNA sense strand
gcaucuacuuggcccugaa

SEQ ID NO: 269531 - RNA, 19 nt, Homo sapiens
  misc_RNA (1)...(19): siRNA sense strand
ccgaagagccaagcgcuuu

SEQ ID NO: 269532 - RNA, 19 nt, Homo sapiens
  misc_RNA (1)...(19): siRNA sense strand
ggaaugguggcaaguacug

SEQ ID NO: 269533 - RNA, 19 nt, Homo sapiens
  misc_RNA (1)...(19): siRNA sense strand
gaguagauuuguggagaca

SEQ ID NO: 269534 - RNA, 19 nt, Homo sapiens
  misc_RNA (1)...(19): siRNA sense strand
caagaagaaguuugacaag

SEQ ID NO: 269535 - RNA, 19 nt, Homo sapiens
  misc_RNA (1)...(19): siRNA sense strand
gguggugacucggcuagug

SEQ ID NO: 269536 - RNA, 19 nt, Homo sapiens
  misc_RNA (1)...(19): siRNA sense strand
guagauuuguggagacacu

SEQ ID NO: 269537 - RNA, 19 nt, Homo sapiens
  misc_RNA (1)...(19): siRNA sense strand
caggaccagugcaaacuca

SEQ ID NO: 269538 - RNA, 19 nt, Homo sapiens
  misc_RNA (1)...(19): siRNA sense strand
uaugggcacugucucuuag

SEQ ID NO: 269539 - RNA, 19 nt, Homo sapiens
  misc_RNA (1)...(19): siRNA sense strand
cuaugggcacugucucuua

SEQ ID NO: 269540 - RNA, 19 nt, Homo sapiens
  misc_RNA (1)...(19): siRNA sense strand
gggaggaggagaucguguu

SEQ ID NO: 269541 - RNA, 19 nt, Homo sapiens
  misc_RNA (1)...(19): siRNA sense strand
guuaggcguguuacaauau

SEQ ID NO: 269542 - RNA, 19 nt, Homo sapiens
  misc_RNA (1)...(19): siRNA sense strand
gcaucugccugugacuuuc

SEQ ID NO: 269543 - RNA, 19 nt, Homo sapiens
  misc_RNA (1)...(19): siRNA sense strand
uugcuucacugaguagauu

SEQ ID NO: 269544 - RNA, 19 nt, Homo sapiens
  misc_RNA (1)...(19): siRNA sense strand
uccaagccaugcaucaguu

SEQ ID NO: 269545 - RNA, 19 nt, Homo sapiens
  misc_RNA (1)...(19): siRNA sense strand
gaacugggucaugucuuca

SEQ ID NO: 269546 - RNA, 19 nt, Homo sapiens
  misc_RNA (1)...(19): siRNA sense strand
gcaauccugucagcuuggu

SEQ ID NO: 269547 - RNA, 19 nt, Homo sapiens
  misc_RNA (1)...(19): siRNA sense strand
ggacuggcugcaccgaaga

SEQ ID NO: 269548 - RNA, 19 nt, Homo sapiens
  misc_RNA (1)...(19): siRNA sense strand
gacacacgccuccgauaca

SEQ ID NO: 269549 - RNA, 19 nt, Homo sapiens
  misc_RNA (1)...(19): siRNA sense strand
cucggacccugaccacuuu

SEQ ID NO: 269550 - RNA, 19 nt, Homo sapiens
  misc_RNA (1)...(19): siRNA sense strand
cggagucgguggcaucucu

SEQ ID NO: 269551 - RNA, 19 nt, Homo sapiens
  misc_RNA (1)...(19): siRNA sense strand
caauggcuaugggcacugu

SEQ ID NO: 269552 - RNA, 19 nt, Homo sapiens
  misc_RNA (1)...(19): siRNA sense strand
gugccauuguggaggauga

SEQ ID NO: 269553 - RNA, 19 nt, Homo sapiens
  misc_RNA (1)...(19): siRNA sense strand
caccgaagagcacagauuc

SEQ ID NO: 269554 - RNA, 19 nt, Homo sapiens
  misc_RNA (1)...(19): siRNA sense strand
gcuccuaugcccucaaugg

SEQ ID NO: 269555 - RNA, 19 nt, Homo sapiens
  misc_RNA (1)...(19): siRNA sense strand
gcccugaagcugccagaug

SEQ ID NO: 269556 - RNA, 19 nt, Homo sapiens
  misc_RNA (1)...(19): siRNA sense strand
gggcacugggcuacuacua

SEQ ID NO: 269557 - RNA, 19 nt, Homo sapiens
  misc_RNA (1)...(19): siRNA sense strand
ccacuuugacacagccauu

SEQ ID NO: 269558 - RNA, 19 nt, Homo sapiens
  misc_RNA (1)...(19): siRNA sense strand
cauccaugcuggcugugau

SEQ ID NO: 269559 - RNA, 19 nt, Homo sapiens
  misc_RNA (1)...(19): siRNA sense strand
gcucuggccaccucaaugg

SEQ ID NO: 269560 - RNA, 19 nt, Homo sapiens
  misc_RNA (1)...(19): siRNA sense strand
ccaugcaucaguuugaaug

SEQ ID NO: 269561 - RNA, 19 nt, Homo sapiens
  misc_RNA (1)...(19): siRNA sense strand
gucaaggucccaugugcaa

SEQ ID NO: 269562 - RNA, 19 nt, Homo sapiens
  misc_RNA (1)...(19): siRNA sense strand
ggcacugggcuacuacuau

SEQ ID NO: 269563 - RNA, 19 nt, Homo sapiens
  misc_RNA (1)...(19): siRNA sense strand
acugaggacugcccaacug

SEQ ID NO: 269564 - RNA, 19 nt, Homo sapiens
  misc_RNA (1)...(19): siRNA sense strand
ccaagccaugcaucaguuu

SEQ ID NO: 269565 - RNA, 19 nt, Homo sapiens
  misc_RNA (1)...(19): siRNA sense strand
augacaagauggccgcauu

SEQ ID NO: 269566 - RNA, 19 nt, Homo sapiens
  misc_RNA (1)...(19): siRNA sense strand
cgaagagccaagcgcuuug

SEQ ID NO: 269567 - RNA, 19 nt, Homo sapiens
  misc_RNA (1)...(19): siRNA sense strand
cagccaaggccuucaagca

SEQ ID NO: 269568 - RNA, 19 nt, Homo sapiens
  misc_RNA (1)...(19): siRNA sense strand
caacaauguggucacuauc

SEQ ID NO: 269569 - RNA, 19 nt, Homo sapiens
  misc_RNA (1)...(19): siRNA sense strand
ggugguggcagaugacaag

SEQ ID NO: 269570 - RNA, 19 nt, Homo sapiens
  misc_RNA (1)...(19): siRNA sense strand
caacgucaaggcuccucuu

SEQ ID NO: 269571 - RNA, 19 nt, Homo sapiens
  misc_RNA (1)...(19): siRNA sense strand
guacaaaucuuacuucaga

SEQ ID NO: 269572 - RNA, 19 nt, Homo sapiens
  misc_RNA (1)...(19): siRNA sense strand
uaacuugaauucucucuug

SEQ ID NO: 269573 - RNA, 19 nt, Homo sapiens
  misc_RNA (1)...(19): siRNA sense strand
acaggaagguuauucuaua

SEQ ID NO: 269574 - RNA, 19 nt, Homo sapiens
  misc_RNA (1)...(19): siRNA sense strand
ggacagaguucacauccau

SEQ ID NO: 269575 - RNA, 19 nt, Homo sapiens
  misc_RNA (1)...(19): siRNA sense strand
gcacuaagucgccaagaaa

SEQ ID NO: 269576 - RNA, 19 nt, Homo sapiens
  misc_RNA (1)...(19): siRNA sense strand
caagguaguuccagaaaca

SEQ ID NO: 269577 - RNA, 19 nt, Homo sapiens
  misc_RNA (1)...(19): siRNA sense strand
gaaacugucagaaaugauu

SEQ ID NO: 269578 - RNA, 19 nt, Homo sapiens
  misc_RNA (1)...(19): siRNA sense strand
gcaaugccuugaaaguuug

SEQ ID NO: 269579 - RNA, 19 nt, Homo sapiens
  misc_RNA (1)...(19): siRNA sense strand
ccaagaaauugacauggaa

SEQ ID NO: 269580 - RNA, 19 nt, Homo sapiens
  misc_RNA (1)...(19): siRNA sense strand
uauaagcaaugccuugaaa

SEQ ID NO: 269581 - RNA, 19 nt, Homo sapiens
  misc_RNA (1)...(19): siRNA sense strand
gaccaugucuuuagaaacu

SEQ ID NO: 269582 - RNA, 19 nt, Homo sapiens
  misc_RNA (1)...(19): siRNA sense strand
ccagaaacauaucucaaga

SEQ ID NO: 269583 - RNA, 19 nt, Homo sapiens
  misc_RNA (1)...(19): siRNA sense strand
gaacgaguguuagaagcaa

SEQ ID NO: 269584 - RNA, 19 nt, Homo sapiens
  misc_RNA (1)...(19): siRNA sense strand
aaauugacauggaagauga

SEQ ID NO: 269585 - RNA, 19 nt, Homo sapiens
  misc_RNA (1)...(19): siRNA sense strand
gaucgauccuauaaaugaa

SEQ ID NO: 269586 - RNA, 19 nt, Homo sapiens
  misc_RNA (1)...(19): siRNA sense strand
gccaagaaauugacaugga

SEQ ID NO: 269587 - RNA, 19 nt, Homo sapiens
  misc_RNA (1)...(19): siRNA sense strand
guucaacaguccagaguau

SEQ ID NO: 269588 - RNA, 19 nt, Homo sapiens
  misc_RNA (1)...(19): siRNA sense strand
uagaaacugucagaaauga

SEQ ID NO: 269589 - RNA, 19 nt, Homo sapiens
  misc_RNA (1)...(19): siRNA sense strand
gaccaacuccugcagauga

SEQ ID NO: 269590 - RNA, 19 nt, Homo sapiens
  misc_RNA (1)...(19): siRNA sense strand
cuugacggguccagaauua

SEQ ID NO: 269591 - RNA, 19 nt, Homo sapiens
  misc_RNA (1)...(19): siRNA sense strand
caacaggaagguuauucua

SEQ ID NO: 269592 - RNA, 19 nt, Homo sapiens
  misc_RNA (1)...(19): siRNA sense strand
gaaauugacauggaagaug

SEQ ID NO: 269593 - RNA, 19 nt, Homo sapiens
  misc_RNA (1)...(19): siRNA sense strand
caggaagguuauucuauau

SEQ ID NO: 269594 - RNA, 19 nt, Homo sapiens
  misc_RNA (1)...(19): siRNA sense strand
agcaaugccuugaaaguuu

SEQ ID NO: 269595 - RNA, 19 nt, Homo sapiens
  misc_RNA (1)...(19): siRNA sense strand
caacuccugcagaugauua

SEQ ID NO: 269596 - RNA, 19 nt, Homo sapiens
  misc_RNA (1)...(19): siRNA sense strand
gagcaaagaguccauaaaa

SEQ ID NO: 269597 - RNA, 19 nt, Homo sapiens
  misc_RNA (1)...(19): siRNA sense strand
acacagacaucagguacaa

SEQ ID NO: 269598 - RNA, 19 nt, Homo sapiens
  misc_RNA (1)...(19): siRNA sense strand
uuucuuggcucaauuacaa

SEQ ID NO: 269599 - RNA, 19 nt, Homo sapiens
  misc_RNA (1)...(19): siRNA sense strand
gacaucagguacaaaucuu

SEQ ID NO: 269600 - RNA, 19 nt, Homo sapiens
  misc_RNA (1)...(19): siRNA sense strand
caacagaugcaucgaccaa

SEQ ID NO: 269601 - RNA, 19 nt, Homo sapiens
  misc_RNA (1)...(19): siRNA sense strand
ggcacuaagucgccaagaa

SEQ ID NO: 269602 - RNA, 19 nt, Homo sapiens
  misc_RNA (1)...(19): siRNA sense strand
gagaagaauuagcacaacu

SEQ ID NO: 269603 - RNA, 19 nt, Homo sapiens
  misc_RNA (1)...(19): siRNA sense strand
gaaaggccagccaccaguu

SEQ ID NO: 269604 - RNA, 19 nt, Homo sapiens
  misc_RNA (1)...(19): siRNA sense strand
aaugauggcucaggaaugu

SEQ ID NO: 269605 - RNA, 19 nt, Homo sapiens
  misc_RNA (1)...(19): siRNA sense strand
gugaccaugucuuuagaaa

SEQ ID NO: 269606 - RNA, 19 nt, Homo sapiens
  misc_RNA (1)...(19): siRNA sense strand
uauaaggaacacugguuua

SEQ ID NO: 269607 - RNA, 19 nt, Homo sapiens
  misc_RNA (1)...(19): siRNA sense strand
gcaaaugauggcucaggaa

SEQ ID NO: 269608 - RNA, 19 nt, Homo sapiens
  misc_RNA (1)...(19): siRNA sense strand
gcaaagaguccauaaaaca

SEQ ID NO: 269609 - RNA, 19 nt, Homo sapiens
  misc_RNA (1)...(19): siRNA sense strand
ggagaagaauuagcacaac

SEQ ID NO: 269610 - RNA, 19 nt, Homo sapiens
  misc_RNA (1)...(19): siRNA sense strand
ugacauggaagaugaggaa

SEQ ID NO: 269611 - RNA, 19 nt, Homo sapiens
  misc_RNA (1)...(19): siRNA sense strand
gcaagguaguuccagaaac

SEQ ID NO: 269612 - RNA, 19 nt, Homo sapiens
  misc_RNA (1)...(19): siRNA sense strand
cagcuaaguaugcaaggua

SEQ ID NO: 269613 - RNA, 19 nt, Homo sapiens
  misc_RNA (1)...(19): siRNA sense strand
guccagaauuaauaucaga

SEQ ID NO: 269614 - RNA, 19 nt, Homo sapiens
  misc_RNA (1)...(19): siRNA sense strand
ggaccuaucaggacagagu

SEQ ID NO: 269615 - RNA, 19 nt, Homo sapiens
  misc_RNA (1)...(19): siRNA sense strand
ugauggcucaggaauguua

SEQ ID NO: 269616 - RNA, 19 nt, Homo sapiens
  misc_RNA (1)...(19): siRNA sense strand
gacggguccagaauuaaua

SEQ ID NO: 269617 - RNA, 19 nt, Homo sapiens
  misc_RNA (1)...(19): siRNA sense strand
caaaugauggcucaggaau

SEQ ID NO: 269618 - RNA, 19 nt, Homo sapiens
  misc_RNA (1)...(19): siRNA sense strand
cuauucagguuauaagcaa

SEQ ID NO: 269619 - RNA, 19 nt, Homo sapiens
  misc_RNA (1)...(19): siRNA sense strand
agaccuggaacgaguguua

SEQ ID NO: 269620 - RNA, 19 nt, Homo sapiens
  misc_RNA (1)...(19): siRNA sense strand
cuaagucgccaagaaauug

SEQ ID NO: 269621 - RNA, 19 nt, Homo sapiens
  misc_RNA (1)...(19): siRNA sense strand
agacgaagaugaggaggau

SEQ ID NO: 269622 - RNA, 19 nt, Homo sapiens
  misc_RNA (1)...(19): siRNA sense strand
cagcugugaccaugucuuu

SEQ ID NO: 269623 - RNA, 19 nt, Homo sapiens
  misc_RNA (1)...(19): siRNA sense strand
ggaacgaguguuagaagca

SEQ ID NO: 269624 - RNA, 19 nt, Homo sapiens
  misc_RNA (1)...(19): siRNA sense strand
ugaucuaggugaugcuaug

SEQ ID NO: 269625 - RNA, 19 nt, Homo sapiens
  misc_RNA (1)...(19): siRNA sense strand
agaagaauuagcacaacua

SEQ ID NO: 269626 - RNA, 19 nt, Homo sapiens
  misc_RNA (1)...(19): siRNA sense strand
caagauaugacacagacau

SEQ ID NO: 269627 - RNA, 19 nt, Homo sapiens
  misc_RNA (1)...(19): siRNA sense strand
cauggaagaugaggaagca

SEQ ID NO: 269628 - RNA, 19 nt, Homo sapiens
  misc_RNA (1)...(19): siRNA sense strand
gaauguuagacgaagauga

SEQ ID NO: 269629 - RNA, 19 nt, Homo sapiens
  misc_RNA (1)...(19): siRNA sense strand
gcugugaccaugucuuuag

SEQ ID NO: 269630 - RNA, 19 nt, Homo sapiens
  misc_RNA (1)...(19): siRNA sense strand
aauuacaacaggaagguua

SEQ ID NO: 269631 - RNA, 19 nt, Homo sapiens
  misc_RNA (1)...(19): siRNA sense strand
uaggugaugcuaugaguga

SEQ ID NO: 269632 - RNA, 19 nt, Homo sapiens
  misc_RNA (1)...(19): siRNA sense strand
gguaguuccagaaacauau

SEQ ID NO: 269633 - RNA, 19 nt, Homo sapiens
  misc_RNA (1)...(19): siRNA sense strand
ugauuaggguccaacagau

SEQ ID NO: 269634 - RNA, 19 nt, Homo sapiens
  misc_RNA (1)...(19): siRNA sense strand
uugcgaagcugaccaacuc

SEQ ID NO: 269635 - RNA, 19 nt, Homo sapiens
  misc_RNA (1)...(19): siRNA sense strand
gguuuaacuugaauucucu

SEQ ID NO: 269636 - RNA, 19 nt, Homo sapiens
  misc_RNA (1)...(19): siRNA sense strand
uaagcaaugccuugaaagu

SEQ ID NO: 269637 - RNA, 19 nt, Homo sapiens
  misc_RNA (1)...(19): siRNA sense strand
gugaugcuaugagugaaga

SEQ ID NO: 269638 - RNA, 19 nt, Homo sapiens
  misc_RNA (1)...(19): siRNA sense strand
aacagugguuuaacuugaa

SEQ ID NO: 269639 - RNA, 19 nt, Homo sapiens
  misc_RNA (1)...(19): siRNA sense strand
gauuaggguccaacagaug

SEQ ID NO: 269640 - RNA, 19 nt, Homo sapiens
  misc_RNA (1)...(19): siRNA sense strand
gcagaugauuaggguccaa

SEQ ID NO: 269641 - RNA, 19 nt, Homo sapiens
  misc_RNA (1)...(19): siRNA sense strand
acgaagaugaggaggauuu

SEQ ID NO: 269642 - RNA, 19 nt, Homo sapiens
  misc_RNA (1)...(19): siRNA sense strand
ggaagaugaggaagcagau

SEQ ID NO: 269643 - RNA, 19 nt, Homo sapiens
  misc_RNA (1)...(19): siRNA sense strand
aaggaacacugguuuacag

SEQ ID NO: 269644 - RNA, 19 nt, Homo sapiens
  misc_RNA (1)...(19): siRNA sense strand
gagugaagaagacaugcuu

SEQ ID NO: 269645 - RNA, 19 nt, Homo sapiens
  misc_RNA (1)...(19): siRNA sense strand
ucaacaguccagaguauca

SEQ ID NO: 269646 - RNA, 19 nt, Homo sapiens
  misc_RNA (1)...(19): siRNA sense strand
ugacggguccagaauuaau

SEQ ID NO: 269647 - RNA, 19 nt, Homo sapiens
  misc_RNA (1)...(19): siRNA sense strand
caggaauguuagacgaaga

SEQ ID NO: 269648 - RNA, 19 nt, Homo sapiens
  misc_RNA (1)...(19): siRNA sense strand
acagacaucagguacaaau

SEQ ID NO: 269649 - RNA, 19 nt, Homo sapiens
  misc_RNA (1)...(19): siRNA sense strand
aagcaaugccuugaaaguu

SEQ ID NO: 269650 - RNA, 19 nt, Homo sapiens
  misc_RNA (1)...(19): siRNA sense strand
guuauaagcaaugccuuga

SEQ ID NO: 269651 - RNA, 19 nt, Homo sapiens
  misc_RNA (1)...(19): siRNA sense strand
uuagaaacugucagaaaug

SEQ ID NO: 269652 - RNA, 19 nt, Homo sapiens
  misc_RNA (1)...(19): siRNA sense strand
gaucuaggugaugcuauga

SEQ ID NO: 269653 - RNA, 19 nt, Homo sapiens
  misc_RNA (1)...(19): siRNA sense strand
aaagagcaaagaguccaua

SEQ ID NO: 269654 - RNA, 19 nt, Homo sapiens
  misc_RNA (1)...(19): siRNA sense strand
uuauaaggaacacugguuu

SEQ ID NO: 269655 - RNA, 19 nt, Homo sapiens
  misc_RNA (1)...(19): siRNA sense strand
gguccagaauuaauaucag

SEQ ID NO: 269656 - RNA, 19 nt, Homo sapiens
  misc_RNA (1)...(19): siRNA sense strand
gcacuuuucuuggcucaau

SEQ ID NO: 269657 - RNA, 19 nt, Homo sapiens
  misc_RNA (1)...(19): siRNA sense strand
uaagucgccaagaaauuga

SEQ ID NO: 269658 - RNA, 19 nt, Homo sapiens
  misc_RNA (1)...(19): siRNA sense strand
cuaaguaugcaagguaguu

SEQ ID NO: 269659 - RNA, 19 nt, Homo sapiens
  misc_RNA (1)...(19): siRNA sense strand
cuuuagaaacugucagaaa

SEQ ID NO: 269660 - RNA, 19 nt, Homo sapiens
  misc_RNA (1)...(19): siRNA sense strand
agacaucagguacaaaucu

SEQ ID NO: 269661 - RNA, 19 nt, Homo sapiens
  misc_RNA (1)...(19): siRNA sense strand
acagaugcaucgaccaaaa

SEQ ID NO: 269662 - RNA, 19 nt, Homo sapiens
  misc_RNA (1)...(19): siRNA sense strand
gaaaguuugggguuuagaa

SEQ ID NO: 269663 - RNA, 19 nt, Homo sapiens
  misc_RNA (1)...(19): siRNA sense strand
uaaggaacacugguuuaca

SEQ ID NO: 269664 - RNA, 19 nt, Homo sapiens
  misc_RNA (1)...(19): siRNA sense strand
ugguuuaacuugaauucuc

SEQ ID NO: 269665 - RNA, 19 nt, Homo sapiens
  misc_RNA (1)...(19): siRNA sense strand
ccaugucuuuagaaacugu

SEQ ID NO: 269666 - RNA, 19 nt, Homo sapiens
  misc_RNA (1)...(19): siRNA sense strand
uggagaagaauuagcacaa

SEQ ID NO: 269667 - RNA, 19 nt, Homo sapiens
  misc_RNA (1)...(19): siRNA sense strand
gaagaugaggaagcagauc

SEQ ID NO: 269668 - RNA, 19 nt, Homo sapiens
  misc_RNA (1)...(19): siRNA sense strand
ucuaggugaugcuaugagu

SEQ ID NO: 269669 - RNA, 19 nt, Homo sapiens
  misc_RNA (1)...(19): siRNA sense strand
ucagguacaaaucuuacuu

SEQ ID NO: 269670 - RNA, 19 nt, Homo sapiens
  misc_RNA (1)...(19): siRNA sense strand
gauaugacacagacaucag

SEQ ID NO: 269671 - RNA, 19 nt, Homo sapiens
  misc_RNA (1)...(19): siRNA sense strand
guacaaaucuuacuucaga

SEQ ID NO: 269672 - RNA, 19 nt, Homo sapiens
  misc_RNA (1)...(19): siRNA sense strand
uaacuugaauucucucuug

SEQ ID NO: 269673 - RNA, 19 nt, Homo sapiens
  misc_RNA (1)...(19): siRNA sense strand
acaggaagguuauucuaua

SEQ ID NO: 269674 - RNA, 19 nt, Homo sapiens
  misc_RNA (1)...(19): siRNA sense strand
ggacagaguucacauccau

SEQ ID NO: 269675 - RNA, 19 nt, Homo sapiens
  misc_RNA (1)...(19): siRNA sense strand
gcacuaagucgccaagaaa

SEQ ID NO: 269676 - RNA, 19 nt, Homo sapiens
  misc_RNA (1)...(19): siRNA sense strand
caagguaguuccagaaaca

SEQ ID NO: 269677 - RNA, 19 nt, Homo sapiens
  misc_RNA (1)...(19): siRNA sense strand
gaaacugucagaaaugauu

SEQ ID NO: 269678 - RNA, 19 nt, Homo sapiens
  misc_RNA (1)...(19): siRNA sense strand
gcaaugccuugaaaguuug

SEQ ID NO: 269679 - RNA, 19 nt, Homo sapiens
  misc_RNA (1)...(19): siRNA sense strand
ccaagaaauugacauggaa

SEQ ID NO: 269680 - RNA, 19 nt, Homo sapiens
  misc_RNA (1)...(19): siRNA sense strand
uauaagcaaugccuugaaa

SEQ ID NO: 269681 - RNA, 19 nt, Homo sapiens
  misc_RNA (1)...(19): siRNA sense strand
gaccaugucuuuagaaacu

SEQ ID NO: 269682 - RNA, 19 nt, Homo sapiens
  misc_RNA (1)...(19): siRNA sense strand
ccagaaacauaucucaaga

SEQ ID NO: 269683 - RNA, 19 nt, Homo sapiens
  misc_RNA (1)...(19): siRNA sense strand
gaacgaguguuagaagcaa

SEQ ID NO: 269684 - RNA, 19 nt, Homo sapiens
  misc_RNA (1)...(19): siRNA sense strand
aaauugacauggaagauga

SEQ ID NO: 269685 - RNA, 19 nt, Homo sapiens
  misc_RNA (1)...(19): siRNA sense strand
gaucgauccuauaaaugaa

SEQ ID NO: 269686 - RNA, 19 nt, Homo sapiens
  misc_RNA (1)...(19): siRNA sense strand
gccaagaaauugacaugga

SEQ ID NO: 269687 - RNA, 19 nt, Homo sapiens
  misc_RNA (1)...(19): siRNA sense strand
guucaacaguccagaguau

SEQ ID NO: 269688 - RNA, 19 nt, Homo sapiens
  misc_RNA (1)...(19): siRNA sense strand
uagaaacugucagaaauga

SEQ ID NO: 269689 - RNA, 19 nt, Homo sapiens
  misc_RNA (1)...(19): siRNA sense strand
gaccaacuccugcagauga

SEQ ID NO: 269690 - RNA, 19 nt, Homo sapiens
  misc_RNA (1)...(19): siRNA sense strand
cuugacggguccagaauua

SEQ ID NO: 269691 - RNA, 19 nt, Homo sapiens
  misc_RNA (1)...(19): siRNA sense strand
caacaggaagguuauucua

SEQ ID NO: 269692 - RNA, 19 nt, Homo sapiens
  misc_RNA (1)...(19): siRNA sense strand
gaaauugacauggaagaug

SEQ ID NO: 269693 - RNA, 19 nt, Homo sapiens
  misc_RNA (1)...(19): siRNA sense strand
caggaagguuauucuauau

SEQ ID NO: 269694 - RNA, 19 nt, Homo sapiens
  misc_RNA (1)...(19): siRNA sense strand
agcaaugccuugaaaguuu

SEQ ID NO: 269695 - RNA, 19 nt, Homo sapiens
  misc_RNA (1)...(19): siRNA sense strand
caacuccugcagaugauua

SEQ ID NO: 269696 - RNA, 19 nt, Homo sapiens
  misc_RNA (1)...(19): siRNA sense strand
gagcaaagaguccauaaaa

SEQ ID NO: 269697 - RNA, 19 nt, Homo sapiens
  misc_RNA (1)...(19): siRNA sense strand
acacagacaucagguacaa

SEQ ID NO: 269698 - RNA, 19 nt, Homo sapiens
  misc_RNA (1)...(19): siRNA sense strand
uuucuuggcucaauuacaa

SEQ ID NO: 269699 - RNA, 19 nt, Homo sapiens
  misc_RNA (1)...(19): siRNA sense strand
gacaucagguacaaaucuu

SEQ ID NO: 269700 - RNA, 19 nt, Homo sapiens
  misc_RNA (1)...(19): siRNA sense strand
caacagaugcaucgaccaa

SEQ ID NO: 269701 - RNA, 19 nt, Homo sapiens
  misc_RNA (1)...(19): siRNA sense strand
ggcacuaagucgccaagaa

SEQ ID NO: 269702 - RNA, 19 nt, Homo sapiens
  misc_RNA (1)...(19): siRNA sense strand
gagaagaauuagcacaacu

SEQ ID NO: 269703 - RNA, 19 nt, Homo sapiens
  misc_RNA (1)...(19): siRNA sense strand
gaaaggccagccaccaguu

SEQ ID NO: 269704 - RNA, 19 nt, Homo sapiens
  misc_RNA (1)...(19): siRNA sense strand
aaugauggcucaggaaugu

SEQ ID NO: 269705 - RNA, 19 nt, Homo sapiens
  misc_RNA (1)...(19): siRNA sense strand
gugaccaugucuuuagaaa

SEQ ID NO: 269706 - RNA, 19 nt, Homo sapiens
  misc_RNA (1)...(19): siRNA sense strand
uauaaggaacacugguuua

SEQ ID NO: 269707 - RNA, 19 nt, Homo sapiens
  misc_RNA (1)...(19): siRNA sense strand
gcaaaugauggcucaggaa

SEQ ID NO: 269708 - RNA, 19 nt, Homo sapiens
  misc_RNA (1)...(19): siRNA sense strand
gcaaagaguccauaaaaca

SEQ ID NO: 269709 - RNA, 19 nt, Homo sapiens
  misc_RNA (1)...(19): siRNA sense strand
ggagaagaauuagcacaac

SEQ ID NO: 269710 - RNA, 19 nt, Homo sapiens
  misc_RNA (1)...(19): siRNA sense strand
ugacauggaagaugaggaa

SEQ ID NO: 269711 - RNA, 19 nt, Homo sapiens
  misc_RNA (1)...(19): siRNA sense strand
gcaagguaguuccagaaac

SEQ ID NO: 269712 - RNA, 19 nt, Homo sapiens
  misc_RNA (1)...(19): siRNA sense strand
cagcuaaguaugcaaggua

SEQ ID NO: 269713 - RNA, 19 nt, Homo sapiens
  misc_RNA (1)...(19): siRNA sense strand
guccagaauuaauaucaga

SEQ ID NO: 269714 - RNA, 19 nt, Homo sapiens
  misc_RNA (1)...(19): siRNA sense strand
ggaccuaucaggacagagu

SEQ ID NO: 269715 - RNA, 19 nt, Homo sapiens
  misc_RNA (1)...(19): siRNA sense strand
ugauggcucaggaauguua

SEQ ID NO: 269716 - RNA, 19 nt, Homo sapiens
  misc_RNA (1)...(19): siRNA sense strand
gacggguccagaauuaaua

SEQ ID NO: 269717 - RNA, 19 nt, Homo sapiens
  misc_RNA (1)...(19): siRNA sense strand
caaaugauggcucaggaau

SEQ ID NO: 269718 - RNA, 19 nt, Homo sapiens
  misc_RNA (1)...(19): siRNA sense strand
cuauucagguuauaagcaa

SEQ ID NO: 269719 - RNA, 19 nt, Homo sapiens
  misc_RNA (1)...(19): siRNA sense strand
agaccuggaacgaguguua

SEQ ID NO: 269720 - RNA, 19 nt, Homo sapiens
  misc_RNA (1)...(19): siRNA sense strand
cuaagucgccaagaaauug

SEQ ID NO: 269721 - RNA, 19 nt, Homo sapiens
  misc_RNA (1)...(19): siRNA sense strand
agacgaagaugaggaggau

SEQ ID NO: 269722 - RNA, 19 nt, Homo sapiens
  misc_RNA (1)...(19): siRNA sense strand
cagcugugaccaugucuuu

SEQ ID NO: 269723 - RNA, 19 nt, Homo sapiens
  misc_RNA (1)...(19): siRNA sense strand
ggaacgaguguuagaagca

SEQ ID NO: 269724 - RNA, 19 nt, Homo sapiens
  misc_RNA (1)...(19): siRNA sense strand
ugaucuaggugaugcuaug

SEQ ID NO: 269725 - RNA, 19 nt, Homo sapiens
  misc_RNA (1)...(19): siRNA sense strand
agaagaauuagcacaacua

SEQ ID NO: 269726 - RNA, 19 nt, Homo sapiens
  misc_RNA (1)...(19): siRNA sense strand
caagauaugacacagacau

SEQ ID NO: 269727 - RNA, 19 nt, Homo sapiens
  misc_RNA (1)...(19): siRNA sense strand
cauggaagaugaggaagca

SEQ ID NO: 269728 - RNA, 19 nt, Homo sapiens
  misc_RNA (1)...(19): siRNA sense strand
gaauguuagacgaagauga

SEQ ID NO: 269729 - RNA, 19 nt, Homo sapiens
  misc_RNA (1)...(19): siRNA sense strand
gcugugaccaugucuuuag

SEQ ID NO: 269730 - RNA, 19 nt, Homo sapiens
  misc_RNA (1)...(19): siRNA sense strand
aauuacaacaggaagguua

SEQ ID NO: 269731 - RNA, 19 nt, Homo sapiens
  misc_RNA (1)...(19): siRNA sense strand
uaggugaugcuaugaguga

SEQ ID NO: 269732 - RNA, 19 nt, Homo sapiens
  misc_RNA (1)...(19): siRNA sense strand
gguaguuccagaaacauau

SEQ ID NO: 269733 - RNA, 19 nt, Homo sapiens
  misc_RNA (1)...(19): siRNA sense strand
ugauuaggguccaacagau

SEQ ID NO: 269734 - RNA, 19 nt, Homo sapiens
  misc_RNA (1)...(19): siRNA sense strand
uugcgaagcugaccaacuc

SEQ ID NO: 269735 - RNA, 19 nt, Homo sapiens
  misc_RNA (1)...(19): siRNA sense strand
gguuuaacuugaauucucu

SEQ ID NO: 269736 - RNA, 19 nt, Homo sapiens
  misc_RNA (1)...(19): siRNA sense strand
uaagcaaugccuugaaagu

SEQ ID NO: 269737 - RNA, 19 nt, Homo sapiens
  misc_RNA (1)...(19): siRNA sense strand
gugaugcuaugagugaaga

SEQ ID NO: 269738 - RNA, 19 nt, Homo sapiens
  misc_RNA (1)...(19): siRNA sense strand
aacagugguuuaacuugaa

SEQ ID NO: 269739 - RNA, 19 nt, Homo sapiens
  misc_RNA (1)...(19): siRNA sense strand
gauuaggguccaacagaug

SEQ ID NO: 269740 - RNA, 19 nt, Homo sapiens
  misc_RNA (1)...(19): siRNA sense strand
gcagaugauuaggguccaa

SEQ ID NO: 269741 - RNA, 19 nt, Homo sapiens
  misc_RNA (1)...(19): siRNA sense strand
acgaagaugaggaggauuu

SEQ ID NO: 269742 - RNA, 19 nt, Homo sapiens
  misc_RNA (1)...(19): siRNA sense strand
ggaagaugaggaagcagau

SEQ ID NO: 269743 - RNA, 19 nt, Homo sapiens
  misc_RNA (1)...(19): siRNA sense strand
aaggaacacugguuuacag

SEQ ID NO: 269744 - RNA, 19 nt, Homo sapiens
  misc_RNA (1)...(19): siRNA sense strand
gagugaagaagacaugcuu

SEQ ID NO: 269745 - RNA, 19 nt, Homo sapiens
  misc_RNA (1)...(19): siRNA sense strand
ucaacaguccagaguauca

SEQ ID NO: 269746 - RNA, 19 nt, Homo sapiens
  misc_RNA (1)...(19): siRNA sense strand
ugacggguccagaauuaau

SEQ ID NO: 269747 - RNA, 19 nt, Homo sapiens
  misc_RNA (1)...(19): siRNA sense strand
caggaauguuagacgaaga

SEQ ID NO: 269748 - RNA, 19 nt, Homo sapiens
  misc_RNA (1)...(19): siRNA sense strand
acagacaucagguacaaau

SEQ ID NO: 269749 - RNA, 19 nt, Homo sapiens
  misc_RNA (1)...(19): siRNA sense strand
aagcaaugccuugaaaguu

SEQ ID NO: 269750 - RNA, 19 nt, Homo sapiens
  misc_RNA (1)...(19): siRNA sense strand
guuauaagcaaugccuuga

SEQ ID NO: 269751 - RNA, 19 nt, Homo sapiens
  misc_RNA (1)...(19): siRNA sense strand
uuagaaacugucagaaaug

SEQ ID NO: 269752 - RNA, 19 nt, Homo sapiens
  misc_RNA (1)...(19): siRNA sense strand
gaucuaggugaugcuauga

SEQ ID NO: 269753 - RNA, 19 nt, Homo sapiens
  misc_RNA (1)...(19): siRNA sense strand
aaagagcaaagaguccaua

SEQ ID NO: 269754 - RNA, 19 nt, Homo sapiens
  misc_RNA (1)...(19): siRNA sense strand
uuauaaggaacacugguuu

SEQ ID NO: 269755 - RNA, 19 nt, Homo sapiens
  misc_RNA (1)...(19): siRNA sense strand
gguccagaauuaauaucag

SEQ ID NO: 269756 - RNA, 19 nt, Homo sapiens
  misc_RNA (1)...(19): siRNA sense strand
gcacuuuucuuggcucaau

SEQ ID NO: 269757 - RNA, 19 nt, Homo sapiens
  misc_RNA (1)...(19): siRNA sense strand
uaagucgccaagaaauuga

SEQ ID NO: 269758 - RNA, 19 nt, Homo sapiens
  misc_RNA (1)...(19): siRNA sense strand
cuaaguaugcaagguaguu

SEQ ID NO: 269759 - RNA, 19 nt, Homo sapiens
  misc_RNA (1)...(19): siRNA sense strand
cuuuagaaacugucagaaa

SEQ ID NO: 269760 - RNA, 19 nt, Homo sapiens
  misc_RNA (1)...(19): siRNA sense strand
agacaucagguacaaaucu

SEQ ID NO: 269761 - RNA, 19 nt, Homo sapiens
  misc_RNA (1)...(19): siRNA sense strand
acagaugcaucgaccaaaa

SEQ ID NO: 269762 - RNA, 19 nt, Homo sapiens
  misc_RNA (1)...(19): siRNA sense strand
gaaaguuugggguuuagaa

SEQ ID NO: 269763 - RNA, 19 nt, Homo sapiens
  misc_RNA (1)...(19): siRNA sense strand
uaaggaacacugguuuaca

SEQ ID NO: 269764 - RNA, 19 nt, Homo sapiens
  misc_RNA (1)...(19): siRNA sense strand
ugguuuaacuugaauucuc

SEQ ID NO: 269765 - RNA, 19 nt, Homo sapiens
  misc_RNA (1)...(19): siRNA sense strand
ccaugucuuuagaaacugu

SEQ ID NO: 269766 - RNA, 19 nt, Homo sapiens
  misc_RNA (1)...(19): siRNA sense strand
uggagaagaauuagcacaa

SEQ ID NO: 269767 - RNA, 19 nt, Homo sapiens
  misc_RNA (1)...(19): siRNA sense strand
gaagaugaggaagcagauc

SEQ ID NO: 269768 - RNA, 19 nt, Homo sapiens
  misc_RNA (1)...(19): siRNA sense strand
ucuaggugaugcuaugagu

SEQ ID NO: 269769 - RNA, 19 nt, Homo sapiens
  misc_RNA (1)...(19): siRNA sense strand
ucagguacaaaucuuacuu

SEQ ID NO: 269770 - RNA, 19 nt, Homo sapiens
  misc_RNA (1)...(19): siRNA sense strand
gauaugacacagacaucag

SEQ ID NO: 269771 - RNA, 19 nt, Homo sapiens
  misc_RNA (1)...(19): siRNA sense strand
gcaagcagaugcagagauu

SEQ ID NO: 269772 - RNA, 19 nt, Homo sapiens
  misc_RNA (1)...(19): siRNA sense strand
cuaaugagcuuccauacaa

SEQ ID NO: 269773 - RNA, 19 nt, Homo sapiens
  misc_RNA (1)...(19): siRNA sense strand
ccacagcgaugacuacauu

SEQ ID NO: 269774 - RNA, 19 nt, Homo sapiens
  misc_RNA (1)...(19): siRNA sense strand
ggacaaggccacccaauga

SEQ ID NO: 269775 - RNA, 19 nt, Homo sapiens
  misc_RNA (1)...(19): siRNA sense strand
gaaagucuguuacuacuac

SEQ ID NO: 269776 - RNA, 19 nt, Homo sapiens
  misc_RNA (1)...(19): siRNA sense strand
ggaggaaagucuguuacua

SEQ ID NO: 269777 - RNA, 19 nt, Homo sapiens
  misc_RNA (1)...(19): siRNA sense strand
ggacaucgcugugaauugg

SEQ ID NO: 269778 - RNA, 19 nt, Homo sapiens
  misc_RNA (1)...(19): siRNA sense strand
cagauaacaugucggagua

SEQ ID NO: 269779 - RNA, 19 nt, Homo sapiens
  misc_RNA (1)...(19): siRNA sense strand
auacggagaucccuaauga

SEQ ID NO: 269780 - RNA, 19 nt, Homo sapiens
  misc_RNA (1)...(19): siRNA sense strand
ggucaugacuguguccuuu

SEQ ID NO: 269781 - RNA, 19 nt, Homo sapiens
  misc_RNA (1)...(19): siRNA sense strand
agaaagaagucaccgaaga

SEQ ID NO: 269782 - RNA, 19 nt, Homo sapiens
  misc_RNA (1)...(19): siRNA sense strand
ggagaucccuaaugagcuu

SEQ ID NO: 269783 - RNA, 19 nt, Homo sapiens
  misc_RNA (1)...(19): siRNA sense strand
cugaggagaugaccaagua

SEQ ID NO: 269784 - RNA, 19 nt, Homo sapiens
  misc_RNA (1)...(19): siRNA sense strand
gaggaagaguucuccgauu

SEQ ID NO: 269785 - RNA, 19 nt, Homo sapiens
  misc_RNA (1)...(19): siRNA sense strand
gcaaguauuaugcuguuaa

SEQ ID NO: 269786 - RNA, 19 nt, Homo sapiens
  misc_RNA (1)...(19): siRNA sense strand
gaucugcuccucugacaaa

SEQ ID NO: 269787 - RNA, 19 nt, Homo sapiens
  misc_RNA (1)...(19): siRNA sense strand
gaauuugucaagagcuuua

SEQ ID NO: 269788 - RNA, 19 nt, Homo sapiens
  misc_RNA (1)...(19): siRNA sense strand
auaauuugcugcucaacua

SEQ ID NO: 269789 - RNA, 19 nt, Homo sapiens
  misc_RNA (1)...(19): siRNA sense strand
ccaaaguaauggagauguu

SEQ ID NO: 269790 - RNA, 19 nt, Homo sapiens
  misc_RNA (1)...(19): siRNA sense strand
caaucuaacuaucaaagga

SEQ ID NO: 269791 - RNA, 19 nt, Homo sapiens
  misc_RNA (1)...(19): siRNA sense strand
ccaaguguguggaauuugu

SEQ ID NO: 269792 - RNA, 19 nt, Homo sapiens
  misc_RNA (1)...(19): siRNA sense strand
caucaguccuuccaauaug

SEQ ID NO: 269793 - RNA, 19 nt, Homo sapiens
  misc_RNA (1)...(19): siRNA sense strand
ccacaucaguccuuccaau

SEQ ID NO: 269794 - RNA, 19 nt, Homo sapiens
  misc_RNA (1)...(19): siRNA sense strand
ggucauguccaaaguaaug

SEQ ID NO: 269795 - RNA, 19 nt, Homo sapiens
  misc_RNA (1)...(19): siRNA sense strand
ggagaagccagaagccaaa

SEQ ID NO: 269796 - RNA, 19 nt, Homo sapiens
  misc_RNA (1)...(19): siRNA sense strand
gaacucuuccaacuucaaa

SEQ ID NO: 269797 - RNA, 19 nt, Homo sapiens
  misc_RNA (1)...(19): siRNA sense strand
acaaacgaauugccuguga

SEQ ID NO: 269798 - RNA, 19 nt, Homo sapiens
  misc_RNA (1)...(19): siRNA sense strand
gcucaacuauggucucuac

SEQ ID NO: 269799 - RNA, 19 nt, Homo sapiens
  misc_RNA (1)...(19): siRNA sense strand
aguauucgauggccuguuu

SEQ ID NO: 269800 - RNA, 19 nt, Homo sapiens
  misc_RNA (1)...(19): siRNA sense strand
gaaagaagucaccgaagag

SEQ ID NO: 269801 - RNA, 19 nt, Homo sapiens
  misc_RNA (1)...(19): siRNA sense strand
gaagaguucuccgauucug

SEQ ID NO: 269802 - RNA, 19 nt, Homo sapiens
  misc_RNA (1)...(19): siRNA sense strand
agagggugcuguacauuga

SEQ ID NO: 269803 - RNA, 19 nt, Homo sapiens
  misc_RNA (1)...(19): siRNA sense strand
cgaggcaucuggcuucugu

SEQ ID NO: 269804 - RNA, 19 nt, Homo sapiens
  misc_RNA (1)...(19): siRNA sense strand
guauuaugcuguuaacuac

SEQ ID NO: 269805 - RNA, 19 nt, Homo sapiens
  misc_RNA (1)...(19): siRNA sense strand
gcgaugacuacauuaaauu

SEQ ID NO: 269806 - RNA, 19 nt, Homo sapiens
  misc_RNA (1)...(19): siRNA sense strand
ggaaagucuguuacuacua

SEQ ID NO: 269807 - RNA, 19 nt, Homo sapiens
  misc_RNA (1)...(19): siRNA sense strand
caaugaagccucaccgaau

SEQ ID NO: 269808 - RNA, 19 nt, Homo sapiens
  misc_RNA (1)...(19): siRNA sense strand
ugacuaaccagaacacgaa

SEQ ID NO: 269809 - RNA, 19 nt, Homo sapiens
  misc_RNA (1)...(19): siRNA sense strand
ucaaggaggaggucaaguu

SEQ ID NO: 269810 - RNA, 19 nt, Homo sapiens
  misc_RNA (1)...(19): siRNA sense strand
ucuguuacgucaaugauau

SEQ ID NO: 269811 - RNA, 19 nt, Homo sapiens
  misc_RNA (1)...(19): siRNA sense strand
gaggaaagucuguuacuac

SEQ ID NO: 269812 - RNA, 19 nt, Homo sapiens
  misc_RNA (1)...(19): siRNA sense strand
agacggacaucgcugugaa

SEQ ID NO: 269813 - RNA, 19 nt, Homo sapiens
  misc_RNA (1)...(19): siRNA sense strand
agaaagacccagaggagaa

SEQ ID NO: 269814 - RNA, 19 nt, Homo sapiens
  misc_RNA (1)...(19): siRNA sense strand
caauaugacuaaccagaac

SEQ ID NO: 269815 - RNA, 19 nt, Homo sapiens
  misc_RNA (1)...(19): siRNA sense strand
ccggucauguccaaaguaa

SEQ ID NO: 269816 - RNA, 19 nt, Homo sapiens
  misc_RNA (1)...(19): siRNA sense strand
gcaaaggcaaguauuaugc

SEQ ID NO: 269817 - RNA, 19 nt, Homo sapiens
  misc_RNA (1)...(19): siRNA sense strand
uccuggaacugcuaaagua

SEQ ID NO: 269818 - RNA, 19 nt, Homo sapiens
  misc_RNA (1)...(19): siRNA sense strand
gauaacaugucggaguaca

SEQ ID NO: 269819 - RNA, 19 nt, Homo sapiens
  misc_RNA (1)...(19): siRNA sense strand
aggaagaguucuccgauuc

SEQ ID NO: 269820 - RNA, 19 nt, Homo sapiens
  misc_RNA (1)...(19): siRNA sense strand
uccauacaaugacuacuuu

SEQ ID NO: 269821 - RNA, 19 nt, Homo sapiens
  misc_RNA (1)...(19): siRNA sense strand
cgucaaugauaucgucuug

SEQ ID NO: 269822 - RNA, 19 nt, Homo sapiens
  misc_RNA (1)...(19): siRNA sense strand
ucgauggccuguuugaguu

SEQ ID NO: 269823 - RNA, 19 nt, Homo sapiens
  misc_RNA (1)...(19): siRNA sense strand
caaggaggaggucaaguug

SEQ ID NO: 269824 - RNA, 19 nt, Homo sapiens
  misc_RNA (1)...(19): siRNA sense strand
caacguuggugaggacugu

SEQ ID NO: 269825 - RNA, 19 nt, Homo sapiens
  misc_RNA (1)...(19): siRNA sense strand
ccaauaugacuaaccagaa

SEQ ID NO: 269826 - RNA, 19 nt, Homo sapiens
  misc_RNA (1)...(19): siRNA sense strand
gcccggugcuggacauaug

SEQ ID NO: 269827 - RNA, 19 nt, Homo sapiens
  misc_RNA (1)...(19): siRNA sense strand
cgccaaguguguggaauuu

SEQ ID NO: 269828 - RNA, 19 nt, Homo sapiens
  misc_RNA (1)...(19): siRNA sense strand
ucgguuagguugcuucaau

SEQ ID NO: 269829 - RNA, 19 nt, Homo sapiens
  misc_RNA (1)...(19): siRNA sense strand
ccaaguaccacagcgauga

SEQ ID NO: 269830 - RNA, 19 nt, Homo sapiens
  misc_RNA (1)...(19): siRNA sense strand
acuauggucucuaccgaaa

SEQ ID NO: 269831 - RNA, 19 nt, Homo sapiens
  misc_RNA (1)...(19): siRNA sense strand
ggauugaugacgaguccua

SEQ ID NO: 269832 - RNA, 19 nt, Homo sapiens
  misc_RNA (1)...(19): siRNA sense strand
gacaaggccacccaaugaa

SEQ ID NO: 269833 - RNA, 19 nt, Homo sapiens
  misc_RNA (1)...(19): siRNA sense strand
cgaaugaguaccuggagaa

SEQ ID NO: 269834 - RNA, 19 nt, Homo sapiens
  misc_RNA (1)...(19): siRNA sense strand
ucaagccggucauguccaa

SEQ ID NO: 269835 - RNA, 19 nt, Homo sapiens
  misc_RNA (1)...(19): siRNA sense strand
uggaacugcuaaaguauca

SEQ ID NO: 269836 - RNA, 19 nt, Homo sapiens
  misc_RNA (1)...(19): siRNA sense strand
gcuucaaucuaacuaucaa

SEQ ID NO: 269837 - RNA, 19 nt, Homo sapiens
  misc_RNA (1)...(19): siRNA sense strand
ugacuguguccuuucauaa

SEQ ID NO: 269838 - RNA, 19 nt, Homo sapiens
  misc_RNA (1)...(19): siRNA sense strand
aaugaagccucaccgaauc

SEQ ID NO: 269839 - RNA, 19 nt, Homo sapiens
  misc_RNA (1)...(19): siRNA sense strand
cacaucaguccuuccaaua

SEQ ID NO: 269840 - RNA, 19 nt, Homo sapiens
  misc_RNA (1)...(19): siRNA sense strand
ucaaaggacacgccaagug

SEQ ID NO: 269841 - RNA, 19 nt, Homo sapiens
  misc_RNA (1)...(19): siRNA sense strand
cagcgaugacuacauuaaa

SEQ ID NO: 269842 - RNA, 19 nt, Homo sapiens
  misc_RNA (1)...(19): siRNA sense strand
ugaauacuuuggaccagau

SEQ ID NO: 269843 - RNA, 19 nt, Homo sapiens
  misc_RNA (1)...(19): siRNA sense strand
ggcaaguauuaugcuguua

SEQ ID NO: 269844 - RNA, 19 nt, Homo sapiens
  misc_RNA (1)...(19): siRNA sense strand
ugacauugauauucaccau

SEQ ID NO: 269845 - RNA, 19 nt, Homo sapiens
  misc_RNA (1)...(19): siRNA sense strand
ggcaaaggcaaguauuaug

SEQ ID NO: 269846 - RNA, 19 nt, Homo sapiens
  misc_RNA (1)...(19): siRNA sense strand
gaaagacccagaggagaag

SEQ ID NO: 269847 - RNA, 19 nt, Homo sapiens
  misc_RNA (1)...(19): siRNA sense strand
gagcuuccauacaaugacu

SEQ ID NO: 269848 - RNA, 19 nt, Homo sapiens
  misc_RNA (1)...(19): siRNA sense strand
uaaugagcuuccauacaau

SEQ ID NO: 269849 - RNA, 19 nt, Homo sapiens
  misc_RNA (1)...(19): siRNA sense strand
caaguauuaugcuguuaac

SEQ ID NO: 269850 - RNA, 19 nt, Homo sapiens
  misc_RNA (1)...(19): siRNA sense strand
gcaucuggcuucuguuacg

SEQ ID NO: 269851 - RNA, 19 nt, Homo sapiens
  misc_RNA (1)...(19): siRNA sense strand
augaguaccuggagaagau

SEQ ID NO: 269852 - RNA, 19 nt, Homo sapiens
  misc_RNA (1)...(19): siRNA sense strand
cauacaaugacuacuuuga

SEQ ID NO: 269853 - RNA, 19 nt, Homo sapiens
  misc_RNA (1)...(19): siRNA sense strand
uaaccugccuaugcugaug

SEQ ID NO: 269854 - RNA, 19 nt, Homo sapiens
  misc_RNA (1)...(19): siRNA sense strand
cuagugcgguggucuuaca

SEQ ID NO: 269855 - RNA, 19 nt, Homo sapiens
  misc_RNA (1)...(19): siRNA sense strand
cuaaccagaacacgaauga

SEQ ID NO: 269856 - RNA, 19 nt, Homo sapiens
  misc_RNA (1)...(19): siRNA sense strand
gaguggcgaugaggacgaa

SEQ ID NO: 269857 - RNA, 19 nt, Homo sapiens
  misc_RNA (1)...(19): siRNA sense strand
ucaugacuguguccuuuca

SEQ ID NO: 269858 - RNA, 19 nt, Homo sapiens
  misc_RNA (1)...(19): siRNA sense strand
caaugacuacuuugaauac

SEQ ID NO: 269859 - RNA, 19 nt, Homo sapiens
  misc_RNA (1)...(19): siRNA sense strand
aggcaaguauuaugcuguu

SEQ ID NO: 269860 - RNA, 19 nt, Homo sapiens
  misc_RNA (1)...(19): siRNA sense strand
cagagggugcuguacauug

SEQ ID NO: 269861 - RNA, 19 nt, Homo sapiens
  misc_RNA (1)...(19): siRNA sense strand
guucuccgauucugaagag

SEQ ID NO: 269862 - RNA, 19 nt, Homo sapiens
  misc_RNA (1)...(19): siRNA sense strand
gcuguacauugacauugau

SEQ ID NO: 269863 - RNA, 19 nt, Homo sapiens
  misc_RNA (1)...(19): siRNA sense strand
gugcugugaaacuuaauaa

SEQ ID NO: 269864 - RNA, 19 nt, Homo sapiens
  misc_RNA (1)...(19): siRNA sense strand
cagaggagaagaaagaagu

SEQ ID NO: 269865 - RNA, 19 nt, Homo sapiens
  misc_RNA (1)...(19): siRNA sense strand
ccaagagagucaaaacaga

SEQ ID NO: 269866 - RNA, 19 nt, Homo sapiens
  misc_RNA (1)...(19): siRNA sense strand
ggaagaguucuccgauucu

SEQ ID NO: 269867 - RNA, 19 nt, Homo sapiens
  misc_RNA (1)...(19): siRNA sense strand
gcuuuaaccugccuaugcu

SEQ ID NO: 269868 - RNA, 19 nt, Homo sapiens
  misc_RNA (1)...(19): siRNA sense strand
caaaguaauggagauguuc

SEQ ID NO: 269869 - RNA, 19 nt, Homo sapiens
  misc_RNA (1)...(19): siRNA sense strand
uggcuucuguuacgucaau

SEQ ID NO: 269870 - RNA, 19 nt, Homo sapiens
  misc_RNA (1)...(19): siRNA sense strand
aggcaucuggcuucuguua

SEQ ID NO: 269871 - RNA, 19 nt, Homo sapiens
  misc_RNA (1)...(19): siRNA sense strand
gaugacaccucucaacaaa

SEQ ID NO: 269872 - RNA, 19 nt, Homo sapiens
  misc_RNA (1)...(19): siRNA sense strand
uaaaguugcucaucaaguu

SEQ ID NO: 269873 - RNA, 19 nt, Homo sapiens
  misc_RNA (1)...(19): siRNA sense strand
ggaagcaacugcagagaca

SEQ ID NO: 269874 - RNA, 19 nt, Homo sapiens
  misc_RNA (1)...(19): siRNA sense strand
ccaaggagcuggacacagu

SEQ ID NO: 269875 - RNA, 19 nt, Homo sapiens
  misc_RNA (1)...(19): siRNA sense strand
caacgagucugccgaagga

SEQ ID NO: 269876 - RNA, 19 nt, Homo sapiens
  misc_RNA (1)...(19): siRNA sense strand
gaucaagaccgcugucauu

SEQ ID NO: 269877 - RNA, 19 nt, Homo sapiens
  misc_RNA (1)...(19): siRNA sense strand
caaagcaaauggagaaugg

SEQ ID NO: 269878 - RNA, 19 nt, Homo sapiens
  misc_RNA (1)...(19): siRNA sense strand
gggcagaccucuucuacuc

SEQ ID NO: 269879 - RNA, 19 nt, Homo sapiens
  misc_RNA (1)...(19): siRNA sense strand
ccacguacauuaacaugau

SEQ ID NO: 269880 - RNA, 19 nt, Homo sapiens
  misc_RNA (1)...(19): siRNA sense strand
gaccgaggcuacauucaga

SEQ ID NO: 269881 - RNA, 19 nt, Homo sapiens
  misc_RNA (1)...(19): siRNA sense strand
uggagaggcucaaggagua

SEQ ID NO: 269882 - RNA, 19 nt, Homo sapiens
  misc_RNA (1)...(19): siRNA sense strand
gcagaccucuucuacucuu

SEQ ID NO: 269883 - RNA, 19 nt, Homo sapiens
  misc_RNA (1)...(19): siRNA sense strand
gaaggaagcaaagcaaaug

SEQ ID NO: 269884 - RNA, 19 nt, Homo sapiens
  misc_RNA (1)...(19): siRNA sense strand
ggccgcagaucuuaaaguu

SEQ ID NO: 269885 - RNA, 19 nt, Homo sapiens
  misc_RNA (1)...(19): siRNA sense strand
gaccuccgcuucaagauca

SEQ ID NO: 269886 - RNA, 19 nt, Homo sapiens
  misc_RNA (1)...(19): siRNA sense strand
aaggagaaauccaggagua

SEQ ID NO: 269887 - RNA, 19 nt, Homo sapiens
  misc_RNA (1)...(19): siRNA sense strand
caucugaaauggaaaccaa

SEQ ID NO: 269888 - RNA, 19 nt, Homo sapiens
  misc_RNA (1)...(19): siRNA sense strand
gcaacugcaucguucuguu

SEQ ID NO: 269889 - RNA, 19 nt, Homo sapiens
  misc_RNA (1)...(19): siRNA sense strand
ggaaagaagucggggcaua

SEQ ID NO: 269890 - RNA, 19 nt, Homo sapiens
  misc_RNA (1)...(19): siRNA sense strand
ugaacgaaauucucaaugg

SEQ ID NO: 269891 - RNA, 19 nt, Homo sapiens
  misc_RNA (1)...(19): siRNA sense strand
caagcuagaccaugaaugu

SEQ ID NO: 269892 - RNA, 19 nt, Homo sapiens
  misc_RNA (1)...(19): siRNA sense strand
guacucggaugaagaaguc

SEQ ID NO: 269893 - RNA, 19 nt, Homo sapiens
  misc_RNA (1)...(19): siRNA sense strand
gagaggaccuggacuucgu

SEQ ID NO: 269894 - RNA, 19 nt, Homo sapiens
  misc_RNA (1)...(19): siRNA sense strand
caacugcaucguucuguuu

SEQ ID NO: 269895 - RNA, 19 nt, Homo sapiens
  misc_RNA (1)...(19): siRNA sense strand
ggacuuggccacguacauu

SEQ ID NO: 269896 - RNA, 19 nt, Homo sapiens
  misc_RNA (1)...(19): siRNA sense strand
caacagcaccgcagaacug

SEQ ID NO: 269897 - RNA, 19 nt, Homo sapiens
  misc_RNA (1)...(19): siRNA sense strand
ggaaggaagcaaagcaaau

SEQ ID NO: 269898 - RNA, 19 nt, Homo sapiens
  misc_RNA (1)...(19): siRNA sense strand
gaucaaagugcuaaagcuu

SEQ ID NO: 269899 - RNA, 19 nt, Homo sapiens
  misc_RNA (1)...(19): siRNA sense strand
ugaaggugcugaagaaguc

SEQ ID NO: 269900 - RNA, 19 nt, Homo sapiens
  misc_RNA (1)...(19): siRNA sense strand
gcagagaggucuuuucuac

SEQ ID NO: 269901 - RNA, 19 nt, Homo sapiens
  misc_RNA (1)...(19): siRNA sense strand
ggaucuuucucucccauga

SEQ ID NO: 269902 - RNA, 19 nt, Homo sapiens
  misc_RNA (1)...(19): siRNA sense strand
cgaugaagaccaagacgua

SEQ ID NO: 269903 - RNA, 19 nt, Homo sapiens
  misc_RNA (1)...(19): siRNA sense strand
gcaucaacaucgccaagau

SEQ ID NO: 269904 - RNA, 19 nt, Homo sapiens
  misc_RNA (1)...(19): siRNA sense strand
gcugguagcccuagugugu

SEQ ID NO: 269905 - RNA, 19 nt, Homo sapiens
  misc_RNA (1)...(19): siRNA sense strand
agaaccagaaggccuauua

SEQ ID NO: 269906 - RNA, 19 nt, Homo sapiens
  misc_RNA (1)...(19): siRNA sense strand
ggacucaggagcacacgaa

SEQ ID NO: 269907 - RNA, 19 nt, Homo sapiens
  misc_RNA (1)...(19): siRNA sense strand
ccugggagcuggcauucaa

SEQ ID NO: 269908 - RNA, 19 nt, Homo sapiens
  misc_RNA (1)...(19): siRNA sense strand
cgaaagagaguuccaaggu

SEQ ID NO: 269909 - RNA, 19 nt, Homo sapiens
  misc_RNA (1)...(19): siRNA sense strand
uggcugagauggacaaagu

SEQ ID NO: 269910 - RNA, 19 nt, Homo sapiens
  misc_RNA (1)...(19): siRNA sense strand
gaagucugccuaccuguca

SEQ ID NO: 269911 - RNA, 19 nt, Homo sapiens
  misc_RNA (1)...(19): siRNA sense strand
cauugcaggucaccacgua

SEQ ID NO: 269912 - RNA, 19 nt, Homo sapiens
  misc_RNA (1)...(19): siRNA sense strand
cugacaagcuagaccauga

SEQ ID NO: 269913 - RNA, 19 nt, Homo sapiens
  misc_RNA (1)...(19): siRNA sense strand
ucuguuugcugcccuguuu

SEQ ID NO: 269914 - RNA, 19 nt, Homo sapiens
  misc_RNA (1)...(19): siRNA sense strand
gaccuggacuucguucuca

SEQ ID NO: 269915 - RNA, 19 nt, Homo sapiens
  misc_RNA (1)...(19): siRNA sense strand
gcaaagacaaucggaucaa

SEQ ID NO: 269916 - RNA, 19 nt, Homo sapiens
  misc_RNA (1)...(19): siRNA sense strand
gaaauucucaaugggauca

SEQ ID NO: 269917 - RNA, 19 nt, Homo sapiens
  misc_RNA (1)...(19): siRNA sense strand
caaagacaaucggaucaag

SEQ ID NO: 269918 - RNA, 19 nt, Homo sapiens
  misc_RNA (1)...(19): siRNA sense strand
cucaugagcuucuucuuca

SEQ ID NO: 269919 - RNA, 19 nt, Homo sapiens
  misc_RNA (1)...(19): siRNA sense strand
aaggagagaucaucaucga

SEQ ID NO: 269920 - RNA, 19 nt, Homo sapiens
  misc_RNA (1)...(19): siRNA sense strand
gagcugaaggugcugaaga

SEQ ID NO: 269921 - RNA, 19 nt, Homo sapiens
  misc_RNA (1)...(19): siRNA sense strand
uggaaugucacguggaaua

SEQ ID NO: 269922 - RNA, 19 nt, Homo sapiens
  misc_RNA (1)...(19): siRNA sense strand
ggaaggcccuggugaucac

SEQ ID NO: 269923 - RNA, 19 nt, Homo sapiens
  misc_RNA (1)...(19): siRNA sense strand
ccacgcugcuugcuaccuu

SEQ ID NO: 269924 - RNA, 19 nt, Homo sapiens
  misc_RNA (1)...(19): siRNA sense strand
gcgagugucucccucaaac

SEQ ID NO: 269925 - RNA, 19 nt, Homo sapiens
  misc_RNA (1)...(19): siRNA sense strand
ggacacgucggaacaaguc

SEQ ID NO: 269926 - RNA, 19 nt, Homo sapiens
  misc_RNA (1)...(19): siRNA sense strand
gaguggaauuccggaacua

SEQ ID NO: 269927 - RNA, 19 nt, Homo sapiens
  misc_RNA (1)...(19): siRNA sense strand
caaggaguauucagagacu

SEQ ID NO: 269928 - RNA, 19 nt, Homo sapiens
  misc_RNA (1)...(19): siRNA sense strand
cacaagggaucgccguguu

SEQ ID NO: 269929 - RNA, 19 nt, Homo sapiens
  misc_RNA (1)...(19): siRNA sense strand
gcgcuggcuuccaacuauu

SEQ ID NO: 269930 - RNA, 19 nt, Homo sapiens
  misc_RNA (1)...(19): siRNA sense strand
guacugggacuacaugaag

SEQ ID NO: 269931 - RNA, 19 nt, Homo sapiens
  misc_RNA (1)...(19): siRNA sense strand
gcaaagcaaauggagaaug

SEQ ID NO: 269932 - RNA, 19 nt, Homo sapiens
  misc_RNA (1)...(19): siRNA sense strand
aagcaaagcaaauggagaa

SEQ ID NO: 269933 - RNA, 19 nt, Homo sapiens
  misc_RNA (1)...(19): siRNA sense strand
gcagguggacgucaucauc

SEQ ID NO: 269934 - RNA, 19 nt, Homo sapiens
  misc_RNA (1)...(19): siRNA sense strand
gacuuggccacguacauua

SEQ ID NO: 269935 - RNA, 19 nt, Homo sapiens
  misc_RNA (1)...(19): siRNA sense strand
ucauggacuuggccacgua

SEQ ID NO: 269936 - RNA, 19 nt, Homo sapiens
  misc_RNA (1)...(19): siRNA sense strand
gaaggaaugcgccaagacu

SEQ ID NO: 269937 - RNA, 19 nt, Homo sapiens
  misc_RNA (1)...(19): siRNA sense strand
cagggaucaugcucacuuu

SEQ ID NO: 269938 - RNA, 19 nt, Homo sapiens
  misc_RNA (1)...(19): siRNA sense strand
ccaguacucggaugaagaa

SEQ ID NO: 269939 - RNA, 19 nt, Homo sapiens
  misc_RNA (1)...(19): siRNA sense strand
ggucaagcuuuccguguac

SEQ ID NO: 269940 - RNA, 19 nt, Homo sapiens
  misc_RNA (1)...(19): siRNA sense strand
uaaagaacuggaagaagga

SEQ ID NO: 269941 - RNA, 19 nt, Homo sapiens
  misc_RNA (1)...(19): siRNA sense strand
cucagugucuuacucauug

SEQ ID NO: 269942 - RNA, 19 nt, Homo sapiens
  misc_RNA (1)...(19): siRNA sense strand
ucaagcugaugaacgaaau

SEQ ID NO: 269943 - RNA, 19 nt, Homo sapiens
  misc_RNA (1)...(19): siRNA sense strand
ggaucaugcucacuuucug

SEQ ID NO: 269944 - RNA, 19 nt, Homo sapiens
  misc_RNA (1)...(19): siRNA sense strand
cagcagcuccuccuccuau

SEQ ID NO: 269945 - RNA, 19 nt, Homo sapiens
  misc_RNA (1)...(19): siRNA sense strand
gcacagcaugagcuacuug

SEQ ID NO: 269946 - RNA, 19 nt, Homo sapiens
  misc_RNA (1)...(19): siRNA sense strand
ggaucaaagugcuaaagcu

SEQ ID NO: 269947 - RNA, 19 nt, Homo sapiens
  misc_RNA (1)...(19): siRNA sense strand
gaugaacgaaauucucaau

SEQ ID NO: 269948 - RNA, 19 nt, Homo sapiens
  misc_RNA (1)...(19): siRNA sense strand
gcccgucaaugcugugaug

SEQ ID NO: 269949 - RNA, 19 nt, Homo sapiens
  misc_RNA (1)...(19): siRNA sense strand
augaggagguggaggcuuu

SEQ ID NO: 269950 - RNA, 19 nt, Homo sapiens
  misc_RNA (1)...(19): siRNA sense strand
ccaagguggaugcgaauga

SEQ ID NO: 269951 - RNA, 19 nt, Homo sapiens
  misc_RNA (1)...(19): siRNA sense strand
ucaaacgccugaggaucuu

SEQ ID NO: 269952 - RNA, 19 nt, Homo sapiens
  misc_RNA (1)...(19): siRNA sense strand
ggucagcccaacucucuug

SEQ ID NO: 269953 - RNA, 19 nt, Homo sapiens
  misc_RNA (1)...(19): siRNA sense strand
gaccaugaaugugcagaag

SEQ ID NO: 269954 - RNA, 19 nt, Homo sapiens
  misc_RNA (1)...(19): siRNA sense strand
auuggugccugcaucguua

SEQ ID NO: 269955 - RNA, 19 nt, Homo sapiens
  misc_RNA (1)...(19): siRNA sense strand
gggaaggaagcaaagcaaa

SEQ ID NO: 269956 - RNA, 19 nt, Homo sapiens
  misc_RNA (1)...(19): siRNA sense strand
gggcccuacuuccucauga

SEQ ID NO: 269957 - RNA, 19 nt, Homo sapiens
  misc_RNA (1)...(19): siRNA sense strand
guucaugggcucccuguuc

SEQ ID NO: 269958 - RNA, 19 nt, Homo sapiens
  misc_RNA (1)...(19): siRNA sense strand
cagggcaggucaagcuuuc

SEQ ID NO: 269959 - RNA, 19 nt, Homo sapiens
  misc_RNA (1)...(19): siRNA sense strand
ugauggcgaugaagaccaa

SEQ ID NO: 269960 - RNA, 19 nt, Homo sapiens
  misc_RNA (1)...(19): siRNA sense strand
gagauugucaaccucaugu

SEQ ID NO: 269961 - RNA, 19 nt, Homo sapiens
  misc_RNA (1)...(19): siRNA sense strand
acaccgugcugcuguuugu

SEQ ID NO: 269962 - RNA, 19 nt, Homo sapiens
  misc_RNA (1)...(19): siRNA sense strand
ucuuaaaguugcucaucaa

SEQ ID NO: 269963 - RNA, 19 nt, Homo sapiens
  misc_RNA (1)...(19): siRNA sense strand
ucccggaggucaucaagau

SEQ ID NO: 269964 - RNA, 19 nt, Homo sapiens
  misc_RNA (1)...(19): siRNA sense strand
ggacagugcagggaagcaa

SEQ ID NO: 269965 - RNA, 19 nt, Homo sapiens
  misc_RNA (1)...(19): siRNA sense strand
ggagguggaggcuuugauc

SEQ ID NO: 269966 - RNA, 19 nt, Homo sapiens
  misc_RNA (1)...(19): siRNA sense strand
gcaggucaccacguacuug

SEQ ID NO: 269967 - RNA, 19 nt, Homo sapiens
  misc_RNA (1)...(19): siRNA sense strand
agaaggaggagaccuggaa

SEQ ID NO: 269968 - RNA, 19 nt, Homo sapiens
  misc_RNA (1)...(19): siRNA sense strand
ucgugugggugccuuguuu

SEQ ID NO: 269969 - RNA, 19 nt, Homo sapiens
  misc_RNA (1)...(19): siRNA sense strand
ccacaucugcuucgucagu

SEQ ID NO: 269970 - RNA, 19 nt, Homo sapiens
  misc_RNA (1)...(19): siRNA sense strand
gcaccaguacuuccacauc

SEQ ID NO: 269971 - RNA, 19 nt, Homo sapiens
  misc_RNA (1)...(19): siRNA sense strand
gaugacaccucucaacaaa

SEQ ID NO: 269972 - RNA, 19 nt, Homo sapiens
  misc_RNA (1)...(19): siRNA sense strand
uaaaguugcucaucaaguu

SEQ ID NO: 269973 - RNA, 19 nt, Homo sapiens
  misc_RNA (1)...(19): siRNA sense strand
ggaagcaacugcagagaca

SEQ ID NO: 269974 - RNA, 19 nt, Homo sapiens
  misc_RNA (1)...(19): siRNA sense strand
ccaaggagcuggacacagu

SEQ ID NO: 269975 - RNA, 19 nt, Homo sapiens
  misc_RNA (1)...(19): siRNA sense strand
caacgagucugccgaagga

SEQ ID NO: 269976 - RNA, 19 nt, Homo sapiens
  misc_RNA (1)...(19): siRNA sense strand
gaucaagaccgcugucauu

SEQ ID NO: 269977 - RNA, 19 nt, Homo sapiens
  misc_RNA (1)...(19): siRNA sense strand
caaagcaaauggagaaugg

SEQ ID NO: 269978 - RNA, 19 nt, Homo sapiens
  misc_RNA (1)...(19): siRNA sense strand
gggcagaccucuucuacuc

SEQ ID NO: 269979 - RNA, 19 nt, Homo sapiens
  misc_RNA (1)...(19): siRNA sense strand
ccacguacauuaacaugau

SEQ ID NO: 269980 - RNA, 19 nt, Homo sapiens
  misc_RNA (1)...(19): siRNA sense strand
gaccgaggcuacauucaga

SEQ ID NO: 269981 - RNA, 19 nt, Homo sapiens
  misc_RNA (1)...(19): siRNA sense strand
uggagaggcucaaggagua

SEQ ID NO: 269982 - RNA, 19 nt, Homo sapiens
  misc_RNA (1)...(19): siRNA sense strand
gcagaccucuucuacucuu

SEQ ID NO: 269983 - RNA, 19 nt, Homo sapiens
  misc_RNA (1)...(19): siRNA sense strand
gaaggaagcaaagcaaaug

SEQ ID NO: 269984 - RNA, 19 nt, Homo sapiens
  misc_RNA (1)...(19): siRNA sense strand
ggccgcagaucuuaaaguu

SEQ ID NO: 269985 - RNA, 19 nt, Homo sapiens
  misc_RNA (1)...(19): siRNA sense strand
gaccuccgcuucaagauca

SEQ ID NO: 269986 - RNA, 19 nt, Homo sapiens
  misc_RNA (1)...(19): siRNA sense strand
aaggagaaauccaggagua

SEQ ID NO: 269987 - RNA, 19 nt, Homo sapiens
  misc_RNA (1)...(19): siRNA sense strand
caucugaaauggaaaccaa

SEQ ID NO: 269988 - RNA, 19 nt, Homo sapiens
  misc_RNA (1)...(19): siRNA sense strand
gcaacugcaucguucuguu

SEQ ID NO: 269989 - RNA, 19 nt, Homo sapiens
  misc_RNA (1)...(19): siRNA sense strand
ggaaagaagucggggcaua

SEQ ID NO: 269990 - RNA, 19 nt, Homo sapiens
  misc_RNA (1)...(19): siRNA sense strand
ugaacgaaauucucaaugg

SEQ ID NO: 269991 - RNA, 19 nt, Homo sapiens
  misc_RNA (1)...(19): siRNA sense strand
caagcuagaccaugaaugu

SEQ ID NO: 269992 - RNA, 19 nt, Homo sapiens
  misc_RNA (1)...(19): siRNA sense strand
guacucggaugaagaaguc

SEQ ID NO: 269993 - RNA, 19 nt, Homo sapiens
  misc_RNA (1)...(19): siRNA sense strand
gagaggaccuggacuucgu

SEQ ID NO: 269994 - RNA, 19 nt, Homo sapiens
  misc_RNA (1)...(19): siRNA sense strand
caacugcaucguucuguuu

SEQ ID NO: 269995 - RNA, 19 nt, Homo sapiens
  misc_RNA (1)...(19): siRNA sense strand
ggacuuggccacguacauu

SEQ ID NO: 269996 - RNA, 19 nt, Homo sapiens
  misc_RNA (1)...(19): siRNA sense strand
caacagcaccgcagaacug

SEQ ID NO: 269997 - RNA, 19 nt, Homo sapiens
  misc_RNA (1)...(19): siRNA sense strand
ggaaggaagcaaagcaaau

SEQ ID NO: 269998 - RNA, 19 nt, Homo sapiens
  misc_RNA (1)...(19): siRNA sense strand
gaucaaagugcuaaagcuu

SEQ ID NO: 269999 - RNA, 19 nt, Homo sapiens
  misc_RNA (1)...(19): siRNA sense strand
ugaaggugcugaagaaguc

SEQ ID NO: 270000 - RNA, 19 nt, Homo sapiens
  misc_RNA (1)...(19): siRNA sense strand
gcagagaggucuuuucuac

SEQ ID NO: 270001 - RNA, 19 nt, Homo sapiens
  misc_RNA (1)...(19): siRNA sense strand
ggaucuuucucucccauga

SEQ ID NO: 270002 - RNA, 19 nt, Homo sapiens
  misc_RNA (1)...(19): siRNA sense strand
cgaugaagaccaagacgua

SEQ ID NO: 270003 - RNA, 19 nt, Homo sapiens
  misc_RNA (1)...(19): siRNA sense strand
gcaucaacaucgccaagau

SEQ ID NO: 270004 - RNA, 19 nt, Homo sapiens
  misc_RNA (1)...(19): siRNA sense strand
gcugguagcccuagugugu

SEQ ID NO: 270005 - RNA, 19 nt, Homo sapiens
  misc_RNA (1)...(19): siRNA sense strand
agaaccagaaggccuauua

SEQ ID NO: 270006 - RNA, 19 nt, Homo sapiens
  misc_RNA (1)...(19): siRNA sense strand
ggacucaggagcacacgaa

SEQ ID NO: 270007 - RNA, 19 nt, Homo sapiens
  misc_RNA (1)...(19): siRNA sense strand
ccugggagcuggcauucaa

SEQ ID NO: 270008 - RNA, 19 nt, Homo sapiens
  misc_RNA (1)...(19): siRNA sense strand
cgaaagagaguuccaaggu

SEQ ID NO: 270009 - RNA, 19 nt, Homo sapiens
  misc_RNA (1)...(19): siRNA sense strand
uggcugagauggacaaagu

SEQ ID NO: 270010 - RNA, 19 nt, Homo sapiens
  misc_RNA (1)...(19): siRNA sense strand
gaagucugccuaccuguca

SEQ ID NO: 270011 - RNA, 19 nt, Homo sapiens
  misc_RNA (1)...(19): siRNA sense strand
cauugcaggucaccacgua

SEQ ID NO: 270012 - RNA, 19 nt, Homo sapiens
  misc_RNA (1)...(19): siRNA sense strand
cugacaagcuagaccauga

SEQ ID NO: 270013 - RNA, 19 nt, Homo sapiens
  misc_RNA (1)...(19): siRNA sense strand
ucuguuugcugcccuguuu

SEQ ID NO: 270014 - RNA, 19 nt, Homo sapiens
  misc_RNA (1)...(19): siRNA sense strand
gaccuggacuucguucuca

SEQ ID NO: 270015 - RNA, 19 nt, Homo sapiens
  misc_RNA (1)...(19): siRNA sense strand
gcaaagacaaucggaucaa

SEQ ID NO: 270016 - RNA, 19 nt, Homo sapiens
  misc_RNA (1)...(19): siRNA sense strand
gaaauucucaaugggauca

SEQ ID NO: 270017 - RNA, 19 nt, Homo sapiens
  misc_RNA (1)...(19): siRNA sense strand
caaagacaaucggaucaag

SEQ ID NO: 270018 - RNA, 19 nt, Homo sapiens
  misc_RNA (1)...(19): siRNA sense strand
cucaugagcuucuucuuca

SEQ ID NO: 270019 - RNA, 19 nt, Homo sapiens
  misc_RNA (1)...(19): siRNA sense strand
aaggagagaucaucaucga

SEQ ID NO: 270020 - RNA, 19 nt, Homo sapiens
  misc_RNA (1)...(19): siRNA sense strand
gagcugaaggugcugaaga

SEQ ID NO: 270021 - RNA, 19 nt, Homo sapiens
  misc_RNA (1)...(19): siRNA sense strand
uggaaugucacguggaaua

SEQ ID NO: 270022 - RNA, 19 nt, Homo sapiens
  misc_RNA (1)...(19): siRNA sense strand
ggaaggcccuggugaucac

SEQ ID NO: 270023 - RNA, 19 nt, Homo sapiens
  misc_RNA (1)...(19): siRNA sense strand
ccacgcugcuugcuaccuu

SEQ ID NO: 270024 - RNA, 19 nt, Homo sapiens
  misc_RNA (1)...(19): siRNA sense strand
gcgagugucucccucaaac

SEQ ID NO: 270025 - RNA, 19 nt, Homo sapiens
  misc_RNA (1)...(19): siRNA sense strand
ggacacgucggaacaaguc

SEQ ID NO: 270026 - RNA, 19 nt, Homo sapiens
  misc_RNA (1)...(19): siRNA sense strand
gaguggaauuccggaacua

SEQ ID NO: 270027 - RNA, 19 nt, Homo sapiens
  misc_RNA (1)...(19): siRNA sense strand
caaggaguauucagagacu

SEQ ID NO: 270028 - RNA, 19 nt, Homo sapiens
  misc_RNA (1)...(19): siRNA sense strand
cacaagggaucgccguguu

SEQ ID NO: 270029 - RNA, 19 nt, Homo sapiens
  misc_RNA (1)...(19): siRNA sense strand
gcgcuggcuuccaacuauu

SEQ ID NO: 270030 - RNA, 19 nt, Homo sapiens
  misc_RNA (1)...(19): siRNA sense strand
guacugggacuacaugaag

SEQ ID NO: 270031 - RNA, 19 nt, Homo sapiens
  misc_RNA (1)...(19): siRNA sense strand
gcaaagcaaauggagaaug

SEQ ID NO: 270032 - RNA, 19 nt, Homo sapiens
  misc_RNA (1)...(19): siRNA sense strand
aagcaaagcaaauggagaa

SEQ ID NO: 270033 - RNA, 19 nt, Homo sapiens
  misc_RNA (1)...(19): siRNA sense strand
gcagguggacgucaucauc

SEQ ID NO: 270034 - RNA, 19 nt, Homo sapiens
  misc_RNA (1)...(19): siRNA sense strand
gacuuggccacguacauua

SEQ ID NO: 270035 - RNA, 19 nt, Homo sapiens
  misc_RNA (1)...(19): siRNA sense strand
ucauggacuuggccacgua

SEQ ID NO: 270036 - RNA, 19 nt, Homo sapiens
  misc_RNA (1)...(19): siRNA sense strand
gaaggaaugcgccaagacu

SEQ ID NO: 270037 - RNA, 19 nt, Homo sapiens
  misc_RNA (1)...(19): siRNA sense strand
cagggaucaugcucacuuu

SEQ ID NO: 270038 - RNA, 19 nt, Homo sapiens
  misc_RNA (1)...(19): siRNA sense strand
ccaguacucggaugaagaa

SEQ ID NO: 270039 - RNA, 19 nt, Homo sapiens
  misc_RNA (1)...(19): siRNA sense strand
ggucaagcuuuccguguac

SEQ ID NO: 270040 - RNA, 19 nt, Homo sapiens
  misc_RNA (1)...(19): siRNA sense strand
uaaagaacuggaagaagga

SEQ ID NO: 270041 - RNA, 19 nt, Homo sapiens
  misc_RNA (1)...(19): siRNA sense strand
cucagugucuuacucauug

SEQ ID NO: 270042 - RNA, 19 nt, Homo sapiens
  misc_RNA (1)...(19): siRNA sense strand
ucaagcugaugaacgaaau

SEQ ID NO: 270043 - RNA, 19 nt, Homo sapiens
  misc_RNA (1)...(19): siRNA sense strand
ggaucaugcucacuuucug

SEQ ID NO: 270044 - RNA, 19 nt, Homo sapiens
  misc_RNA (1)...(19): siRNA sense strand
cagcagcuccuccuccuau

SEQ ID NO: 270045 - RNA, 19 nt, Homo sapiens
  misc_RNA (1)...(19): siRNA sense strand
gcacagcaugagcuacuug

SEQ ID NO: 270046 - RNA, 19 nt, Homo sapiens
  misc_RNA (1)...(19): siRNA sense strand
ggaucaaagugcuaaagcu

SEQ ID NO: 270047 - RNA, 19 nt, Homo sapiens
  misc_RNA (1)...(19): siRNA sense strand
gaugaacgaaauucucaau

SEQ ID NO: 270048 - RNA, 19 nt, Homo sapiens
  misc_RNA (1)...(19): siRNA sense strand
gcccgucaaugcugugaug

SEQ ID NO: 270049 - RNA, 19 nt, Homo sapiens
  misc_RNA (1)...(19): siRNA sense strand
augaggagguggaggcuuu

SEQ ID NO: 270050 - RNA, 19 nt, Homo sapiens
  misc_RNA (1)...(19): siRNA sense strand
ccaagguggaugcgaauga

SEQ ID NO: 270051 - RNA, 19 nt, Homo sapiens
  misc_RNA (1)...(19): siRNA sense strand
ucaaacgccugaggaucuu

SEQ ID NO: 270052 - RNA, 19 nt, Homo sapiens
  misc_RNA (1)...(19): siRNA sense strand
ggucagcccaacucucuug

SEQ ID NO: 270053 - RNA, 19 nt, Homo sapiens
  misc_RNA (1)...(19): siRNA sense strand
gaccaugaaugugcagaag

SEQ ID NO: 270054 - RNA, 19 nt, Homo sapiens
  misc_RNA (1)...(19): siRNA sense strand
auuggugccugcaucguua

SEQ ID NO: 270055 - RNA, 19 nt, Homo sapiens
  misc_RNA (1)...(19): siRNA sense strand
gggaaggaagcaaagcaaa

SEQ ID NO: 270056 - RNA, 19 nt, Homo sapiens
  misc_RNA (1)...(19): siRNA sense strand
gggcccuacuuccucauga

SEQ ID NO: 270057 - RNA, 19 nt, Homo sapiens
  misc_RNA (1)...(19): siRNA sense strand
guucaugggcucccuguuc

SEQ ID NO: 270058 - RNA, 19 nt, Homo sapiens
  misc_RNA (1)...(19): siRNA sense strand
cagggcaggucaagcuuuc

SEQ ID NO: 270059 - RNA, 19 nt, Homo sapiens
  misc_RNA (1)...(19): siRNA sense strand
ugauggcgaugaagaccaa

SEQ ID NO: 270060 - RNA, 19 nt, Homo sapiens
  misc_RNA (1)...(19): siRNA sense strand
gagauugucaaccucaugu

SEQ ID NO: 270061 - RNA, 19 nt, Homo sapiens
  misc_RNA (1)...(19): siRNA sense strand
acaccgugcugcuguuugu

SEQ ID NO: 270062 - RNA, 19 nt, Homo sapiens
  misc_RNA (1)...(19): siRNA sense strand
ucuuaaaguugcucaucaa

SEQ ID NO: 270063 - RNA, 19 nt, Homo sapiens
  misc_RNA (1)...(19): siRNA sense strand
ucccggaggucaucaagau

SEQ ID NO: 270064 - RNA, 19 nt, Homo sapiens
  misc_RNA (1)...(19): siRNA sense strand
ggacagugcagggaagcaa

SEQ ID NO: 270065 - RNA, 19 nt, Homo sapiens
  misc_RNA (1)...(19): siRNA sense strand
ggagguggaggcuuugauc

SEQ ID NO: 270066 - RNA, 19 nt, Homo sapiens
  misc_RNA (1)...(19): siRNA sense strand
gcaggucaccacguacuug

SEQ ID NO: 270067 - RNA, 19 nt, Homo sapiens
  misc_RNA (1)...(19): siRNA sense strand
agaaggaggagaccuggaa

SEQ ID NO: 270068 - RNA, 19 nt, Homo sapiens
  misc_RNA (1)...(19): siRNA sense strand
ucgugugggugccuuguuu

SEQ ID NO: 270069 - RNA, 19 nt, Homo sapiens
  misc_RNA (1)...(19): siRNA sense strand
ccacaucugcuucgucagu

SEQ ID NO: 270070 - RNA, 19 nt, Homo sapiens
  misc_RNA (1)...(19): siRNA sense strand
gcaccaguacuuccacauc

SEQ ID NO: 270071 - RNA, 19 nt, Homo sapiens
  misc_RNA (1)...(19): siRNA sense strand
gaugacaccucucaacaaa

SEQ ID NO: 270072 - RNA, 19 nt, Homo sapiens
  misc_RNA (1)...(19): siRNA sense strand
uaaaguugcucaucaaguu

SEQ ID NO: 270073 - RNA, 19 nt, Homo sapiens
  misc_RNA (1)...(19): siRNA sense strand
ggaagcaacugcagagaca

SEQ ID NO: 270074 - RNA, 19 nt, Homo sapiens
  misc_RNA (1)...(19): siRNA sense strand
ccaaggagcuggacacagu

SEQ ID NO: 270075 - RNA, 19 nt, Homo sapiens
  misc_RNA (1)...(19): siRNA sense strand
caacgagucugccgaagga

SEQ ID NO: 270076 - RNA, 19 nt, Homo sapiens
  misc_RNA (1)...(19): siRNA sense strand
gaucaagaccgcugucauu

SEQ ID NO: 270077 - RNA, 19 nt, Homo sapiens
  misc_RNA (1)...(19): siRNA sense strand
caaagcaaauggagaaugg

SEQ ID NO: 270078 - RNA, 19 nt, Homo sapiens
  misc_RNA (1)...(19): siRNA sense strand
gggcagaccucuucuacuc

SEQ ID NO: 270079 - RNA, 19 nt, Homo sapiens
  misc_RNA (1)...(19): siRNA sense strand
ccacguacauuaacaugau

SEQ ID NO: 270080 - RNA, 19 nt, Homo sapiens
  misc_RNA (1)...(19): siRNA sense strand
gaccgaggcuacauucaga

SEQ ID NO: 270081 - RNA, 19 nt, Homo sapiens
  misc_RNA (1)...(19): siRNA sense strand
uggagaggcucaaggagua

SEQ ID NO: 270082 - RNA, 19 nt, Homo sapiens
  misc_RNA (1)...(19): siRNA sense strand
gcagaccucuucuacucuu

SEQ ID NO: 270083 - RNA, 19 nt, Homo sapiens
  misc_RNA (1)...(19): siRNA sense strand
gaaggaagcaaagcaaaug

SEQ ID NO: 270084 - RNA, 19 nt, Homo sapiens
  misc_RNA (1)...(19): siRNA sense strand
ggccgcagaucuuaaaguu

SEQ ID NO: 270085 - RNA, 19 nt, Homo sapiens
  misc_RNA (1)...(19): siRNA sense strand
gaccuccgcuucaagauca

SEQ ID NO: 270086 - RNA, 19 nt, Homo sapiens
  misc_RNA (1)...(19): siRNA sense strand
aaggagaaauccaggagua

SEQ ID NO: 270087 - RNA, 19 nt, Homo sapiens
  misc_RNA (1)...(19): siRNA sense strand
caucugaaauggaaaccaa

SEQ ID NO: 270088 - RNA, 19 nt, Homo sapiens
  misc_RNA (1)...(19): siRNA sense strand
gcaacugcaucguucuguu

SEQ ID NO: 270089 - RNA, 19 nt, Homo sapiens
  misc_RNA (1)...(19): siRNA sense strand
ggaaagaagucggggcaua

SEQ ID NO: 270090 - RNA, 19 nt, Homo sapiens
  misc_RNA (1)...(19): siRNA sense strand
ugaacgaaauucucaaugg

SEQ ID NO: 270091 - RNA, 19 nt, Homo sapiens
  misc_RNA (1)...(19): siRNA sense strand
caagcuagaccaugaaugu

SEQ ID NO: 270092 - RNA, 19 nt, Homo sapiens
  misc_RNA (1)...(19): siRNA sense strand
guacucggaugaagaaguc

SEQ ID NO: 270093 - RNA, 19 nt, Homo sapiens
  misc_RNA (1)...(19): siRNA sense strand
gagaggaccuggacuucgu

SEQ ID NO: 270094 - RNA, 19 nt, Homo sapiens
  misc_RNA (1)...(19): siRNA sense strand
caacugcaucguucuguuu

SEQ ID NO: 270095 - RNA, 19 nt, Homo sapiens
  misc_RNA (1)...(19): siRNA sense strand
ggacuuggccacguacauu

SEQ ID NO: 270096 - RNA, 19 nt, Homo sapiens
  misc_RNA (1)...(19): siRNA sense strand
caacagcaccgcagaacug

SEQ ID NO: 270097 - RNA, 19 nt, Homo sapiens
  misc_RNA (1)...(19): siRNA sense strand
ggaaggaagcaaagcaaau

SEQ ID NO: 270098 - RNA, 19 nt, Homo sapiens
  misc_RNA (1)...(19): siRNA sense strand
gaucaaagugcuaaagcuu

SEQ ID NO: 270099 - RNA, 19 nt, Homo sapiens
  misc_RNA (1)...(19): siRNA sense strand
ugaaggugcugaagaaguc

SEQ ID NO: 270100 - RNA, 19 nt, Homo sapiens
  misc_RNA (1)...(19): siRNA sense strand
gcagagaggucuuuucuac

SEQ ID NO: 270101 - RNA, 19 nt, Homo sapiens
  misc_RNA (1)...(19): siRNA sense strand
ggaucuuucucucccauga

SEQ ID NO: 270102 - RNA, 19 nt, Homo sapiens
  misc_RNA (1)...(19): siRNA sense strand
cgaugaagaccaagacgua

SEQ ID NO: 270103 - RNA, 19 nt, Homo sapiens
  misc_RNA (1)...(19): siRNA sense strand
gcaucaacaucgccaagau

SEQ ID NO: 270104 - RNA, 19 nt, Homo sapiens
  misc_RNA (1)...(19): siRNA sense strand
gcugguagcccuagugugu

SEQ ID NO: 270105 - RNA, 19 nt, Homo sapiens
  misc_RNA (1)...(19): siRNA sense strand
agaaccagaaggccuauua

SEQ ID NO: 270106 - RNA, 19 nt, Homo sapiens
  misc_RNA (1)...(19): siRNA sense strand
ggacucaggagcacacgaa

SEQ ID NO: 270107 - RNA, 19 nt, Homo sapiens
  misc_RNA (1)...(19): siRNA sense strand
ccugggagcuggcauucaa

SEQ ID NO: 270108 - RNA, 19 nt, Homo sapiens
  misc_RNA (1)...(19): siRNA sense strand
cgaaagagaguuccaaggu

SEQ ID NO: 270109 - RNA, 19 nt, Homo sapiens
  misc_RNA (1)...(19): siRNA sense strand
uggcugagauggacaaagu

SEQ ID NO: 270110 - RNA, 19 nt, Homo sapiens
  misc_RNA (1)...(19): siRNA sense strand
gaagucugccuaccuguca

SEQ ID NO: 270111 - RNA, 19 nt, Homo sapiens
  misc_RNA (1)...(19): siRNA sense strand
cauugcaggucaccacgua

SEQ ID NO: 270112 - RNA, 19 nt, Homo sapiens
  misc_RNA (1)...(19): siRNA sense strand
cugacaagcuagaccauga

SEQ ID NO: 270113 - RNA, 19 nt, Homo sapiens
  misc_RNA (1)...(19): siRNA sense strand
ucuguuugcugcccuguuu

SEQ ID NO: 270114 - RNA, 19 nt, Homo sapiens
  misc_RNA (1)...(19): siRNA sense strand
gaccuggacuucguucuca

SEQ ID NO: 270115 - RNA, 19 nt, Homo sapiens
  misc_RNA (1)...(19): siRNA sense strand
gcaaagacaaucggaucaa

SEQ ID NO: 270116 - RNA, 19 nt, Homo sapiens
  misc_RNA (1)...(19): siRNA sense strand
gaaauucucaaugggauca

SEQ ID NO: 270117 - RNA, 19 nt, Homo sapiens
  misc_RNA (1)...(19): siRNA sense strand
caaagacaaucggaucaag

SEQ ID NO: 270118 - RNA, 19 nt, Homo sapiens
  misc_RNA (1)...(19): siRNA sense strand
cucaugagcuucuucuuca

SEQ ID NO: 270119 - RNA, 19 nt, Homo sapiens
  misc_RNA (1)...(19): siRNA sense strand
aaggagagaucaucaucga

SEQ ID NO: 270120 - RNA, 19 nt, Homo sapiens
  misc_RNA (1)...(19): siRNA sense strand
gagcugaaggugcugaaga

SEQ ID NO: 270121 - RNA, 19 nt, Homo sapiens
  misc_RNA (1)...(19): siRNA sense strand
uggaaugucacguggaaua

SEQ ID NO: 270122 - RNA, 19 nt, Homo sapiens
  misc_RNA (1)...(19): siRNA sense strand
ggaaggcccuggugaucac

SEQ ID NO: 270123 - RNA, 19 nt, Homo sapiens
  misc_RNA (1)...(19): siRNA sense strand
ccacgcugcuugcuaccuu

SEQ ID NO: 270124 - RNA, 19 nt, Homo sapiens
  misc_RNA (1)...(19): siRNA sense strand
gcgagugucucccucaaac

SEQ ID NO: 270125 - RNA, 19 nt, Homo sapiens
  misc_RNA (1)...(19): siRNA sense strand
ggacacgucggaacaaguc

SEQ ID NO: 270126 - RNA, 19 nt, Homo sapiens
  misc_RNA (1)...(19): siRNA sense strand
gaguggaauuccggaacua

SEQ ID NO: 270127 - RNA, 19 nt, Homo sapiens
  misc_RNA (1)...(19): siRNA sense strand
caaggaguauucagagacu

SEQ ID NO: 270128 - RNA, 19 nt, Homo sapiens
  misc_RNA (1)...(19): siRNA sense strand
cacaagggaucgccguguu

SEQ ID NO: 270129 - RNA, 19 nt, Homo sapiens
  misc_RNA (1)...(19): siRNA sense strand
gcgcuggcuuccaacuauu

SEQ ID NO: 270130 - RNA, 19 nt, Homo sapiens
  misc_RNA (1)...(19): siRNA sense strand
guacugggacuacaugaag

SEQ ID NO: 270131 - RNA, 19 nt, Homo sapiens
  misc_RNA (1)...(19): siRNA sense strand
gcaaagcaaauggagaaug

SEQ ID NO: 270132 - RNA, 19 nt, Homo sapiens
  misc_RNA (1)...(19): siRNA sense strand
aagcaaagcaaauggagaa

SEQ ID NO: 270133 - RNA, 19 nt, Homo sapiens
  misc_RNA (1)...(19): siRNA sense strand
gcagguggacgucaucauc

SEQ ID NO: 270134 - RNA, 19 nt, Homo sapiens
  misc_RNA (1)...(19): siRNA sense strand
gacuuggccacguacauua

SEQ ID NO: 270135 - RNA, 19 nt, Homo sapiens
  misc_RNA (1)...(19): siRNA sense strand
ucauggacuuggccacgua

SEQ ID NO: 270136 - RNA, 19 nt, Homo sapiens
  misc_RNA (1)...(19): siRNA sense strand
gaaggaaugcgccaagacu

SEQ ID NO: 270137 - RNA, 19 nt, Homo sapiens
  misc_RNA (1)...(19): siRNA sense strand
cagggaucaugcucacuuu

SEQ ID NO: 270138 - RNA, 19 nt, Homo sapiens
  misc_RNA (1)...(19): siRNA sense strand
ccaguacucggaugaagaa

SEQ ID NO: 270139 - RNA, 19 nt, Homo sapiens
  misc_RNA (1)...(19): siRNA sense strand
ggucaagcuuuccguguac

SEQ ID NO: 270140 - RNA, 19 nt, Homo sapiens
  misc_RNA (1)...(19): siRNA sense strand
uaaagaacuggaagaagga

SEQ ID NO: 270141 - RNA, 19 nt, Homo sapiens
  misc_RNA (1)...(19): siRNA sense strand
cucagugucuuacucauug

SEQ ID NO: 270142 - RNA, 19 nt, Homo sapiens
  misc_RNA (1)...(19): siRNA sense strand
ucaagcugaugaacgaaau

SEQ ID NO: 270143 - RNA, 19 nt, Homo sapiens
  misc_RNA (1)...(19): siRNA sense strand
ggaucaugcucacuuucug

SEQ ID NO: 270144 - RNA, 19 nt, Homo sapiens
  misc_RNA (1)...(19): siRNA sense strand
cagcagcuccuccuccuau

SEQ ID NO: 270145 - RNA, 19 nt, Homo sapiens
  misc_RNA (1)...(19): siRNA sense strand
gcacagcaugagcuacuug

SEQ ID NO: 270146 - RNA, 19 nt, Homo sapiens
  misc_RNA (1)...(19): siRNA sense strand
ggaucaaagugcuaaagcu

SEQ ID NO: 270147 - RNA, 19 nt, Homo sapiens
  misc_RNA (1)...(19): siRNA sense strand
gaugaacgaaauucucaau

SEQ ID NO: 270148 - RNA, 19 nt, Homo sapiens
  misc_RNA (1)...(19): siRNA sense strand
gcccgucaaugcugugaug

SEQ ID NO: 270149 - RNA, 19 nt, Homo sapiens
  misc_RNA (1)...(19): siRNA sense strand
augaggagguggaggcuuu

SEQ ID NO: 270150 - RNA, 19 nt, Homo sapiens
  misc_RNA (1)...(19): siRNA sense strand
ccaagguggaugcgaauga

SEQ ID NO: 270151 - RNA, 19 nt, Homo sapiens
  misc_RNA (1)...(19): siRNA sense strand
ucaaacgccugaggaucuu

SEQ ID NO: 270152 - RNA, 19 nt, Homo sapiens
  misc_RNA (1)...(19): siRNA sense strand
ggucagcccaacucucuug

SEQ ID NO: 270153 - RNA, 19 nt, Homo sapiens
  misc_RNA (1)...(19): siRNA sense strand
gaccaugaaugugcagaag

SEQ ID NO: 270154 - RNA, 19 nt, Homo sapiens
  misc_RNA (1)...(19): siRNA sense strand
auuggugccugcaucguua

SEQ ID NO: 270155 - RNA, 19 nt, Homo sapiens
  misc_RNA (1)...(19): siRNA sense strand
gggaaggaagcaaagcaaa

SEQ ID NO: 270156 - RNA, 19 nt, Homo sapiens
  misc_RNA (1)...(19): siRNA sense strand
gggcccuacuuccucauga

SEQ ID NO: 270157 - RNA, 19 nt, Homo sapiens
  misc_RNA (1)...(19): siRNA sense strand
guucaugggcucccuguuc

SEQ ID NO: 270158 - RNA, 19 nt, Homo sapiens
  misc_RNA (1)...(19): siRNA sense strand
cagggcaggucaagcuuuc

SEQ ID NO: 270159 - RNA, 19 nt, Homo sapiens
  misc_RNA (1)...(19): siRNA sense strand
ugauggcgaugaagaccaa

SEQ ID NO: 270160 - RNA, 19 nt, Homo sapiens
  misc_RNA (1)...(19): siRNA sense strand
gagauugucaaccucaugu

SEQ ID NO: 270161 - RNA, 19 nt, Homo sapiens
  misc_RNA (1)...(19): siRNA sense strand
acaccgugcugcuguuugu

SEQ ID NO: 270162 - RNA, 19 nt, Homo sapiens
  misc_RNA (1)...(19): siRNA sense strand
ucuuaaaguugcucaucaa

SEQ ID NO: 270163 - RNA, 19 nt, Homo sapiens
  misc_RNA (1)...(19): siRNA sense strand
ucccggaggucaucaagau

SEQ ID NO: 270164 - RNA, 19 nt, Homo sapiens
  misc_RNA (1)...(19): siRNA sense strand
ggacagugcagggaagcaa

SEQ ID NO: 270165 - RNA, 19 nt, Homo sapiens
  misc_RNA (1)...(19): siRNA sense strand
ggagguggaggcuuugauc

SEQ ID NO: 270166 - RNA, 19 nt, Homo sapiens
  misc_RNA (1)...(19): siRNA sense strand
gcaggucaccacguacuug

SEQ ID NO: 270167 - RNA, 19 nt, Homo sapiens
  misc_RNA (1)...(19): siRNA sense strand
agaaggaggagaccuggaa

SEQ ID NO: 270168 - RNA, 19 nt, Homo sapiens
  misc_RNA (1)...(19): siRNA sense strand
ucgugugggugccuuguuu

SEQ ID NO: 270169 - RNA, 19 nt, Homo sapiens
  misc_RNA (1)...(19): siRNA sense strand
ccacaucugcuucgucagu

SEQ ID NO: 270170 - RNA, 19 nt, Homo sapiens
  misc_RNA (1)...(19): siRNA sense strand
gcaccaguacuuccacauc

SEQ ID NO: 270171 - RNA, 19 nt, Homo sapiens
  misc_RNA (1)...(19): siRNA sense strand
gaugacaccucucaacaaa

SEQ ID NO: 270172 - RNA, 19 nt, Homo sapiens
  misc_RNA (1)...(19): siRNA sense strand
uaaaguugcucaucaaguu

SEQ ID NO: 270173 - RNA, 19 nt, Homo sapiens
  misc_RNA (1)...(19): siRNA sense strand
ggaagcaacugcagagaca

SEQ ID NO: 270174 - RNA, 19 nt, Homo sapiens
  misc_RNA (1)...(19): siRNA sense strand
ccaaggagcuggacacagu

SEQ ID NO: 270175 - RNA, 19 nt, Homo sapiens
  misc_RNA (1)...(19): siRNA sense strand
caacgagucugccgaagga

SEQ ID NO: 270176 - RNA, 19 nt, Homo sapiens
  misc_RNA (1)...(19): siRNA sense strand
gaucaagaccgcugucauu

SEQ ID NO: 270177 - RNA, 19 nt, Homo sapiens
  misc_RNA (1)...(19): siRNA sense strand
caaagcaaauggagaaugg

SEQ ID NO: 270178 - RNA, 19 nt, Homo sapiens
  misc_RNA (1)...(19): siRNA sense strand
gggcagaccucuucuacuc

SEQ ID NO: 270179 - RNA, 19 nt, Homo sapiens
  misc_RNA (1)...(19): siRNA sense strand
ccacguacauuaacaugau

SEQ ID NO: 270180 - RNA, 19 nt, Homo sapiens
  misc_RNA (1)...(19): siRNA sense strand
gaccgaggcuacauucaga

SEQ ID NO: 270181 - RNA, 19 nt, Homo sapiens
  misc_RNA (1)...(19): siRNA sense strand
uggagaggcucaaggagua

SEQ ID NO: 270182 - RNA, 19 nt, Homo sapiens
  misc_RNA (1)...(19): siRNA sense strand
gcagaccucuucuacucuu

SEQ ID NO: 270183 - RNA, 19 nt, Homo sapiens
  misc_RNA (1)...(19): siRNA sense strand
gaaggaagcaaagcaaaug

SEQ ID NO: 270184 - RNA, 19 nt, Homo sapiens
  misc_RNA (1)...(19): siRNA sense strand
ggccgcagaucuuaaaguu

SEQ ID NO: 270185 - RNA, 19 nt, Homo sapiens
  misc_RNA (1)...(19): siRNA sense strand
gaccuccgcuucaagauca

SEQ ID NO: 270186 - RNA, 19 nt, Homo sapiens
  misc_RNA (1)...(19): siRNA sense strand
aaggagaaauccaggagua

SEQ ID NO: 270187 - RNA, 19 nt, Homo sapiens
  misc_RNA (1)...(19): siRNA sense strand
caucugaaauggaaaccaa

SEQ ID NO: 270188 - RNA, 19 nt, Homo sapiens
  misc_RNA (1)...(19): siRNA sense strand
gcaacugcaucguucuguu

SEQ ID NO: 270189 - RNA, 19 nt, Homo sapiens
  misc_RNA (1)...(19): siRNA sense strand
ggaaagaagucggggcaua

SEQ ID NO: 270190 - RNA, 19 nt, Homo sapiens
  misc_RNA (1)...(19): siRNA sense strand
ugaacgaaauucucaaugg

SEQ ID NO: 270191 - RNA, 19 nt, Homo sapiens
  misc_RNA (1)...(19): siRNA sense strand
caagcuagaccaugaaugu

SEQ ID NO: 270192 - RNA, 19 nt, Homo sapiens
  misc_RNA (1)...(19): siRNA sense strand
guacucggaugaagaaguc

SEQ ID NO: 270193 - RNA, 19 nt, Homo sapiens
  misc_RNA (1)...(19): siRNA sense strand
gagaggaccuggacuucgu

SEQ ID NO: 270194 - RNA, 19 nt, Homo sapiens
  misc_RNA (1)...(19): siRNA sense strand
caacugcaucguucuguuu

SEQ ID NO: 270195 - RNA, 19 nt, Homo sapiens
  misc_RNA (1)...(19): siRNA sense strand
ggacuuggccacguacauu

SEQ ID NO: 270196 - RNA, 19 nt, Homo sapiens
  misc_RNA (1)...(19): siRNA sense strand
caacagcaccgcagaacug

SEQ ID NO: 270197 - RNA, 19 nt, Homo sapiens
  misc_RNA (1)...(19): siRNA sense strand
ggaaggaagcaaagcaaau

SEQ ID NO: 270198 - RNA, 19 nt, Homo sapiens
  misc_RNA (1)...(19): siRNA sense strand
gaucaaagugcuaaagcuu

SEQ ID NO: 270199 - RNA, 19 nt, Homo sapiens
  misc_RNA (1)...(19): siRNA sense strand
ugaaggugcugaagaaguc

SEQ ID NO: 270200 - RNA, 19 nt, Homo sapiens
  misc_RNA (1)...(19): siRNA sense strand
gcagagaggucuuuucuac

SEQ ID NO: 270201 - RNA, 19 nt, Homo sapiens
  misc_RNA (1)...(19): siRNA sense strand
ggaucuuucucucccauga

SEQ ID NO: 270202 - RNA, 19 nt, Homo sapiens
  misc_RNA (1)...(19): siRNA sense strand
cgaugaagaccaagacgua

SEQ ID NO: 270203 - RNA, 19 nt, Homo sapiens
  misc_RNA (1)...(19): siRNA sense strand
gcaucaacaucgccaagau

SEQ ID NO: 270204 - RNA, 19 nt, Homo sapiens
  misc_RNA (1)...(19): siRNA sense strand
gcugguagcccuagugugu

SEQ ID NO: 270205 - RNA, 19 nt, Homo sapiens
  misc_RNA (1)...(19): siRNA sense strand
agaaccagaaggccuauua

SEQ ID NO: 270206 - RNA, 19 nt, Homo sapiens
  misc_RNA (1)...(19): siRNA sense strand
ggacucaggagcacacgaa

SEQ ID NO: 270207 - RNA, 19 nt, Homo sapiens
  misc_RNA (1)...(19): siRNA sense strand
ccugggagcuggcauucaa

SEQ ID NO: 270208 - RNA, 19 nt, Homo sapiens
  misc_RNA (1)...(19): siRNA sense strand
cgaaagagaguuccaaggu

SEQ ID NO: 270209 - RNA, 19 nt, Homo sapiens
  misc_RNA (1)...(19): siRNA sense strand
uggcugagauggacaaagu

SEQ ID NO: 270210 - RNA, 19 nt, Homo sapiens
  misc_RNA (1)...(19): siRNA sense strand
gaagucugccuaccuguca

SEQ ID NO: 270211 - RNA, 19 nt, Homo sapiens
  misc_RNA (1)...(19): siRNA sense strand
cauugcaggucaccacgua

SEQ ID NO: 270212 - RNA, 19 nt, Homo sapiens
  misc_RNA (1)...(19): siRNA sense strand
cugacaagcuagaccauga

SEQ ID NO: 270213 - RNA, 19 nt, Homo sapiens
  misc_RNA (1)...(19): siRNA sense strand
ucuguuugcugcccuguuu

SEQ ID NO: 270214 - RNA, 19 nt, Homo sapiens
  misc_RNA (1)...(19): siRNA sense strand
gaccuggacuucguucuca

SEQ ID NO: 270215 - RNA, 19 nt, Homo sapiens
  misc_RNA (1)...(19): siRNA sense strand
gcaaagacaaucggaucaa

SEQ ID NO: 270216 - RNA, 19 nt, Homo sapiens
  misc_RNA (1)...(19): siRNA sense strand
gaaauucucaaugggauca

SEQ ID NO: 270217 - RNA, 19 nt, Homo sapiens
  misc_RNA (1)...(19): siRNA sense strand
caaagacaaucggaucaag

SEQ ID NO: 270218 - RNA, 19 nt, Homo sapiens
  misc_RNA (1)...(19): siRNA sense strand
cucaugagcuucuucuuca

SEQ ID NO: 270219 - RNA, 19 nt, Homo sapiens
  misc_RNA (1)...(19): siRNA sense strand
aaggagagaucaucaucga

SEQ ID NO: 270220 - RNA, 19 nt, Homo sapiens
  misc_RNA (1)...(19): siRNA sense strand
gagcugaaggugcugaaga

SEQ ID NO: 270221 - RNA, 19 nt, Homo sapiens
  misc_RNA (1)...(19): siRNA sense strand
uggaaugucacguggaaua

SEQ ID NO: 270222 - RNA, 19 nt, Homo sapiens
  misc_RNA (1)...(19): siRNA sense strand
ggaaggcccuggugaucac

SEQ ID NO: 270223 - RNA, 19 nt, Homo sapiens
  misc_RNA (1)...(19): siRNA sense strand
ccacgcugcuugcuaccuu

SEQ ID NO: 270224 - RNA, 19 nt, Homo sapiens
  misc_RNA (1)...(19): siRNA sense strand
gcgagugucucccucaaac

SEQ ID NO: 270225 - RNA, 19 nt, Homo sapiens
  misc_RNA (1)...(19): siRNA sense strand
ggacacgucggaacaaguc

SEQ ID NO: 270226 - RNA, 19 nt, Homo sapiens
  misc_RNA (1)...(19): siRNA sense strand
gaguggaauuccggaacua

SEQ ID NO: 270227 - RNA, 19 nt, Homo sapiens
  misc_RNA (1)...(19): siRNA sense strand
caaggaguauucagagacu

SEQ ID NO: 270228 - RNA, 19 nt, Homo sapiens
  misc_RNA (1)...(19): siRNA sense strand
cacaagggaucgccguguu

SEQ ID NO: 270229 - RNA, 19 nt, Homo sapiens
  misc_RNA (1)...(19): siRNA sense strand
gcgcuggcuuccaacuauu

SEQ ID NO: 270230 - RNA, 19 nt, Homo sapiens
  misc_RNA (1)...(19): siRNA sense strand
guacugggacuacaugaag

SEQ ID NO: 270231 - RNA, 19 nt, Homo sapiens
  misc_RNA (1)...(19): siRNA sense strand
gcaaagcaaauggagaaug

SEQ ID NO: 270232 - RNA, 19 nt, Homo sapiens
  misc_RNA (1)...(19): siRNA sense strand
aagcaaagcaaauggagaa

SEQ ID NO: 270233 - RNA, 19 nt, Homo sapiens
  misc_RNA (1)...(19): siRNA sense strand
gcagguggacgucaucauc

SEQ ID NO: 270234 - RNA, 19 nt, Homo sapiens
  misc_RNA (1)...(19): siRNA sense strand
gacuuggccacguacauua

SEQ ID NO: 270235 - RNA, 19 nt, Homo sapiens
  misc_RNA (1)...(19): siRNA sense strand
ucauggacuuggccacgua

SEQ ID NO: 270236 - RNA, 19 nt, Homo sapiens
  misc_RNA (1)...(19): siRNA sense strand
gaaggaaugcgccaagacu

SEQ ID NO: 270237 - RNA, 19 nt, Homo sapiens
  misc_RNA (1)...(19): siRNA sense strand
cagggaucaugcucacuuu

SEQ ID NO: 270238 - RNA, 19 nt, Homo sapiens
  misc_RNA (1)...(19): siRNA sense strand
ccaguacucggaugaagaa

SEQ ID NO: 270239 - RNA, 19 nt, Homo sapiens
  misc_RNA (1)...(19): siRNA sense strand
ggucaagcuuuccguguac

SEQ ID NO: 270240 - RNA, 19 nt, Homo sapiens
  misc_RNA (1)...(19): siRNA sense strand
uaaagaacuggaagaagga

SEQ ID NO: 270241 - RNA, 19 nt, Homo sapiens
  misc_RNA (1)...(19): siRNA sense strand
cucagugucuuacucauug

SEQ ID NO: 270242 - RNA, 19 nt, Homo sapiens
  misc_RNA (1)...(19): siRNA sense strand
ucaagcugaugaacgaaau

SEQ ID NO: 270243 - RNA, 19 nt, Homo sapiens
  misc_RNA (1)...(19): siRNA sense strand
ggaucaugcucacuuucug

SEQ ID NO: 270244 - RNA, 19 nt, Homo sapiens
  misc_RNA (1)...(19): siRNA sense strand
cagcagcuccuccuccuau

SEQ ID NO: 270245 - RNA, 19 nt, Homo sapiens
  misc_RNA (1)...(19): siRNA sense strand
gcacagcaugagcuacuug

SEQ ID NO: 270246 - RNA, 19 nt, Homo sapiens
  misc_RNA (1)...(19): siRNA sense strand
ggaucaaagugcuaaagcu

SEQ ID NO: 270247 - RNA, 19 nt, Homo sapiens
  misc_RNA (1)...(19): siRNA sense strand
gaugaacgaaauucucaau

SEQ ID NO: 270248 - RNA, 19 nt, Homo sapiens
  misc_RNA (1)...(19): siRNA sense strand
gcccgucaaugcugugaug

SEQ ID NO: 270249 - RNA, 19 nt, Homo sapiens
  misc_RNA (1)...(19): siRNA sense strand
augaggagguggaggcuuu

SEQ ID NO: 270250 - RNA, 19 nt, Homo sapiens
  misc_RNA (1)...(19): siRNA sense strand
ccaagguggaugcgaauga

SEQ ID NO: 270251 - RNA, 19 nt, Homo sapiens
  misc_RNA (1)...(19): siRNA sense strand
ucaaacgccugaggaucuu

SEQ ID NO: 270252 - RNA, 19 nt, Homo sapiens
  misc_RNA (1)...(19): siRNA sense strand
ggucagcccaacucucuug

SEQ ID NO: 270253 - RNA, 19 nt, Homo sapiens
  misc_RNA (1)...(19): siRNA sense strand
gaccaugaaugugcagaag

SEQ ID NO: 270254 - RNA, 19 nt, Homo sapiens
  misc_RNA (1)...(19): siRNA sense strand
auuggugccugcaucguua

SEQ ID NO: 270255 - RNA, 19 nt, Homo sapiens
  misc_RNA (1)...(19): siRNA sense strand
gggaaggaagcaaagcaaa

SEQ ID NO: 270256 - RNA, 19 nt, Homo sapiens
  misc_RNA (1)...(19): siRNA sense strand
gggcccuacuuccucauga

SEQ ID NO: 270257 - RNA, 19 nt, Homo sapiens
  misc_RNA (1)...(19): siRNA sense strand
guucaugggcucccuguuc

SEQ ID NO: 270258 - RNA, 19 nt, Homo sapiens
  misc_RNA (1)...(19): siRNA sense strand
cagggcaggucaagcuuuc

SEQ ID NO: 270259 - RNA, 19 nt, Homo sapiens
  misc_RNA (1)...(19): siRNA sense strand
ugauggcgaugaagaccaa

SEQ ID NO: 270260 - RNA, 19 nt, Homo sapiens
  misc_RNA (1)...(19): siRNA sense strand
gagauugucaaccucaugu

SEQ ID NO: 270261 - RNA, 19 nt, Homo sapiens
  misc_RNA (1)...(19): siRNA sense strand
acaccgugcugcuguuugu

SEQ ID NO: 270262 - RNA, 19 nt, Homo sapiens
  misc_RNA (1)...(19): siRNA sense strand
ucuuaaaguugcucaucaa

SEQ ID NO: 270263 - RNA, 19 nt, Homo sapiens
  misc_RNA (1)...(19): siRNA sense strand
ucccggaggucaucaagau

SEQ ID NO: 270264 - RNA, 19 nt, Homo sapiens
  misc_RNA (1)...(19): siRNA sense strand
ggacagugcagggaagcaa

SEQ ID NO: 270265 - RNA, 19 nt, Homo sapiens
  misc_RNA (1)...(19): siRNA sense strand
ggagguggaggcuuugauc

SEQ ID NO: 270266 - RNA, 19 nt, Homo sapiens
  misc_RNA (1)...(19): siRNA sense strand
gcaggucaccacguacuug

SEQ ID NO: 270267 - RNA, 19 nt, Homo sapiens
  misc_RNA (1)...(19): siRNA sense strand
agaaggaggagaccuggaa

SEQ ID NO: 270268 - RNA, 19 nt, Homo sapiens
  misc_RNA (1)...(19): siRNA sense strand
ucgugugggugccuuguuu

SEQ ID NO: 270269 - RNA, 19 nt, Homo sapiens
  misc_RNA (1)...(19): siRNA sense strand
ccacaucugcuucgucagu

SEQ ID NO: 270270 - RNA, 19 nt, Homo sapiens
  misc_RNA (1)...(19): siRNA sense strand
gcaccaguacuuccacauc

SEQ ID NO: 270271 - RNA, 19 nt, Homo sapiens
  misc_RNA (1)...(19): siRNA sense strand
gaugacaccucucaacaaa

SEQ ID NO: 270272 - RNA, 19 nt, Homo sapiens
  misc_RNA (1)...(19): siRNA sense strand
uaaaguugcucaucaaguu

SEQ ID NO: 270273 - RNA, 19 nt, Homo sapiens
  misc_RNA (1)...(19): siRNA sense strand
ggaagcaacugcagagaca

SEQ ID NO: 270274 - RNA, 19 nt, Homo sapiens
  misc_RNA (1)...(19): siRNA sense strand
ccaaggagcuggacacagu

SEQ ID NO: 270275 - RNA, 19 nt, Homo sapiens
  misc_RNA (1)...(19): siRNA sense strand
caacgagucugccgaagga

SEQ ID NO: 270276 - RNA, 19 nt, Homo sapiens
  misc_RNA (1)...(19): siRNA sense strand
gaucaagaccgcugucauu

SEQ ID NO: 270277 - RNA, 19 nt, Homo sapiens
  misc_RNA (1)...(19): siRNA sense strand
caaagcaaauggagaaugg

SEQ ID NO: 270278 - RNA, 19 nt, Homo sapiens
  misc_RNA (1)...(19): siRNA sense strand
gggcagaccucuucuacuc

SEQ ID NO: 270279 - RNA, 19 nt, Homo sapiens
  misc_RNA (1)...(19): siRNA sense strand
ccacguacauuaacaugau

SEQ ID NO: 270280 - RNA, 19 nt, Homo sapiens
  misc_RNA (1)...(19): siRNA sense strand
gaccgaggcuacauucaga

SEQ ID NO: 270281 - RNA, 19 nt, Homo sapiens
  misc_RNA (1)...(19): siRNA sense strand
uggagaggcucaaggagua

SEQ ID NO: 270282 - RNA, 19 nt, Homo sapiens
  misc_RNA (1)...(19): siRNA sense strand
gcagaccucuucuacucuu

SEQ ID NO: 270283 - RNA, 19 nt, Homo sapiens
  misc_RNA (1)...(19): siRNA sense strand
gaaggaagcaaagcaaaug

SEQ ID NO: 270284 - RNA, 19 nt, Homo sapiens
  misc_RNA (1)...(19): siRNA sense strand
ggccgcagaucuuaaaguu

SEQ ID NO: 270285 - RNA, 19 nt, Homo sapiens
  misc_RNA (1)...(19): siRNA sense strand
gaccuccgcuucaagauca

SEQ ID NO: 270286 - RNA, 19 nt, Homo sapiens
  misc_RNA (1)...(19): siRNA sense strand
aaggagaaauccaggagua

SEQ ID NO: 270287 - RNA, 19 nt, Homo sapiens
  misc_RNA (1)...(19): siRNA sense strand
caucugaaauggaaaccaa

SEQ ID NO: 270288 - RNA, 19 nt, Homo sapiens
  misc_RNA (1)...(19): siRNA sense strand
gcaacugcaucguucuguu

SEQ ID NO: 270289 - RNA, 19 nt, Homo sapiens
  misc_RNA (1)...(19): siRNA sense strand
ggaaagaagucggggcaua

SEQ ID NO: 270290 - RNA, 19 nt, Homo sapiens
  misc_RNA (1)...(19): siRNA sense strand
ugaacgaaauucucaaugg

SEQ ID NO: 270291 - RNA, 19 nt, Homo sapiens
  misc_RNA (1)...(19): siRNA sense strand
caagcuagaccaugaaugu

SEQ ID NO: 270292 - RNA, 19 nt, Homo sapiens
  misc_RNA (1)...(19): siRNA sense strand
guacucggaugaagaaguc

SEQ ID NO: 270293 - RNA, 19 nt, Homo sapiens
  misc_RNA (1)...(19): siRNA sense strand
gagaggaccuggacuucgu

SEQ ID NO: 270294 - RNA, 19 nt, Homo sapiens
  misc_RNA (1)...(19): siRNA sense strand
caacugcaucguucuguuu

SEQ ID NO: 270295 - RNA, 19 nt, Homo sapiens
  misc_RNA (1)...(19): siRNA sense strand
ggacuuggccacguacauu

SEQ ID NO: 270296 - RNA, 19 nt, Homo sapiens
  misc_RNA (1)...(19): siRNA sense strand
caacagcaccgcagaacug

SEQ ID NO: 270297 - RNA, 19 nt, Homo sapiens
  misc_RNA (1)...(19): siRNA sense strand
ggaaggaagcaaagcaaau

SEQ ID NO: 270298 - RNA, 19 nt, Homo sapiens
  misc_RNA (1)...(19): siRNA sense strand
gaucaaagugcuaaagcuu

SEQ ID NO: 270299 - RNA, 19 nt, Homo sapiens
  misc_RNA (1)...(19): siRNA sense strand
ugaaggugcugaagaaguc

SEQ ID NO: 270300 - RNA, 19 nt, Homo sapiens
  misc_RNA (1)...(19): siRNA sense strand
gcagagaggucuuuucuac

SEQ ID NO: 270301 - RNA, 19 nt, Homo sapiens
  misc_RNA (1)...(19): siRNA sense strand
ggaucuuucucucccauga

SEQ ID NO: 270302 - RNA, 19 nt, Homo sapiens
  misc_RNA (1)...(19): siRNA sense strand
cgaugaagaccaagacgua

SEQ ID NO: 270303 - RNA, 19 nt, Homo sapiens
  misc_RNA (1)...(19): siRNA sense strand
gcaucaacaucgccaagau

SEQ ID NO: 270304 - RNA, 19 nt, Homo sapiens
  misc_RNA (1)...(19): siRNA sense strand
gcugguagcccuagugugu

SEQ ID NO: 270305 - RNA, 19 nt, Homo sapiens
  misc_RNA (1)...(19): siRNA sense strand
agaaccagaaggccuauua

SEQ ID NO: 270306 - RNA, 19 nt, Homo sapiens
  misc_RNA (1)...(19): siRNA sense strand
ggacucaggagcacacgaa

SEQ ID NO: 270307 - RNA, 19 nt, Homo sapiens
  misc_RNA (1)...(19): siRNA sense strand
ccugggagcuggcauucaa

SEQ ID NO: 270308 - RNA, 19 nt, Homo sapiens
  misc_RNA (1)...(19): siRNA sense strand
cgaaagagaguuccaaggu

SEQ ID NO: 270309 - RNA, 19 nt, Homo sapiens
  misc_RNA (1)...(19): siRNA sense strand
uggcugagauggacaaagu

SEQ ID NO: 270310 - RNA, 19 nt, Homo sapiens
  misc_RNA (1)...(19): siRNA sense strand
gaagucugccuaccuguca

SEQ ID NO: 270311 - RNA, 19 nt, Homo sapiens
  misc_RNA (1)...(19): siRNA sense strand
cauugcaggucaccacgua

SEQ ID NO: 270312 - RNA, 19 nt, Homo sapiens
  misc_RNA (1)...(19): siRNA sense strand
cugacaagcuagaccauga

SEQ ID NO: 270313 - RNA, 19 nt, Homo sapiens
  misc_RNA (1)...(19): siRNA sense strand
ucuguuugcugcccuguuu

SEQ ID NO: 270314 - RNA, 19 nt, Homo sapiens
  misc_RNA (1)...(19): siRNA sense strand
gaccuggacuucguucuca

SEQ ID NO: 270315 - RNA, 19 nt, Homo sapiens
  misc_RNA (1)...(19): siRNA sense strand
gcaaagacaaucggaucaa

SEQ ID NO: 270316 - RNA, 19 nt, Homo sapiens
  misc_RNA (1)...(19): siRNA sense strand
gaaauucucaaugggauca

SEQ ID NO: 270317 - RNA, 19 nt, Homo sapiens
  misc_RNA (1)...(19): siRNA sense strand
caaagacaaucggaucaag

SEQ ID NO: 270318 - RNA, 19 nt, Homo sapiens
  misc_RNA (1)...(19): siRNA sense strand
cucaugagcuucuucuuca

SEQ ID NO: 270319 - RNA, 19 nt, Homo sapiens
  misc_RNA (1)...(19): siRNA sense strand
aaggagagaucaucaucga

SEQ ID NO: 270320 - RNA, 19 nt, Homo sapiens
  misc_RNA (1)...(19): siRNA sense strand
gagcugaaggugcugaaga

SEQ ID NO: 270321 - RNA, 19 nt, Homo sapiens
  misc_RNA (1)...(19): siRNA sense strand
uggaaugucacguggaaua

SEQ ID NO: 270322 - RNA, 19 nt, Homo sapiens
  misc_RNA (1)...(19): siRNA sense strand
ggaaggcccuggugaucac

SEQ ID NO: 270323 - RNA, 19 nt, Homo sapiens
  misc_RNA (1)...(19): siRNA sense strand
ccacgcugcuugcuaccuu

SEQ ID NO: 270324 - RNA, 19 nt, Homo sapiens
  misc_RNA (1)...(19): siRNA sense strand
gcgagugucucccucaaac

SEQ ID NO: 270325 - RNA, 19 nt, Homo sapiens
  misc_RNA (1)...(19): siRNA sense strand
ggacacgucggaacaaguc

SEQ ID NO: 270326 - RNA, 19 nt, Homo sapiens
  misc_RNA (1)...(19): siRNA sense strand
gaguggaauuccggaacua

SEQ ID NO: 270327 - RNA, 19 nt, Homo sapiens
  misc_RNA (1)...(19): siRNA sense strand
caaggaguauucagagacu

SEQ ID NO: 270328 - RNA, 19 nt, Homo sapiens
  misc_RNA (1)...(19): siRNA sense strand
cacaagggaucgccguguu

SEQ ID NO: 270329 - RNA, 19 nt, Homo sapiens
  misc_RNA (1)...(19): siRNA sense strand
gcgcuggcuuccaacuauu

SEQ ID NO: 270330 - RNA, 19 nt, Homo sapiens
  misc_RNA (1)...(19): siRNA sense strand
guacugggacuacaugaag

SEQ ID NO: 270331 - RNA, 19 nt, Homo sapiens
  misc_RNA (1)...(19): siRNA sense strand
gcaaagcaaauggagaaug

SEQ ID NO: 270332 - RNA, 19 nt, Homo sapiens
  misc_RNA (1)...(19): siRNA sense strand
aagcaaagcaaauggagaa

SEQ ID NO: 270333 - RNA, 19 nt, Homo sapiens
  misc_RNA (1)...(19): siRNA sense strand
gcagguggacgucaucauc

SEQ ID NO: 270334 - RNA, 19 nt, Homo sapiens
  misc_RNA (1)...(19): siRNA sense strand
gacuuggccacguacauua

SEQ ID NO: 270335 - RNA, 19 nt, Homo sapiens
  misc_RNA (1)...(19): siRNA sense strand
ucauggacuuggccacgua

SEQ ID NO: 270336 - RNA, 19 nt, Homo sapiens
  misc_RNA (1)...(19): siRNA sense strand
gaaggaaugcgccaagacu

SEQ ID NO: 270337 - RNA, 19 nt, Homo sapiens
  misc_RNA (1)...(19): siRNA sense strand
cagggaucaugcucacuuu

SEQ ID NO: 270338 - RNA, 19 nt, Homo sapiens
  misc_RNA (1)...(19): siRNA sense strand
ccaguacucggaugaagaa

SEQ ID NO: 270339 - RNA, 19 nt, Homo sapiens
  misc_RNA (1)...(19): siRNA sense strand
ggucaagcuuuccguguac

SEQ ID NO: 270340 - RNA, 19 nt, Homo sapiens
  misc_RNA (1)...(19): siRNA sense strand
uaaagaacuggaagaagga

SEQ ID NO: 270341 - RNA, 19 nt, Homo sapiens
  misc_RNA (1)...(19): siRNA sense strand
cucagugucuuacucauug

SEQ ID NO: 270342 - RNA, 19 nt, Homo sapiens
  misc_RNA (1)...(19): siRNA sense strand
ucaagcugaugaacgaaau

SEQ ID NO: 270343 - RNA, 19 nt, Homo sapiens
  misc_RNA (1)...(19): siRNA sense strand
ggaucaugcucacuuucug

SEQ ID NO: 270344 - RNA, 19 nt, Homo sapiens
  misc_RNA (1)...(19): siRNA sense strand
cagcagcuccuccuccuau

SEQ ID NO: 270345 - RNA, 19 nt, Homo sapiens
  misc_RNA (1)...(19): siRNA sense strand
gcacagcaugagcuacuug

SEQ ID NO: 270346 - RNA, 19 nt, Homo sapiens
  misc_RNA (1)...(19): siRNA sense strand
ggaucaaagugcuaaagcu

SEQ ID NO: 270347 - RNA, 19 nt, Homo sapiens
  misc_RNA (1)...(19): siRNA sense strand
gaugaacgaaauucucaau

SEQ ID NO: 270348 - RNA, 19 nt, Homo sapiens
  misc_RNA (1)...(19): siRNA sense strand
gcccgucaaugcugugaug

SEQ ID NO: 270349 - RNA, 19 nt, Homo sapiens
  misc_RNA (1)...(19): siRNA sense strand
augaggagguggaggcuuu

SEQ ID NO: 270350 - RNA, 19 nt, Homo sapiens
  misc_RNA (1)...(19): siRNA sense strand
ccaagguggaugcgaauga

SEQ ID NO: 270351 - RNA, 19 nt, Homo sapiens
  misc_RNA (1)...(19): siRNA sense strand
ucaaacgccugaggaucuu

SEQ ID NO: 270352 - RNA, 19 nt, Homo sapiens
  misc_RNA (1)...(19): siRNA sense strand
ggucagcccaacucucuug

SEQ ID NO: 270353 - RNA, 19 nt, Homo sapiens
  misc_RNA (1)...(19): siRNA sense strand
gaccaugaaugugcagaag

SEQ ID NO: 270354 - RNA, 19 nt, Homo sapiens
  misc_RNA (1)...(19): siRNA sense strand
auuggugccugcaucguua

SEQ ID NO: 270355 - RNA, 19 nt, Homo sapiens
  misc_RNA (1)...(19): siRNA sense strand
gggaaggaagcaaagcaaa

SEQ ID NO: 270356 - RNA, 19 nt, Homo sapiens
  misc_RNA (1)...(19): siRNA sense strand
gggcccuacuuccucauga

SEQ ID NO: 270357 - RNA, 19 nt, Homo sapiens
  misc_RNA (1)...(19): siRNA sense strand
guucaugggcucccuguuc

SEQ ID NO: 270358 - RNA, 19 nt, Homo sapiens
  misc_RNA (1)...(19): siRNA sense strand
cagggcaggucaagcuuuc

SEQ ID NO: 270359 - RNA, 19 nt, Homo sapiens
  misc_RNA (1)...(19): siRNA sense strand
ugauggcgaugaagaccaa

SEQ ID NO: 270360 - RNA, 19 nt, Homo sapiens
  misc_RNA (1)...(19): siRNA sense strand
gagauugucaaccucaugu

SEQ ID NO: 270361 - RNA, 19 nt, Homo sapiens
  misc_RNA (1)...(19): siRNA sense strand
acaccgugcugcuguuugu

SEQ ID NO: 270362 - RNA, 19 nt, Homo sapiens
  misc_RNA (1)...(19): siRNA sense strand
ucuuaaaguugcucaucaa

SEQ ID NO: 270363 - RNA, 19 nt, Homo sapiens
  misc_RNA (1)...(19): siRNA sense strand
ucccggaggucaucaagau

SEQ ID NO: 270364 - RNA, 19 nt, Homo sapiens
  misc_RNA (1)...(19): siRNA sense strand
ggacagugcagggaagcaa

SEQ ID NO: 270365 - RNA, 19 nt, Homo sapiens
  misc_RNA (1)...(19): siRNA sense strand
ggagguggaggcuuugauc

SEQ ID NO: 270366 - RNA, 19 nt, Homo sapiens
  misc_RNA (1)...(19): siRNA sense strand
gcaggucaccacguacuug

SEQ ID NO: 270367 - RNA, 19 nt, Homo sapiens
  misc_RNA (1)...(19): siRNA sense strand
agaaggaggagaccuggaa

SEQ ID NO: 270368 - RNA, 19 nt, Homo sapiens
  misc_RNA (1)...(19): siRNA sense strand
ucgugugggugccuuguuu

SEQ ID NO: 270369 - RNA, 19 nt, Homo sapiens
  misc_RNA (1)...(19): siRNA sense strand
ccacaucugcuucgucagu

SEQ ID NO: 270370 - RNA, 19 nt, Homo sapiens
  misc_RNA (1)...(19): siRNA sense strand
gcaccaguacuuccacauc

SEQ ID NO: 270371 - RNA, 19 nt, Homo sapiens
  misc_RNA (1)...(19): siRNA sense strand
gaugacaccucucaacaaa

SEQ ID NO: 270372 - RNA, 19 nt, Homo sapiens
  misc_RNA (1)...(19): siRNA sense strand
uaaaguugcucaucaaguu

SEQ ID NO: 270373 - RNA, 19 nt, Homo sapiens
  misc_RNA (1)...(19): siRNA sense strand
ggaagcaacugcagagaca

SEQ ID NO: 270374 - RNA, 19 nt, Homo sapiens
  misc_RNA (1)...(19): siRNA sense strand
ccaaggagcuggacacagu

SEQ ID NO: 270375 - RNA, 19 nt, Homo sapiens
  misc_RNA (1)...(19): siRNA sense strand
caacgagucugccgaagga

SEQ ID NO: 270376 - RNA, 19 nt, Homo sapiens
  misc_RNA (1)...(19): siRNA sense strand
gaucaagaccgcugucauu

SEQ ID NO: 270377 - RNA, 19 nt, Homo sapiens
  misc_RNA (1)...(19): siRNA sense strand
caaagcaaauggagaaugg

SEQ ID NO: 270378 - RNA, 19 nt, Homo sapiens
  misc_RNA (1)...(19): siRNA sense strand
gggcagaccucuucuacuc

SEQ ID NO: 270379 - RNA, 19 nt, Homo sapiens
  misc_RNA (1)...(19): siRNA sense strand
ccacguacauuaacaugau

SEQ ID NO: 270380 - RNA, 19 nt, Homo sapiens
  misc_RNA (1)...(19): siRNA sense strand
gaccgaggcuacauucaga

SEQ ID NO: 270381 - RNA, 19 nt, Homo sapiens
  misc_RNA (1)...(19): siRNA sense strand
uggagaggcucaaggagua

SEQ ID NO: 270382 - RNA, 19 nt, Homo sapiens
  misc_RNA (1)...(19): siRNA sense strand
gcagaccucuucuacucuu

SEQ ID NO: 270383 - RNA, 19 nt, Homo sapiens
  misc_RNA (1)...(19): siRNA sense strand
gaaggaagcaaagcaaaug

SEQ ID NO: 270384 - RNA, 19 nt, Homo sapiens
  misc_RNA (1)...(19): siRNA sense strand
ggccgcagaucuuaaaguu

SEQ ID NO: 270385 - RNA, 19 nt, Homo sapiens
  misc_RNA (1)...(19): siRNA sense strand
gaccuccgcuucaagauca

SEQ ID NO: 270386 - RNA, 19 nt, Homo sapiens
  misc_RNA (1)...(19): siRNA sense strand
aaggagaaauccaggagua

SEQ ID NO: 270387 - RNA, 19 nt, Homo sapiens
  misc_RNA (1)...(19): siRNA sense strand
caucugaaauggaaaccaa

SEQ ID NO: 270388 - RNA, 19 nt, Homo sapiens
  misc_RNA (1)...(19): siRNA sense strand
gcaacugcaucguucuguu

SEQ ID NO: 270389 - RNA, 19 nt, Homo sapiens
  misc_RNA (1)...(19): siRNA sense strand
ggaaagaagucggggcaua

SEQ ID NO: 270390 - RNA, 19 nt, Homo sapiens
  misc_RNA (1)...(19): siRNA sense strand
ugaacgaaauucucaaugg

SEQ ID NO: 270391 - RNA, 19 nt, Homo sapiens
  misc_RNA (1)...(19): siRNA sense strand
caagcuagaccaugaaugu

SEQ ID NO: 270392 - RNA, 19 nt, Homo sapiens
  misc_RNA (1)...(19): siRNA sense strand
guacucggaugaagaaguc

SEQ ID NO: 270393 - RNA, 19 nt, Homo sapiens
  misc_RNA (1)...(19): siRNA sense strand
gagaggaccuggacuucgu

SEQ ID NO: 270394 - RNA, 19 nt, Homo sapiens
  misc_RNA (1)...(19): siRNA sense strand
caacugcaucguucuguuu

SEQ ID NO: 270395 - RNA, 19 nt, Homo sapiens
  misc_RNA (1)...(19): siRNA sense strand
ggacuuggccacguacauu

SEQ ID NO: 270396 - RNA, 19 nt, Homo sapiens
  misc_RNA (1)...(19): siRNA sense strand
caacagcaccgcagaacug

SEQ ID NO: 270397 - RNA, 19 nt, Homo sapiens
  misc_RNA (1)...(19): siRNA sense strand
ggaaggaagcaaagcaaau

SEQ ID NO: 270398 - RNA, 19 nt, Homo sapiens
  misc_RNA (1)...(19): siRNA sense strand
gaucaaagugcuaaagcuu

SEQ ID NO: 270399 - RNA, 19 nt, Homo sapiens
  misc_RNA (1)...(19): siRNA sense strand
ugaaggugcugaagaaguc

SEQ ID NO: 270400 - RNA, 19 nt, Homo sapiens
  misc_RNA (1)...(19): siRNA sense strand
gcagagaggucuuuucuac

SEQ ID NO: 270401 - RNA, 19 nt, Homo sapiens
  misc_RNA (1)...(19): siRNA sense strand
ggaucuuucucucccauga

SEQ ID NO: 270402 - RNA, 19 nt, Homo sapiens
  misc_RNA (1)...(19): siRNA sense strand
cgaugaagaccaagacgua

SEQ ID NO: 270403 - RNA, 19 nt, Homo sapiens
  misc_RNA (1)...(19): siRNA sense strand
gcaucaacaucgccaagau

SEQ ID NO: 270404 - RNA, 19 nt, Homo sapiens
  misc_RNA (1)...(19): siRNA sense strand
gcugguagcccuagugugu

SEQ ID NO: 270405 - RNA, 19 nt, Homo sapiens
  misc_RNA (1)...(19): siRNA sense strand
agaaccagaaggccuauua

SEQ ID NO: 270406 - RNA, 19 nt, Homo sapiens
  misc_RNA (1)...(19): siRNA sense strand
ggacucaggagcacacgaa

SEQ ID NO: 270407 - RNA, 19 nt, Homo sapiens
  misc_RNA (1)...(19): siRNA sense strand
ccugggagcuggcauucaa

SEQ ID NO: 270408 - RNA, 19 nt, Homo sapiens
  misc_RNA (1)...(19): siRNA sense strand
cgaaagagaguuccaaggu

SEQ ID NO: 270409 - RNA, 19 nt, Homo sapiens
  misc_RNA (1)...(19): siRNA sense strand
uggcugagauggacaaagu

SEQ ID NO: 270410 - RNA, 19 nt, Homo sapiens
  misc_RNA (1)...(19): siRNA sense strand
gaagucugccuaccuguca

SEQ ID NO: 270411 - RNA, 19 nt, Homo sapiens
  misc_RNA (1)...(19): siRNA sense strand
cauugcaggucaccacgua

SEQ ID NO: 270412 - RNA, 19 nt, Homo sapiens
  misc_RNA (1)...(19): siRNA sense strand
cugacaagcuagaccauga

SEQ ID NO: 270413 - RNA, 19 nt, Homo sapiens
  misc_RNA (1)...(19): siRNA sense strand
ucuguuugcugcccuguuu

SEQ ID NO: 270414 - RNA, 19 nt, Homo sapiens
  misc_RNA (1)...(19): siRNA sense strand
gaccuggacuucguucuca

SEQ ID NO: 270415 - RNA, 19 nt, Homo sapiens
  misc_RNA (1)...(19): siRNA sense strand
gcaaagacaaucggaucaa

SEQ ID NO: 270416 - RNA, 19 nt, Homo sapiens
  misc_RNA (1)...(19): siRNA sense strand
gaaauucucaaugggauca

SEQ ID NO: 270417 - RNA, 19 nt, Homo sapiens
  misc_RNA (1)...(19): siRNA sense strand
caaagacaaucggaucaag

SEQ ID NO: 270418 - RNA, 19 nt, Homo sapiens
  misc_RNA (1)...(19): siRNA sense strand
cucaugagcuucuucuuca

SEQ ID NO: 270419 - RNA, 19 nt, Homo sapiens
  misc_RNA (1)...(19): siRNA sense strand
aaggagagaucaucaucga

SEQ ID NO: 270420 - RNA, 19 nt, Homo sapiens
  misc_RNA (1)...(19): siRNA sense strand
gagcugaaggugcugaaga

SEQ ID NO: 270421 - RNA, 19 nt, Homo sapiens
  misc_RNA (1)...(19): siRNA sense strand
uggaaugucacguggaaua

SEQ ID NO: 270422 - RNA, 19 nt, Homo sapiens
  misc_RNA (1)...(19): siRNA sense strand
ggaaggcccuggugaucac

SEQ ID NO: 270423 - RNA, 19 nt, Homo sapiens
  misc_RNA (1)...(19): siRNA sense strand
ccacgcugcuugcuaccuu

SEQ ID NO: 270424 - RNA, 19 nt, Homo sapiens
  misc_RNA (1)...(19): siRNA sense strand
gcgagugucucccucaaac

SEQ ID NO: 270425 - RNA, 19 nt, Homo sapiens
  misc_RNA (1)...(19): siRNA sense strand
ggacacgucggaacaaguc

SEQ ID NO: 270426 - RNA, 19 nt, Homo sapiens
  misc_RNA (1)...(19): siRNA sense strand
gaguggaauuccggaacua

SEQ ID NO: 270427 - RNA, 19 nt, Homo sapiens
  misc_RNA (1)...(19): siRNA sense strand
caaggaguauucagagacu

SEQ ID NO: 270428 - RNA, 19 nt, Homo sapiens
  misc_RNA (1)...(19): siRNA sense strand
cacaagggaucgccguguu

SEQ ID NO: 270429 - RNA, 19 nt, Homo sapiens
  misc_RNA (1)...(19): siRNA sense strand
gcgcuggcuuccaacuauu

SEQ ID NO: 270430 - RNA, 19 nt, Homo sapiens
  misc_RNA (1)...(19): siRNA sense strand
guacugggacuacaugaag

SEQ ID NO: 270431 - RNA, 19 nt, Homo sapiens
  misc_RNA (1)...(19): siRNA sense strand
gcaaagcaaauggagaaug

SEQ ID NO: 270432 - RNA, 19 nt, Homo sapiens
  misc_RNA (1)...(19): siRNA sense strand
aagcaaagcaaauggagaa

SEQ ID NO: 270433 - RNA, 19 nt, Homo sapiens
  misc_RNA (1)...(19): siRNA sense strand
gcagguggacgucaucauc

SEQ ID NO: 270434 - RNA, 19 nt, Homo sapiens
  misc_RNA (1)...(19): siRNA sense strand
gacuuggccacguacauua

SEQ ID NO: 270435 - RNA, 19 nt, Homo sapiens
  misc_RNA (1)...(19): siRNA sense strand
ucauggacuuggccacgua

SEQ ID NO: 270436 - RNA, 19 nt, Homo sapiens
  misc_RNA (1)...(19): siRNA sense strand
gaaggaaugcgccaagacu

SEQ ID NO: 270437 - RNA, 19 nt, Homo sapiens
  misc_RNA (1)...(19): siRNA sense strand
cagggaucaugcucacuuu

SEQ ID NO: 270438 - RNA, 19 nt, Homo sapiens
  misc_RNA (1)...(19): siRNA sense strand
ccaguacucggaugaagaa

SEQ ID NO: 270439 - RNA, 19 nt, Homo sapiens
  misc_RNA (1)...(19): siRNA sense strand
ggucaagcuuuccguguac

SEQ ID NO: 270440 - RNA, 19 nt, Homo sapiens
  misc_RNA (1)...(19): siRNA sense strand
uaaagaacuggaagaagga

SEQ ID NO: 270441 - RNA, 19 nt, Homo sapiens
  misc_RNA (1)...(19): siRNA sense strand
cucagugucuuacucauug

SEQ ID NO: 270442 - RNA, 19 nt, Homo sapiens
  misc_RNA (1)...(19): siRNA sense strand
ucaagcugaugaacgaaau

SEQ ID NO: 270443 - RNA, 19 nt, Homo sapiens
  misc_RNA (1)...(19): siRNA sense strand
ggaucaugcucacuuucug

SEQ ID NO: 270444 - RNA, 19 nt, Homo sapiens
  misc_RNA (1)...(19): siRNA sense strand
cagcagcuccuccuccuau

SEQ ID NO: 270445 - RNA, 19 nt, Homo sapiens
  misc_RNA (1)...(19): siRNA sense strand
gcacagcaugagcuacuug

SEQ ID NO: 270446 - RNA, 19 nt, Homo sapiens
  misc_RNA (1)...(19): siRNA sense strand
ggaucaaagugcuaaagcu

SEQ ID NO: 270447 - RNA, 19 nt, Homo sapiens
  misc_RNA (1)...(19): siRNA sense strand
gaugaacgaaauucucaau

SEQ ID NO: 270448 - RNA, 19 nt, Homo sapiens
  misc_RNA (1)...(19): siRNA sense strand
gcccgucaaugcugugaug

SEQ ID NO: 270449 - RNA, 19 nt, Homo sapiens
  misc_RNA (1)...(19): siRNA sense strand
augaggagguggaggcuuu

SEQ ID NO: 270450 - RNA, 19 nt, Homo sapiens
  misc_RNA (1)...(19): siRNA sense strand
ccaagguggaugcgaauga

SEQ ID NO: 270451 - RNA, 19 nt, Homo sapiens
  misc_RNA (1)...(19): siRNA sense strand
ucaaacgccugaggaucuu

SEQ ID NO: 270452 - RNA, 19 nt, Homo sapiens
  misc_RNA (1)...(19): siRNA sense strand
ggucagcccaacucucuug

SEQ ID NO: 270453 - RNA, 19 nt, Homo sapiens
  misc_RNA (1)...(19): siRNA sense strand
gaccaugaaugugcagaag

SEQ ID NO: 270454 - RNA, 19 nt, Homo sapiens
  misc_RNA (1)...(19): siRNA sense strand
auuggugccugcaucguua

SEQ ID NO: 270455 - RNA, 19 nt, Homo sapiens
  misc_RNA (1)...(19): siRNA sense strand
gggaaggaagcaaagcaaa

SEQ ID NO: 270456 - RNA, 19 nt, Homo sapiens
  misc_RNA (1)...(19): siRNA sense strand
gggcccuacuuccucauga

SEQ ID NO: 270457 - RNA, 19 nt, Homo sapiens
  misc_RNA (1)...(19): siRNA sense strand
guucaugggcucccuguuc

SEQ ID NO: 270458 - RNA, 19 nt, Homo sapiens
  misc_RNA (1)...(19): siRNA sense strand
cagggcaggucaagcuuuc

SEQ ID NO: 270459 - RNA, 19 nt, Homo sapiens
  misc_RNA (1)...(19): siRNA sense strand
ugauggcgaugaagaccaa

SEQ ID NO: 270460 - RNA, 19 nt, Homo sapiens
  misc_RNA (1)...(19): siRNA sense strand
gagauugucaaccucaugu

SEQ ID NO: 270461 - RNA, 19 nt, Homo sapiens
  misc_RNA (1)...(19): siRNA sense strand
acaccgugcugcuguuugu

SEQ ID NO: 270462 - RNA, 19 nt, Homo sapiens
  misc_RNA (1)...(19): siRNA sense strand
ucuuaaaguugcucaucaa

SEQ ID NO: 270463 - RNA, 19 nt, Homo sapiens
  misc_RNA (1)...(19): siRNA sense strand
ucccggaggucaucaagau

SEQ ID NO: 270464 - RNA, 19 nt, Homo sapiens
  misc_RNA (1)...(19): siRNA sense strand
ggacagugcagggaagcaa

SEQ ID NO: 270465 - RNA, 19 nt, Homo sapiens
  misc_RNA (1)...(19): siRNA sense strand
ggagguggaggcuuugauc

SEQ ID NO: 270466 - RNA, 19 nt, Homo sapiens
  misc_RNA (1)...(19): siRNA sense strand
gcaggucaccacguacuug

SEQ ID NO: 270467 - RNA, 19 nt, Homo sapiens
  misc_RNA (1)...(19): siRNA sense strand
agaaggaggagaccuggaa

SEQ ID NO: 270468 - RNA, 19 nt, Homo sapiens
  misc_RNA (1)...(19): siRNA sense strand
ucgugugggugccuuguuu

SEQ ID NO: 270469 - RNA, 19 nt, Homo sapiens
  misc_RNA (1)...(19): siRNA sense strand
ccacaucugcuucgucagu

SEQ ID NO: 270470 - RNA, 19 nt, Homo sapiens
  misc_RNA (1)...(19): siRNA sense strand
gcaccaguacuuccacauc

SEQ ID NO: 270471 - RNA, 19 nt, Homo sapiens
  misc_RNA (1)...(19): siRNA sense strand
gaugacaccucucaacaaa

SEQ ID NO: 270472 - RNA, 19 nt, Homo sapiens
  misc_RNA (1)...(19): siRNA sense strand
uaaaguugcucaucaaguu

SEQ ID NO: 270473 - RNA, 19 nt, Homo sapiens
  misc_RNA (1)...(19): siRNA sense strand
ggaagcaacugcagagaca

SEQ ID NO: 270474 - RNA, 19 nt, Homo sapiens
  misc_RNA (1)...(19): siRNA sense strand
ccaaggagcuggacacagu

SEQ ID NO: 270475 - RNA, 19 nt, Homo sapiens
  misc_RNA (1)...(19): siRNA sense strand
caacgagucugccgaagga

SEQ ID NO: 270476 - RNA, 19 nt, Homo sapiens
  misc_RNA (1)...(19): siRNA sense strand
gaucaagaccgcugucauu

SEQ ID NO: 270477 - RNA, 19 nt, Homo sapiens
  misc_RNA (1)...(19): siRNA sense strand
caaagcaaauggagaaugg

SEQ ID NO: 270478 - RNA, 19 nt, Homo sapiens
  misc_RNA (1)...(19): siRNA sense strand
gggcagaccucuucuacuc

SEQ ID NO: 270479 - RNA, 19 nt, Homo sapiens
  misc_RNA (1)...(19): siRNA sense strand
ccacguacauuaacaugau

SEQ ID NO: 270480 - RNA, 19 nt, Homo sapiens
  misc_RNA (1)...(19): siRNA sense strand
gaccgaggcuacauucaga

SEQ ID NO: 270481 - RNA, 19 nt, Homo sapiens
  misc_RNA (1)...(19): siRNA sense strand
uggagaggcucaaggagua

SEQ ID NO: 270482 - RNA, 19 nt, Homo sapiens
  misc_RNA (1)...(19): siRNA sense strand
gcagaccucuucuacucuu

SEQ ID NO: 270483 - RNA, 19 nt, Homo sapiens
  misc_RNA (1)...(19): siRNA sense strand
gaaggaagcaaagcaaaug

SEQ ID NO: 270484 - RNA, 19 nt, Homo sapiens
  misc_RNA (1)...(19): siRNA sense strand
ggccgcagaucuuaaaguu

SEQ ID NO: 270485 - RNA, 19 nt, Homo sapiens
  misc_RNA (1)...(19): siRNA sense strand
gaccuccgcuucaagauca

SEQ ID NO: 270486 - RNA, 19 nt, Homo sapiens
  misc_RNA (1)...(19): siRNA sense strand
aaggagaaauccaggagua

SEQ ID NO: 270487 - RNA, 19 nt, Homo sapiens
  misc_RNA (1)...(19): siRNA sense strand
caucugaaauggaaaccaa

SEQ ID NO: 270488 - RNA, 19 nt, Homo sapiens
  misc_RNA (1)...(19): siRNA sense strand
gcaacugcaucguucuguu

SEQ ID NO: 270489 - RNA, 19 nt, Homo sapiens
  misc_RNA (1)...(19): siRNA sense strand
ggaaagaagucggggcaua

SEQ ID NO: 270490 - RNA, 19 nt, Homo sapiens
  misc_RNA (1)...(19): siRNA sense strand
ugaacgaaauucucaaugg

SEQ ID NO: 270491 - RNA, 19 nt, Homo sapiens
  misc_RNA (1)...(19): siRNA sense strand
caagcuagaccaugaaugu

SEQ ID NO: 270492 - RNA, 19 nt, Homo sapiens
  misc_RNA (1)...(19): siRNA sense strand
guacucggaugaagaaguc

SEQ ID NO: 270493 - RNA, 19 nt, Homo sapiens
  misc_RNA (1)...(19): siRNA sense strand
gagaggaccuggacuucgu

SEQ ID NO: 270494 - RNA, 19 nt, Homo sapiens
  misc_RNA (1)...(19): siRNA sense strand
caacugcaucguucuguuu

SEQ ID NO: 270495 - RNA, 19 nt, Homo sapiens
  misc_RNA (1)...(19): siRNA sense strand
ggacuuggccacguacauu

SEQ ID NO: 270496 - RNA, 19 nt, Homo sapiens
  misc_RNA (1)...(19): siRNA sense strand
caacagcaccgcagaacug

SEQ ID NO: 270497 - RNA, 19 nt, Homo sapiens
  misc_RNA (1)...(19): siRNA sense strand
ggaaggaagcaaagcaaau

SEQ ID NO: 270498 - RNA, 19 nt, Homo sapiens
  misc_RNA (1)...(19): siRNA sense strand
gaucaaagugcuaaagcuu

SEQ ID NO: 270499 - RNA, 19 nt, Homo sapiens
  misc_RNA (1)...(19): siRNA sense strand
ugaaggugcugaagaaguc

SEQ ID NO: 270500 - RNA, 19 nt, Homo sapiens
  misc_RNA (1)...(19): siRNA sense strand
gcagagaggucuuuucuac

SEQ ID NO: 270501 - RNA, 19 nt, Homo sapiens
  misc_RNA (1)...(19): siRNA sense strand
ggaucuuucucucccauga

SEQ ID NO: 270502 - RNA, 19 nt, Homo sapiens
  misc_RNA (1)...(19): siRNA sense strand
cgaugaagaccaagacgua

SEQ ID NO: 270503 - RNA, 19 nt, Homo sapiens
  misc_RNA (1)...(19): siRNA sense strand
gcaucaacaucgccaagau

SEQ ID NO: 270504 - RNA, 19 nt, Homo sapiens
  misc_RNA (1)...(19): siRNA sense strand
gcugguagcccuagugugu

SEQ ID NO: 270505 - RNA, 19 nt, Homo sapiens
  misc_RNA (1)...(19): siRNA sense strand
agaaccagaaggccuauua

SEQ ID NO: 270506 - RNA, 19 nt, Homo sapiens
  misc_RNA (1)...(19): siRNA sense strand
ggacucaggagcacacgaa

SEQ ID NO: 270507 - RNA, 19 nt, Homo sapiens
  misc_RNA (1)...(19): siRNA sense strand
ccugggagcuggcauucaa

SEQ ID NO: 270508 - RNA, 19 nt, Homo sapiens
  misc_RNA (1)...(19): siRNA sense strand
cgaaagagaguuccaaggu

SEQ ID NO: 270509 - RNA, 19 nt, Homo sapiens
  misc_RNA (1)...(19): siRNA sense strand
uggcugagauggacaaagu

SEQ ID NO: 270510 - RNA, 19 nt, Homo sapiens
  misc_RNA (1)...(19): siRNA sense strand
gaagucugccuaccuguca

SEQ ID NO: 270511 - RNA, 19 nt, Homo sapiens
  misc_RNA (1)...(19): siRNA sense strand
cauugcaggucaccacgua

SEQ ID NO: 270512 - RNA, 19 nt, Homo sapiens
  misc_RNA (1)...(19): siRNA sense strand
cugacaagcuagaccauga

SEQ ID NO: 270513 - RNA, 19 nt, Homo sapiens
  misc_RNA (1)...(19): siRNA sense strand
ucuguuugcugcccuguuu

SEQ ID NO: 270514 - RNA, 19 nt, Homo sapiens
  misc_RNA (1)...(19): siRNA sense strand
gaccuggacuucguucuca

SEQ ID NO: 270515 - RNA, 19 nt, Homo sapiens
  misc_RNA (1)...(19): siRNA sense strand
gcaaagacaaucggaucaa

SEQ ID NO: 270516 - RNA, 19 nt, Homo sapiens
  misc_RNA (1)...(19): siRNA sense strand
gaaauucucaaugggauca

SEQ ID NO: 270517 - RNA, 19 nt, Homo sapiens
  misc_RNA (1)...(19): siRNA sense strand
caaagacaaucggaucaag

SEQ ID NO: 270518 - RNA, 19 nt, Homo sapiens
  misc_RNA (1)...(19): siRNA sense strand
cucaugagcuucuucuuca

SEQ ID NO: 270519 - RNA, 19 nt, Homo sapiens
  misc_RNA (1)...(19): siRNA sense strand
aaggagagaucaucaucga

SEQ ID NO: 270520 - RNA, 19 nt, Homo sapiens
  misc_RNA (1)...(19): siRNA sense strand
gagcugaaggugcugaaga

SEQ ID NO: 270521 - RNA, 19 nt, Homo sapiens
  misc_RNA (1)...(19): siRNA sense strand
uggaaugucacguggaaua

SEQ ID NO: 270522 - RNA, 19 nt, Homo sapiens
  misc_RNA (1)...(19): siRNA sense strand
ggaaggcccuggugaucac

SEQ ID NO: 270523 - RNA, 19 nt, Homo sapiens
  misc_RNA (1)...(19): siRNA sense strand
ccacgcugcuugcuaccuu

SEQ ID NO: 270524 - RNA, 19 nt, Homo sapiens
  misc_RNA (1)...(19): siRNA sense strand
gcgagugucucccucaaac

SEQ ID NO: 270525 - RNA, 19 nt, Homo sapiens
  misc_RNA (1)...(19): siRNA sense strand
ggacacgucggaacaaguc

SEQ ID NO: 270526 - RNA, 19 nt, Homo sapiens
  misc_RNA (1)...(19): siRNA sense strand
gaguggaauuccggaacua

SEQ ID NO: 270527 - RNA, 19 nt, Homo sapiens
  misc_RNA (1)...(19): siRNA sense strand
caaggaguauucagagacu

SEQ ID NO: 270528 - RNA, 19 nt, Homo sapiens
  misc_RNA (1)...(19): siRNA sense strand
cacaagggaucgccguguu

SEQ ID NO: 270529 - RNA, 19 nt, Homo sapiens
  misc_RNA (1)...(19): siRNA sense strand
gcgcuggcuuccaacuauu

SEQ ID NO: 270530 - RNA, 19 nt, Homo sapiens
  misc_RNA (1)...(19): siRNA sense strand
guacugggacuacaugaag

SEQ ID NO: 270531 - RNA, 19 nt, Homo sapiens
  misc_RNA (1)...(19): siRNA sense strand
gcaaagcaaauggagaaug

SEQ ID NO: 270532 - RNA, 19 nt, Homo sapiens
  misc_RNA (1)...(19): siRNA sense strand
aagcaaagcaaauggagaa

SEQ ID NO: 270533 - RNA, 19 nt, Homo sapiens
  misc_RNA (1)...(19): siRNA sense strand
gcagguggacgucaucauc

SEQ ID NO: 270534 - RNA, 19 nt, Homo sapiens
  misc_RNA (1)...(19): siRNA sense strand
gacuuggccacguacauua

SEQ ID NO: 270535 - RNA, 19 nt, Homo sapiens
  misc_RNA (1)...(19): siRNA sense strand
ucauggacuuggccacgua

SEQ ID NO: 270536 - RNA, 19 nt, Homo sapiens
  misc_RNA (1)...(19): siRNA sense strand
gaaggaaugcgccaagacu

SEQ ID NO: 270537 - RNA, 19 nt, Homo sapiens
  misc_RNA (1)...(19): siRNA sense strand
cagggaucaugcucacuuu

SEQ ID NO: 270538 - RNA, 19 nt, Homo sapiens
  misc_RNA (1)...(19): siRNA sense strand
ccaguacucggaugaagaa

SEQ ID NO: 270539 - RNA, 19 nt, Homo sapiens
  misc_RNA (1)...(19): siRNA sense strand
ggucaagcuuuccguguac

SEQ ID NO: 270540 - RNA, 19 nt, Homo sapiens
  misc_RNA (1)...(19): siRNA sense strand
uaaagaacuggaagaagga

SEQ ID NO: 270541 - RNA, 19 nt, Homo sapiens
  misc_RNA (1)...(19): siRNA sense strand
cucagugucuuacucauug

SEQ ID NO: 270542 - RNA, 19 nt, Homo sapiens
  misc_RNA (1)...(19): siRNA sense strand
ucaagcugaugaacgaaau

SEQ ID NO: 270543 - RNA, 19 nt, Homo sapiens
  misc_RNA (1)...(19): siRNA sense strand
ggaucaugcucacuuucug

SEQ ID NO: 270544 - RNA, 19 nt, Homo sapiens
  misc_RNA (1)...(19): siRNA sense strand
cagcagcuccuccuccuau

SEQ ID NO: 270545 - RNA, 19 nt, Homo sapiens
  misc_RNA (1)...(19): siRNA sense strand
gcacagcaugagcuacuug

SEQ ID NO: 270546 - RNA, 19 nt, Homo sapiens
  misc_RNA (1)...(19): siRNA sense strand
ggaucaaagugcuaaagcu

SEQ ID NO: 270547 - RNA, 19 nt, Homo sapiens
  misc_RNA (1)...(19): siRNA sense strand
gaugaacgaaauucucaau

SEQ ID NO: 270548 - RNA, 19 nt, Homo sapiens
  misc_RNA (1)...(19): siRNA sense strand
gcccgucaaugcugugaug

SEQ ID NO: 270549 - RNA, 19 nt, Homo sapiens
  misc_RNA (1)...(19): siRNA sense strand
augaggagguggaggcuuu

SEQ ID NO: 270550 - RNA, 19 nt, Homo sapiens
  misc_RNA (1)...(19): siRNA sense strand
ccaagguggaugcgaauga

SEQ ID NO: 270551 - RNA, 19 nt, Homo sapiens
  misc_RNA (1)...(19): siRNA sense strand
ucaaacgccugaggaucuu

SEQ ID NO: 270552 - RNA, 19 nt, Homo sapiens
  misc_RNA (1)...(19): siRNA sense strand
ggucagcccaacucucuug

SEQ ID NO: 270553 - RNA, 19 nt, Homo sapiens
  misc_RNA (1)...(19): siRNA sense strand
gaccaugaaugugcagaag

SEQ ID NO: 270554 - RNA, 19 nt, Homo sapiens
  misc_RNA (1)...(19): siRNA sense strand
auuggugccugcaucguua

SEQ ID NO: 270555 - RNA, 19 nt, Homo sapiens
  misc_RNA (1)...(19): siRNA sense strand
gggaaggaagcaaagcaaa

SEQ ID NO: 270556 - RNA, 19 nt, Homo sapiens
  misc_RNA (1)...(19): siRNA sense strand
gggcccuacuuccucauga

SEQ ID NO: 270557 - RNA, 19 nt, Homo sapiens
  misc_RNA (1)...(19): siRNA sense strand
guucaugggcucccuguuc

SEQ ID NO: 270558 - RNA, 19 nt, Homo sapiens
  misc_RNA (1)...(19): siRNA sense strand
cagggcaggucaagcuuuc

SEQ ID NO: 270559 - RNA, 19 nt, Homo sapiens
  misc_RNA (1)...(19): siRNA sense strand
ugauggcgaugaagaccaa

SEQ ID NO: 270560 - RNA, 19 nt, Homo sapiens
  misc_RNA (1)...(19): siRNA sense strand
gagauugucaaccucaugu

SEQ ID NO: 270561 - RNA, 19 nt, Homo sapiens
  misc_RNA (1)...(19): siRNA sense strand
acaccgugcugcuguuugu

SEQ ID NO: 270562 - RNA, 19 nt, Homo sapiens
  misc_RNA (1)...(19): siRNA sense strand
ucuuaaaguugcucaucaa

SEQ ID NO: 270563 - RNA, 19 nt, Homo sapiens
  misc_RNA (1)...(19): siRNA sense strand
ucccggaggucaucaagau

SEQ ID NO: 270564 - RNA, 19 nt, Homo sapiens
  misc_RNA (1)...(19): siRNA sense strand
ggacagugcagggaagcaa

SEQ ID NO: 270565 - RNA, 19 nt, Homo sapiens
  misc_RNA (1)...(19): siRNA sense strand
ggagguggaggcuuugauc

SEQ ID NO: 270566 - RNA, 19 nt, Homo sapiens
  misc_RNA (1)...(19): siRNA sense strand
gcaggucaccacguacuug

SEQ ID NO: 270567 - RNA, 19 nt, Homo sapiens
  misc_RNA (1)...(19): siRNA sense strand
agaaggaggagaccuggaa

SEQ ID NO: 270568 - RNA, 19 nt, Homo sapiens
  misc_RNA (1)...(19): siRNA sense strand
ucgugugggugccuuguuu

SEQ ID NO: 270569 - RNA, 19 nt, Homo sapiens
  misc_RNA (1)...(19): siRNA sense strand
ccacaucugcuucgucagu

SEQ ID NO: 270570 - RNA, 19 nt, Homo sapiens
  misc_RNA (1)...(19): siRNA sense strand
gcaccaguacuuccacauc

SEQ ID NO: 270571 - RNA, 19 nt, Homo sapiens
  misc_RNA (1)...(19): siRNA sense strand
gaacucacuugaugggauu

SEQ ID NO: 270572 - RNA, 19 nt, Homo sapiens
  misc_RNA (1)...(19): siRNA sense strand
uugaugggauuauucguua

SEQ ID NO: 270573 - RNA, 19 nt, Homo sapiens
  misc_RNA (1)...(19): siRNA sense strand
gacuggaacucacuugaug

SEQ ID NO: 270574 - RNA, 19 nt, Homo sapiens
  misc_RNA (1)...(19): siRNA sense strand
gccaacagacuauguggaa

SEQ ID NO: 270575 - RNA, 19 nt, Homo sapiens
  misc_RNA (1)...(19): siRNA sense strand
ggacuggaacucacuugau

SEQ ID NO: 270576 - RNA, 19 nt, Homo sapiens
  misc_RNA (1)...(19): siRNA sense strand
gaaccugacauggccauuc

SEQ ID NO: 270577 - RNA, 19 nt, Homo sapiens
  misc_RNA (1)...(19): siRNA sense strand
caggaggaccgcuaugaga

SEQ ID NO: 270578 - RNA, 19 nt, Homo sapiens
  misc_RNA (1)...(19): siRNA sense strand
ggaaccaccgcuuaaaucg

SEQ ID NO: 270579 - RNA, 19 nt, Homo sapiens
  misc_RNA (1)...(19): siRNA sense strand
ugagugauccggaggagau

SEQ ID NO: 270580 - RNA, 19 nt, Homo sapiens
  misc_RNA (1)...(19): siRNA sense strand
ugaugggauuauucguuaa

SEQ ID NO: 270581 - RNA, 19 nt, Homo sapiens
  misc_RNA (1)...(19): siRNA sense strand
gcaggaggaccgcuaugag

SEQ ID NO: 270582 - RNA, 19 nt, Homo sapiens
  misc_RNA (1)...(19): siRNA sense strand
ccucugcaccaaagaaguu

SEQ ID NO: 270583 - RNA, 19 nt, Homo sapiens
  misc_RNA (1)...(19): siRNA sense strand
gcagccaacagacuaugug

SEQ ID NO: 270584 - RNA, 19 nt, Homo sapiens
  misc_RNA (1)...(19): siRNA sense strand
uaaaucggacuggaacuca

SEQ ID NO: 270585 - RNA, 19 nt, Homo sapiens
  misc_RNA (1)...(19): siRNA sense strand
ucacuugaugggauuauuc

SEQ ID NO: 270586 - RNA, 19 nt, Homo sapiens
  misc_RNA (1)...(19): siRNA sense strand
ggaggaccgcuaugagaac

SEQ ID NO: 270587 - RNA, 19 nt, Homo sapiens
  misc_RNA (1)...(19): siRNA sense strand
uggaaccaccgcuuaaauc

SEQ ID NO: 270588 - RNA, 19 nt, Homo sapiens
  misc_RNA (1)...(19): siRNA sense strand
ggaagaaacuaaagaacaa

SEQ ID NO: 270589 - RNA, 19 nt, Homo sapiens
  misc_RNA (1)...(19): siRNA sense strand
gacacaagcucacgugaua

SEQ ID NO: 270590 - RNA, 19 nt, Homo sapiens
  misc_RNA (1)...(19): siRNA sense strand
cgacagaaguguuugauga

SEQ ID NO: 270591 - RNA, 19 nt, Homo sapiens
  misc_RNA (1)...(19): siRNA sense strand
gagagaaucugcaaaguca

SEQ ID NO: 270592 - RNA, 19 nt, Homo sapiens
  misc_RNA (1)...(19): siRNA sense strand
auaaagagauggcuacuaa

SEQ ID NO: 270593 - RNA, 19 nt, Homo sapiens
  misc_RNA (1)...(19): siRNA sense strand
agaagaagcugaauguaaa

SEQ ID NO: 270594 - RNA, 19 nt, Homo sapiens
  misc_RNA (1)...(19): siRNA sense strand
caaacaaucuacagagaaa

SEQ ID NO: 270595 - RNA, 19 nt, Homo sapiens
  misc_RNA (1)...(19): siRNA sense strand
gaccaugacuguugaggua

SEQ ID NO: 270596 - RNA, 19 nt, Homo sapiens
  misc_RNA (1)...(19): siRNA sense strand
gaaggaggaugaaguggaa

SEQ ID NO: 270597 - RNA, 19 nt, Homo sapiens
  misc_RNA (1)...(19): siRNA sense strand
guagaagguuccacuguaa

SEQ ID NO: 270598 - RNA, 19 nt, Homo sapiens
  misc_RNA (1)...(19): siRNA sense strand
caaaggaagucagcaguuu

SEQ ID NO: 270599 - RNA, 19 nt, Homo sapiens
  misc_RNA (1)...(19): siRNA sense strand
gguagaagguuccacugua

SEQ ID NO: 270600 - RNA, 19 nt, Homo sapiens
  misc_RNA (1)...(19): siRNA sense strand
caaagugaguguagcaauu

SEQ ID NO: 270601 - RNA, 19 nt, Homo sapiens
  misc_RNA (1)...(19): siRNA sense strand
gacagaaccucuugaacaa

SEQ ID NO: 270602 - RNA, 19 nt, Homo sapiens
  misc_RNA (1)...(19): siRNA sense strand
gaaggaggaugcccaggaa

SEQ ID NO: 270603 - RNA, 19 nt, Homo sapiens
  misc_RNA (1)...(19): siRNA sense strand
gaaacaggaucaaccuuca

SEQ ID NO: 270604 - RNA, 19 nt, Homo sapiens
  misc_RNA (1)...(19): siRNA sense strand
gaagucagaugaagucgau

SEQ ID NO: 270605 - RNA, 19 nt, Homo sapiens
  misc_RNA (1)...(19): siRNA sense strand
gagcacagccucugaaaug

SEQ ID NO: 270606 - RNA, 19 nt, Homo sapiens
  misc_RNA (1)...(19): siRNA sense strand
gcaaagccacgcagaaauu

SEQ ID NO: 270607 - RNA, 19 nt, Homo sapiens
  misc_RNA (1)...(19): siRNA sense strand
ucaagaggcugaccaguau

SEQ ID NO: 270608 - RNA, 19 nt, Homo sapiens
  misc_RNA (1)...(19): siRNA sense strand
gaaacuguauccauucugu

SEQ ID NO: 270609 - RNA, 19 nt, Homo sapiens
  misc_RNA (1)...(19): siRNA sense strand
gaagcagcauccaaagaaa

SEQ ID NO: 270610 - RNA, 19 nt, Homo sapiens
  misc_RNA (1)...(19): siRNA sense strand
ggaaagugauaaagaagau

SEQ ID NO: 270611 - RNA, 19 nt, Homo sapiens
  misc_RNA (1)...(19): siRNA sense strand
ccacugagguguccaagga

SEQ ID NO: 270612 - RNA, 19 nt, Homo sapiens
  misc_RNA (1)...(19): siRNA sense strand
ggacaagcacauucugaua

SEQ ID NO: 270613 - RNA, 19 nt, Homo sapiens
  misc_RNA (1)...(19): siRNA sense strand
caacgaagaugacucugau

SEQ ID NO: 270614 - RNA, 19 nt, Homo sapiens
  misc_RNA (1)...(19): siRNA sense strand
ucacugaaguugcccuuaa

SEQ ID NO: 270615 - RNA, 19 nt, Homo sapiens
  misc_RNA (1)...(19): siRNA sense strand
gagggcagcuaccauuauu

SEQ ID NO: 270616 - RNA, 19 nt, Homo sapiens
  misc_RNA (1)...(19): siRNA sense strand
gaugguaguucaagucgaa

SEQ ID NO: 270617 - RNA, 19 nt, Homo sapiens
  misc_RNA (1)...(19): siRNA sense strand
gcaguaaacuuguccaaaa

SEQ ID NO: 270618 - RNA, 19 nt, Homo sapiens
  misc_RNA (1)...(19): siRNA sense strand
gaaaaggucuuaggagaaa

SEQ ID NO: 270619 - RNA, 19 nt, Homo sapiens
  misc_RNA (1)...(19): siRNA sense strand
ggaggagacacccgaaaua

SEQ ID NO: 270620 - RNA, 19 nt, Homo sapiens
  misc_RNA (1)...(19): siRNA sense strand
ccaguaugcugaugagaaa

SEQ ID NO: 270621 - RNA, 19 nt, Homo sapiens
  misc_RNA (1)...(19): siRNA sense strand
gcagggaaguccacuaaag

SEQ ID NO: 270622 - RNA, 19 nt, Homo sapiens
  misc_RNA (1)...(19): siRNA sense strand
ggaagacacucuagagcau

SEQ ID NO: 270623 - RNA, 19 nt, Homo sapiens
  misc_RNA (1)...(19): siRNA sense strand
cagaagaagcugaauguaa

SEQ ID NO: 270624 - RNA, 19 nt, Homo sapiens
  misc_RNA (1)...(19): siRNA sense strand
gagaaguaauugcagaaga

SEQ ID NO: 270625 - RNA, 19 nt, Homo sapiens
  misc_RNA (1)...(19): siRNA sense strand
ggaaauccaugaggagaau

SEQ ID NO: 270626 - RNA, 19 nt, Homo sapiens
  misc_RNA (1)...(19): siRNA sense strand
gaaagagacggauguagug

SEQ ID NO: 270627 - RNA, 19 nt, Homo sapiens
  misc_RNA (1)...(19): siRNA sense strand
ggagaaagaaggagaggaa

SEQ ID NO: 270628 - RNA, 19 nt, Homo sapiens
  misc_RNA (1)...(19): siRNA sense strand
gaagaaacagccaccgaaa

SEQ ID NO: 270629 - RNA, 19 nt, Homo sapiens
  misc_RNA (1)...(19): siRNA sense strand
ggagacacccgaaauaauc

SEQ ID NO: 270630 - RNA, 19 nt, Homo sapiens
  misc_RNA (1)...(19): siRNA sense strand
gagaucacgugucuggaaa

SEQ ID NO: 270631 - RNA, 19 nt, Homo sapiens
  misc_RNA (1)...(19): siRNA sense strand
ggaaagagaaguaauugca

SEQ ID NO: 270632 - RNA, 19 nt, Homo sapiens
  misc_RNA (1)...(19): siRNA sense strand
ggagaaacugccaacauuu

SEQ ID NO: 270633 - RNA, 19 nt, Homo sapiens
  misc_RNA (1)...(19): siRNA sense strand
gagcaaagccacgcagaaa

SEQ ID NO: 270634 - RNA, 19 nt, Homo sapiens
  misc_RNA (1)...(19): siRNA sense strand
gcacagugaaucagauaaa

SEQ ID NO: 270635 - RNA, 19 nt, Homo sapiens
  misc_RNA (1)...(19): siRNA sense strand
gaaaagaccaugacuguug

SEQ ID NO: 270636 - RNA, 19 nt, Homo sapiens
  misc_RNA (1)...(19): siRNA sense strand
gaugaaacaccaauuacuu

SEQ ID NO: 270637 - RNA, 19 nt, Homo sapiens
  misc_RNA (1)...(19): siRNA sense strand
gaagaaagagacggaugua

SEQ ID NO: 270638 - RNA, 19 nt, Homo sapiens
  misc_RNA (1)...(19): siRNA sense strand
agaaguaauugcagaagaa

SEQ ID NO: 270639 - RNA, 19 nt, Homo sapiens
  misc_RNA (1)...(19): siRNA sense strand
caaagaaagcgaacccaaa

SEQ ID NO: 270640 - RNA, 19 nt, Homo sapiens
  misc_RNA (1)...(19): siRNA sense strand
uggcguaccugacauagaa

SEQ ID NO: 270641 - RNA, 19 nt, Homo sapiens
  misc_RNA (1)...(19): siRNA sense strand
aaauagaaguccaccaaga

SEQ ID NO: 270642 - RNA, 19 nt, Homo sapiens
  misc_RNA (1)...(19): siRNA sense strand
caacccaugugaaugaaga

SEQ ID NO: 270643 - RNA, 19 nt, Homo sapiens
  misc_RNA (1)...(19): siRNA sense strand
gaggagacacccgaaauaa

SEQ ID NO: 270644 - RNA, 19 nt, Homo sapiens
  misc_RNA (1)...(19): siRNA sense strand
agagagagaugguaguuca

SEQ ID NO: 270645 - RNA, 19 nt, Homo sapiens
  misc_RNA (1)...(19): siRNA sense strand
acaagcacauucugauauu

SEQ ID NO: 270646 - RNA, 19 nt, Homo sapiens
  misc_RNA (1)...(19): siRNA sense strand
gauguaguguugaaaguag

SEQ ID NO: 270647 - RNA, 19 nt, Homo sapiens
  misc_RNA (1)...(19): siRNA sense strand
uagcaagucugcagaaucu

SEQ ID NO: 270648 - RNA, 19 nt, Homo sapiens
  misc_RNA (1)...(19): siRNA sense strand
auagagaagucacuaguug

SEQ ID NO: 270649 - RNA, 19 nt, Homo sapiens
  misc_RNA (1)...(19): siRNA sense strand
agagauggcuacuaaguca

SEQ ID NO: 270650 - RNA, 19 nt, Homo sapiens
  misc_RNA (1)...(19): siRNA sense strand
aggagaaacugccaacauu

SEQ ID NO: 270651 - RNA, 19 nt, Homo sapiens
  misc_RNA (1)...(19): siRNA sense strand
gaaagacgagauuguggaa

SEQ ID NO: 270652 - RNA, 19 nt, Homo sapiens
  misc_RNA (1)...(19): siRNA sense strand
gaagagaccacagaaaugg

SEQ ID NO: 270653 - RNA, 19 nt, Homo sapiens
  misc_RNA (1)...(19): siRNA sense strand
gggaggagaccaccagaaa

SEQ ID NO: 270654 - RNA, 19 nt, Homo sapiens
  misc_RNA (1)...(19): siRNA sense strand
caaaagagacuccgauaaa

SEQ ID NO: 270655 - RNA, 19 nt, Homo sapiens
  misc_RNA (1)...(19): siRNA sense strand
caggaugaaacaccaauua

SEQ ID NO: 270656 - RNA, 19 nt, Homo sapiens
  misc_RNA (1)...(19): siRNA sense strand
ggaugaugcucuugaacug

SEQ ID NO: 270657 - RNA, 19 nt, Homo sapiens
  misc_RNA (1)...(19): siRNA sense strand
gcagagagcagaggcagaa

SEQ ID NO: 270658 - RNA, 19 nt, Homo sapiens
  misc_RNA (1)...(19): siRNA sense strand
ugacagaaccucuugaaca

SEQ ID NO: 270659 - RNA, 19 nt, Homo sapiens
  misc_RNA (1)...(19): siRNA sense strand
gauaucugcuucagugaca

SEQ ID NO: 270660 - RNA, 19 nt, Homo sapiens
  misc_RNA (1)...(19): siRNA sense strand
aaacggagguggaagaaac

SEQ ID NO: 270661 - RNA, 19 nt, Homo sapiens
  misc_RNA (1)...(19): siRNA sense strand
agucagaacuuacagaauc

SEQ ID NO: 270662 - RNA, 19 nt, Homo sapiens
  misc_RNA (1)...(19): siRNA sense strand
cgucgggucugaagaaaga

SEQ ID NO: 270663 - RNA, 19 nt, Homo sapiens
  misc_RNA (1)...(19): siRNA sense strand
gaaauggugucagcagucu

SEQ ID NO: 270664 - RNA, 19 nt, Homo sapiens
  misc_RNA (1)...(19): siRNA sense strand
cagcuaccauuauugaaga

SEQ ID NO: 270665 - RNA, 19 nt, Homo sapiens
  misc_RNA (1)...(19): siRNA sense strand
aagaugagcuggacaaggu

SEQ ID NO: 270666 - RNA, 19 nt, Homo sapiens
  misc_RNA (1)...(19): siRNA sense strand
ggagaucacgugucuggaa

SEQ ID NO: 270667 - RNA, 19 nt, Homo sapiens
  misc_RNA (1)...(19): siRNA sense strand
ccucugaaaugcaagaaga

SEQ ID NO: 270668 - RNA, 19 nt, Homo sapiens
  misc_RNA (1)...(19): siRNA sense strand
ggaaguagaauugcaggaa

SEQ ID NO: 270669 - RNA, 19 nt, Homo sapiens
  misc_RNA (1)...(19): siRNA sense strand
gcaaaggaagucagcaguu

SEQ ID NO: 270670 - RNA, 19 nt, Homo sapiens
  misc_RNA (1)...(19): siRNA sense strand
gaaaagcgaagacuccaua

SEQ ID NO: 270671 - RNA, 19 nt, Homo sapiens
  misc_RNA (1)...(19): siRNA sense strand
ggaaggagaagagaaacaa

SEQ ID NO: 270672 - RNA, 19 nt, Homo sapiens
  misc_RNA (1)...(19): siRNA sense strand
gaaacaagagagagaaucu

SEQ ID NO: 270673 - RNA, 19 nt, Homo sapiens
  misc_RNA (1)...(19): siRNA sense strand
ucaggaggcuuaaccaaag

SEQ ID NO: 270674 - RNA, 19 nt, Homo sapiens
  misc_RNA (1)...(19): siRNA sense strand
caagcacauucugauauuu

SEQ ID NO: 270675 - RNA, 19 nt, Homo sapiens
  misc_RNA (1)...(19): siRNA sense strand
gacaagcacauucugauau

SEQ ID NO: 270676 - RNA, 19 nt, Homo sapiens
  misc_RNA (1)...(19): siRNA sense strand
gacagccguugaccaguuu

SEQ ID NO: 270677 - RNA, 19 nt, Homo sapiens
  misc_RNA (1)...(19): siRNA sense strand
guguagcaauugaggauuu

SEQ ID NO: 270678 - RNA, 19 nt, Homo sapiens
  misc_RNA (1)...(19): siRNA sense strand
ggacagaagaagcugaaug

SEQ ID NO: 270679 - RNA, 19 nt, Homo sapiens
  misc_RNA (1)...(19): siRNA sense strand
gaagacacucuagagcaua

SEQ ID NO: 270680 - RNA, 19 nt, Homo sapiens
  misc_RNA (1)...(19): siRNA sense strand
ucgaacagauuccuucuuc

SEQ ID NO: 270681 - RNA, 19 nt, Homo sapiens
  misc_RNA (1)...(19): siRNA sense strand
gagagucagguucauauga

SEQ ID NO: 270682 - RNA, 19 nt, Homo sapiens
  misc_RNA (1)...(19): siRNA sense strand
ugaguaugaugcuguagaa

SEQ ID NO: 270683 - RNA, 19 nt, Homo sapiens
  misc_RNA (1)...(19): siRNA sense strand
cagagaagccugacacugu

SEQ ID NO: 270684 - RNA, 19 nt, Homo sapiens
  misc_RNA (1)...(19): siRNA sense strand
gaagaauccugggucucaa

SEQ ID NO: 270685 - RNA, 19 nt, Homo sapiens
  misc_RNA (1)...(19): siRNA sense strand
gaaaugcaagaagaaauga

SEQ ID NO: 270686 - RNA, 19 nt, Homo sapiens
  misc_RNA (1)...(19): siRNA sense strand
guuaucagcugaauaugag

SEQ ID NO: 270687 - RNA, 19 nt, Homo sapiens
  misc_RNA (1)...(19): siRNA sense strand
agaaagcaauuuagaagag

SEQ ID NO: 270688 - RNA, 19 nt, Homo sapiens
  misc_RNA (1)...(19): siRNA sense strand
ggaagaaacuaaagaacaa

SEQ ID NO: 270689 - RNA, 19 nt, Homo sapiens
  misc_RNA (1)...(19): siRNA sense strand
gacacaagcucacgugaua

SEQ ID NO: 270690 - RNA, 19 nt, Homo sapiens
  misc_RNA (1)...(19): siRNA sense strand
cgacagaaguguuugauga

SEQ ID NO: 270691 - RNA, 19 nt, Homo sapiens
  misc_RNA (1)...(19): siRNA sense strand
gagagaaucugcaaaguca

SEQ ID NO: 270692 - RNA, 19 nt, Homo sapiens
  misc_RNA (1)...(19): siRNA sense strand
auaaagagauggcuacuaa

SEQ ID NO: 270693 - RNA, 19 nt, Homo sapiens
  misc_RNA (1)...(19): siRNA sense strand
agaagaagcugaauguaaa

SEQ ID NO: 270694 - RNA, 19 nt, Homo sapiens
  misc_RNA (1)...(19): siRNA sense strand
caaacaaucuacagagaaa

SEQ ID NO: 270695 - RNA, 19 nt, Homo sapiens
  misc_RNA (1)...(19): siRNA sense strand
gaccaugacuguugaggua

SEQ ID NO: 270696 - RNA, 19 nt, Homo sapiens
  misc_RNA (1)...(19): siRNA sense strand
gaaggaggaugaaguggaa

SEQ ID NO: 270697 - RNA, 19 nt, Homo sapiens
  misc_RNA (1)...(19): siRNA sense strand
guagaagguuccacuguaa

SEQ ID NO: 270698 - RNA, 19 nt, Homo sapiens
  misc_RNA (1)...(19): siRNA sense strand
caaaggaagucagcaguuu

SEQ ID NO: 270699 - RNA, 19 nt, Homo sapiens
  misc_RNA (1)...(19): siRNA sense strand
gguagaagguuccacugua

SEQ ID NO: 270700 - RNA, 19 nt, Homo sapiens
  misc_RNA (1)...(19): siRNA sense strand
caaagugaguguagcaauu

SEQ ID NO: 270701 - RNA, 19 nt, Homo sapiens
  misc_RNA (1)...(19): siRNA sense strand
gacagaaccucuugaacaa

SEQ ID NO: 270702 - RNA, 19 nt, Homo sapiens
  misc_RNA (1)...(19): siRNA sense strand
gaaggaggaugcccaggaa

SEQ ID NO: 270703 - RNA, 19 nt, Homo sapiens
  misc_RNA (1)...(19): siRNA sense strand
gaaacaggaucaaccuuca

SEQ ID NO: 270704 - RNA, 19 nt, Homo sapiens
  misc_RNA (1)...(19): siRNA sense strand
gaagucagaugaagucgau

SEQ ID NO: 270705 - RNA, 19 nt, Homo sapiens
  misc_RNA (1)...(19): siRNA sense strand
gagcacagccucugaaaug

SEQ ID NO: 270706 - RNA, 19 nt, Homo sapiens
  misc_RNA (1)...(19): siRNA sense strand
gcaaagccacgcagaaauu

SEQ ID NO: 270707 - RNA, 19 nt, Homo sapiens
  misc_RNA (1)...(19): siRNA sense strand
ucaagaggcugaccaguau

SEQ ID NO: 270708 - RNA, 19 nt, Homo sapiens
  misc_RNA (1)...(19): siRNA sense strand
gaaacuguauccauucugu

SEQ ID NO: 270709 - RNA, 19 nt, Homo sapiens
  misc_RNA (1)...(19): siRNA sense strand
gaagcagcauccaaagaaa

SEQ ID NO: 270710 - RNA, 19 nt, Homo sapiens
  misc_RNA (1)...(19): siRNA sense strand
ggaaagugauaaagaagau

SEQ ID NO: 270711 - RNA, 19 nt, Homo sapiens
  misc_RNA (1)...(19): siRNA sense strand
ccacugagguguccaagga

SEQ ID NO: 270712 - RNA, 19 nt, Homo sapiens
  misc_RNA (1)...(19): siRNA sense strand
ggacaagcacauucugaua

SEQ ID NO: 270713 - RNA, 19 nt, Homo sapiens
  misc_RNA (1)...(19): siRNA sense strand
caacgaagaugacucugau

SEQ ID NO: 270714 - RNA, 19 nt, Homo sapiens
  misc_RNA (1)...(19): siRNA sense strand
ucacugaaguugcccuuaa

SEQ ID NO: 270715 - RNA, 19 nt, Homo sapiens
  misc_RNA (1)...(19): siRNA sense strand
gagggcagcuaccauuauu

SEQ ID NO: 270716 - RNA, 19 nt, Homo sapiens
  misc_RNA (1)...(19): siRNA sense strand
gaugguaguucaagucgaa

SEQ ID NO: 270717 - RNA, 19 nt, Homo sapiens
  misc_RNA (1)...(19): siRNA sense strand
gcaguaaacuuguccaaaa

SEQ ID NO: 270718 - RNA, 19 nt, Homo sapiens
  misc_RNA (1)...(19): siRNA sense strand
gaaaaggucuuaggagaaa

SEQ ID NO: 270719 - RNA, 19 nt, Homo sapiens
  misc_RNA (1)...(19): siRNA sense strand
ggaggagacacccgaaaua

SEQ ID NO: 270720 - RNA, 19 nt, Homo sapiens
  misc_RNA (1)...(19): siRNA sense strand
ccaguaugcugaugagaaa

SEQ ID NO: 270721 - RNA, 19 nt, Homo sapiens
  misc_RNA (1)...(19): siRNA sense strand
gcagggaaguccacuaaag

SEQ ID NO: 270722 - RNA, 19 nt, Homo sapiens
  misc_RNA (1)...(19): siRNA sense strand
ggaagacacucuagagcau

SEQ ID NO: 270723 - RNA, 19 nt, Homo sapiens
  misc_RNA (1)...(19): siRNA sense strand
cagaagaagcugaauguaa

SEQ ID NO: 270724 - RNA, 19 nt, Homo sapiens
  misc_RNA (1)...(19): siRNA sense strand
gagaaguaauugcagaaga

SEQ ID NO: 270725 - RNA, 19 nt, Homo sapiens
  misc_RNA (1)...(19): siRNA sense strand
ggaaauccaugaggagaau

SEQ ID NO: 270726 - RNA, 19 nt, Homo sapiens
  misc_RNA (1)...(19): siRNA sense strand
gaaagagacggauguagug

SEQ ID NO: 270727 - RNA, 19 nt, Homo sapiens
  misc_RNA (1)...(19): siRNA sense strand
ggagaaagaaggagaggaa

SEQ ID NO: 270728 - RNA, 19 nt, Homo sapiens
  misc_RNA (1)...(19): siRNA sense strand
gaagaaacagccaccgaaa

SEQ ID NO: 270729 - RNA, 19 nt, Homo sapiens
  misc_RNA (1)...(19): siRNA sense strand
ggagacacccgaaauaauc

SEQ ID NO: 270730 - RNA, 19 nt, Homo sapiens
  misc_RNA (1)...(19): siRNA sense strand
gagaucacgugucuggaaa

SEQ ID NO: 270731 - RNA, 19 nt, Homo sapiens
  misc_RNA (1)...(19): siRNA sense strand
ggaaagagaaguaauugca

SEQ ID NO: 270732 - RNA, 19 nt, Homo sapiens
  misc_RNA (1)...(19): siRNA sense strand
ggagaaacugccaacauuu

SEQ ID NO: 270733 - RNA, 19 nt, Homo sapiens
  misc_RNA (1)...(19): siRNA sense strand
gagcaaagccacgcagaaa

SEQ ID NO: 270734 - RNA, 19 nt, Homo sapiens
  misc_RNA (1)...(19): siRNA sense strand
gcacagugaaucagauaaa

SEQ ID NO: 270735 - RNA, 19 nt, Homo sapiens
  misc_RNA (1)...(19): siRNA sense strand
gaaaagaccaugacuguug

SEQ ID NO: 270736 - RNA, 19 nt, Homo sapiens
  misc_RNA (1)...(19): siRNA sense strand
gaugaaacaccaauuacuu

SEQ ID NO: 270737 - RNA, 19 nt, Homo sapiens
  misc_RNA (1)...(19): siRNA sense strand
gaagaaagagacggaugua

SEQ ID NO: 270738 - RNA, 19 nt, Homo sapiens
  misc_RNA (1)...(19): siRNA sense strand
agaaguaauugcagaagaa

SEQ ID NO: 270739 - RNA, 19 nt, Homo sapiens
  misc_RNA (1)...(19): siRNA sense strand
caaagaaagcgaacccaaa

SEQ ID NO: 270740 - RNA, 19 nt, Homo sapiens
  misc_RNA (1)...(19): siRNA sense strand
uggcguaccugacauagaa

SEQ ID NO: 270741 - RNA, 19 nt, Homo sapiens
  misc_RNA (1)...(19): siRNA sense strand
aaauagaaguccaccaaga

SEQ ID NO: 270742 - RNA, 19 nt, Homo sapiens
  misc_RNA (1)...(19): siRNA sense strand
caacccaugugaaugaaga

SEQ ID NO: 270743 - RNA, 19 nt, Homo sapiens
  misc_RNA (1)...(19): siRNA sense strand
gaggagacacccgaaauaa

SEQ ID NO: 270744 - RNA, 19 nt, Homo sapiens
  misc_RNA (1)...(19): siRNA sense strand
agagagagaugguaguuca

SEQ ID NO: 270745 - RNA, 19 nt, Homo sapiens
  misc_RNA (1)...(19): siRNA sense strand
acaagcacauucugauauu

SEQ ID NO: 270746 - RNA, 19 nt, Homo sapiens
  misc_RNA (1)...(19): siRNA sense strand
gauguaguguugaaaguag

SEQ ID NO: 270747 - RNA, 19 nt, Homo sapiens
  misc_RNA (1)...(19): siRNA sense strand
uagcaagucugcagaaucu

SEQ ID NO: 270748 - RNA, 19 nt, Homo sapiens
  misc_RNA (1)...(19): siRNA sense strand
auagagaagucacuaguug

SEQ ID NO: 270749 - RNA, 19 nt, Homo sapiens
  misc_RNA (1)...(19): siRNA sense strand
agagauggcuacuaaguca

SEQ ID NO: 270750 - RNA, 19 nt, Homo sapiens
  misc_RNA (1)...(19): siRNA sense strand
aggagaaacugccaacauu

SEQ ID NO: 270751 - RNA, 19 nt, Homo sapiens
  misc_RNA (1)...(19): siRNA sense strand
gaaagacgagauuguggaa

SEQ ID NO: 270752 - RNA, 19 nt, Homo sapiens
  misc_RNA (1)...(19): siRNA sense strand
gaagagaccacagaaaugg

SEQ ID NO: 270753 - RNA, 19 nt, Homo sapiens
  misc_RNA (1)...(19): siRNA sense strand
gggaggagaccaccagaaa

SEQ ID NO: 270754 - RNA, 19 nt, Homo sapiens
  misc_RNA (1)...(19): siRNA sense strand
caaaagagacuccgauaaa

SEQ ID NO: 270755 - RNA, 19 nt, Homo sapiens
  misc_RNA (1)...(19): siRNA sense strand
caggaugaaacaccaauua

SEQ ID NO: 270756 - RNA, 19 nt, Homo sapiens
  misc_RNA (1)...(19): siRNA sense strand
ggaugaugcucuugaacug

SEQ ID NO: 270757 - RNA, 19 nt, Homo sapiens
  misc_RNA (1)...(19): siRNA sense strand
gcagagagcagaggcagaa

SEQ ID NO: 270758 - RNA, 19 nt, Homo sapiens
  misc_RNA (1)...(19): siRNA sense strand
ugacagaaccucuugaaca

SEQ ID NO: 270759 - RNA, 19 nt, Homo sapiens
  misc_RNA (1)...(19): siRNA sense strand
gauaucugcuucagugaca

SEQ ID NO: 270760 - RNA, 19 nt, Homo sapiens
  misc_RNA (1)...(19): siRNA sense strand
aaacggagguggaagaaac

SEQ ID NO: 270761 - RNA, 19 nt, Homo sapiens
  misc_RNA (1)...(19): siRNA sense strand
agucagaacuuacagaauc

SEQ ID NO: 270762 - RNA, 19 nt, Homo sapiens
  misc_RNA (1)...(19): siRNA sense strand
cgucgggucugaagaaaga

SEQ ID NO: 270763 - RNA, 19 nt, Homo sapiens
  misc_RNA (1)...(19): siRNA sense strand
gaaauggugucagcagucu

SEQ ID NO: 270764 - RNA, 19 nt, Homo sapiens
  misc_RNA (1)...(19): siRNA sense strand
cagcuaccauuauugaaga

SEQ ID NO: 270765 - RNA, 19 nt, Homo sapiens
  misc_RNA (1)...(19): siRNA sense strand
aagaugagcuggacaaggu

SEQ ID NO: 270766 - RNA, 19 nt, Homo sapiens
  misc_RNA (1)...(19): siRNA sense strand
ggagaucacgugucuggaa

SEQ ID NO: 270767 - RNA, 19 nt, Homo sapiens
  misc_RNA (1)...(19): siRNA sense strand
ccucugaaaugcaagaaga

SEQ ID NO: 270768 - RNA, 19 nt, Homo sapiens
  misc_RNA (1)...(19): siRNA sense strand
ggaaguagaauugcaggaa

SEQ ID NO: 270769 - RNA, 19 nt, Homo sapiens
  misc_RNA (1)...(19): siRNA sense strand
gcaaaggaagucagcaguu

SEQ ID NO: 270770 - RNA, 19 nt, Homo sapiens
  misc_RNA (1)...(19): siRNA sense strand
gaaaagcgaagacuccaua

SEQ ID NO: 270771 - RNA, 19 nt, Homo sapiens
  misc_RNA (1)...(19): siRNA sense strand
ggaaggagaagagaaacaa

SEQ ID NO: 270772 - RNA, 19 nt, Homo sapiens
  misc_RNA (1)...(19): siRNA sense strand
gaaacaagagagagaaucu

SEQ ID NO: 270773 - RNA, 19 nt, Homo sapiens
  misc_RNA (1)...(19): siRNA sense strand
ucaggaggcuuaaccaaag

SEQ ID NO: 270774 - RNA, 19 nt, Homo sapiens
  misc_RNA (1)...(19): siRNA sense strand
caagcacauucugauauuu

SEQ ID NO: 270775 - RNA, 19 nt, Homo sapiens
  misc_RNA (1)...(19): siRNA sense strand
gacaagcacauucugauau

SEQ ID NO: 270776 - RNA, 19 nt, Homo sapiens
  misc_RNA (1)...(19): siRNA sense strand
gacagccguugaccaguuu

SEQ ID NO: 270777 - RNA, 19 nt, Homo sapiens
  misc_RNA (1)...(19): siRNA sense strand
guguagcaauugaggauuu

SEQ ID NO: 270778 - RNA, 19 nt, Homo sapiens
  misc_RNA (1)...(19): siRNA sense strand
ggacagaagaagcugaaug

SEQ ID NO: 270779 - RNA, 19 nt, Homo sapiens
  misc_RNA (1)...(19): siRNA sense strand
gaagacacucuagagcaua

SEQ ID NO: 270780 - RNA, 19 nt, Homo sapiens
  misc_RNA (1)...(19): siRNA sense strand
ucgaacagauuccuucuuc

SEQ ID NO: 270781 - RNA, 19 nt, Homo sapiens
  misc_RNA (1)...(19): siRNA sense strand
gagagucagguucauauga

SEQ ID NO: 270782 - RNA, 19 nt, Homo sapiens
  misc_RNA (1)...(19): siRNA sense strand
ugaguaugaugcuguagaa

SEQ ID NO: 270783 - RNA, 19 nt, Homo sapiens
  misc_RNA (1)...(19): siRNA sense strand
cagagaagccugacacugu

SEQ ID NO: 270784 - RNA, 19 nt, Homo sapiens
  misc_RNA (1)...(19): siRNA sense strand
gaagaauccugggucucaa

SEQ ID NO: 270785 - RNA, 19 nt, Homo sapiens
  misc_RNA (1)...(19): siRNA sense strand
gaaaugcaagaagaaauga

SEQ ID NO: 270786 - RNA, 19 nt, Homo sapiens
  misc_RNA (1)...(19): siRNA sense strand
guuaucagcugaauaugag

SEQ ID NO: 270787 - RNA, 19 nt, Homo sapiens
  misc_RNA (1)...(19): siRNA sense strand
agaaagcaauuuagaagag

SEQ ID NO: 270788 - RNA, 19 nt, Homo sapiens
  misc_RNA (1)...(19): siRNA sense strand
gaaggaaagugaugaagaa

SEQ ID NO: 270789 - RNA, 19 nt, Homo sapiens
  misc_RNA (1)...(19): siRNA sense strand
ggaaagugaugaagaagaa

SEQ ID NO: 270790 - RNA, 19 nt, Homo sapiens
  misc_RNA (1)...(19): siRNA sense strand
gaaugaagaugaagacucu

SEQ ID NO: 270791 - RNA, 19 nt, Homo sapiens
  misc_RNA (1)...(19): siRNA sense strand
gcuaugauggucagaauua

SEQ ID NO: 270792 - RNA, 19 nt, Homo sapiens
  misc_RNA (1)...(19): siRNA sense strand
uuacaagcaugccuacuuu

SEQ ID NO: 270793 - RNA, 19 nt, Homo sapiens
  misc_RNA (1)...(19): siRNA sense strand
gaagaggaaggaaaugaaa

SEQ ID NO: 270794 - RNA, 19 nt, Homo sapiens
  misc_RNA (1)...(19): siRNA sense strand
caauccagcuucccaagaa

SEQ ID NO: 270795 - RNA, 19 nt, Homo sapiens
  misc_RNA (1)...(19): siRNA sense strand
acaacaaccucuccaaaug

SEQ ID NO: 270796 - RNA, 19 nt, Homo sapiens
  misc_RNA (1)...(19): siRNA sense strand
gaagacugcuuuaauuuug

SEQ ID NO: 270797 - RNA, 19 nt, Homo sapiens
  misc_RNA (1)...(19): siRNA sense strand
ggaaggaaaugaaaacgaa

SEQ ID NO: 270798 - RNA, 19 nt, Homo sapiens
  misc_RNA (1)...(19): siRNA sense strand
gcagaaggcaccacagaga

SEQ ID NO: 270799 - RNA, 19 nt, Homo sapiens
  misc_RNA (1)...(19): siRNA sense strand
aaaauggggucuuuaagua

SEQ ID NO: 270800 - RNA, 19 nt, Homo sapiens
  misc_RNA (1)...(19): siRNA sense strand
guacagcuacuuuaaagga

SEQ ID NO: 270801 - RNA, 19 nt, Homo sapiens
  misc_RNA (1)...(19): siRNA sense strand
caagaaggcuggggauaua

SEQ ID NO: 270802 - RNA, 19 nt, Homo sapiens
  misc_RNA (1)...(19): siRNA sense strand
guacaggccacgauauuau

SEQ ID NO: 270803 - RNA, 19 nt, Homo sapiens
  misc_RNA (1)...(19): siRNA sense strand
ggaagaggaaggaaaugaa

SEQ ID NO: 270804 - RNA, 19 nt, Homo sapiens
  misc_RNA (1)...(19): siRNA sense strand
aagaggagacuucaaauga

SEQ ID NO: 270805 - RNA, 19 nt, Homo sapiens
  misc_RNA (1)...(19): siRNA sense strand
ccacaagucuauagaacca

SEQ ID NO: 270806 - RNA, 19 nt, Homo sapiens
  misc_RNA (1)...(19): siRNA sense strand
ggaauggccugugcuuucu

SEQ ID NO: 270807 - RNA, 19 nt, Homo sapiens
  misc_RNA (1)...(19): siRNA sense strand
ggaggaagaggaaggaaau

SEQ ID NO: 270808 - RNA, 19 nt, Homo sapiens
  misc_RNA (1)...(19): siRNA sense strand
aaauggagaugacaguuca

SEQ ID NO: 270809 - RNA, 19 nt, Homo sapiens
  misc_RNA (1)...(19): siRNA sense strand
gacaacaaccucuccaaau

SEQ ID NO: 270810 - RNA, 19 nt, Homo sapiens
  misc_RNA (1)...(19): siRNA sense strand
gggaauggccugugcuuuc

SEQ ID NO: 270811 - RNA, 19 nt, Homo sapiens
  misc_RNA (1)...(19): siRNA sense strand
gagaugacaguucagaaga

SEQ ID NO: 270812 - RNA, 19 nt, Homo sapiens
  misc_RNA (1)...(19): siRNA sense strand
ggccugugcuuucucaaug

SEQ ID NO: 270813 - RNA, 19 nt, Homo sapiens
  misc_RNA (1)...(19): siRNA sense strand
gaagaaagcgaagcagaag

SEQ ID NO: 270814 - RNA, 19 nt, Homo sapiens
  misc_RNA (1)...(19): siRNA sense strand
cgaagaaagcgaagcagaa

SEQ ID NO: 270815 - RNA, 19 nt, Homo sapiens
  misc_RNA (1)...(19): siRNA sense strand
aaacaaagcuacaaaagag

SEQ ID NO: 270816 - RNA, 19 nt, Homo sapiens
  misc_RNA (1)...(19): siRNA sense strand
caaaagagaaggaaaguga

SEQ ID NO: 270817 - RNA, 19 nt, Homo sapiens
  misc_RNA (1)...(19): siRNA sense strand
gacaauggauaugaaaucu

SEQ ID NO: 270818 - RNA, 19 nt, Homo sapiens
  misc_RNA (1)...(19): siRNA sense strand
ggcauaaacggcaccagua

SEQ ID NO: 270819 - RNA, 19 nt, Homo sapiens
  misc_RNA (1)...(19): siRNA sense strand
ggacaauuaccgagccuau

SEQ ID NO: 270820 - RNA, 19 nt, Homo sapiens
  misc_RNA (1)...(19): siRNA sense strand
ggagaugacaguucagaag

SEQ ID NO: 270821 - RNA, 19 nt, Homo sapiens
  misc_RNA (1)...(19): siRNA sense strand
acaauuaccgagccuauga

SEQ ID NO: 270822 - RNA, 19 nt, Homo sapiens
  misc_RNA (1)...(19): siRNA sense strand
cacaggguauacaggguua

SEQ ID NO: 270823 - RNA, 19 nt, Homo sapiens
  misc_RNA (1)...(19): siRNA sense strand
cuacaacacugggcuaugg

SEQ ID NO: 270824 - RNA, 19 nt, Homo sapiens
  misc_RNA (1)...(19): siRNA sense strand
cagaagaggaggaggaaga

SEQ ID NO: 270825 - RNA, 19 nt, Homo sapiens
  misc_RNA (1)...(19): siRNA sense strand
agaaucgaaugaagaugaa

SEQ ID NO: 270826 - RNA, 19 nt, Homo sapiens
  misc_RNA (1)...(19): siRNA sense strand
aaaccaccaccguugaaua

SEQ ID NO: 270827 - RNA, 19 nt, Homo sapiens
  misc_RNA (1)...(19): siRNA sense strand
aaauagaggauucugaaga

SEQ ID NO: 270828 - RNA, 19 nt, Homo sapiens
  misc_RNA (1)...(19): siRNA sense strand
gcugagaauaccacacuuu

SEQ ID NO: 270829 - RNA, 19 nt, Homo sapiens
  misc_RNA (1)...(19): siRNA sense strand
gaaaauggggucuuuaagu

SEQ ID NO: 270830 - RNA, 19 nt, Homo sapiens
  misc_RNA (1)...(19): siRNA sense strand
caacaaccucuccaaaugg

SEQ ID NO: 270831 - RNA, 19 nt, Homo sapiens
  misc_RNA (1)...(19): siRNA sense strand
gcaauccagcuucccaaga

SEQ ID NO: 270832 - RNA, 19 nt, Homo sapiens
  misc_RNA (1)...(19): siRNA sense strand
aagaaucgaaugaagauga

SEQ ID NO: 270833 - RNA, 19 nt, Homo sapiens
  misc_RNA (1)...(19): siRNA sense strand
caacagcacagaggcagaa

SEQ ID NO: 270834 - RNA, 19 nt, Homo sapiens
  misc_RNA (1)...(19): siRNA sense strand
acaaugaagaaucgaauga

SEQ ID NO: 270835 - RNA, 19 nt, Homo sapiens
  misc_RNA (1)...(19): siRNA sense strand
uuaccgagccuaugaagau

SEQ ID NO: 270836 - RNA, 19 nt, Homo sapiens
  misc_RNA (1)...(19): siRNA sense strand
cgacaauggauaugaaauc

SEQ ID NO: 270837 - RNA, 19 nt, Homo sapiens
  misc_RNA (1)...(19): siRNA sense strand
ugaagaaucgaaugaagau

SEQ ID NO: 270838 - RNA, 19 nt, Homo sapiens
  misc_RNA (1)...(19): siRNA sense strand
caaaauagaggauucugaa

SEQ ID NO: 270839 - RNA, 19 nt, Homo sapiens
  misc_RNA (1)...(19): siRNA sense strand
gagccuaugaagaugagua

SEQ ID NO: 270840 - RNA, 19 nt, Homo sapiens
  misc_RNA (1)...(19): siRNA sense strand
ccaccaccguugaauacga

SEQ ID NO: 270841 - RNA, 19 nt, Homo sapiens
  misc_RNA (1)...(19): siRNA sense strand
agacaacaaccucuccaaa

SEQ ID NO: 270842 - RNA, 19 nt, Homo sapiens
  misc_RNA (1)...(19): siRNA sense strand
uuaaguacaggccacgaua

SEQ ID NO: 270843 - RNA, 19 nt, Homo sapiens
  misc_RNA (1)...(19): siRNA sense strand
ggcaagggcaccucgaaga

SEQ ID NO: 270844 - RNA, 19 nt, Homo sapiens
  misc_RNA (1)...(19): siRNA sense strand
uuaaaacgauuuccaguuc

SEQ ID NO: 270845 - RNA, 19 nt, Homo sapiens
  misc_RNA (1)...(19): siRNA sense strand
aagcagaaguggaugaaaa

SEQ ID NO: 270846 - RNA, 19 nt, Homo sapiens
  misc_RNA (1)...(19): siRNA sense strand
ggauauaacaaacaaagcu

SEQ ID NO: 270847 - RNA, 19 nt, Homo sapiens
  misc_RNA (1)...(19): siRNA sense strand
agaaggaaagugaugaaga

SEQ ID NO: 270848 - RNA, 19 nt, Homo sapiens
  misc_RNA (1)...(19): siRNA sense strand
caaugaagaaucgaaugaa

SEQ ID NO: 270849 - RNA, 19 nt, Homo sapiens
  misc_RNA (1)...(19): siRNA sense strand
uaaaggacaaggcuacgau

SEQ ID NO: 270850 - RNA, 19 nt, Homo sapiens
  misc_RNA (1)...(19): siRNA sense strand
agaaagcgaagcagaagug

SEQ ID NO: 270851 - RNA, 19 nt, Homo sapiens
  misc_RNA (1)...(19): siRNA sense strand
aaugaagaaucgaaugaag

SEQ ID NO: 270852 - RNA, 19 nt, Homo sapiens
  misc_RNA (1)...(19): siRNA sense strand
caaacaaagcuacaaaaga

SEQ ID NO: 270853 - RNA, 19 nt, Homo sapiens
  misc_RNA (1)...(19): siRNA sense strand
gcauaaacggcaccaguac

SEQ ID NO: 270854 - RNA, 19 nt, Homo sapiens
  misc_RNA (1)...(19): siRNA sense strand
gccugugcuuucucaauga

SEQ ID NO: 270855 - RNA, 19 nt, Homo sapiens
  misc_RNA (1)...(19): siRNA sense strand
caccacaagucuauagaac

SEQ ID NO: 270856 - RNA, 19 nt, Homo sapiens
  misc_RNA (1)...(19): siRNA sense strand
gaagcagaaguggaugaaa

SEQ ID NO: 270857 - RNA, 19 nt, Homo sapiens
  misc_RNA (1)...(19): siRNA sense strand
gaaaugaaaacgaagaaag

SEQ ID NO: 270858 - RNA, 19 nt, Homo sapiens
  misc_RNA (1)...(19): siRNA sense strand
ugaagaagaagaggaggaa

SEQ ID NO: 270859 - RNA, 19 nt, Homo sapiens
  misc_RNA (1)...(19): siRNA sense strand
aaagagaaggaaagugaug

SEQ ID NO: 270860 - RNA, 19 nt, Homo sapiens
  misc_RNA (1)...(19): siRNA sense strand
agaaguggaugaaaacgaa

SEQ ID NO: 270861 - RNA, 19 nt, Homo sapiens
  misc_RNA (1)...(19): siRNA sense strand
gaaaaccaccaccguugaa

SEQ ID NO: 270862 - RNA, 19 nt, Homo sapiens
  misc_RNA (1)...(19): siRNA sense strand
ccaccacaagucuauagaa

SEQ ID NO: 270863 - RNA, 19 nt, Homo sapiens
  misc_RNA (1)...(19): siRNA sense strand
uaaguacaggccacgauau

SEQ ID NO: 270864 - RNA, 19 nt, Homo sapiens
  misc_RNA (1)...(19): siRNA sense strand
ggaaaaccaccaccguuga

SEQ ID NO: 270865 - RNA, 19 nt, Homo sapiens
  misc_RNA (1)...(19): siRNA sense strand
aaacgaacaaggcauaaac

SEQ ID NO: 270866 - RNA, 19 nt, Homo sapiens
  misc_RNA (1)...(19): siRNA sense strand
gcgaagcagaaguggauga

SEQ ID NO: 270867 - RNA, 19 nt, Homo sapiens
  misc_RNA (1)...(19): siRNA sense strand
aagaagaagaggaggaaga

SEQ ID NO: 270868 - RNA, 19 nt, Homo sapiens
  misc_RNA (1)...(19): siRNA sense strand
uuacuaccaccaccaguga

SEQ ID NO: 270869 - RNA, 19 nt, Homo sapiens
  misc_RNA (1)...(19): siRNA sense strand
uggcuaugauggucagaau

SEQ ID NO: 270870 - RNA, 19 nt, Homo sapiens
  misc_RNA (1)...(19): siRNA sense strand
cagcuacuuuaaaggacaa

SEQ ID NO: 270871 - RNA, 19 nt, Homo sapiens
  misc_RNA (1)...(19): siRNA sense strand
aagggcaccucgaagacaa

SEQ ID NO: 270872 - RNA, 19 nt, Homo sapiens
  misc_RNA (1)...(19): siRNA sense strand
ucagggcaguagugacuca

SEQ ID NO: 270873 - RNA, 19 nt, Homo sapiens
  misc_RNA (1)...(19): siRNA sense strand
aaacgaagaaagcgaagca

SEQ ID NO: 270874 - RNA, 19 nt, Homo sapiens
  misc_RNA (1)...(19): siRNA sense strand
agaagaggaggaagaggaa

SEQ ID NO: 270875 - RNA, 19 nt, Homo sapiens
  misc_RNA (1)...(19): siRNA sense strand
gcaagggcaccucgaagac

SEQ ID NO: 270876 - RNA, 19 nt, Homo sapiens
  misc_RNA (1)...(19): siRNA sense strand
aagaggaggaggaagaaga

SEQ ID NO: 270877 - RNA, 19 nt, Homo sapiens
  misc_RNA (1)...(19): siRNA sense strand
ugaaaacgaacaaggcaua

SEQ ID NO: 270878 - RNA, 19 nt, Homo sapiens
  misc_RNA (1)...(19): siRNA sense strand
aagcgaagcagaaguggau

SEQ ID NO: 270879 - RNA, 19 nt, Homo sapiens
  misc_RNA (1)...(19): siRNA sense strand
aaagugaugaagaagaaga

SEQ ID NO: 270880 - RNA, 19 nt, Homo sapiens
  misc_RNA (1)...(19): siRNA sense strand
guagugacucauccgaaga

SEQ ID NO: 270881 - RNA, 19 nt, Homo sapiens
  misc_RNA (1)...(19): siRNA sense strand
aguacaggccacgauauua

SEQ ID NO: 270882 - RNA, 19 nt, Homo sapiens
  misc_RNA (1)...(19): siRNA sense strand
ccugugcuuucucaaugaa

SEQ ID NO: 270883 - RNA, 19 nt, Homo sapiens
  misc_RNA (1)...(19): siRNA sense strand
gaaaacgaacaaggcauaa

SEQ ID NO: 270884 - RNA, 19 nt, Homo sapiens
  misc_RNA (1)...(19): siRNA sense strand
gcaucgaagagucaaaaua

SEQ ID NO: 270885 - RNA, 19 nt, Homo sapiens
  misc_RNA (1)...(19): siRNA sense strand
cgaagcagaaguggaugaa

SEQ ID NO: 270886 - RNA, 19 nt, Homo sapiens
  misc_RNA (1)...(19): siRNA sense strand
aggcuacgauggcuaugau

SEQ ID NO: 270887 - RNA, 19 nt, Homo sapiens
  misc_RNA (1)...(19): siRNA sense strand
gagaagaaggggaagaaga

SEQ ID NO: 270888 - RNA, 19 nt, Homo sapiens
  misc_RNA (1)...(19): siRNA sense strand
gcacgaaccuccuacauug

SEQ ID NO: 270889 - RNA, 19 nt, Homo sapiens
  misc_RNA (1)...(19): siRNA sense strand
gaacaauucuucccucaug

SEQ ID NO: 270890 - RNA, 19 nt, Homo sapiens
  misc_RNA (1)...(19): siRNA sense strand
ggacaucuaugcuuacaug

SEQ ID NO: 270891 - RNA, 19 nt, Homo sapiens
  misc_RNA (1)...(19): siRNA sense strand
gagaaaccuuccauccuua

SEQ ID NO: 270892 - RNA, 19 nt, Homo sapiens
  misc_RNA (1)...(19): siRNA sense strand
gaucaucaaugcagucaug

SEQ ID NO: 270893 - RNA, 19 nt, Homo sapiens
  misc_RNA (1)...(19): siRNA sense strand
gaacauccgugagcaagga

SEQ ID NO: 270894 - RNA, 19 nt, Homo sapiens
  misc_RNA (1)...(19): siRNA sense strand
ggucauaguuauucuggaa

SEQ ID NO: 270895 - RNA, 19 nt, Homo sapiens
  misc_RNA (1)...(19): siRNA sense strand
uaccaaaggugcaauuuau

SEQ ID NO: 270896 - RNA, 19 nt, Homo sapiens
  misc_RNA (1)...(19): siRNA sense strand
ugagaaaccuuccauccuu

SEQ ID NO: 270897 - RNA, 19 nt, Homo sapiens
  misc_RNA (1)...(19): siRNA sense strand
caucaaugcagucauguua

SEQ ID NO: 270898 - RNA, 19 nt, Homo sapiens
  misc_RNA (1)...(19): siRNA sense strand
caacugaccuggccaacca

SEQ ID NO: 270899 - RNA, 19 nt, Homo sapiens
  misc_RNA (1)...(19): siRNA sense strand
ggacauuccuguugauaac

SEQ ID NO: 270900 - RNA, 19 nt, Homo sapiens
  misc_RNA (1)...(19): siRNA sense strand
guaccaaaggugcaauuua

SEQ ID NO: 270901 - RNA, 19 nt, Homo sapiens
  misc_RNA (1)...(19): siRNA sense strand
gagggaggaugaugacaga

SEQ ID NO: 270902 - RNA, 19 nt, Homo sapiens
  misc_RNA (1)...(19): siRNA sense strand
gaaaacaacuacaccugaa

SEQ ID NO: 270903 - RNA, 19 nt, Homo sapiens
  misc_RNA (1)...(19): siRNA sense strand
agagugaacugucucauca

SEQ ID NO: 270904 - RNA, 19 nt, Homo sapiens
  misc_RNA (1)...(19): siRNA sense strand
gaaguucaaguuaccauug

SEQ ID NO: 270905 - RNA, 19 nt, Homo sapiens
  misc_RNA (1)...(19): siRNA sense strand
aaacacaucggaaucauga

SEQ ID NO: 270906 - RNA, 19 nt, Homo sapiens
  misc_RNA (1)...(19): siRNA sense strand
gcaacuccaugagaagaaa

SEQ ID NO: 270907 - RNA, 19 nt, Homo sapiens
  misc_RNA (1)...(19): siRNA sense strand
gcauccagguggucaagaa

SEQ ID NO: 270908 - RNA, 19 nt, Homo sapiens
  misc_RNA (1)...(19): siRNA sense strand
gaguguauucuguggauua

SEQ ID NO: 270909 - RNA, 19 nt, Homo sapiens
  misc_RNA (1)...(19): siRNA sense strand
ccaaaggugcaauuuauga

SEQ ID NO: 270910 - RNA, 19 nt, Homo sapiens
  misc_RNA (1)...(19): siRNA sense strand
cccgagagcuggaugagaa

SEQ ID NO: 270911 - RNA, 19 nt, Homo sapiens
  misc_RNA (1)...(19): siRNA sense strand
ggaaaagcaugaucauuag

SEQ ID NO: 270912 - RNA, 19 nt, Homo sapiens
  misc_RNA (1)...(19): siRNA sense strand
gaagaaacaauuccaugag

SEQ ID NO: 270913 - RNA, 19 nt, Homo sapiens
  misc_RNA (1)...(19): siRNA sense strand
ccugcaaccuggcgcauaa

SEQ ID NO: 270914 - RNA, 19 nt, Homo sapiens
  misc_RNA (1)...(19): siRNA sense strand
gagcaaggacgcuuucuac

SEQ ID NO: 270915 - RNA, 19 nt, Homo sapiens
  misc_RNA (1)...(19): siRNA sense strand
cagaagggcagaaacuuug

SEQ ID NO: 270916 - RNA, 19 nt, Homo sapiens
  misc_RNA (1)...(19): siRNA sense strand
gggaggugguuccuauuca

SEQ ID NO: 270917 - RNA, 19 nt, Homo sapiens
  misc_RNA (1)...(19): siRNA sense strand
aagcgcaacuccaugagaa

SEQ ID NO: 270918 - RNA, 19 nt, Homo sapiens
  misc_RNA (1)...(19): siRNA sense strand
uccagaauauuguggguuu

SEQ ID NO: 270919 - RNA, 19 nt, Homo sapiens
  misc_RNA (1)...(19): siRNA sense strand
gaaggagugguugaaacua

SEQ ID NO: 270920 - RNA, 19 nt, Homo sapiens
  misc_RNA (1)...(19): siRNA sense strand
agaagaaacaauuccauga

SEQ ID NO: 270921 - RNA, 19 nt, Homo sapiens
  misc_RNA (1)...(19): siRNA sense strand
gcaaggacgcuuucuacag

SEQ ID NO: 270922 - RNA, 19 nt, Homo sapiens
  misc_RNA (1)...(19): siRNA sense strand
ggaaggagugguugaaacu

SEQ ID NO: 270923 - RNA, 19 nt, Homo sapiens
  misc_RNA (1)...(19): siRNA sense strand
gggcagaaacuuugauuuu

SEQ ID NO: 270924 - RNA, 19 nt, Homo sapiens
  misc_RNA (1)...(19): siRNA sense strand
gaagcgcaacuccaugaga

SEQ ID NO: 270925 - RNA, 19 nt, Homo sapiens
  misc_RNA (1)...(19): siRNA sense strand
gaaaccuuccauccuuauu

SEQ ID NO: 270926 - RNA, 19 nt, Homo sapiens
  misc_RNA (1)...(19): siRNA sense strand
cuacauugcugaggagauc

SEQ ID NO: 270927 - RNA, 19 nt, Homo sapiens
  misc_RNA (1)...(19): siRNA sense strand
gccacacgcuggucaucuu

SEQ ID NO: 270928 - RNA, 19 nt, Homo sapiens
  misc_RNA (1)...(19): siRNA sense strand
acagaagggcagaaacuuu

SEQ ID NO: 270929 - RNA, 19 nt, Homo sapiens
  misc_RNA (1)...(19): siRNA sense strand
caaguuaccauuggguuug

SEQ ID NO: 270930 - RNA, 19 nt, Homo sapiens
  misc_RNA (1)...(19): siRNA sense strand
agugaacugucucaucaaa

SEQ ID NO: 270931 - RNA, 19 nt, Homo sapiens
  misc_RNA (1)...(19): siRNA sense strand
ugaggaagaaggaguguau

SEQ ID NO: 270932 - RNA, 19 nt, Homo sapiens
  misc_RNA (1)...(19): siRNA sense strand
aggaaaagcaugaucauua

SEQ ID NO: 270933 - RNA, 19 nt, Homo sapiens
  misc_RNA (1)...(19): siRNA sense strand
acaauucuauccgaaggaa

SEQ ID NO: 270934 - RNA, 19 nt, Homo sapiens
  misc_RNA (1)...(19): siRNA sense strand
ucaaugcagucauguuagg

SEQ ID NO: 270935 - RNA, 19 nt, Homo sapiens
  misc_RNA (1)...(19): siRNA sense strand
cauugugacugaggaagaa

SEQ ID NO: 270936 - RNA, 19 nt, Homo sapiens
  misc_RNA (1)...(19): siRNA sense strand
ugucaggucuuucacuucu

SEQ ID NO: 270937 - RNA, 19 nt, Homo sapiens
  misc_RNA (1)...(19): siRNA sense strand
cuacuggcaucaccacaca

SEQ ID NO: 270938 - RNA, 19 nt, Homo sapiens
  misc_RNA (1)...(19): siRNA sense strand
agacuuggaggucauaguu

SEQ ID NO: 270939 - RNA, 19 nt, Homo sapiens
  misc_RNA (1)...(19): siRNA sense strand
gcuggcugcucuucgcuau

SEQ ID NO: 270940 - RNA, 19 nt, Homo sapiens
  misc_RNA (1)...(19): siRNA sense strand
aaugucaggucuuucacuu

SEQ ID NO: 270941 - RNA, 19 nt, Homo sapiens
  misc_RNA (1)...(19): siRNA sense strand
gcaaccuggcgcauaagaa

SEQ ID NO: 270942 - RNA, 19 nt, Homo sapiens
  misc_RNA (1)...(19): siRNA sense strand
gacuuggaggucauaguua

SEQ ID NO: 270943 - RNA, 19 nt, Homo sapiens
  misc_RNA (1)...(19): siRNA sense strand
ggucuuucacuucugcuuu

SEQ ID NO: 270944 - RNA, 19 nt, Homo sapiens
  misc_RNA (1)...(19): siRNA sense strand
uaugacaucucagcaacug

SEQ ID NO: 270945 - RNA, 19 nt, Homo sapiens
  misc_RNA (1)...(19): siRNA sense strand
gcucacagaagggcagaaa

SEQ ID NO: 270946 - RNA, 19 nt, Homo sapiens
  misc_RNA (1)...(19): siRNA sense strand
ucaaguuaccauuggguuu

SEQ ID NO: 270947 - RNA, 19 nt, Homo sapiens
  misc_RNA (1)...(19): siRNA sense strand
ccacugugugugugacuaa

SEQ ID NO: 270948 - RNA, 19 nt, Homo sapiens
  misc_RNA (1)...(19): siRNA sense strand
ugaggaggaacaauucuau

SEQ ID NO: 270949 - RNA, 19 nt, Homo sapiens
  misc_RNA (1)...(19): siRNA sense strand
ugaacugucucaucaaaau

SEQ ID NO: 270950 - RNA, 19 nt, Homo sapiens
  misc_RNA (1)...(19): siRNA sense strand
ggaguguauucuguggauu

SEQ ID NO: 270951 - RNA, 19 nt, Homo sapiens
  misc_RNA (1)...(19): siRNA sense strand
ugacagaggaaugcccuuu

SEQ ID NO: 270952 - RNA, 19 nt, Homo sapiens
  misc_RNA (1)...(19): siRNA sense strand
uggcugcucuucgcuauca

SEQ ID NO: 270953 - RNA, 19 nt, Homo sapiens
  misc_RNA (1)...(19): siRNA sense strand
caauucuucccucauggua

SEQ ID NO: 270954 - RNA, 19 nt, Homo sapiens
  misc_RNA (1)...(19): siRNA sense strand
acagaggaaugcccuuugg

SEQ ID NO: 270955 - RNA, 19 nt, Homo sapiens
  misc_RNA (1)...(19): siRNA sense strand
gacagaggaaugcccuuug

SEQ ID NO: 270956 - RNA, 19 nt, Homo sapiens
  misc_RNA (1)...(19): siRNA sense strand
ggaggugguuccuauucac

SEQ ID NO: 270957 - RNA, 19 nt, Homo sapiens
  misc_RNA (1)...(19): siRNA sense strand
gugauugccguccgaaaug

SEQ ID NO: 270958 - RNA, 19 nt, Homo sapiens
  misc_RNA (1)...(19): siRNA sense strand
gaauauuguggguuugauc

SEQ ID NO: 270959 - RNA, 19 nt, Homo sapiens
  misc_RNA (1)...(19): siRNA sense strand
ccacacgcuggucaucuuu

SEQ ID NO: 270960 - RNA, 19 nt, Homo sapiens
  misc_RNA (1)...(19): siRNA sense strand
acuuggaggucauaguuau

SEQ ID NO: 270961 - RNA, 19 nt, Homo sapiens
  misc_RNA (1)...(19): siRNA sense strand
cagaauauuguggguuuga

SEQ ID NO: 270962 - RNA, 19 nt, Homo sapiens
  misc_RNA (1)...(19): siRNA sense strand
uccaugagaagaaacaauu

SEQ ID NO: 270963 - RNA, 19 nt, Homo sapiens
  misc_RNA (1)...(19): siRNA sense strand
caaccuggcgcauaagaac

SEQ ID NO: 270964 - RNA, 19 nt, Homo sapiens
  misc_RNA (1)...(19): siRNA sense strand
gcgcaacuccaugagaaga

SEQ ID NO: 270965 - RNA, 19 nt, Homo sapiens
  misc_RNA (1)...(19): siRNA sense strand
aaccuuccauccuuauuca

SEQ ID NO: 270966 - RNA, 19 nt, Homo sapiens
  misc_RNA (1)...(19): siRNA sense strand
ucacagaagggcagaaacu

SEQ ID NO: 270967 - RNA, 19 nt, Homo sapiens
  misc_RNA (1)...(19): siRNA sense strand
gcuuuucucuucuccauug

SEQ ID NO: 270968 - RNA, 19 nt, Homo sapiens
  misc_RNA (1)...(19): siRNA sense strand
ccaugaggaggaacaauuc

SEQ ID NO: 270969 - RNA, 19 nt, Homo sapiens
  misc_RNA (1)...(19): siRNA sense strand
uaagaacauccgugagcaa

SEQ ID NO: 270970 - RNA, 19 nt, Homo sapiens
  misc_RNA (1)...(19): siRNA sense strand
ugagcaaggacgcuuucua

SEQ ID NO: 270971 - RNA, 19 nt, Homo sapiens
  misc_RNA (1)...(19): siRNA sense strand
ccaaaagagugaacugucu

SEQ ID NO: 270972 - RNA, 19 nt, Homo sapiens
  misc_RNA (1)...(19): siRNA sense strand
gaagggcagaaacuuugau

SEQ ID NO: 270973 - RNA, 19 nt, Homo sapiens
  misc_RNA (1)...(19): siRNA sense strand
gaaugcccuuuggccauca

SEQ ID NO: 270974 - RNA, 19 nt, Homo sapiens
  misc_RNA (1)...(19): siRNA sense strand
agaaggaaaucaaaacaca

SEQ ID NO: 270975 - RNA, 19 nt, Homo sapiens
  misc_RNA (1)...(19): siRNA sense strand
caauuuaugacuccagaag

SEQ ID NO: 270976 - RNA, 19 nt, Homo sapiens
  misc_RNA (1)...(19): siRNA sense strand
gguaccaaaggugcaauuu

SEQ ID NO: 270977 - RNA, 19 nt, Homo sapiens
  misc_RNA (1)...(19): siRNA sense strand
ugaggaagcgcaacuccau

SEQ ID NO: 270978 - RNA, 19 nt, Homo sapiens
  misc_RNA (1)...(19): siRNA sense strand
aaaccuuccauccuuauuc

SEQ ID NO: 270979 - RNA, 19 nt, Homo sapiens
  misc_RNA (1)...(19): siRNA sense strand
ccagaauauuguggguuug

SEQ ID NO: 270980 - RNA, 19 nt, Homo sapiens
  misc_RNA (1)...(19): siRNA sense strand
caaucgagagcaauaacau

SEQ ID NO: 270981 - RNA, 19 nt, Homo sapiens
  misc_RNA (1)...(19): siRNA sense strand
uguauucuguggauuacuc

SEQ ID NO: 270982 - RNA, 19 nt, Homo sapiens
  misc_RNA (1)...(19): siRNA sense strand
aaggagugguugaaacuac

SEQ ID NO: 270983 - RNA, 19 nt, Homo sapiens
  misc_RNA (1)...(19): siRNA sense strand
uggaaggagugguugaaac

SEQ ID NO: 270984 - RNA, 19 nt, Homo sapiens
  misc_RNA (1)...(19): siRNA sense strand
auuuaugacuccagaagga

SEQ ID NO: 270985 - RNA, 19 nt, Homo sapiens
  misc_RNA (1)...(19): siRNA sense strand
gaggaagaaggaguguauu

SEQ ID NO: 270986 - RNA, 19 nt, Homo sapiens
  misc_RNA (1)...(19): siRNA sense strand
uccaugaggaggaacaauu

SEQ ID NO: 270987 - RNA, 19 nt, Homo sapiens
  misc_RNA (1)...(19): siRNA sense strand
gaggaggaacaauucuauc

SEQ ID NO: 270988 - RNA, 19 nt, Homo sapiens
  misc_RNA (1)...(19): siRNA sense strand
gagauuggcucugugaaau

SEQ ID NO: 270989 - RNA, 19 nt, Homo sapiens
  misc_RNA (1)...(19): siRNA sense strand
ggagauuggcucugugaaa

SEQ ID NO: 270990 - RNA, 19 nt, Homo sapiens
  misc_RNA (1)...(19): siRNA sense strand
aaacugacgucuuucugau

SEQ ID NO: 270991 - RNA, 19 nt, Homo sapiens
  misc_RNA (1)...(19): siRNA sense strand
caaacugacgucuuucuga

SEQ ID NO: 270992 - RNA, 19 nt, Homo sapiens
  misc_RNA (1)...(19): siRNA sense strand
gaagacaugcuugcugauc

SEQ ID NO: 270993 - RNA, 19 nt, Homo sapiens
  misc_RNA (1)...(19): siRNA sense strand
gauuggcucugugaaauac

SEQ ID NO: 270994 - RNA, 19 nt, Homo sapiens
  misc_RNA (1)...(19): siRNA sense strand
cgggaaaccagucaacuug

SEQ ID NO: 270995 - RNA, 19 nt, Homo sapiens
  misc_RNA (1)...(19): siRNA sense strand
aagacaugcuugcugauca

SEQ ID NO: 270996 - RNA, 19 nt, Homo sapiens
  misc_RNA (1)...(19): siRNA sense strand
cgacgacaaggacaccauu

SEQ ID NO: 270997 - RNA, 19 nt, Homo sapiens
  misc_RNA (1)...(19): siRNA sense strand
agauuggcucugugaaaua

SEQ ID NO: 270998 - RNA, 19 nt, Homo sapiens
  misc_RNA (1)...(19): siRNA sense strand
cagcgggucaggaggacua

SEQ ID NO: 270999 - RNA, 19 nt, Homo sapiens
  misc_RNA (1)...(19): siRNA sense strand
cgacaaggacaccauugag

SEQ ID NO: 271000 - RNA, 19 nt, Homo sapiens
  misc_RNA (1)...(19): siRNA sense strand
gccugaagacaguguuuga

SEQ ID NO: 271001 - RNA, 19 nt, Homo sapiens
  misc_RNA (1)...(19): siRNA sense strand
ggacgggaaaccagucaac

SEQ ID NO: 271002 - RNA, 19 nt, Homo sapiens
  misc_RNA (1)...(19): siRNA sense strand
gaaagaagcugcagucaug

SEQ ID NO: 271003 - RNA, 19 nt, Homo sapiens
  misc_RNA (1)...(19): siRNA sense strand
ucaacaaacuggagaauaa

SEQ ID NO: 271004 - RNA, 19 nt, Homo sapiens
  misc_RNA (1)...(19): siRNA sense strand
ggaaaucagugacauagug

SEQ ID NO: 271005 - RNA, 19 nt, Homo sapiens
  misc_RNA (1)...(19): siRNA sense strand
ccagaaggcugcccagaga

SEQ ID NO: 271006 - RNA, 19 nt, Homo sapiens
  misc_RNA (1)...(19): siRNA sense strand
gcaacaagcccacugucua

SEQ ID NO: 271007 - RNA, 19 nt, Homo sapiens
  misc_RNA (1)...(19): siRNA sense strand
gaaggaaaucagugacaua

SEQ ID NO: 271008 - RNA, 19 nt, Homo sapiens
  misc_RNA (1)...(19): siRNA sense strand
ucacugaguucaugaccua

SEQ ID NO: 271009 - RNA, 19 nt, Homo sapiens
  misc_RNA (1)...(19): siRNA sense strand
uguaugagcugcuagagaa

SEQ ID NO: 271010 - RNA, 19 nt, Homo sapiens
  misc_RNA (1)...(19): siRNA sense strand
agauaacacucuaagcaua

SEQ ID NO: 271011 - RNA, 19 nt, Homo sapiens
  misc_RNA (1)...(19): siRNA sense strand
gauaacacucuaagcauaa

SEQ ID NO: 271012 - RNA, 19 nt, Homo sapiens
  misc_RNA (1)...(19): siRNA sense strand
gcaaaugaggaacaaguuu

SEQ ID NO: 271013 - RNA, 19 nt, Homo sapiens
  misc_RNA (1)...(19): siRNA sense strand
gaagggaggguguaccauu

SEQ ID NO: 271014 - RNA, 19 nt, Homo sapiens
  misc_RNA (1)...(19): siRNA sense strand
gaaaaugaccccaaccuuu

SEQ ID NO: 271015 - RNA, 19 nt, Homo sapiens
  misc_RNA (1)...(19): siRNA sense strand
gaagagggccgagacauca

SEQ ID NO: 271016 - RNA, 19 nt, Homo sapiens
  misc_RNA (1)...(19): siRNA sense strand
ggagauaacacucuaagca

SEQ ID NO: 271017 - RNA, 19 nt, Homo sapiens
  misc_RNA (1)...(19): siRNA sense strand
gccaguagcaucugacuuu

SEQ ID NO: 271018 - RNA, 19 nt, Homo sapiens
  misc_RNA (1)...(19): siRNA sense strand
ucagcaagcuccucaguuc

SEQ ID NO: 271019 - RNA, 19 nt, Homo sapiens
  misc_RNA (1)...(19): siRNA sense strand
gagaaggucuaugaacuca

SEQ ID NO: 271020 - RNA, 19 nt, Homo sapiens
  misc_RNA (1)...(19): siRNA sense strand
aagggaggguguaccauua

SEQ ID NO: 271021 - RNA, 19 nt, Homo sapiens
  misc_RNA (1)...(19): siRNA sense strand
caacaagcccacugucuau

SEQ ID NO: 271022 - RNA, 19 nt, Homo sapiens
  misc_RNA (1)...(19): siRNA sense strand
gcgauccucuggaccauga

SEQ ID NO: 271023 - RNA, 19 nt, Homo sapiens
  misc_RNA (1)...(19): siRNA sense strand
aagcauaacuaaaggugaa

SEQ ID NO: 271024 - RNA, 19 nt, Homo sapiens
  misc_RNA (1)...(19): siRNA sense strand
ccaccaagccuuugaaaca

SEQ ID NO: 271025 - RNA, 19 nt, Homo sapiens
  misc_RNA (1)...(19): siRNA sense strand
ccauggagguggaagaguu

SEQ ID NO: 271026 - RNA, 19 nt, Homo sapiens
  misc_RNA (1)...(19): siRNA sense strand
cuucaucccucucauauca

SEQ ID NO: 271027 - RNA, 19 nt, Homo sapiens
  misc_RNA (1)...(19): siRNA sense strand
gcccagagaaggucuauga

SEQ ID NO: 271028 - RNA, 19 nt, Homo sapiens
  misc_RNA (1)...(19): siRNA sense strand
ucaacagucuggagaaaca

SEQ ID NO: 271029 - RNA, 19 nt, Homo sapiens
  misc_RNA (1)...(19): siRNA sense strand
ugaggaagcugcugaugag

SEQ ID NO: 271030 - RNA, 19 nt, Homo sapiens
  misc_RNA (1)...(19): siRNA sense strand
uaucaucacugaguucaug

SEQ ID NO: 271031 - RNA, 19 nt, Homo sapiens
  misc_RNA (1)...(19): siRNA sense strand
ccacugacgugccugagau

SEQ ID NO: 271032 - RNA, 19 nt, Homo sapiens
  misc_RNA (1)...(19): siRNA sense strand
guacauggccacucagauc

SEQ ID NO: 271033 - RNA, 19 nt, Homo sapiens
  misc_RNA (1)...(19): siRNA sense strand
ucaguucggugaaggaaau

SEQ ID NO: 271034 - RNA, 19 nt, Homo sapiens
  misc_RNA (1)...(19): siRNA sense strand
cagagaaggucuaugaacu

SEQ ID NO: 271035 - RNA, 19 nt, Homo sapiens
  misc_RNA (1)...(19): siRNA sense strand
gcauuuggaguauugcuuu

SEQ ID NO: 271036 - RNA, 19 nt, Homo sapiens
  misc_RNA (1)...(19): siRNA sense strand
gagaggccaucaacaaacu

SEQ ID NO: 271037 - RNA, 19 nt, Homo sapiens
  misc_RNA (1)...(19): siRNA sense strand
caaggaagaagccuggaaa

SEQ ID NO: 271038 - RNA, 19 nt, Homo sapiens
  misc_RNA (1)...(19): siRNA sense strand
ugaaauccaccaagccuuu

SEQ ID NO: 271039 - RNA, 19 nt, Homo sapiens
  misc_RNA (1)...(19): siRNA sense strand
gaguauugcuuugggaaau

SEQ ID NO: 271040 - RNA, 19 nt, Homo sapiens
  misc_RNA (1)...(19): siRNA sense strand
ggaagagggccgagacauc

SEQ ID NO: 271041 - RNA, 19 nt, Homo sapiens
  misc_RNA (1)...(19): siRNA sense strand
gaucaauggcagcuucuug

SEQ ID NO: 271042 - RNA, 19 nt, Homo sapiens
  misc_RNA (1)...(19): siRNA sense strand
caccaagccuuugaaacaa

SEQ ID NO: 271043 - RNA, 19 nt, Homo sapiens
  misc_RNA (1)...(19): siRNA sense strand
ucaacacccuggccgaguu

SEQ ID NO: 271044 - RNA, 19 nt, Homo sapiens
  misc_RNA (1)...(19): siRNA sense strand
aagcugcagucaugaaaga

SEQ ID NO: 271045 - RNA, 19 nt, Homo sapiens
  misc_RNA (1)...(19): siRNA sense strand
ucguugcacuguaugauuu

SEQ ID NO: 271046 - RNA, 19 nt, Homo sapiens
  misc_RNA (1)...(19): siRNA sense strand
ggaucaacacugcuucuga

SEQ ID NO: 271047 - RNA, 19 nt, Homo sapiens
  misc_RNA (1)...(19): siRNA sense strand
gccgaggaguccagaguga

SEQ ID NO: 271048 - RNA, 19 nt, Homo sapiens
  misc_RNA (1)...(19): siRNA sense strand
acaacaaguucuccaucaa

SEQ ID NO: 271049 - RNA, 19 nt, Homo sapiens
  misc_RNA (1)...(19): siRNA sense strand
uacaacaaguucuccauca

SEQ ID NO: 271050 - RNA, 19 nt, Homo sapiens
  misc_RNA (1)...(19): siRNA sense strand
gagauaacacucuaagcau

SEQ ID NO: 271051 - RNA, 19 nt, Homo sapiens
  misc_RNA (1)...(19): siRNA sense strand
ccgagagccuggccuacaa

SEQ ID NO: 271052 - RNA, 19 nt, Homo sapiens
  misc_RNA (1)...(19): siRNA sense strand
ccaagccuuugaaacaaug

SEQ ID NO: 271053 - RNA, 19 nt, Homo sapiens
  misc_RNA (1)...(19): siRNA sense strand
uggugaagguagcugauuu

SEQ ID NO: 271054 - RNA, 19 nt, Homo sapiens
  misc_RNA (1)...(19): siRNA sense strand
guauugcuuugggaaauug

SEQ ID NO: 271055 - RNA, 19 nt, Homo sapiens
  misc_RNA (1)...(19): siRNA sense strand
cgucugggcauuuggagua

SEQ ID NO: 271056 - RNA, 19 nt, Homo sapiens
  misc_RNA (1)...(19): siRNA sense strand
ucaccacgcuccauuaucc

SEQ ID NO: 271057 - RNA, 19 nt, Homo sapiens
  misc_RNA (1)...(19): siRNA sense strand
ggcacaagcacuccucuga

SEQ ID NO: 271058 - RNA, 19 nt, Homo sapiens
  misc_RNA (1)...(19): siRNA sense strand
gaaauccaccaagccuuug

SEQ ID NO: 271059 - RNA, 19 nt, Homo sapiens
  misc_RNA (1)...(19): siRNA sense strand
caacaaguucuccaucaag

SEQ ID NO: 271060 - RNA, 19 nt, Homo sapiens
  misc_RNA (1)...(19): siRNA sense strand
gugugaagcccaaaccaaa

SEQ ID NO: 271061 - RNA, 19 nt, Homo sapiens
  misc_RNA (1)...(19): siRNA sense strand
caacaaacuggagaauaau

SEQ ID NO: 271062 - RNA, 19 nt, Homo sapiens
  misc_RNA (1)...(19): siRNA sense strand
ggaguauugcuuugggaaa

SEQ ID NO: 271063 - RNA, 19 nt, Homo sapiens
  misc_RNA (1)...(19): siRNA sense strand
gagccuggccuacaacaag

SEQ ID NO: 271064 - RNA, 19 nt, Homo sapiens
  misc_RNA (1)...(19): siRNA sense strand
acgggaaccuccuggacua

SEQ ID NO: 271065 - RNA, 19 nt, Homo sapiens
  misc_RNA (1)...(19): siRNA sense strand
gagggcguguggaagaaau

SEQ ID NO: 271066 - RNA, 19 nt, Homo sapiens
  misc_RNA (1)...(19): siRNA sense strand
ccagguguaugagcugcua

SEQ ID NO: 271067 - RNA, 19 nt, Homo sapiens
  misc_RNA (1)...(19): siRNA sense strand
aaaaggagcuggggaaaca

SEQ ID NO: 271068 - RNA, 19 nt, Homo sapiens
  misc_RNA (1)...(19): siRNA sense strand
ccaguagcaucugacuuug

SEQ ID NO: 271069 - RNA, 19 nt, Homo sapiens
  misc_RNA (1)...(19): siRNA sense strand
ugaaggaaaucagugacau

SEQ ID NO: 271070 - RNA, 19 nt, Homo sapiens
  misc_RNA (1)...(19): siRNA sense strand
cguucuauaucaucacuga

SEQ ID NO: 271071 - RNA, 19 nt, Homo sapiens
  misc_RNA (1)...(19): siRNA sense strand
ccgaguugguucaucauca

SEQ ID NO: 271072 - RNA, 19 nt, Homo sapiens
  misc_RNA (1)...(19): siRNA sense strand
cgaguugguucaucaucau

SEQ ID NO: 271073 - RNA, 19 nt, Homo sapiens
  misc_RNA (1)...(19): siRNA sense strand
ccgagaggccaucaacaaa

SEQ ID NO: 271074 - RNA, 19 nt, Homo sapiens
  misc_RNA (1)...(19): siRNA sense strand
uaucucagacgaaguggaa

SEQ ID NO: 271075 - RNA, 19 nt, Homo sapiens
  misc_RNA (1)...(19): siRNA sense strand
ccgcaaugccgcugaguau

SEQ ID NO: 271076 - RNA, 19 nt, Homo sapiens
  misc_RNA (1)...(19): siRNA sense strand
gauuccauccagcaaauga

SEQ ID NO: 271077 - RNA, 19 nt, Homo sapiens
  misc_RNA (1)...(19): siRNA sense strand
acucuaagcauaacuaaag

SEQ ID NO: 271078 - RNA, 19 nt, Homo sapiens
  misc_RNA (1)...(19): siRNA sense strand
uuugggaaauugcuaccua

SEQ ID NO: 271079 - RNA, 19 nt, Homo sapiens
  misc_RNA (1)...(19): siRNA sense strand
ugaaggaggacaccaugga

SEQ ID NO: 271080 - RNA, 19 nt, Homo sapiens
  misc_RNA (1)...(19): siRNA sense strand
gugacauagugcagaggua

SEQ ID NO: 271081 - RNA, 19 nt, Homo sapiens
  misc_RNA (1)...(19): siRNA sense strand
cuccauugcucccucgaaa

SEQ ID NO: 271082 - RNA, 19 nt, Homo sapiens
  misc_RNA (1)...(19): siRNA sense strand
gagcauguuggcaguggaa

SEQ ID NO: 271083 - RNA, 19 nt, Homo sapiens
  misc_RNA (1)...(19): siRNA sense strand
gaaacacuccugguaccau

SEQ ID NO: 271084 - RNA, 19 nt, Homo sapiens
  misc_RNA (1)...(19): siRNA sense strand
caucaccacgcuccauuau

SEQ ID NO: 271085 - RNA, 19 nt, Homo sapiens
  misc_RNA (1)...(19): siRNA sense strand
agucaacagucuggagaaa

SEQ ID NO: 271086 - RNA, 19 nt, Homo sapiens
  misc_RNA (1)...(19): siRNA sense strand
cagcaaaugaggaacaagu

SEQ ID NO: 271087 - RNA, 19 nt, Homo sapiens
  misc_RNA (1)...(19): siRNA sense strand
agggaaggcuggaggaaag

SEQ ID NO: 271088 - RNA, 19 nt, Homo sapiens
  misc_RNA (1)...(19): siRNA sense strand
ucaagaagaagaagaagac

SEQ ID NO: 271089 - RNA, 19 nt, Homo sapiens
  misc_RNA (1)...(19): siRNA sense strand
ccagagcugcccaccaaga

SEQ ID NO: 271090 - RNA, 19 nt, Homo sapiens
  misc_RNA (1)...(19): siRNA sense strand
ucuauaucaucacugaguu

SEQ ID NO: 271091 - RNA, 19 nt, Homo sapiens
  misc_RNA (1)...(19): siRNA sense strand
ccacucaggacuucagcaa

SEQ ID NO: 271092 - RNA, 19 nt, Homo sapiens
  misc_RNA (1)...(19): siRNA sense strand
ugaucaagaagaagaagaa

SEQ ID NO: 271093 - RNA, 19 nt, Homo sapiens
  misc_RNA (1)...(19): siRNA sense strand
ccaugagccugccgugucu

SEQ ID NO: 271094 - RNA, 19 nt, Homo sapiens
  misc_RNA (1)...(19): siRNA sense strand
gagcugcagagcacagaga

SEQ ID NO: 271095 - RNA, 19 nt, Homo sapiens
  misc_RNA (1)...(19): siRNA sense strand
gcaaccggcaggaggugaa

SEQ ID NO: 271096 - RNA, 19 nt, Homo sapiens
  misc_RNA (1)...(19): siRNA sense strand
uggccgaguugguucauca

SEQ ID NO: 271097 - RNA, 19 nt, Homo sapiens
  misc_RNA (1)...(19): siRNA sense strand
ggugugaagcccaaaccaa

SEQ ID NO: 271098 - RNA, 19 nt, Homo sapiens
  misc_RNA (1)...(19): siRNA sense strand
gggaaauugcuaccuaugg

SEQ ID NO: 271099 - RNA, 19 nt, Homo sapiens
  misc_RNA (1)...(19): siRNA sense strand
ugaaagaagcugcagucau

SEQ ID NO: 271100 - RNA, 19 nt, Homo sapiens
  misc_RNA (1)...(19): siRNA sense strand
caagcccacugucuauggu

SEQ ID NO: 271101 - RNA, 19 nt, Homo sapiens
  misc_RNA (1)...(19): siRNA sense strand
cauaucaacccgagugucu

SEQ ID NO: 271102 - RNA, 19 nt, Homo sapiens
  misc_RNA (1)...(19): siRNA sense strand
gaaagaagcugcagucaug

SEQ ID NO: 271103 - RNA, 19 nt, Homo sapiens
  misc_RNA (1)...(19): siRNA sense strand
ucaacaaacuggagaauaa

SEQ ID NO: 271104 - RNA, 19 nt, Homo sapiens
  misc_RNA (1)...(19): siRNA sense strand
ggaaaucagugacauagug

SEQ ID NO: 271105 - RNA, 19 nt, Homo sapiens
  misc_RNA (1)...(19): siRNA sense strand
ccagaaggcugcccagaga

SEQ ID NO: 271106 - RNA, 19 nt, Homo sapiens
  misc_RNA (1)...(19): siRNA sense strand
gcaacaagcccacugucua

SEQ ID NO: 271107 - RNA, 19 nt, Homo sapiens
  misc_RNA (1)...(19): siRNA sense strand
gaaggaaaucagugacaua

SEQ ID NO: 271108 - RNA, 19 nt, Homo sapiens
  misc_RNA (1)...(19): siRNA sense strand
ucacugaguucaugaccua

SEQ ID NO: 271109 - RNA, 19 nt, Homo sapiens
  misc_RNA (1)...(19): siRNA sense strand
uguaugagcugcuagagaa

SEQ ID NO: 271110 - RNA, 19 nt, Homo sapiens
  misc_RNA (1)...(19): siRNA sense strand
agauaacacucuaagcaua

SEQ ID NO: 271111 - RNA, 19 nt, Homo sapiens
  misc_RNA (1)...(19): siRNA sense strand
gauaacacucuaagcauaa

SEQ ID NO: 271112 - RNA, 19 nt, Homo sapiens
  misc_RNA (1)...(19): siRNA sense strand
gcaaaugaggaacaaguuu

SEQ ID NO: 271113 - RNA, 19 nt, Homo sapiens
  misc_RNA (1)...(19): siRNA sense strand
gaagggaggguguaccauu

SEQ ID NO: 271114 - RNA, 19 nt, Homo sapiens
  misc_RNA (1)...(19): siRNA sense strand
gaaaaugaccccaaccuuu

SEQ ID NO: 271115 - RNA, 19 nt, Homo sapiens
  misc_RNA (1)...(19): siRNA sense strand
gaagagggccgagacauca

SEQ ID NO: 271116 - RNA, 19 nt, Homo sapiens
  misc_RNA (1)...(19): siRNA sense strand
ggagauaacacucuaagca

SEQ ID NO: 271117 - RNA, 19 nt, Homo sapiens
  misc_RNA (1)...(19): siRNA sense strand
gccaguagcaucugacuuu

SEQ ID NO: 271118 - RNA, 19 nt, Homo sapiens
  misc_RNA (1)...(19): siRNA sense strand
ucagcaagcuccucaguuc

SEQ ID NO: 271119 - RNA, 19 nt, Homo sapiens
  misc_RNA (1)...(19): siRNA sense strand
gagaaggucuaugaacuca

SEQ ID NO: 271120 - RNA, 19 nt, Homo sapiens
  misc_RNA (1)...(19): siRNA sense strand
aagggaggguguaccauua

SEQ ID NO: 271121 - RNA, 19 nt, Homo sapiens
  misc_RNA (1)...(19): siRNA sense strand
caacaagcccacugucuau

SEQ ID NO: 271122 - RNA, 19 nt, Homo sapiens
  misc_RNA (1)...(19): siRNA sense strand
gcgauccucuggaccauga

SEQ ID NO: 271123 - RNA, 19 nt, Homo sapiens
  misc_RNA (1)...(19): siRNA sense strand
aagcauaacuaaaggugaa

SEQ ID NO: 271124 - RNA, 19 nt, Homo sapiens
  misc_RNA (1)...(19): siRNA sense strand
ccaccaagccuuugaaaca

SEQ ID NO: 271125 - RNA, 19 nt, Homo sapiens
  misc_RNA (1)...(19): siRNA sense strand
ccauggagguggaagaguu

SEQ ID NO: 271126 - RNA, 19 nt, Homo sapiens
  misc_RNA (1)...(19): siRNA sense strand
cuucaucccucucauauca

SEQ ID NO: 271127 - RNA, 19 nt, Homo sapiens
  misc_RNA (1)...(19): siRNA sense strand
gcccagagaaggucuauga

SEQ ID NO: 271128 - RNA, 19 nt, Homo sapiens
  misc_RNA (1)...(19): siRNA sense strand
ucaacagucuggagaaaca

SEQ ID NO: 271129 - RNA, 19 nt, Homo sapiens
  misc_RNA (1)...(19): siRNA sense strand
ugaggaagcugcugaugag

SEQ ID NO: 271130 - RNA, 19 nt, Homo sapiens
  misc_RNA (1)...(19): siRNA sense strand
uaucaucacugaguucaug

SEQ ID NO: 271131 - RNA, 19 nt, Homo sapiens
  misc_RNA (1)...(19): siRNA sense strand
ccacugacgugccugagau

SEQ ID NO: 271132 - RNA, 19 nt, Homo sapiens
  misc_RNA (1)...(19): siRNA sense strand
guacauggccacucagauc

SEQ ID NO: 271133 - RNA, 19 nt, Homo sapiens
  misc_RNA (1)...(19): siRNA sense strand
ucaguucggugaaggaaau

SEQ ID NO: 271134 - RNA, 19 nt, Homo sapiens
  misc_RNA (1)...(19): siRNA sense strand
cagagaaggucuaugaacu

SEQ ID NO: 271135 - RNA, 19 nt, Homo sapiens
  misc_RNA (1)...(19): siRNA sense strand
gcauuuggaguauugcuuu

SEQ ID NO: 271136 - RNA, 19 nt, Homo sapiens
  misc_RNA (1)...(19): siRNA sense strand
gagaggccaucaacaaacu

SEQ ID NO: 271137 - RNA, 19 nt, Homo sapiens
  misc_RNA (1)...(19): siRNA sense strand
caaggaagaagccuggaaa

SEQ ID NO: 271138 - RNA, 19 nt, Homo sapiens
  misc_RNA (1)...(19): siRNA sense strand
ugaaauccaccaagccuuu

SEQ ID NO: 271139 - RNA, 19 nt, Homo sapiens
  misc_RNA (1)...(19): siRNA sense strand
gaguauugcuuugggaaau

SEQ ID NO: 271140 - RNA, 19 nt, Homo sapiens
  misc_RNA (1)...(19): siRNA sense strand
ggaagagggccgagacauc

SEQ ID NO: 271141 - RNA, 19 nt, Homo sapiens
  misc_RNA (1)...(19): siRNA sense strand
gaucaauggcagcuucuug

SEQ ID NO: 271142 - RNA, 19 nt, Homo sapiens
  misc_RNA (1)...(19): siRNA sense strand
caccaagccuuugaaacaa

SEQ ID NO: 271143 - RNA, 19 nt, Homo sapiens
  misc_RNA (1)...(19): siRNA sense strand
ucaacacccuggccgaguu

SEQ ID NO: 271144 - RNA, 19 nt, Homo sapiens
  misc_RNA (1)...(19): siRNA sense strand
aagcugcagucaugaaaga

SEQ ID NO: 271145 - RNA, 19 nt, Homo sapiens
  misc_RNA (1)...(19): siRNA sense strand
ucguugcacuguaugauuu

SEQ ID NO: 271146 - RNA, 19 nt, Homo sapiens
  misc_RNA (1)...(19): siRNA sense strand
ggaucaacacugcuucuga

SEQ ID NO: 271147 - RNA, 19 nt, Homo sapiens
  misc_RNA (1)...(19): siRNA sense strand
gccgaggaguccagaguga

SEQ ID NO: 271148 - RNA, 19 nt, Homo sapiens
  misc_RNA (1)...(19): siRNA sense strand
acaacaaguucuccaucaa

SEQ ID NO: 271149 - RNA, 19 nt, Homo sapiens
  misc_RNA (1)...(19): siRNA sense strand
uacaacaaguucuccauca

SEQ ID NO: 271150 - RNA, 19 nt, Homo sapiens
  misc_RNA (1)...(19): siRNA sense strand
gagauaacacucuaagcau

SEQ ID NO: 271151 - RNA, 19 nt, Homo sapiens
  misc_RNA (1)...(19): siRNA sense strand
ccgagagccuggccuacaa

SEQ ID NO: 271152 - RNA, 19 nt, Homo sapiens
  misc_RNA (1)...(19): siRNA sense strand
ccaagccuuugaaacaaug

SEQ ID NO: 271153 - RNA, 19 nt, Homo sapiens
  misc_RNA (1)...(19): siRNA sense strand
uggugaagguagcugauuu

SEQ ID NO: 271154 - RNA, 19 nt, Homo sapiens
  misc_RNA (1)...(19): siRNA sense strand
guauugcuuugggaaauug

SEQ ID NO: 271155 - RNA, 19 nt, Homo sapiens
  misc_RNA (1)...(19): siRNA sense strand
cgucugggcauuuggagua

SEQ ID NO: 271156 - RNA, 19 nt, Homo sapiens
  misc_RNA (1)...(19): siRNA sense strand
ucaccacgcuccauuaucc

SEQ ID NO: 271157 - RNA, 19 nt, Homo sapiens
  misc_RNA (1)...(19): siRNA sense strand
ggcacaagcacuccucuga

SEQ ID NO: 271158 - RNA, 19 nt, Homo sapiens
  misc_RNA (1)...(19): siRNA sense strand
gaaauccaccaagccuuug

SEQ ID NO: 271159 - RNA, 19 nt, Homo sapiens
  misc_RNA (1)...(19): siRNA sense strand
caacaaguucuccaucaag

SEQ ID NO: 271160 - RNA, 19 nt, Homo sapiens
  misc_RNA (1)...(19): siRNA sense strand
gugugaagcccaaaccaaa

SEQ ID NO: 271161 - RNA, 19 nt, Homo sapiens
  misc_RNA (1)...(19): siRNA sense strand
caacaaacuggagaauaau

SEQ ID NO: 271162 - RNA, 19 nt, Homo sapiens
  misc_RNA (1)...(19): siRNA sense strand
ggaguauugcuuugggaaa

SEQ ID NO: 271163 - RNA, 19 nt, Homo sapiens
  misc_RNA (1)...(19): siRNA sense strand
gagccuggccuacaacaag

SEQ ID NO: 271164 - RNA, 19 nt, Homo sapiens
  misc_RNA (1)...(19): siRNA sense strand
acgggaaccuccuggacua

SEQ ID NO: 271165 - RNA, 19 nt, Homo sapiens
  misc_RNA (1)...(19): siRNA sense strand
gagggcguguggaagaaau

SEQ ID NO: 271166 - RNA, 19 nt, Homo sapiens
  misc_RNA (1)...(19): siRNA sense strand
ccagguguaugagcugcua

SEQ ID NO: 271167 - RNA, 19 nt, Homo sapiens
  misc_RNA (1)...(19): siRNA sense strand
aaaaggagcuggggaaaca

SEQ ID NO: 271168 - RNA, 19 nt, Homo sapiens
  misc_RNA (1)...(19): siRNA sense strand
ccaguagcaucugacuuug

SEQ ID NO: 271169 - RNA, 19 nt, Homo sapiens
  misc_RNA (1)...(19): siRNA sense strand
ugaaggaaaucagugacau

SEQ ID NO: 271170 - RNA, 19 nt, Homo sapiens
  misc_RNA (1)...(19): siRNA sense strand
cguucuauaucaucacuga

SEQ ID NO: 271171 - RNA, 19 nt, Homo sapiens
  misc_RNA (1)...(19): siRNA sense strand
ccgaguugguucaucauca

SEQ ID NO: 271172 - RNA, 19 nt, Homo sapiens
  misc_RNA (1)...(19): siRNA sense strand
cgaguugguucaucaucau

SEQ ID NO: 271173 - RNA, 19 nt, Homo sapiens
  misc_RNA (1)...(19): siRNA sense strand
ccgagaggccaucaacaaa

SEQ ID NO: 271174 - RNA, 19 nt, Homo sapiens
  misc_RNA (1)...(19): siRNA sense strand
uaucucagacgaaguggaa

SEQ ID NO: 271175 - RNA, 19 nt, Homo sapiens
  misc_RNA (1)...(19): siRNA sense strand
ccgcaaugccgcugaguau

SEQ ID NO: 271176 - RNA, 19 nt, Homo sapiens
  misc_RNA (1)...(19): siRNA sense strand
gauuccauccagcaaauga

SEQ ID NO: 271177 - RNA, 19 nt, Homo sapiens
  misc_RNA (1)...(19): siRNA sense strand
acucuaagcauaacuaaag

SEQ ID NO: 271178 - RNA, 19 nt, Homo sapiens
  misc_RNA (1)...(19): siRNA sense strand
uuugggaaauugcuaccua

SEQ ID NO: 271179 - RNA, 19 nt, Homo sapiens
  misc_RNA (1)...(19): siRNA sense strand
ugaaggaggacaccaugga

SEQ ID NO: 271180 - RNA, 19 nt, Homo sapiens
  misc_RNA (1)...(19): siRNA sense strand
gugacauagugcagaggua

SEQ ID NO: 271181 - RNA, 19 nt, Homo sapiens
  misc_RNA (1)...(19): siRNA sense strand
cuccauugcucccucgaaa

SEQ ID NO: 271182 - RNA, 19 nt, Homo sapiens
  misc_RNA (1)...(19): siRNA sense strand
gagcauguuggcaguggaa

SEQ ID NO: 271183 - RNA, 19 nt, Homo sapiens
  misc_RNA (1)...(19): siRNA sense strand
gaaacacuccugguaccau

SEQ ID NO: 271184 - RNA, 19 nt, Homo sapiens
  misc_RNA (1)...(19): siRNA sense strand
caucaccacgcuccauuau

SEQ ID NO: 271185 - RNA, 19 nt, Homo sapiens
  misc_RNA (1)...(19): siRNA sense strand
agucaacagucuggagaaa

SEQ ID NO: 271186 - RNA, 19 nt, Homo sapiens
  misc_RNA (1)...(19): siRNA sense strand
cagcaaaugaggaacaagu

SEQ ID NO: 271187 - RNA, 19 nt, Homo sapiens
  misc_RNA (1)...(19): siRNA sense strand
agggaaggcuggaggaaag

SEQ ID NO: 271188 - RNA, 19 nt, Homo sapiens
  misc_RNA (1)...(19): siRNA sense strand
ucaagaagaagaagaagac

SEQ ID NO: 271189 - RNA, 19 nt, Homo sapiens
  misc_RNA (1)...(19): siRNA sense strand
ccagagcugcccaccaaga

SEQ ID NO: 271190 - RNA, 19 nt, Homo sapiens
  misc_RNA (1)...(19): siRNA sense strand
ucuauaucaucacugaguu

SEQ ID NO: 271191 - RNA, 19 nt, Homo sapiens
  misc_RNA (1)...(19): siRNA sense strand
ccacucaggacuucagcaa

SEQ ID NO: 271192 - RNA, 19 nt, Homo sapiens
  misc_RNA (1)...(19): siRNA sense strand
ugaucaagaagaagaagaa

SEQ ID NO: 271193 - RNA, 19 nt, Homo sapiens
  misc_RNA (1)...(19): siRNA sense strand
ccaugagccugccgugucu

SEQ ID NO: 271194 - RNA, 19 nt, Homo sapiens
  misc_RNA (1)...(19): siRNA sense strand
gagcugcagagcacagaga

SEQ ID NO: 271195 - RNA, 19 nt, Homo sapiens
  misc_RNA (1)...(19): siRNA sense strand
gcaaccggcaggaggugaa

SEQ ID NO: 271196 - RNA, 19 nt, Homo sapiens
  misc_RNA (1)...(19): siRNA sense strand
uggccgaguugguucauca

SEQ ID NO: 271197 - RNA, 19 nt, Homo sapiens
  misc_RNA (1)...(19): siRNA sense strand
ggugugaagcccaaaccaa

SEQ ID NO: 271198 - RNA, 19 nt, Homo sapiens
  misc_RNA (1)...(19): siRNA sense strand
gggaaauugcuaccuaugg

SEQ ID NO: 271199 - RNA, 19 nt, Homo sapiens
  misc_RNA (1)...(19): siRNA sense strand
ugaaagaagcugcagucau

SEQ ID NO: 271200 - RNA, 19 nt, Homo sapiens
  misc_RNA (1)...(19): siRNA sense strand
caagcccacugucuauggu

SEQ ID NO: 271201 - RNA, 19 nt, Homo sapiens
  misc_RNA (1)...(19): siRNA sense strand
cauaucaacccgagugucu

SEQ ID NO: 271202 - RNA, 19 nt, Homo sapiens
  misc_RNA (1)...(19): siRNA sense strand
gaaagaagcugcaguaaug

SEQ ID NO: 271203 - RNA, 19 nt, Homo sapiens
  misc_RNA (1)...(19): siRNA sense strand
gaacagauauuaccaugaa

SEQ ID NO: 271204 - RNA, 19 nt, Homo sapiens
  misc_RNA (1)...(19): siRNA sense strand
gaaguucgcucuaagaaug

SEQ ID NO: 271205 - RNA, 19 nt, Homo sapiens
  misc_RNA (1)...(19): siRNA sense strand
ggagccaaauuuccuauua

SEQ ID NO: 271206 - RNA, 19 nt, Homo sapiens
  misc_RNA (1)...(19): siRNA sense strand
gaaauggagcgaacagaua

SEQ ID NO: 271207 - RNA, 19 nt, Homo sapiens
  misc_RNA (1)...(19): siRNA sense strand
gaagagaaaugcuccuaca

SEQ ID NO: 271208 - RNA, 19 nt, Homo sapiens
  misc_RNA (1)...(19): siRNA sense strand
guaauaagccuacagucua

SEQ ID NO: 271209 - RNA, 19 nt, Homo sapiens
  misc_RNA (1)...(19): siRNA sense strand
gcacaggccucuaguggau

SEQ ID NO: 271210 - RNA, 19 nt, Homo sapiens
  misc_RNA (1)...(19): siRNA sense strand
ggaaauugcuaccuaugga

SEQ ID NO: 271211 - RNA, 19 nt, Homo sapiens
  misc_RNA (1)...(19): siRNA sense strand
gagccaaauuuccuauuaa

SEQ ID NO: 271212 - RNA, 19 nt, Homo sapiens
  misc_RNA (1)...(19): siRNA sense strand
ggagugaaguucgcucuaa

SEQ ID NO: 271213 - RNA, 19 nt, Homo sapiens
  misc_RNA (1)...(19): siRNA sense strand
gaagaagaauuucauccau

SEQ ID NO: 271214 - RNA, 19 nt, Homo sapiens
  misc_RNA (1)...(19): siRNA sense strand
ccaaugacaugcuuccaaa

SEQ ID NO: 271215 - RNA, 19 nt, Homo sapiens
  misc_RNA (1)...(19): siRNA sense strand
caaacccuguccuuaauaa

SEQ ID NO: 271216 - RNA, 19 nt, Homo sapiens
  misc_RNA (1)...(19): siRNA sense strand
ggaaugugcugaccuacug

SEQ ID NO: 271217 - RNA, 19 nt, Homo sapiens
  misc_RNA (1)...(19): siRNA sense strand
cagcauuucugaagaggua

SEQ ID NO: 271218 - RNA, 19 nt, Homo sapiens
  misc_RNA (1)...(19): siRNA sense strand
gaaauacagccuuacaguu

SEQ ID NO: 271219 - RNA, 19 nt, Homo sapiens
  misc_RNA (1)...(19): siRNA sense strand
gcaauggaguacuuagaga

SEQ ID NO: 271220 - RNA, 19 nt, Homo sapiens
  misc_RNA (1)...(19): siRNA sense strand
gaacaaggagaacauugaa

SEQ ID NO: 271221 - RNA, 19 nt, Homo sapiens
  misc_RNA (1)...(19): siRNA sense strand
uagaagaauuccugaaaga

SEQ ID NO: 271222 - RNA, 19 nt, Homo sapiens
  misc_RNA (1)...(19): siRNA sense strand
ggacagggccaaugacaug

SEQ ID NO: 271223 - RNA, 19 nt, Homo sapiens
  misc_RNA (1)...(19): siRNA sense strand
uggaagaaauacagccuua

SEQ ID NO: 271224 - RNA, 19 nt, Homo sapiens
  misc_RNA (1)...(19): siRNA sense strand
agaaacagguggagaacaa

SEQ ID NO: 271225 - RNA, 19 nt, Homo sapiens
  misc_RNA (1)...(19): siRNA sense strand
gacaccagcugcuugacua

SEQ ID NO: 271226 - RNA, 19 nt, Homo sapiens
  misc_RNA (1)...(19): siRNA sense strand
gcucagacccuacagaaga

SEQ ID NO: 271227 - RNA, 19 nt, Homo sapiens
  misc_RNA (1)...(19): siRNA sense strand
gcucagcagucuaaucaau

SEQ ID NO: 271228 - RNA, 19 nt, Homo sapiens
  misc_RNA (1)...(19): siRNA sense strand
gcugauggguucucuuuca

SEQ ID NO: 271229 - RNA, 19 nt, Homo sapiens
  misc_RNA (1)...(19): siRNA sense strand
gguaacuucucaucuguug

SEQ ID NO: 271230 - RNA, 19 nt, Homo sapiens
  misc_RNA (1)...(19): siRNA sense strand
cgucaucuguuguuccaua

SEQ ID NO: 271231 - RNA, 19 nt, Homo sapiens
  misc_RNA (1)...(19): siRNA sense strand
uaauaagccuacagucuau

SEQ ID NO: 271232 - RNA, 19 nt, Homo sapiens
  misc_RNA (1)...(19): siRNA sense strand
caaacaggccgcugagaaa

SEQ ID NO: 271233 - RNA, 19 nt, Homo sapiens
  misc_RNA (1)...(19): siRNA sense strand
gaagaaauacagccuuaca

SEQ ID NO: 271234 - RNA, 19 nt, Homo sapiens
  misc_RNA (1)...(19): siRNA sense strand
aaauucugcuuccaguuua

SEQ ID NO: 271235 - RNA, 19 nt, Homo sapiens
  misc_RNA (1)...(19): siRNA sense strand
cagagagucuugccuacaa

SEQ ID NO: 271236 - RNA, 19 nt, Homo sapiens
  misc_RNA (1)...(19): siRNA sense strand
gguagaagaauuccugaaa

SEQ ID NO: 271237 - RNA, 19 nt, Homo sapiens
  misc_RNA (1)...(19): siRNA sense strand
ccauggagguagaagaauu

SEQ ID NO: 271238 - RNA, 19 nt, Homo sapiens
  misc_RNA (1)...(19): siRNA sense strand
gcuggaaugugcugaccua

SEQ ID NO: 271239 - RNA, 19 nt, Homo sapiens
  misc_RNA (1)...(19): siRNA sense strand
ggaauuugcuggauuaccu

SEQ ID NO: 271240 - RNA, 19 nt, Homo sapiens
  misc_RNA (1)...(19): siRNA sense strand
guagaagaauuccugaaag

SEQ ID NO: 271241 - RNA, 19 nt, Homo sapiens
  misc_RNA (1)...(19): siRNA sense strand
aaauacagccuuacaguug

SEQ ID NO: 271242 - RNA, 19 nt, Homo sapiens
  misc_RNA (1)...(19): siRNA sense strand
aauacgaacucacggguaa

SEQ ID NO: 271243 - RNA, 19 nt, Homo sapiens
  misc_RNA (1)...(19): siRNA sense strand
gaaaucaagcauccuaauc

SEQ ID NO: 271244 - RNA, 19 nt, Homo sapiens
  misc_RNA (1)...(19): siRNA sense strand
gaagaauuccugaaagaag

SEQ ID NO: 271245 - RNA, 19 nt, Homo sapiens
  misc_RNA (1)...(19): siRNA sense strand
ccaaauuuccuauuaagug

SEQ ID NO: 271246 - RNA, 19 nt, Homo sapiens
  misc_RNA (1)...(19): siRNA sense strand
gaaaaucucagcagacaaa

SEQ ID NO: 271247 - RNA, 19 nt, Homo sapiens
  misc_RNA (1)...(19): siRNA sense strand
gauaacacacucagcauca

SEQ ID NO: 271248 - RNA, 19 nt, Homo sapiens
  misc_RNA (1)...(19): siRNA sense strand
aauucaagcucuuaucuga

SEQ ID NO: 271249 - RNA, 19 nt, Homo sapiens
  misc_RNA (1)...(19): siRNA sense strand
ggaaauggagcgaacagau

SEQ ID NO: 271250 - RNA, 19 nt, Homo sapiens
  misc_RNA (1)...(19): siRNA sense strand
cuacauggccacucagauu

SEQ ID NO: 271251 - RNA, 19 nt, Homo sapiens
  misc_RNA (1)...(19): siRNA sense strand
gcacaagaugccacagaaa

SEQ ID NO: 271252 - RNA, 19 nt, Homo sapiens
  misc_RNA (1)...(19): siRNA sense strand
agaagaauuucauccauag

SEQ ID NO: 271253 - RNA, 19 nt, Homo sapiens
  misc_RNA (1)...(19): siRNA sense strand
caagcauccuaaucuggua

SEQ ID NO: 271254 - RNA, 19 nt, Homo sapiens
  misc_RNA (1)...(19): siRNA sense strand
ccaaacaggccgcugagaa

SEQ ID NO: 271255 - RNA, 19 nt, Homo sapiens
  misc_RNA (1)...(19): siRNA sense strand
gaaauugcuaccuauggaa

SEQ ID NO: 271256 - RNA, 19 nt, Homo sapiens
  misc_RNA (1)...(19): siRNA sense strand
cuacaauaccuucucaauu

SEQ ID NO: 271257 - RNA, 19 nt, Homo sapiens
  misc_RNA (1)...(19): siRNA sense strand
gcacagcagguacuaaagu

SEQ ID NO: 271258 - RNA, 19 nt, Homo sapiens
  misc_RNA (1)...(19): siRNA sense strand
gaucuagccauuacagaga

SEQ ID NO: 271259 - RNA, 19 nt, Homo sapiens
  misc_RNA (1)...(19): siRNA sense strand
cauaagaaauacgaacuca

SEQ ID NO: 271260 - RNA, 19 nt, Homo sapiens
  misc_RNA (1)...(19): siRNA sense strand
ggaaaucaagcauccuaau

SEQ ID NO: 271261 - RNA, 19 nt, Homo sapiens
  misc_RNA (1)...(19): siRNA sense strand
gugauguggugcagaggua

SEQ ID NO: 271262 - RNA, 19 nt, Homo sapiens
  misc_RNA (1)...(19): siRNA sense strand
ucguugcacuuuaugauuu

SEQ ID NO: 271263 - RNA, 19 nt, Homo sapiens
  misc_RNA (1)...(19): siRNA sense strand
caaagaggcccugcuggaa

SEQ ID NO: 271264 - RNA, 19 nt, Homo sapiens
  misc_RNA (1)...(19): siRNA sense strand
uaaaguggcucugagaaaa

SEQ ID NO: 271265 - RNA, 19 nt, Homo sapiens
  misc_RNA (1)...(19): siRNA sense strand
ggucaaacucuacaucuuc

SEQ ID NO: 271266 - RNA, 19 nt, Homo sapiens
  misc_RNA (1)...(19): siRNA sense strand
ugaagaaacagguggagaa

SEQ ID NO: 271267 - RNA, 19 nt, Homo sapiens
  misc_RNA (1)...(19): siRNA sense strand
cauugugacugaauacaug

SEQ ID NO: 271268 - RNA, 19 nt, Homo sapiens
  misc_RNA (1)...(19): siRNA sense strand
uuccaugacuccagcauuu

SEQ ID NO: 271269 - RNA, 19 nt, Homo sapiens
  misc_RNA (1)...(19): siRNA sense strand
gagagucuugccuacaaua

SEQ ID NO: 271270 - RNA, 19 nt, Homo sapiens
  misc_RNA (1)...(19): siRNA sense strand
acgggaauuugcuggauua

SEQ ID NO: 271271 - RNA, 19 nt, Homo sapiens
  misc_RNA (1)...(19): siRNA sense strand
gagugacccuaaucucuuc

SEQ ID NO: 271272 - RNA, 19 nt, Homo sapiens
  misc_RNA (1)...(19): siRNA sense strand
gcacccaaguguaauaagc

SEQ ID NO: 271273 - RNA, 19 nt, Homo sapiens
  misc_RNA (1)...(19): siRNA sense strand
ugaaagaagcugcaguaau

SEQ ID NO: 271274 - RNA, 19 nt, Homo sapiens
  misc_RNA (1)...(19): siRNA sense strand
ggacagcaccagagagucu

SEQ ID NO: 271275 - RNA, 19 nt, Homo sapiens
  misc_RNA (1)...(19): siRNA sense strand
gagaacaaggagaacauug

SEQ ID NO: 271276 - RNA, 19 nt, Homo sapiens
  misc_RNA (1)...(19): siRNA sense strand
gaagagccaacugcccuaa

SEQ ID NO: 271277 - RNA, 19 nt, Homo sapiens
  misc_RNA (1)...(19): siRNA sense strand
ggaagaugccaaagagaca

SEQ ID NO: 271278 - RNA, 19 nt, Homo sapiens
  misc_RNA (1)...(19): siRNA sense strand
guacgagggacguguguau

SEQ ID NO: 271279 - RNA, 19 nt, Homo sapiens
  misc_RNA (1)...(19): siRNA sense strand
cuaaaguggcucugagaaa

SEQ ID NO: 271280 - RNA, 19 nt, Homo sapiens
  misc_RNA (1)...(19): siRNA sense strand
cagcagcuccuuccgagaa

SEQ ID NO: 271281 - RNA, 19 nt, Homo sapiens
  misc_RNA (1)...(19): siRNA sense strand
gcacugccucgaaagcaaa

SEQ ID NO: 271282 - RNA, 19 nt, Homo sapiens
  misc_RNA (1)...(19): siRNA sense strand
aaaaggauaucgaauggaa

SEQ ID NO: 271283 - RNA, 19 nt, Homo sapiens
  misc_RNA (1)...(19): siRNA sense strand
agaauuucauccauagaga

SEQ ID NO: 271284 - RNA, 19 nt, Homo sapiens
  misc_RNA (1)...(19): siRNA sense strand
gaagaggugacugcaguug

SEQ ID NO: 271285 - RNA, 19 nt, Homo sapiens
  misc_RNA (1)...(19): siRNA sense strand
ccugaaagaagcugcagua

SEQ ID NO: 271286 - RNA, 19 nt, Homo sapiens
  misc_RNA (1)...(19): siRNA sense strand
ugugggaaauugcuaccua

SEQ ID NO: 271287 - RNA, 19 nt, Homo sapiens
  misc_RNA (1)...(19): siRNA sense strand
ugacugaauacaugccaua

SEQ ID NO: 271288 - RNA, 19 nt, Homo sapiens
  misc_RNA (1)...(19): siRNA sense strand
ccgagaggcugugagcaaa

SEQ ID NO: 271289 - RNA, 19 nt, Homo sapiens
  misc_RNA (1)...(19): siRNA sense strand
caaagugccaguccuuauc

SEQ ID NO: 271290 - RNA, 19 nt, Homo sapiens
  misc_RNA (1)...(19): siRNA sense strand
uccgagaaauggagaauca

SEQ ID NO: 271291 - RNA, 19 nt, Homo sapiens
  misc_RNA (1)...(19): siRNA sense strand
ggagaacaaggagaacauu

SEQ ID NO: 271292 - RNA, 19 nt, Homo sapiens
  misc_RNA (1)...(19): siRNA sense strand
ucucuucguugcacuuuau

SEQ ID NO: 271293 - RNA, 19 nt, Homo sapiens
  misc_RNA (1)...(19): siRNA sense strand
ccuaaucugguacaacuuu

SEQ ID NO: 271294 - RNA, 19 nt, Homo sapiens
  misc_RNA (1)...(19): siRNA sense strand
aagaggcccugcuggaaug

SEQ ID NO: 271295 - RNA, 19 nt, Homo sapiens
  misc_RNA (1)...(19): siRNA sense strand
caucacaggcuucuuuaca

SEQ ID NO: 271296 - RNA, 19 nt, Homo sapiens
  misc_RNA (1)...(19): siRNA sense strand
gaaagcaaagagacaaguc

SEQ ID NO: 271297 - RNA, 19 nt, Homo sapiens
  misc_RNA (1)...(19): siRNA sense strand
gaagaauuucauccauaga

SEQ ID NO: 271298 - RNA, 19 nt, Homo sapiens
  misc_RNA (1)...(19): siRNA sense strand
uggauuaccuccgagaaug

SEQ ID NO: 271299 - RNA, 19 nt, Homo sapiens
  misc_RNA (1)...(19): siRNA sense strand
agaacaaggagaacauuga

SEQ ID NO: 271300 - RNA, 19 nt, Homo sapiens
  misc_RNA (1)...(19): siRNA sense strand
ccacaaagugccaguccuu

SEQ ID NO: 271301 - RNA, 19 nt, Homo sapiens
  misc_RNA (1)...(19): siRNA sense strand
caggauaggauggcaauga

SEQ ID NO: 271302 - RNA, 19 nt, Homo sapiens
  misc_RNA (1)...(19): siRNA sense strand
gaaagaagcugcaguaaug

SEQ ID NO: 271303 - RNA, 19 nt, Homo sapiens
  misc_RNA (1)...(19): siRNA sense strand
gaacagauauuaccaugaa

SEQ ID NO: 271304 - RNA, 19 nt, Homo sapiens
  misc_RNA (1)...(19): siRNA sense strand
gaaguucgcucuaagaaug

SEQ ID NO: 271305 - RNA, 19 nt, Homo sapiens
  misc_RNA (1)...(19): siRNA sense strand
ggagccaaauuuccuauua

SEQ ID NO: 271306 - RNA, 19 nt, Homo sapiens
  misc_RNA (1)...(19): siRNA sense strand
gaaauggagcgaacagaua

SEQ ID NO: 271307 - RNA, 19 nt, Homo sapiens
  misc_RNA (1)...(19): siRNA sense strand
gaagagaaaugcuccuaca

SEQ ID NO: 271308 - RNA, 19 nt, Homo sapiens
  misc_RNA (1)...(19): siRNA sense strand
guaauaagccuacagucua

SEQ ID NO: 271309 - RNA, 19 nt, Homo sapiens
  misc_RNA (1)...(19): siRNA sense strand
gcacaggccucuaguggau

SEQ ID NO: 271310 - RNA, 19 nt, Homo sapiens
  misc_RNA (1)...(19): siRNA sense strand
ggaaauugcuaccuaugga

SEQ ID NO: 271311 - RNA, 19 nt, Homo sapiens
  misc_RNA (1)...(19): siRNA sense strand
gagccaaauuuccuauuaa

SEQ ID NO: 271312 - RNA, 19 nt, Homo sapiens
  misc_RNA (1)...(19): siRNA sense strand
ggagugaaguucgcucuaa

SEQ ID NO: 271313 - RNA, 19 nt, Homo sapiens
  misc_RNA (1)...(19): siRNA sense strand
gaagaagaauuucauccau

SEQ ID NO: 271314 - RNA, 19 nt, Homo sapiens
  misc_RNA (1)...(19): siRNA sense strand
ccaaugacaugcuuccaaa

SEQ ID NO: 271315 - RNA, 19 nt, Homo sapiens
  misc_RNA (1)...(19): siRNA sense strand
caaacccuguccuuaauaa

SEQ ID NO: 271316 - RNA, 19 nt, Homo sapiens
  misc_RNA (1)...(19): siRNA sense strand
ggaaugugcugaccuacug

SEQ ID NO: 271317 - RNA, 19 nt, Homo sapiens
  misc_RNA (1)...(19): siRNA sense strand
cagcauuucugaagaggua

SEQ ID NO: 271318 - RNA, 19 nt, Homo sapiens
  misc_RNA (1)...(19): siRNA sense strand
gaaauacagccuuacaguu

SEQ ID NO: 271319 - RNA, 19 nt, Homo sapiens
  misc_RNA (1)...(19): siRNA sense strand
gcaauggaguacuuagaga

SEQ ID NO: 271320 - RNA, 19 nt, Homo sapiens
  misc_RNA (1)...(19): siRNA sense strand
gaacaaggagaacauugaa

SEQ ID NO: 271321 - RNA, 19 nt, Homo sapiens
  misc_RNA (1)...(19): siRNA sense strand
uagaagaauuccugaaaga

SEQ ID NO: 271322 - RNA, 19 nt, Homo sapiens
  misc_RNA (1)...(19): siRNA sense strand
ggacagggccaaugacaug

SEQ ID NO: 271323 - RNA, 19 nt, Homo sapiens
  misc_RNA (1)...(19): siRNA sense strand
uggaagaaauacagccuua

SEQ ID NO: 271324 - RNA, 19 nt, Homo sapiens
  misc_RNA (1)...(19): siRNA sense strand
agaaacagguggagaacaa

SEQ ID NO: 271325 - RNA, 19 nt, Homo sapiens
  misc_RNA (1)...(19): siRNA sense strand
gacaccagcugcuugacua

SEQ ID NO: 271326 - RNA, 19 nt, Homo sapiens
  misc_RNA (1)...(19): siRNA sense strand
gcucagacccuacagaaga

SEQ ID NO: 271327 - RNA, 19 nt, Homo sapiens
  misc_RNA (1)...(19): siRNA sense strand
gcucagcagucuaaucaau

SEQ ID NO: 271328 - RNA, 19 nt, Homo sapiens
  misc_RNA (1)...(19): siRNA sense strand
gcugauggguucucuuuca

SEQ ID NO: 271329 - RNA, 19 nt, Homo sapiens
  misc_RNA (1)...(19): siRNA sense strand
gguaacuucucaucuguug

SEQ ID NO: 271330 - RNA, 19 nt, Homo sapiens
  misc_RNA (1)...(19): siRNA sense strand
cgucaucuguuguuccaua

SEQ ID NO: 271331 - RNA, 19 nt, Homo sapiens
  misc_RNA (1)...(19): siRNA sense strand
uaauaagccuacagucuau

SEQ ID NO: 271332 - RNA, 19 nt, Homo sapiens
  misc_RNA (1)...(19): siRNA sense strand
caaacaggccgcugagaaa

SEQ ID NO: 271333 - RNA, 19 nt, Homo sapiens
  misc_RNA (1)...(19): siRNA sense strand
gaagaaauacagccuuaca

SEQ ID NO: 271334 - RNA, 19 nt, Homo sapiens
  misc_RNA (1)...(19): siRNA sense strand
aaauucugcuuccaguuua

SEQ ID NO: 271335 - RNA, 19 nt, Homo sapiens
  misc_RNA (1)...(19): siRNA sense strand
cagagagucuugccuacaa

SEQ ID NO: 271336 - RNA, 19 nt, Homo sapiens
  misc_RNA (1)...(19): siRNA sense strand
gguagaagaauuccugaaa

SEQ ID NO: 271337 - RNA, 19 nt, Homo sapiens
  misc_RNA (1)...(19): siRNA sense strand
ccauggagguagaagaauu

SEQ ID NO: 271338 - RNA, 19 nt, Homo sapiens
  misc_RNA (1)...(19): siRNA sense strand
gcuggaaugugcugaccua

SEQ ID NO: 271339 - RNA, 19 nt, Homo sapiens
  misc_RNA (1)...(19): siRNA sense strand
ggaauuugcuggauuaccu

SEQ ID NO: 271340 - RNA, 19 nt, Homo sapiens
  misc_RNA (1)...(19): siRNA sense strand
guagaagaauuccugaaag

SEQ ID NO: 271341 - RNA, 19 nt, Homo sapiens
  misc_RNA (1)...(19): siRNA sense strand
aaauacagccuuacaguug

SEQ ID NO: 271342 - RNA, 19 nt, Homo sapiens
  misc_RNA (1)...(19): siRNA sense strand
aauacgaacucacggguaa

SEQ ID NO: 271343 - RNA, 19 nt, Homo sapiens
  misc_RNA (1)...(19): siRNA sense strand
gaaaucaagcauccuaauc

SEQ ID NO: 271344 - RNA, 19 nt, Homo sapiens
  misc_RNA (1)...(19): siRNA sense strand
gaagaauuccugaaagaag

SEQ ID NO: 271345 - RNA, 19 nt, Homo sapiens
  misc_RNA (1)...(19): siRNA sense strand
ccaaauuuccuauuaagug

SEQ ID NO: 271346 - RNA, 19 nt, Homo sapiens
  misc_RNA (1)...(19): siRNA sense strand
gaaaaucucagcagacaaa

SEQ ID NO: 271347 - RNA, 19 nt, Homo sapiens
  misc_RNA (1)...(19): siRNA sense strand
gauaacacacucagcauca

SEQ ID NO: 271348 - RNA, 19 nt, Homo sapiens
  misc_RNA (1)...(19): siRNA sense strand
aauucaagcucuuaucuga

SEQ ID NO: 271349 - RNA, 19 nt, Homo sapiens
  misc_RNA (1)...(19): siRNA sense strand
ggaaauggagcgaacagau

SEQ ID NO: 271350 - RNA, 19 nt, Homo sapiens
  misc_RNA (1)...(19): siRNA sense strand
cuacauggccacucagauu

SEQ ID NO: 271351 - RNA, 19 nt, Homo sapiens
  misc_RNA (1)...(19): siRNA sense strand
gcacaagaugccacagaaa

SEQ ID NO: 271352 - RNA, 19 nt, Homo sapiens
  misc_RNA (1)...(19): siRNA sense strand
agaagaauuucauccauag

SEQ ID NO: 271353 - RNA, 19 nt, Homo sapiens
  misc_RNA (1)...(19): siRNA sense strand
caagcauccuaaucuggua

SEQ ID NO: 271354 - RNA, 19 nt, Homo sapiens
  misc_RNA (1)...(19): siRNA sense strand
ccaaacaggccgcugagaa

SEQ ID NO: 271355 - RNA, 19 nt, Homo sapiens
  misc_RNA (1)...(19): siRNA sense strand
gaaauugcuaccuauggaa

SEQ ID NO: 271356 - RNA, 19 nt, Homo sapiens
  misc_RNA (1)...(19): siRNA sense strand
cuacaauaccuucucaauu

SEQ ID NO: 271357 - RNA, 19 nt, Homo sapiens
  misc_RNA (1)...(19): siRNA sense strand
gcacagcagguacuaaagu

SEQ ID NO: 271358 - RNA, 19 nt, Homo sapiens
  misc_RNA (1)...(19): siRNA sense strand
gaucuagccauuacagaga

SEQ ID NO: 271359 - RNA, 19 nt, Homo sapiens
  misc_RNA (1)...(19): siRNA sense strand
cauaagaaauacgaacuca

SEQ ID NO: 271360 - RNA, 19 nt, Homo sapiens
  misc_RNA (1)...(19): siRNA sense strand
ggaaaucaagcauccuaau

SEQ ID NO: 271361 - RNA, 19 nt, Homo sapiens
  misc_RNA (1)...(19): siRNA sense strand
gugauguggugcagaggua

SEQ ID NO: 271362 - RNA, 19 nt, Homo sapiens
  misc_RNA (1)...(19): siRNA sense strand
ucguugcacuuuaugauuu

SEQ ID NO: 271363 - RNA, 19 nt, Homo sapiens
  misc_RNA (1)...(19): siRNA sense strand
caaagaggcccugcuggaa

SEQ ID NO: 271364 - RNA, 19 nt, Homo sapiens
  misc_RNA (1)...(19): siRNA sense strand
uaaaguggcucugagaaaa

SEQ ID NO: 271365 - RNA, 19 nt, Homo sapiens
  misc_RNA (1)...(19): siRNA sense strand
ggucaaacucuacaucuuc

SEQ ID NO: 271366 - RNA, 19 nt, Homo sapiens
  misc_RNA (1)...(19): siRNA sense strand
ugaagaaacagguggagaa

SEQ ID NO: 271367 - RNA, 19 nt, Homo sapiens
  misc_RNA (1)...(19): siRNA sense strand
cauugugacugaauacaug

SEQ ID NO: 271368 - RNA, 19 nt, Homo sapiens
  misc_RNA (1)...(19): siRNA sense strand
uuccaugacuccagcauuu

SEQ ID NO: 271369 - RNA, 19 nt, Homo sapiens
  misc_RNA (1)...(19): siRNA sense strand
gagagucuugccuacaaua

SEQ ID NO: 271370 - RNA, 19 nt, Homo sapiens
  misc_RNA (1)...(19): siRNA sense strand
acgggaauuugcuggauua

SEQ ID NO: 271371 - RNA, 19 nt, Homo sapiens
  misc_RNA (1)...(19): siRNA sense strand
gagugacccuaaucucuuc

SEQ ID NO: 271372 - RNA, 19 nt, Homo sapiens
  misc_RNA (1)...(19): siRNA sense strand
gcacccaaguguaauaagc

SEQ ID NO: 271373 - RNA, 19 nt, Homo sapiens
  misc_RNA (1)...(19): siRNA sense strand
ugaaagaagcugcaguaau

SEQ ID NO: 271374 - RNA, 19 nt, Homo sapiens
  misc_RNA (1)...(19): siRNA sense strand
ggacagcaccagagagucu

SEQ ID NO: 271375 - RNA, 19 nt, Homo sapiens
  misc_RNA (1)...(19): siRNA sense strand
gagaacaaggagaacauug

SEQ ID NO: 271376 - RNA, 19 nt, Homo sapiens
  misc_RNA (1)...(19): siRNA sense strand
gaagagccaacugcccuaa

SEQ ID NO: 271377 - RNA, 19 nt, Homo sapiens
  misc_RNA (1)...(19): siRNA sense strand
ggaagaugccaaagagaca

SEQ ID NO: 271378 - RNA, 19 nt, Homo sapiens
  misc_RNA (1)...(19): siRNA sense strand
guacgagggacguguguau

SEQ ID NO: 271379 - RNA, 19 nt, Homo sapiens
  misc_RNA (1)...(19): siRNA sense strand
cuaaaguggcucugagaaa

SEQ ID NO: 271380 - RNA, 19 nt, Homo sapiens
  misc_RNA (1)...(19): siRNA sense strand
cagcagcuccuuccgagaa

SEQ ID NO: 271381 - RNA, 19 nt, Homo sapiens
  misc_RNA (1)...(19): siRNA sense strand
gcacugccucgaaagcaaa

SEQ ID NO: 271382 - RNA, 19 nt, Homo sapiens
  misc_RNA (1)...(19): siRNA sense strand
aaaaggauaucgaauggaa

SEQ ID NO: 271383 - RNA, 19 nt, Homo sapiens
  misc_RNA (1)...(19): siRNA sense strand
agaauuucauccauagaga

SEQ ID NO: 271384 - RNA, 19 nt, Homo sapiens
  misc_RNA (1)...(19): siRNA sense strand
gaagaggugacugcaguug

SEQ ID NO: 271385 - RNA, 19 nt, Homo sapiens
  misc_RNA (1)...(19): siRNA sense strand
ccugaaagaagcugcagua

SEQ ID NO: 271386 - RNA, 19 nt, Homo sapiens
  misc_RNA (1)...(19): siRNA sense strand
ugugggaaauugcuaccua

SEQ ID NO: 271387 - RNA, 19 nt, Homo sapiens
  misc_RNA (1)...(19): siRNA sense strand
ugacugaauacaugccaua

SEQ ID NO: 271388 - RNA, 19 nt, Homo sapiens
  misc_RNA (1)...(19): siRNA sense strand
ccgagaggcugugagcaaa

SEQ ID NO: 271389 - RNA, 19 nt, Homo sapiens
  misc_RNA (1)...(19): siRNA sense strand
caaagugccaguccuuauc

SEQ ID NO: 271390 - RNA, 19 nt, Homo sapiens
  misc_RNA (1)...(19): siRNA sense strand
uccgagaaauggagaauca

SEQ ID NO: 271391 - RNA, 19 nt, Homo sapiens
  misc_RNA (1)...(19): siRNA sense strand
ggagaacaaggagaacauu

SEQ ID NO: 271392 - RNA, 19 nt, Homo sapiens
  misc_RNA (1)...(19): siRNA sense strand
ucucuucguugcacuuuau

SEQ ID NO: 271393 - RNA, 19 nt, Homo sapiens
  misc_RNA (1)...(19): siRNA sense strand
ccuaaucugguacaacuuu

SEQ ID NO: 271394 - RNA, 19 nt, Homo sapiens
  misc_RNA (1)...(19): siRNA sense strand
aagaggcccugcuggaaug

SEQ ID NO: 271395 - RNA, 19 nt, Homo sapiens
  misc_RNA (1)...(19): siRNA sense strand
caucacaggcuucuuuaca

SEQ ID NO: 271396 - RNA, 19 nt, Homo sapiens
  misc_RNA (1)...(19): siRNA sense strand
gaaagcaaagagacaaguc

SEQ ID NO: 271397 - RNA, 19 nt, Homo sapiens
  misc_RNA (1)...(19): siRNA sense strand
gaagaauuucauccauaga

SEQ ID NO: 271398 - RNA, 19 nt, Homo sapiens
  misc_RNA (1)...(19): siRNA sense strand
uggauuaccuccgagaaug

SEQ ID NO: 271399 - RNA, 19 nt, Homo sapiens
  misc_RNA (1)...(19): siRNA sense strand
agaacaaggagaacauuga

SEQ ID NO: 271400 - RNA, 19 nt, Homo sapiens
  misc_RNA (1)...(19): siRNA sense strand
ccacaaagugccaguccuu

SEQ ID NO: 271401 - RNA, 19 nt, Homo sapiens
  misc_RNA (1)...(19): siRNA sense strand
caggauaggauggcaauga

SEQ ID NO: 271402 - RNA, 19 nt, Homo sapiens
  misc_RNA (1)...(19): siRNA sense strand
uaaauacucugucuggauu

SEQ ID NO: 271403 - RNA, 19 nt, Homo sapiens
  misc_RNA (1)...(19): siRNA sense strand
ugacucagaucauguuuga

SEQ ID NO: 271404 - RNA, 19 nt, Homo sapiens
  misc_RNA (1)...(19): siRNA sense strand
gagcguggcuacuccuuug

SEQ ID NO: 271405 - RNA, 19 nt, Homo sapiens
  misc_RNA (1)...(19): siRNA sense strand
gggagaagaugacucagau

SEQ ID NO: 271406 - RNA, 19 nt, Homo sapiens
  misc_RNA (1)...(19): siRNA sense strand
ucaugaagauccucacuga

SEQ ID NO: 271407 - RNA, 19 nt, Homo sapiens
  misc_RNA (1)...(19): siRNA sense strand
gaaacaacuuacaauagca

SEQ ID NO: 271408 - RNA, 19 nt, Homo sapiens
  misc_RNA (1)...(19): siRNA sense strand
cagcaaauguggauuagca

SEQ ID NO: 271409 - RNA, 19 nt, Homo sapiens
  misc_RNA (1)...(19): siRNA sense strand
ggaccuguaugccaacaau

SEQ ID NO: 271410 - RNA, 19 nt, Homo sapiens
  misc_RNA (1)...(19): siRNA sense strand
caccacaccuucuacaaug

SEQ ID NO: 271411 - RNA, 19 nt, Homo sapiens
  misc_RNA (1)...(19): siRNA sense strand
aagagaagcugugcuaugu

SEQ ID NO: 271412 - RNA, 19 nt, Homo sapiens
  misc_RNA (1)...(19): siRNA sense strand
gagaagaugacucagauca

SEQ ID NO: 271413 - RNA, 19 nt, Homo sapiens
  misc_RNA (1)...(19): siRNA sense strand
ugaaacaacuuacaauagc

SEQ ID NO: 271414 - RNA, 19 nt, Homo sapiens
  misc_RNA (1)...(19): siRNA sense strand
gcagugcuaucccuguaug

SEQ ID NO: 271415 - RNA, 19 nt, Homo sapiens
  misc_RNA (1)...(19): siRNA sense strand
gagcguaaauacucugucu

SEQ ID NO: 271416 - RNA, 19 nt, Homo sapiens
  misc_RNA (1)...(19): siRNA sense strand
gcaagcaagaguacgauga

SEQ ID NO: 271417 - RNA, 19 nt, Homo sapiens
  misc_RNA (1)...(19): siRNA sense strand
gcaccacaccuucuacaau

SEQ ID NO: 271418 - RNA, 19 nt, Homo sapiens
  misc_RNA (1)...(19): siRNA sense strand
acaauagcaucaugaagug

SEQ ID NO: 271419 - RNA, 19 nt, Homo sapiens
  misc_RNA (1)...(19): siRNA sense strand
ggaaucugcuggcauccau

SEQ ID NO: 271420 - RNA, 19 nt, Homo sapiens
  misc_RNA (1)...(19): siRNA sense strand
ccuagcaccaugaagauua

SEQ ID NO: 271421 - RNA, 19 nt, Homo sapiens
  misc_RNA (1)...(19): siRNA sense strand
uuaaagagaagcugugcua

SEQ ID NO: 271422 - RNA, 19 nt, Homo sapiens
  misc_RNA (1)...(19): siRNA sense strand
gggacgacauggagaagau

SEQ ID NO: 271423 - RNA, 19 nt, Homo sapiens
  misc_RNA (1)...(19): siRNA sense strand
guaaauacucugucuggau

SEQ ID NO: 271424 - RNA, 19 nt, Homo sapiens
  misc_RNA (1)...(19): siRNA sense strand
cuagcaccaugaagauuaa

SEQ ID NO: 271425 - RNA, 19 nt, Homo sapiens
  misc_RNA (1)...(19): siRNA sense strand
gaucguaugcagaaggaaa

SEQ ID NO: 271426 - RNA, 19 nt, Homo sapiens
  misc_RNA (1)...(19): siRNA sense strand
ggagaagagcuaugaacug

SEQ ID NO: 271427 - RNA, 19 nt, Homo sapiens
  misc_RNA (1)...(19): siRNA sense strand
caaugucccugccauguac

SEQ ID NO: 271428 - RNA, 19 nt, Homo sapiens
  misc_RNA (1)...(19): siRNA sense strand
gucgggaccucacugacua

SEQ ID NO: 271429 - RNA, 19 nt, Homo sapiens
  misc_RNA (1)...(19): siRNA sense strand
gcuccuagcaccaugaaga

SEQ ID NO: 271430 - RNA, 19 nt, Homo sapiens
  misc_RNA (1)...(19): siRNA sense strand
gaggcaggcccauccauug

SEQ ID NO: 271431 - RNA, 19 nt, Homo sapiens
  misc_RNA (1)...(19): siRNA sense strand
caugaagugugacauugau

SEQ ID NO: 271432 - RNA, 19 nt, Homo sapiens
  misc_RNA (1)...(19): siRNA sense strand
gaugaagcccagagcaaga

SEQ ID NO: 271433 - RNA, 19 nt, Homo sapiens
  misc_RNA (1)...(19): siRNA sense strand
ucaaugucccugccaugua

SEQ ID NO: 271434 - RNA, 19 nt, Homo sapiens
  misc_RNA (1)...(19): siRNA sense strand
ggauuagcaagcaagagua

SEQ ID NO: 271435 - RNA, 19 nt, Homo sapiens
  misc_RNA (1)...(19): siRNA sense strand
caucaugaagugugacauu

SEQ ID NO: 271436 - RNA, 19 nt, Homo sapiens
  misc_RNA (1)...(19): siRNA sense strand
caucgagcaugguaucauc

SEQ ID NO: 271437 - RNA, 19 nt, Homo sapiens
  misc_RNA (1)...(19): siRNA sense strand
aaagagaagcugugcuaug

SEQ ID NO: 271438 - RNA, 19 nt, Homo sapiens
  misc_RNA (1)...(19): siRNA sense strand
uacaauagcaucaugaagu

SEQ ID NO: 271439 - RNA, 19 nt, Homo sapiens
  misc_RNA (1)...(19): siRNA sense strand
gggaugguguaacucacaa

SEQ ID NO: 271440 - RNA, 19 nt, Homo sapiens
  misc_RNA (1)...(19): siRNA sense strand
gaagugugacauugauauc

SEQ ID NO: 271441 - RNA, 19 nt, Homo sapiens
  misc_RNA (1)...(19): siRNA sense strand
cugacuaccucaugaagau

SEQ ID NO: 271442 - RNA, 19 nt, Homo sapiens
  misc_RNA (1)...(19): siRNA sense strand
gcauccaugaaacaacuua

SEQ ID NO: 271443 - RNA, 19 nt, Homo sapiens
  misc_RNA (1)...(19): siRNA sense strand
caccacugcugaacgugaa

SEQ ID NO: 271444 - RNA, 19 nt, Homo sapiens
  misc_RNA (1)...(19): siRNA sense strand
guaugccaacaaugucuua

SEQ ID NO: 271445 - RNA, 19 nt, Homo sapiens
  misc_RNA (1)...(19): siRNA sense strand
ugaagugugacauugauau

SEQ ID NO: 271446 - RNA, 19 nt, Homo sapiens
  misc_RNA (1)...(19): siRNA sense strand
cagcccuccuucauuggua

SEQ ID NO: 271447 - RNA, 19 nt, Homo sapiens
  misc_RNA (1)...(19): siRNA sense strand
uuccagcccuccuucauug

SEQ ID NO: 271448 - RNA, 19 nt, Homo sapiens
  misc_RNA (1)...(19): siRNA sense strand
aggcagugcuaucccugua

SEQ ID NO: 271449 - RNA, 19 nt, Homo sapiens
  misc_RNA (1)...(19): siRNA sense strand
ccaccgcaaaugcuucuaa

SEQ ID NO: 271450 - RNA, 19 nt, Homo sapiens
  misc_RNA (1)...(19): siRNA sense strand
gcaccaugaagauuaagau

SEQ ID NO: 271451 - RNA, 19 nt, Homo sapiens
  misc_RNA (1)...(19): siRNA sense strand
gcuaugucgcccuggauuu

SEQ ID NO: 271452 - RNA, 19 nt, Homo sapiens
  misc_RNA (1)...(19): siRNA sense strand
ucuaugagggcuacgcuuu

SEQ ID NO: 271453 - RNA, 19 nt, Homo sapiens
  misc_RNA (1)...(19): siRNA sense strand
gaggcauccugacccugaa

SEQ ID NO: 271454 - RNA, 19 nt, Homo sapiens
  misc_RNA (1)...(19): siRNA sense strand
uccgugacauuaaagagaa

SEQ ID NO: 271455 - RNA, 19 nt, Homo sapiens
  misc_RNA (1)...(19): siRNA sense strand
ugccaacaaugucuuaucu

SEQ ID NO: 271456 - RNA, 19 nt, Homo sapiens
  misc_RNA (1)...(19): siRNA sense strand
gaugguguaacucacaaug

SEQ ID NO: 271457 - RNA, 19 nt, Homo sapiens
  misc_RNA (1)...(19): siRNA sense strand
agucaucacuaucggcaau

SEQ ID NO: 271458 - RNA, 19 nt, Homo sapiens
  misc_RNA (1)...(19): siRNA sense strand
ucaugaagugugacauuga

SEQ ID NO: 271459 - RNA, 19 nt, Homo sapiens
  misc_RNA (1)...(19): siRNA sense strand
ggaguuaugguggguaugg

SEQ ID NO: 271460 - RNA, 19 nt, Homo sapiens
  misc_RNA (1)...(19): siRNA sense strand
aaauguggauuagcaagca

SEQ ID NO: 271461 - RNA, 19 nt, Homo sapiens
  misc_RNA (1)...(19): siRNA sense strand
ccaugaaacaacuuacaau

SEQ ID NO: 271462 - RNA, 19 nt, Homo sapiens
  misc_RNA (1)...(19): siRNA sense strand
ucacugacuaccucaugaa

SEQ ID NO: 271463 - RNA, 19 nt, Homo sapiens
  misc_RNA (1)...(19): siRNA sense strand
ugaggcaggcccauccauu

SEQ ID NO: 271464 - RNA, 19 nt, Homo sapiens
  misc_RNA (1)...(19): siRNA sense strand
gcauccugacccugaagua

SEQ ID NO: 271465 - RNA, 19 nt, Homo sapiens
  misc_RNA (1)...(19): siRNA sense strand
ugguauugcugaucguaug

SEQ ID NO: 271466 - RNA, 19 nt, Homo sapiens
  misc_RNA (1)...(19): siRNA sense strand
acauugauauccgcaagga

SEQ ID NO: 271467 - RNA, 19 nt, Homo sapiens
  misc_RNA (1)...(19): siRNA sense strand
uacaaugagcuccguguug

SEQ ID NO: 271468 - RNA, 19 nt, Homo sapiens
  misc_RNA (1)...(19): siRNA sense strand
gaaguaucccaucgagcau

SEQ ID NO: 271469 - RNA, 19 nt, Homo sapiens
  misc_RNA (1)...(19): siRNA sense strand
gugaugaagcccagagcaa

SEQ ID NO: 271470 - RNA, 19 nt, Homo sapiens
  misc_RNA (1)...(19): siRNA sense strand
ugguguaacucacaauguc

SEQ ID NO: 271471 - RNA, 19 nt, Homo sapiens
  misc_RNA (1)...(19): siRNA sense strand
caacuuacaauagcaucau

SEQ ID NO: 271472 - RNA, 19 nt, Homo sapiens
  misc_RNA (1)...(19): siRNA sense strand
uggcauccaugaaacaacu

SEQ ID NO: 271473 - RNA, 19 nt, Homo sapiens
  misc_RNA (1)...(19): siRNA sense strand
caucaugcgucuggaucug

SEQ ID NO: 271474 - RNA, 19 nt, Homo sapiens
  misc_RNA (1)...(19): siRNA sense strand
caccaugaagauuaagauu

SEQ ID NO: 271475 - RNA, 19 nt, Homo sapiens
  misc_RNA (1)...(19): siRNA sense strand
caagcaagaguacgaugag

SEQ ID NO: 271476 - RNA, 19 nt, Homo sapiens
  misc_RNA (1)...(19): siRNA sense strand
ggccguaccacaggcauug

SEQ ID NO: 271477 - RNA, 19 nt, Homo sapiens
  misc_RNA (1)...(19): siRNA sense strand
cugcugaacgugaaauugu

SEQ ID NO: 271478 - RNA, 19 nt, Homo sapiens
  misc_RNA (1)...(19): siRNA sense strand
ccauguacguggccaucca

SEQ ID NO: 271479 - RNA, 19 nt, Homo sapiens
  misc_RNA (1)...(19): siRNA sense strand
ugucaccacugcugaacgu

SEQ ID NO: 271480 - RNA, 19 nt, Homo sapiens
  misc_RNA (1)...(19): siRNA sense strand
caacacaucuggaaaguaa

SEQ ID NO: 271481 - RNA, 19 nt, Homo sapiens
  misc_RNA (1)...(19): siRNA sense strand
gcaaggagauguucaagaa

SEQ ID NO: 271482 - RNA, 19 nt, Homo sapiens
  misc_RNA (1)...(19): siRNA sense strand
caagucagcuggauauguu

SEQ ID NO: 271483 - RNA, 19 nt, Homo sapiens
  misc_RNA (1)...(19): siRNA sense strand
cgcagaagcucaucacuaa

SEQ ID NO: 271484 - RNA, 19 nt, Homo sapiens
  misc_RNA (1)...(19): siRNA sense strand
gcagagagcaccauaucaa

SEQ ID NO: 271485 - RNA, 19 nt, Homo sapiens
  misc_RNA (1)...(19): siRNA sense strand
gcuagaagaugcaaagaag

SEQ ID NO: 271486 - RNA, 19 nt, Homo sapiens
  misc_RNA (1)...(19): siRNA sense strand
gcucaucacuaacaucuuc

SEQ ID NO: 271487 - RNA, 19 nt, Homo sapiens
  misc_RNA (1)...(19): siRNA sense strand
gaaggacuuugagaagaaa

SEQ ID NO: 271488 - RNA, 19 nt, Homo sapiens
  misc_RNA (1)...(19): siRNA sense strand
gauccaacauguccacuca

SEQ ID NO: 271489 - RNA, 19 nt, Homo sapiens
  misc_RNA (1)...(19): siRNA sense strand
ucacuaacaucuucagcaa

SEQ ID NO: 271490 - RNA, 19 nt, Homo sapiens
  misc_RNA (1)...(19): siRNA sense strand
agaaggacuuugagaagaa

SEQ ID NO: 271491 - RNA, 19 nt, Homo sapiens
  misc_RNA (1)...(19): siRNA sense strand
gauacagaccuacuuagaa

SEQ ID NO: 271492 - RNA, 19 nt, Homo sapiens
  misc_RNA (1)...(19): siRNA sense strand
gcgaguaccucaucuacca

SEQ ID NO: 271493 - RNA, 19 nt, Homo sapiens
  misc_RNA (1)...(19): siRNA sense strand
ggagcuguccucacacuuu

SEQ ID NO: 271494 - RNA, 19 nt, Homo sapiens
  misc_RNA (1)...(19): siRNA sense strand
ggugauacagaccuacuua

SEQ ID NO: 271495 - RNA, 19 nt, Homo sapiens
  misc_RNA (1)...(19): siRNA sense strand
agucaaagaucaaccacuu

SEQ ID NO: 271496 - RNA, 19 nt, Homo sapiens
  misc_RNA (1)...(19): siRNA sense strand
ccaggaagcuguggugaag

SEQ ID NO: 271497 - RNA, 19 nt, Homo sapiens
  misc_RNA (1)...(19): siRNA sense strand
ggaccgagacuaccagcuu

SEQ ID NO: 271498 - RNA, 19 nt, Homo sapiens
  misc_RNA (1)...(19): siRNA sense strand
agaccaacaucgagaacaa

SEQ ID NO: 271499 - RNA, 19 nt, Homo sapiens
  misc_RNA (1)...(19): siRNA sense strand
ucauggaccuggaugugaa

SEQ ID NO: 271500 - RNA, 19 nt, Homo sapiens
  misc_RNA (1)...(19): siRNA sense strand
aagaaggacuuugagaaga

SEQ ID NO: 271501 - RNA, 19 nt, Homo sapiens
  misc_RNA (1)...(19): siRNA sense strand
gcaucuacuuugccucaga

SEQ ID NO: 271502 - RNA, 19 nt, Homo sapiens
  misc_RNA (1)...(19): siRNA sense strand
ggacuuugagaagaaauuu

SEQ ID NO: 271503 - RNA, 19 nt, Homo sapiens
  misc_RNA (1)...(19): siRNA sense strand
gauauguuauuggcaugaa

SEQ ID NO: 271504 - RNA, 19 nt, Homo sapiens
  misc_RNA (1)...(19): siRNA sense strand
ggaccuggaugugaagaag

SEQ ID NO: 271505 - RNA, 19 nt, Homo sapiens
  misc_RNA (1)...(19): siRNA sense strand
gcaagucagcuggauaugu

SEQ ID NO: 271506 - RNA, 19 nt, Homo sapiens
  misc_RNA (1)...(19): siRNA sense strand
auacagaccuacuuagaac

SEQ ID NO: 271507 - RNA, 19 nt, Homo sapiens
  misc_RNA (1)...(19): siRNA sense strand
gcagagaagcgcauaaucc

SEQ ID NO: 271508 - RNA, 19 nt, Homo sapiens
  misc_RNA (1)...(19): siRNA sense strand
ggcaagggcaucuacuuug

SEQ ID NO: 271509 - RNA, 19 nt, Homo sapiens
  misc_RNA (1)...(19): siRNA sense strand
ucauccagcugcuccaaga

SEQ ID NO: 271510 - RNA, 19 nt, Homo sapiens
  misc_RNA (1)...(19): siRNA sense strand
gggcagagagcaccauauc

SEQ ID NO: 271511 - RNA, 19 nt, Homo sapiens
  misc_RNA (1)...(19): siRNA sense strand
gagaacaacaacaagaagu

SEQ ID NO: 271512 - RNA, 19 nt, Homo sapiens
  misc_RNA (1)...(19): siRNA sense strand
cagaagcucaucacuaaca

SEQ ID NO: 271513 - RNA, 19 nt, Homo sapiens
  misc_RNA (1)...(19): siRNA sense strand
ccgcguggauccaacaugu

SEQ ID NO: 271514 - RNA, 19 nt, Homo sapiens
  misc_RNA (1)...(19): siRNA sense strand
ucaaagaucaaccacuuca

SEQ ID NO: 271515 - RNA, 19 nt, Homo sapiens
  misc_RNA (1)...(19): siRNA sense strand
gcccuacacuucaacacau

SEQ ID NO: 271516 - RNA, 19 nt, Homo sapiens
  misc_RNA (1)...(19): siRNA sense strand
ugggaaagcugagcaagca

SEQ ID NO: 271517 - RNA, 19 nt, Homo sapiens
  misc_RNA (1)...(19): siRNA sense strand
gagcuguccucacacuuuu

SEQ ID NO: 271518 - RNA, 19 nt, Homo sapiens
  misc_RNA (1)...(19): siRNA sense strand
gaggucggccagucaaaga

SEQ ID NO: 271519 - RNA, 19 nt, Homo sapiens
  misc_RNA (1)...(19): siRNA sense strand
ucagcuggauauguuauug

SEQ ID NO: 271520 - RNA, 19 nt, Homo sapiens
  misc_RNA (1)...(19): siRNA sense strand
ugauacagaccuacuuaga

SEQ ID NO: 271521 - RNA, 19 nt, Homo sapiens
  misc_RNA (1)...(19): siRNA sense strand
acuaccagcuucucaagug

SEQ ID NO: 271522 - RNA, 19 nt, Homo sapiens
  misc_RNA (1)...(19): siRNA sense strand
ccgaagcccuggguacaga

SEQ ID NO: 271523 - RNA, 19 nt, Homo sapiens
  misc_RNA (1)...(19): siRNA sense strand
uagaagaugcaaagaagga

SEQ ID NO: 271524 - RNA, 19 nt, Homo sapiens
  misc_RNA (1)...(19): siRNA sense strand
ggccauacccgcagagaag

SEQ ID NO: 271525 - RNA, 19 nt, Homo sapiens
  misc_RNA (1)...(19): siRNA sense strand
gagcgggaccacuuugugu

SEQ ID NO: 271526 - RNA, 19 nt, Homo sapiens
  misc_RNA (1)...(19): siRNA sense strand
gcagagcgggaccacuuug

SEQ ID NO: 271527 - RNA, 19 nt, Homo sapiens
  misc_RNA (1)...(19): siRNA sense strand
gggaaaagaccaagaacaa

SEQ ID NO: 271528 - RNA, 19 nt, Homo sapiens
  misc_RNA (1)...(19): siRNA sense strand
ggagaggucggccagucaa

SEQ ID NO: 271529 - RNA, 19 nt, Homo sapiens
  misc_RNA (1)...(19): siRNA sense strand
gacagcaaccgcuucuuca

SEQ ID NO: 271530 - RNA, 19 nt, Homo sapiens
  misc_RNA (1)...(19): siRNA sense strand
uggcaagggcaucuacuuu

SEQ ID NO: 271531 - RNA, 19 nt, Homo sapiens
  misc_RNA (1)...(19): siRNA sense strand
ccacaggugcccuacacuu

SEQ ID NO: 271532 - RNA, 19 nt, Homo sapiens
  misc_RNA (1)...(19): siRNA sense strand
gcugagcaagcaacagauu

SEQ ID NO: 271533 - RNA, 19 nt, Homo sapiens
  misc_RNA (1)...(19): siRNA sense strand
gaaagcugagcaagcaaca

SEQ ID NO: 271534 - RNA, 19 nt, Homo sapiens
  misc_RNA (1)...(19): siRNA sense strand
aaagaucaaccacuucaca

SEQ ID NO: 271535 - RNA, 19 nt, Homo sapiens
  misc_RNA (1)...(19): siRNA sense strand
ucuggaaaguaaaccaaga

SEQ ID NO: 271536 - RNA, 19 nt, Homo sapiens
  misc_RNA (1)...(19): siRNA sense strand
agaacaacaacaagaaguu

SEQ ID NO: 271537 - RNA, 19 nt, Homo sapiens
  misc_RNA (1)...(19): siRNA sense strand
agacugagggcccugagaa

SEQ ID NO: 271538 - RNA, 19 nt, Homo sapiens
  misc_RNA (1)...(19): siRNA sense strand
gggaccacuuugugucuca

SEQ ID NO: 271539 - RNA, 19 nt, Homo sapiens
  misc_RNA (1)...(19): siRNA sense strand
caacaucgagaacaacaac

SEQ ID NO: 271540 - RNA, 19 nt, Homo sapiens
  misc_RNA (1)...(19): siRNA sense strand
agacagcaaccgcuucuuc

SEQ ID NO: 271541 - RNA, 19 nt, Homo sapiens
  misc_RNA (1)...(19): siRNA sense strand
gagcgaguaccucaucuac

SEQ ID NO: 271542 - RNA, 19 nt, Homo sapiens
  misc_RNA (1)...(19): siRNA sense strand
caggugcccuacacuucaa

SEQ ID NO: 271543 - RNA, 19 nt, Homo sapiens
  misc_RNA (1)...(19): siRNA sense strand
acgcagaagcucaucacua

SEQ ID NO: 271544 - RNA, 19 nt, Homo sapiens
  misc_RNA (1)...(19): siRNA sense strand
guucagcagcuccacauuc

SEQ ID NO: 271545 - RNA, 19 nt, Homo sapiens
  misc_RNA (1)...(19): siRNA sense strand
gaguacaaggugauacaga

SEQ ID NO: 271546 - RNA, 19 nt, Homo sapiens
  misc_RNA (1)...(19): siRNA sense strand
gaaaagaccaagaacaacu

SEQ ID NO: 271547 - RNA, 19 nt, Homo sapiens
  misc_RNA (1)...(19): siRNA sense strand
cgaaguacaggcagaggau

SEQ ID NO: 271548 - RNA, 19 nt, Homo sapiens
  misc_RNA (1)...(19): siRNA sense strand
ucgagaacaacaacaagaa

SEQ ID NO: 271549 - RNA, 19 nt, Homo sapiens
  misc_RNA (1)...(19): siRNA sense strand
aagcugagcaagcaacaga

SEQ ID NO: 271550 - RNA, 19 nt, Homo sapiens
  misc_RNA (1)...(19): siRNA sense strand
ggcuagaagaugcaaagaa

SEQ ID NO: 271551 - RNA, 19 nt, Homo sapiens
  misc_RNA (1)...(19): siRNA sense strand
ccagagcgaguaccucauc

SEQ ID NO: 271552 - RNA, 19 nt, Homo sapiens
  misc_RNA (1)...(19): siRNA sense strand
gcuggaggaggcccugaaa

SEQ ID NO: 271553 - RNA, 19 nt, Homo sapiens
  misc_RNA (1)...(19): siRNA sense strand
caagacagcaaccgcuucu

SEQ ID NO: 271554 - RNA, 19 nt, Homo sapiens
  misc_RNA (1)...(19): siRNA sense strand
ggauauguuauuggcauga

SEQ ID NO: 271555 - RNA, 19 nt, Homo sapiens
  misc_RNA (1)...(19): siRNA sense strand
cgucaucccgcacaacuuc

SEQ ID NO: 271556 - RNA, 19 nt, Homo sapiens
  misc_RNA (1)...(19): siRNA sense strand
gagaggucggccagucaaa

SEQ ID NO: 271557 - RNA, 19 nt, Homo sapiens
  misc_RNA (1)...(19): siRNA sense strand
ccacuucacaaggcuagaa

SEQ ID NO: 271558 - RNA, 19 nt, Homo sapiens
  misc_RNA (1)...(19): siRNA sense strand
gacccaggacacugaguug

SEQ ID NO: 271559 - RNA, 19 nt, Homo sapiens
  misc_RNA (1)...(19): siRNA sense strand
ugagggcccugagaagaag

SEQ ID NO: 271560 - RNA, 19 nt, Homo sapiens
  misc_RNA (1)...(19): siRNA sense strand
ccagguguaugaggacuac

SEQ ID NO: 271561 - RNA, 19 nt, Homo sapiens
  misc_RNA (1)...(19): siRNA sense strand
cgacccaggacacugaguu

SEQ ID NO: 271562 - RNA, 19 nt, Homo sapiens
  misc_RNA (1)...(19): siRNA sense strand
ggcagagcgggaccacuuu

SEQ ID NO: 271563 - RNA, 19 nt, Homo sapiens
  misc_RNA (1)...(19): siRNA sense strand
gagagcaccauaucaacac

SEQ ID NO: 271564 - RNA, 19 nt, Homo sapiens
  misc_RNA (1)...(19): siRNA sense strand
agagagcaccauaucaaca

SEQ ID NO: 271565 - RNA, 19 nt, Homo sapiens
  misc_RNA (1)...(19): siRNA sense strand
ucaacacaucuggaaagua

SEQ ID NO: 271566 - RNA, 19 nt, Homo sapiens
  misc_RNA (1)...(19): siRNA sense strand
cgagaacaacaacaagaag

SEQ ID NO: 271567 - RNA, 19 nt, Homo sapiens
  misc_RNA (1)...(19): siRNA sense strand
cugagggcccugagaagaa

SEQ ID NO: 271568 - RNA, 19 nt, Homo sapiens
  misc_RNA (1)...(19): siRNA sense strand
aggaagcuguggugaaggu

SEQ ID NO: 271569 - RNA, 19 nt, Homo sapiens
  misc_RNA (1)...(19): siRNA sense strand
gaaaugaugucuaugaugu

SEQ ID NO: 271570 - RNA, 19 nt, Homo sapiens
  misc_RNA (1)...(19): siRNA sense strand
ggagaaggauggugagaaa

SEQ ID NO: 271571 - RNA, 19 nt, Homo sapiens
  misc_RNA (1)...(19): siRNA sense strand
cagaggaacuucaguguuu

SEQ ID NO: 271572 - RNA, 19 nt, Homo sapiens
  misc_RNA (1)...(19): siRNA sense strand
caucacagguuacauguuu

SEQ ID NO: 271573 - RNA, 19 nt, Homo sapiens
  misc_RNA (1)...(19): siRNA sense strand
gaagaaauuccuugacaaa

SEQ ID NO: 271574 - RNA, 19 nt, Homo sapiens
  misc_RNA (1)...(19): siRNA sense strand
guacaggaguuaauaaagu

SEQ ID NO: 271575 - RNA, 19 nt, Homo sapiens
  misc_RNA (1)...(19): siRNA sense strand
uuaagaagauugaggauug

SEQ ID NO: 271576 - RNA, 19 nt, Homo sapiens
  misc_RNA (1)...(19): siRNA sense strand
ugaaggaaaugaugucuau

SEQ ID NO: 271577 - RNA, 19 nt, Homo sapiens
  misc_RNA (1)...(19): siRNA sense strand
ucaaagugauuucccagua

SEQ ID NO: 271578 - RNA, 19 nt, Homo sapiens
  misc_RNA (1)...(19): siRNA sense strand
gaagaaaugaugauggaaa

SEQ ID NO: 271579 - RNA, 19 nt, Homo sapiens
  misc_RNA (1)...(19): siRNA sense strand
gaaaugaugauggaaauga

SEQ ID NO: 271580 - RNA, 19 nt, Homo sapiens
  misc_RNA (1)...(19): siRNA sense strand
gugaaggccuugcuguuaa

SEQ ID NO: 271581 - RNA, 19 nt, Homo sapiens
  misc_RNA (1)...(19): siRNA sense strand
caacaaguacuaucugauu

SEQ ID NO: 271582 - RNA, 19 nt, Homo sapiens
  misc_RNA (1)...(19): siRNA sense strand
ggaaggcucauguguauug

SEQ ID NO: 271583 - RNA, 19 nt, Homo sapiens
  misc_RNA (1)...(19): siRNA sense strand
gagaggaccuucauaacag

SEQ ID NO: 271584 - RNA, 19 nt, Homo sapiens
  misc_RNA (1)...(19): siRNA sense strand
gaaggugccuggaaaauau

SEQ ID NO: 271585 - RNA, 19 nt, Homo sapiens
  misc_RNA (1)...(19): siRNA sense strand
gaaggauggugagaaagaa

SEQ ID NO: 271586 - RNA, 19 nt, Homo sapiens
  misc_RNA (1)...(19): siRNA sense strand
ggacagaagacaagcaaga

SEQ ID NO: 271587 - RNA, 19 nt, Homo sapiens
  misc_RNA (1)...(19): siRNA sense strand
caagauggcucccaguucu

SEQ ID NO: 271588 - RNA, 19 nt, Homo sapiens
  misc_RNA (1)...(19): siRNA sense strand
cagaagaaauuccuugaca

SEQ ID NO: 271589 - RNA, 19 nt, Homo sapiens
  misc_RNA (1)...(19): siRNA sense strand
guuauacccucaacuacaa

SEQ ID NO: 271590 - RNA, 19 nt, Homo sapiens
  misc_RNA (1)...(19): siRNA sense strand
gcagguuaccagucucuua

SEQ ID NO: 271591 - RNA, 19 nt, Homo sapiens
  misc_RNA (1)...(19): siRNA sense strand
ucagagaggaccuucauaa

SEQ ID NO: 271592 - RNA, 19 nt, Homo sapiens
  misc_RNA (1)...(19): siRNA sense strand
gaagauugaggauuguauu

SEQ ID NO: 271593 - RNA, 19 nt, Homo sapiens
  misc_RNA (1)...(19): siRNA sense strand
ccacuaauccggacacaga

SEQ ID NO: 271594 - RNA, 19 nt, Homo sapiens
  misc_RNA (1)...(19): siRNA sense strand
aaggauugcuucaagguaa

SEQ ID NO: 271595 - RNA, 19 nt, Homo sapiens
  misc_RNA (1)...(19): siRNA sense strand
gcaaaagggucucugaauc

SEQ ID NO: 271596 - RNA, 19 nt, Homo sapiens
  misc_RNA (1)...(19): siRNA sense strand
ccaugaaaguuacgaguuc

SEQ ID NO: 271597 - RNA, 19 nt, Homo sapiens
  misc_RNA (1)...(19): siRNA sense strand
ggaagcaugcaaugaauuc

SEQ ID NO: 271598 - RNA, 19 nt, Homo sapiens
  misc_RNA (1)...(19): siRNA sense strand
ugauucagcuauuagaaga

SEQ ID NO: 271599 - RNA, 19 nt, Homo sapiens
  misc_RNA (1)...(19): siRNA sense strand
agaccaaucuccaguucaa

SEQ ID NO: 271600 - RNA, 19 nt, Homo sapiens
  misc_RNA (1)...(19): siRNA sense strand
gaagacaagcaagauggua

SEQ ID NO: 271601 - RNA, 19 nt, Homo sapiens
  misc_RNA (1)...(19): siRNA sense strand
caaggcagguuaccagucu

SEQ ID NO: 271602 - RNA, 19 nt, Homo sapiens
  misc_RNA (1)...(19): siRNA sense strand
ugaaggccuugcuguuaaa

SEQ ID NO: 271603 - RNA, 19 nt, Homo sapiens
  misc_RNA (1)...(19): siRNA sense strand
ugaccuugcuggauuuguu

SEQ ID NO: 271604 - RNA, 19 nt, Homo sapiens
  misc_RNA (1)...(19): siRNA sense strand
uggacgagcucucauggaa

SEQ ID NO: 271605 - RNA, 19 nt, Homo sapiens
  misc_RNA (1)...(19): siRNA sense strand
ggacaggacagaagacaag

SEQ ID NO: 271606 - RNA, 19 nt, Homo sapiens
  misc_RNA (1)...(19): siRNA sense strand
uggaagaaaugaugaugga

SEQ ID NO: 271607 - RNA, 19 nt, Homo sapiens
  misc_RNA (1)...(19): siRNA sense strand
ggaaaugaugucuaugaug

SEQ ID NO: 271608 - RNA, 19 nt, Homo sapiens
  misc_RNA (1)...(19): siRNA sense strand
caacaaggccaaggaaauc

SEQ ID NO: 271609 - RNA, 19 nt, Homo sapiens
  misc_RNA (1)...(19): siRNA sense strand
caaagugauuucccaguac

SEQ ID NO: 271610 - RNA, 19 nt, Homo sapiens
  misc_RNA (1)...(19): siRNA sense strand
gcacaaaucaaggcagguu

SEQ ID NO: 271611 - RNA, 19 nt, Homo sapiens
  misc_RNA (1)...(19): siRNA sense strand
ucucuuaaaucucccuuga

SEQ ID NO: 271612 - RNA, 19 nt, Homo sapiens
  misc_RNA (1)...(19): siRNA sense strand
agaagaaauuccuugacaa

SEQ ID NO: 271613 - RNA, 19 nt, Homo sapiens
  misc_RNA (1)...(19): siRNA sense strand
agaaggaacugucagaaaa

SEQ ID NO: 271614 - RNA, 19 nt, Homo sapiens
  misc_RNA (1)...(19): siRNA sense strand
acaccaggauuccgcauga

SEQ ID NO: 271615 - RNA, 19 nt, Homo sapiens
  misc_RNA (1)...(19): siRNA sense strand
ccaacacuauagaaaccua

SEQ ID NO: 271616 - RNA, 19 nt, Homo sapiens
  misc_RNA (1)...(19): siRNA sense strand
gcaagugacacaggaauuc

SEQ ID NO: 271617 - RNA, 19 nt, Homo sapiens
  misc_RNA (1)...(19): siRNA sense strand
gagaaaaguuugagaaggu

SEQ ID NO: 271618 - RNA, 19 nt, Homo sapiens
  misc_RNA (1)...(19): siRNA sense strand
cagaaggaacugucagaaa

SEQ ID NO: 271619 - RNA, 19 nt, Homo sapiens
  misc_RNA (1)...(19): siRNA sense strand
aaguugaucuguaauguuc

SEQ ID NO: 271620 - RNA, 19 nt, Homo sapiens
  misc_RNA (1)...(19): siRNA sense strand
ccaccaauacucaggauga

SEQ ID NO: 271621 - RNA, 19 nt, Homo sapiens
  misc_RNA (1)...(19): siRNA sense strand
gcucauguguauugugaag

SEQ ID NO: 271622 - RNA, 19 nt, Homo sapiens
  misc_RNA (1)...(19): siRNA sense strand
cuacuuugcugacaugucu

SEQ ID NO: 271623 - RNA, 19 nt, Homo sapiens
  misc_RNA (1)...(19): siRNA sense strand
uggcaugguuccaggauga

SEQ ID NO: 271624 - RNA, 19 nt, Homo sapiens
  misc_RNA (1)...(19): siRNA sense strand
cauaacaggaugcuucuau

SEQ ID NO: 271625 - RNA, 19 nt, Homo sapiens
  misc_RNA (1)...(19): siRNA sense strand
gaagccagagucacagcua

SEQ ID NO: 271626 - RNA, 19 nt, Homo sapiens
  misc_RNA (1)...(19): siRNA sense strand
ggggaaggcucauguguau

SEQ ID NO: 271627 - RNA, 19 nt, Homo sapiens
  misc_RNA (1)...(19): siRNA sense strand
ggaguacagugccauuagg

SEQ ID NO: 271628 - RNA, 19 nt, Homo sapiens
  misc_RNA (1)...(19): siRNA sense strand
gcaagauggcucccaguuc

SEQ ID NO: 271629 - RNA, 19 nt, Homo sapiens
  misc_RNA (1)...(19): siRNA sense strand
gagugccaauuacugcuuu

SEQ ID NO: 271630 - RNA, 19 nt, Homo sapiens
  misc_RNA (1)...(19): siRNA sense strand
uauagaaaccuacauugug

SEQ ID NO: 271631 - RNA, 19 nt, Homo sapiens
  misc_RNA (1)...(19): siRNA sense strand
gguuaccagucucuuaaga

SEQ ID NO: 271632 - RNA, 19 nt, Homo sapiens
  misc_RNA (1)...(19): siRNA sense strand
ccaauacucaggaugaaga

SEQ ID NO: 271633 - RNA, 19 nt, Homo sapiens
  misc_RNA (1)...(19): siRNA sense strand
gauggacuaugccaccaau

SEQ ID NO: 271634 - RNA, 19 nt, Homo sapiens
  misc_RNA (1)...(19): siRNA sense strand
uacaauuacuagaggcuuu

SEQ ID NO: 271635 - RNA, 19 nt, Homo sapiens
  misc_RNA (1)...(19): siRNA sense strand
cuuccaagagugccaauua

SEQ ID NO: 271636 - RNA, 19 nt, Homo sapiens
  misc_RNA (1)...(19): siRNA sense strand
ugugaaggccuugcuguua

SEQ ID NO: 271637 - RNA, 19 nt, Homo sapiens
  misc_RNA (1)...(19): siRNA sense strand
ccaugaccuugcuggauuu

SEQ ID NO: 271638 - RNA, 19 nt, Homo sapiens
  misc_RNA (1)...(19): siRNA sense strand
gaugucaugcuaaaucaga

SEQ ID NO: 271639 - RNA, 19 nt, Homo sapiens
  misc_RNA (1)...(19): siRNA sense strand
gaaucuacuuugcugacau

SEQ ID NO: 271640 - RNA, 19 nt, Homo sapiens
  misc_RNA (1)...(19): siRNA sense strand
ggaaucuacuuugcugaca

SEQ ID NO: 271641 - RNA, 19 nt, Homo sapiens
  misc_RNA (1)...(19): siRNA sense strand
aagcucccaucacagguua

SEQ ID NO: 271642 - RNA, 19 nt, Homo sapiens
  misc_RNA (1)...(19): siRNA sense strand
gaagcucccaucacagguu

SEQ ID NO: 271643 - RNA, 19 nt, Homo sapiens
  misc_RNA (1)...(19): siRNA sense strand
cagguuaccagucucuuaa

SEQ ID NO: 271644 - RNA, 19 nt, Homo sapiens
  misc_RNA (1)...(19): siRNA sense strand
caacaacaacaaguacuau

SEQ ID NO: 271645 - RNA, 19 nt, Homo sapiens
  misc_RNA (1)...(19): siRNA sense strand
ucaacaacaacaaguacua

SEQ ID NO: 271646 - RNA, 19 nt, Homo sapiens
  misc_RNA (1)...(19): siRNA sense strand
uugagaaggugccuggaaa

SEQ ID NO: 271647 - RNA, 19 nt, Homo sapiens
  misc_RNA (1)...(19): siRNA sense strand
ucagaccaaucuccaguuc

SEQ ID NO: 271648 - RNA, 19 nt, Homo sapiens
  misc_RNA (1)...(19): siRNA sense strand
uaagaagauugaggauugu

SEQ ID NO: 271649 - RNA, 19 nt, Homo sapiens
  misc_RNA (1)...(19): siRNA sense strand
aaggaaaugaugucuauga

SEQ ID NO: 271650 - RNA, 19 nt, Homo sapiens
  misc_RNA (1)...(19): siRNA sense strand
ggaccaacacuauagaaac

SEQ ID NO: 271651 - RNA, 19 nt, Homo sapiens
  misc_RNA (1)...(19): siRNA sense strand
ucuuaaaucucccuugaag

SEQ ID NO: 271652 - RNA, 19 nt, Homo sapiens
  misc_RNA (1)...(19): siRNA sense strand
ucaacaaggccaaggaaau

SEQ ID NO: 271653 - RNA, 19 nt, Homo sapiens
  misc_RNA (1)...(19): siRNA sense strand
aacaacaaguacuaucuga

SEQ ID NO: 271654 - RNA, 19 nt, Homo sapiens
  misc_RNA (1)...(19): siRNA sense strand
ucauguguauugugaagga

SEQ ID NO: 271655 - RNA, 19 nt, Homo sapiens
  misc_RNA (1)...(19): siRNA sense strand
caacaacaaguacuaucug

SEQ ID NO: 271656 - RNA, 19 nt, Homo sapiens
  misc_RNA (1)...(19): siRNA sense strand
auacaggacugcugcucuu

SEQ ID NO: 271657 - RNA, 19 nt, Homo sapiens
  misc_RNA (1)...(19): siRNA sense strand
uaacugggugggaaucuug

SEQ ID NO: 271658 - RNA, 19 nt, Homo sapiens
  misc_RNA (1)...(19): siRNA sense strand
guaacugggugggaaucuu

SEQ ID NO: 271659 - RNA, 19 nt, Homo sapiens
  misc_RNA (1)...(19): siRNA sense strand
gaaaguuacgaguucaaag

SEQ ID NO: 271660 - RNA, 19 nt, Homo sapiens
  misc_RNA (1)...(19): siRNA sense strand
caagaugguaugccaggaa

SEQ ID NO: 271661 - RNA, 19 nt, Homo sapiens
  misc_RNA (1)...(19): siRNA sense strand
gaccaacacuauagaaacc

SEQ ID NO: 271662 - RNA, 19 nt, Homo sapiens
  misc_RNA (1)...(19): siRNA sense strand
aggcucauguguauuguga

SEQ ID NO: 271663 - RNA, 19 nt, Homo sapiens
  misc_RNA (1)...(19): siRNA sense strand
agagaggaccuucauaaca

SEQ ID NO: 271664 - RNA, 19 nt, Homo sapiens
  misc_RNA (1)...(19): siRNA sense strand
agaaggauggugagaaaga

SEQ ID NO: 271665 - RNA, 19 nt, Homo sapiens
  misc_RNA (1)...(19): siRNA sense strand
accaugaccuugcuggauu

SEQ ID NO: 271666 - RNA, 19 nt, Homo sapiens
  misc_RNA (1)...(19): siRNA sense strand
ggguacaggaguuaauaaa

SEQ ID NO: 271667 - RNA, 19 nt, Homo sapiens
  misc_RNA (1)...(19): siRNA sense strand
cacagcgacuauaccauga

SEQ ID NO: 271668 - RNA, 19 nt, Homo sapiens
  misc_RNA (1)...(19): siRNA sense strand
ccucaacuacaaugaauau

SEQ ID NO: 271669 - RNA, 19 nt, Homo sapiens
  misc_RNA (1)...(19): siRNA sense strand
gcaaugaaaugcuuagaua

SEQ ID NO: 271670 - RNA, 19 nt, Homo sapiens
  misc_RNA (1)...(19): siRNA sense strand
gaaauaaccuuugacaaga

SEQ ID NO: 271671 - RNA, 19 nt, Homo sapiens
  misc_RNA (1)...(19): siRNA sense strand
gaaacaaggagaaacauua

SEQ ID NO: 271672 - RNA, 19 nt, Homo sapiens
  misc_RNA (1)...(19): siRNA sense strand
gauauuggcucauuugaug

SEQ ID NO: 271673 - RNA, 19 nt, Homo sapiens
  misc_RNA (1)...(19): siRNA sense strand
ggauuaagcuacuugauug

SEQ ID NO: 271674 - RNA, 19 nt, Homo sapiens
  misc_RNA (1)...(19): siRNA sense strand
caagugacaucaacucuuu

SEQ ID NO: 271675 - RNA, 19 nt, Homo sapiens
  misc_RNA (1)...(19): siRNA sense strand
caaauauucucuuggauga

SEQ ID NO: 271676 - RNA, 19 nt, Homo sapiens
  misc_RNA (1)...(19): siRNA sense strand
ggagugugaugcagaagua

SEQ ID NO: 271677 - RNA, 19 nt, Homo sapiens
  misc_RNA (1)...(19): siRNA sense strand
gcagaagucgacaaauuua

SEQ ID NO: 271678 - RNA, 19 nt, Homo sapiens
  misc_RNA (1)...(19): siRNA sense strand
gaacagcaacggccucuga

SEQ ID NO: 271679 - RNA, 19 nt, Homo sapiens
  misc_RNA (1)...(19): siRNA sense strand
gaacuucccuuuggucauc

SEQ ID NO: 271680 - RNA, 19 nt, Homo sapiens
  misc_RNA (1)...(19): siRNA sense strand
gaagaccgccuuugcagaa

SEQ ID NO: 271681 - RNA, 19 nt, Homo sapiens
  misc_RNA (1)...(19): siRNA sense strand
cagcaugucuacuuacaaa

SEQ ID NO: 271682 - RNA, 19 nt, Homo sapiens
  misc_RNA (1)...(19): siRNA sense strand
gcagagagaaaugaaauaa

SEQ ID NO: 271683 - RNA, 19 nt, Homo sapiens
  misc_RNA (1)...(19): siRNA sense strand
gcugaugccuuugauauug

SEQ ID NO: 271684 - RNA, 19 nt, Homo sapiens
  misc_RNA (1)...(19): siRNA sense strand
caaagucauuuauccaaga

SEQ ID NO: 271685 - RNA, 19 nt, Homo sapiens
  misc_RNA (1)...(19): siRNA sense strand
cagcaaauauucucuugga

SEQ ID NO: 271686 - RNA, 19 nt, Homo sapiens
  misc_RNA (1)...(19): siRNA sense strand
gaagaaagaguugaacgaa

SEQ ID NO: 271687 - RNA, 19 nt, Homo sapiens
  misc_RNA (1)...(19): siRNA sense strand
gaaguaccuugcagagaga

SEQ ID NO: 271688 - RNA, 19 nt, Homo sapiens
  misc_RNA (1)...(19): siRNA sense strand
ucacagcccuuucagacaa

SEQ ID NO: 271689 - RNA, 19 nt, Homo sapiens
  misc_RNA (1)...(19): siRNA sense strand
ugagagugauccagaguuu

SEQ ID NO: 271690 - RNA, 19 nt, Homo sapiens
  misc_RNA (1)...(19): siRNA sense strand
gggaaggacuguauuaugc

SEQ ID NO: 271691 - RNA, 19 nt, Homo sapiens
  misc_RNA (1)...(19): siRNA sense strand
gaacacguacaaagucauu

SEQ ID NO: 271692 - RNA, 19 nt, Homo sapiens
  misc_RNA (1)...(19): siRNA sense strand
gaacauggacacgcaagaa

SEQ ID NO: 271693 - RNA, 19 nt, Homo sapiens
  misc_RNA (1)...(19): siRNA sense strand
ugaaauaaccuuugacaag

SEQ ID NO: 271694 - RNA, 19 nt, Homo sapiens
  misc_RNA (1)...(19): siRNA sense strand
caaagacaagcaugaaauu

SEQ ID NO: 271695 - RNA, 19 nt, Homo sapiens
  misc_RNA (1)...(19): siRNA sense strand
agacuguccuuucauugua

SEQ ID NO: 271696 - RNA, 19 nt, Homo sapiens
  misc_RNA (1)...(19): siRNA sense strand
gaagucgacaaauuuauga

SEQ ID NO: 271697 - RNA, 19 nt, Homo sapiens
  misc_RNA (1)...(19): siRNA sense strand
accaagaacucuacaagaa

SEQ ID NO: 271698 - RNA, 19 nt, Homo sapiens
  misc_RNA (1)...(19): siRNA sense strand
gaggauaccaaagggauua

SEQ ID NO: 271699 - RNA, 19 nt, Homo sapiens
  misc_RNA (1)...(19): siRNA sense strand
gcaugaaauugaccgaaug

SEQ ID NO: 271700 - RNA, 19 nt, Homo sapiens
  misc_RNA (1)...(19): siRNA sense strand
uugcagaagucgacaaauu

SEQ ID NO: 271701 - RNA, 19 nt, Homo sapiens
  misc_RNA (1)...(19): siRNA sense strand
caauuugucuugcaaugug

SEQ ID NO: 271702 - RNA, 19 nt, Homo sapiens
  misc_RNA (1)...(19): siRNA sense strand
gggauuaagcuacuugauu

SEQ ID NO: 271703 - RNA, 19 nt, Homo sapiens
  misc_RNA (1)...(19): siRNA sense strand
agaaucauguugucucuug

SEQ ID NO: 271704 - RNA, 19 nt, Homo sapiens
  misc_RNA (1)...(19): siRNA sense strand
guucacauccuuucucaaa

SEQ ID NO: 271705 - RNA, 19 nt, Homo sapiens
  misc_RNA (1)...(19): siRNA sense strand
gauuugcacuaccaccuuu

SEQ ID NO: 271706 - RNA, 19 nt, Homo sapiens
  misc_RNA (1)...(19): siRNA sense strand
guaaaugcagacacagaua

SEQ ID NO: 271707 - RNA, 19 nt, Homo sapiens
  misc_RNA (1)...(19): siRNA sense strand
guggaagaaacucaaauua

SEQ ID NO: 271708 - RNA, 19 nt, Homo sapiens
  misc_RNA (1)...(19): siRNA sense strand
ggaaagcagacacuggaaa

SEQ ID NO: 271709 - RNA, 19 nt, Homo sapiens
  misc_RNA (1)...(19): siRNA sense strand
uaaaugcagacacagauaa

SEQ ID NO: 271710 - RNA, 19 nt, Homo sapiens
  misc_RNA (1)...(19): siRNA sense strand
caagaacucuacaagaacu

SEQ ID NO: 271711 - RNA, 19 nt, Homo sapiens
  misc_RNA (1)...(19): siRNA sense strand
caaugcugcugaugccuuu

SEQ ID NO: 271712 - RNA, 19 nt, Homo sapiens
  misc_RNA (1)...(19): siRNA sense strand
aagaaagaguugaacgaaa

SEQ ID NO: 271713 - RNA, 19 nt, Homo sapiens
  misc_RNA (1)...(19): siRNA sense strand
uacaagaacuucccuuugg

SEQ ID NO: 271714 - RNA, 19 nt, Homo sapiens
  misc_RNA (1)...(19): siRNA sense strand
ccaaagggauuaagcuacu

SEQ ID NO: 271715 - RNA, 19 nt, Homo sapiens
  misc_RNA (1)...(19): siRNA sense strand
agaaagaguugaacgaaac

SEQ ID NO: 271716 - RNA, 19 nt, Homo sapiens
  misc_RNA (1)...(19): siRNA sense strand
ggaagaaagaguugaacga

SEQ ID NO: 271717 - RNA, 19 nt, Homo sapiens
  misc_RNA (1)...(19): siRNA sense strand
ccaaauagacuugaaugga

SEQ ID NO: 271718 - RNA, 19 nt, Homo sapiens
  misc_RNA (1)...(19): siRNA sense strand
gaacugaagucccuuuugg

SEQ ID NO: 271719 - RNA, 19 nt, Homo sapiens
  misc_RNA (1)...(19): siRNA sense strand
ccaaagacaagcaugaaau

SEQ ID NO: 271720 - RNA, 19 nt, Homo sapiens
  misc_RNA (1)...(19): siRNA sense strand
acacguacaaagucauuua

SEQ ID NO: 271721 - RNA, 19 nt, Homo sapiens
  misc_RNA (1)...(19): siRNA sense strand
gcacuaccaccuuucacaa

SEQ ID NO: 271722 - RNA, 19 nt, Homo sapiens
  misc_RNA (1)...(19): siRNA sense strand
gaagagauaaaggaauaug

SEQ ID NO: 271723 - RNA, 19 nt, Homo sapiens
  misc_RNA (1)...(19): siRNA sense strand
agaaggagaugcgguuuua

SEQ ID NO: 271724 - RNA, 19 nt, Homo sapiens
  misc_RNA (1)...(19): siRNA sense strand
gaccaagaacucuacaaga

SEQ ID NO: 271725 - RNA, 19 nt, Homo sapiens
  misc_RNA (1)...(19): siRNA sense strand
gccagcaaauauucucuug

SEQ ID NO: 271726 - RNA, 19 nt, Homo sapiens
  misc_RNA (1)...(19): siRNA sense strand
gcaacuuggccacgaagaa

SEQ ID NO: 271727 - RNA, 19 nt, Homo sapiens
  misc_RNA (1)...(19): siRNA sense strand
agaaguaacggaaacaguu

SEQ ID NO: 271728 - RNA, 19 nt, Homo sapiens
  misc_RNA (1)...(19): siRNA sense strand
aaagcaagcuguagaacac

SEQ ID NO: 271729 - RNA, 19 nt, Homo sapiens
  misc_RNA (1)...(19): siRNA sense strand
ucccugggcugcaugcuuu

SEQ ID NO: 271730 - RNA, 19 nt, Homo sapiens
  misc_RNA (1)...(19): siRNA sense strand
gagacuguccuuucauugu

SEQ ID NO: 271731 - RNA, 19 nt, Homo sapiens
  misc_RNA (1)...(19): siRNA sense strand
uagaacacguacaaaguca

SEQ ID NO: 271732 - RNA, 19 nt, Homo sapiens
  misc_RNA (1)...(19): siRNA sense strand
aagacaagcaugaaauuga

SEQ ID NO: 271733 - RNA, 19 nt, Homo sapiens
  misc_RNA (1)...(19): siRNA sense strand
uaagcaacuuggccacgaa

SEQ ID NO: 271734 - RNA, 19 nt, Homo sapiens
  misc_RNA (1)...(19): siRNA sense strand
caaagcaagcuguagaaca

SEQ ID NO: 271735 - RNA, 19 nt, Homo sapiens
  misc_RNA (1)...(19): siRNA sense strand
agaaacaagugacaucaac

SEQ ID NO: 271736 - RNA, 19 nt, Homo sapiens
  misc_RNA (1)...(19): siRNA sense strand
guagaacacguacaaaguc

SEQ ID NO: 271737 - RNA, 19 nt, Homo sapiens
  misc_RNA (1)...(19): siRNA sense strand
gaaagcagacacuggaaaa

SEQ ID NO: 271738 - RNA, 19 nt, Homo sapiens
  misc_RNA (1)...(19): siRNA sense strand
ugcagaagucgacaaauuu

SEQ ID NO: 271739 - RNA, 19 nt, Homo sapiens
  misc_RNA (1)...(19): siRNA sense strand
cuacaagaacuucccuuug

SEQ ID NO: 271740 - RNA, 19 nt, Homo sapiens
  misc_RNA (1)...(19): siRNA sense strand
caccuucucuccugaacug

SEQ ID NO: 271741 - RNA, 19 nt, Homo sapiens
  misc_RNA (1)...(19): siRNA sense strand
aaaccaaagacaagcauga

SEQ ID NO: 271742 - RNA, 19 nt, Homo sapiens
  misc_RNA (1)...(19): siRNA sense strand
aauaucagaucuuggucuu

SEQ ID NO: 271743 - RNA, 19 nt, Homo sapiens
  misc_RNA (1)...(19): siRNA sense strand
ucucuuggaugaacaugga

SEQ ID NO: 271744 - RNA, 19 nt, Homo sapiens
  misc_RNA (1)...(19): siRNA sense strand
ggagacuguccuuucauug

SEQ ID NO: 271745 - RNA, 19 nt, Homo sapiens
  misc_RNA (1)...(19): siRNA sense strand
gauaagaagaggaucaaaa

SEQ ID NO: 271746 - RNA, 19 nt, Homo sapiens
  misc_RNA (1)...(19): siRNA sense strand
caagaaacaagugacauca

SEQ ID NO: 271747 - RNA, 19 nt, Homo sapiens
  misc_RNA (1)...(19): siRNA sense strand
guacaaagucauuuaucca

SEQ ID NO: 271748 - RNA, 19 nt, Homo sapiens
  misc_RNA (1)...(19): siRNA sense strand
agagagaaaugaaauaacc

SEQ ID NO: 271749 - RNA, 19 nt, Homo sapiens
  misc_RNA (1)...(19): siRNA sense strand
caaagggauuaagcuacuu

SEQ ID NO: 271750 - RNA, 19 nt, Homo sapiens
  misc_RNA (1)...(19): siRNA sense strand
guacccaccacccuugauu

SEQ ID NO: 271751 - RNA, 19 nt, Homo sapiens
  misc_RNA (1)...(19): siRNA sense strand
acauggacacgcaagaaua

SEQ ID NO: 271752 - RNA, 19 nt, Homo sapiens
  misc_RNA (1)...(19): siRNA sense strand
uuaugccacugaaaucauu

SEQ ID NO: 271753 - RNA, 19 nt, Homo sapiens
  misc_RNA (1)...(19): siRNA sense strand
aaagaaucauguugucucu

SEQ ID NO: 271754 - RNA, 19 nt, Homo sapiens
  misc_RNA (1)...(19): siRNA sense strand
aaacaaggagaaacauuag

SEQ ID NO: 271755 - RNA, 19 nt, Homo sapiens
  misc_RNA (1)...(19): siRNA sense strand
agaagaaauuugugaaagc

SEQ ID NO: 271756 - RNA, 19 nt, Homo sapiens
  misc_RNA (1)...(19): siRNA sense strand
ccaagaaacaagugacauc

SEQ ID NO: 271757 - RNA, 19 nt, Homo sapiens
  misc_RNA (1)...(19): siRNA sense strand
cagaguuugugcaguggaa

SEQ ID NO: 271758 - RNA, 19 nt, Homo sapiens
  misc_RNA (1)...(19): siRNA sense strand
gaaucauguugucucuugu

SEQ ID NO: 271759 - RNA, 19 nt, Homo sapiens
  misc_RNA (1)...(19): siRNA sense strand
ugaaacaaggagaaacauu

SEQ ID NO: 271760 - RNA, 19 nt, Homo sapiens
  misc_RNA (1)...(19): siRNA sense strand
cauggacacgcaagaauau

SEQ ID NO: 271761 - RNA, 19 nt, Homo sapiens
  misc_RNA (1)...(19): siRNA sense strand
gagagucccggcaaaauuu

SEQ ID NO: 271762 - RNA, 19 nt, Homo sapiens
  misc_RNA (1)...(19): siRNA sense strand
gcuacuugauugcgaccaa

SEQ ID NO: 271763 - RNA, 19 nt, Homo sapiens
  misc_RNA (1)...(19): siRNA sense strand
ggcagcaugucuacuuaca

SEQ ID NO: 271764 - RNA, 19 nt, Homo sapiens
  misc_RNA (1)...(19): siRNA sense strand
agacaagcaugaaauugac

SEQ ID NO: 271765 - RNA, 19 nt, Homo sapiens
  misc_RNA (1)...(19): siRNA sense strand
gcaguggaagaaagaguug

SEQ ID NO: 271766 - RNA, 19 nt, Homo sapiens
  misc_RNA (1)...(19): siRNA sense strand
ggaaggacuguauuaugca

SEQ ID NO: 271767 - RNA, 19 nt, Homo sapiens
  misc_RNA (1)...(19): siRNA sense strand
cuggcagcaugucuacuua

SEQ ID NO: 271768 - RNA, 19 nt, Homo sapiens
  misc_RNA (1)...(19): siRNA sense strand
ugaaauugaccgaaugaca

SEQ ID NO: 271769 - RNA, 19 nt, Homo sapiens
  misc_RNA (1)...(19): siRNA sense strand
ggagaaagcugaugggaaa

SEQ ID NO: 271770 - RNA, 19 nt, Homo sapiens
  misc_RNA (1)...(19): siRNA sense strand
ggacagggcugcuuguuca

SEQ ID NO: 271771 - RNA, 19 nt, Homo sapiens
  misc_RNA (1)...(19): siRNA sense strand
gcagagagaggcagaugaa

SEQ ID NO: 271772 - RNA, 19 nt, Homo sapiens
  misc_RNA (1)...(19): siRNA sense strand
gcaguauucucggcuguau

SEQ ID NO: 271773 - RNA, 19 nt, Homo sapiens
  misc_RNA (1)...(19): siRNA sense strand
gcucaaaucccaccgaagu

SEQ ID NO: 271774 - RNA, 19 nt, Homo sapiens
  misc_RNA (1)...(19): siRNA sense strand
ugggaaaccugugaguuaa

SEQ ID NO: 271775 - RNA, 19 nt, Homo sapiens
  misc_RNA (1)...(19): siRNA sense strand
gcugcuuguucaguuauua

SEQ ID NO: 271776 - RNA, 19 nt, Homo sapiens
  misc_RNA (1)...(19): siRNA sense strand
gcagaugaacauaguuuua

SEQ ID NO: 271777 - RNA, 19 nt, Homo sapiens
  misc_RNA (1)...(19): siRNA sense strand
cuccaggucuuuccuaaug

SEQ ID NO: 271778 - RNA, 19 nt, Homo sapiens
  misc_RNA (1)...(19): siRNA sense strand
gagagaggcagaugaacau

SEQ ID NO: 271779 - RNA, 19 nt, Homo sapiens
  misc_RNA (1)...(19): siRNA sense strand
gacuccaggucuuuccuaa

SEQ ID NO: 271780 - RNA, 19 nt, Homo sapiens
  misc_RNA (1)...(19): siRNA sense strand
agucucagcuucggcagua

SEQ ID NO: 271781 - RNA, 19 nt, Homo sapiens
  misc_RNA (1)...(19): siRNA sense strand
agaggcagaugaacauagu

SEQ ID NO: 271782 - RNA, 19 nt, Homo sapiens
  misc_RNA (1)...(19): siRNA sense strand
augggaaaccugugaguua

SEQ ID NO: 271783 - RNA, 19 nt, Homo sapiens
  misc_RNA (1)...(19): siRNA sense strand
cagggcugcuuguucaguu

SEQ ID NO: 271784 - RNA, 19 nt, Homo sapiens
  misc_RNA (1)...(19): siRNA sense strand
gagaggcagaugaacauag

SEQ ID NO: 271785 - RNA, 19 nt, Homo sapiens
  misc_RNA (1)...(19): siRNA sense strand
gaugggaaaccugugaguu

SEQ ID NO: 271786 - RNA, 19 nt, Homo sapiens
  misc_RNA (1)...(19): siRNA sense strand
gcugaugggaaaccuguga

SEQ ID NO: 271787 - RNA, 19 nt, Homo sapiens
  misc_RNA (1)...(19): siRNA sense strand
gaaagcugaugggaaaccu

SEQ ID NO: 271788 - RNA, 19 nt, Homo sapiens
  misc_RNA (1)...(19): siRNA sense strand
agagagaggcagaugaaca

SEQ ID NO: 271789 - RNA, 19 nt, Homo sapiens
  misc_RNA (1)...(19): siRNA sense strand
ccaggucuuuccuaaugca

SEQ ID NO: 271790 - RNA, 19 nt, Homo sapiens
  misc_RNA (1)...(19): siRNA sense strand
aggcagaugaacauaguuu

SEQ ID NO: 271791 - RNA, 19 nt, Homo sapiens
  misc_RNA (1)...(19): siRNA sense strand
gggacagggcugcuuguuc

SEQ ID NO: 271792 - RNA, 19 nt, Homo sapiens
  misc_RNA (1)...(19): siRNA sense strand
agggcugcuuguucaguua

SEQ ID NO: 271793 - RNA, 19 nt, Homo sapiens
  misc_RNA (1)...(19): siRNA sense strand
cuaaugcacaguagucagu

SEQ ID NO: 271794 - RNA, 19 nt, Homo sapiens
  misc_RNA (1)...(19): siRNA sense strand
ccaugaagauccucaagaa

SEQ ID NO: 271795 - RNA, 19 nt, Homo sapiens
  misc_RNA (1)...(19): siRNA sense strand
gacaaggacgggcacauua

SEQ ID NO: 271796 - RNA, 19 nt, Homo sapiens
  misc_RNA (1)...(19): siRNA sense strand
gcaaggugauccuggugaa

SEQ ID NO: 271797 - RNA, 19 nt, Homo sapiens
  misc_RNA (1)...(19): siRNA sense strand
ggacaaggacgggcacauu

SEQ ID NO: 271798 - RNA, 19 nt, Homo sapiens
  misc_RNA (1)...(19): siRNA sense strand
uuucagggcugcucaagaa

SEQ ID NO: 271799 - RNA, 19 nt, Homo sapiens
  misc_RNA (1)...(19): siRNA sense strand
cgacguggcuauugugaag

SEQ ID NO: 271800 - RNA, 19 nt, Homo sapiens
  misc_RNA (1)...(19): siRNA sense strand
ucacagcccugaaguacuc

SEQ ID NO: 271801 - RNA, 19 nt, Homo sapiens
  misc_RNA (1)...(19): siRNA sense strand
gcuacuuccuccucaagaa

SEQ ID NO: 271802 - RNA, 19 nt, Homo sapiens
  misc_RNA (1)...(19): siRNA sense strand
acauuaagaucacagacuu

SEQ ID NO: 271803 - RNA, 19 nt, Homo sapiens
  misc_RNA (1)...(19): siRNA sense strand
caaccgccauccagacugu

SEQ ID NO: 271804 - RNA, 19 nt, Homo sapiens
  misc_RNA (1)...(19): siRNA sense strand
gaccgccucugcuuuguca

SEQ ID NO: 271805 - RNA, 19 nt, Homo sapiens
  misc_RNA (1)...(19): siRNA sense strand
agacugacaccagguauuu

SEQ ID NO: 271806 - RNA, 19 nt, Homo sapiens
  misc_RNA (1)...(19): siRNA sense strand
gcgcagugccagcugauga

SEQ ID NO: 271807 - RNA, 19 nt, Homo sapiens
  misc_RNA (1)...(19): siRNA sense strand
acaaggacgggcacauuaa

SEQ ID NO: 271808 - RNA, 19 nt, Homo sapiens
  misc_RNA (1)...(19): siRNA sense strand
ggcagcacguguacgagaa

SEQ ID NO: 271809 - RNA, 19 nt, Homo sapiens
  misc_RNA (1)...(19): siRNA sense strand
ggaguucacggcccagaug

SEQ ID NO: 271810 - RNA, 19 nt, Homo sapiens
  misc_RNA (1)...(19): siRNA sense strand
ucacaccaccugaccaaga

SEQ ID NO: 271811 - RNA, 19 nt, Homo sapiens
  misc_RNA (1)...(19): siRNA sense strand
gcaccuucauuggcuacaa

SEQ ID NO: 271812 - RNA, 19 nt, Homo sapiens
  misc_RNA (1)...(19): siRNA sense strand
ccacgaccgccucugcuuu

SEQ ID NO: 271813 - RNA, 19 nt, Homo sapiens
  misc_RNA (1)...(19): siRNA sense strand
ccaugaacgaguuugagua

SEQ ID NO: 271814 - RNA, 19 nt, Homo sapiens
  misc_RNA (1)...(19): siRNA sense strand
gcccaacaccuucaucauc

SEQ ID NO: 271815 - RNA, 19 nt, Homo sapiens
  misc_RNA (1)...(19): siRNA sense strand
gagacugacaccagguauu

SEQ ID NO: 271816 - RNA, 19 nt, Homo sapiens
  misc_RNA (1)...(19): siRNA sense strand
gcgugaccaugaacgaguu

SEQ ID NO: 271817 - RNA, 19 nt, Homo sapiens
  misc_RNA (1)...(19): siRNA sense strand
ggacgggcacauuaagauc

SEQ ID NO: 271818 - RNA, 19 nt, Homo sapiens
  misc_RNA (1)...(19): siRNA sense strand
ccgaggugcuggaggacaa

SEQ ID NO: 271819 - RNA, 19 nt, Homo sapiens
  misc_RNA (1)...(19): siRNA sense strand
cagggcugcucaagaagga

SEQ ID NO: 271820 - RNA, 19 nt, Homo sapiens
  misc_RNA (1)...(19): siRNA sense strand
caaccaggaccaugagaag

SEQ ID NO: 271821 - RNA, 19 nt, Homo sapiens
  misc_RNA (1)...(19): siRNA sense strand
gcuacuacgccaugaagau

SEQ ID NO: 271822 - RNA, 19 nt, Homo sapiens
  misc_RNA (1)...(19): siRNA sense strand
cacaccaccugaccaagau

SEQ ID NO: 271823 - RNA, 19 nt, Homo sapiens
  misc_RNA (1)...(19): siRNA sense strand
gcaaggaggggaucaagga

SEQ ID NO: 271824 - RNA, 19 nt, Homo sapiens
  misc_RNA (1)...(19): siRNA sense strand
caucacaccaccugaccaa

SEQ ID NO: 271825 - RNA, 19 nt, Homo sapiens
  misc_RNA (1)...(19): siRNA sense strand
aagcaccgcgugaccauga

SEQ ID NO: 271826 - RNA, 19 nt, Homo sapiens
  misc_RNA (1)...(19): siRNA sense strand
ggcugggcguggucaugua

SEQ ID NO: 271827 - RNA, 19 nt, Homo sapiens
  misc_RNA (1)...(19): siRNA sense strand
gccaugaagauccucaaga

SEQ ID NO: 271828 - RNA, 19 nt, Homo sapiens
  misc_RNA (1)...(19): siRNA sense strand
ugaacgaguuugaguaccu

SEQ ID NO: 271829 - RNA, 19 nt, Homo sapiens
  misc_RNA (1)...(19): siRNA sense strand
cgaacgcaccuuccaugug

SEQ ID NO: 271830 - RNA, 19 nt, Homo sapiens
  misc_RNA (1)...(19): siRNA sense strand
gcucagcccacccuucaag

SEQ ID NO: 271831 - RNA, 19 nt, Homo sapiens
  misc_RNA (1)...(19): siRNA sense strand
gcacguguacgagaagaag

SEQ ID NO: 271832 - RNA, 19 nt, Homo sapiens
  misc_RNA (1)...(19): siRNA sense strand
gacgggcacauuaagauca

SEQ ID NO: 271833 - RNA, 19 nt, Homo sapiens
  misc_RNA (1)...(19): siRNA sense strand
cccacacacucaccgagaa

SEQ ID NO: 271834 - RNA, 19 nt, Homo sapiens
  misc_RNA (1)...(19): siRNA sense strand
ccaggaccaugagaagcuu

SEQ ID NO: 271835 - RNA, 19 nt, Homo sapiens
  misc_RNA (1)...(19): siRNA sense strand
caaggacgggcacauuaag

SEQ ID NO: 271836 - RNA, 19 nt, Homo sapiens
  misc_RNA (1)...(19): siRNA sense strand
uaccugcacucggagaaga

SEQ ID NO: 271837 - RNA, 19 nt, Homo sapiens
  misc_RNA (1)...(19): siRNA sense strand
cuauggcgcugagauugug

SEQ ID NO: 271838 - RNA, 19 nt, Homo sapiens
  misc_RNA (1)...(19): siRNA sense strand
ggagacugacaccagguau

SEQ ID NO: 271839 - RNA, 19 nt, Homo sapiens
  misc_RNA (1)...(19): siRNA sense strand
gcaggaggaggaggagaug

SEQ ID NO: 271840 - RNA, 19 nt, Homo sapiens
  misc_RNA (1)...(19): siRNA sense strand
ucuacaaccaggaccauga

SEQ ID NO: 271841 - RNA, 19 nt, Homo sapiens
  misc_RNA (1)...(19): siRNA sense strand
gugccaccaugaagaccuu

SEQ ID NO: 271842 - RNA, 19 nt, Homo sapiens
  misc_RNA (1)...(19): siRNA sense strand
caugaacgaguuugaguac

SEQ ID NO: 271843 - RNA, 19 nt, Homo sapiens
  misc_RNA (1)...(19): siRNA sense strand
gagcgacguggcuauugug

SEQ ID NO: 271844 - RNA, 19 nt, Homo sapiens
  misc_RNA (1)...(19): siRNA sense strand
aagcucagcccacccuuca

SEQ ID NO: 271845 - RNA, 19 nt, Homo sapiens
  misc_RNA (1)...(19): siRNA sense strand
gggcauggcucguauguuu

SEQ ID NO: 271846 - RNA, 19 nt, Homo sapiens
  misc_RNA (1)...(19): siRNA sense strand
uaagagaacugcugucauu

SEQ ID NO: 271847 - RNA, 19 nt, Homo sapiens
  misc_RNA (1)...(19): siRNA sense strand
gaaugcagauuucuucaaa

SEQ ID NO: 271848 - RNA, 19 nt, Homo sapiens
  misc_RNA (1)...(19): siRNA sense strand
gaacguauccuacacaaug

SEQ ID NO: 271849 - RNA, 19 nt, Homo sapiens
  misc_RNA (1)...(19): siRNA sense strand
gaacugcugucauucaaga

SEQ ID NO: 271850 - RNA, 19 nt, Homo sapiens
  misc_RNA (1)...(19): siRNA sense strand
acaaagaggucacugaauu

SEQ ID NO: 271851 - RNA, 19 nt, Homo sapiens
  misc_RNA (1)...(19): siRNA sense strand
gagcagcaguggacuaauu

SEQ ID NO: 271852 - RNA, 19 nt, Homo sapiens
  misc_RNA (1)...(19): siRNA sense strand
gaaccuuucuuucuaucua

SEQ ID NO: 271853 - RNA, 19 nt, Homo sapiens
  misc_RNA (1)...(19): siRNA sense strand
ggacuuucaucaucaaauu

SEQ ID NO: 271854 - RNA, 19 nt, Homo sapiens
  misc_RNA (1)...(19): siRNA sense strand
uaugugcacucgagaauua

SEQ ID NO: 271855 - RNA, 19 nt, Homo sapiens
  misc_RNA (1)...(19): siRNA sense strand
gaauggagcuaagguagaa

SEQ ID NO: 271856 - RNA, 19 nt, Homo sapiens
  misc_RNA (1)...(19): siRNA sense strand
gaccuucucuuuggaaaua

SEQ ID NO: 271857 - RNA, 19 nt, Homo sapiens
  misc_RNA (1)...(19): siRNA sense strand
ucacauaguucaaagagaa

SEQ ID NO: 271858 - RNA, 19 nt, Homo sapiens
  misc_RNA (1)...(19): siRNA sense strand
uuacaaagcuuuagcagau

SEQ ID NO: 271859 - RNA, 19 nt, Homo sapiens
  misc_RNA (1)...(19): siRNA sense strand
gcaauaagguaccuggaau

SEQ ID NO: 271860 - RNA, 19 nt, Homo sapiens
  misc_RNA (1)...(19): siRNA sense strand
cuucagaacucgccuagua

SEQ ID NO: 271861 - RNA, 19 nt, Homo sapiens
  misc_RNA (1)...(19): siRNA sense strand
caaagaggucacugaauua

SEQ ID NO: 271862 - RNA, 19 nt, Homo sapiens
  misc_RNA (1)...(19): siRNA sense strand
ccacaaaggccauauaugu

SEQ ID NO: 271863 - RNA, 19 nt, Homo sapiens
  misc_RNA (1)...(19): siRNA sense strand
gacauaagguagaaaugaa

SEQ ID NO: 271864 - RNA, 19 nt, Homo sapiens
  misc_RNA (1)...(19): siRNA sense strand
ggacauaagguagaaauga

SEQ ID NO: 271865 - RNA, 19 nt, Homo sapiens
  misc_RNA (1)...(19): siRNA sense strand
uaagguaccuggaaugcaa

SEQ ID NO: 271866 - RNA, 19 nt, Homo sapiens
  misc_RNA (1)...(19): siRNA sense strand
gcauugaugucgaaggaaa

SEQ ID NO: 271867 - RNA, 19 nt, Homo sapiens
  misc_RNA (1)...(19): siRNA sense strand
gcaccgagaccauuuguga

SEQ ID NO: 271868 - RNA, 19 nt, Homo sapiens
  misc_RNA (1)...(19): siRNA sense strand
gaaggagguuggcgcuuug

SEQ ID NO: 271869 - RNA, 19 nt, Homo sapiens
  misc_RNA (1)...(19): siRNA sense strand
acacagaaauacugcauug

SEQ ID NO: 271870 - RNA, 19 nt, Homo sapiens
  misc_RNA (1)...(19): siRNA sense strand
uggaugauaugcaugauaa

SEQ ID NO: 271871 - RNA, 19 nt, Homo sapiens
  misc_RNA (1)...(19): siRNA sense strand
uaccacugcucgaaauuua

SEQ ID NO: 271872 - RNA, 19 nt, Homo sapiens
  misc_RNA (1)...(19): siRNA sense strand
gagaacugcugucauucaa

SEQ ID NO: 271873 - RNA, 19 nt, Homo sapiens
  misc_RNA (1)...(19): siRNA sense strand
ccauauaugucucuuggaa

SEQ ID NO: 271874 - RNA, 19 nt, Homo sapiens
  misc_RNA (1)...(19): siRNA sense strand
gaaaaguucucucuucaga

SEQ ID NO: 271875 - RNA, 19 nt, Homo sapiens
  misc_RNA (1)...(19): siRNA sense strand
uagcaggacuuguggugua

SEQ ID NO: 271876 - RNA, 19 nt, Homo sapiens
  misc_RNA (1)...(19): siRNA sense strand
acacagaccuucucuuugg

SEQ ID NO: 271877 - RNA, 19 nt, Homo sapiens
  misc_RNA (1)...(19): siRNA sense strand
uuaaucaaguggcuuauga

SEQ ID NO: 271878 - RNA, 19 nt, Homo sapiens
  misc_RNA (1)...(19): siRNA sense strand
caaaguagaagaaggaaug

SEQ ID NO: 271879 - RNA, 19 nt, Homo sapiens
  misc_RNA (1)...(19): siRNA sense strand
gagacucaaugaacuaugu

SEQ ID NO: 271880 - RNA, 19 nt, Homo sapiens
  misc_RNA (1)...(19): siRNA sense strand
ugaaggagguuggcgcuuu

SEQ ID NO: 271881 - RNA, 19 nt, Homo sapiens
  misc_RNA (1)...(19): siRNA sense strand
acacacagaccuucucuuu

SEQ ID NO: 271882 - RNA, 19 nt, Homo sapiens
  misc_RNA (1)...(19): siRNA sense strand
guuauggacuggaaagaug

SEQ ID NO: 271883 - RNA, 19 nt, Homo sapiens
  misc_RNA (1)...(19): siRNA sense strand
gcagagacucaaugaacua

SEQ ID NO: 271884 - RNA, 19 nt, Homo sapiens
  misc_RNA (1)...(19): siRNA sense strand
ucaaguggcuuaugauugc

SEQ ID NO: 271885 - RNA, 19 nt, Homo sapiens
  misc_RNA (1)...(19): siRNA sense strand
gaaugggcauggcucguau

SEQ ID NO: 271886 - RNA, 19 nt, Homo sapiens
  misc_RNA (1)...(19): siRNA sense strand
gaacggacagaagccuuua

SEQ ID NO: 271887 - RNA, 19 nt, Homo sapiens
  misc_RNA (1)...(19): siRNA sense strand
ucaaacagcuacuagaacu

SEQ ID NO: 271888 - RNA, 19 nt, Homo sapiens
  misc_RNA (1)...(19): siRNA sense strand
gaauuuccuuacugucuau

SEQ ID NO: 271889 - RNA, 19 nt, Homo sapiens
  misc_RNA (1)...(19): siRNA sense strand
uuacagaggacauaaggua

SEQ ID NO: 271890 - RNA, 19 nt, Homo sapiens
  misc_RNA (1)...(19): siRNA sense strand
ggcaaacccugaccaaucu

SEQ ID NO: 271891 - RNA, 19 nt, Homo sapiens
  misc_RNA (1)...(19): siRNA sense strand
gcuauccguuugacauuga

SEQ ID NO: 271892 - RNA, 19 nt, Homo sapiens
  misc_RNA (1)...(19): siRNA sense strand
ccacacacauuuauuacag

SEQ ID NO: 271893 - RNA, 19 nt, Homo sapiens
  misc_RNA (1)...(19): siRNA sense strand
cggaggauauuaugauguu

SEQ ID NO: 271894 - RNA, 19 nt, Homo sapiens
  misc_RNA (1)...(19): siRNA sense strand
cagcauugaugucgaagga

SEQ ID NO: 271895 - RNA, 19 nt, Homo sapiens
  misc_RNA (1)...(19): siRNA sense strand
gcucuaaucucaagaaccu

SEQ ID NO: 271896 - RNA, 19 nt, Homo sapiens
  misc_RNA (1)...(19): siRNA sense strand
guggaucacggaauuauuu

SEQ ID NO: 271897 - RNA, 19 nt, Homo sapiens
  misc_RNA (1)...(19): siRNA sense strand
gcagaggaagcacauagaa

SEQ ID NO: 271898 - RNA, 19 nt, Homo sapiens
  misc_RNA (1)...(19): siRNA sense strand
gcaguggacuaauuauggu

SEQ ID NO: 271899 - RNA, 19 nt, Homo sapiens
  misc_RNA (1)...(19): siRNA sense strand
uaaaccaccuccucaacau

SEQ ID NO: 271900 - RNA, 19 nt, Homo sapiens
  misc_RNA (1)...(19): siRNA sense strand
aaagaggcauuuauaagag

SEQ ID NO: 271901 - RNA, 19 nt, Homo sapiens
  misc_RNA (1)...(19): siRNA sense strand
gcucgaguguacaauaugu

SEQ ID NO: 271902 - RNA, 19 nt, Homo sapiens
  misc_RNA (1)...(19): siRNA sense strand
caagucauuuacccugauu

SEQ ID NO: 271903 - RNA, 19 nt, Homo sapiens
  misc_RNA (1)...(19): siRNA sense strand
gcagagaacacagaaauac

SEQ ID NO: 271904 - RNA, 19 nt, Homo sapiens
  misc_RNA (1)...(19): siRNA sense strand
ugaaagccauagcaagaau

SEQ ID NO: 271905 - RNA, 19 nt, Homo sapiens
  misc_RNA (1)...(19): siRNA sense strand
cgagugaaauggaccagau

SEQ ID NO: 271906 - RNA, 19 nt, Homo sapiens
  misc_RNA (1)...(19): siRNA sense strand
gaacaauuggauacugcua

SEQ ID NO: 271907 - RNA, 19 nt, Homo sapiens
  misc_RNA (1)...(19): siRNA sense strand
guaccuggaaugcaaauug

SEQ ID NO: 271908 - RNA, 19 nt, Homo sapiens
  misc_RNA (1)...(19): siRNA sense strand
gaacacagaaauacugcau

SEQ ID NO: 271909 - RNA, 19 nt, Homo sapiens
  misc_RNA (1)...(19): siRNA sense strand
gcucuggccuguguaugaa

SEQ ID NO: 271910 - RNA, 19 nt, Homo sapiens
  misc_RNA (1)...(19): siRNA sense strand
caagaauggagcuaaggua

SEQ ID NO: 271911 - RNA, 19 nt, Homo sapiens
  misc_RNA (1)...(19): siRNA sense strand
uaugguggcuauaccuauu

SEQ ID NO: 271912 - RNA, 19 nt, Homo sapiens
  misc_RNA (1)...(19): siRNA sense strand
uugaaaggauuaugucuuc

SEQ ID NO: 271913 - RNA, 19 nt, Homo sapiens
  misc_RNA (1)...(19): siRNA sense strand
gaccaaaccuauuuuagau

SEQ ID NO: 271914 - RNA, 19 nt, Homo sapiens
  misc_RNA (1)...(19): siRNA sense strand
cuggaaagauguccuguca

SEQ ID NO: 271915 - RNA, 19 nt, Homo sapiens
  misc_RNA (1)...(19): siRNA sense strand
gagcugaugcuauugaaag

SEQ ID NO: 271916 - RNA, 19 nt, Homo sapiens
  misc_RNA (1)...(19): siRNA sense strand
aacaguuccugaugaagua

SEQ ID NO: 271917 - RNA, 19 nt, Homo sapiens
  misc_RNA (1)...(19): siRNA sense strand
uauagccaauguagaagaa

SEQ ID NO: 271918 - RNA, 19 nt, Homo sapiens
  misc_RNA (1)...(19): siRNA sense strand
guaaugcugaccuccuaua

SEQ ID NO: 271919 - RNA, 19 nt, Homo sapiens
  misc_RNA (1)...(19): siRNA sense strand
ggcaagcguuuaaagcaau

SEQ ID NO: 271920 - RNA, 19 nt, Homo sapiens
  misc_RNA (1)...(19): siRNA sense strand
accaagaucuggaacguau

SEQ ID NO: 271921 - RNA, 19 nt, Homo sapiens
  misc_RNA (1)...(19): siRNA sense strand
aaacguuugugguacauca

SEQ ID NO: 271922 - RNA, 19 nt, Homo sapiens
  misc_RNA (1)...(19): siRNA sense strand
aaucugaccaaaccuauuu

SEQ ID NO: 271923 - RNA, 19 nt, Homo sapiens
  misc_RNA (1)...(19): siRNA sense strand
ugaaaagcauuguggaaaa

SEQ ID NO: 271924 - RNA, 19 nt, Homo sapiens
  misc_RNA (1)...(19): siRNA sense strand
ccagaucgagugcugcuaa

SEQ ID NO: 271925 - RNA, 19 nt, Homo sapiens
  misc_RNA (1)...(19): siRNA sense strand
gaaaggauuaugucuucau

SEQ ID NO: 271926 - RNA, 19 nt, Homo sapiens
  misc_RNA (1)...(19): siRNA sense strand
cgagaauuauagccaaugu

SEQ ID NO: 271927 - RNA, 19 nt, Homo sapiens
  misc_RNA (1)...(19): siRNA sense strand
ccacgccuaugaaaccuau

SEQ ID NO: 271928 - RNA, 19 nt, Homo sapiens
  misc_RNA (1)...(19): siRNA sense strand
cagaggacauaagguagaa

SEQ ID NO: 271929 - RNA, 19 nt, Homo sapiens
  misc_RNA (1)...(19): siRNA sense strand
ggucuuugaugaaguaaaa

SEQ ID NO: 271930 - RNA, 19 nt, Homo sapiens
  misc_RNA (1)...(19): siRNA sense strand
caaaagcaaguuaugguua

SEQ ID NO: 271931 - RNA, 19 nt, Homo sapiens
  misc_RNA (1)...(19): siRNA sense strand
gaaaagaagccucggacuu

SEQ ID NO: 271932 - RNA, 19 nt, Homo sapiens
  misc_RNA (1)...(19): siRNA sense strand
uagaauuaccucucaguga

SEQ ID NO: 271933 - RNA, 19 nt, Homo sapiens
  misc_RNA (1)...(19): siRNA sense strand
agaggucacugaauuagca

SEQ ID NO: 271934 - RNA, 19 nt, Homo sapiens
  misc_RNA (1)...(19): siRNA sense strand
guagaaaugaaacaacuuc

SEQ ID NO: 271935 - RNA, 19 nt, Homo sapiens
  misc_RNA (1)...(19): siRNA sense strand
cagaggagcaagcccaauu

SEQ ID NO: 271936 - RNA, 19 nt, Homo sapiens
  misc_RNA (1)...(19): siRNA sense strand
ucacuuguauuccaaucug

SEQ ID NO: 271937 - RNA, 19 nt, Homo sapiens
  misc_RNA (1)...(19): siRNA sense strand
guagaccacgccuaugaaa

SEQ ID NO: 271938 - RNA, 19 nt, Homo sapiens
  misc_RNA (1)...(19): siRNA sense strand
uggcuggucuggauggaaa

SEQ ID NO: 271939 - RNA, 19 nt, Homo sapiens
  misc_RNA (1)...(19): siRNA sense strand
gaugcuauugaaaggauua

SEQ ID NO: 271940 - RNA, 19 nt, Homo sapiens
  misc_RNA (1)...(19): siRNA sense strand
gaaccucauuuuauccaaa

SEQ ID NO: 271941 - RNA, 19 nt, Homo sapiens
  misc_RNA (1)...(19): siRNA sense strand
gaccuccuauacacucauu

SEQ ID NO: 271942 - RNA, 19 nt, Homo sapiens
  misc_RNA (1)...(19): siRNA sense strand
gaucacggaauuauuugug

SEQ ID NO: 271943 - RNA, 19 nt, Homo sapiens
  misc_RNA (1)...(19): siRNA sense strand
gaauguaccagugcuguca

SEQ ID NO: 271944 - RNA, 19 nt, Homo sapiens
  misc_RNA (1)...(19): siRNA sense strand
gauaacuggucccaauggu

SEQ ID NO: 271945 - RNA, 19 nt, Homo sapiens
  misc_RNA (1)...(19): siRNA sense strand
ggagacacauuucggauua

SEQ ID NO: 271946 - RNA, 19 nt, Homo sapiens
  misc_RNA (1)...(19): siRNA sense strand
gaucugaccugcaaugauu

SEQ ID NO: 271947 - RNA, 19 nt, Homo sapiens
  misc_RNA (1)...(19): siRNA sense strand
gacaaucccucacaauaaa

SEQ ID NO: 271948 - RNA, 19 nt, Homo sapiens
  misc_RNA (1)...(19): siRNA sense strand
ccagaaagcuuuggucauu

SEQ ID NO: 271949 - RNA, 19 nt, Homo sapiens
  misc_RNA (1)...(19): siRNA sense strand
gcucugaaauccacuauug

SEQ ID NO: 271950 - RNA, 19 nt, Homo sapiens
  misc_RNA (1)...(19): siRNA sense strand
ucacaaaccuggcaguuau

SEQ ID NO: 271951 - RNA, 19 nt, Homo sapiens
  misc_RNA (1)...(19): siRNA sense strand
caauaaaccucucuuccaa

SEQ ID NO: 271952 - RNA, 19 nt, Homo sapiens
  misc_RNA (1)...(19): siRNA sense strand
aagaauagcccaccuuaua

SEQ ID NO: 271953 - RNA, 19 nt, Homo sapiens
  misc_RNA (1)...(19): siRNA sense strand
uagcccaccuuauaucuua

SEQ ID NO: 271954 - RNA, 19 nt, Homo sapiens
  misc_RNA (1)...(19): siRNA sense strand
gaauagcagcccauuagua

SEQ ID NO: 271955 - RNA, 19 nt, Homo sapiens
  misc_RNA (1)...(19): siRNA sense strand
ccaggaacaauaugaauua

SEQ ID NO: 271956 - RNA, 19 nt, Homo sapiens
  misc_RNA (1)...(19): siRNA sense strand
acaagaagaugguggagaa

SEQ ID NO: 271957 - RNA, 19 nt, Homo sapiens
  misc_RNA (1)...(19): siRNA sense strand
gcuggaagcucauggacaa

SEQ ID NO: 271958 - RNA, 19 nt, Homo sapiens
  misc_RNA (1)...(19): siRNA sense strand
gaccugcaaugauuauauu

SEQ ID NO: 271959 - RNA, 19 nt, Homo sapiens
  misc_RNA (1)...(19): siRNA sense strand
uaaagaauagcccaccuua

SEQ ID NO: 271960 - RNA, 19 nt, Homo sapiens
  misc_RNA (1)...(19): siRNA sense strand
gaaauccacuauugaucug

SEQ ID NO: 271961 - RNA, 19 nt, Homo sapiens
  misc_RNA (1)...(19): siRNA sense strand
ggucagggcuguccuuucu

SEQ ID NO: 271962 - RNA, 19 nt, Homo sapiens
  misc_RNA (1)...(19): siRNA sense strand
ggaacauucuccagacaau

SEQ ID NO: 271963 - RNA, 19 nt, Homo sapiens
  misc_RNA (1)...(19): siRNA sense strand
aaucaacucugaacggaaa

SEQ ID NO: 271964 - RNA, 19 nt, Homo sapiens
  misc_RNA (1)...(19): siRNA sense strand
gcuucuggcucccuucaua

SEQ ID NO: 271965 - RNA, 19 nt, Homo sapiens
  misc_RNA (1)...(19): siRNA sense strand
ccauaagccucuucaagga

SEQ ID NO: 271966 - RNA, 19 nt, Homo sapiens
  misc_RNA (1)...(19): siRNA sense strand
caccucagcucuccaguga

SEQ ID NO: 271967 - RNA, 19 nt, Homo sapiens
  misc_RNA (1)...(19): siRNA sense strand
cagacaaucccucacaaua

SEQ ID NO: 271968 - RNA, 19 nt, Homo sapiens
  misc_RNA (1)...(19): siRNA sense strand
agacaaucccucacaauaa

SEQ ID NO: 271969 - RNA, 19 nt, Homo sapiens
  misc_RNA (1)...(19): siRNA sense strand
gccgaacucucucagauau

SEQ ID NO: 271970 - RNA, 19 nt, Homo sapiens
  misc_RNA (1)...(19): siRNA sense strand
aaucaaaccuuccucaucu

SEQ ID NO: 271971 - RNA, 19 nt, Homo sapiens
  misc_RNA (1)...(19): siRNA sense strand
aagcucggcuccagaaauu

SEQ ID NO: 271972 - RNA, 19 nt, Homo sapiens
  misc_RNA (1)...(19): siRNA sense strand
gcagaaucccgaccucaaa

SEQ ID NO: 271973 - RNA, 19 nt, Homo sapiens
  misc_RNA (1)...(19): siRNA sense strand
gaaauuaaagguacugaac

SEQ ID NO: 271974 - RNA, 19 nt, Homo sapiens
  misc_RNA (1)...(19): siRNA sense strand
gaaauucauucacaaaccu

SEQ ID NO: 271975 - RNA, 19 nt, Homo sapiens
  misc_RNA (1)...(19): siRNA sense strand
ugauugggcucaugaagga

SEQ ID NO: 271976 - RNA, 19 nt, Homo sapiens
  misc_RNA (1)...(19): siRNA sense strand
gugaagaggacacagagua

SEQ ID NO: 271977 - RNA, 19 nt, Homo sapiens
  misc_RNA (1)...(19): siRNA sense strand
ugaacgagcugaugauacu

SEQ ID NO: 271978 - RNA, 19 nt, Homo sapiens
  misc_RNA (1)...(19): siRNA sense strand
gccaguaccucccacacuu

SEQ ID NO: 271979 - RNA, 19 nt, Homo sapiens
  misc_RNA (1)...(19): siRNA sense strand
acccaaagcuggcgcuaaa

SEQ ID NO: 271980 - RNA, 19 nt, Homo sapiens
  misc_RNA (1)...(19): siRNA sense strand
ccaagaccauaucaaagug

SEQ ID NO: 271981 - RNA, 19 nt, Homo sapiens
  misc_RNA (1)...(19): siRNA sense strand
gacaaaccauugccaguac

SEQ ID NO: 271982 - RNA, 19 nt, Homo sapiens
  misc_RNA (1)...(19): siRNA sense strand
gaugaacgagcugaugaua

SEQ ID NO: 271983 - RNA, 19 nt, Homo sapiens
  misc_RNA (1)...(19): siRNA sense strand
gauaaggauguaaagauug

SEQ ID NO: 271984 - RNA, 19 nt, Homo sapiens
  misc_RNA (1)...(19): siRNA sense strand
gagaugggcuccacauucc

SEQ ID NO: 271985 - RNA, 19 nt, Homo sapiens
  misc_RNA (1)...(19): siRNA sense strand
ugaauuauacugugagaug

SEQ ID NO: 271986 - RNA, 19 nt, Homo sapiens
  misc_RNA (1)...(19): siRNA sense strand
ggguguuuauggagaauuu

SEQ ID NO: 271987 - RNA, 19 nt, Homo sapiens
  misc_RNA (1)...(19): siRNA sense strand
cguaugaagcaauguauaa

SEQ ID NO: 271988 - RNA, 19 nt, Homo sapiens
  misc_RNA (1)...(19): siRNA sense strand
guacguaugaagcaaugua

SEQ ID NO: 271989 - RNA, 19 nt, Homo sapiens
  misc_RNA (1)...(19): siRNA sense strand
ucagugggcuauuggguau

SEQ ID NO: 271990 - RNA, 19 nt, Homo sapiens
  misc_RNA (1)...(19): siRNA sense strand
uggagaauuugaugaagaa

SEQ ID NO: 271991 - RNA, 19 nt, Homo sapiens
  misc_RNA (1)...(19): siRNA sense strand
gaauagcccaccuuauauc

SEQ ID NO: 271992 - RNA, 19 nt, Homo sapiens
  misc_RNA (1)...(19): siRNA sense strand
uaaccaaacugucccucau

SEQ ID NO: 271993 - RNA, 19 nt, Homo sapiens
  misc_RNA (1)...(19): siRNA sense strand
caaacugucccucaucuuc

SEQ ID NO: 271994 - RNA, 19 nt, Homo sapiens
  misc_RNA (1)...(19): siRNA sense strand
acacauuucggauuacuaa

SEQ ID NO: 271995 - RNA, 19 nt, Homo sapiens
  misc_RNA (1)...(19): siRNA sense strand
gaagauggagacacuugga

SEQ ID NO: 271996 - RNA, 19 nt, Homo sapiens
  misc_RNA (1)...(19): siRNA sense strand
ucucagauaucucuaaugc

SEQ ID NO: 271997 - RNA, 19 nt, Homo sapiens
  misc_RNA (1)...(19): siRNA sense strand
aaaugaggaugauggguau

SEQ ID NO: 271998 - RNA, 19 nt, Homo sapiens
  misc_RNA (1)...(19): siRNA sense strand
gaccggccauauucuguug

SEQ ID NO: 271999 - RNA, 19 nt, Homo sapiens
  misc_RNA (1)...(19): siRNA sense strand
ucauaaagacaaaccauug

SEQ ID NO: 272000 - RNA, 19 nt, Homo sapiens
  misc_RNA (1)...(19): siRNA sense strand
ccucuuugcucaggaauug

SEQ ID NO: 272001 - RNA, 19 nt, Homo sapiens
  misc_RNA (1)...(19): siRNA sense strand
cuauugaucugaccugcaa

SEQ ID NO: 272002 - RNA, 19 nt, Homo sapiens
  misc_RNA (1)...(19): siRNA sense strand
ccagaaauucauucacaaa

SEQ ID NO: 272003 - RNA, 19 nt, Homo sapiens
  misc_RNA (1)...(19): siRNA sense strand
agacaaaccauugccagua

SEQ ID NO: 272004 - RNA, 19 nt, Homo sapiens
  misc_RNA (1)...(19): siRNA sense strand
agacaauagucccuuggaa

SEQ ID NO: 272005 - RNA, 19 nt, Homo sapiens
  misc_RNA (1)...(19): siRNA sense strand
cacugaagguucccaaguu

SEQ ID NO: 272006 - RNA, 19 nt, Homo sapiens
  misc_RNA (1)...(19): siRNA sense strand
auugauagcuguacguaug

SEQ ID NO: 272007 - RNA, 19 nt, Homo sapiens
  misc_RNA (1)...(19): siRNA sense strand
gaagugcaucccaucaguu

SEQ ID NO: 272008 - RNA, 19 nt, Homo sapiens
  misc_RNA (1)...(19): siRNA sense strand
gacaggcucuacaugaagu

SEQ ID NO: 272009 - RNA, 19 nt, Homo sapiens
  misc_RNA (1)...(19): siRNA sense strand
ggacauccagaaagcuuug

SEQ ID NO: 272010 - RNA, 19 nt, Homo sapiens
  misc_RNA (1)...(19): siRNA sense strand
ggacacagaguacaugacu

SEQ ID NO: 272011 - RNA, 19 nt, Homo sapiens
  misc_RNA (1)...(19): siRNA sense strand
caaagugacccaggaacaa

SEQ ID NO: 272012 - RNA, 19 nt, Homo sapiens
  misc_RNA (1)...(19): siRNA sense strand
caucuuuacccgacucuuu

SEQ ID NO: 272013 - RNA, 19 nt, Homo sapiens
  misc_RNA (1)...(19): siRNA sense strand
aaacuaagcaaaccauaag

SEQ ID NO: 272014 - RNA, 19 nt, Homo sapiens
  misc_RNA (1)...(19): siRNA sense strand
cagaaagcuuuggucauug

SEQ ID NO: 272015 - RNA, 19 nt, Homo sapiens
  misc_RNA (1)...(19): siRNA sense strand
gaguauguguucccucaag

SEQ ID NO: 272016 - RNA, 19 nt, Homo sapiens
  misc_RNA (1)...(19): siRNA sense strand
ccaaagcuggcgcuaaaga

SEQ ID NO: 272017 - RNA, 19 nt, Homo sapiens
  misc_RNA (1)...(19): siRNA sense strand
ucgacaggcucuacaugaa

SEQ ID NO: 272018 - RNA, 19 nt, Homo sapiens
  misc_RNA (1)...(19): siRNA sense strand
ggcgaaaccuaaccaaacu

SEQ ID NO: 272019 - RNA, 19 nt, Homo sapiens
  misc_RNA (1)...(19): siRNA sense strand
gcaucuccguacuaucuug

SEQ ID NO: 272020 - RNA, 19 nt, Homo sapiens
  misc_RNA (1)...(19): siRNA sense strand
agaagaugguggagaagug

SEQ ID NO: 272021 - RNA, 19 nt, Homo sapiens
  misc_RNA (1)...(19): siRNA sense strand
uacaacaaaugucacugaa

SEQ ID NO: 272022 - RNA, 19 nt, Homo sapiens
  misc_RNA (1)...(19): siRNA sense strand
cgaacucucucagauaucu

SEQ ID NO: 272023 - RNA, 19 nt, Homo sapiens
  misc_RNA (1)...(19): siRNA sense strand
ggagcaaugugagggugaa

SEQ ID NO: 272024 - RNA, 19 nt, Homo sapiens
  misc_RNA (1)...(19): siRNA sense strand
cagcaucuccguacuaucu

SEQ ID NO: 272025 - RNA, 19 nt, Homo sapiens
  misc_RNA (1)...(19): siRNA sense strand
agaauagcccaccuuauau

SEQ ID NO: 272026 - RNA, 19 nt, Homo sapiens
  misc_RNA (1)...(19): siRNA sense strand
acaauagucccuuggaaga

SEQ ID NO: 272027 - RNA, 19 nt, Homo sapiens
  misc_RNA (1)...(19): siRNA sense strand
aaacauccuccgggaauuu

SEQ ID NO: 272028 - RNA, 19 nt, Homo sapiens
  misc_RNA (1)...(19): siRNA sense strand
cuacaacaaaugucacuga

SEQ ID NO: 272029 - RNA, 19 nt, Homo sapiens
  misc_RNA (1)...(19): siRNA sense strand
caaagcuggcgcuaaagaa

SEQ ID NO: 272030 - RNA, 19 nt, Homo sapiens
  misc_RNA (1)...(19): siRNA sense strand
cugccgaugugaaauuaaa

SEQ ID NO: 272031 - RNA, 19 nt, Homo sapiens
  misc_RNA (1)...(19): siRNA sense strand
ugaaagcucggcuccagaa

SEQ ID NO: 272032 - RNA, 19 nt, Homo sapiens
  misc_RNA (1)...(19): siRNA sense strand
ugaagugcaucccaucagu

SEQ ID NO: 272033 - RNA, 19 nt, Homo sapiens
  misc_RNA (1)...(19): siRNA sense strand
gggaagauggagacacuug

SEQ ID NO: 272034 - RNA, 19 nt, Homo sapiens
  misc_RNA (1)...(19): siRNA sense strand
ccagugagaucgagaaccu

SEQ ID NO: 272035 - RNA, 19 nt, Homo sapiens
  misc_RNA (1)...(19): siRNA sense strand
gauccuacaacaaauguca

SEQ ID NO: 272036 - RNA, 19 nt, Homo sapiens
  misc_RNA (1)...(19): siRNA sense strand
guggugcgguugugucaga

SEQ ID NO: 272037 - RNA, 19 nt, Homo sapiens
  misc_RNA (1)...(19): siRNA sense strand
ugaucugacuggcuuaugu

SEQ ID NO: 272038 - RNA, 19 nt, Homo sapiens
  misc_RNA (1)...(19): siRNA sense strand
gauggagacacuuggagaa

SEQ ID NO: 272039 - RNA, 19 nt, Homo sapiens
  misc_RNA (1)...(19): siRNA sense strand
ggagacacuuggagaaaau

SEQ ID NO: 272040 - RNA, 19 nt, Homo sapiens
  misc_RNA (1)...(19): siRNA sense strand
ugaugaugaugaugaugaa

SEQ ID NO: 272041 - RNA, 19 nt, Homo sapiens
  misc_RNA (1)...(19): siRNA sense strand
gggaguggcagccuguuga

SEQ ID NO: 272042 - RNA, 19 nt, Homo sapiens
  misc_RNA (1)...(19): siRNA sense strand
gcacauccugucuuacauc

SEQ ID NO: 272043 - RNA, 19 nt, Homo sapiens
  misc_RNA (1)...(19): siRNA sense strand
ccucuacggccuuuggaua

SEQ ID NO: 272044 - RNA, 19 nt, Homo sapiens
  misc_RNA (1)...(19): siRNA sense strand
ggaagcucauggacaaggu

SEQ ID NO: 272045 - RNA, 19 nt, Homo sapiens
  misc_RNA (1)...(19): siRNA sense strand
ggacuacuccuaccucaau

SEQ ID NO: 272046 - RNA, 19 nt, Homo sapiens
  misc_RNA (1)...(19): siRNA sense strand
acuccuaccucaauucgua

SEQ ID NO: 272047 - RNA, 19 nt, Homo sapiens
  misc_RNA (1)...(19): siRNA sense strand
gcagugccauacaauuucu

SEQ ID NO: 272048 - RNA, 19 nt, Homo sapiens
  misc_RNA (1)...(19): siRNA sense strand
cauccggccugcacgagaa

SEQ ID NO: 272049 - RNA, 19 nt, Homo sapiens
  misc_RNA (1)...(19): siRNA sense strand
gggccaaguuccgcaaaca

SEQ ID NO: 272050 - RNA, 19 nt, Homo sapiens
  misc_RNA (1)...(19): siRNA sense strand
gacuacuccuaccucaauu

SEQ ID NO: 272051 - RNA, 19 nt, Homo sapiens
  misc_RNA (1)...(19): siRNA sense strand
gcaagaagcugagcaaggu

SEQ ID NO: 272052 - RNA, 19 nt, Homo sapiens
  misc_RNA (1)...(19): siRNA sense strand
gcgugaagcuggugaacuu

SEQ ID NO: 272053 - RNA, 19 nt, Homo sapiens
  misc_RNA (1)...(19): siRNA sense strand
cgacuucuccagcugguua

SEQ ID NO: 272054 - RNA, 19 nt, Homo sapiens
  misc_RNA (1)...(19): siRNA sense strand
gcucagccguggaguacau

SEQ ID NO: 272055 - RNA, 19 nt, Homo sapiens
  misc_RNA (1)...(19): siRNA sense strand
acaagaagcuguccaaaua

SEQ ID NO: 272056 - RNA, 19 nt, Homo sapiens
  misc_RNA (1)...(19): siRNA sense strand
gaccagcugcgcaauguua

SEQ ID NO: 272057 - RNA, 19 nt, Homo sapiens
  misc_RNA (1)...(19): siRNA sense strand
gggcugaagugaaggaguu

SEQ ID NO: 272058 - RNA, 19 nt, Homo sapiens
  misc_RNA (1)...(19): siRNA sense strand
gcaauguuaucccgucguu

SEQ ID NO: 272059 - RNA, 19 nt, Homo sapiens
  misc_RNA (1)...(19): siRNA sense strand
gcucugcacuucucgacuu

SEQ ID NO: 272060 - RNA, 19 nt, Homo sapiens
  misc_RNA (1)...(19): siRNA sense strand
cgagagagcaucccgucua

SEQ ID NO: 272061 - RNA, 19 nt, Homo sapiens
  misc_RNA (1)...(19): siRNA sense strand
aagaagcuguccaaauaug

SEQ ID NO: 272062 - RNA, 19 nt, Homo sapiens
  misc_RNA (1)...(19): siRNA sense strand
gagagagcaucccgucuac

SEQ ID NO: 272063 - RNA, 19 nt, Homo sapiens
  misc_RNA (1)...(19): siRNA sense strand
caagaagcuguccaaauau

SEQ ID NO: 272064 - RNA, 19 nt, Homo sapiens
  misc_RNA (1)...(19): siRNA sense strand
caacuuugcaggcgagaga

SEQ ID NO: 272065 - RNA, 19 nt, Homo sapiens
  misc_RNA (1)...(19): siRNA sense strand
gcuggacgcucugcacuuc

SEQ ID NO: 272066 - RNA, 19 nt, Homo sapiens
  misc_RNA (1)...(19): siRNA sense strand
agagugggcugaagugaag

SEQ ID NO: 272067 - RNA, 19 nt, Homo sapiens
  misc_RNA (1)...(19): siRNA sense strand
gcagaagagugggcugaag

SEQ ID NO: 272068 - RNA, 19 nt, Homo sapiens
  misc_RNA (1)...(19): siRNA sense strand
gaagagugggcugaaguga

SEQ ID NO: 272069 - RNA, 19 nt, Homo sapiens
  misc_RNA (1)...(19): siRNA sense strand
gcccaguauuugcuacauu

SEQ ID NO: 272070 - RNA, 19 nt, Homo sapiens
  misc_RNA (1)...(19): siRNA sense strand
cccaguauuugcuacauuc

SEQ ID NO: 272071 - RNA, 19 nt, Homo sapiens
  misc_RNA (1)...(19): siRNA sense strand
uguccgagcugcuacaaac

SEQ ID NO: 272072 - RNA, 19 nt, Homo sapiens
  misc_RNA (1)...(19): siRNA sense strand
acucggaugaggcaaguua

SEQ ID NO: 272073 - RNA, 19 nt, Homo sapiens
  misc_RNA (1)...(19): siRNA sense strand
gaagcuguccaaauaugag

SEQ ID NO: 272074 - RNA, 19 nt, Homo sapiens
  misc_RNA (1)...(19): siRNA sense strand
gaggaaaacagcaaaacuu

SEQ ID NO: 272075 - RNA, 19 nt, Homo sapiens
  misc_RNA (1)...(19): siRNA sense strand
aauaugagacccugcagau

SEQ ID NO: 272076 - RNA, 19 nt, Homo sapiens
  misc_RNA (1)...(19): siRNA sense strand
ccagcaaacaggugaaugg

SEQ ID NO: 272077 - RNA, 19 nt, Homo sapiens
  misc_RNA (1)...(19): siRNA sense strand
ucgaccagcugcgcaaugu

SEQ ID NO: 272078 - RNA, 19 nt, Homo sapiens
  misc_RNA (1)...(19): siRNA sense strand
cagaagagugggcugaagu

SEQ ID NO: 272079 - RNA, 19 nt, Homo sapiens
  misc_RNA (1)...(19): siRNA sense strand
guucaacaacgacaagaag

SEQ ID NO: 272080 - RNA, 19 nt, Homo sapiens
  misc_RNA (1)...(19): siRNA sense strand
guuaucccgucguucaaca

SEQ ID NO: 272081 - RNA, 19 nt, Homo sapiens
  misc_RNA (1)...(19): siRNA sense strand
gaugauggcgcaaaagaau

SEQ ID NO: 272082 - RNA, 19 nt, Homo sapiens
  misc_RNA (1)...(19): siRNA sense strand
aauguuaucccgucguuca

SEQ ID NO: 272083 - RNA, 19 nt, Homo sapiens
  misc_RNA (1)...(19): siRNA sense strand
ucgccucggucccacagaa

SEQ ID NO: 272084 - RNA, 19 nt, Homo sapiens
  misc_RNA (1)...(19): siRNA sense strand
agaagcuguccaaauauga

SEQ ID NO: 272085 - RNA, 19 nt, Homo sapiens
  misc_RNA (1)...(19): siRNA sense strand
ggaguugggagaccaccau

SEQ ID NO: 272086 - RNA, 19 nt, Homo sapiens
  misc_RNA (1)...(19): siRNA sense strand
ugacucggaugaggcaagu

SEQ ID NO: 272087 - RNA, 19 nt, Homo sapiens
  misc_RNA (1)...(19): siRNA sense strand
cuggcuggcucccacuuug

SEQ ID NO: 272088 - RNA, 19 nt, Homo sapiens
  misc_RNA (1)...(19): siRNA sense strand
ggaaauccauguccgugua

SEQ ID NO: 272089 - RNA, 19 nt, Homo sapiens
  misc_RNA (1)...(19): siRNA sense strand
ccaacgagcucccgaguga

SEQ ID NO: 272090 - RNA, 19 nt, Homo sapiens
  misc_RNA (1)...(19): siRNA sense strand
gcagcaaguuugugcagua

SEQ ID NO: 272091 - RNA, 19 nt, Homo sapiens
  misc_RNA (1)...(19): siRNA sense strand
gcagcaagauguuugugaa

SEQ ID NO: 272092 - RNA, 19 nt, Homo sapiens
  misc_RNA (1)...(19): siRNA sense strand
gaugcgggcuccugccuuu

SEQ ID NO: 272093 - RNA, 19 nt, Homo sapiens
  misc_RNA (1)...(19): siRNA sense strand
gagcagauccuggcaaaga

SEQ ID NO: 272094 - RNA, 19 nt, Homo sapiens
  misc_RNA (1)...(19): siRNA sense strand
ugacuugccugguggagaa

SEQ ID NO: 272095 - RNA, 19 nt, Homo sapiens
  misc_RNA (1)...(19): siRNA sense strand
ccaaggguguguaugagaa

SEQ ID NO: 272096 - RNA, 19 nt, Homo sapiens
  misc_RNA (1)...(19): siRNA sense strand
gaccucacaucaacuucua

SEQ ID NO: 272097 - RNA, 19 nt, Homo sapiens
  misc_RNA (1)...(19): siRNA sense strand
gggagcagauccuggcaaa

SEQ ID NO: 272098 - RNA, 19 nt, Homo sapiens
  misc_RNA (1)...(19): siRNA sense strand
gcaaguuugugcaguacga

SEQ ID NO: 272099 - RNA, 19 nt, Homo sapiens
  misc_RNA (1)...(19): siRNA sense strand
gcaagggcgugcagaggau

SEQ ID NO: 272100 - RNA, 19 nt, Homo sapiens
  misc_RNA (1)...(19): siRNA sense strand
ggacgacugcagcaaguuu

SEQ ID NO: 272101 - RNA, 19 nt, Homo sapiens
  misc_RNA (1)...(19): siRNA sense strand
guaacacggucaucaagca

SEQ ID NO: 272102 - RNA, 19 nt, Homo sapiens
  misc_RNA (1)...(19): siRNA sense strand
gggugaaccuggugacaga

SEQ ID NO: 272103 - RNA, 19 nt, Homo sapiens
  misc_RNA (1)...(19): siRNA sense strand
uuaacgagaucacugcuau

SEQ ID NO: 272104 - RNA, 19 nt, Homo sapiens
  misc_RNA (1)...(19): siRNA sense strand
acacggagcugggcaagau

SEQ ID NO: 272105 - RNA, 19 nt, Homo sapiens
  misc_RNA (1)...(19): siRNA sense strand
cgagaucacugcuaugacu

SEQ ID NO: 272106 - RNA, 19 nt, Homo sapiens
  misc_RNA (1)...(19): siRNA sense strand
ucgaggcccugaaggagua

SEQ ID NO: 272107 - RNA, 19 nt, Homo sapiens
  misc_RNA (1)...(19): siRNA sense strand
acagcaacaugaagcaauu

SEQ ID NO: 272108 - RNA, 19 nt, Homo sapiens
  misc_RNA (1)...(19): siRNA sense strand
gagaaccugcaguccuuua

SEQ ID NO: 272109 - RNA, 19 nt, Homo sapiens
  misc_RNA (1)...(19): siRNA sense strand
ccgcaggcuuggcaucuuu

SEQ ID NO: 272110 - RNA, 19 nt, Homo sapiens
  misc_RNA (1)...(19): siRNA sense strand
ccuggugguuuguguauga

SEQ ID NO: 272111 - RNA, 19 nt, Homo sapiens
  misc_RNA (1)...(19): siRNA sense strand
gaagugcuccgaagacaac

SEQ ID NO: 272112 - RNA, 19 nt, Homo sapiens
  misc_RNA (1)...(19): siRNA sense strand
uggagaaccugcaguccuu

SEQ ID NO: 272113 - RNA, 19 nt, Homo sapiens
  misc_RNA (1)...(19): siRNA sense strand
cagagauggugcugucaga

SEQ ID NO: 272114 - RNA, 19 nt, Homo sapiens
  misc_RNA (1)...(19): siRNA sense strand
agauggugcugucagauga

SEQ ID NO: 272115 - RNA, 19 nt, Homo sapiens
  misc_RNA (1)...(19): siRNA sense strand
uaccucaucuccuccaaug

SEQ ID NO: 272116 - RNA, 19 nt, Homo sapiens
  misc_RNA (1)...(19): siRNA sense strand
gagauggugcugucagaug

SEQ ID NO: 272117 - RNA, 19 nt, Homo sapiens
  misc_RNA (1)...(19): siRNA sense strand
caaggaaggaggacaugga

SEQ ID NO: 272118 - RNA, 19 nt, Homo sapiens
  misc_RNA (1)...(19): siRNA sense strand
gcaccagcccugaagaaag

SEQ ID NO: 272119 - RNA, 19 nt, Homo sapiens
  misc_RNA (1)...(19): siRNA sense strand
ccacggcucugggcuucaa

SEQ ID NO: 272120 - RNA, 19 nt, Homo sapiens
  misc_RNA (1)...(19): siRNA sense strand
ccucaucuccuccaauguu

SEQ ID NO: 272121 - RNA, 19 nt, Homo sapiens
  misc_RNA (1)...(19): siRNA sense strand
gcguggcgcugucuacuac

SEQ ID NO: 272122 - RNA, 19 nt, Homo sapiens
  misc_RNA (1)...(19): siRNA sense strand
ggaguucacccuggaguuc

SEQ ID NO: 272123 - RNA, 19 nt, Homo sapiens
  misc_RNA (1)...(19): siRNA sense strand
agacggaccugaccuucgu

SEQ ID NO: 272124 - RNA, 19 nt, Homo sapiens
  misc_RNA (1)...(19): siRNA sense strand
ccgagaagcccucaucagu

SEQ ID NO: 272125 - RNA, 19 nt, Homo sapiens
  misc_RNA (1)...(19): siRNA sense strand
gcgcaagcuggacgaguuu

SEQ ID NO: 272126 - RNA, 19 nt, Homo sapiens
  misc_RNA (1)...(19): siRNA sense strand
caccagcccugaagaaagc

SEQ ID NO: 272127 - RNA, 19 nt, Homo sapiens
  misc_RNA (1)...(19): siRNA sense strand
ggccagggcagcaagaugu

SEQ ID NO: 272128 - RNA, 19 nt, Homo sapiens
  misc_RNA (1)...(19): siRNA sense strand
ggaguaugagccugagaug

SEQ ID NO: 272129 - RNA, 19 nt, Homo sapiens
  misc_RNA (1)...(19): siRNA sense strand
gcucaccaccaaucagaug

SEQ ID NO: 272130 - RNA, 19 nt, Homo sapiens
  misc_RNA (1)...(19): siRNA sense strand
ugaaccaggacaagaagaa

SEQ ID NO: 272131 - RNA, 19 nt, Homo sapiens
  misc_RNA (1)...(19): siRNA sense strand
gggcugcaccucagucauc

SEQ ID NO: 272132 - RNA, 19 nt, Homo sapiens
  misc_RNA (1)...(19): siRNA sense strand
ggugguggugcuccagaua

SEQ ID NO: 272133 - RNA, 19 nt, Homo sapiens
  misc_RNA (1)...(19): siRNA sense strand
caucgacugugagguguuc

SEQ ID NO: 272134 - RNA, 19 nt, Homo sapiens
  misc_RNA (1)...(19): siRNA sense strand
gcaucuuccucacggcaau

SEQ ID NO: 272135 - RNA, 19 nt, Homo sapiens
  misc_RNA (1)...(19): siRNA sense strand
uggcugcccuugucuccuu

SEQ ID NO: 272136 - RNA, 19 nt, Homo sapiens
  misc_RNA (1)...(19): siRNA sense strand
caucucggguaccacguau

SEQ ID NO: 272137 - RNA, 19 nt, Homo sapiens
  misc_RNA (1)...(19): siRNA sense strand
gcacgcucaccaccaauca

SEQ ID NO: 272138 - RNA, 19 nt, Homo sapiens
  misc_RNA (1)...(19): siRNA sense strand
gcugucuacuacuucaaga

SEQ ID NO: 272139 - RNA, 19 nt, Homo sapiens
  misc_RNA (1)...(19): siRNA sense strand
caauaucacaucgggcaaa

SEQ ID NO: 272140 - RNA, 19 nt, Homo sapiens
  misc_RNA (1)...(19): siRNA sense strand
gcaguccuuuaacgagauc

SEQ ID NO: 272141 - RNA, 19 nt, Homo sapiens
  misc_RNA (1)...(19): siRNA sense strand
gcgcauggcacgcaagaac

SEQ ID NO: 272142 - RNA, 19 nt, Homo sapiens
  misc_RNA (1)...(19): siRNA sense strand
ucuaccagcugaggaacuu

SEQ ID NO: 272143 - RNA, 19 nt, Homo sapiens
  misc_RNA (1)...(19): siRNA sense strand
ggagaaccugcaguccuuu

SEQ ID NO: 272144 - RNA, 19 nt, Homo sapiens
  misc_RNA (1)...(19): siRNA sense strand
ggaccucacaucaacuucu

SEQ ID NO: 272145 - RNA, 19 nt, Homo sapiens
  misc_RNA (1)...(19): siRNA sense strand
gaaccugcaguccuuuaac

SEQ ID NO: 272146 - RNA, 19 nt, Homo sapiens
  misc_RNA (1)...(19): siRNA sense strand
caucaacaucggccacuuc

SEQ ID NO: 272147 - RNA, 19 nt, Homo sapiens
  misc_RNA (1)...(19): siRNA sense strand
agauaucucugccugucau

SEQ ID NO: 272148 - RNA, 19 nt, Homo sapiens
  misc_RNA (1)...(19): siRNA sense strand
ccaccaccauggccuuguc

SEQ ID NO: 272149 - RNA, 19 nt, Homo sapiens
  misc_RNA (1)...(19): siRNA sense strand
cgaggucgucugcaucuuc

SEQ ID NO: 272150 - RNA, 19 nt, Homo sapiens
  misc_RNA (1)...(19): siRNA sense strand
ggaacgcaacgccgagagu

SEQ ID NO: 272151 - RNA, 19 nt, Homo sapiens
  misc_RNA (1)...(19): siRNA sense strand
gggagcuggugcuggaaca

SEQ ID NO: 272152 - RNA, 19 nt, Homo sapiens
  misc_RNA (1)...(19): siRNA sense strand
ggcagcaagauguuuguga

SEQ ID NO: 272153 - RNA, 19 nt, Homo sapiens
  misc_RNA (1)...(19): siRNA sense strand
gaaauccauguccguguac

SEQ ID NO: 272154 - RNA, 19 nt, Homo sapiens
  misc_RNA (1)...(19): siRNA sense strand
ggccaaggguguguaugag

SEQ ID NO: 272155 - RNA, 19 nt, Homo sapiens
  misc_RNA (1)...(19): siRNA sense strand
cggcugucaucacuacaug

SEQ ID NO: 272156 - RNA, 19 nt, Homo sapiens
  misc_RNA (1)...(19): siRNA sense strand
gccaaggguguguaugaga

SEQ ID NO: 272157 - RNA, 19 nt, Homo sapiens
  misc_RNA (1)...(19): siRNA sense strand
gcuggcucuucuuccgaua

SEQ ID NO: 272158 - RNA, 19 nt, Homo sapiens
  misc_RNA (1)...(19): siRNA sense strand
gagcugugaaccaggacaa

SEQ ID NO: 272159 - RNA, 19 nt, Homo sapiens
  misc_RNA (1)...(19): siRNA sense strand
cagcaaguuugugcaguac

SEQ ID NO: 272160 - RNA, 19 nt, Homo sapiens
  misc_RNA (1)...(19): siRNA sense strand
agcgcaagcuggacgaguu

SEQ ID NO: 272161 - RNA, 19 nt, Homo sapiens
  misc_RNA (1)...(19): siRNA sense strand
caagauccggagccagaug

SEQ ID NO: 272162 - RNA, 19 nt, Homo sapiens
  misc_RNA (1)...(19): siRNA sense strand
gcugugaaccaggacaaga

SEQ ID NO: 272163 - RNA, 19 nt, Homo sapiens
  misc_RNA (1)...(19): siRNA sense strand
guggcgcugucuacuacuu

SEQ ID NO: 272164 - RNA, 19 nt, Homo sapiens
  misc_RNA (1)...(19): siRNA sense strand
ccaucgaggcccugaagga

SEQ ID NO: 272165 - RNA, 19 nt, Homo sapiens
  misc_RNA (1)...(19): siRNA sense strand
cgagcuggcgccuguaaca

SEQ ID NO: 272166 - RNA, 19 nt, Homo sapiens
  misc_RNA (1)...(19): siRNA sense strand
cggagacagcucugacuug

SEQ ID NO: 272167 - RNA, 19 nt, Homo sapiens
  misc_RNA (1)...(19): siRNA sense strand
ggaaauccauguccgugua

SEQ ID NO: 272168 - RNA, 19 nt, Homo sapiens
  misc_RNA (1)...(19): siRNA sense strand
ccaacgagcucccgaguga

SEQ ID NO: 272169 - RNA, 19 nt, Homo sapiens
  misc_RNA (1)...(19): siRNA sense strand
gcagcaaguuugugcagua

SEQ ID NO: 272170 - RNA, 19 nt, Homo sapiens
  misc_RNA (1)...(19): siRNA sense strand
gcagcaagauguuugugaa

SEQ ID NO: 272171 - RNA, 19 nt, Homo sapiens
  misc_RNA (1)...(19): siRNA sense strand
gaugcgggcuccugccuuu

SEQ ID NO: 272172 - RNA, 19 nt, Homo sapiens
  misc_RNA (1)...(19): siRNA sense strand
gagcagauccuggcaaaga

SEQ ID NO: 272173 - RNA, 19 nt, Homo sapiens
  misc_RNA (1)...(19): siRNA sense strand
ugacuugccugguggagaa

SEQ ID NO: 272174 - RNA, 19 nt, Homo sapiens
  misc_RNA (1)...(19): siRNA sense strand
ccaaggguguguaugagaa

SEQ ID NO: 272175 - RNA, 19 nt, Homo sapiens
  misc_RNA (1)...(19): siRNA sense strand
gaccucacaucaacuucua

SEQ ID NO: 272176 - RNA, 19 nt, Homo sapiens
  misc_RNA (1)...(19): siRNA sense strand
gggagcagauccuggcaaa

SEQ ID NO: 272177 - RNA, 19 nt, Homo sapiens
  misc_RNA (1)...(19): siRNA sense strand
gcaaguuugugcaguacga

SEQ ID NO: 272178 - RNA, 19 nt, Homo sapiens
  misc_RNA (1)...(19): siRNA sense strand
gcaagggcgugcagaggau

SEQ ID NO: 272179 - RNA, 19 nt, Homo sapiens
  misc_RNA (1)...(19): siRNA sense strand
ggacgacugcagcaaguuu

SEQ ID NO: 272180 - RNA, 19 nt, Homo sapiens
  misc_RNA (1)...(19): siRNA sense strand
guaacacggucaucaagca

SEQ ID NO: 272181 - RNA, 19 nt, Homo sapiens
  misc_RNA (1)...(19): siRNA sense strand
gggugaaccuggugacaga

SEQ ID NO: 272182 - RNA, 19 nt, Homo sapiens
  misc_RNA (1)...(19): siRNA sense strand
uuaacgagaucacugcuau

SEQ ID NO: 272183 - RNA, 19 nt, Homo sapiens
  misc_RNA (1)...(19): siRNA sense strand
acacggagcugggcaagau

SEQ ID NO: 272184 - RNA, 19 nt, Homo sapiens
  misc_RNA (1)...(19): siRNA sense strand
cgagaucacugcuaugacu

SEQ ID NO: 272185 - RNA, 19 nt, Homo sapiens
  misc_RNA (1)...(19): siRNA sense strand
ucgaggcccugaaggagua

SEQ ID NO: 272186 - RNA, 19 nt, Homo sapiens
  misc_RNA (1)...(19): siRNA sense strand
acagcaacaugaagcaauu

SEQ ID NO: 272187 - RNA, 19 nt, Homo sapiens
  misc_RNA (1)...(19): siRNA sense strand
gagaaccugcaguccuuua

SEQ ID NO: 272188 - RNA, 19 nt, Homo sapiens
  misc_RNA (1)...(19): siRNA sense strand
ccgcaggcuuggcaucuuu

SEQ ID NO: 272189 - RNA, 19 nt, Homo sapiens
  misc_RNA (1)...(19): siRNA sense strand
ccuggugguuuguguauga

SEQ ID NO: 272190 - RNA, 19 nt, Homo sapiens
  misc_RNA (1)...(19): siRNA sense strand
gaagugcuccgaagacaac

SEQ ID NO: 272191 - RNA, 19 nt, Homo sapiens
  misc_RNA (1)...(19): siRNA sense strand
uggagaaccugcaguccuu

SEQ ID NO: 272192 - RNA, 19 nt, Homo sapiens
  misc_RNA (1)...(19): siRNA sense strand
cagagauggugcugucaga

SEQ ID NO: 272193 - RNA, 19 nt, Homo sapiens
  misc_RNA (1)...(19): siRNA sense strand
agauggugcugucagauga

SEQ ID NO: 272194 - RNA, 19 nt, Homo sapiens
  misc_RNA (1)...(19): siRNA sense strand
uaccucaucuccuccaaug

SEQ ID NO: 272195 - RNA, 19 nt, Homo sapiens
  misc_RNA (1)...(19): siRNA sense strand
gagauggugcugucagaug

SEQ ID NO: 272196 - RNA, 19 nt, Homo sapiens
  misc_RNA (1)...(19): siRNA sense strand
caaggaaggaggacaugga

SEQ ID NO: 272197 - RNA, 19 nt, Homo sapiens
  misc_RNA (1)...(19): siRNA sense strand
gcaccagcccugaagaaag

SEQ ID NO: 272198 - RNA, 19 nt, Homo sapiens
  misc_RNA (1)...(19): siRNA sense strand
ccacggcucugggcuucaa

SEQ ID NO: 272199 - RNA, 19 nt, Homo sapiens
  misc_RNA (1)...(19): siRNA sense strand
ccucaucuccuccaauguu

SEQ ID NO: 272200 - RNA, 19 nt, Homo sapiens
  misc_RNA (1)...(19): siRNA sense strand
gcguggcgcugucuacuac

SEQ ID NO: 272201 - RNA, 19 nt, Homo sapiens
  misc_RNA (1)...(19): siRNA sense strand
ggaguucacccuggaguuc

SEQ ID NO: 272202 - RNA, 19 nt, Homo sapiens
  misc_RNA (1)...(19): siRNA sense strand
agacggaccugaccuucgu

SEQ ID NO: 272203 - RNA, 19 nt, Homo sapiens
  misc_RNA (1)...(19): siRNA sense strand
ccgagaagcccucaucagu

SEQ ID NO: 272204 - RNA, 19 nt, Homo sapiens
  misc_RNA (1)...(19): siRNA sense strand
gcgcaagcuggacgaguuu

SEQ ID NO: 272205 - RNA, 19 nt, Homo sapiens
  misc_RNA (1)...(19): siRNA sense strand
caccagcccugaagaaagc

SEQ ID NO: 272206 - RNA, 19 nt, Homo sapiens
  misc_RNA (1)...(19): siRNA sense strand
ggccagggcagcaagaugu

SEQ ID NO: 272207 - RNA, 19 nt, Homo sapiens
  misc_RNA (1)...(19): siRNA sense strand
ggaguaugagccugagaug

SEQ ID NO: 272208 - RNA, 19 nt, Homo sapiens
  misc_RNA (1)...(19): siRNA sense strand
gcucaccaccaaucagaug

SEQ ID NO: 272209 - RNA, 19 nt, Homo sapiens
  misc_RNA (1)...(19): siRNA sense strand
ugaaccaggacaagaagaa

SEQ ID NO: 272210 - RNA, 19 nt, Homo sapiens
  misc_RNA (1)...(19): siRNA sense strand
gggcugcaccucagucauc

SEQ ID NO: 272211 - RNA, 19 nt, Homo sapiens
  misc_RNA (1)...(19): siRNA sense strand
ggugguggugcuccagaua

SEQ ID NO: 272212 - RNA, 19 nt, Homo sapiens
  misc_RNA (1)...(19): siRNA sense strand
caucgacugugagguguuc

SEQ ID NO: 272213 - RNA, 19 nt, Homo sapiens
  misc_RNA (1)...(19): siRNA sense strand
gcaucuuccucacggcaau

SEQ ID NO: 272214 - RNA, 19 nt, Homo sapiens
  misc_RNA (1)...(19): siRNA sense strand
uggcugcccuugucuccuu

SEQ ID NO: 272215 - RNA, 19 nt, Homo sapiens
  misc_RNA (1)...(19): siRNA sense strand
caucucggguaccacguau

SEQ ID NO: 272216 - RNA, 19 nt, Homo sapiens
  misc_RNA (1)...(19): siRNA sense strand
gcacgcucaccaccaauca

SEQ ID NO: 272217 - RNA, 19 nt, Homo sapiens
  misc_RNA (1)...(19): siRNA sense strand
gcugucuacuacuucaaga

SEQ ID NO: 272218 - RNA, 19 nt, Homo sapiens
  misc_RNA (1)...(19): siRNA sense strand
caauaucacaucgggcaaa

SEQ ID NO: 272219 - RNA, 19 nt, Homo sapiens
  misc_RNA (1)...(19): siRNA sense strand
gcaguccuuuaacgagauc

SEQ ID NO: 272220 - RNA, 19 nt, Homo sapiens
  misc_RNA (1)...(19): siRNA sense strand
gcgcauggcacgcaagaac

SEQ ID NO: 272221 - RNA, 19 nt, Homo sapiens
  misc_RNA (1)...(19): siRNA sense strand
ucuaccagcugaggaacuu

SEQ ID NO: 272222 - RNA, 19 nt, Homo sapiens
  misc_RNA (1)...(19): siRNA sense strand
ggagaaccugcaguccuuu

SEQ ID NO: 272223 - RNA, 19 nt, Homo sapiens
  misc_RNA (1)...(19): siRNA sense strand
ggaccucacaucaacuucu

SEQ ID NO: 272224 - RNA, 19 nt, Homo sapiens
  misc_RNA (1)...(19): siRNA sense strand
gaaccugcaguccuuuaac

SEQ ID NO: 272225 - RNA, 19 nt, Homo sapiens
  misc_RNA (1)...(19): siRNA sense strand
caucaacaucggccacuuc

SEQ ID NO: 272226 - RNA, 19 nt, Homo sapiens
  misc_RNA (1)...(19): siRNA sense strand
agauaucucugccugucau

SEQ ID NO: 272227 - RNA, 19 nt, Homo sapiens
  misc_RNA (1)...(19): siRNA sense strand
ccaccaccauggccuuguc

SEQ ID NO: 272228 - RNA, 19 nt, Homo sapiens
  misc_RNA (1)...(19): siRNA sense strand
cgaggucgucugcaucuuc

SEQ ID NO: 272229 - RNA, 19 nt, Homo sapiens
  misc_RNA (1)...(19): siRNA sense strand
ggaacgcaacgccgagagu

SEQ ID NO: 272230 - RNA, 19 nt, Homo sapiens
  misc_RNA (1)...(19): siRNA sense strand
gggagcuggugcuggaaca

SEQ ID NO: 272231 - RNA, 19 nt, Homo sapiens
  misc_RNA (1)...(19): siRNA sense strand
ggcagcaagauguuuguga

SEQ ID NO: 272232 - RNA, 19 nt, Homo sapiens
  misc_RNA (1)...(19): siRNA sense strand
gaaauccauguccguguac

SEQ ID NO: 272233 - RNA, 19 nt, Homo sapiens
  misc_RNA (1)...(19): siRNA sense strand
ggccaaggguguguaugag

SEQ ID NO: 272234 - RNA, 19 nt, Homo sapiens
  misc_RNA (1)...(19): siRNA sense strand
cggcugucaucacuacaug

SEQ ID NO: 272235 - RNA, 19 nt, Homo sapiens
  misc_RNA (1)...(19): siRNA sense strand
gccaaggguguguaugaga

SEQ ID NO: 272236 - RNA, 19 nt, Homo sapiens
  misc_RNA (1)...(19): siRNA sense strand
gcuggcucuucuuccgaua

SEQ ID NO: 272237 - RNA, 19 nt, Homo sapiens
  misc_RNA (1)...(19): siRNA sense strand
gagcugugaaccaggacaa

SEQ ID NO: 272238 - RNA, 19 nt, Homo sapiens
  misc_RNA (1)...(19): siRNA sense strand
cagcaaguuugugcaguac

SEQ ID NO: 272239 - RNA, 19 nt, Homo sapiens
  misc_RNA (1)...(19): siRNA sense strand
agcgcaagcuggacgaguu

SEQ ID NO: 272240 - RNA, 19 nt, Homo sapiens
  misc_RNA (1)...(19): siRNA sense strand
caagauccggagccagaug

SEQ ID NO: 272241 - RNA, 19 nt, Homo sapiens
  misc_RNA (1)...(19): siRNA sense strand
gcugugaaccaggacaaga

SEQ ID NO: 272242 - RNA, 19 nt, Homo sapiens
  misc_RNA (1)...(19): siRNA sense strand
guggcgcugucuacuacuu

SEQ ID NO: 272243 - RNA, 19 nt, Homo sapiens
  misc_RNA (1)...(19): siRNA sense strand
ccaucgaggcccugaagga

SEQ ID NO: 272244 - RNA, 19 nt, Homo sapiens
  misc_RNA (1)...(19): siRNA sense strand
cgagcuggcgccuguaaca

SEQ ID NO: 272245 - RNA, 19 nt, Homo sapiens
  misc_RNA (1)...(19): siRNA sense strand
cggagacagcucugacuug

SEQ ID NO: 272246 - RNA, 19 nt, Homo sapiens
  misc_RNA (1)...(19): siRNA sense strand
ggaaauccauguccgugua

SEQ ID NO: 272247 - RNA, 19 nt, Homo sapiens
  misc_RNA (1)...(19): siRNA sense strand
ccaacgagcucccgaguga

SEQ ID NO: 272248 - RNA, 19 nt, Homo sapiens
  misc_RNA (1)...(19): siRNA sense strand
gcagcaaguuugugcagua

SEQ ID NO: 272249 - RNA, 19 nt, Homo sapiens
  misc_RNA (1)...(19): siRNA sense strand
gcagcaagauguuugugaa

SEQ ID NO: 272250 - RNA, 19 nt, Homo sapiens
  misc_RNA (1)...(19): siRNA sense strand
gaugcgggcuccugccuuu

SEQ ID NO: 272251 - RNA, 19 nt, Homo sapiens
  misc_RNA (1)...(19): siRNA sense strand
gagcagauccuggcaaaga

SEQ ID NO: 272252 - RNA, 19 nt, Homo sapiens
  misc_RNA (1)...(19): siRNA sense strand
ugacuugccugguggagaa

SEQ ID NO: 272253 - RNA, 19 nt, Homo sapiens
  misc_RNA (1)...(19): siRNA sense strand
ccaaggguguguaugagaa

SEQ ID NO: 272254 - RNA, 19 nt, Homo sapiens
  misc_RNA (1)...(19): siRNA sense strand
gaccucacaucaacuucua

SEQ ID NO: 272255 - RNA, 19 nt, Homo sapiens
  misc_RNA (1)...(19): siRNA sense strand
gggagcagauccuggcaaa

SEQ ID NO: 272256 - RNA, 19 nt, Homo sapiens
  misc_RNA (1)...(19): siRNA sense strand
gcaaguuugugcaguacga

SEQ ID NO: 272257 - RNA, 19 nt, Homo sapiens
  misc_RNA (1)...(19): siRNA sense strand
gcaagggcgugcagaggau

SEQ ID NO: 272258 - RNA, 19 nt, Homo sapiens
  misc_RNA (1)...(19): siRNA sense strand
ggacgacugcagcaaguuu

SEQ ID NO: 272259 - RNA, 19 nt, Homo sapiens
  misc_RNA (1)...(19): siRNA sense strand
guaacacggucaucaagca

SEQ ID NO: 272260 - RNA, 19 nt, Homo sapiens
  misc_RNA (1)...(19): siRNA sense strand
gggugaaccuggugacaga

SEQ ID NO: 272261 - RNA, 19 nt, Homo sapiens
  misc_RNA (1)...(19): siRNA sense strand
uuaacgagaucacugcuau

SEQ ID NO: 272262 - RNA, 19 nt, Homo sapiens
  misc_RNA (1)...(19): siRNA sense strand
acacggagcugggcaagau

SEQ ID NO: 272263 - RNA, 19 nt, Homo sapiens
  misc_RNA (1)...(19): siRNA sense strand
cgagaucacugcuaugacu

SEQ ID NO: 272264 - RNA, 19 nt, Homo sapiens
  misc_RNA (1)...(19): siRNA sense strand
ucgaggcccugaaggagua

SEQ ID NO: 272265 - RNA, 19 nt, Homo sapiens
  misc_RNA (1)...(19): siRNA sense strand
acagcaacaugaagcaauu

SEQ ID NO: 272266 - RNA, 19 nt, Homo sapiens
  misc_RNA (1)...(19): siRNA sense strand
gagaaccugcaguccuuua

SEQ ID NO: 272267 - RNA, 19 nt, Homo sapiens
  misc_RNA (1)...(19): siRNA sense strand
ccgcaggcuuggcaucuuu

SEQ ID NO: 272268 - RNA, 19 nt, Homo sapiens
  misc_RNA (1)...(19): siRNA sense strand
ccuggugguuuguguauga

SEQ ID NO: 272269 - RNA, 19 nt, Homo sapiens
  misc_RNA (1)...(19): siRNA sense strand
gaagugcuccgaagacaac

SEQ ID NO: 272270 - RNA, 19 nt, Homo sapiens
  misc_RNA (1)...(19): siRNA sense strand
uggagaaccugcaguccuu

SEQ ID NO: 272271 - RNA, 19 nt, Homo sapiens
  misc_RNA (1)...(19): siRNA sense strand
cagagauggugcugucaga

SEQ ID NO: 272272 - RNA, 19 nt, Homo sapiens
  misc_RNA (1)...(19): siRNA sense strand
agauggugcugucagauga

SEQ ID NO: 272273 - RNA, 19 nt, Homo sapiens
  misc_RNA (1)...(19): siRNA sense strand
uaccucaucuccuccaaug

SEQ ID NO: 272274 - RNA, 19 nt, Homo sapiens
  misc_RNA (1)...(19): siRNA sense strand
gagauggugcugucagaug

SEQ ID NO: 272275 - RNA, 19 nt, Homo sapiens
  misc_RNA (1)...(19): siRNA sense strand
caaggaaggaggacaugga

SEQ ID NO: 272276 - RNA, 19 nt, Homo sapiens
  misc_RNA (1)...(19): siRNA sense strand
gcaccagcccugaagaaag

SEQ ID NO: 272277 - RNA, 19 nt, Homo sapiens
  misc_RNA (1)...(19): siRNA sense strand
ccacggcucugggcuucaa

SEQ ID NO: 272278 - RNA, 19 nt, Homo sapiens
  misc_RNA (1)...(19): siRNA sense strand
ccucaucuccuccaauguu

SEQ ID NO: 272279 - RNA, 19 nt, Homo sapiens
  misc_RNA (1)...(19): siRNA sense strand
gcguggcgcugucuacuac

SEQ ID NO: 272280 - RNA, 19 nt, Homo sapiens
  misc_RNA (1)...(19): siRNA sense strand
ggaguucacccuggaguuc

SEQ ID NO: 272281 - RNA, 19 nt, Homo sapiens
  misc_RNA (1)...(19): siRNA sense strand
agacggaccugaccuucgu

SEQ ID NO: 272282 - RNA, 19 nt, Homo sapiens
  misc_RNA (1)...(19): siRNA sense strand
ccgagaagcccucaucagu

SEQ ID NO: 272283 - RNA, 19 nt, Homo sapiens
  misc_RNA (1)...(19): siRNA sense strand
gcgcaagcuggacgaguuu

SEQ ID NO: 272284 - RNA, 19 nt, Homo sapiens
  misc_RNA (1)...(19): siRNA sense strand
caccagcccugaagaaagc

SEQ ID NO: 272285 - RNA, 19 nt, Homo sapiens
  misc_RNA (1)...(19): siRNA sense strand
ggccagggcagcaagaugu

SEQ ID NO: 272286 - RNA, 19 nt, Homo sapiens
  misc_RNA (1)...(19): siRNA sense strand
ggaguaugagccugagaug

SEQ ID NO: 272287 - RNA, 19 nt, Homo sapiens
  misc_RNA (1)...(19): siRNA sense strand
gcucaccaccaaucagaug

SEQ ID NO: 272288 - RNA, 19 nt, Homo sapiens
  misc_RNA (1)...(19): siRNA sense strand
ugaaccaggacaagaagaa

SEQ ID NO: 272289 - RNA, 19 nt, Homo sapiens
  misc_RNA (1)...(19): siRNA sense strand
gggcugcaccucagucauc

SEQ ID NO: 272290 - RNA, 19 nt, Homo sapiens
  misc_RNA (1)...(19): siRNA sense strand
ggugguggugcuccagaua

SEQ ID NO: 272291 - RNA, 19 nt, Homo sapiens
  misc_RNA (1)...(19): siRNA sense strand
caucgacugugagguguuc

SEQ ID NO: 272292 - RNA, 19 nt, Homo sapiens
  misc_RNA (1)...(19): siRNA sense strand
gcaucuuccucacggcaau

SEQ ID NO: 272293 - RNA, 19 nt, Homo sapiens
  misc_RNA (1)...(19): siRNA sense strand
uggcugcccuugucuccuu

SEQ ID NO: 272294 - RNA, 19 nt, Homo sapiens
  misc_RNA (1)...(19): siRNA sense strand
caucucggguaccacguau

SEQ ID NO: 272295 - RNA, 19 nt, Homo sapiens
  misc_RNA (1)...(19): siRNA sense strand
gcacgcucaccaccaauca

SEQ ID NO: 272296 - RNA, 19 nt, Homo sapiens
  misc_RNA (1)...(19): siRNA sense strand
gcugucuacuacuucaaga

SEQ ID NO: 272297 - RNA, 19 nt, Homo sapiens
  misc_RNA (1)...(19): siRNA sense strand
caauaucacaucgggcaaa

SEQ ID NO: 272298 - RNA, 19 nt, Homo sapiens
  misc_RNA (1)...(19): siRNA sense strand
gcaguccuuuaacgagauc

SEQ ID NO: 272299 - RNA, 19 nt, Homo sapiens
  misc_RNA (1)...(19): siRNA sense strand
gcgcauggcacgcaagaac

SEQ ID NO: 272300 - RNA, 19 nt, Homo sapiens
  misc_RNA (1)...(19): siRNA sense strand
ucuaccagcugaggaacuu

SEQ ID NO: 272301 - RNA, 19 nt, Homo sapiens
  misc_RNA (1)...(19): siRNA sense strand
ggagaaccugcaguccuuu

SEQ ID NO: 272302 - RNA, 19 nt, Homo sapiens
  misc_RNA (1)...(19): siRNA sense strand
ggaccucacaucaacuucu

SEQ ID NO: 272303 - RNA, 19 nt, Homo sapiens
  misc_RNA (1)...(19): siRNA sense strand
gaaccugcaguccuuuaac

SEQ ID NO: 272304 - RNA, 19 nt, Homo sapiens
  misc_RNA (1)...(19): siRNA sense strand
caucaacaucggccacuuc

SEQ ID NO: 272305 - RNA, 19 nt, Homo sapiens
  misc_RNA (1)...(19): siRNA sense strand
agauaucucugccugucau

SEQ ID NO: 272306 - RNA, 19 nt, Homo sapiens
  misc_RNA (1)...(19): siRNA sense strand
ccaccaccauggccuuguc

SEQ ID NO: 272307 - RNA, 19 nt, Homo sapiens
  misc_RNA (1)...(19): siRNA sense strand
cgaggucgucugcaucuuc

SEQ ID NO: 272308 - RNA, 19 nt, Homo sapiens
  misc_RNA (1)...(19): siRNA sense strand
ggaacgcaacgccgagagu

SEQ ID NO: 272309 - RNA, 19 nt, Homo sapiens
  misc_RNA (1)...(19): siRNA sense strand
gggagcuggugcuggaaca

SEQ ID NO: 272310 - RNA, 19 nt, Homo sapiens
  misc_RNA (1)...(19): siRNA sense strand
ggcagcaagauguuuguga

SEQ ID NO: 272311 - RNA, 19 nt, Homo sapiens
  misc_RNA (1)...(19): siRNA sense strand
gaaauccauguccguguac

SEQ ID NO: 272312 - RNA, 19 nt, Homo sapiens
  misc_RNA (1)...(19): siRNA sense strand
ggccaaggguguguaugag

SEQ ID NO: 272313 - RNA, 19 nt, Homo sapiens
  misc_RNA (1)...(19): siRNA sense strand
cggcugucaucacuacaug

SEQ ID NO: 272314 - RNA, 19 nt, Homo sapiens
  misc_RNA (1)...(19): siRNA sense strand
gccaaggguguguaugaga

SEQ ID NO: 272315 - RNA, 19 nt, Homo sapiens
  misc_RNA (1)...(19): siRNA sense strand
gcuggcucuucuuccgaua

SEQ ID NO: 272316 - RNA, 19 nt, Homo sapiens
  misc_RNA (1)...(19): siRNA sense strand
gagcugugaaccaggacaa

SEQ ID NO: 272317 - RNA, 19 nt, Homo sapiens
  misc_RNA (1)...(19): siRNA sense strand
cagcaaguuugugcaguac

SEQ ID NO: 272318 - RNA, 19 nt, Homo sapiens
  misc_RNA (1)...(19): siRNA sense strand
agcgcaagcuggacgaguu

SEQ ID NO: 272319 - RNA, 19 nt, Homo sapiens
  misc_RNA (1)...(19): siRNA sense strand
caagauccggagccagaug

SEQ ID NO: 272320 - RNA, 19 nt, Homo sapiens
  misc_RNA (1)...(19): siRNA sense strand
gcugugaaccaggacaaga

SEQ ID NO: 272321 - RNA, 19 nt, Homo sapiens
  misc_RNA (1)...(19): siRNA sense strand
guggcgcugucuacuacuu

SEQ ID NO: 272322 - RNA, 19 nt, Homo sapiens
  misc_RNA (1)...(19): siRNA sense strand
ccaucgaggcccugaagga

SEQ ID NO: 272323 - RNA, 19 nt, Homo sapiens
  misc_RNA (1)...(19): siRNA sense strand
cgagcuggcgccuguaaca

SEQ ID NO: 272324 - RNA, 19 nt, Homo sapiens
  misc_RNA (1)...(19): siRNA sense strand
cggagacagcucugacuug

SEQ ID NO: 272325 - RNA, 19 nt, Homo sapiens
  misc_RNA (1)...(19): siRNA sense strand
ggaaauccauguccgugua

SEQ ID NO: 272326 - RNA, 19 nt, Homo sapiens
  misc_RNA (1)...(19): siRNA sense strand
ccaacgagcucccgaguga

SEQ ID NO: 272327 - RNA, 19 nt, Homo sapiens
  misc_RNA (1)...(19): siRNA sense strand
gcagcaaguuugugcagua

SEQ ID NO: 272328 - RNA, 19 nt, Homo sapiens
  misc_RNA (1)...(19): siRNA sense strand
gcagcaagauguuugugaa

SEQ ID NO: 272329 - RNA, 19 nt, Homo sapiens
  misc_RNA (1)...(19): siRNA sense strand
gaugcgggcuccugccuuu

SEQ ID NO: 272330 - RNA, 19 nt, Homo sapiens
  misc_RNA (1)...(19): siRNA sense strand
gagcagauccuggcaaaga

SEQ ID NO: 272331 - RNA, 19 nt, Homo sapiens
  misc_RNA (1)...(19): siRNA sense strand
ugacuugccugguggagaa

SEQ ID NO: 272332 - RNA, 19 nt, Homo sapiens
  misc_RNA (1)...(19): siRNA sense strand
ccaaggguguguaugagaa

SEQ ID NO: 272333 - RNA, 19 nt, Homo sapiens
  misc_RNA (1)...(19): siRNA sense strand
gaccucacaucaacuucua

SEQ ID NO: 272334 - RNA, 19 nt, Homo sapiens
  misc_RNA (1)...(19): siRNA sense strand
gggagcagauccuggcaaa

SEQ ID NO: 272335 - RNA, 19 nt, Homo sapiens
  misc_RNA (1)...(19): siRNA sense strand
gcaaguuugugcaguacga

SEQ ID NO: 272336 - RNA, 19 nt, Homo sapiens
  misc_RNA (1)...(19): siRNA sense strand
gcaagggcgugcagaggau

SEQ ID NO: 272337 - RNA, 19 nt, Homo sapiens
  misc_RNA (1)...(19): siRNA sense strand
ggacgacugcagcaaguuu

SEQ ID NO: 272338 - RNA, 19 nt, Homo sapiens
  misc_RNA (1)...(19): siRNA sense strand
guaacacggucaucaagca

SEQ ID NO: 272339 - RNA, 19 nt, Homo sapiens
  misc_RNA (1)...(19): siRNA sense strand
gggugaaccuggugacaga

SEQ ID NO: 272340 - RNA, 19 nt, Homo sapiens
  misc_RNA (1)...(19): siRNA sense strand
uuaacgagaucacugcuau

SEQ ID NO: 272341 - RNA, 19 nt, Homo sapiens
  misc_RNA (1)...(19): siRNA sense strand
acacggagcugggcaagau

SEQ ID NO: 272342 - RNA, 19 nt, Homo sapiens
  misc_RNA (1)...(19): siRNA sense strand
cgagaucacugcuaugacu

SEQ ID NO: 272343 - RNA, 19 nt, Homo sapiens
  misc_RNA (1)...(19): siRNA sense strand
ucgaggcccugaaggagua

SEQ ID NO: 272344 - RNA, 19 nt, Homo sapiens
  misc_RNA (1)...(19): siRNA sense strand
acagcaacaugaagcaauu

SEQ ID NO: 272345 - RNA, 19 nt, Homo sapiens
  misc_RNA (1)...(19): siRNA sense strand
gagaaccugcaguccuuua

SEQ ID NO: 272346 - RNA, 19 nt, Homo sapiens
  misc_RNA (1)...(19): siRNA sense strand
gaagugagcgcugggaaca

SEQ ID NO: 272347 - RNA, 19 nt, Homo sapiens
  misc_RNA (1)...(19): siRNA sense strand
ccgcaggcuuggcaucuuu

SEQ ID NO: 272348 - RNA, 19 nt, Homo sapiens
  misc_RNA (1)...(19): siRNA sense strand
ccuggugguuuguguauga

SEQ ID NO: 272349 - RNA, 19 nt, Homo sapiens
  misc_RNA (1)...(19): siRNA sense strand
gaagugcuccgaagacaac

SEQ ID NO: 272350 - RNA, 19 nt, Homo sapiens
  misc_RNA (1)...(19): siRNA sense strand
uggagaaccugcaguccuu

SEQ ID NO: 272351 - RNA, 19 nt, Homo sapiens
  misc_RNA (1)...(19): siRNA sense strand
cagagauggugcugucaga

SEQ ID NO: 272352 - RNA, 19 nt, Homo sapiens
  misc_RNA (1)...(19): siRNA sense strand
agauggugcugucagauga

SEQ ID NO: 272353 - RNA, 19 nt, Homo sapiens
  misc_RNA (1)...(19): siRNA sense strand
uaccucaucuccuccaaug

SEQ ID NO: 272354 - RNA, 19 nt, Homo sapiens
  misc_RNA (1)...(19): siRNA sense strand
gagauggugcugucagaug

SEQ ID NO: 272355 - RNA, 19 nt, Homo sapiens
  misc_RNA (1)...(19): siRNA sense strand
caaggaaggaggacaugga

SEQ ID NO: 272356 - RNA, 19 nt, Homo sapiens
  misc_RNA (1)...(19): siRNA sense strand
gcaccagcccugaagaaag

SEQ ID NO: 272357 - RNA, 19 nt, Homo sapiens
  misc_RNA (1)...(19): siRNA sense strand
ccacggcucugggcuucaa

SEQ ID NO: 272358 - RNA, 19 nt, Homo sapiens
  misc_RNA (1)...(19): siRNA sense strand
ccucaucuccuccaauguu

SEQ ID NO: 272359 - RNA, 19 nt, Homo sapiens
  misc_RNA (1)...(19): siRNA sense strand
gcguggcgcugucuacuac

SEQ ID NO: 272360 - RNA, 19 nt, Homo sapiens
  misc_RNA (1)...(19): siRNA sense strand
ggaguucacccuggaguuc

SEQ ID NO: 272361 - RNA, 19 nt, Homo sapiens
  misc_RNA (1)...(19): siRNA sense strand
agacggaccugaccuucgu

SEQ ID NO: 272362 - RNA, 19 nt, Homo sapiens
  misc_RNA (1)...(19): siRNA sense strand
ccgagaagcccucaucagu

SEQ ID NO: 272363 - RNA, 19 nt, Homo sapiens
  misc_RNA (1)...(19): siRNA sense strand
gcgcaagcuggacgaguuu

SEQ ID NO: 272364 - RNA, 19 nt, Homo sapiens
  misc_RNA (1)...(19): siRNA sense strand
caccagcccugaagaaagc

SEQ ID NO: 272365 - RNA, 19 nt, Homo sapiens
  misc_RNA (1)...(19): siRNA sense strand
ggccagggcagcaagaugu

SEQ ID NO: 272366 - RNA, 19 nt, Homo sapiens
  misc_RNA (1)...(19): siRNA sense strand
ggaguaugagccugagaug

SEQ ID NO: 272367 - RNA, 19 nt, Homo sapiens
  misc_RNA (1)...(19): siRNA sense strand
gcucaccaccaaucagaug

SEQ ID NO: 272368 - RNA, 19 nt, Homo sapiens
  misc_RNA (1)...(19): siRNA sense strand
ugaaccaggacaagaagaa

SEQ ID NO: 272369 - RNA, 19 nt, Homo sapiens
  misc_RNA (1)...(19): siRNA sense strand
gggcugcaccucagucauc

SEQ ID NO: 272370 - RNA, 19 nt, Homo sapiens
  misc_RNA (1)...(19): siRNA sense strand
ggugguggugcuccagaua

SEQ ID NO: 272371 - RNA, 19 nt, Homo sapiens
  misc_RNA (1)...(19): siRNA sense strand
caucgacugugagguguuc

SEQ ID NO: 272372 - RNA, 19 nt, Homo sapiens
  misc_RNA (1)...(19): siRNA sense strand
gcaucuuccucacggcaau

SEQ ID NO: 272373 - RNA, 19 nt, Homo sapiens
  misc_RNA (1)...(19): siRNA sense strand
uggcugcccuugucuccuu

SEQ ID NO: 272374 - RNA, 19 nt, Homo sapiens
  misc_RNA (1)...(19): siRNA sense strand
caucucggguaccacguau

SEQ ID NO: 272375 - RNA, 19 nt, Homo sapiens
  misc_RNA (1)...(19): siRNA sense strand
gcacgcucaccaccaauca

SEQ ID NO: 272376 - RNA, 19 nt, Homo sapiens
  misc_RNA (1)...(19): siRNA sense strand
gcugucuacuacuucaaga

SEQ ID NO: 272377 - RNA, 19 nt, Homo sapiens
  misc_RNA (1)...(19): siRNA sense strand
caauaucacaucgggcaaa

SEQ ID NO: 272378 - RNA, 19 nt, Homo sapiens
  misc_RNA (1)...(19): siRNA sense strand
gcaguccuuuaacgagauc

SEQ ID NO: 272379 - RNA, 19 nt, Homo sapiens
  misc_RNA (1)...(19): siRNA sense strand
gcgcauggcacgcaagaac

SEQ ID NO: 272380 - RNA, 19 nt, Homo sapiens
  misc_RNA (1)...(19): siRNA sense strand
ucuaccagcugaggaacuu

SEQ ID NO: 272381 - RNA, 19 nt, Homo sapiens
  misc_RNA (1)...(19): siRNA sense strand
agugagcgcugggaacaga

SEQ ID NO: 272382 - RNA, 19 nt, Homo sapiens
  misc_RNA (1)...(19): siRNA sense strand
ggagaaccugcaguccuuu

SEQ ID NO: 272383 - RNA, 19 nt, Homo sapiens
  misc_RNA (1)...(19): siRNA sense strand
ggaccucacaucaacuucu

SEQ ID NO: 272384 - RNA, 19 nt, Homo sapiens
  misc_RNA (1)...(19): siRNA sense strand
gaaccugcaguccuuuaac

SEQ ID NO: 272385 - RNA, 19 nt, Homo sapiens
  misc_RNA (1)...(19): siRNA sense strand
caucaacaucggccacuuc

SEQ ID NO: 272386 - RNA, 19 nt, Homo sapiens
  misc_RNA (1)...(19): siRNA sense strand
agauaucucugccugucau

SEQ ID NO: 272387 - RNA, 19 nt, Homo sapiens
  misc_RNA (1)...(19): siRNA sense strand
ccaccaccauggccuuguc

SEQ ID NO: 272388 - RNA, 19 nt, Homo sapiens
  misc_RNA (1)...(19): siRNA sense strand
cgaggucgucugcaucuuc

SEQ ID NO: 272389 - RNA, 19 nt, Homo sapiens
  misc_RNA (1)...(19): siRNA sense strand
ggaacgcaacgccgagagu

SEQ ID NO: 272390 - RNA, 19 nt, Homo sapiens
  misc_RNA (1)...(19): siRNA sense strand
gggagcuggugcuggaaca

SEQ ID NO: 272391 - RNA, 19 nt, Homo sapiens
  misc_RNA (1)...(19): siRNA sense strand
ggcagcaagauguuuguga

SEQ ID NO: 272392 - RNA, 19 nt, Homo sapiens
  misc_RNA (1)...(19): siRNA sense strand
gaaauccauguccguguac

SEQ ID NO: 272393 - RNA, 19 nt, Homo sapiens
  misc_RNA (1)...(19): siRNA sense strand
ggccaaggguguguaugag

SEQ ID NO: 272394 - RNA, 19 nt, Homo sapiens
  misc_RNA (1)...(19): siRNA sense strand
cggcugucaucacuacaug

SEQ ID NO: 272395 - RNA, 19 nt, Homo sapiens
  misc_RNA (1)...(19): siRNA sense strand
gccaaggguguguaugaga

SEQ ID NO: 272396 - RNA, 19 nt, Homo sapiens
  misc_RNA (1)...(19): siRNA sense strand
gcuggcucuucuuccgaua

SEQ ID NO: 272397 - RNA, 19 nt, Homo sapiens
  misc_RNA (1)...(19): siRNA sense strand
gagcugugaaccaggacaa

SEQ ID NO: 272398 - RNA, 19 nt, Homo sapiens
  misc_RNA (1)...(19): siRNA sense strand
cagcaaguuugugcaguac

SEQ ID NO: 272399 - RNA, 19 nt, Homo sapiens
  misc_RNA (1)...(19): siRNA sense strand
agcgcaagcuggacgaguu

SEQ ID NO: 272400 - RNA, 19 nt, Homo sapiens
  misc_RNA (1)...(19): siRNA sense strand
caagauccggagccagaug

SEQ ID NO: 272401 - RNA, 19 nt, Homo sapiens
  misc_RNA (1)...(19): siRNA sense strand
gcugugaaccaggacaaga

SEQ ID NO: 272402 - RNA, 19 nt, Homo sapiens
  misc_RNA (1)...(19): siRNA sense strand
guggcgcugucuacuacuu

SEQ ID NO: 272403 - RNA, 19 nt, Homo sapiens
  misc_RNA (1)...(19): siRNA sense strand
ccaucgaggcccugaagga

SEQ ID NO: 272404 - RNA, 19 nt, Homo sapiens
  misc_RNA (1)...(19): siRNA sense strand
cgagcuggcgccuguaaca

SEQ ID NO: 272405 - RNA, 19 nt, Homo sapiens
  misc_RNA (1)...(19): siRNA sense strand
cggagacagcucugacuug

SEQ ID NO: 272406 - RNA, 19 nt, Homo sapiens
  misc_RNA (1)...(19): siRNA sense strand
ggaaauccauguccgugua

SEQ ID NO: 272407 - RNA, 19 nt, Homo sapiens
  misc_RNA (1)...(19): siRNA sense strand
ccaacgagcucccgaguga

SEQ ID NO: 272408 - RNA, 19 nt, Homo sapiens
  misc_RNA (1)...(19): siRNA sense strand
gcagcaaguuugugcagua

SEQ ID NO: 272409 - RNA, 19 nt, Homo sapiens
  misc_RNA (1)...(19): siRNA sense strand
gcagcaagauguuugugaa

SEQ ID NO: 272410 - RNA, 19 nt, Homo sapiens
  misc_RNA (1)...(19): siRNA sense strand
gaugcgggcuccugccuuu

SEQ ID NO: 272411 - RNA, 19 nt, Homo sapiens
  misc_RNA (1)...(19): siRNA sense strand
gagcagauccuggcaaaga

SEQ ID NO: 272412 - RNA, 19 nt, Homo sapiens
  misc_RNA (1)...(19): siRNA sense strand
ugacuugccugguggagaa

SEQ ID NO: 272413 - RNA, 19 nt, Homo sapiens
  misc_RNA (1)...(19): siRNA sense strand
ccaaggguguguaugagaa

SEQ ID NO: 272414 - RNA, 19 nt, Homo sapiens
  misc_RNA (1)...(19): siRNA sense strand
gaccucacaucaacuucua

SEQ ID NO: 272415 - RNA, 19 nt, Homo sapiens
  misc_RNA (1)...(19): siRNA sense strand
gggagcagauccuggcaaa

SEQ ID NO: 272416 - RNA, 19 nt, Homo sapiens
  misc_RNA (1)...(19): siRNA sense strand
gcaaguuugugcaguacga

SEQ ID NO: 272417 - RNA, 19 nt, Homo sapiens
  misc_RNA (1)...(19): siRNA sense strand
gcaagggcgugcagaggau

SEQ ID NO: 272418 - RNA, 19 nt, Homo sapiens
  misc_RNA (1)...(19): siRNA sense strand
ggacgacugcagcaaguuu

SEQ ID NO: 272419 - RNA, 19 nt, Homo sapiens
  misc_RNA (1)...(19): siRNA sense strand
guaacacggucaucaagca

SEQ ID NO: 272420 - RNA, 19 nt, Homo sapiens
  misc_RNA (1)...(19): siRNA sense strand
gggugaaccuggugacaga

SEQ ID NO: 272421 - RNA, 19 nt, Homo sapiens
  misc_RNA (1)...(19): siRNA sense strand
uuaacgagaucacugcuau

SEQ ID NO: 272422 - RNA, 19 nt, Homo sapiens
  misc_RNA (1)...(19): siRNA sense strand
acacggagcugggcaagau

SEQ ID NO: 272423 - RNA, 19 nt, Homo sapiens
  misc_RNA (1)...(19): siRNA sense strand
cgagaucacugcuaugacu

SEQ ID NO: 272424 - RNA, 19 nt, Homo sapiens
  misc_RNA (1)...(19): siRNA sense strand
ucgaggcccugaaggagua

SEQ ID NO: 272425 - RNA, 19 nt, Homo sapiens
  misc_RNA (1)...(19): siRNA sense strand
acagcaacaugaagcaauu

SEQ ID NO: 272426 - RNA, 19 nt, Homo sapiens
  misc_RNA (1)...(19): siRNA sense strand
gagaaccugcaguccuuua

SEQ ID NO: 272427 - RNA, 19 nt, Homo sapiens
  misc_RNA (1)...(19): siRNA sense strand
ccgcaggcuuggcaucuuu

SEQ ID NO: 272428 - RNA, 19 nt, Homo sapiens
  misc_RNA (1)...(19): siRNA sense strand
ccuggugguuuguguauga

SEQ ID NO: 272429 - RNA, 19 nt, Homo sapiens
  misc_RNA (1)...(19): siRNA sense strand
gaagugcuccgaagacaac

SEQ ID NO: 272430 - RNA, 19 nt, Homo sapiens
  misc_RNA (1)...(19): siRNA sense strand
uggagaaccugcaguccuu

SEQ ID NO: 272431 - RNA, 19 nt, Homo sapiens
  misc_RNA (1)...(19): siRNA sense strand
cagagauggugcugucaga

SEQ ID NO: 272432 - RNA, 19 nt, Homo sapiens
  misc_RNA (1)...(19): siRNA sense strand
agauggugcugucagauga

SEQ ID NO: 272433 - RNA, 19 nt, Homo sapiens
  misc_RNA (1)...(19): siRNA sense strand
uaccucaucuccuccaaug

SEQ ID NO: 272434 - RNA, 19 nt, Homo sapiens
  misc_RNA (1)...(19): siRNA sense strand
gagauggugcugucagaug

SEQ ID NO: 272435 - RNA, 19 nt, Homo sapiens
  misc_RNA (1)...(19): siRNA sense strand
caaggaaggaggacaugga

SEQ ID NO: 272436 - RNA, 19 nt, Homo sapiens
  misc_RNA (1)...(19): siRNA sense strand
gcaccagcccugaagaaag

SEQ ID NO: 272437 - RNA, 19 nt, Homo sapiens
  misc_RNA (1)...(19): siRNA sense strand
ccacggcucugggcuucaa

SEQ ID NO: 272438 - RNA, 19 nt, Homo sapiens
  misc_RNA (1)...(19): siRNA sense strand
ccucaucuccuccaauguu

SEQ ID NO: 272439 - RNA, 19 nt, Homo sapiens
  misc_RNA (1)...(19): siRNA sense strand
gcguggcgcugucuacuac

SEQ ID NO: 272440 - RNA, 19 nt, Homo sapiens
  misc_RNA (1)...(19): siRNA sense strand
ggaguucacccuggaguuc

SEQ ID NO: 272441 - RNA, 19 nt, Homo sapiens
  misc_RNA (1)...(19): siRNA sense strand
agacggaccugaccuucgu

SEQ ID NO: 272442 - RNA, 19 nt, Homo sapiens
  misc_RNA (1)...(19): siRNA sense strand
ccgagaagcccucaucagu

SEQ ID NO: 272443 - RNA, 19 nt, Homo sapiens
  misc_RNA (1)...(19): siRNA sense strand
gcgcaagcuggacgaguuu

SEQ ID NO: 272444 - RNA, 19 nt, Homo sapiens
  misc_RNA (1)...(19): siRNA sense strand
caccagcccugaagaaagc

SEQ ID NO: 272445 - RNA, 19 nt, Homo sapiens
  misc_RNA (1)...(19): siRNA sense strand
ggccagggcagcaagaugu

SEQ ID NO: 272446 - RNA, 19 nt, Homo sapiens
  misc_RNA (1)...(19): siRNA sense strand
ggaguaugagccugagaug

SEQ ID NO: 272447 - RNA, 19 nt, Homo sapiens
  misc_RNA (1)...(19): siRNA sense strand
gcucaccaccaaucagaug

SEQ ID NO: 272448 - RNA, 19 nt, Homo sapiens
  misc_RNA (1)...(19): siRNA sense strand
ugaaccaggacaagaagaa

SEQ ID NO: 272449 - RNA, 19 nt, Homo sapiens
  misc_RNA (1)...(19): siRNA sense strand
gggcugcaccucagucauc

SEQ ID NO: 272450 - RNA, 19 nt, Homo sapiens
  misc_RNA (1)...(19): siRNA sense strand
ggugguggugcuccagaua

SEQ ID NO: 272451 - RNA, 19 nt, Homo sapiens
  misc_RNA (1)...(19): siRNA sense strand
caucgacugugagguguuc

SEQ ID NO: 272452 - RNA, 19 nt, Homo sapiens
  misc_RNA (1)...(19): siRNA sense strand
gcaucuuccucacggcaau

SEQ ID NO: 272453 - RNA, 19 nt, Homo sapiens
  misc_RNA (1)...(19): siRNA sense strand
uggcugcccuugucuccuu

SEQ ID NO: 272454 - RNA, 19 nt, Homo sapiens
  misc_RNA (1)...(19): siRNA sense strand
caucucggguaccacguau

SEQ ID NO: 272455 - RNA, 19 nt, Homo sapiens
  misc_RNA (1)...(19): siRNA sense strand
gcacgcucaccaccaauca

SEQ ID NO: 272456 - RNA, 19 nt, Homo sapiens
  misc_RNA (1)...(19): siRNA sense strand
gcugucuacuacuucaaga

SEQ ID NO: 272457 - RNA, 19 nt, Homo sapiens
  misc_RNA (1)...(19): siRNA sense strand
caauaucacaucgggcaaa

SEQ ID NO: 272458 - RNA, 19 nt, Homo sapiens
  misc_RNA (1)...(19): siRNA sense strand
gcaguccuuuaacgagauc

SEQ ID NO: 272459 - RNA, 19 nt, Homo sapiens
  misc_RNA (1)...(19): siRNA sense strand
gcgcauggcacgcaagaac

SEQ ID NO: 272460 - RNA, 19 nt, Homo sapiens
  misc_RNA (1)...(19): siRNA sense strand
ucuaccagcugaggaacuu

SEQ ID NO: 272461 - RNA, 19 nt, Homo sapiens
  misc_RNA (1)...(19): siRNA sense strand
ggagaaccugcaguccuuu

SEQ ID NO: 272462 - RNA, 19 nt, Homo sapiens
  misc_RNA (1)...(19): siRNA sense strand
ggaccucacaucaacuucu

SEQ ID NO: 272463 - RNA, 19 nt, Homo sapiens
  misc_RNA (1)...(19): siRNA sense strand
gaaccugcaguccuuuaac

SEQ ID NO: 272464 - RNA, 19 nt, Homo sapiens
  misc_RNA (1)...(19): siRNA sense strand
caucaacaucggccacuuc

SEQ ID NO: 272465 - RNA, 19 nt, Homo sapiens
  misc_RNA (1)...(19): siRNA sense strand
agauaucucugccugucau

SEQ ID NO: 272466 - RNA, 19 nt, Homo sapiens
  misc_RNA (1)...(19): siRNA sense strand
ccaccaccauggccuuguc

SEQ ID NO: 272467 - RNA, 19 nt, Homo sapiens
  misc_RNA (1)...(19): siRNA sense strand
cgaggucgucugcaucuuc

SEQ ID NO: 272468 - RNA, 19 nt, Homo sapiens
  misc_RNA (1)...(19): siRNA sense strand
ggaacgcaacgccgagagu

SEQ ID NO: 272469 - RNA, 19 nt, Homo sapiens
  misc_RNA (1)...(19): siRNA sense strand
gggagcuggugcuggaaca

SEQ ID NO: 272470 - RNA, 19 nt, Homo sapiens
  misc_RNA (1)...(19): siRNA sense strand
ggcagcaagauguuuguga

SEQ ID NO: 272471 - RNA, 19 nt, Homo sapiens
  misc_RNA (1)...(19): siRNA sense strand
gaaauccauguccguguac

SEQ ID NO: 272472 - RNA, 19 nt, Homo sapiens
  misc_RNA (1)...(19): siRNA sense strand
ggccaaggguguguaugag

SEQ ID NO: 272473 - RNA, 19 nt, Homo sapiens
  misc_RNA (1)...(19): siRNA sense strand
cggcugucaucacuacaug

SEQ ID NO: 272474 - RNA, 19 nt, Homo sapiens
  misc_RNA (1)...(19): siRNA sense strand
gccaaggguguguaugaga

SEQ ID NO: 272475 - RNA, 19 nt, Homo sapiens
  misc_RNA (1)...(19): siRNA sense strand
gcuggcucuucuuccgaua

SEQ ID NO: 272476 - RNA, 19 nt, Homo sapiens
  misc_RNA (1)...(19): siRNA sense strand
gagcugugaaccaggacaa

SEQ ID NO: 272477 - RNA, 19 nt, Homo sapiens
  misc_RNA (1)...(19): siRNA sense strand
cagcaaguuugugcaguac

SEQ ID NO: 272478 - RNA, 19 nt, Homo sapiens
  misc_RNA (1)...(19): siRNA sense strand
agcgcaagcuggacgaguu

SEQ ID NO: 272479 - RNA, 19 nt, Homo sapiens
  misc_RNA (1)...(19): siRNA sense strand
caagauccggagccagaug

SEQ ID NO: 272480 - RNA, 19 nt, Homo sapiens
  misc_RNA (1)...(19): siRNA sense strand
gcugugaaccaggacaaga

SEQ ID NO: 272481 - RNA, 19 nt, Homo sapiens
  misc_RNA (1)...(19): siRNA sense strand
guggcgcugucuacuacuu

SEQ ID NO: 272482 - RNA, 19 nt, Homo sapiens
  misc_RNA (1)...(19): siRNA sense strand
ccaucgaggcccugaagga

SEQ ID NO: 272483 - RNA, 19 nt, Homo sapiens
  misc_RNA (1)...(19): siRNA sense strand
cgagcuggcgccuguaaca

SEQ ID NO: 272484 - RNA, 19 nt, Homo sapiens
  misc_RNA (1)...(19): siRNA sense strand
cggagacagcucugacuug

SEQ ID NO: 272485 - RNA, 19 nt, Homo sapiens
  misc_RNA (1)...(19): siRNA sense strand
ggaaauccauguccgugua

SEQ ID NO: 272486 - RNA, 19 nt, Homo sapiens
  misc_RNA (1)...(19): siRNA sense strand
ccaacgagcucccgaguga

SEQ ID NO: 272487 - RNA, 19 nt, Homo sapiens
  misc_RNA (1)...(19): siRNA sense strand
gcagcaaguuugugcagua

SEQ ID NO: 272488 - RNA, 19 nt, Homo sapiens
  misc_RNA (1)...(19): siRNA sense strand
gcagcaagauguuugugaa

SEQ ID NO: 272489 - RNA, 19 nt, Homo sapiens
  misc_RNA (1)...(19): siRNA sense strand
gaugcgggcuccugccuuu

SEQ ID NO: 272490 - RNA, 19 nt, Homo sapiens
  misc_RNA (1)...(19): siRNA sense strand
gagcagauccuggcaaaga

SEQ ID NO: 272491 - RNA, 19 nt, Homo sapiens
  misc_RNA (1)...(19): siRNA sense strand
ugacuugccugguggagaa

SEQ ID NO: 272492 - RNA, 19 nt, Homo sapiens
  misc_RNA (1)...(19): siRNA sense strand
ccaaggguguguaugagaa

SEQ ID NO: 272493 - RNA, 19 nt, Homo sapiens
  misc_RNA (1)...(19): siRNA sense strand
gaccucacaucaacuucua

SEQ ID NO: 272494 - RNA, 19 nt, Homo sapiens
  misc_RNA (1)...(19): siRNA sense strand
gggagcagauccuggcaaa

SEQ ID NO: 272495 - RNA, 19 nt, Homo sapiens
  misc_RNA (1)...(19): siRNA sense strand
gcaaguuugugcaguacga

SEQ ID NO: 272496 - RNA, 19 nt, Homo sapiens
  misc_RNA (1)...(19): siRNA sense strand
gcaagggcgugcagaggau

SEQ ID NO: 272497 - RNA, 19 nt, Homo sapiens
  misc_RNA (1)...(19): siRNA sense strand
ggacgacugcagcaaguuu

SEQ ID NO: 272498 - RNA, 19 nt, Homo sapiens
  misc_RNA (1)...(19): siRNA sense strand
guaacacggucaucaagca

SEQ ID NO: 272499 - RNA, 19 nt, Homo sapiens
  misc_RNA (1)...(19): siRNA sense strand
gggugaaccuggugacaga

SEQ ID NO: 272500 - RNA, 19 nt, Homo sapiens
  misc_RNA (1)...(19): siRNA sense strand
uuaacgagaucacugcuau

SEQ ID NO: 272501 - RNA, 19 nt, Homo sapiens
  misc_RNA (1)...(19): siRNA sense strand
acacggagcugggcaagau

SEQ ID NO: 272502 - RNA, 19 nt, Homo sapiens
  misc_RNA (1)...(19): siRNA sense strand
cgagaucacugcuaugacu

SEQ ID NO: 272503 - RNA, 19 nt, Homo sapiens
  misc_RNA (1)...(19): siRNA sense strand
ucgaggcccugaaggagua

SEQ ID NO: 272504 - RNA, 19 nt, Homo sapiens
  misc_RNA (1)...(19): siRNA sense strand
acagcaacaugaagcaauu

SEQ ID NO: 272505 - RNA, 19 nt, Homo sapiens
  misc_RNA (1)...(19): siRNA sense strand
gagaaccugcaguccuuua

SEQ ID NO: 272506 - RNA, 19 nt, Homo sapiens
  misc_RNA (1)...(19): siRNA sense strand
ccgcaggcuuggcaucuuu

SEQ ID NO: 272507 - RNA, 19 nt, Homo sapiens
  misc_RNA (1)...(19): siRNA sense strand
ccuggugguuuguguauga

SEQ ID NO: 272508 - RNA, 19 nt, Homo sapiens
  misc_RNA (1)...(19): siRNA sense strand
gaagugcuccgaagacaac

SEQ ID NO: 272509 - RNA, 19 nt, Homo sapiens
  misc_RNA (1)...(19): siRNA sense strand
uggagaaccugcaguccuu

SEQ ID NO: 272510 - RNA, 19 nt, Homo sapiens
  misc_RNA (1)...(19): siRNA sense strand
cagagauggugcugucaga

SEQ ID NO: 272511 - RNA, 19 nt, Homo sapiens
  misc_RNA (1)...(19): siRNA sense strand
agauggugcugucagauga

SEQ ID NO: 272512 - RNA, 19 nt, Homo sapiens
  misc_RNA (1)...(19): siRNA sense strand
uaccucaucuccuccaaug

SEQ ID NO: 272513 - RNA, 19 nt, Homo sapiens
  misc_RNA (1)...(19): siRNA sense strand
gagauggugcugucagaug

SEQ ID NO: 272514 - RNA, 19 nt, Homo sapiens
  misc_RNA (1)...(19): siRNA sense strand
caaggaaggaggacaugga

SEQ ID NO: 272515 - RNA, 19 nt, Homo sapiens
  misc_RNA (1)...(19): siRNA sense strand
gcaccagcccugaagaaag

SEQ ID NO: 272516 - RNA, 19 nt, Homo sapiens
  misc_RNA (1)...(19): siRNA sense strand
ccacggcucugggcuucaa

SEQ ID NO: 272517 - RNA, 19 nt, Homo sapiens
  misc_RNA (1)...(19): siRNA sense strand
ccucaucuccuccaauguu

SEQ ID NO: 272518 - RNA, 19 nt, Homo sapiens
  misc_RNA (1)...(19): siRNA sense strand
gcguggcgcugucuacuac

SEQ ID NO: 272519 - RNA, 19 nt, Homo sapiens
  misc_RNA (1)...(19): siRNA sense strand
ggaguucacccuggaguuc

SEQ ID NO: 272520 - RNA, 19 nt, Homo sapiens
  misc_RNA (1)...(19): siRNA sense strand
agacggaccugaccuucgu

SEQ ID NO: 272521 - RNA, 19 nt, Homo sapiens
  misc_RNA (1)...(19): siRNA sense strand
ccgagaagcccucaucagu

SEQ ID NO: 272522 - RNA, 19 nt, Homo sapiens
  misc_RNA (1)...(19): siRNA sense strand
gcgcaagcuggacgaguuu

SEQ ID NO: 272523 - RNA, 19 nt, Homo sapiens
  misc_RNA (1)...(19): siRNA sense strand
caccagcccugaagaaagc

SEQ ID NO: 272524 - RNA, 19 nt, Homo sapiens
  misc_RNA (1)...(19): siRNA sense strand
ggccagggcagcaagaugu

SEQ ID NO: 272525 - RNA, 19 nt, Homo sapiens
  misc_RNA (1)...(19): siRNA sense strand
ggaguaugagccugagaug

SEQ ID NO: 272526 - RNA, 19 nt, Homo sapiens
  misc_RNA (1)...(19): siRNA sense strand
gcucaccaccaaucagaug

SEQ ID NO: 272527 - RNA, 19 nt, Homo sapiens
  misc_RNA (1)...(19): siRNA sense strand
ugaaccaggacaagaagaa

SEQ ID NO: 272528 - RNA, 19 nt, Homo sapiens
  misc_RNA (1)...(19): siRNA sense strand
gggcugcaccucagucauc

SEQ ID NO: 272529 - RNA, 19 nt, Homo sapiens
  misc_RNA (1)...(19): siRNA sense strand
ggugguggugcuccagaua

SEQ ID NO: 272530 - RNA, 19 nt, Homo sapiens
  misc_RNA (1)...(19): siRNA sense strand
caucgacugugagguguuc

SEQ ID NO: 272531 - RNA, 19 nt, Homo sapiens
  misc_RNA (1)...(19): siRNA sense strand
gcaucuuccucacggcaau

SEQ ID NO: 272532 - RNA, 19 nt, Homo sapiens
  misc_RNA (1)...(19): siRNA sense strand
uggcugcccuugucuccuu

SEQ ID NO: 272533 - RNA, 19 nt, Homo sapiens
  misc_RNA (1)...(19): siRNA sense strand
caucucggguaccacguau

SEQ ID NO: 272534 - RNA, 19 nt, Homo sapiens
  misc_RNA (1)...(19): siRNA sense strand
gcacgcucaccaccaauca

SEQ ID NO: 272535 - RNA, 19 nt, Homo sapiens
  misc_RNA (1)...(19): siRNA sense strand
gcugucuacuacuucaaga

SEQ ID NO: 272536 - RNA, 19 nt, Homo sapiens
  misc_RNA (1)...(19): siRNA sense strand
caauaucacaucgggcaaa

SEQ ID NO: 272537 - RNA, 19 nt, Homo sapiens
  misc_RNA (1)...(19): siRNA sense strand
gcaguccuuuaacgagauc

SEQ ID NO: 272538 - RNA, 19 nt, Homo sapiens
  misc_RNA (1)...(19): siRNA sense strand
gcgcauggcacgcaagaac

SEQ ID NO: 272539 - RNA, 19 nt, Homo sapiens
  misc_RNA (1)...(19): siRNA sense strand
ucuaccagcugaggaacuu

SEQ ID NO: 272540 - RNA, 19 nt, Homo sapiens
  misc_RNA (1)...(19): siRNA sense strand
ggagaaccugcaguccuuu

SEQ ID NO: 272541 - RNA, 19 nt, Homo sapiens
  misc_RNA (1)...(19): siRNA sense strand
ggaccucacaucaacuucu

SEQ ID NO: 272542 - RNA, 19 nt, Homo sapiens
  misc_RNA (1)...(19): siRNA sense strand
gaaccugcaguccuuuaac

SEQ ID NO: 272543 - RNA, 19 nt, Homo sapiens
  misc_RNA (1)...(19): siRNA sense strand
caucaacaucggccacuuc

SEQ ID NO: 272544 - RNA, 19 nt, Homo sapiens
  misc_RNA (1)...(19): siRNA sense strand
agauaucucugccugucau

SEQ ID NO: 272545 - RNA, 19 nt, Homo sapiens
  misc_RNA (1)...(19): siRNA sense strand
ccaccaccauggccuuguc

SEQ ID NO: 272546 - RNA, 19 nt, Homo sapiens
  misc_RNA (1)...(19): siRNA sense strand
cgaggucgucugcaucuuc

SEQ ID NO: 272547 - RNA, 19 nt, Homo sapiens
  misc_RNA (1)...(19): siRNA sense strand
ggaacgcaacgccgagagu

SEQ ID NO: 272548 - RNA, 19 nt, Homo sapiens
  misc_RNA (1)...(19): siRNA sense strand
gggagcuggugcuggaaca

SEQ ID NO: 272549 - RNA, 19 nt, Homo sapiens
  misc_RNA (1)...(19): siRNA sense strand
ggcagcaagauguuuguga

SEQ ID NO: 272550 - RNA, 19 nt, Homo sapiens
  misc_RNA (1)...(19): siRNA sense strand
gaaauccauguccguguac

SEQ ID NO: 272551 - RNA, 19 nt, Homo sapiens
  misc_RNA (1)...(19): siRNA sense strand
ggccaaggguguguaugag

SEQ ID NO: 272552 - RNA, 19 nt, Homo sapiens
  misc_RNA (1)...(19): siRNA sense strand
cggcugucaucacuacaug

SEQ ID NO: 272553 - RNA, 19 nt, Homo sapiens
  misc_RNA (1)...(19): siRNA sense strand
gccaaggguguguaugaga

SEQ ID NO: 272554 - RNA, 19 nt, Homo sapiens
  misc_RNA (1)...(19): siRNA sense strand
gcuggcucuucuuccgaua

SEQ ID NO: 272555 - RNA, 19 nt, Homo sapiens
  misc_RNA (1)...(19): siRNA sense strand
gagcugugaaccaggacaa

SEQ ID NO: 272556 - RNA, 19 nt, Homo sapiens
  misc_RNA (1)...(19): siRNA sense strand
cagcaaguuugugcaguac

SEQ ID NO: 272557 - RNA, 19 nt, Homo sapiens
  misc_RNA (1)...(19): siRNA sense strand
agcgcaagcuggacgaguu

SEQ ID NO: 272558 - RNA, 19 nt, Homo sapiens
  misc_RNA (1)...(19): siRNA sense strand
caagauccggagccagaug

SEQ ID NO: 272559 - RNA, 19 nt, Homo sapiens
  misc_RNA (1)...(19): siRNA sense strand
gcugugaaccaggacaaga

SEQ ID NO: 272560 - RNA, 19 nt, Homo sapiens
  misc_RNA (1)...(19): siRNA sense strand
guggcgcugucuacuacuu

SEQ ID NO: 272561 - RNA, 19 nt, Homo sapiens
  misc_RNA (1)...(19): siRNA sense strand
ccaucgaggcccugaagga

SEQ ID NO: 272562 - RNA, 19 nt, Homo sapiens
  misc_RNA (1)...(19): siRNA sense strand
cgagcuggcgccuguaaca

SEQ ID NO: 272563 - RNA, 19 nt, Homo sapiens
  misc_RNA (1)...(19): siRNA sense strand
cggagacagcucugacuug

SEQ ID NO: 272564 - RNA, 19 nt, Homo sapiens
  misc_RNA (1)...(19): siRNA sense strand
ggaaauccauguccgugua

SEQ ID NO: 272565 - RNA, 19 nt, Homo sapiens
  misc_RNA (1)...(19): siRNA sense strand
ccaacgagcucccgaguga

SEQ ID NO: 272566 - RNA, 19 nt, Homo sapiens
  misc_RNA (1)...(19): siRNA sense strand
gcagcaaguuugugcagua

SEQ ID NO: 272567 - RNA, 19 nt, Homo sapiens
  misc_RNA (1)...(19): siRNA sense strand
gcagcaagauguuugugaa

SEQ ID NO: 272568 - RNA, 19 nt, Homo sapiens
  misc_RNA (1)...(19): siRNA sense strand
gaugcgggcuccugccuuu

SEQ ID NO: 272569 - RNA, 19 nt, Homo sapiens
  misc_RNA (1)...(19): siRNA sense strand
gagcagauccuggcaaaga

SEQ ID NO: 272570 - RNA, 19 nt, Homo sapiens
  misc_RNA (1)...(19): siRNA sense strand
ugacuugccugguggagaa

SEQ ID NO: 272571 - RNA, 19 nt, Homo sapiens
  misc_RNA (1)...(19): siRNA sense strand
ccaaggguguguaugagaa

SEQ ID NO: 272572 - RNA, 19 nt, Homo sapiens
  misc_RNA (1)...(19): siRNA sense strand
gaccucacaucaacuucua

SEQ ID NO: 272573 - RNA, 19 nt, Homo sapiens
  misc_RNA (1)...(19): siRNA sense strand
gggagcagauccuggcaaa

SEQ ID NO: 272574 - RNA, 19 nt, Homo sapiens
  misc_RNA (1)...(19): siRNA sense strand
gcaaguuugugcaguacga

SEQ ID NO: 272575 - RNA, 19 nt, Homo sapiens
  misc_RNA (1)...(19): siRNA sense strand
gcaagggcgugcagaggau

SEQ ID NO: 272576 - RNA, 19 nt, Homo sapiens
  misc_RNA (1)...(19): siRNA sense strand
ggacgacugcagcaaguuu

SEQ ID NO: 272577 - RNA, 19 nt, Homo sapiens
  misc_RNA (1)...(19): siRNA sense strand
guaacacggucaucaagca

SEQ ID NO: 272578 - RNA, 19 nt, Homo sapiens
  misc_RNA (1)...(19): siRNA sense strand
gggugaaccuggugacaga

SEQ ID NO: 272579 - RNA, 19 nt, Homo sapiens
  misc_RNA (1)...(19): siRNA sense strand
uuaacgagaucacugcuau

SEQ ID NO: 272580 - RNA, 19 nt, Homo sapiens
  misc_RNA (1)...(19): siRNA sense strand
acacggagcugggcaagau

SEQ ID NO: 272581 - RNA, 19 nt, Homo sapiens
  misc_RNA (1)...(19): siRNA sense strand
cgagaucacugcuaugacu

SEQ ID NO: 272582 - RNA, 19 nt, Homo sapiens
  misc_RNA (1)...(19): siRNA sense strand
ucgaggcccugaaggagua

SEQ ID NO: 272583 - RNA, 19 nt, Homo sapiens
  misc_RNA (1)...(19): siRNA sense strand
acagcaacaugaagcaauu

SEQ ID NO: 272584 - RNA, 19 nt, Homo sapiens
  misc_RNA (1)...(19): siRNA sense strand
gagaaccugcaguccuuua

SEQ ID NO: 272585 - RNA, 19 nt, Homo sapiens
  misc_RNA (1)...(19): siRNA sense strand
ccgcaggcuuggcaucuuu

SEQ ID NO: 272586 - RNA, 19 nt, Homo sapiens
  misc_RNA (1)...(19): siRNA sense strand
ccuggugguuuguguauga

SEQ ID NO: 272587 - RNA, 19 nt, Homo sapiens
  misc_RNA (1)...(19): siRNA sense strand
gaagugcuccgaagacaac

SEQ ID NO: 272588 - RNA, 19 nt, Homo sapiens
  misc_RNA (1)...(19): siRNA sense strand
uggagaaccugcaguccuu

SEQ ID NO: 272589 - RNA, 19 nt, Homo sapiens
  misc_RNA (1)...(19): siRNA sense strand
cagagauggugcugucaga

SEQ ID NO: 272590 - RNA, 19 nt, Homo sapiens
  misc_RNA (1)...(19): siRNA sense strand
agauggugcugucagauga

SEQ ID NO: 272591 - RNA, 19 nt, Homo sapiens
  misc_RNA (1)...(19): siRNA sense strand
uaccucaucuccuccaaug

SEQ ID NO: 272592 - RNA, 19 nt, Homo sapiens
  misc_RNA (1)...(19): siRNA sense strand
gagauggugcugucagaug

SEQ ID NO: 272593 - RNA, 19 nt, Homo sapiens
  misc_RNA (1)...(19): siRNA sense strand
caaggaaggaggacaugga

SEQ ID NO: 272594 - RNA, 19 nt, Homo sapiens
  misc_RNA (1)...(19): siRNA sense strand
gcaccagcccugaagaaag

SEQ ID NO: 272595 - RNA, 19 nt, Homo sapiens
  misc_RNA (1)...(19): siRNA sense strand
ccacggcucugggcuucaa

SEQ ID NO: 272596 - RNA, 19 nt, Homo sapiens
  misc_RNA (1)...(19): siRNA sense strand
ccucaucuccuccaauguu

SEQ ID NO: 272597 - RNA, 19 nt, Homo sapiens
  misc_RNA (1)...(19): siRNA sense strand
gcguggcgcugucuacuac

SEQ ID NO: 272598 - RNA, 19 nt, Homo sapiens
  misc_RNA (1)...(19): siRNA sense strand
ggaguucacccuggaguuc

SEQ ID NO: 272599 - RNA, 19 nt, Homo sapiens
  misc_RNA (1)...(19): siRNA sense strand
agacggaccugaccuucgu

SEQ ID NO: 272600 - RNA, 19 nt, Homo sapiens
  misc_RNA (1)...(19): siRNA sense strand
ccgagaagcccucaucagu

SEQ ID NO: 272601 - RNA, 19 nt, Homo sapiens
  misc_RNA (1)...(19): siRNA sense strand
gcgcaagcuggacgaguuu

SEQ ID NO: 272602 - RNA, 19 nt, Homo sapiens
  misc_RNA (1)...(19): siRNA sense strand
caccagcccugaagaaagc

SEQ ID NO: 272603 - RNA, 19 nt, Homo sapiens
  misc_RNA (1)...(19): siRNA sense strand
ggccagggcagcaagaugu

SEQ ID NO: 272604 - RNA, 19 nt, Homo sapiens
  misc_RNA (1)...(19): siRNA sense strand
ggaguaugagccugagaug

SEQ ID NO: 272605 - RNA, 19 nt, Homo sapiens
  misc_RNA (1)...(19): siRNA sense strand
gcucaccaccaaucagaug

SEQ ID NO: 272606 - RNA, 19 nt, Homo sapiens
  misc_RNA (1)...(19): siRNA sense strand
ugaaccaggacaagaagaa

SEQ ID NO: 272607 - RNA, 19 nt, Homo sapiens
  misc_RNA (1)...(19): siRNA sense strand
gggcugcaccucagucauc

SEQ ID NO: 272608 - RNA, 19 nt, Homo sapiens
  misc_RNA (1)...(19): siRNA sense strand
ggugguggugcuccagaua

SEQ ID NO: 272609 - RNA, 19 nt, Homo sapiens
  misc_RNA (1)...(19): siRNA sense strand
caucgacugugagguguuc

SEQ ID NO: 272610 - RNA, 19 nt, Homo sapiens
  misc_RNA (1)...(19): siRNA sense strand
gcaucuuccucacggcaau

SEQ ID NO: 272611 - RNA, 19 nt, Homo sapiens
  misc_RNA (1)...(19): siRNA sense strand
uggcugcccuugucuccuu

SEQ ID NO: 272612 - RNA, 19 nt, Homo sapiens
  misc_RNA (1)...(19): siRNA sense strand
caucucggguaccacguau

SEQ ID NO: 272613 - RNA, 19 nt, Homo sapiens
  misc_RNA (1)...(19): siRNA sense strand
gcacgcucaccaccaauca

SEQ ID NO: 272614 - RNA, 19 nt, Homo sapiens
  misc_RNA (1)...(19): siRNA sense strand
gcugucuacuacuucaaga

SEQ ID NO: 272615 - RNA, 19 nt, Homo sapiens
  misc_RNA (1)...(19): siRNA sense strand
caauaucacaucgggcaaa

SEQ ID NO: 272616 - RNA, 19 nt, Homo sapiens
  misc_RNA (1)...(19): siRNA sense strand
gcaguccuuuaacgagauc

SEQ ID NO: 272617 - RNA, 19 nt, Homo sapiens
  misc_RNA (1)...(19): siRNA sense strand
gcgcauggcacgcaagaac

SEQ ID NO: 272618 - RNA, 19 nt, Homo sapiens
  misc_RNA (1)...(19): siRNA sense strand
ucuaccagcugaggaacuu

SEQ ID NO: 272619 - RNA, 19 nt, Homo sapiens
  misc_RNA (1)...(19): siRNA sense strand
ggagaaccugcaguccuuu

SEQ ID NO: 272620 - RNA, 19 nt, Homo sapiens
  misc_RNA (1)...(19): siRNA sense strand
ggaccucacaucaacuucu

SEQ ID NO: 272621 - RNA, 19 nt, Homo sapiens
  misc_RNA (1)...(19): siRNA sense strand
gaaccugcaguccuuuaac

SEQ ID NO: 272622 - RNA, 19 nt, Homo sapiens
  misc_RNA (1)...(19): siRNA sense strand
caucaacaucggccacuuc

SEQ ID NO: 272623 - RNA, 19 nt, Homo sapiens
  misc_RNA (1)...(19): siRNA sense strand
agauaucucugccugucau

SEQ ID NO: 272624 - RNA, 19 nt, Homo sapiens
  misc_RNA (1)...(19): siRNA sense strand
ccaccaccauggccuuguc

SEQ ID NO: 272625 - RNA, 19 nt, Homo sapiens
  misc_RNA (1)...(19): siRNA sense strand
cgaggucgucugcaucuuc

SEQ ID NO: 272626 - RNA, 19 nt, Homo sapiens
  misc_RNA (1)...(19): siRNA sense strand
ggaacgcaacgccgagagu

SEQ ID NO: 272627 - RNA, 19 nt, Homo sapiens
  misc_RNA (1)...(19): siRNA sense strand
gggagcuggugcuggaaca

SEQ ID NO: 272628 - RNA, 19 nt, Homo sapiens
  misc_RNA (1)...(19): siRNA sense strand
ggcagcaagauguuuguga

SEQ ID NO: 272629 - RNA, 19 nt, Homo sapiens
  misc_RNA (1)...(19): siRNA sense strand
gaaauccauguccguguac

SEQ ID NO: 272630 - RNA, 19 nt, Homo sapiens
  misc_RNA (1)...(19): siRNA sense strand
ggccaaggguguguaugag

SEQ ID NO: 272631 - RNA, 19 nt, Homo sapiens
  misc_RNA (1)...(19): siRNA sense strand
cggcugucaucacuacaug

SEQ ID NO: 272632 - RNA, 19 nt, Homo sapiens
  misc_RNA (1)...(19): siRNA sense strand
gccaaggguguguaugaga

SEQ ID NO: 272633 - RNA, 19 nt, Homo sapiens
  misc_RNA (1)...(19): siRNA sense strand
gcuggcucuucuuccgaua

SEQ ID NO: 272634 - RNA, 19 nt, Homo sapiens
  misc_RNA (1)...(19): siRNA sense strand
gagcugugaaccaggacaa

SEQ ID NO: 272635 - RNA, 19 nt, Homo sapiens
  misc_RNA (1)...(19): siRNA sense strand
cagcaaguuugugcaguac

SEQ ID NO: 272636 - RNA, 19 nt, Homo sapiens
  misc_RNA (1)...(19): siRNA sense strand
agcgcaagcuggacgaguu

SEQ ID NO: 272637 - RNA, 19 nt, Homo sapiens
  misc_RNA (1)...(19): siRNA sense strand
caagauccggagccagaug

SEQ ID NO: 272638 - RNA, 19 nt, Homo sapiens
  misc_RNA (1)...(19): siRNA sense strand
gcugugaaccaggacaaga

SEQ ID NO: 272639 - RNA, 19 nt, Homo sapiens
  misc_RNA (1)...(19): siRNA sense strand
guggcgcugucuacuacuu

SEQ ID NO: 272640 - RNA, 19 nt, Homo sapiens
  misc_RNA (1)...(19): siRNA sense strand
ccaucgaggcccugaagga

SEQ ID NO: 272641 - RNA, 19 nt, Homo sapiens
  misc_RNA (1)...(19): siRNA sense strand
cgagcuggcgccuguaaca

SEQ ID NO: 272642 - RNA, 19 nt, Homo sapiens
  misc_RNA (1)...(19): siRNA sense strand
cggagacagcucugacuug

SEQ ID NO: 272643 - RNA, 19 nt, Homo sapiens
  misc_RNA (1)...(19): siRNA sense strand
gaacaccgagugccaagaa

SEQ ID NO: 272644 - RNA, 19 nt, Homo sapiens
  misc_RNA (1)...(19): siRNA sense strand
gagccuuacugccuuugua

SEQ ID NO: 272645 - RNA, 19 nt, Homo sapiens
  misc_RNA (1)...(19): siRNA sense strand
gccgggagcucgacaucua

SEQ ID NO: 272646 - RNA, 19 nt, Homo sapiens
  misc_RNA (1)...(19): siRNA sense strand
agacacgccucuccauauu

SEQ ID NO: 272647 - RNA, 19 nt, Homo sapiens
  misc_RNA (1)...(19): siRNA sense strand
ccauggcuccucccaauuu

SEQ ID NO: 272648 - RNA, 19 nt, Homo sapiens
  misc_RNA (1)...(19): siRNA sense strand
ggccggaggcgcuuuacua

SEQ ID NO: 272649 - RNA, 19 nt, Homo sapiens
  misc_RNA (1)...(19): siRNA sense strand
cgacaucuacaacaaccua

SEQ ID NO: 272650 - RNA, 19 nt, Homo sapiens
  misc_RNA (1)...(19): siRNA sense strand
gaaaacaacagccuuagca

SEQ ID NO: 272651 - RNA, 19 nt, Homo sapiens
  misc_RNA (1)...(19): siRNA sense strand
ucgacgcaguggacauuaa

SEQ ID NO: 272652 - RNA, 19 nt, Homo sapiens
  misc_RNA (1)...(19): siRNA sense strand
caacgugaacgcgcaaaug

SEQ ID NO: 272653 - RNA, 19 nt, Homo sapiens
  misc_RNA (1)...(19): siRNA sense strand
cccaauuucuuccuuccuu

SEQ ID NO: 272654 - RNA, 19 nt, Homo sapiens
  misc_RNA (1)...(19): siRNA sense strand
gacagcagccucaagaacu

SEQ ID NO: 272655 - RNA, 19 nt, Homo sapiens
  misc_RNA (1)...(19): siRNA sense strand
ccgugcagcucuugcuaga

SEQ ID NO: 272656 - RNA, 19 nt, Homo sapiens
  misc_RNA (1)...(19): siRNA sense strand
caucgacgcaguggacauu

SEQ ID NO: 272657 - RNA, 19 nt, Homo sapiens
  misc_RNA (1)...(19): siRNA sense strand
gagcucgacaucuacaaca

SEQ ID NO: 272658 - RNA, 19 nt, Homo sapiens
  misc_RNA (1)...(19): siRNA sense strand
acagcagccucaagaacug

SEQ ID NO: 272659 - RNA, 19 nt, Homo sapiens
  misc_RNA (1)...(19): siRNA sense strand
caacgacacgccgcucaug

SEQ ID NO: 272660 - RNA, 19 nt, Homo sapiens
  misc_RNA (1)...(19): siRNA sense strand
acacgccucuccauauugc

SEQ ID NO: 272661 - RNA, 19 nt, Homo sapiens
  misc_RNA (1)...(19): siRNA sense strand
gacacgccucuccauauug

SEQ ID NO: 272662 - RNA, 19 nt, Homo sapiens
  misc_RNA (1)...(19): siRNA sense strand
cauggcuccucccaauuuc

SEQ ID NO: 272663 - RNA, 19 nt, Homo sapiens
  misc_RNA (1)...(19): siRNA sense strand
uugcuguggugcaggguaa

SEQ ID NO: 272664 - RNA, 19 nt, Homo sapiens
  misc_RNA (1)...(19): siRNA sense strand
ccggagccuuacugccuuu

SEQ ID NO: 272665 - RNA, 19 nt, Homo sapiens
  misc_RNA (1)...(19): siRNA sense strand
ggacauugccuucuuguua

SEQ ID NO: 272666 - RNA, 19 nt, Homo sapiens
  misc_RNA (1)...(19): siRNA sense strand
cagcaaagguucuggaaua

SEQ ID NO: 272667 - RNA, 19 nt, Homo sapiens
  misc_RNA (1)...(19): siRNA sense strand
ggaaagagauggauaucac

SEQ ID NO: 272668 - RNA, 19 nt, Homo sapiens
  misc_RNA (1)...(19): siRNA sense strand
caaagguucuggaauaaca

SEQ ID NO: 272669 - RNA, 19 nt, Homo sapiens
  misc_RNA (1)...(19): siRNA sense strand
ccaacuaacucgcuucaau

SEQ ID NO: 272670 - RNA, 19 nt, Homo sapiens
  misc_RNA (1)...(19): siRNA sense strand
ccacuucccuuccucagaa

SEQ ID NO: 272671 - RNA, 19 nt, Homo sapiens
  misc_RNA (1)...(19): siRNA sense strand
gaacacagggcccaaaugg

SEQ ID NO: 272672 - RNA, 19 nt, Homo sapiens
  misc_RNA (1)...(19): siRNA sense strand
ccaaacuacuguaaaggaa

SEQ ID NO: 272673 - RNA, 19 nt, Homo sapiens
  misc_RNA (1)...(19): siRNA sense strand
ccaauuaguguccuuauga

SEQ ID NO: 272674 - RNA, 19 nt, Homo sapiens
  misc_RNA (1)...(19): siRNA sense strand
agagguaccuggcauauac

SEQ ID NO: 272675 - RNA, 19 nt, Homo sapiens
  misc_RNA (1)...(19): siRNA sense strand
uugaggagcugcuagaaga

SEQ ID NO: 272676 - RNA, 19 nt, Homo sapiens
  misc_RNA (1)...(19): siRNA sense strand
aaccuucccugaugucuaa

SEQ ID NO: 272677 - RNA, 19 nt, Homo sapiens
  misc_RNA (1)...(19): siRNA sense strand
gaacuugucuccgaguacu

SEQ ID NO: 272678 - RNA, 19 nt, Homo sapiens
  misc_RNA (1)...(19): siRNA sense strand
agagagaaccgcaccauug

SEQ ID NO: 272679 - RNA, 19 nt, Homo sapiens
  misc_RNA (1)...(19): siRNA sense strand
gacauugccuucuuguuac

SEQ ID NO: 272680 - RNA, 19 nt, Homo sapiens
  misc_RNA (1)...(19): siRNA sense strand
cuaacucgcuucaaucucu

SEQ ID NO: 272681 - RNA, 19 nt, Homo sapiens
  misc_RNA (1)...(19): siRNA sense strand
uucagaaccuuaucaauca

SEQ ID NO: 272682 - RNA, 19 nt, Homo sapiens
  misc_RNA (1)...(19): siRNA sense strand
uuaguguccuuaugauuga

SEQ ID NO: 272683 - RNA, 19 nt, Homo sapiens
  misc_RNA (1)...(19): siRNA sense strand
ccuccugugucccguauaa

SEQ ID NO: 272684 - RNA, 19 nt, Homo sapiens
  misc_RNA (1)...(19): siRNA sense strand
caauuaguguccuuaugau

SEQ ID NO: 272685 - RNA, 19 nt, Homo sapiens
  misc_RNA (1)...(19): siRNA sense strand
caacuaacucgcuucaauc

SEQ ID NO: 272686 - RNA, 19 nt, Homo sapiens
  misc_RNA (1)...(19): siRNA sense strand
ggaguaugaggguaugauu

SEQ ID NO: 272687 - RNA, 19 nt, Homo sapiens
  misc_RNA (1)...(19): siRNA sense strand
agagauggauaucacacaa

SEQ ID NO: 272688 - RNA, 19 nt, Homo sapiens
  misc_RNA (1)...(19): siRNA sense strand
gaaagagauggauaucaca

SEQ ID NO: 272689 - RNA, 19 nt, Homo sapiens
  misc_RNA (1)...(19): siRNA sense strand
gagagaaccgcaccauugg

SEQ ID NO: 272690 - RNA, 19 nt, Homo sapiens
  misc_RNA (1)...(19): siRNA sense strand
gccauuauucagaaccuua

SEQ ID NO: 272691 - RNA, 19 nt, Homo sapiens
  misc_RNA (1)...(19): siRNA sense strand
ggaaagggaaucucuucuc

SEQ ID NO: 272692 - RNA, 19 nt, Homo sapiens
  misc_RNA (1)...(19): siRNA sense strand
ucggaaggcuaaauuucuu

SEQ ID NO: 272693 - RNA, 19 nt, Homo sapiens
  misc_RNA (1)...(19): siRNA sense strand
gcauucggaaggcuaaauu

SEQ ID NO: 272694 - RNA, 19 nt, Homo sapiens
  misc_RNA (1)...(19): siRNA sense strand
gcucuggcauggcacuuca

SEQ ID NO: 272695 - RNA, 19 nt, Homo sapiens
  misc_RNA (1)...(19): siRNA sense strand
gaccaaaccgaggacuaua

SEQ ID NO: 272696 - RNA, 19 nt, Homo sapiens
  misc_RNA (1)...(19): siRNA sense strand
ccaaucacgccauuauuca

SEQ ID NO: 272697 - RNA, 19 nt, Homo sapiens
  misc_RNA (1)...(19): siRNA sense strand
ggagauuccucaaaaccuu

SEQ ID NO: 272698 - RNA, 19 nt, Homo sapiens
  misc_RNA (1)...(19): siRNA sense strand
guaccuggcauauacagau

SEQ ID NO: 272699 - RNA, 19 nt, Homo sapiens
  misc_RNA (1)...(19): siRNA sense strand
caaggaguaugaggguaug

SEQ ID NO: 272700 - RNA, 19 nt, Homo sapiens
  misc_RNA (1)...(19): siRNA sense strand
ccuccacccuuuccaaauc

SEQ ID NO: 272701 - RNA, 19 nt, Homo sapiens
  misc_RNA (1)...(19): siRNA sense strand
agcaaagguucuggaauaa

SEQ ID NO: 272702 - RNA, 19 nt, Homo sapiens
  misc_RNA (1)...(19): siRNA sense strand
cgaggacuauaccaacuag

SEQ ID NO: 272703 - RNA, 19 nt, Homo sapiens
  misc_RNA (1)...(19): siRNA sense strand
ggaacacagggcccaaaug

SEQ ID NO: 272704 - RNA, 19 nt, Homo sapiens
  misc_RNA (1)...(19): siRNA sense strand
gaguaugaggguaugauug

SEQ ID NO: 272705 - RNA, 19 nt, Homo sapiens
  misc_RNA (1)...(19): siRNA sense strand
guccuccucaguauucuua

SEQ ID NO: 272706 - RNA, 19 nt, Homo sapiens
  misc_RNA (1)...(19): siRNA sense strand
gaaccuuaucaaucaguug

SEQ ID NO: 272707 - RNA, 19 nt, Homo sapiens
  misc_RNA (1)...(19): siRNA sense strand
aguguucccuccacccuuu

SEQ ID NO: 272708 - RNA, 19 nt, Homo sapiens
  misc_RNA (1)...(19): siRNA sense strand
uggaggaguucauggaaag

SEQ ID NO: 272709 - RNA, 19 nt, Homo sapiens
  misc_RNA (1)...(19): siRNA sense strand
aaacuacuguaaaggaacu

SEQ ID NO: 272710 - RNA, 19 nt, Homo sapiens
  misc_RNA (1)...(19): siRNA sense strand
gccaucaucuccaacuaac

SEQ ID NO: 272711 - RNA, 19 nt, Homo sapiens
  misc_RNA (1)...(19): siRNA sense strand
guuacugccucuuccucaa

SEQ ID NO: 272712 - RNA, 19 nt, Homo sapiens
  misc_RNA (1)...(19): siRNA sense strand
aaaccgaggacuauaccaa

SEQ ID NO: 272713 - RNA, 19 nt, Homo sapiens
  misc_RNA (1)...(19): siRNA sense strand
uaugauugcugagucuugu

SEQ ID NO: 272714 - RNA, 19 nt, Homo sapiens
  misc_RNA (1)...(19): siRNA sense strand
ugaggcaaaugggaguauu

SEQ ID NO: 272715 - RNA, 19 nt, Homo sapiens
  misc_RNA (1)...(19): siRNA sense strand
cagagguaccuggcauaua

SEQ ID NO: 272716 - RNA, 19 nt, Homo sapiens
  misc_RNA (1)...(19): siRNA sense strand
ccugugucccguauaagua

SEQ ID NO: 272717 - RNA, 19 nt, Homo sapiens
  misc_RNA (1)...(19): siRNA sense strand
gcacuucauccuuggacau

SEQ ID NO: 272718 - RNA, 19 nt, Homo sapiens
  misc_RNA (1)...(19): siRNA sense strand
ggcauucacugcgguacau

SEQ ID NO: 272719 - RNA, 19 nt, Homo sapiens
  misc_RNA (1)...(19): siRNA sense strand
auucagaaccuuaucaauc

SEQ ID NO: 272720 - RNA, 19 nt, Homo sapiens
  misc_RNA (1)...(19): siRNA sense strand
cccaaucacgccauuauuc

SEQ ID NO: 272721 - RNA, 19 nt, Homo sapiens
  misc_RNA (1)...(19): siRNA sense strand
caugggcacccuagagaga

SEQ ID NO: 272722 - RNA, 19 nt, Homo sapiens
  misc_RNA (1)...(19): siRNA sense strand
acaaggaguaugaggguau

SEQ ID NO: 272723 - RNA, 19 nt, Homo sapiens
  misc_RNA (1)...(19): siRNA sense strand
guacuacgcgauggucuca

SEQ ID NO: 272724 - RNA, 19 nt, Homo sapiens
  misc_RNA (1)...(19): siRNA sense strand
caucaucuccaacuaacuc

SEQ ID NO: 272725 - RNA, 19 nt, Homo sapiens
  misc_RNA (1)...(19): siRNA sense strand
ugaagcccuugaccagugu

SEQ ID NO: 272726 - RNA, 19 nt, Homo sapiens
  misc_RNA (1)...(19): siRNA sense strand
gaggagcugcuagaagaau

SEQ ID NO: 272727 - RNA, 19 nt, Homo sapiens
  misc_RNA (1)...(19): siRNA sense strand
caagggacacaggauccua

SEQ ID NO: 272728 - RNA, 19 nt, Homo sapiens
  misc_RNA (1)...(19): siRNA sense strand
ucuaacgcuuggaaagaga

SEQ ID NO: 272729 - RNA, 19 nt, Homo sapiens
  misc_RNA (1)...(19): siRNA sense strand
agaccaaaccgaggacuau

SEQ ID NO: 272730 - RNA, 19 nt, Homo sapiens
  misc_RNA (1)...(19): siRNA sense strand
gcuuuccucucagaccaaa

SEQ ID NO: 272731 - RNA, 19 nt, Homo sapiens
  misc_RNA (1)...(19): siRNA sense strand
ccggagaacccgacaagca

SEQ ID NO: 272732 - RNA, 19 nt, Homo sapiens
  misc_RNA (1)...(19): siRNA sense strand
aaacccaaccaaccacuuc

SEQ ID NO: 272733 - RNA, 19 nt, Homo sapiens
  misc_RNA (1)...(19): siRNA sense strand
ccgccaucaucuccaacua

SEQ ID NO: 272734 - RNA, 19 nt, Homo sapiens
  misc_RNA (1)...(19): siRNA sense strand
uuaccgccaucaucuccaa

SEQ ID NO: 272735 - RNA, 19 nt, Homo sapiens
  misc_RNA (1)...(19): siRNA sense strand
ggguaugauugcugagucu

SEQ ID NO: 272736 - RNA, 19 nt, Homo sapiens
  misc_RNA (1)...(19): siRNA sense strand
auuaguguccuuaugauug

SEQ ID NO: 272737 - RNA, 19 nt, Homo sapiens
  misc_RNA (1)...(19): siRNA sense strand
uccaauuaguguccuuaug

SEQ ID NO: 272738 - RNA, 19 nt, Homo sapiens
  misc_RNA (1)...(19): siRNA sense strand
aggaacuugucuccgagua

SEQ ID NO: 272739 - RNA, 19 nt, Homo sapiens
  misc_RNA (1)...(19): siRNA sense strand
ccuuggacauugccuucuu

SEQ ID NO: 272740 - RNA, 19 nt, Homo sapiens
  misc_RNA (1)...(19): siRNA sense strand
gcaaagguucuggaauaac

SEQ ID NO: 272741 - RNA, 19 nt, Homo sapiens
  misc_RNA (1)...(19): siRNA sense strand
agauggauaucacacaacu

SEQ ID NO: 272742 - RNA, 19 nt, Homo sapiens
  misc_RNA (1)...(19): siRNA sense strand
gcuuggaaagagauggaua

SEQ ID NO: 272743 - RNA, 19 nt, Homo sapiens
  misc_RNA (1)...(19): siRNA sense strand
cgccaucaucuccaacuaa

SEQ ID NO: 272744 - RNA, 19 nt, Homo sapiens
  misc_RNA (1)...(19): siRNA sense strand
ccgaggacuauaccaacua

SEQ ID NO: 272745 - RNA, 19 nt, Homo sapiens
  misc_RNA (1)...(19): siRNA sense strand
guaugauugcugagucuug

SEQ ID NO: 272746 - RNA, 19 nt, Homo sapiens
  misc_RNA (1)...(19): siRNA sense strand
gcccuccugugucccguau

SEQ ID NO: 272747 - RNA, 19 nt, Homo sapiens
  misc_RNA (1)...(19): siRNA sense strand
aaucacgccauuauucaga

SEQ ID NO: 272748 - RNA, 19 nt, Homo sapiens
  misc_RNA (1)...(19): siRNA sense strand
auacagauccugggcuuuc

SEQ ID NO: 272749 - RNA, 19 nt, Homo sapiens
  misc_RNA (1)...(19): siRNA sense strand
cccaaacuacuguaaagga

SEQ ID NO: 272750 - RNA, 19 nt, Homo sapiens
  misc_RNA (1)...(19): siRNA sense strand
ccuccucaguauucuuaga

SEQ ID NO: 272751 - RNA, 19 nt, Homo sapiens
  misc_RNA (1)...(19): siRNA sense strand
aaaccuucccugaugucua

SEQ ID NO: 272752 - RNA, 19 nt, Homo sapiens
  misc_RNA (1)...(19): siRNA sense strand
auggauaucacacaacuug

SEQ ID NO: 272753 - RNA, 19 nt, Homo sapiens
  misc_RNA (1)...(19): siRNA sense strand
agaaccuuaucaaucaguu

SEQ ID NO: 272754 - RNA, 19 nt, Homo sapiens
  misc_RNA (1)...(19): siRNA sense strand
acuacgcgauggucucaau

SEQ ID NO: 272755 - RNA, 19 nt, Homo sapiens
  misc_RNA (1)...(19): siRNA sense strand
ugcgguacaugcuggaguu

SEQ ID NO: 272756 - RNA, 19 nt, Homo sapiens
  misc_RNA (1)...(19): siRNA sense strand
uuacugccucuuccucaaa

SEQ ID NO: 272757 - RNA, 19 nt, Homo sapiens
  misc_RNA (1)...(19): siRNA sense strand
auccugggcuuuccucuca

SEQ ID NO: 272758 - RNA, 19 nt, Homo sapiens
  misc_RNA (1)...(19): siRNA sense strand
uagagagaaccgcaccauu

SEQ ID NO: 272759 - RNA, 19 nt, Homo sapiens
  misc_RNA (1)...(19): siRNA sense strand
ggugagagcuuccuucaaa

SEQ ID NO: 272760 - RNA, 19 nt, Homo sapiens
  misc_RNA (1)...(19): siRNA sense strand
gggaagaccugccgaguug

SEQ ID NO: 272761 - RNA, 19 nt, Homo sapiens
  misc_RNA (1)...(19): siRNA sense strand
ccaagaccauccugaauaa

SEQ ID NO: 272762 - RNA, 19 nt, Homo sapiens
  misc_RNA (1)...(19): siRNA sense strand
gaagauaggacaugagaau

SEQ ID NO: 272763 - RNA, 19 nt, Homo sapiens
  misc_RNA (1)...(19): siRNA sense strand
gccaagaccauccugaaua

SEQ ID NO: 272764 - RNA, 19 nt, Homo sapiens
  misc_RNA (1)...(19): siRNA sense strand
cuaaagacaucaggcauga

SEQ ID NO: 272765 - RNA, 19 nt, Homo sapiens
  misc_RNA (1)...(19): siRNA sense strand
cgaguuguauuugaugaua

SEQ ID NO: 272766 - RNA, 19 nt, Homo sapiens
  misc_RNA (1)...(19): siRNA sense strand
gaagaccugccgaguugua

SEQ ID NO: 272767 - RNA, 19 nt, Homo sapiens
  misc_RNA (1)...(19): siRNA sense strand
cagcggagcuucauuuggu

SEQ ID NO: 272768 - RNA, 19 nt, Homo sapiens
  misc_RNA (1)...(19): siRNA sense strand
uggacaagauuaagacaaa

SEQ ID NO: 272769 - RNA, 19 nt, Homo sapiens
  misc_RNA (1)...(19): siRNA sense strand
cauggucugugucuuauga

SEQ ID NO: 272770 - RNA, 19 nt, Homo sapiens
  misc_RNA (1)...(19): siRNA sense strand
gaauggcgaguuccagauu

SEQ ID NO: 272771 - RNA, 19 nt, Homo sapiens
  misc_RNA (1)...(19): siRNA sense strand
cuccacagccuaucaauaa

SEQ ID NO: 272772 - RNA, 19 nt, Homo sapiens
  misc_RNA (1)...(19): siRNA sense strand
gagagcuuccuucaaauga

SEQ ID NO: 272773 - RNA, 19 nt, Homo sapiens
  misc_RNA (1)...(19): siRNA sense strand
cuaccgacuucgccaguuu

SEQ ID NO: 272774 - RNA, 19 nt, Homo sapiens
  misc_RNA (1)...(19): siRNA sense strand
gaccugccgaguuguauuu

SEQ ID NO: 272775 - RNA, 19 nt, Homo sapiens
  misc_RNA (1)...(19): siRNA sense strand
ggacaagauuaagacaaag

SEQ ID NO: 272776 - RNA, 19 nt, Homo sapiens
  misc_RNA (1)...(19): siRNA sense strand
acuggaacccgaaguauaa

SEQ ID NO: 272777 - RNA, 19 nt, Homo sapiens
  misc_RNA (1)...(19): siRNA sense strand
ggaccuaccagggcucauu

SEQ ID NO: 272778 - RNA, 19 nt, Homo sapiens
  misc_RNA (1)...(19): siRNA sense strand
gcauuggacaagauuaaga

SEQ ID NO: 272779 - RNA, 19 nt, Homo sapiens
  misc_RNA (1)...(19): siRNA sense strand
ggcaugaacuuuucccaaa

SEQ ID NO: 272780 - RNA, 19 nt, Homo sapiens
  misc_RNA (1)...(19): siRNA sense strand
gaugauacuuaugauaggu

SEQ ID NO: 272781 - RNA, 19 nt, Homo sapiens
  misc_RNA (1)...(19): siRNA sense strand
gaugggaucgcugugauug

SEQ ID NO: 272782 - RNA, 19 nt, Homo sapiens
  misc_RNA (1)...(19): siRNA sense strand
cgacuucgccaguuucauc

SEQ ID NO: 272783 - RNA, 19 nt, Homo sapiens
  misc_RNA (1)...(19): siRNA sense strand
gccauggucugugucuuau

SEQ ID NO: 272784 - RNA, 19 nt, Homo sapiens
  misc_RNA (1)...(19): siRNA sense strand
gccgaguuguauuugauga

SEQ ID NO: 272785 - RNA, 19 nt, Homo sapiens
  misc_RNA (1)...(19): siRNA sense strand
gugagagcuuccuucaaau

SEQ ID NO: 272786 - RNA, 19 nt, Homo sapiens
  misc_RNA (1)...(19): siRNA sense strand
uuaaagaagcccugaagca

SEQ ID NO: 272787 - RNA, 19 nt, Homo sapiens
  misc_RNA (1)...(19): siRNA sense strand
caucaggcaugacccuucu

SEQ ID NO: 272788 - RNA, 19 nt, Homo sapiens
  misc_RNA (1)...(19): siRNA sense strand
aauggcgaguuccagauuu

SEQ ID NO: 272789 - RNA, 19 nt, Homo sapiens
  misc_RNA (1)...(19): siRNA sense strand
cacuggaacccgaaguaua

SEQ ID NO: 272790 - RNA, 19 nt, Homo sapiens
  misc_RNA (1)...(19): siRNA sense strand
ugagagcuuccuucaaaug

SEQ ID NO: 272791 - RNA, 19 nt, Homo sapiens
  misc_RNA (1)...(19): siRNA sense strand
caccguggauggagucaag

SEQ ID NO: 272792 - RNA, 19 nt, Homo sapiens
  misc_RNA (1)...(19): siRNA sense strand
agccauggucugugucuua

SEQ ID NO: 272793 - RNA, 19 nt, Homo sapiens
  misc_RNA (1)...(19): siRNA sense strand
ccacagccuaucaauaaca

SEQ ID NO: 272794 - RNA, 19 nt, Homo sapiens
  misc_RNA (1)...(19): siRNA sense strand
gacaugagaauggcgaguu

SEQ ID NO: 272795 - RNA, 19 nt, Homo sapiens
  misc_RNA (1)...(19): siRNA sense strand
aagaccauccugaauaaug

SEQ ID NO: 272796 - RNA, 19 nt, Homo sapiens
  misc_RNA (1)...(19): siRNA sense strand
gcaugaacuuuucccaaau

SEQ ID NO: 272797 - RNA, 19 nt, Homo sapiens
  misc_RNA (1)...(19): siRNA sense strand
ccuccacagccuaucaaua

SEQ ID NO: 272798 - RNA, 19 nt, Homo sapiens
  misc_RNA (1)...(19): siRNA sense strand
ccaugaccgugagcucuga

SEQ ID NO: 272799 - RNA, 19 nt, Homo sapiens
  misc_RNA (1)...(19): siRNA sense strand
cugcagccauggucugugu

SEQ ID NO: 272800 - RNA, 19 nt, Homo sapiens
  misc_RNA (1)...(19): siRNA sense strand
acaugagaauggcgaguuc

SEQ ID NO: 272801 - RNA, 19 nt, Homo sapiens
  misc_RNA (1)...(19): siRNA sense strand
ccacuggcaugaacuuuuc

SEQ ID NO: 272802 - RNA, 19 nt, Homo sapiens
  misc_RNA (1)...(19): siRNA sense strand
ugacccauccugccuguuc

SEQ ID NO: 272803 - RNA, 19 nt, Homo sapiens
  misc_RNA (1)...(19): siRNA sense strand
gaugcauuggacaagauua

SEQ ID NO: 272804 - RNA, 19 nt, Homo sapiens
  misc_RNA (1)...(19): siRNA sense strand
ugaugauacuuaugauagg

SEQ ID NO: 272805 - RNA, 19 nt, Homo sapiens
  misc_RNA (1)...(19): siRNA sense strand
cugaagauaggacaugaga

SEQ ID NO: 272806 - RNA, 19 nt, Homo sapiens
  misc_RNA (1)...(19): siRNA sense strand
gagcuucauuugguucacu

SEQ ID NO: 272807 - RNA, 19 nt, Homo sapiens
  misc_RNA (1)...(19): siRNA sense strand
cggaugaucauggcucuga

SEQ ID NO: 272808 - RNA, 19 nt, Homo sapiens
  misc_RNA (1)...(19): siRNA sense strand
ccuggacccuaccgacuuc

SEQ ID NO: 272809 - RNA, 19 nt, Homo sapiens
  misc_RNA (1)...(19): siRNA sense strand
uggauggagucaaguaugc

SEQ ID NO: 272810 - RNA, 19 nt, Homo sapiens
  misc_RNA (1)...(19): siRNA sense strand
gcugcauacuaaagacauc

SEQ ID NO: 272811 - RNA, 19 nt, Homo sapiens
  misc_RNA (1)...(19): siRNA sense strand
cagugccucuugugagcaa

SEQ ID NO: 272812 - RNA, 19 nt, Homo sapiens
  misc_RNA (1)...(19): siRNA sense strand
ccagggagaucgccaauca

SEQ ID NO: 272813 - RNA, 19 nt, Homo sapiens
  misc_RNA (1)...(19): siRNA sense strand
cacuggagcuuuccuauga

SEQ ID NO: 272814 - RNA, 19 nt, Homo sapiens
  misc_RNA (1)...(19): siRNA sense strand
gccaaucacccaucaauau

SEQ ID NO: 272815 - RNA, 19 nt, Homo sapiens
  misc_RNA (1)...(19): siRNA sense strand
gagagugucaccuggauug

SEQ ID NO: 272816 - RNA, 19 nt, Homo sapiens
  misc_RNA (1)...(19): siRNA sense strand
gaucgccaaucacccauca

SEQ ID NO: 272817 - RNA, 19 nt, Homo sapiens
  misc_RNA (1)...(19): siRNA sense strand
cagcaugaaucgucugaca

SEQ ID NO: 272818 - RNA, 19 nt, Homo sapiens
  misc_RNA (1)...(19): siRNA sense strand
cagaugcgcucuacauggu

SEQ ID NO: 272819 - RNA, 19 nt, Homo sapiens
  misc_RNA (1)...(19): siRNA sense strand
cagguagacuucaaugaca

SEQ ID NO: 272820 - RNA, 19 nt, Homo sapiens
  misc_RNA (1)...(19): siRNA sense strand
gcacaagcuguaucccauu

SEQ ID NO: 272821 - RNA, 19 nt, Homo sapiens
  misc_RNA (1)...(19): siRNA sense strand
ggauccacauggugaacaa

SEQ ID NO: 272822 - RNA, 19 nt, Homo sapiens
  misc_RNA (1)...(19): siRNA sense strand
cacaagcuguaucccauug

SEQ ID NO: 272823 - RNA, 19 nt, Homo sapiens
  misc_RNA (1)...(19): siRNA sense strand
ucacuggaaugccaagaag

SEQ ID NO: 272824 - RNA, 19 nt, Homo sapiens
  misc_RNA (1)...(19): siRNA sense strand
uggccacucuguccaggua

SEQ ID NO: 272825 - RNA, 19 nt, Homo sapiens
  misc_RNA (1)...(19): siRNA sense strand
ugacagaugcgcucuacau

SEQ ID NO: 272826 - RNA, 19 nt, Homo sapiens
  misc_RNA (1)...(19): siRNA sense strand
gaagcacgauguggguucu

SEQ ID NO: 272827 - RNA, 19 nt, Homo sapiens
  misc_RNA (1)...(19): siRNA sense strand
ccaaucacccaucaauauc

SEQ ID NO: 272828 - RNA, 19 nt, Homo sapiens
  misc_RNA (1)...(19): siRNA sense strand
gcaucugguucacuggaau

SEQ ID NO: 272829 - RNA, 19 nt, Homo sapiens
  misc_RNA (1)...(19): siRNA sense strand
caaucacccaucaauauca

SEQ ID NO: 272830 - RNA, 19 nt, Homo sapiens
  misc_RNA (1)...(19): siRNA sense strand
ucaagcaguuucacuucca

SEQ ID NO: 272831 - RNA, 19 nt, Homo sapiens
  misc_RNA (1)...(19): siRNA sense strand
caccaacaauggccacucu

SEQ ID NO: 272832 - RNA, 19 nt, Homo sapiens
  misc_RNA (1)...(19): siRNA sense strand
gacagaugcgcucuacaug

SEQ ID NO: 272833 - RNA, 19 nt, Homo sapiens
  misc_RNA (1)...(19): siRNA sense strand
acuggaaugccaagaagua

SEQ ID NO: 272834 - RNA, 19 nt, Homo sapiens
  misc_RNA (1)...(19): siRNA sense strand
ccacuggagcuuuccuaug

SEQ ID NO: 272835 - RNA, 19 nt, Homo sapiens
  misc_RNA (1)...(19): siRNA sense strand
ccacauggugaacaacuuc

SEQ ID NO: 272836 - RNA, 19 nt, Homo sapiens
  misc_RNA (1)...(19): siRNA sense strand
ggaaugccaagaaguacag

SEQ ID NO: 272837 - RNA, 19 nt, Homo sapiens
  misc_RNA (1)...(19): siRNA sense strand
ccagguagacuucaaugac

SEQ ID NO: 272838 - RNA, 19 nt, Homo sapiens
  misc_RNA (1)...(19): siRNA sense strand
ccaacaauggccacucugu

SEQ ID NO: 272839 - RNA, 19 nt, Homo sapiens
  misc_RNA (1)...(19): siRNA sense strand
ccuaccgccucaagcaguu

SEQ ID NO: 272840 - RNA, 19 nt, Homo sapiens
  misc_RNA (1)...(19): siRNA sense strand
cgccaaucacccaucaaua

SEQ ID NO: 272841 - RNA, 19 nt, Homo sapiens
  misc_RNA (1)...(19): siRNA sense strand
aaucacccaucaauaucau

SEQ ID NO: 272842 - RNA, 19 nt, Homo sapiens
  misc_RNA (1)...(19): siRNA sense strand
gcaccaaagcccaguucag

SEQ ID NO: 272843 - RNA, 19 nt, Homo sapiens
  misc_RNA (1)...(19): siRNA sense strand
gccacucuguccagguaga

SEQ ID NO: 272844 - RNA, 19 nt, Homo sapiens
  misc_RNA (1)...(19): siRNA sense strand
gaaguuccggagccugcuu

SEQ ID NO: 272845 - RNA, 19 nt, Homo sapiens
  misc_RNA (1)...(19): siRNA sense strand
cgcauuggcacaagcugua

SEQ ID NO: 272846 - RNA, 19 nt, Homo sapiens
  misc_RNA (1)...(19): siRNA sense strand
gggcaagaagcacgaugug

SEQ ID NO: 272847 - RNA, 19 nt, Homo sapiens
  misc_RNA (1)...(19): siRNA sense strand
ugcaaccacuggagcuuuc

SEQ ID NO: 272848 - RNA, 19 nt, Homo sapiens
  misc_RNA (1)...(19): siRNA sense strand
ggaagaauauuggaaguua

SEQ ID NO: 272849 - RNA, 19 nt, Homo sapiens
  misc_RNA (1)...(19): siRNA sense strand
gcagagcucccacuauuug

SEQ ID NO: 272850 - RNA, 19 nt, Homo sapiens
  misc_RNA (1)...(19): siRNA sense strand
uggcagagcucccacuauu

SEQ ID NO: 272851 - RNA, 19 nt, Homo sapiens
  misc_RNA (1)...(19): siRNA sense strand
ggaguaguuucaaauacaa

SEQ ID NO: 272852 - RNA, 19 nt, Homo sapiens
  misc_RNA (1)...(19): siRNA sense strand
gaccuuugcuccaguaugu

SEQ ID NO: 272853 - RNA, 19 nt, Homo sapiens
  misc_RNA (1)...(19): siRNA sense strand
gagauucuaugccagguau

SEQ ID NO: 272854 - RNA, 19 nt, Homo sapiens
  misc_RNA (1)...(19): siRNA sense strand
gaacggaucuuugccuacu

SEQ ID NO: 272855 - RNA, 19 nt, Homo sapiens
  misc_RNA (1)...(19): siRNA sense strand
ccacugcuacgguauauuu

SEQ ID NO: 272856 - RNA, 19 nt, Homo sapiens
  misc_RNA (1)...(19): siRNA sense strand
gaagucagaacucuagcua

SEQ ID NO: 272857 - RNA, 19 nt, Homo sapiens
  misc_RNA (1)...(19): siRNA sense strand
uggcaaccauucuuaguaa

SEQ ID NO: 272858 - RNA, 19 nt, Homo sapiens
  misc_RNA (1)...(19): siRNA sense strand
gauuguugcuugauagugu

SEQ ID NO: 272859 - RNA, 19 nt, Homo sapiens
  misc_RNA (1)...(19): siRNA sense strand
cauggaggauagugaauga

SEQ ID NO: 272860 - RNA, 19 nt, Homo sapiens
  misc_RNA (1)...(19): siRNA sense strand
uaugagcaguggaagaauu

SEQ ID NO: 272861 - RNA, 19 nt, Homo sapiens
  misc_RNA (1)...(19): siRNA sense strand
gaagaauauuggaaguuac

SEQ ID NO: 272862 - RNA, 19 nt, Homo sapiens
  misc_RNA (1)...(19): siRNA sense strand
acauguagccuguguugua

SEQ ID NO: 272863 - RNA, 19 nt, Homo sapiens
  misc_RNA (1)...(19): siRNA sense strand
cauccaaaguagaggaauu

SEQ ID NO: 272864 - RNA, 19 nt, Homo sapiens
  misc_RNA (1)...(19): siRNA sense strand
agaggaauuuggaguaguu

SEQ ID NO: 272865 - RNA, 19 nt, Homo sapiens
  misc_RNA (1)...(19): siRNA sense strand
gaggaagaauauuggaagu

SEQ ID NO: 272866 - RNA, 19 nt, Homo sapiens
  misc_RNA (1)...(19): siRNA sense strand
gcauuaggugaacaucuua

SEQ ID NO: 272867 - RNA, 19 nt, Homo sapiens
  misc_RNA (1)...(19): siRNA sense strand
gaagaauuucgaugagaga

SEQ ID NO: 272868 - RNA, 19 nt, Homo sapiens
  misc_RNA (1)...(19): siRNA sense strand
ggacaugggccaagaagac

SEQ ID NO: 272869 - RNA, 19 nt, Homo sapiens
  misc_RNA (1)...(19): siRNA sense strand
guagaggaauuuggaguag

SEQ ID NO: 272870 - RNA, 19 nt, Homo sapiens
  misc_RNA (1)...(19): siRNA sense strand
gguauucucugaaaaguau

SEQ ID NO: 272871 - RNA, 19 nt, Homo sapiens
  misc_RNA (1)...(19): siRNA sense strand
auuaauggcuccuacaugu

SEQ ID NO: 272872 - RNA, 19 nt, Homo sapiens
  misc_RNA (1)...(19): siRNA sense strand
ggauuuaaaguuucucuca

SEQ ID NO: 272873 - RNA, 19 nt, Homo sapiens
  misc_RNA (1)...(19): siRNA sense strand
ggagagcaggguccaaaug

SEQ ID NO: 272874 - RNA, 19 nt, Homo sapiens
  misc_RNA (1)...(19): siRNA sense strand
ggaggauagugaaugauac

SEQ ID NO: 272875 - RNA, 19 nt, Homo sapiens
  misc_RNA (1)...(19): siRNA sense strand
ggaauuuggaguaguuuca

SEQ ID NO: 272876 - RNA, 19 nt, Homo sapiens
  misc_RNA (1)...(19): siRNA sense strand
cgguauauuucaagagauu

SEQ ID NO: 272877 - RNA, 19 nt, Homo sapiens
  misc_RNA (1)...(19): siRNA sense strand
cuaauggauuguugcuuga

SEQ ID NO: 272878 - RNA, 19 nt, Homo sapiens
  misc_RNA (1)...(19): siRNA sense strand
agucagaacucuagcuaca

SEQ ID NO: 272879 - RNA, 19 nt, Homo sapiens
  misc_RNA (1)...(19): siRNA sense strand
uacgguauauuucaagaga

SEQ ID NO: 272880 - RNA, 19 nt, Homo sapiens
  misc_RNA (1)...(19): siRNA sense strand
gcugagcuuucuguggaua

SEQ ID NO: 272881 - RNA, 19 nt, Homo sapiens
  misc_RNA (1)...(19): siRNA sense strand
uagaacuaauggauuguug

SEQ ID NO: 272882 - RNA, 19 nt, Homo sapiens
  misc_RNA (1)...(19): siRNA sense strand
gcugcuacuucuguauuaa

SEQ ID NO: 272883 - RNA, 19 nt, Homo sapiens
  misc_RNA (1)...(19): siRNA sense strand
uggaguaguuucaaauaca

SEQ ID NO: 272884 - RNA, 19 nt, Homo sapiens
  misc_RNA (1)...(19): siRNA sense strand
gcuacgguauauuucaaga

SEQ ID NO: 272885 - RNA, 19 nt, Homo sapiens
  misc_RNA (1)...(19): siRNA sense strand
uauaugagcaguggaagaa

SEQ ID NO: 272886 - RNA, 19 nt, Homo sapiens
  misc_RNA (1)...(19): siRNA sense strand
ggauagugaaugauaccua

SEQ ID NO: 272887 - RNA, 19 nt, Homo sapiens
  misc_RNA (1)...(19): siRNA sense strand
ucucagaggaagaauauug

SEQ ID NO: 272888 - RNA, 19 nt, Homo sapiens
  misc_RNA (1)...(19): siRNA sense strand
gaucuuugccuacuguauc

SEQ ID NO: 272889 - RNA, 19 nt, Homo sapiens
  misc_RNA (1)...(19): siRNA sense strand
aauggauuguugcuugaua

SEQ ID NO: 272890 - RNA, 19 nt, Homo sapiens
  misc_RNA (1)...(19): siRNA sense strand
ugccagguauucucugaaa

SEQ ID NO: 272891 - RNA, 19 nt, Homo sapiens
  misc_RNA (1)...(19): siRNA sense strand
gggccaagaagacauguug

SEQ ID NO: 272892 - RNA, 19 nt, Homo sapiens
  misc_RNA (1)...(19): siRNA sense strand
caaguuauugccacugcua

SEQ ID NO: 272893 - RNA, 19 nt, Homo sapiens
  misc_RNA (1)...(19): siRNA sense strand
cuagcuacagccaaucuua

SEQ ID NO: 272894 - RNA, 19 nt, Homo sapiens
  misc_RNA (1)...(19): siRNA sense strand
uggaggauagugaaugaua

SEQ ID NO: 272895 - RNA, 19 nt, Homo sapiens
  misc_RNA (1)...(19): siRNA sense strand
gagagcaggguccaaaugg

SEQ ID NO: 272896 - RNA, 19 nt, Homo sapiens
  misc_RNA (1)...(19): siRNA sense strand
gcaauggauuuuggauaaa

SEQ ID NO: 272897 - RNA, 19 nt, Homo sapiens
  misc_RNA (1)...(19): siRNA sense strand
uagcuacagccaaucuuaa

SEQ ID NO: 272898 - RNA, 19 nt, Homo sapiens
  misc_RNA (1)...(19): siRNA sense strand
uggaagaauuucgaugaga

SEQ ID NO: 272899 - RNA, 19 nt, Homo sapiens
  misc_RNA (1)...(19): siRNA sense strand
agcauuaggugaacaucuu

SEQ ID NO: 272900 - RNA, 19 nt, Homo sapiens
  misc_RNA (1)...(19): siRNA sense strand
gaacuaauggauuguugcu

SEQ ID NO: 272901 - RNA, 19 nt, Homo sapiens
  misc_RNA (1)...(19): siRNA sense strand
uauccaagcauuaggugaa

SEQ ID NO: 272902 - RNA, 19 nt, Homo sapiens
  misc_RNA (1)...(19): siRNA sense strand
ugcaauggauuuuggauaa

SEQ ID NO: 272903 - RNA, 19 nt, Homo sapiens
  misc_RNA (1)...(19): siRNA sense strand
ggcagagcucccacuauuu

SEQ ID NO: 272904 - RNA, 19 nt, Homo sapiens
  misc_RNA (1)...(19): siRNA sense strand
gaauuuggaguaguuucaa

SEQ ID NO: 272905 - RNA, 19 nt, Homo sapiens
  misc_RNA (1)...(19): siRNA sense strand
uaauggcuccuacaugugu

SEQ ID NO: 272906 - RNA, 19 nt, Homo sapiens
  misc_RNA (1)...(19): siRNA sense strand
uaugccagguauucucuga

SEQ ID NO: 272907 - RNA, 19 nt, Homo sapiens
  misc_RNA (1)...(19): siRNA sense strand
uaucauccuuauagaccuu

SEQ ID NO: 272908 - RNA, 19 nt, Homo sapiens
  misc_RNA (1)...(19): siRNA sense strand
cuacagaacggaucuuugc

SEQ ID NO: 272909 - RNA, 19 nt, Homo sapiens
  misc_RNA (1)...(19): siRNA sense strand
gcauggaggauagugaaug

SEQ ID NO: 272910 - RNA, 19 nt, Homo sapiens
  misc_RNA (1)...(19): siRNA sense strand
uuucauaugccuuuccaaa

SEQ ID NO: 272911 - RNA, 19 nt, Homo sapiens
  misc_RNA (1)...(19): siRNA sense strand
ccaaauggaagucagaacu

SEQ ID NO: 272912 - RNA, 19 nt, Homo sapiens
  misc_RNA (1)...(19): siRNA sense strand
uuggaaauaaucaggguua

SEQ ID NO: 272913 - RNA, 19 nt, Homo sapiens
  misc_RNA (1)...(19): siRNA sense strand
ugaaugauaccuacagaac

SEQ ID NO: 272914 - RNA, 19 nt, Homo sapiens
  misc_RNA (1)...(19): siRNA sense strand
ugcugcuacuucuguauua

SEQ ID NO: 272915 - RNA, 19 nt, Homo sapiens
  misc_RNA (1)...(19): siRNA sense strand
guggaagaauuucgaugag

SEQ ID NO: 272916 - RNA, 19 nt, Homo sapiens
  misc_RNA (1)...(19): siRNA sense strand
ccaagaagacauguugcuu

SEQ ID NO: 272917 - RNA, 19 nt, Homo sapiens
  misc_RNA (1)...(19): siRNA sense strand
gcaggacaugggccaagaa

SEQ ID NO: 272918 - RNA, 19 nt, Homo sapiens
  misc_RNA (1)...(19): siRNA sense strand
auagaccuuugcuccagua

SEQ ID NO: 272919 - RNA, 19 nt, Homo sapiens
  misc_RNA (1)...(19): siRNA sense strand
gccaaaaggauuuaaaguu

SEQ ID NO: 272920 - RNA, 19 nt, Homo sapiens
  misc_RNA (1)...(19): siRNA sense strand
gagcucccacuauuugcaa

SEQ ID NO: 272921 - RNA, 19 nt, Homo sapiens
  misc_RNA (1)...(19): siRNA sense strand
caaauggaagucagaacuc

SEQ ID NO: 272922 - RNA, 19 nt, Homo sapiens
  misc_RNA (1)...(19): siRNA sense strand
gcuuuagcuugccuacaug

SEQ ID NO: 272923 - RNA, 19 nt, Homo sapiens
  misc_RNA (1)...(19): siRNA sense strand
uaguguaucauccuuauag

SEQ ID NO: 272924 - RNA, 19 nt, Homo sapiens
  misc_RNA (1)...(19): siRNA sense strand
cugcuacgguauauuucaa

SEQ ID NO: 272925 - RNA, 19 nt, Homo sapiens
  misc_RNA (1)...(19): siRNA sense strand
cagaggaagaauauuggaa

SEQ ID NO: 272926 - RNA, 19 nt, Homo sapiens
  misc_RNA (1)...(19): siRNA sense strand
cauguagccuguguuguac

SEQ ID NO: 272927 - RNA, 19 nt, Homo sapiens
  misc_RNA (1)...(19): siRNA sense strand
aguagaggaauuuggagua

SEQ ID NO: 272928 - RNA, 19 nt, Homo sapiens
  misc_RNA (1)...(19): siRNA sense strand
aaauggaagucagaacucu

SEQ ID NO: 272929 - RNA, 19 nt, Homo sapiens
  misc_RNA (1)...(19): siRNA sense strand
gauugcugcugcuacuucu

SEQ ID NO: 272930 - RNA, 19 nt, Homo sapiens
  misc_RNA (1)...(19): siRNA sense strand
aguggaagaauuucgauga

SEQ ID NO: 272931 - RNA, 19 nt, Homo sapiens
  misc_RNA (1)...(19): siRNA sense strand
uaucagggcaagcuguguu

SEQ ID NO: 272932 - RNA, 19 nt, Homo sapiens
  misc_RNA (1)...(19): siRNA sense strand
uaagacaacaaguuauugc

SEQ ID NO: 272933 - RNA, 19 nt, Homo sapiens
  misc_RNA (1)...(19): siRNA sense strand
gaaaaguauagauccugua

SEQ ID NO: 272934 - RNA, 19 nt, Homo sapiens
  misc_RNA (1)...(19): siRNA sense strand
ccuacuguauccuccuuuc

SEQ ID NO: 272935 - RNA, 19 nt, Homo sapiens
  misc_RNA (1)...(19): siRNA sense strand
guauuaauggcuccuacau

SEQ ID NO: 272936 - RNA, 19 nt, Homo sapiens
  misc_RNA (1)...(19): siRNA sense strand
ugaaggagcgccaaaagga

SEQ ID NO: 272937 - RNA, 19 nt, Homo sapiens
  misc_RNA (1)...(19): siRNA sense strand
gugaaugauaccuacagaa

SEQ ID NO: 272938 - RNA, 19 nt, Homo sapiens
  misc_RNA (1)...(19): siRNA sense strand
gaaacaccucucagaaaua

SEQ ID NO: 272939 - RNA, 19 nt, Homo sapiens
  misc_RNA (1)...(19): siRNA sense strand
gcaagaagcugaggagcau

SEQ ID NO: 272940 - RNA, 19 nt, Homo sapiens
  misc_RNA (1)...(19): siRNA sense strand
gaacuuauucagacaaaug

SEQ ID NO: 272941 - RNA, 19 nt, Homo sapiens
  misc_RNA (1)...(19): siRNA sense strand
gcagccaaaucuucaacua

SEQ ID NO: 272942 - RNA, 19 nt, Homo sapiens
  misc_RNA (1)...(19): siRNA sense strand
gggagaaguucaagaaaca

SEQ ID NO: 272943 - RNA, 19 nt, Homo sapiens
  misc_RNA (1)...(19): siRNA sense strand
aaacaccucucagaaauau

SEQ ID NO: 272944 - RNA, 19 nt, Homo sapiens
  misc_RNA (1)...(19): siRNA sense strand
agaaacaccucucagaaau

SEQ ID NO: 272945 - RNA, 19 nt, Homo sapiens
  misc_RNA (1)...(19): siRNA sense strand
ugacaacagugaccgacua

SEQ ID NO: 272946 - RNA, 19 nt, Homo sapiens
  misc_RNA (1)...(19): siRNA sense strand
caacagugaccgacuacua

SEQ ID NO: 272947 - RNA, 19 nt, Homo sapiens
  misc_RNA (1)...(19): siRNA sense strand
cuacuacccugauaucuuc

SEQ ID NO: 272948 - RNA, 19 nt, Homo sapiens
  misc_RNA (1)...(19): siRNA sense strand
caagaaacaccucucagaa

SEQ ID NO: 272949 - RNA, 19 nt, Homo sapiens
  misc_RNA (1)...(19): siRNA sense strand
ucagacaaauggcaaguug

SEQ ID NO: 272950 - RNA, 19 nt, Homo sapiens
  misc_RNA (1)...(19): siRNA sense strand
gccaacagcugacuuaugc

SEQ ID NO: 272951 - RNA, 19 nt, Homo sapiens
  misc_RNA (1)...(19): siRNA sense strand
gaucuucaccaacuucaaa

SEQ ID NO: 272952 - RNA, 19 nt, Homo sapiens
  misc_RNA (1)...(19): siRNA sense strand
gucauugcaucuuuacuuu

SEQ ID NO: 272953 - RNA, 19 nt, Homo sapiens
  misc_RNA (1)...(19): siRNA sense strand
ugugaacccuguuaucuau

SEQ ID NO: 272954 - RNA, 19 nt, Homo sapiens
  misc_RNA (1)...(19): siRNA sense strand
guaccuggcuguuguccau

SEQ ID NO: 272955 - RNA, 19 nt, Homo sapiens
  misc_RNA (1)...(19): siRNA sense strand
caaguggccucugaagaug

SEQ ID NO: 272956 - RNA, 19 nt, Homo sapiens
  misc_RNA (1)...(19): siRNA sense strand
ccaaguggccucugaagau

SEQ ID NO: 272957 - RNA, 19 nt, Homo sapiens
  misc_RNA (1)...(19): siRNA sense strand
ucacagauguauaccucuu

SEQ ID NO: 272958 - RNA, 19 nt, Homo sapiens
  misc_RNA (1)...(19): siRNA sense strand
uuggauggauguagcauaa

SEQ ID NO: 272959 - RNA, 19 nt, Homo sapiens
  misc_RNA (1)...(19): siRNA sense strand
ggucauugcaucuuuacuu

SEQ ID NO: 272960 - RNA, 19 nt, Homo sapiens
  misc_RNA (1)...(19): siRNA sense strand
aagaaacaccucucagaaa

SEQ ID NO: 272961 - RNA, 19 nt, Homo sapiens
  misc_RNA (1)...(19): siRNA sense strand
ucaagaaacaccucucaga

SEQ ID NO: 272962 - RNA, 19 nt, Homo sapiens
  misc_RNA (1)...(19): siRNA sense strand
ucacuuccuugcacaguau

SEQ ID NO: 272963 - RNA, 19 nt, Homo sapiens
  misc_RNA (1)...(19): siRNA sense strand
gaagaugguguucuacagu

SEQ ID NO: 272964 - RNA, 19 nt, Homo sapiens
  misc_RNA (1)...(19): siRNA sense strand
gaaacagccuggucauccu

SEQ ID NO: 272965 - RNA, 19 nt, Homo sapiens
  misc_RNA (1)...(19): siRNA sense strand
acaccucucagaaauauuu

SEQ ID NO: 272966 - RNA, 19 nt, Homo sapiens
  misc_RNA (1)...(19): siRNA sense strand
ggacuguaaugugcaaagu

SEQ ID NO: 272967 - RNA, 19 nt, Homo sapiens
  misc_RNA (1)...(19): siRNA sense strand
ucaugaguguggacaggua

SEQ ID NO: 272968 - RNA, 19 nt, Homo sapiens
  misc_RNA (1)...(19): siRNA sense strand
ccacccaugucacagaaau

SEQ ID NO: 272969 - RNA, 19 nt, Homo sapiens
  misc_RNA (1)...(19): siRNA sense strand
acagauguauaccucuuga

SEQ ID NO: 272970 - RNA, 19 nt, Homo sapiens
  misc_RNA (1)...(19): siRNA sense strand
ggagagcugugaaaaguca

SEQ ID NO: 272971 - RNA, 19 nt, Homo sapiens
  misc_RNA (1)...(19): siRNA sense strand
gacuacuacuacccugaua

SEQ ID NO: 272972 - RNA, 19 nt, Homo sapiens
  misc_RNA (1)...(19): siRNA sense strand
gcacaguaugcacaucuug

SEQ ID NO: 272973 - RNA, 19 nt, Homo sapiens
  misc_RNA (1)...(19): siRNA sense strand
cagaaaaguugcagccaaa

SEQ ID NO: 272974 - RNA, 19 nt, Homo sapiens
  misc_RNA (1)...(19): siRNA sense strand
cggaacuuauucagacaaa

SEQ ID NO: 272975 - RNA, 19 nt, Homo sapiens
  misc_RNA (1)...(19): siRNA sense strand
ugacuuaugccacccaugu

SEQ ID NO: 272976 - RNA, 19 nt, Homo sapiens
  misc_RNA (1)...(19): siRNA sense strand
uguggucauugcaucuuua

SEQ ID NO: 272977 - RNA, 19 nt, Homo sapiens
  misc_RNA (1)...(19): siRNA sense strand
ggauggauguagcauaagc

SEQ ID NO: 272978 - RNA, 19 nt, Homo sapiens
  misc_RNA (1)...(19): siRNA sense strand
ccaaaucuucaacuaccua

SEQ ID NO: 272979 - RNA, 19 nt, Homo sapiens
  misc_RNA (1)...(19): siRNA sense strand
cagcugaagaggugucaaa

SEQ ID NO: 272980 - RNA, 19 nt, Homo sapiens
  misc_RNA (1)...(19): siRNA sense strand
ucagguuggugcucauugu

SEQ ID NO: 272981 - RNA, 19 nt, Homo sapiens
  misc_RNA (1)...(19): siRNA sense strand
uuuauugccuccuguuugu

SEQ ID NO: 272982 - RNA, 19 nt, Homo sapiens
  misc_RNA (1)...(19): siRNA sense strand
ccaugucacagaaaucauu

SEQ ID NO: 272983 - RNA, 19 nt, Homo sapiens
  misc_RNA (1)...(19): siRNA sense strand
guucuacaguguuauucau

SEQ ID NO: 272984 - RNA, 19 nt, Homo sapiens
  misc_RNA (1)...(19): siRNA sense strand
ugaagaugguguucuacag

SEQ ID NO: 272985 - RNA, 19 nt, Homo sapiens
  misc_RNA (1)...(19): siRNA sense strand
gugugaacccuguuaucua

SEQ ID NO: 272986 - RNA, 19 nt, Homo sapiens
  misc_RNA (1)...(19): siRNA sense strand
ggaacuuauucagacaaau

SEQ ID NO: 272987 - RNA, 19 nt, Homo sapiens
  misc_RNA (1)...(19): siRNA sense strand
ucaacuaccuaggaagaca

SEQ ID NO: 272988 - RNA, 19 nt, Homo sapiens
  misc_RNA (1)...(19): siRNA sense strand
ccauucaccaucuuuaugu

SEQ ID NO: 272989 - RNA, 19 nt, Homo sapiens
  misc_RNA (1)...(19): siRNA sense strand
agaccaaggccaucagguu

SEQ ID NO: 272990 - RNA, 19 nt, Homo sapiens
  misc_RNA (1)...(19): siRNA sense strand
uauucagucuucugggaaa

SEQ ID NO: 272991 - RNA, 19 nt, Homo sapiens
  misc_RNA (1)...(19): siRNA sense strand
gaucccauucaccaucuuu

SEQ ID NO: 272992 - RNA, 19 nt, Homo sapiens
  misc_RNA (1)...(19): siRNA sense strand
ggcccugucugaccugcuu

SEQ ID NO: 272993 - RNA, 19 nt, Homo sapiens
  misc_RNA (1)...(19): siRNA sense strand
gaugcggaacuuauucaga

SEQ ID NO: 272994 - RNA, 19 nt, Homo sapiens
  misc_RNA (1)...(19): siRNA sense strand
guugcuccuugcugucuuu

SEQ ID NO: 272995 - RNA, 19 nt, Homo sapiens
  misc_RNA (1)...(19): siRNA sense strand
gguguucuacaguguuauu

SEQ ID NO: 272996 - RNA, 19 nt, Homo sapiens
  misc_RNA (1)...(19): siRNA sense strand
ucccauugcuaguguuuua

SEQ ID NO: 272997 - RNA, 19 nt, Homo sapiens
  misc_RNA (1)...(19): siRNA sense strand
gcuccuugcugucuuuuau

SEQ ID NO: 272998 - RNA, 19 nt, Homo sapiens
  misc_RNA (1)...(19): siRNA sense strand
ccaucuuuauguucugcua

SEQ ID NO: 272999 - RNA, 19 nt, Homo sapiens
  misc_RNA (1)...(19): siRNA sense strand
cauucaccaucuuuauguu

SEQ ID NO: 273000 - RNA, 19 nt, Homo sapiens
  misc_RNA (1)...(19): siRNA sense strand
augguguucuacaguguua

SEQ ID NO: 273001 - RNA, 19 nt, Homo sapiens
  misc_RNA (1)...(19): siRNA sense strand
cuaccuaggaagacaaaug

SEQ ID NO: 273002 - RNA, 19 nt, Homo sapiens
  misc_RNA (1)...(19): siRNA sense strand
cuaaaggugaggacgauca

SEQ ID NO: 273003 - RNA, 19 nt, Homo sapiens
  misc_RNA (1)...(19): siRNA sense strand
caacuaccuaggaagacaa

SEQ ID NO: 273004 - RNA, 19 nt, Homo sapiens
  misc_RNA (1)...(19): siRNA sense strand
guucaagaaacaccucuca

SEQ ID NO: 273005 - RNA, 19 nt, Homo sapiens
  misc_RNA (1)...(19): siRNA sense strand
gauguagcauaagccaaca

SEQ ID NO: 273006 - RNA, 19 nt, Homo sapiens
  misc_RNA (1)...(19): siRNA sense strand
ccauucaacgugguucuuu

SEQ ID NO: 273007 - RNA, 19 nt, Homo sapiens
  misc_RNA (1)...(19): siRNA sense strand
cucugaagaugguguucua

SEQ ID NO: 273008 - RNA, 19 nt, Homo sapiens
  misc_RNA (1)...(19): siRNA sense strand
ugaacccuguuaucuaugc

SEQ ID NO: 273009 - RNA, 19 nt, Homo sapiens
  misc_RNA (1)...(19): siRNA sense strand
gaugguguucuacaguguu

SEQ ID NO: 273010 - RNA, 19 nt, Homo sapiens
  misc_RNA (1)...(19): siRNA sense strand
aaucuucaacuaccuagga

SEQ ID NO: 273011 - RNA, 19 nt, Homo sapiens
  misc_RNA (1)...(19): siRNA sense strand
cuacuacuacccugauauc

SEQ ID NO: 273012 - RNA, 19 nt, Homo sapiens
  misc_RNA (1)...(19): siRNA sense strand
cgacuacuacuacccugau

SEQ ID NO: 273013 - RNA, 19 nt, Homo sapiens
  misc_RNA (1)...(19): siRNA sense strand
gaaacgacaucgagaagaa

SEQ ID NO: 273014 - RNA, 19 nt, Homo sapiens
  misc_RNA (1)...(19): siRNA sense strand
gcacgaacgucggaaacga

SEQ ID NO: 273015 - RNA, 19 nt, Homo sapiens
  misc_RNA (1)...(19): siRNA sense strand
gagaagaacaggauaaagc

SEQ ID NO: 273016 - RNA, 19 nt, Homo sapiens
  misc_RNA (1)...(19): siRNA sense strand
gagcauuccaggagagaaa

SEQ ID NO: 273017 - RNA, 19 nt, Homo sapiens
  misc_RNA (1)...(19): siRNA sense strand
gcuucgaccucaugaacaa

SEQ ID NO: 273018 - RNA, 19 nt, Homo sapiens
  misc_RNA (1)...(19): siRNA sense strand
ggaaacgacaucgagaaga

SEQ ID NO: 273019 - RNA, 19 nt, Homo sapiens
  misc_RNA (1)...(19): siRNA sense strand
gaaugggaaagacagaaga

SEQ ID NO: 273020 - RNA, 19 nt, Homo sapiens
  misc_RNA (1)...(19): siRNA sense strand
agacagaagagaagggaaa

SEQ ID NO: 273021 - RNA, 19 nt, Homo sapiens
  misc_RNA (1)...(19): siRNA sense strand
gggaaagacagaagagaag

SEQ ID NO: 273022 - RNA, 19 nt, Homo sapiens
  misc_RNA (1)...(19): siRNA sense strand
ggaaugggaaagacagaag

SEQ ID NO: 273023 - RNA, 19 nt, Homo sapiens
  misc_RNA (1)...(19): siRNA sense strand
ggaccgcuuggagcaguua

SEQ ID NO: 273024 - RNA, 19 nt, Homo sapiens
  misc_RNA (1)...(19): siRNA sense strand
cagaagagaagggaaaugg

SEQ ID NO: 273025 - RNA, 19 nt, Homo sapiens
  misc_RNA (1)...(19): siRNA sense strand
aggacggccucaagcauga

SEQ ID NO: 273026 - RNA, 19 nt, Homo sapiens
  misc_RNA (1)...(19): siRNA sense strand
ggaaauggcaagggagcau

SEQ ID NO: 273027 - RNA, 19 nt, Homo sapiens
  misc_RNA (1)...(19): siRNA sense strand
gcuuggagcaguuagaaag

SEQ ID NO: 273028 - RNA, 19 nt, Homo sapiens
  misc_RNA (1)...(19): siRNA sense strand
ugggaaagacagaagagaa

SEQ ID NO: 273029 - RNA, 19 nt, Homo sapiens
  misc_RNA (1)...(19): siRNA sense strand
uggagcaguuagaaaggaa

SEQ ID NO: 273030 - RNA, 19 nt, Homo sapiens
  misc_RNA (1)...(19): siRNA sense strand
caucgagaagaacaggaua

SEQ ID NO: 273031 - RNA, 19 nt, Homo sapiens
  misc_RNA (1)...(19): siRNA sense strand
ucgagaagaacaggauaaa

SEQ ID NO: 273032 - RNA, 19 nt, Homo sapiens
  misc_RNA (1)...(19): siRNA sense strand
gggcuucgaccucaugaac

SEQ ID NO: 273033 - RNA, 19 nt, Homo sapiens
  misc_RNA (1)...(19): siRNA sense strand
gcuucgaccucaugaacaa

SEQ ID NO: 273034 - RNA, 19 nt, Homo sapiens
  misc_RNA (1)...(19): siRNA sense strand
aggacggccucaagcauga

SEQ ID NO: 273035 - RNA, 19 nt, Homo sapiens
  misc_RNA (1)...(19): siRNA sense strand
gggcuucgaccucaugaac

SEQ ID NO: 273036 - RNA, 19 nt, Homo sapiens
  misc_RNA (1)...(19): siRNA sense strand
gaaacgacaucgagaagaa

SEQ ID NO: 273037 - RNA, 19 nt, Homo sapiens
  misc_RNA (1)...(19): siRNA sense strand
gcacgaacgucggaaacga

SEQ ID NO: 273038 - RNA, 19 nt, Homo sapiens
  misc_RNA (1)...(19): siRNA sense strand
gagaagaacaggauaaagc

SEQ ID NO: 273039 - RNA, 19 nt, Homo sapiens
  misc_RNA (1)...(19): siRNA sense strand
gagcauuccaggagagaaa

SEQ ID NO: 273040 - RNA, 19 nt, Homo sapiens
  misc_RNA (1)...(19): siRNA sense strand
gcuucgaccucaugaacaa

SEQ ID NO: 273041 - RNA, 19 nt, Homo sapiens
  misc_RNA (1)...(19): siRNA sense strand
ggaaacgacaucgagaaga

SEQ ID NO: 273042 - RNA, 19 nt, Homo sapiens
  misc_RNA (1)...(19): siRNA sense strand
gaaugggaaagacagaaga

SEQ ID NO: 273043 - RNA, 19 nt, Homo sapiens
  misc_RNA (1)...(19): siRNA sense strand
agacagaagagaagggaaa

SEQ ID NO: 273044 - RNA, 19 nt, Homo sapiens
  misc_RNA (1)...(19): siRNA sense strand
gggaaagacagaagagaag

SEQ ID NO: 273045 - RNA, 19 nt, Homo sapiens
  misc_RNA (1)...(19): siRNA sense strand
ggaaugggaaagacagaag

SEQ ID NO: 273046 - RNA, 19 nt, Homo sapiens
  misc_RNA (1)...(19): siRNA sense strand
ggaccgcuuggagcaguua

SEQ ID NO: 273047 - RNA, 19 nt, Homo sapiens
  misc_RNA (1)...(19): siRNA sense strand
cagaagagaagggaaaugg

SEQ ID NO: 273048 - RNA, 19 nt, Homo sapiens
  misc_RNA (1)...(19): siRNA sense strand
aggacggccucaagcauga

SEQ ID NO: 273049 - RNA, 19 nt, Homo sapiens
  misc_RNA (1)...(19): siRNA sense strand
ggaaauggcaagggagcau

SEQ ID NO: 273050 - RNA, 19 nt, Homo sapiens
  misc_RNA (1)...(19): siRNA sense strand
gcuuggagcaguuagaaag

SEQ ID NO: 273051 - RNA, 19 nt, Homo sapiens
  misc_RNA (1)...(19): siRNA sense strand
ugggaaagacagaagagaa

SEQ ID NO: 273052 - RNA, 19 nt, Homo sapiens
  misc_RNA (1)...(19): siRNA sense strand
uggagcaguuagaaaggaa

SEQ ID NO: 273053 - RNA, 19 nt, Homo sapiens
  misc_RNA (1)...(19): siRNA sense strand
caucgagaagaacaggaua

SEQ ID NO: 273054 - RNA, 19 nt, Homo sapiens
  misc_RNA (1)...(19): siRNA sense strand
ucgagaagaacaggauaaa

SEQ ID NO: 273055 - RNA, 19 nt, Homo sapiens
  misc_RNA (1)...(19): siRNA sense strand
gggcuucgaccucaugaac

SEQ ID NO: 273056 - RNA, 19 nt, Homo sapiens
  misc_RNA (1)...(19): siRNA sense strand
gaaacgacaucgagaagaa

SEQ ID NO: 273057 - RNA, 19 nt, Homo sapiens
  misc_RNA (1)...(19): siRNA sense strand
gcacgaacgucggaaacga

SEQ ID NO: 273058 - RNA, 19 nt, Homo sapiens
  misc_RNA (1)...(19): siRNA sense strand
gagaagaacaggauaaagc

SEQ ID NO: 273059 - RNA, 19 nt, Homo sapiens
  misc_RNA (1)...(19): siRNA sense strand
gagcauuccaggagagaaa

SEQ ID NO: 273060 - RNA, 19 nt, Homo sapiens
  misc_RNA (1)...(19): siRNA sense strand
gcuucgaccucaugaacaa

SEQ ID NO: 273061 - RNA, 19 nt, Homo sapiens
  misc_RNA (1)...(19): siRNA sense strand
ggaaacgacaucgagaaga

SEQ ID NO: 273062 - RNA, 19 nt, Homo sapiens
  misc_RNA (1)...(19): siRNA sense strand
gaaugggaaagacagaaga

SEQ ID NO: 273063 - RNA, 19 nt, Homo sapiens
  misc_RNA (1)...(19): siRNA sense strand
agacagaagagaagggaaa

SEQ ID NO: 273064 - RNA, 19 nt, Homo sapiens
  misc_RNA (1)...(19): siRNA sense strand
gggaaagacagaagagaag

SEQ ID NO: 273065 - RNA, 19 nt, Homo sapiens
  misc_RNA (1)...(19): siRNA sense strand
ggaaugggaaagacagaag

SEQ ID NO: 273066 - RNA, 19 nt, Homo sapiens
  misc_RNA (1)...(19): siRNA sense strand
ggaccgcuuggagcaguua

SEQ ID NO: 273067 - RNA, 19 nt, Homo sapiens
  misc_RNA (1)...(19): siRNA sense strand
cagaagagaagggaaaugg

SEQ ID NO: 273068 - RNA, 19 nt, Homo sapiens
  misc_RNA (1)...(19): siRNA sense strand
aggacggccucaagcauga

SEQ ID NO: 273069 - RNA, 19 nt, Homo sapiens
  misc_RNA (1)...(19): siRNA sense strand
ggaaauggcaagggagcau

SEQ ID NO: 273070 - RNA, 19 nt, Homo sapiens
  misc_RNA (1)...(19): siRNA sense strand
gcuuggagcaguuagaaag

SEQ ID NO: 273071 - RNA, 19 nt, Homo sapiens
  misc_RNA (1)...(19): siRNA sense strand
ugggaaagacagaagagaa

SEQ ID NO: 273072 - RNA, 19 nt, Homo sapiens
  misc_RNA (1)...(19): siRNA sense strand
uggagcaguuagaaaggaa

SEQ ID NO: 273073 - RNA, 19 nt, Homo sapiens
  misc_RNA (1)...(19): siRNA sense strand
caucgagaagaacaggaua

SEQ ID NO: 273074 - RNA, 19 nt, Homo sapiens
  misc_RNA (1)...(19): siRNA sense strand
ucgagaagaacaggauaaa

SEQ ID NO: 273075 - RNA, 19 nt, Homo sapiens
  misc_RNA (1)...(19): siRNA sense strand
gggcuucgaccucaugaac

SEQ ID NO: 273076 - RNA, 19 nt, Homo sapiens
  misc_RNA (1)...(19): siRNA sense strand
gaaacgacaucgagaagaa

SEQ ID NO: 273077 - RNA, 19 nt, Homo sapiens
  misc_RNA (1)...(19): siRNA sense strand
gcacgaacgucggaaacga

SEQ ID NO: 273078 - RNA, 19 nt, Homo sapiens
  misc_RNA (1)...(19): siRNA sense strand
gagaagaacaggauaaagc

SEQ ID NO: 273079 - RNA, 19 nt, Homo sapiens
  misc_RNA (1)...(19): siRNA sense strand
gagcauuccaggagagaaa

SEQ ID NO: 273080 - RNA, 19 nt, Homo sapiens
  misc_RNA (1)...(19): siRNA sense strand
gcuucgaccucaugaacaa

SEQ ID NO: 273081 - RNA, 19 nt, Homo sapiens
  misc_RNA (1)...(19): siRNA sense strand
ggaaacgacaucgagaaga

SEQ ID NO: 273082 - RNA, 19 nt, Homo sapiens
  misc_RNA (1)...(19): siRNA sense strand
gaaugggaaagacagaaga

SEQ ID NO: 273083 - RNA, 19 nt, Homo sapiens
  misc_RNA (1)...(19): siRNA sense strand
agacagaagagaagggaaa

SEQ ID NO: 273084 - RNA, 19 nt, Homo sapiens
  misc_RNA (1)...(19): siRNA sense strand
gggaaagacagaagagaag

SEQ ID NO: 273085 - RNA, 19 nt, Homo sapiens
  misc_RNA (1)...(19): siRNA sense strand
ggaaugggaaagacagaag

SEQ ID NO: 273086 - RNA, 19 nt, Homo sapiens
  misc_RNA (1)...(19): siRNA sense strand
ggaccgcuuggagcaguua

SEQ ID NO: 273087 - RNA, 19 nt, Homo sapiens
  misc_RNA (1)...(19): siRNA sense strand
cagaagagaagggaaaugg

SEQ ID NO: 273088 - RNA, 19 nt, Homo sapiens
  misc_RNA (1)...(19): siRNA sense strand
aggacggccucaagcauga

SEQ ID NO: 273089 - RNA, 19 nt, Homo sapiens
  misc_RNA (1)...(19): siRNA sense strand
ggaaauggcaagggagcau

SEQ ID NO: 273090 - RNA, 19 nt, Homo sapiens
  misc_RNA (1)...(19): siRNA sense strand
gcuuggagcaguuagaaag

SEQ ID NO: 273091 - RNA, 19 nt, Homo sapiens
  misc_RNA (1)...(19): siRNA sense strand
ugggaaagacagaagagaa

SEQ ID NO: 273092 - RNA, 19 nt, Homo sapiens
  misc_RNA (1)...(19): siRNA sense strand
uggagcaguuagaaaggaa

SEQ ID NO: 273093 - RNA, 19 nt, Homo sapiens
  misc_RNA (1)...(19): siRNA sense strand
caucgagaagaacaggaua

SEQ ID NO: 273094 - RNA, 19 nt, Homo sapiens
  misc_RNA (1)...(19): siRNA sense strand
ucgagaagaacaggauaaa

SEQ ID NO: 273095 - RNA, 19 nt, Homo sapiens
  misc_RNA (1)...(19): siRNA sense strand
gggcuucgaccucaugaac

SEQ ID NO: 273096 - RNA, 19 nt, Homo sapiens
  misc_RNA (1)...(19): siRNA sense strand
gcuucgaccucaugaacaa

SEQ ID NO: 273097 - RNA, 19 nt, Homo sapiens
  misc_RNA (1)...(19): siRNA sense strand
aggacggccucaagcauga

SEQ ID NO: 273098 - RNA, 19 nt, Homo sapiens
  misc_RNA (1)...(19): siRNA sense strand
gggcuucgaccucaugaac

SEQ ID NO: 273099 - RNA, 19 nt, Homo sapiens
  misc_RNA (1)...(19): siRNA sense strand
gagcauuccaggagagaaa

SEQ ID NO: 273100 - RNA, 19 nt, Homo sapiens
  misc_RNA (1)...(19): siRNA sense strand
gcuucgaccucaugaacaa

SEQ ID NO: 273101 - RNA, 19 nt, Homo sapiens
  misc_RNA (1)...(19): siRNA sense strand
agacagaagagaagggaaa

SEQ ID NO: 273102 - RNA, 19 nt, Homo sapiens
  misc_RNA (1)...(19): siRNA sense strand
gggaaagacagaagagaag

SEQ ID NO: 273103 - RNA, 19 nt, Homo sapiens
  misc_RNA (1)...(19): siRNA sense strand
ggaccgcuuggagcaguua

SEQ ID NO: 273104 - RNA, 19 nt, Homo sapiens
  misc_RNA (1)...(19): siRNA sense strand
cagaagagaagggaaaugg

SEQ ID NO: 273105 - RNA, 19 nt, Homo sapiens
  misc_RNA (1)...(19): siRNA sense strand
aggacggccucaagcauga

SEQ ID NO: 273106 - RNA, 19 nt, Homo sapiens
  misc_RNA (1)...(19): siRNA sense strand
gcuuggagcaguuagaaag

SEQ ID NO: 273107 - RNA, 19 nt, Homo sapiens
  misc_RNA (1)...(19): siRNA sense strand
ggaaauggcaagggagcau

SEQ ID NO: 273108 - RNA, 19 nt, Homo sapiens
  misc_RNA (1)...(19): siRNA sense strand
uggagcaguuagaaaggaa

SEQ ID NO: 273109 - RNA, 19 nt, Homo sapiens
  misc_RNA (1)...(19): siRNA sense strand
gggcuucgaccucaugaac

SEQ ID NO: 273110 - RNA, 19 nt, Homo sapiens
  misc_RNA (1)...(19): siRNA sense strand
gaaacgacaucgagaagaa

SEQ ID NO: 273111 - RNA, 19 nt, Homo sapiens
  misc_RNA (1)...(19): siRNA sense strand
gcacgaacgucggaaacga

SEQ ID NO: 273112 - RNA, 19 nt, Homo sapiens
  misc_RNA (1)...(19): siRNA sense strand
gagaagaacaggauaaagc

SEQ ID NO: 273113 - RNA, 19 nt, Homo sapiens
  misc_RNA (1)...(19): siRNA sense strand
gagcauuccaggagagaaa

SEQ ID NO: 273114 - RNA, 19 nt, Homo sapiens
  misc_RNA (1)...(19): siRNA sense strand
gcuucgaccucaugaacaa

SEQ ID NO: 273115 - RNA, 19 nt, Homo sapiens
  misc_RNA (1)...(19): siRNA sense strand
ggaaacgacaucgagaaga

SEQ ID NO: 273116 - RNA, 19 nt, Homo sapiens
  misc_RNA (1)...(19): siRNA sense strand
gaaugggaaagacagaaga

SEQ ID NO: 273117 - RNA, 19 nt, Homo sapiens
  misc_RNA (1)...(19): siRNA sense strand
agacagaagagaagggaaa

SEQ ID NO: 273118 - RNA, 19 nt, Homo sapiens
  misc_RNA (1)...(19): siRNA sense strand
gggaaagacagaagagaag

SEQ ID NO: 273119 - RNA, 19 nt, Homo sapiens
  misc_RNA (1)...(19): siRNA sense strand
ggaaugggaaagacagaag

SEQ ID NO: 273120 - RNA, 19 nt, Homo sapiens
  misc_RNA (1)...(19): siRNA sense strand
ggaccgcuuggagcaguua

SEQ ID NO: 273121 - RNA, 19 nt, Homo sapiens
  misc_RNA (1)...(19): siRNA sense strand
cagaagagaagggaaaugg

SEQ ID NO: 273122 - RNA, 19 nt, Homo sapiens
  misc_RNA (1)...(19): siRNA sense strand
aggacggccucaagcauga

SEQ ID NO: 273123 - RNA, 19 nt, Homo sapiens
  misc_RNA (1)...(19): siRNA sense strand
ggaaauggcaagggagcau

SEQ ID NO: 273124 - RNA, 19 nt, Homo sapiens
  misc_RNA (1)...(19): siRNA sense strand
gcuuggagcaguuagaaag

SEQ ID NO: 273125 - RNA, 19 nt, Homo sapiens
  misc_RNA (1)...(19): siRNA sense strand
ugggaaagacagaagagaa

SEQ ID NO: 273126 - RNA, 19 nt, Homo sapiens
  misc_RNA (1)...(19): siRNA sense strand
uggagcaguuagaaaggaa

SEQ ID NO: 273127 - RNA, 19 nt, Homo sapiens
  misc_RNA (1)...(19): siRNA sense strand
caucgagaagaacaggaua

SEQ ID NO: 273128 - RNA, 19 nt, Homo sapiens
  misc_RNA (1)...(19): siRNA sense strand
ucgagaagaacaggauaaa

SEQ ID NO: 273129 - RNA, 19 nt, Homo sapiens
  misc_RNA (1)...(19): siRNA sense strand
gggcuucgaccucaugaac

SEQ ID NO: 273130 - RNA, 19 nt, Homo sapiens
  misc_RNA (1)...(19): siRNA sense strand
gaaacgacaucgagaagaa

SEQ ID NO: 273131 - RNA, 19 nt, Homo sapiens
  misc_RNA (1)...(19): siRNA sense strand
gcacgaacgucggaaacga

SEQ ID NO: 273132 - RNA, 19 nt, Homo sapiens
  misc_RNA (1)...(19): siRNA sense strand
gagaagaacaggauaaagc

SEQ ID NO: 273133 - RNA, 19 nt, Homo sapiens
  misc_RNA (1)...(19): siRNA sense strand
gagcauuccaggagagaaa

SEQ ID NO: 273134 - RNA, 19 nt, Homo sapiens
  misc_RNA (1)...(19): siRNA sense strand
gcuucgaccucaugaacaa

SEQ ID NO: 273135 - RNA, 19 nt, Homo sapiens
  misc_RNA (1)...(19): siRNA sense strand
ggaaacgacaucgagaaga

SEQ ID NO: 273136 - RNA, 19 nt, Homo sapiens
  misc_RNA (1)...(19): siRNA sense strand
gaaugggaaagacagaaga

SEQ ID NO: 273137 - RNA, 19 nt, Homo sapiens
  misc_RNA (1)...(19): siRNA sense strand
agacagaagagaagggaaa

SEQ ID NO: 273138 - RNA, 19 nt, Homo sapiens
  misc_RNA (1)...(19): siRNA sense strand
gggaaagacagaagagaag

SEQ ID NO: 273139 - RNA, 19 nt, Homo sapiens
  misc_RNA (1)...(19): siRNA sense strand
ggaaugggaaagacagaag

SEQ ID NO: 273140 - RNA, 19 nt, Homo sapiens
  misc_RNA (1)...(19): siRNA sense strand
ggaccgcuuggagcaguua

SEQ ID NO: 273141 - RNA, 19 nt, Homo sapiens
  misc_RNA (1)...(19): siRNA sense strand
cagaagagaagggaaaugg

SEQ ID NO: 273142 - RNA, 19 nt, Homo sapiens
  misc_RNA (1)...(19): siRNA sense strand
aggacggccucaagcauga

SEQ ID NO: 273143 - RNA, 19 nt, Homo sapiens
  misc_RNA (1)...(19): siRNA sense strand
ggaaauggcaagggagcau

SEQ ID NO: 273144 - RNA, 19 nt, Homo sapiens
  misc_RNA (1)...(19): siRNA sense strand
gcuuggagcaguuagaaag

SEQ ID NO: 273145 - RNA, 19 nt, Homo sapiens
  misc_RNA (1)...(19): siRNA sense strand
ugggaaagacagaagagaa

SEQ ID NO: 273146 - RNA, 19 nt, Homo sapiens
  misc_RNA (1)...(19): siRNA sense strand
uggagcaguuagaaaggaa

SEQ ID NO: 273147 - RNA, 19 nt, Homo sapiens
  misc_RNA (1)...(19): siRNA sense strand
caucgagaagaacaggaua

SEQ ID NO: 273148 - RNA, 19 nt, Homo sapiens
  misc_RNA (1)...(19): siRNA sense strand
ucgagaagaacaggauaaa

SEQ ID NO: 273149 - RNA, 19 nt, Homo sapiens
  misc_RNA (1)...(19): siRNA sense strand
gggcuucgaccucaugaac

SEQ ID NO: 273150 - RNA, 19 nt, Homo sapiens
  misc_RNA (1)...(19): siRNA sense strand
caaauuagcugcacaucua

SEQ ID NO: 273151 - RNA, 19 nt, Homo sapiens
  misc_RNA (1)...(19): siRNA sense strand
gaacagacuccaauucaua

SEQ ID NO: 273152 - RNA, 19 nt, Homo sapiens
  misc_RNA (1)...(19): siRNA sense strand
gaacuaaagagcuguggua

SEQ ID NO: 273153 - RNA, 19 nt, Homo sapiens
  misc_RNA (1)...(19): siRNA sense strand
gcacaucuaucaucaagag

SEQ ID NO: 273154 - RNA, 19 nt, Homo sapiens
  misc_RNA (1)...(19): siRNA sense strand
gaggggaacugucaaaaua

SEQ ID NO: 273155 - RNA, 19 nt, Homo sapiens
  misc_RNA (1)...(19): siRNA sense strand
cuaaagagcugugguauac

SEQ ID NO: 273156 - RNA, 19 nt, Homo sapiens
  misc_RNA (1)...(19): siRNA sense strand
gaaauaauggaagagcuua

SEQ ID NO: 273157 - RNA, 19 nt, Homo sapiens
  misc_RNA (1)...(19): siRNA sense strand
ugggagaucuugucuugua

SEQ ID NO: 273158 - RNA, 19 nt, Homo sapiens
  misc_RNA (1)...(19): siRNA sense strand
gagcuuacaaccugccuua

SEQ ID NO: 273159 - RNA, 19 nt, Homo sapiens
  misc_RNA (1)...(19): siRNA sense strand
ggaauuaucacccaucauc

SEQ ID NO: 273160 - RNA, 19 nt, Homo sapiens
  misc_RNA (1)...(19): siRNA sense strand
uaccagcaauguggaauua

SEQ ID NO: 273161 - RNA, 19 nt, Homo sapiens
  misc_RNA (1)...(19): siRNA sense strand
ccaucaagcaauacaauua

SEQ ID NO: 273162 - RNA, 19 nt, Homo sapiens
  misc_RNA (1)...(19): siRNA sense strand
aaagagcugugguauacaa

SEQ ID NO: 273163 - RNA, 19 nt, Homo sapiens
  misc_RNA (1)...(19): siRNA sense strand
ugaagagccuauugaagau

SEQ ID NO: 273164 - RNA, 19 nt, Homo sapiens
  misc_RNA (1)...(19): siRNA sense strand
uacagaccaucaagcaaua

SEQ ID NO: 273165 - RNA, 19 nt, Homo sapiens
  misc_RNA (1)...(19): siRNA sense strand
gcugugaaauaauggaaga

SEQ ID NO: 273166 - RNA, 19 nt, Homo sapiens
  misc_RNA (1)...(19): siRNA sense strand
guucucaguuucucgguuu

SEQ ID NO: 273167 - RNA, 19 nt, Homo sapiens
  misc_RNA (1)...(19): siRNA sense strand
cugcuugucuccuacuaua

SEQ ID NO: 273168 - RNA, 19 nt, Homo sapiens
  misc_RNA (1)...(19): siRNA sense strand
uaucauggcuaucuuuguc

SEQ ID NO: 273169 - RNA, 19 nt, Homo sapiens
  misc_RNA (1)...(19): siRNA sense strand
cuuccagguuguaaauuua

SEQ ID NO: 273170 - RNA, 19 nt, Homo sapiens
  misc_RNA (1)...(19): siRNA sense strand
gaagaugaacagacuccaa

SEQ ID NO: 273171 - RNA, 19 nt, Homo sapiens
  misc_RNA (1)...(19): siRNA sense strand
ggggaacugucaaaauaua

SEQ ID NO: 273172 - RNA, 19 nt, Homo sapiens
  misc_RNA (1)...(19): siRNA sense strand
cuugggagaucuugucuug

SEQ ID NO: 273173 - RNA, 19 nt, Homo sapiens
  misc_RNA (1)...(19): siRNA sense strand
gcuuacaaccugccuuaaa

SEQ ID NO: 273174 - RNA, 19 nt, Homo sapiens
  misc_RNA (1)...(19): siRNA sense strand
caaaccuucuggaucucua

SEQ ID NO: 273175 - RNA, 19 nt, Homo sapiens
  misc_RNA (1)...(19): siRNA sense strand
aucaagaucuguaucaaga

SEQ ID NO: 273176 - RNA, 19 nt, Homo sapiens
  misc_RNA (1)...(19): siRNA sense strand
caaucaagaucuguaucaa

SEQ ID NO: 273177 - RNA, 19 nt, Homo sapiens
  misc_RNA (1)...(19): siRNA sense strand
ccagcaauguggaauuauc

SEQ ID NO: 273178 - RNA, 19 nt, Homo sapiens
  misc_RNA (1)...(19): siRNA sense strand
gaugaacagacuccaauuc

SEQ ID NO: 273179 - RNA, 19 nt, Homo sapiens
  misc_RNA (1)...(19): siRNA sense strand
cgagugaauuguucucagu

SEQ ID NO: 273180 - RNA, 19 nt, Homo sapiens
  misc_RNA (1)...(19): siRNA sense strand
augaagagccuauugaaga

SEQ ID NO: 273181 - RNA, 19 nt, Homo sapiens
  misc_RNA (1)...(19): siRNA sense strand
ucuuccagguuguaaauuu

SEQ ID NO: 273182 - RNA, 19 nt, Homo sapiens
  misc_RNA (1)...(19): siRNA sense strand
caauacagaccaucaagca

SEQ ID NO: 273183 - RNA, 19 nt, Homo sapiens
  misc_RNA (1)...(19): siRNA sense strand
cagaugaagagccuauuga

SEQ ID NO: 273184 - RNA, 19 nt, Homo sapiens
  misc_RNA (1)...(19): siRNA sense strand
ggacaaauuagcugcacau

SEQ ID NO: 273185 - RNA, 19 nt, Homo sapiens
  misc_RNA (1)...(19): siRNA sense strand
ugaguuucgggacaaauua

SEQ ID NO: 273186 - RNA, 19 nt, Homo sapiens
  misc_RNA (1)...(19): siRNA sense strand
ucccaaaccuucuggaucu

SEQ ID NO: 273187 - RNA, 19 nt, Homo sapiens
  misc_RNA (1)...(19): siRNA sense strand
gugaauuguucucaguuuc

SEQ ID NO: 273188 - RNA, 19 nt, Homo sapiens
  misc_RNA (1)...(19): siRNA sense strand
aagagccuauugaagauga

SEQ ID NO: 273189 - RNA, 19 nt, Homo sapiens
  misc_RNA (1)...(19): siRNA sense strand
acacugcuauggaggacuu

SEQ ID NO: 273190 - RNA, 19 nt, Homo sapiens
  misc_RNA (1)...(19): siRNA sense strand
agugaauuguucucaguuu

SEQ ID NO: 273191 - RNA, 19 nt, Homo sapiens
  misc_RNA (1)...(19): siRNA sense strand
ccgcccaguucaauacaaa

SEQ ID NO: 273192 - RNA, 19 nt, Homo sapiens
  misc_RNA (1)...(19): siRNA sense strand
ggacuugggagaucuuguc

SEQ ID NO: 273193 - RNA, 19 nt, Homo sapiens
  misc_RNA (1)...(19): siRNA sense strand
gaugaagagccuauugaag

SEQ ID NO: 273194 - RNA, 19 nt, Homo sapiens
  misc_RNA (1)...(19): siRNA sense strand
gaauuaucacccaucauca

SEQ ID NO: 273195 - RNA, 19 nt, Homo sapiens
  misc_RNA (1)...(19): siRNA sense strand
cauauaucauggcuaucuu

SEQ ID NO: 273196 - RNA, 19 nt, Homo sapiens
  misc_RNA (1)...(19): siRNA sense strand
ccaguucaauacaaacaag

SEQ ID NO: 273197 - RNA, 19 nt, Homo sapiens
  misc_RNA (1)...(19): siRNA sense strand
agacuccaauucauauauc

SEQ ID NO: 273198 - RNA, 19 nt, Homo sapiens
  misc_RNA (1)...(19): siRNA sense strand
gaccaucaagcaauacaau

SEQ ID NO: 273199 - RNA, 19 nt, Homo sapiens
  misc_RNA (1)...(19): siRNA sense strand
cacaauaucaccagagcaa

SEQ ID NO: 273200 - RNA, 19 nt, Homo sapiens
  misc_RNA (1)...(19): siRNA sense strand
ugaaauaauggaagagcuu

SEQ ID NO: 273201 - RNA, 19 nt, Homo sapiens
  misc_RNA (1)...(19): siRNA sense strand
caccagagcaagccauaga

SEQ ID NO: 273202 - RNA, 19 nt, Homo sapiens
  misc_RNA (1)...(19): siRNA sense strand
uguagcugcuugucuccua

SEQ ID NO: 273203 - RNA, 19 nt, Homo sapiens
  misc_RNA (1)...(19): siRNA sense strand
guggaauuaucacccauca

SEQ ID NO: 273204 - RNA, 19 nt, Homo sapiens
  misc_RNA (1)...(19): siRNA sense strand
aaaccuuaauacacugcua

SEQ ID NO: 273205 - RNA, 19 nt, Homo sapiens
  misc_RNA (1)...(19): siRNA sense strand
gcucuuccagguuguaaau

SEQ ID NO: 273206 - RNA, 19 nt, Homo sapiens
  misc_RNA (1)...(19): siRNA sense strand
gaagagccuauugaagaug

SEQ ID NO: 273207 - RNA, 19 nt, Homo sapiens
  misc_RNA (1)...(19): siRNA sense strand
gaauuguucucaguuucuc

SEQ ID NO: 273208 - RNA, 19 nt, Homo sapiens
  misc_RNA (1)...(19): siRNA sense strand
gguauacaagacauauuug

SEQ ID NO: 273209 - RNA, 19 nt, Homo sapiens
  misc_RNA (1)...(19): siRNA sense strand
gagcugugguauacaagac

SEQ ID NO: 273210 - RNA, 19 nt, Homo sapiens
  misc_RNA (1)...(19): siRNA sense strand
gauacagaagaacuaaaga

SEQ ID NO: 273211 - RNA, 19 nt, Homo sapiens
  misc_RNA (1)...(19): siRNA sense strand
uauugaagaugaacagacu

SEQ ID NO: 273212 - RNA, 19 nt, Homo sapiens
  misc_RNA (1)...(19): siRNA sense strand
acuaaagagcugugguaua

SEQ ID NO: 273213 - RNA, 19 nt, Homo sapiens
  misc_RNA (1)...(19): siRNA sense strand
gggagaucuugucuuguag

SEQ ID NO: 273214 - RNA, 19 nt, Homo sapiens
  misc_RNA (1)...(19): siRNA sense strand
acaaucaagaucuguauca

SEQ ID NO: 273215 - RNA, 19 nt, Homo sapiens
  misc_RNA (1)...(19): siRNA sense strand
ucacaaucaagaucuguau

SEQ ID NO: 273216 - RNA, 19 nt, Homo sapiens
  misc_RNA (1)...(19): siRNA sense strand
cugcacaucuaucaucaag

SEQ ID NO: 273217 - RNA, 19 nt, Homo sapiens
  misc_RNA (1)...(19): siRNA sense strand
auacagaccaucaagcaau

SEQ ID NO: 273218 - RNA, 19 nt, Homo sapiens
  misc_RNA (1)...(19): siRNA sense strand
ucagaugaagagccuauug

SEQ ID NO: 273219 - RNA, 19 nt, Homo sapiens
  misc_RNA (1)...(19): siRNA sense strand
gacuccaauucauauauca

SEQ ID NO: 273220 - RNA, 19 nt, Homo sapiens
  misc_RNA (1)...(19): siRNA sense strand
guucaauacaaacaaguga

SEQ ID NO: 273221 - RNA, 19 nt, Homo sapiens
  misc_RNA (1)...(19): siRNA sense strand
cuuacaaccugccuuaaaa

SEQ ID NO: 273222 - RNA, 19 nt, Homo sapiens
  misc_RNA (1)...(19): siRNA sense strand
cagcaauguggaauuauca

SEQ ID NO: 273223 - RNA, 19 nt, Homo sapiens
  misc_RNA (1)...(19): siRNA sense strand
cagacuccaauucauauau

SEQ ID NO: 273224 - RNA, 19 nt, Homo sapiens
  misc_RNA (1)...(19): siRNA sense strand
cuuaauacacugcuaugga

SEQ ID NO: 273225 - RNA, 19 nt, Homo sapiens
  misc_RNA (1)...(19): siRNA sense strand
caaaauauagagucccaaa

SEQ ID NO: 273226 - RNA, 19 nt, Homo sapiens
  misc_RNA (1)...(19): siRNA sense strand
gggcaauacagaccaucaa

SEQ ID NO: 273227 - RNA, 19 nt, Homo sapiens
  misc_RNA (1)...(19): siRNA sense strand
gagaucuugucuuguagcu

SEQ ID NO: 273228 - RNA, 19 nt, Homo sapiens
  misc_RNA (1)...(19): siRNA sense strand
gagugaauuguucucaguu

SEQ ID NO: 273229 - RNA, 19 nt, Homo sapiens
  misc_RNA (1)...(19): siRNA sense strand
agaugaagagccuauugaa

SEQ ID NO: 273230 - RNA, 19 nt, Homo sapiens
  misc_RNA (1)...(19): siRNA sense strand
aagaugaacagacuccaau

SEQ ID NO: 273231 - RNA, 19 nt, Homo sapiens
  misc_RNA (1)...(19): siRNA sense strand
gcugugguauacaagacau

SEQ ID NO: 273232 - RNA, 19 nt, Homo sapiens
  misc_RNA (1)...(19): siRNA sense strand
ucauauaucauggcuaucu

SEQ ID NO: 273233 - RNA, 19 nt, Homo sapiens
  misc_RNA (1)...(19): siRNA sense strand
uauaucauggcuaucuuug

SEQ ID NO: 273234 - RNA, 19 nt, Homo sapiens
  misc_RNA (1)...(19): siRNA sense strand
caauacaaacaagugaguu

SEQ ID NO: 273235 - RNA, 19 nt, Homo sapiens
  misc_RNA (1)...(19): siRNA sense strand
ucaauacaaacaagugagu

SEQ ID NO: 273236 - RNA, 19 nt, Homo sapiens
  misc_RNA (1)...(19): siRNA sense strand
gcucuucgccgaccucuuc

SEQ ID NO: 273237 - RNA, 19 nt, Homo sapiens
  misc_RNA (1)...(19): siRNA sense strand
cgagagcgccaucgacuuc

SEQ ID NO: 273238 - RNA, 19 nt, Homo sapiens
  misc_RNA (1)...(19): siRNA sense strand
ggagaugcagcagaaguug

SEQ ID NO: 273239 - RNA, 19 nt, Homo sapiens
  misc_RNA (1)...(19): siRNA sense strand
accaggagaugcagcagaa

SEQ ID NO: 273240 - RNA, 19 nt, Homo sapiens
  misc_RNA (1)...(19): siRNA sense strand
gcgccuacaucgacuccau

SEQ ID NO: 273241 - RNA, 19 nt, Homo sapiens
  misc_RNA (1)...(19): siRNA sense strand
cgacuucagcgccuacauc

SEQ ID NO: 273242 - RNA, 19 nt, Homo sapiens
  misc_RNA (1)...(19): siRNA sense strand
cacagaccguggugagcuu

SEQ ID NO: 273243 - RNA, 19 nt, Homo sapiens
  misc_RNA (1)...(19): siRNA sense strand
guggagcugucggcugaga

SEQ ID NO: 273244 - RNA, 19 nt, Homo sapiens
  misc_RNA (1)...(19): siRNA sense strand
ggaagaagccugagagaga

SEQ ID NO: 273245 - RNA, 19 nt, Homo sapiens
  misc_RNA (1)...(19): siRNA sense strand
gaagaagccugagagagaa

SEQ ID NO: 273246 - RNA, 19 nt, Homo sapiens
  misc_RNA (1)...(19): siRNA sense strand
gccgauagauggaaugaaa

SEQ ID NO: 273247 - RNA, 19 nt, Homo sapiens
  misc_RNA (1)...(19): siRNA sense strand
ggagaagccagaucuguuu

SEQ ID NO: 273248 - RNA, 19 nt, Homo sapiens
  misc_RNA (1)...(19): siRNA sense strand
ggaagaagccaagaaauuc

SEQ ID NO: 273249 - RNA, 19 nt, Homo sapiens
  misc_RNA (1)...(19): siRNA sense strand
gggaagaagccaagaaauu

SEQ ID NO: 273250 - RNA, 19 nt, Homo sapiens
  misc_RNA (1)...(19): siRNA sense strand
gaacugcacugaacuuucc

SEQ ID NO: 273251 - RNA, 19 nt, Homo sapiens
  misc_RNA (1)...(19): siRNA sense strand
gaacuuuccuccgugauca

SEQ ID NO: 273252 - RNA, 19 nt, Homo sapiens
  misc_RNA (1)...(19): siRNA sense strand
agaagaugcuguccagauu

SEQ ID NO: 273253 - RNA, 19 nt, Homo sapiens
  misc_RNA (1)...(19): siRNA sense strand
gaagaugcuguccagauuu

SEQ ID NO: 273254 - RNA, 19 nt, Homo sapiens
  misc_RNA (1)...(19): siRNA sense strand
ccacugaacugcacugaac

SEQ ID NO: 273255 - RNA, 19 nt, Homo sapiens
  misc_RNA (1)...(19): siRNA sense strand
gaaauucuggcaccacuuc

SEQ ID NO: 273256 - RNA, 19 nt, Homo sapiens
  misc_RNA (1)...(19): siRNA sense strand
gagaagaugcuguccagau

SEQ ID NO: 273257 - RNA, 19 nt, Homo sapiens
  misc_RNA (1)...(19): siRNA sense strand
gaaugaaaauggagaaauc

SEQ ID NO: 273258 - RNA, 19 nt, Homo sapiens
  misc_RNA (1)...(19): siRNA sense strand
cagaacaaccuuugcuuug

SEQ ID NO: 273259 - RNA, 19 nt, Homo sapiens
  misc_RNA (1)...(19): siRNA sense strand
gaagacggagcaugaagau

SEQ ID NO: 273260 - RNA, 19 nt, Homo sapiens
  misc_RNA (1)...(19): siRNA sense strand
ugaggaagcugaggagaag

SEQ ID NO: 273261 - RNA, 19 nt, Homo sapiens
  misc_RNA (1)...(19): siRNA sense strand
ucagaacaaccuuugcuuu

SEQ ID NO: 273262 - RNA, 19 nt, Homo sapiens
  misc_RNA (1)...(19): siRNA sense strand
gaaaugcgggucuguucau

SEQ ID NO: 273263 - RNA, 19 nt, Homo sapiens
  misc_RNA (1)...(19): siRNA sense strand
gaagccagaucuguuuguc

SEQ ID NO: 273264 - RNA, 19 nt, Homo sapiens
  misc_RNA (1)...(19): siRNA sense strand
aagaugcuguccagauuug

SEQ ID NO: 273265 - RNA, 19 nt, Homo sapiens
  misc_RNA (1)...(19): siRNA sense strand
ggaaaugcgggucuguuca

SEQ ID NO: 273266 - RNA, 19 nt, Homo sapiens
  misc_RNA (1)...(19): siRNA sense strand
acgaugcacuugccacuga

SEQ ID NO: 273267 - RNA, 19 nt, Homo sapiens
  misc_RNA (1)...(19): siRNA sense strand
caucaaaagccaugaagua

SEQ ID NO: 273268 - RNA, 19 nt, Homo sapiens
  misc_RNA (1)...(19): siRNA sense strand
caaaagccaugaaguacau

SEQ ID NO: 273269 - RNA, 19 nt, Homo sapiens
  misc_RNA (1)...(19): siRNA sense strand
gcgcagcacucccauaccu

SEQ ID NO: 273270 - RNA, 19 nt, Homo sapiens
  misc_RNA (1)...(19): siRNA sense strand
gggaaaugcgggucuguuc

SEQ ID NO: 273271 - RNA, 19 nt, Homo sapiens
  misc_RNA (1)...(19): siRNA sense strand
cccaggaguuucagcuuga

SEQ ID NO: 273272 - RNA, 19 nt, Homo sapiens
  misc_RNA (1)...(19): siRNA sense strand
gacggagcaugaagaugga

SEQ ID NO: 273273 - RNA, 19 nt, Homo sapiens
  misc_RNA (1)...(19): siRNA sense strand
ggccagaggcagagagaga

SEQ ID NO: 273274 - RNA, 19 nt, Homo sapiens
  misc_RNA (1)...(19): siRNA sense strand
agaacaaccuuugcuuugg

SEQ ID NO: 273275 - RNA, 19 nt, Homo sapiens
  misc_RNA (1)...(19): siRNA sense strand
uggcaccacuucauguuca

SEQ ID NO: 273276 - RNA, 19 nt, Homo sapiens
  misc_RNA (1)...(19): siRNA sense strand
gaggagaagccagaucugu

SEQ ID NO: 273277 - RNA, 19 nt, Homo sapiens
  misc_RNA (1)...(19): siRNA sense strand
gagaagccagaucuguuug

SEQ ID NO: 273278 - RNA, 19 nt, Homo sapiens
  misc_RNA (1)...(19): siRNA sense strand
ggucaucuugcccaucaaa

SEQ ID NO: 273279 - RNA, 19 nt, Homo sapiens
  misc_RNA (1)...(19): siRNA sense strand
ugaagacggagcaugaaga

SEQ ID NO: 273280 - RNA, 19 nt, Homo sapiens
  misc_RNA (1)...(19): siRNA sense strand
gcaggacagugcccuucag

SEQ ID NO: 273281 - RNA, 19 nt, Homo sapiens
  misc_RNA (1)...(19): siRNA sense strand
caaccuuugcuuugggaaa

SEQ ID NO: 273282 - RNA, 19 nt, Homo sapiens
  misc_RNA (1)...(19): siRNA sense strand
ccagggacucagauaguga

SEQ ID NO: 273283 - RNA, 19 nt, Homo sapiens
  misc_RNA (1)...(19): siRNA sense strand
cuccugcucucacuguuug

SEQ ID NO: 273284 - RNA, 19 nt, Homo sapiens
  misc_RNA (1)...(19): siRNA sense strand
gcagugccacaccuuguag

SEQ ID NO: 273285 - RNA, 19 nt, Homo sapiens
  misc_RNA (1)...(19): siRNA sense strand
uuuggcagguucuggaaga

SEQ ID NO: 273286 - RNA, 19 nt, Homo sapiens
  misc_RNA (1)...(19): siRNA sense strand
ucgggaagaagccaagaaa

SEQ ID NO: 273287 - RNA, 19 nt, Homo sapiens
  misc_RNA (1)...(19): siRNA sense strand
cccuucagccagacuauaa

SEQ ID NO: 273288 - RNA, 19 nt, Homo sapiens
  misc_RNA (1)...(19): siRNA sense strand
cgaugcacuugccacugaa

SEQ ID NO: 273289 - RNA, 19 nt, Homo sapiens
  misc_RNA (1)...(19): siRNA sense strand
ggugaagacggagcaugaa

SEQ ID NO: 273290 - RNA, 19 nt, Homo sapiens
  misc_RNA (1)...(19): siRNA sense strand
ccagaaagcucaggaauua

SEQ ID NO: 273291 - RNA, 19 nt, Homo sapiens
  misc_RNA (1)...(19): siRNA sense strand
uuaagaaaguggacaaaga

SEQ ID NO: 273292 - RNA, 19 nt, Homo sapiens
  misc_RNA (1)...(19): siRNA sense strand
ugaaggauaucuacaacug

SEQ ID NO: 273293 - RNA, 19 nt, Homo sapiens
  misc_RNA (1)...(19): siRNA sense strand
aaagagaggagucagagua

SEQ ID NO: 273294 - RNA, 19 nt, Homo sapiens
  misc_RNA (1)...(19): siRNA sense strand
gcauagacccagaguauag

SEQ ID NO: 273295 - RNA, 19 nt, Homo sapiens
  misc_RNA (1)...(19): siRNA sense strand
gagaggagucagaguauug

SEQ ID NO: 273296 - RNA, 19 nt, Homo sapiens
  misc_RNA (1)...(19): siRNA sense strand
gugcauagacccagaguau

SEQ ID NO: 273297 - RNA, 19 nt, Homo sapiens
  misc_RNA (1)...(19): siRNA sense strand
ugaauaacaucaccaaucg

SEQ ID NO: 273298 - RNA, 19 nt, Homo sapiens
  misc_RNA (1)...(19): siRNA sense strand
gggauccgguccuguuuga

SEQ ID NO: 273299 - RNA, 19 nt, Homo sapiens
  misc_RNA (1)...(19): siRNA sense strand
agaaggagcccaaggauuc

SEQ ID NO: 273300 - RNA, 19 nt, Homo sapiens
  misc_RNA (1)...(19): siRNA sense strand
ucagcugccucauauuuau

SEQ ID NO: 273301 - RNA, 19 nt, Homo sapiens
  misc_RNA (1)...(19): siRNA sense strand
cgacgaccacuaugaguuu

SEQ ID NO: 273302 - RNA, 19 nt, Homo sapiens
  misc_RNA (1)...(19): siRNA sense strand
ccaagcgccugccagugaa

SEQ ID NO: 273303 - RNA, 19 nt, Homo sapiens
  misc_RNA (1)...(19): siRNA sense strand
ugacagcggccaugaggaa

SEQ ID NO: 273304 - RNA, 19 nt, Homo sapiens
  misc_RNA (1)...(19): siRNA sense strand
ucagugagacacaauuuau

SEQ ID NO: 273305 - RNA, 19 nt, Homo sapiens
  misc_RNA (1)...(19): siRNA sense strand
gacccagaguauagacaaa

SEQ ID NO: 273306 - RNA, 19 nt, Homo sapiens
  misc_RNA (1)...(19): siRNA sense strand
gagcgaugaugaggagaug

SEQ ID NO: 273307 - RNA, 19 nt, Homo sapiens
  misc_RNA (1)...(19): siRNA sense strand
gccagaaagcucaggaauu

SEQ ID NO: 273308 - RNA, 19 nt, Homo sapiens
  misc_RNA (1)...(19): siRNA sense strand
ggaagcacagccagaagga

SEQ ID NO: 273309 - RNA, 19 nt, Homo sapiens
  misc_RNA (1)...(19): siRNA sense strand
gauccgguccuguuugaau

SEQ ID NO: 273310 - RNA, 19 nt, Homo sapiens
  misc_RNA (1)...(19): siRNA sense strand
cuucagcugccucauauuu

SEQ ID NO: 273311 - RNA, 19 nt, Homo sapiens
  misc_RNA (1)...(19): siRNA sense strand
agaacuugcugaagagcuu

SEQ ID NO: 273312 - RNA, 19 nt, Homo sapiens
  misc_RNA (1)...(19): siRNA sense strand
gcagaaagagcaaaaggaa

SEQ ID NO: 273313 - RNA, 19 nt, Homo sapiens
  misc_RNA (1)...(19): siRNA sense strand
acaacuggaucuuggaaca

SEQ ID NO: 273314 - RNA, 19 nt, Homo sapiens
  misc_RNA (1)...(19): siRNA sense strand
uaagaaaguggacaaagag

SEQ ID NO: 273315 - RNA, 19 nt, Homo sapiens
  misc_RNA (1)...(19): siRNA sense strand
acaagaagcgccagcacuu

SEQ ID NO: 273316 - RNA, 19 nt, Homo sapiens
  misc_RNA (1)...(19): siRNA sense strand
ggaugcggacugagaguga

SEQ ID NO: 273317 - RNA, 19 nt, Homo sapiens
  misc_RNA (1)...(19): siRNA sense strand
gcgaugaugaggagaugaa

SEQ ID NO: 273318 - RNA, 19 nt, Homo sapiens
  misc_RNA (1)...(19): siRNA sense strand
ccagucaugccucccagua

SEQ ID NO: 273319 - RNA, 19 nt, Homo sapiens
  misc_RNA (1)...(19): siRNA sense strand
agacgaugaccucgacuuu

SEQ ID NO: 273320 - RNA, 19 nt, Homo sapiens
  misc_RNA (1)...(19): siRNA sense strand
gaaagcucaggaauuagug

SEQ ID NO: 273321 - RNA, 19 nt, Homo sapiens
  misc_RNA (1)...(19): siRNA sense strand
gcaaaaggaaaccacaaaa

SEQ ID NO: 273322 - RNA, 19 nt, Homo sapiens
  misc_RNA (1)...(19): siRNA sense strand
gaacauuuuccguauuuug

SEQ ID NO: 273323 - RNA, 19 nt, Homo sapiens
  misc_RNA (1)...(19): siRNA sense strand
cagaaggagcccaaggauu

SEQ ID NO: 273324 - RNA, 19 nt, Homo sapiens
  misc_RNA (1)...(19): siRNA sense strand
cggaagaggacgacaggaa

SEQ ID NO: 273325 - RNA, 19 nt, Homo sapiens
  misc_RNA (1)...(19): siRNA sense strand
acuaugaguuugccaccaa

SEQ ID NO: 273326 - RNA, 19 nt, Homo sapiens
  misc_RNA (1)...(19): siRNA sense strand
gagagugagccaucuugug

SEQ ID NO: 273327 - RNA, 19 nt, Homo sapiens
  misc_RNA (1)...(19): siRNA sense strand
gacaaagagaggagucaga

SEQ ID NO: 273328 - RNA, 19 nt, Homo sapiens
  misc_RNA (1)...(19): siRNA sense strand
agagaggagucagaguauu

SEQ ID NO: 273329 - RNA, 19 nt, Homo sapiens
  misc_RNA (1)...(19): siRNA sense strand
ucaccaaucggacggcaaa

SEQ ID NO: 273330 - RNA, 19 nt, Homo sapiens
  misc_RNA (1)...(19): siRNA sense strand
gccagugccaugaugcuuu

SEQ ID NO: 273331 - RNA, 19 nt, Homo sapiens
  misc_RNA (1)...(19): siRNA sense strand
gaacuugcugaagagcuuu

SEQ ID NO: 273332 - RNA, 19 nt, Homo sapiens
  misc_RNA (1)...(19): siRNA sense strand
agaaagcucaggaauuagu

SEQ ID NO: 273333 - RNA, 19 nt, Homo sapiens
  misc_RNA (1)...(19): siRNA sense strand
ccaguaagaagccagaaag

SEQ ID NO: 273334 - RNA, 19 nt, Homo sapiens
  misc_RNA (1)...(19): siRNA sense strand
ccucaggcauaucaaagca

SEQ ID NO: 273335 - RNA, 19 nt, Homo sapiens
  misc_RNA (1)...(19): siRNA sense strand
gacgaccacuaugaguuug

SEQ ID NO: 273336 - RNA, 19 nt, Homo sapiens
  misc_RNA (1)...(19): siRNA sense strand
gggcaguaccuucuucaag

SEQ ID NO: 273337 - RNA, 19 nt, Homo sapiens
  misc_RNA (1)...(19): siRNA sense strand
gagucagaguauugggaaa

SEQ ID NO: 273338 - RNA, 19 nt, Homo sapiens
  misc_RNA (1)...(19): siRNA sense strand
gccaugaugcuuuugaaua

SEQ ID NO: 273339 - RNA, 19 nt, Homo sapiens
  misc_RNA (1)...(19): siRNA sense strand
cacccacacguguucaaua

SEQ ID NO: 273340 - RNA, 19 nt, Homo sapiens
  misc_RNA (1)...(19): siRNA sense strand
augaagagcugaccaaccu

SEQ ID NO: 273341 - RNA, 19 nt, Homo sapiens
  misc_RNA (1)...(19): siRNA sense strand
gaugaggagaugaaagaag

SEQ ID NO: 273342 - RNA, 19 nt, Homo sapiens
  misc_RNA (1)...(19): siRNA sense strand
gccagaaggagcccaagga

SEQ ID NO: 273343 - RNA, 19 nt, Homo sapiens
  misc_RNA (1)...(19): siRNA sense strand
cagccgacgaccacuauga

SEQ ID NO: 273344 - RNA, 19 nt, Homo sapiens
  misc_RNA (1)...(19): siRNA sense strand
uccuucagcugccucauau

SEQ ID NO: 273345 - RNA, 19 nt, Homo sapiens
  misc_RNA (1)...(19): siRNA sense strand
acucugacaugcccuacga

SEQ ID NO: 273346 - RNA, 19 nt, Homo sapiens
  misc_RNA (1)...(19): siRNA sense strand
cagugaaggauaucuacaa

SEQ ID NO: 273347 - RNA, 19 nt, Homo sapiens
  misc_RNA (1)...(19): siRNA sense strand
agucaugccucccaguaag

SEQ ID NO: 273348 - RNA, 19 nt, Homo sapiens
  misc_RNA (1)...(19): siRNA sense strand
ccagugccaugaugcuuuu

SEQ ID NO: 273349 - RNA, 19 nt, Homo sapiens
  misc_RNA (1)...(19): siRNA sense strand
aacuggaucuuggaacauu

SEQ ID NO: 273350 - RNA, 19 nt, Homo sapiens
  misc_RNA (1)...(19): siRNA sense strand
accaagcgccugccaguga

SEQ ID NO: 273351 - RNA, 19 nt, Homo sapiens
  misc_RNA (1)...(19): siRNA sense strand
uugaauaacaucaccaauc

SEQ ID NO: 273352 - RNA, 19 nt, Homo sapiens
  misc_RNA (1)...(19): siRNA sense strand
auccgguccuguuugaaua

SEQ ID NO: 273353 - RNA, 19 nt, Homo sapiens
  misc_RNA (1)...(19): siRNA sense strand
gaaggagcccaaggauucu

SEQ ID NO: 273354 - RNA, 19 nt, Homo sapiens
  misc_RNA (1)...(19): siRNA sense strand
gcagugccaaguccuccaa

SEQ ID NO: 273355 - RNA, 19 nt, Homo sapiens
  misc_RNA (1)...(19): siRNA sense strand
gagcugaccaaccugaacu

SEQ ID NO: 273356 - RNA, 19 nt, Homo sapiens
  misc_RNA (1)...(19): siRNA sense strand
ugacauccgauuagaagag

SEQ ID NO: 273357 - RNA, 19 nt, Homo sapiens
  misc_RNA (1)...(19): siRNA sense strand
guacgcaucccagcacaag

SEQ ID NO: 273358 - RNA, 19 nt, Homo sapiens
  misc_RNA (1)...(19): siRNA sense strand
ccagaaggagcccaaggau

SEQ ID NO: 273359 - RNA, 19 nt, Homo sapiens
  misc_RNA (1)...(19): siRNA sense strand
aagagaggagucagaguau

SEQ ID NO: 273360 - RNA, 19 nt, Homo sapiens
  misc_RNA (1)...(19): siRNA sense strand
acaggaagcacagccagaa

SEQ ID NO: 273361 - RNA, 19 nt, Homo sapiens
  misc_RNA (1)...(19): siRNA sense strand
cuacaacuggaucuuggaa

SEQ ID NO: 273362 - RNA, 19 nt, Homo sapiens
  misc_RNA (1)...(19): siRNA sense strand
acgcaucccagcacaagaa

SEQ ID NO: 273363 - RNA, 19 nt, Homo sapiens
  misc_RNA (1)...(19): siRNA sense strand
ccugacauccgauuagaag

SEQ ID NO: 273364 - RNA, 19 nt, Homo sapiens
  misc_RNA (1)...(19): siRNA sense strand
agugagacacaauuuauca

SEQ ID NO: 273365 - RNA, 19 nt, Homo sapiens
  misc_RNA (1)...(19): siRNA sense strand
gcauuacuaucccuggaaa

SEQ ID NO: 273366 - RNA, 19 nt, Homo sapiens
  misc_RNA (1)...(19): siRNA sense strand
guacauccacuccuccuuu

SEQ ID NO: 273367 - RNA, 19 nt, Homo sapiens
  misc_RNA (1)...(19): siRNA sense strand
gcaugcccgugaaauuuga

SEQ ID NO: 273368 - RNA, 19 nt, Homo sapiens
  misc_RNA (1)...(19): siRNA sense strand
cuacuuugcuuaccaugug

SEQ ID NO: 273369 - RNA, 19 nt, Homo sapiens
  misc_RNA (1)...(19): siRNA sense strand
ggguggcccuguacaagaa

SEQ ID NO: 273370 - RNA, 19 nt, Homo sapiens
  misc_RNA (1)...(19): siRNA sense strand
ugaccggacucucuacaau

SEQ ID NO: 273371 - RNA, 19 nt, Homo sapiens
  misc_RNA (1)...(19): siRNA sense strand
ccaccuauaccuacgauga

SEQ ID NO: 273372 - RNA, 19 nt, Homo sapiens
  misc_RNA (1)...(19): siRNA sense strand
ggguccagcuggcccuauu

SEQ ID NO: 273373 - RNA, 19 nt, Homo sapiens
  misc_RNA (1)...(19): siRNA sense strand
ggcaugcccgugaaauuug

SEQ ID NO: 273374 - RNA, 19 nt, Homo sapiens
  misc_RNA (1)...(19): siRNA sense strand
gaccggacucucuacaaug

SEQ ID NO: 273375 - RNA, 19 nt, Homo sapiens
  misc_RNA (1)...(19): siRNA sense strand
ccaagggugagccggguuu

SEQ ID NO: 273376 - RNA, 19 nt, Homo sapiens
  misc_RNA (1)...(19): siRNA sense strand
cuacuacuuugcuuaccau

SEQ ID NO: 273377 - RNA, 19 nt, Homo sapiens
  misc_RNA (1)...(19): siRNA sense strand
caggagcugugggcccaaa

SEQ ID NO: 273378 - RNA, 19 nt, Homo sapiens
  misc_RNA (1)...(19): siRNA sense strand
gaaaaccaggcaugggaaa

SEQ ID NO: 273379 - RNA, 19 nt, Homo sapiens
  misc_RNA (1)...(19): siRNA sense strand
ccagcuggcuuaggcaaac

SEQ ID NO: 273380 - RNA, 19 nt, Homo sapiens
  misc_RNA (1)...(19): siRNA sense strand
gggaaagccaggacuccau

SEQ ID NO: 273381 - RNA, 19 nt, Homo sapiens
  misc_RNA (1)...(19): siRNA sense strand
ccuacgaugaguacaagaa

SEQ ID NO: 273382 - RNA, 19 nt, Homo sapiens
  misc_RNA (1)...(19): siRNA sense strand
gaacagagauuuacaugag

SEQ ID NO: 273383 - RNA, 19 nt, Homo sapiens
  misc_RNA (1)...(19): siRNA sense strand
ccaaauagauuccgauguu

SEQ ID NO: 273384 - RNA, 19 nt, Homo sapiens
  misc_RNA (1)...(19): siRNA sense strand
gcaagaggcugcugaguag

SEQ ID NO: 273385 - RNA, 19 nt, Homo sapiens
  misc_RNA (1)...(19): siRNA sense strand
aaauggacguuaccaaaua

SEQ ID NO: 273386 - RNA, 19 nt, Homo sapiens
  misc_RNA (1)...(19): siRNA sense strand
gaaacuguccaucucuuua

SEQ ID NO: 273387 - RNA, 19 nt, Homo sapiens
  misc_RNA (1)...(19): siRNA sense strand
ccacaggaaucuggaauuu

SEQ ID NO: 273388 - RNA, 19 nt, Homo sapiens
  misc_RNA (1)...(19): siRNA sense strand
gugaagagccagcaguuua

SEQ ID NO: 273389 - RNA, 19 nt, Homo sapiens
  misc_RNA (1)...(19): siRNA sense strand
gaacaucgcagagcuguau

SEQ ID NO: 273390 - RNA, 19 nt, Homo sapiens
  misc_RNA (1)...(19): siRNA sense strand
gaagcugacuuacaggaau

SEQ ID NO: 273391 - RNA, 19 nt, Homo sapiens
  misc_RNA (1)...(19): siRNA sense strand
ggagagcuguggaccaaug

SEQ ID NO: 273392 - RNA, 19 nt, Homo sapiens
  misc_RNA (1)...(19): siRNA sense strand
gaagugacaauaaagaaga

SEQ ID NO: 273393 - RNA, 19 nt, Homo sapiens
  misc_RNA (1)...(19): siRNA sense strand
gaagaugucuauuuuccua

SEQ ID NO: 273394 - RNA, 19 nt, Homo sapiens
  misc_RNA (1)...(19): siRNA sense strand
gcaacgcucucucuacauc

SEQ ID NO: 273395 - RNA, 19 nt, Homo sapiens
  misc_RNA (1)...(19): siRNA sense strand
caccaacgcuugaauaugg

SEQ ID NO: 273396 - RNA, 19 nt, Homo sapiens
  misc_RNA (1)...(19): siRNA sense strand
uggaagacauugcagauga

SEQ ID NO: 273397 - RNA, 19 nt, Homo sapiens
  misc_RNA (1)...(19): siRNA sense strand
acaggaaucuggaauuuua

SEQ ID NO: 273398 - RNA, 19 nt, Homo sapiens
  misc_RNA (1)...(19): siRNA sense strand
gaccgaagaugucuauuuu

SEQ ID NO: 273399 - RNA, 19 nt, Homo sapiens
  misc_RNA (1)...(19): siRNA sense strand
gccaagagguaccaugguu

SEQ ID NO: 273400 - RNA, 19 nt, Homo sapiens
  misc_RNA (1)...(19): siRNA sense strand
ggacaacgaccacaggaau

SEQ ID NO: 273401 - RNA, 19 nt, Homo sapiens
  misc_RNA (1)...(19): siRNA sense strand
ggaauauugguucugauuu

SEQ ID NO: 273402 - RNA, 19 nt, Homo sapiens
  misc_RNA (1)...(19): siRNA sense strand
ccaaugagagaauuugaaa

SEQ ID NO: 273403 - RNA, 19 nt, Homo sapiens
  misc_RNA (1)...(19): siRNA sense strand
agaauggcguguaaacuga

SEQ ID NO: 273404 - RNA, 19 nt, Homo sapiens
  misc_RNA (1)...(19): siRNA sense strand
cacaagauauaaagacgaa

SEQ ID NO: 273405 - RNA, 19 nt, Homo sapiens
  misc_RNA (1)...(19): siRNA sense strand
ggacguuaccaaauagauu

SEQ ID NO: 273406 - RNA, 19 nt, Homo sapiens
  misc_RNA (1)...(19): siRNA sense strand
gauauuaaaccuagcaaca

SEQ ID NO: 273407 - RNA, 19 nt, Homo sapiens
  misc_RNA (1)...(19): siRNA sense strand
ugacaaagcauguucucaa

SEQ ID NO: 273408 - RNA, 19 nt, Homo sapiens
  misc_RNA (1)...(19): siRNA sense strand
gacaaagcauguucucaag

SEQ ID NO: 273409 - RNA, 19 nt, Homo sapiens
  misc_RNA (1)...(19): siRNA sense strand
aagcuucccuggagagaaa

SEQ ID NO: 273410 - RNA, 19 nt, Homo sapiens
  misc_RNA (1)...(19): siRNA sense strand
guacauaauccacaagcaa

SEQ ID NO: 273411 - RNA, 19 nt, Homo sapiens
  misc_RNA (1)...(19): siRNA sense strand
gaugagagagcugauagaa

SEQ ID NO: 273412 - RNA, 19 nt, Homo sapiens
  misc_RNA (1)...(19): siRNA sense strand
caaauagauuccgauguuc

SEQ ID NO: 273413 - RNA, 19 nt, Homo sapiens
  misc_RNA (1)...(19): siRNA sense strand
gaccaccaacgcuugaaua

SEQ ID NO: 273414 - RNA, 19 nt, Homo sapiens
  misc_RNA (1)...(19): siRNA sense strand
ccuccuaccuguacauaau

SEQ ID NO: 273415 - RNA, 19 nt, Homo sapiens
  misc_RNA (1)...(19): siRNA sense strand
ggaacagagauuuacauga

SEQ ID NO: 273416 - RNA, 19 nt, Homo sapiens
  misc_RNA (1)...(19): siRNA sense strand
aagcugacuuacaggaaua

SEQ ID NO: 273417 - RNA, 19 nt, Homo sapiens
  misc_RNA (1)...(19): siRNA sense strand
caagauauaaagacgaaga

SEQ ID NO: 273418 - RNA, 19 nt, Homo sapiens
  misc_RNA (1)...(19): siRNA sense strand
ugaccgaagaugucuauuu

SEQ ID NO: 273419 - RNA, 19 nt, Homo sapiens
  misc_RNA (1)...(19): siRNA sense strand
acaggaauauugguucuga

SEQ ID NO: 273420 - RNA, 19 nt, Homo sapiens
  misc_RNA (1)...(19): siRNA sense strand
ggucaucacuccccaaaau

SEQ ID NO: 273421 - RNA, 19 nt, Homo sapiens
  misc_RNA (1)...(19): siRNA sense strand
ggccuaaguguucaaauga

SEQ ID NO: 273422 - RNA, 19 nt, Homo sapiens
  misc_RNA (1)...(19): siRNA sense strand
gaacuuccugagaacauug

SEQ ID NO: 273423 - RNA, 19 nt, Homo sapiens
  misc_RNA (1)...(19): siRNA sense strand
uggaggauuugcuugcuuu

SEQ ID NO: 273424 - RNA, 19 nt, Homo sapiens
  misc_RNA (1)...(19): siRNA sense strand
cccaagagccgcagaccua

SEQ ID NO: 273425 - RNA, 19 nt, Homo sapiens
  misc_RNA (1)...(19): siRNA sense strand
uaugaacccagucuaauga

SEQ ID NO: 273426 - RNA, 19 nt, Homo sapiens
  misc_RNA (1)...(19): siRNA sense strand
cccaguagaucaauuuaag

SEQ ID NO: 273427 - RNA, 19 nt, Homo sapiens
  misc_RNA (1)...(19): siRNA sense strand
agaaaagaauggcguguaa

SEQ ID NO: 273428 - RNA, 19 nt, Homo sapiens
  misc_RNA (1)...(19): siRNA sense strand
gcuggcuacuucaaucuug

SEQ ID NO: 273429 - RNA, 19 nt, Homo sapiens
  misc_RNA (1)...(19): siRNA sense strand
cgcaagaggcugcugagua

SEQ ID NO: 273430 - RNA, 19 nt, Homo sapiens
  misc_RNA (1)...(19): siRNA sense strand
caaccaaagcagacaucua

SEQ ID NO: 273431 - RNA, 19 nt, Homo sapiens
  misc_RNA (1)...(19): siRNA sense strand
ggaagugacaauaaagaag

SEQ ID NO: 273432 - RNA, 19 nt, Homo sapiens
  misc_RNA (1)...(19): siRNA sense strand
cugagaacauugcugauuc

SEQ ID NO: 273433 - RNA, 19 nt, Homo sapiens
  misc_RNA (1)...(19): siRNA sense strand
uggccuaaguguucaaaug

SEQ ID NO: 273434 - RNA, 19 nt, Homo sapiens
  misc_RNA (1)...(19): siRNA sense strand
ggaagcugacuuacaggaa

SEQ ID NO: 273435 - RNA, 19 nt, Homo sapiens
  misc_RNA (1)...(19): siRNA sense strand
ccuggaagcugacuuacag

SEQ ID NO: 273436 - RNA, 19 nt, Homo sapiens
  misc_RNA (1)...(19): siRNA sense strand
caaaauggacguuaccaaa

SEQ ID NO: 273437 - RNA, 19 nt, Homo sapiens
  misc_RNA (1)...(19): siRNA sense strand
gugaaacuguccaucucuu

SEQ ID NO: 273438 - RNA, 19 nt, Homo sapiens
  misc_RNA (1)...(19): siRNA sense strand
ggaccaaugagagaauuug

SEQ ID NO: 273439 - RNA, 19 nt, Homo sapiens
  misc_RNA (1)...(19): siRNA sense strand
gaagcaccgaggaaucuga

SEQ ID NO: 273440 - RNA, 19 nt, Homo sapiens
  misc_RNA (1)...(19): siRNA sense strand
ggaagacauugcagaugac

SEQ ID NO: 273441 - RNA, 19 nt, Homo sapiens
  misc_RNA (1)...(19): siRNA sense strand
ucaaaugaccgaagauguc

SEQ ID NO: 273442 - RNA, 19 nt, Homo sapiens
  misc_RNA (1)...(19): siRNA sense strand
ugaagagccagcaguuuau

SEQ ID NO: 273443 - RNA, 19 nt, Homo sapiens
  misc_RNA (1)...(19): siRNA sense strand
gggccacgcucauccacau

SEQ ID NO: 273444 - RNA, 19 nt, Homo sapiens
  misc_RNA (1)...(19): siRNA sense strand
gaagagccagcaguuuaug

SEQ ID NO: 273445 - RNA, 19 nt, Homo sapiens
  misc_RNA (1)...(19): siRNA sense strand
caagagguaccaugguugu

SEQ ID NO: 273446 - RNA, 19 nt, Homo sapiens
  misc_RNA (1)...(19): siRNA sense strand
aggcaacgcucucucuaca

SEQ ID NO: 273447 - RNA, 19 nt, Homo sapiens
  misc_RNA (1)...(19): siRNA sense strand
ucuggacucugcccucuug

SEQ ID NO: 273448 - RNA, 19 nt, Homo sapiens
  misc_RNA (1)...(19): siRNA sense strand
ugaaacuguccaucucuuu

SEQ ID NO: 273449 - RNA, 19 nt, Homo sapiens
  misc_RNA (1)...(19): siRNA sense strand
ccaacacugcaaagcauuu

SEQ ID NO: 273450 - RNA, 19 nt, Homo sapiens
  misc_RNA (1)...(19): siRNA sense strand
gaaaaucuuuaugcaagug

SEQ ID NO: 273451 - RNA, 19 nt, Homo sapiens
  misc_RNA (1)...(19): siRNA sense strand
guuuaugaacccagucuaa

SEQ ID NO: 273452 - RNA, 19 nt, Homo sapiens
  misc_RNA (1)...(19): siRNA sense strand
aaacuguccaucucuuuau

SEQ ID NO: 273453 - RNA, 19 nt, Homo sapiens
  misc_RNA (1)...(19): siRNA sense strand
gacguuaccaaauagauuc

SEQ ID NO: 273454 - RNA, 19 nt, Homo sapiens
  misc_RNA (1)...(19): siRNA sense strand
gaccaaugagagaauuuga

SEQ ID NO: 273455 - RNA, 19 nt, Homo sapiens
  misc_RNA (1)...(19): siRNA sense strand
gggugaaacuguccaucuc

SEQ ID NO: 273456 - RNA, 19 nt, Homo sapiens
  misc_RNA (1)...(19): siRNA sense strand
cuggagagcuguggaccaa

SEQ ID NO: 273457 - RNA, 19 nt, Homo sapiens
  misc_RNA (1)...(19): siRNA sense strand
gcaaaccauauauccaaca

SEQ ID NO: 273458 - RNA, 19 nt, Homo sapiens
  misc_RNA (1)...(19): siRNA sense strand
uaccaugguugucaucagu

SEQ ID NO: 273459 - RNA, 19 nt, Homo sapiens
  misc_RNA (1)...(19): siRNA sense strand
aagaauggcguguaaacug

SEQ ID NO: 273460 - RNA, 19 nt, Homo sapiens
  misc_RNA (1)...(19): siRNA sense strand
auggaacuguggaggauuu

SEQ ID NO: 273461 - RNA, 19 nt, Homo sapiens
  misc_RNA (1)...(19): siRNA sense strand
guacaugagcacuggaagu

SEQ ID NO: 273462 - RNA, 19 nt, Homo sapiens
  misc_RNA (1)...(19): siRNA sense strand
gagguaccaugguugucau

SEQ ID NO: 273463 - RNA, 19 nt, Homo sapiens
  misc_RNA (1)...(19): siRNA sense strand
gggaugagagagcugauag

SEQ ID NO: 273464 - RNA, 19 nt, Homo sapiens
  misc_RNA (1)...(19): siRNA sense strand
gcuuaguggccaagaggua

SEQ ID NO: 273465 - RNA, 19 nt, Homo sapiens
  misc_RNA (1)...(19): siRNA sense strand
ugacuuacaggaauauugg

SEQ ID NO: 273466 - RNA, 19 nt, Homo sapiens
  misc_RNA (1)...(19): siRNA sense strand
gaggaacagagauuuacau

SEQ ID NO: 273467 - RNA, 19 nt, Homo sapiens
  misc_RNA (1)...(19): siRNA sense strand
guguucaaaugaccgaaga

SEQ ID NO: 273468 - RNA, 19 nt, Homo sapiens
  misc_RNA (1)...(19): siRNA sense strand
gagcuguggaccaaugaga

SEQ ID NO: 273469 - RNA, 19 nt, Homo sapiens
  misc_RNA (1)...(19): siRNA sense strand
guggaccaaugagagaauu

SEQ ID NO: 273470 - RNA, 19 nt, Homo sapiens
  misc_RNA (1)...(19): siRNA sense strand
ggaaaaucuuuaugcaagu

SEQ ID NO: 273471 - RNA, 19 nt, Homo sapiens
  misc_RNA (1)...(19): siRNA sense strand
uuacaggaauauugguucu

SEQ ID NO: 273472 - RNA, 19 nt, Homo sapiens
  misc_RNA (1)...(19): siRNA sense strand
ggaccaccaacgcuugaau

SEQ ID NO: 273473 - RNA, 19 nt, Homo sapiens
  misc_RNA (1)...(19): siRNA sense strand
guggaggauuugcuugcuu

SEQ ID NO: 273474 - RNA, 19 nt, Homo sapiens
  misc_RNA (1)...(19): siRNA sense strand
ccugagaacauugcugauu

SEQ ID NO: 273475 - RNA, 19 nt, Homo sapiens
  misc_RNA (1)...(19): siRNA sense strand
cgaugagcguucuaagucu

SEQ ID NO: 273476 - RNA, 19 nt, Homo sapiens
  misc_RNA (1)...(19): siRNA sense strand
caaaccauauauccaacac

SEQ ID NO: 273477 - RNA, 19 nt, Homo sapiens
  misc_RNA (1)...(19): siRNA sense strand
aaccaaagcagacaucuac

SEQ ID NO: 273478 - RNA, 19 nt, Homo sapiens
  misc_RNA (1)...(19): siRNA sense strand
guugucaucagucagauau

SEQ ID NO: 273479 - RNA, 19 nt, Homo sapiens
  misc_RNA (1)...(19): siRNA sense strand
gaagcuucccuggagagaa

SEQ ID NO: 273480 - RNA, 19 nt, Homo sapiens
  misc_RNA (1)...(19): siRNA sense strand
ugucaucagucagauaugg

SEQ ID NO: 273481 - RNA, 19 nt, Homo sapiens
  misc_RNA (1)...(19): siRNA sense strand
ccgcagaccuacuaaaaca

SEQ ID NO: 273482 - RNA, 19 nt, Homo sapiens
  misc_RNA (1)...(19): siRNA sense strand
cacacucuguuccacaaua

SEQ ID NO: 273483 - RNA, 19 nt, Homo sapiens
  misc_RNA (1)...(19): siRNA sense strand
cgaguuccgucccuaccaa

SEQ ID NO: 273484 - RNA, 19 nt, Homo sapiens
  misc_RNA (1)...(19): siRNA sense strand
acacucuguuccacaauag

SEQ ID NO: 273485 - RNA, 19 nt, Homo sapiens
  misc_RNA (1)...(19): siRNA sense strand
gaagagcagugguggaaug

SEQ ID NO: 273486 - RNA, 19 nt, Homo sapiens
  misc_RNA (1)...(19): siRNA sense strand
aauaggagaucaagaguuu

SEQ ID NO: 273487 - RNA, 19 nt, Homo sapiens
  misc_RNA (1)...(19): siRNA sense strand
gaaaggagacaucuugaga

SEQ ID NO: 273488 - RNA, 19 nt, Homo sapiens
  misc_RNA (1)...(19): siRNA sense strand
ggagacaucuugagaaucc

SEQ ID NO: 273489 - RNA, 19 nt, Homo sapiens
  misc_RNA (1)...(19): siRNA sense strand
ggacagcgaaggcaagaga

SEQ ID NO: 273490 - RNA, 19 nt, Homo sapiens
  misc_RNA (1)...(19): siRNA sense strand
gcaggguaguggagugauu

SEQ ID NO: 273491 - RNA, 19 nt, Homo sapiens
  misc_RNA (1)...(19): siRNA sense strand
ucccuuacgucgagaagua

SEQ ID NO: 273492 - RNA, 19 nt, Homo sapiens
  misc_RNA (1)...(19): siRNA sense strand
gaauaggagaucaagaguu

SEQ ID NO: 273493 - RNA, 19 nt, Homo sapiens
  misc_RNA (1)...(19): siRNA sense strand
uaaugggaaugaugaggaa

SEQ ID NO: 273494 - RNA, 19 nt, Homo sapiens
  misc_RNA (1)...(19): siRNA sense strand
aaggagacaucuugagaau

SEQ ID NO: 273495 - RNA, 19 nt, Homo sapiens
  misc_RNA (1)...(19): siRNA sense strand
ggaaugaugaggaagaucu

SEQ ID NO: 273496 - RNA, 19 nt, Homo sapiens
  misc_RNA (1)...(19): siRNA sense strand
cgagcccucuuugacuuua

SEQ ID NO: 273497 - RNA, 19 nt, Homo sapiens
  misc_RNA (1)...(19): siRNA sense strand
ggaugauuccagucccuua

SEQ ID NO: 273498 - RNA, 19 nt, Homo sapiens
  misc_RNA (1)...(19): siRNA sense strand
ggcaagagagggaugauuc

SEQ ID NO: 273499 - RNA, 19 nt, Homo sapiens
  misc_RNA (1)...(19): siRNA sense strand
gaaccaguuuccagaucca

SEQ ID NO: 273500 - RNA, 19 nt, Homo sapiens
  misc_RNA (1)...(19): siRNA sense strand
ggacacuacaacguugaua

SEQ ID NO: 273501 - RNA, 19 nt, Homo sapiens
  misc_RNA (1)...(19): siRNA sense strand
gagcccucuuugacuuuaa

SEQ ID NO: 273502 - RNA, 19 nt, Homo sapiens
  misc_RNA (1)...(19): siRNA sense strand
cugcuuuacuggaauucua

SEQ ID NO: 273503 - RNA, 19 nt, Homo sapiens
  misc_RNA (1)...(19): siRNA sense strand
gguaguggagugauucuca

SEQ ID NO: 273504 - RNA, 19 nt, Homo sapiens
  misc_RNA (1)...(19): siRNA sense strand
gaaggcaagagagggauga

SEQ ID NO: 273505 - RNA, 19 nt, Homo sapiens
  misc_RNA (1)...(19): siRNA sense strand
uagaaccaguuuccagauc

SEQ ID NO: 273506 - RNA, 19 nt, Homo sapiens
  misc_RNA (1)...(19): siRNA sense strand
aaaggagacaucuugagaa

SEQ ID NO: 273507 - RNA, 19 nt, Homo sapiens
  misc_RNA (1)...(19): siRNA sense strand
acacuacaacguugauaga

SEQ ID NO: 273508 - RNA, 19 nt, Homo sapiens
  misc_RNA (1)...(19): siRNA sense strand
gcgcgucucccacuacauc

SEQ ID NO: 273509 - RNA, 19 nt, Homo sapiens
  misc_RNA (1)...(19): siRNA sense strand
gaaugaugaggaagaucuu

SEQ ID NO: 273510 - RNA, 19 nt, Homo sapiens
  misc_RNA (1)...(19): siRNA sense strand
ccgaauaggagaucaagag

SEQ ID NO: 273511 - RNA, 19 nt, Homo sapiens
  misc_RNA (1)...(19): siRNA sense strand
ggaggaggcggaguaugug

SEQ ID NO: 273512 - RNA, 19 nt, Homo sapiens
  misc_RNA (1)...(19): siRNA sense strand
gcaggaggaggcggaguau

SEQ ID NO: 273513 - RNA, 19 nt, Homo sapiens
  misc_RNA (1)...(19): siRNA sense strand
gaggacagcgaaggcaaga

SEQ ID NO: 273514 - RNA, 19 nt, Homo sapiens
  misc_RNA (1)...(19): siRNA sense strand
gcgagcccucuuugacuuu

SEQ ID NO: 273515 - RNA, 19 nt, Homo sapiens
  misc_RNA (1)...(19): siRNA sense strand
uugauucauugccugcuuu

SEQ ID NO: 273516 - RNA, 19 nt, Homo sapiens
  misc_RNA (1)...(19): siRNA sense strand
guaugugcgagcccucuuu

SEQ ID NO: 273517 - RNA, 19 nt, Homo sapiens
  misc_RNA (1)...(19): siRNA sense strand
gacacuacaacguugauag

SEQ ID NO: 273518 - RNA, 19 nt, Homo sapiens
  misc_RNA (1)...(19): siRNA sense strand
aggaggaggcggaguaugu

SEQ ID NO: 273519 - RNA, 19 nt, Homo sapiens
  misc_RNA (1)...(19): siRNA sense strand
ugcgagcccucuuugacuu

SEQ ID NO: 273520 - RNA, 19 nt, Homo sapiens
  misc_RNA (1)...(19): siRNA sense strand
ugacuuuaaugggaaugau

SEQ ID NO: 273521 - RNA, 19 nt, Homo sapiens
  misc_RNA (1)...(19): siRNA sense strand
cugaagagcagugguggaa

SEQ ID NO: 273522 - RNA, 19 nt, Homo sapiens
  misc_RNA (1)...(19): siRNA sense strand
cgaauaggagaucaagagu

SEQ ID NO: 273523 - RNA, 19 nt, Homo sapiens
  misc_RNA (1)...(19): siRNA sense strand
gaagagcagugguggaaug

SEQ ID NO: 273524 - RNA, 19 nt, Homo sapiens
  misc_RNA (1)...(19): siRNA sense strand
aauaggagaucaagaguuu

SEQ ID NO: 273525 - RNA, 19 nt, Homo sapiens
  misc_RNA (1)...(19): siRNA sense strand
gaaaggagacaucuugaga

SEQ ID NO: 273526 - RNA, 19 nt, Homo sapiens
  misc_RNA (1)...(19): siRNA sense strand
ggagacaucuugagaaucc

SEQ ID NO: 273527 - RNA, 19 nt, Homo sapiens
  misc_RNA (1)...(19): siRNA sense strand
ggaggucggugagcuggua

SEQ ID NO: 273528 - RNA, 19 nt, Homo sapiens
  misc_RNA (1)...(19): siRNA sense strand
ggacagcgaaggcaagaga

SEQ ID NO: 273529 - RNA, 19 nt, Homo sapiens
  misc_RNA (1)...(19): siRNA sense strand
gcaggguaguggagugauu

SEQ ID NO: 273530 - RNA, 19 nt, Homo sapiens
  misc_RNA (1)...(19): siRNA sense strand
cgaggucacuucccauuca

SEQ ID NO: 273531 - RNA, 19 nt, Homo sapiens
  misc_RNA (1)...(19): siRNA sense strand
ucccuuacgucgagaagua

SEQ ID NO: 273532 - RNA, 19 nt, Homo sapiens
  misc_RNA (1)...(19): siRNA sense strand
gaauaggagaucaagaguu

SEQ ID NO: 273533 - RNA, 19 nt, Homo sapiens
  misc_RNA (1)...(19): siRNA sense strand
uaaugggaaugaugaggaa

SEQ ID NO: 273534 - RNA, 19 nt, Homo sapiens
  misc_RNA (1)...(19): siRNA sense strand
aaggagacaucuugagaau

SEQ ID NO: 273535 - RNA, 19 nt, Homo sapiens
  misc_RNA (1)...(19): siRNA sense strand
ggaaugaugaggaagaucu

SEQ ID NO: 273536 - RNA, 19 nt, Homo sapiens
  misc_RNA (1)...(19): siRNA sense strand
ggugagcugguaaagguua

SEQ ID NO: 273537 - RNA, 19 nt, Homo sapiens
  misc_RNA (1)...(19): siRNA sense strand
cgagcccucuuugacuuua

SEQ ID NO: 273538 - RNA, 19 nt, Homo sapiens
  misc_RNA (1)...(19): siRNA sense strand
ggaugauuccagucccuua

SEQ ID NO: 273539 - RNA, 19 nt, Homo sapiens
  misc_RNA (1)...(19): siRNA sense strand
ggcaagagagggaugauuc

SEQ ID NO: 273540 - RNA, 19 nt, Homo sapiens
  misc_RNA (1)...(19): siRNA sense strand
ucggugagcugguaaaggu

SEQ ID NO: 273541 - RNA, 19 nt, Homo sapiens
  misc_RNA (1)...(19): siRNA sense strand
gaaccaguuuccagaucca

SEQ ID NO: 273542 - RNA, 19 nt, Homo sapiens
  misc_RNA (1)...(19): siRNA sense strand
ggacacuacaacguugaua

SEQ ID NO: 273543 - RNA, 19 nt, Homo sapiens
  misc_RNA (1)...(19): siRNA sense strand
gagcccucuuugacuuuaa

SEQ ID NO: 273544 - RNA, 19 nt, Homo sapiens
  misc_RNA (1)...(19): siRNA sense strand
cugcuuuacuggaauucua

SEQ ID NO: 273545 - RNA, 19 nt, Homo sapiens
  misc_RNA (1)...(19): siRNA sense strand
gguaguggagugauucuca

SEQ ID NO: 273546 - RNA, 19 nt, Homo sapiens
  misc_RNA (1)...(19): siRNA sense strand
gaaggcaagagagggauga

SEQ ID NO: 273547 - RNA, 19 nt, Homo sapiens
  misc_RNA (1)...(19): siRNA sense strand
uagaaccaguuuccagauc

SEQ ID NO: 273548 - RNA, 19 nt, Homo sapiens
  misc_RNA (1)...(19): siRNA sense strand
gaaucccgaugaggacuuc

SEQ ID NO: 273549 - RNA, 19 nt, Homo sapiens
  misc_RNA (1)...(19): siRNA sense strand
aaaggagacaucuugagaa

SEQ ID NO: 273550 - RNA, 19 nt, Homo sapiens
  misc_RNA (1)...(19): siRNA sense strand
guuacgaagauuaauguga

SEQ ID NO: 273551 - RNA, 19 nt, Homo sapiens
  misc_RNA (1)...(19): siRNA sense strand
acacuacaacguugauaga

SEQ ID NO: 273552 - RNA, 19 nt, Homo sapiens
  misc_RNA (1)...(19): siRNA sense strand
gcgcgucucccacuacauc

SEQ ID NO: 273553 - RNA, 19 nt, Homo sapiens
  misc_RNA (1)...(19): siRNA sense strand
gaaugaugaggaagaucuu

SEQ ID NO: 273554 - RNA, 19 nt, Homo sapiens
  misc_RNA (1)...(19): siRNA sense strand
ccgaauaggagaucaagag

SEQ ID NO: 273555 - RNA, 19 nt, Homo sapiens
  misc_RNA (1)...(19): siRNA sense strand
ggaggaggcggaguaugug

SEQ ID NO: 273556 - RNA, 19 nt, Homo sapiens
  misc_RNA (1)...(19): siRNA sense strand
gcaggaggaggcggaguau

SEQ ID NO: 273557 - RNA, 19 nt, Homo sapiens
  misc_RNA (1)...(19): siRNA sense strand
gaggacagcgaaggcaaga

SEQ ID NO: 273558 - RNA, 19 nt, Homo sapiens
  misc_RNA (1)...(19): siRNA sense strand
gcgagcccucuuugacuuu

SEQ ID NO: 273559 - RNA, 19 nt, Homo sapiens
  misc_RNA (1)...(19): siRNA sense strand
guaugugcgagcccucuuu

SEQ ID NO: 273560 - RNA, 19 nt, Homo sapiens
  misc_RNA (1)...(19): siRNA sense strand
uugauucauugccugcuuu

SEQ ID NO: 273561 - RNA, 19 nt, Homo sapiens
  misc_RNA (1)...(19): siRNA sense strand
gacacuacaacguugauag

SEQ ID NO: 273562 - RNA, 19 nt, Homo sapiens
  misc_RNA (1)...(19): siRNA sense strand
aggaggaggcggaguaugu

SEQ ID NO: 273563 - RNA, 19 nt, Homo sapiens
  misc_RNA (1)...(19): siRNA sense strand
ucaacagaaucccgaugag

SEQ ID NO: 273564 - RNA, 19 nt, Homo sapiens
  misc_RNA (1)...(19): siRNA sense strand
ugcgagcccucuuugacuu

SEQ ID NO: 273565 - RNA, 19 nt, Homo sapiens
  misc_RNA (1)...(19): siRNA sense strand
cgaauaggagaucaagagu

SEQ ID NO: 273566 - RNA, 19 nt, Homo sapiens
  misc_RNA (1)...(19): siRNA sense strand
cugaagagcagugguggaa

SEQ ID NO: 273567 - RNA, 19 nt, Homo sapiens
  misc_RNA (1)...(19): siRNA sense strand
ugacuuuaaugggaaugau

SEQ ID NO: 273568 - RNA, 19 nt, Homo sapiens
  misc_RNA (1)...(19): siRNA sense strand
ccgaagaccugcccuuuaa

SEQ ID NO: 273569 - RNA, 19 nt, Homo sapiens
  misc_RNA (1)...(19): siRNA sense strand
gaagauaaccuggaauaug

SEQ ID NO: 273570 - RNA, 19 nt, Homo sapiens
  misc_RNA (1)...(19): siRNA sense strand
aagauaaccuggaauaugu

SEQ ID NO: 273571 - RNA, 19 nt, Homo sapiens
  misc_RNA (1)...(19): siRNA sense strand
cagaagauaaccuggaaua

SEQ ID NO: 273572 - RNA, 19 nt, Homo sapiens
  misc_RNA (1)...(19): siRNA sense strand
gaugauuccugucccuuau

SEQ ID NO: 273573 - RNA, 19 nt, Homo sapiens
  misc_RNA (1)...(19): siRNA sense strand
ccaggaauuugaccauuug

SEQ ID NO: 273574 - RNA, 19 nt, Homo sapiens
  misc_RNA (1)...(19): siRNA sense strand
ggugagauccuagugauaa

SEQ ID NO: 273575 - RNA, 19 nt, Homo sapiens
  misc_RNA (1)...(19): siRNA sense strand
guacggacucuguaugauu

SEQ ID NO: 273576 - RNA, 19 nt, Homo sapiens
  misc_RNA (1)...(19): siRNA sense strand
ggaugauuccugucccuua

SEQ ID NO: 273577 - RNA, 19 nt, Homo sapiens
  misc_RNA (1)...(19): siRNA sense strand
uacggacucuguaugauuu

SEQ ID NO: 273578 - RNA, 19 nt, Homo sapiens
  misc_RNA (1)...(19): siRNA sense strand
gaauauguacggacucugu

SEQ ID NO: 273579 - RNA, 19 nt, Homo sapiens
  misc_RNA (1)...(19): siRNA sense strand
gaaagcauggaaauaggaa

SEQ ID NO: 273580 - RNA, 19 nt, Homo sapiens
  misc_RNA (1)...(19): siRNA sense strand
gaaauaggaauuccaacag

SEQ ID NO: 273581 - RNA, 19 nt, Homo sapiens
  misc_RNA (1)...(19): siRNA sense strand
gaccaggaauuugaccauu

SEQ ID NO: 273582 - RNA, 19 nt, Homo sapiens
  misc_RNA (1)...(19): siRNA sense strand
ggaaagcauggaaauagga

SEQ ID NO: 273583 - RNA, 19 nt, Homo sapiens
  misc_RNA (1)...(19): siRNA sense strand
gccgaagaccugcccuuua

SEQ ID NO: 273584 - RNA, 19 nt, Homo sapiens
  misc_RNA (1)...(19): siRNA sense strand
uaauagagaagccugaaga

SEQ ID NO: 273585 - RNA, 19 nt, Homo sapiens
  misc_RNA (1)...(19): siRNA sense strand
uagagaagccugaagaaca

SEQ ID NO: 273586 - RNA, 19 nt, Homo sapiens
  misc_RNA (1)...(19): siRNA sense strand
aauaggaauuccaacaguu

SEQ ID NO: 273587 - RNA, 19 nt, Homo sapiens
  misc_RNA (1)...(19): siRNA sense strand
gucacaaggaugaauauaa

SEQ ID NO: 273588 - RNA, 19 nt, Homo sapiens
  misc_RNA (1)...(19): siRNA sense strand
gaccacaacuccucuaccu

SEQ ID NO: 273589 - RNA, 19 nt, Homo sapiens
  misc_RNA (1)...(19): siRNA sense strand
aaagucacaaggaugaaua

SEQ ID NO: 273590 - RNA, 19 nt, Homo sapiens
  misc_RNA (1)...(19): siRNA sense strand
aaauaggaauuccaacagu

SEQ ID NO: 273591 - RNA, 19 nt, Homo sapiens
  misc_RNA (1)...(19): siRNA sense strand
gaaagucacaaggaugaau

SEQ ID NO: 273592 - RNA, 19 nt, Homo sapiens
  misc_RNA (1)...(19): siRNA sense strand
ggagugcccggaacaagga

SEQ ID NO: 273593 - RNA, 19 nt, Homo sapiens
  misc_RNA (1)...(19): siRNA sense strand
auaggaauuccaacaguua

SEQ ID NO: 273594 - RNA, 19 nt, Homo sapiens
  misc_RNA (1)...(19): siRNA sense strand
aaagaguacccugugcuua

SEQ ID NO: 273595 - RNA, 19 nt, Homo sapiens
  misc_RNA (1)...(19): siRNA sense strand
gauaauagagaagccugaa

SEQ ID NO: 273596 - RNA, 19 nt, Homo sapiens
  misc_RNA (1)...(19): siRNA sense strand
agagaagccugaagaacag

SEQ ID NO: 273597 - RNA, 19 nt, Homo sapiens
  misc_RNA (1)...(19): siRNA sense strand
gaagaccugcccuuuaaaa

SEQ ID NO: 273598 - RNA, 19 nt, Homo sapiens
  misc_RNA (1)...(19): siRNA sense strand
cagaaccugcucaugcaua

SEQ ID NO: 273599 - RNA, 19 nt, Homo sapiens
  misc_RNA (1)...(19): siRNA sense strand
accaggaauuugaccauuu

SEQ ID NO: 273600 - RNA, 19 nt, Homo sapiens
  misc_RNA (1)...(19): siRNA sense strand
ucgaaaagcuugugagauc

SEQ ID NO: 273601 - RNA, 19 nt, Homo sapiens
  misc_RNA (1)...(19): siRNA sense strand
ggacaccaccacccucauc

SEQ ID NO: 273602 - RNA, 19 nt, Homo sapiens
  misc_RNA (1)...(19): siRNA sense strand
uauccaagcccaccaaugg

SEQ ID NO: 273603 - RNA, 19 nt, Homo sapiens
  misc_RNA (1)...(19): siRNA sense strand
aagaguacccugugcuuau

SEQ ID NO: 273604 - RNA, 19 nt, Homo sapiens
  misc_RNA (1)...(19): siRNA sense strand
gagauccuagugauaauag

SEQ ID NO: 273605 - RNA, 19 nt, Homo sapiens
  misc_RNA (1)...(19): siRNA sense strand
cgaaagcaauccagaaaag

SEQ ID NO: 273606 - RNA, 19 nt, Homo sapiens
  misc_RNA (1)...(19): siRNA sense strand
gugagauccuagugauaau

SEQ ID NO: 273607 - RNA, 19 nt, Homo sapiens
  misc_RNA (1)...(19): siRNA sense strand
gggcagcaaucaccccuuu

SEQ ID NO: 273608 - RNA, 19 nt, Homo sapiens
  misc_RNA (1)...(19): siRNA sense strand
gauccucaccacacggaaa

SEQ ID NO: 273609 - RNA, 19 nt, Homo sapiens
  misc_RNA (1)...(19): siRNA sense strand
caaggaugaauauaaaugg

SEQ ID NO: 273610 - RNA, 19 nt, Homo sapiens
  misc_RNA (1)...(19): siRNA sense strand
agaguacccugugcuuaug

SEQ ID NO: 273611 - RNA, 19 nt, Homo sapiens
  misc_RNA (1)...(19): siRNA sense strand
ugagauccuagugauaaua

SEQ ID NO: 273612 - RNA, 19 nt, Homo sapiens
  misc_RNA (1)...(19): siRNA sense strand
cagaauggaccugucuuug

SEQ ID NO: 273613 - RNA, 19 nt, Homo sapiens
  misc_RNA (1)...(19): siRNA sense strand
cggaaagcauggaaauagg

SEQ ID NO: 273614 - RNA, 19 nt, Homo sapiens
  misc_RNA (1)...(19): siRNA sense strand
ggaauuccaacaguuaugg

SEQ ID NO: 273615 - RNA, 19 nt, Homo sapiens
  misc_RNA (1)...(19): siRNA sense strand
agcagaagauaaccuggaa

SEQ ID NO: 273616 - RNA, 19 nt, Homo sapiens
  misc_RNA (1)...(19): siRNA sense strand
cccagaaccugcucaugca

SEQ ID NO: 273617 - RNA, 19 nt, Homo sapiens
  misc_RNA (1)...(19): siRNA sense strand
ugauuccugucccuuaugu

SEQ ID NO: 273618 - RNA, 19 nt, Homo sapiens
  misc_RNA (1)...(19): siRNA sense strand
cauuagagguuggugacau

SEQ ID NO: 273619 - RNA, 19 nt, Homo sapiens
  misc_RNA (1)...(19): siRNA sense strand
aagcauggaaauaggaauu

SEQ ID NO: 273620 - RNA, 19 nt, Homo sapiens
  misc_RNA (1)...(19): siRNA sense strand
cgaagaccugcccuuuaaa

SEQ ID NO: 273621 - RNA, 19 nt, Homo sapiens
  misc_RNA (1)...(19): siRNA sense strand
acacggaaagcauggaaau

SEQ ID NO: 273622 - RNA, 19 nt, Homo sapiens
  misc_RNA (1)...(19): siRNA sense strand
ggaccaggaauuugaccau

SEQ ID NO: 273623 - RNA, 19 nt, Homo sapiens
  misc_RNA (1)...(19): siRNA sense strand
gggugagauccuagugaua

SEQ ID NO: 273624 - RNA, 19 nt, Homo sapiens
  misc_RNA (1)...(19): siRNA sense strand
gaucggggaccaggaauuu

SEQ ID NO: 273625 - RNA, 19 nt, Homo sapiens
  misc_RNA (1)...(19): siRNA sense strand
ugcgaaagcaauccagaaa

SEQ ID NO: 273626 - RNA, 19 nt, Homo sapiens
  misc_RNA (1)...(19): siRNA sense strand
ccacacggaaagcauggaa

SEQ ID NO: 273627 - RNA, 19 nt, Homo sapiens
  misc_RNA (1)...(19): siRNA sense strand
cacggaaagcauggaaaua

SEQ ID NO: 273628 - RNA, 19 nt, Homo sapiens
  misc_RNA (1)...(19): siRNA sense strand
gcgggucucccacuacauc

SEQ ID NO: 273629 - RNA, 19 nt, Homo sapiens
  misc_RNA (1)...(19): siRNA sense strand
uuggugacaucgugaaagu

SEQ ID NO: 273630 - RNA, 19 nt, Homo sapiens
  misc_RNA (1)...(19): siRNA sense strand
agaaccugcucaugcauac

SEQ ID NO: 273631 - RNA, 19 nt, Homo sapiens
  misc_RNA (1)...(19): siRNA sense strand
gauccuagugauaauagag

SEQ ID NO: 273632 - RNA, 19 nt, Homo sapiens
  misc_RNA (1)...(19): siRNA sense strand
ccagugggaaggcgaagug

SEQ ID NO: 273633 - RNA, 19 nt, Homo sapiens
  misc_RNA (1)...(19): siRNA sense strand
gaaagcaauccagaaaaga

SEQ ID NO: 273634 - RNA, 19 nt, Homo sapiens
  misc_RNA (1)...(19): siRNA sense strand
gcggagaguucuguacuua

SEQ ID NO: 273635 - RNA, 19 nt, Homo sapiens
  misc_RNA (1)...(19): siRNA sense strand
ggauguggguucccucaaa

SEQ ID NO: 273636 - RNA, 19 nt, Homo sapiens
  misc_RNA (1)...(19): siRNA sense strand
gcguuuggguggccuuuga

SEQ ID NO: 273637 - RNA, 19 nt, Homo sapiens
  misc_RNA (1)...(19): siRNA sense strand
ggagaguucuguacuuacg

SEQ ID NO: 273638 - RNA, 19 nt, Homo sapiens
  misc_RNA (1)...(19): siRNA sense strand
gauguggguucccucaaag

SEQ ID NO: 273639 - RNA, 19 nt, Homo sapiens
  misc_RNA (1)...(19): siRNA sense strand
aguuugaccucguugauga

SEQ ID NO: 273640 - RNA, 19 nt, Homo sapiens
  misc_RNA (1)...(19): siRNA sense strand
uuccaaggcugcaaguuug

SEQ ID NO: 273641 - RNA, 19 nt, Homo sapiens
  misc_RNA (1)...(19): siRNA sense strand
cuaccgaggcuaccaguau

SEQ ID NO: 273642 - RNA, 19 nt, Homo sapiens
  misc_RNA (1)...(19): siRNA sense strand
gcaaguuugaccucguuga

SEQ ID NO: 273643 - RNA, 19 nt, Homo sapiens
  misc_RNA (1)...(19): siRNA sense strand
cuuccaaggcugcaaguuu

SEQ ID NO: 273644 - RNA, 19 nt, Homo sapiens
  misc_RNA (1)...(19): siRNA sense strand
ugaccucguugaugacuac

SEQ ID NO: 273645 - RNA, 19 nt, Homo sapiens
  misc_RNA (1)...(19): siRNA sense strand
gaggcuaccaguauguguu

SEQ ID NO: 273646 - RNA, 19 nt, Homo sapiens
  misc_RNA (1)...(19): siRNA sense strand
uaccgaggcuaccaguaug

SEQ ID NO: 273647 - RNA, 19 nt, Homo sapiens
  misc_RNA (1)...(19): siRNA sense strand
gcucugcgcgaaccacaau

SEQ ID NO: 273648 - RNA, 19 nt, Homo sapiens
  misc_RNA (1)...(19): siRNA sense strand
caaguuugaccucguugau

SEQ ID NO: 273649 - RNA, 19 nt, Homo sapiens
  misc_RNA (1)...(19): siRNA sense strand
cugcaaguuugaccucguu

SEQ ID NO: 273650 - RNA, 19 nt, Homo sapiens
  misc_RNA (1)...(19): siRNA sense strand
gcagcagccacaacagcaa

SEQ ID NO: 273651 - RNA, 19 nt, Homo sapiens
  misc_RNA (1)...(19): siRNA sense strand
ccagggacagcaguucauu

SEQ ID NO: 273652 - RNA, 19 nt, Homo sapiens
  misc_RNA (1)...(19): siRNA sense strand
gcggagaguucuguacuua

SEQ ID NO: 273653 - RNA, 19 nt, Homo sapiens
  misc_RNA (1)...(19): siRNA sense strand
ggauguggguucccucaaa

SEQ ID NO: 273654 - RNA, 19 nt, Homo sapiens
  misc_RNA (1)...(19): siRNA sense strand
gcguuuggguggccuuuga

SEQ ID NO: 273655 - RNA, 19 nt, Homo sapiens
  misc_RNA (1)...(19): siRNA sense strand
ggagaguucuguacuuacg

SEQ ID NO: 273656 - RNA, 19 nt, Homo sapiens
  misc_RNA (1)...(19): siRNA sense strand
gauguggguucccucaaag

SEQ ID NO: 273657 - RNA, 19 nt, Homo sapiens
  misc_RNA (1)...(19): siRNA sense strand
aguuugaccucguugauga

SEQ ID NO: 273658 - RNA, 19 nt, Homo sapiens
  misc_RNA (1)...(19): siRNA sense strand
uuccaaggcugcaaguuug

SEQ ID NO: 273659 - RNA, 19 nt, Homo sapiens
  misc_RNA (1)...(19): siRNA sense strand
cuaccgaggcuaccaguau

SEQ ID NO: 273660 - RNA, 19 nt, Homo sapiens
  misc_RNA (1)...(19): siRNA sense strand
gcaaguuugaccucguuga

SEQ ID NO: 273661 - RNA, 19 nt, Homo sapiens
  misc_RNA (1)...(19): siRNA sense strand
cuuccaaggcugcaaguuu

SEQ ID NO: 273662 - RNA, 19 nt, Homo sapiens
  misc_RNA (1)...(19): siRNA sense strand
ugaccucguugaugacuac

SEQ ID NO: 273663 - RNA, 19 nt, Homo sapiens
  misc_RNA (1)...(19): siRNA sense strand
gaggcuaccaguauguguu

SEQ ID NO: 273664 - RNA, 19 nt, Homo sapiens
  misc_RNA (1)...(19): siRNA sense strand
uaccgaggcuaccaguaug

SEQ ID NO: 273665 - RNA, 19 nt, Homo sapiens
  misc_RNA (1)...(19): siRNA sense strand
gcucugcgcgaaccacaau

SEQ ID NO: 273666 - RNA, 19 nt, Homo sapiens
  misc_RNA (1)...(19): siRNA sense strand
caaguuugaccucguugau

SEQ ID NO: 273667 - RNA, 19 nt, Homo sapiens
  misc_RNA (1)...(19): siRNA sense strand
cugcaaguuugaccucguu

SEQ ID NO: 273668 - RNA, 19 nt, Homo sapiens
  misc_RNA (1)...(19): siRNA sense strand
gcagcagccacaacagcaa

SEQ ID NO: 273669 - RNA, 19 nt, Homo sapiens
  misc_RNA (1)...(19): siRNA sense strand
ccagggacagcaguucauu

SEQ ID NO: 273670 - RNA, 19 nt, Homo sapiens
  misc_RNA (1)...(19): siRNA sense strand
gcggagaguucuguacuua

SEQ ID NO: 273671 - RNA, 19 nt, Homo sapiens
  misc_RNA (1)...(19): siRNA sense strand
ggauguggguucccucaaa

SEQ ID NO: 273672 - RNA, 19 nt, Homo sapiens
  misc_RNA (1)...(19): siRNA sense strand
gcguuuggguggccuuuga

SEQ ID NO: 273673 - RNA, 19 nt, Homo sapiens
  misc_RNA (1)...(19): siRNA sense strand
ggagaguucuguacuuacg

SEQ ID NO: 273674 - RNA, 19 nt, Homo sapiens
  misc_RNA (1)...(19): siRNA sense strand
gauguggguucccucaaag

SEQ ID NO: 273675 - RNA, 19 nt, Homo sapiens
  misc_RNA (1)...(19): siRNA sense strand
aguuugaccucguugauga

SEQ ID NO: 273676 - RNA, 19 nt, Homo sapiens
  misc_RNA (1)...(19): siRNA sense strand
uuccaaggcugcaaguuug

SEQ ID NO: 273677 - RNA, 19 nt, Homo sapiens
  misc_RNA (1)...(19): siRNA sense strand
cuaccgaggcuaccaguau

SEQ ID NO: 273678 - RNA, 19 nt, Homo sapiens
  misc_RNA (1)...(19): siRNA sense strand
gcaaguuugaccucguuga

SEQ ID NO: 273679 - RNA, 19 nt, Homo sapiens
  misc_RNA (1)...(19): siRNA sense strand
cuuccaaggcugcaaguuu

SEQ ID NO: 273680 - RNA, 19 nt, Homo sapiens
  misc_RNA (1)...(19): siRNA sense strand
ugaccucguugaugacuac

SEQ ID NO: 273681 - RNA, 19 nt, Homo sapiens
  misc_RNA (1)...(19): siRNA sense strand
gaggcuaccaguauguguu

SEQ ID NO: 273682 - RNA, 19 nt, Homo sapiens
  misc_RNA (1)...(19): siRNA sense strand
uaccgaggcuaccaguaug

SEQ ID NO: 273683 - RNA, 19 nt, Homo sapiens
  misc_RNA (1)...(19): siRNA sense strand
gcucugcgcgaaccacaau

SEQ ID NO: 273684 - RNA, 19 nt, Homo sapiens
  misc_RNA (1)...(19): siRNA sense strand
caaguuugaccucguugau

SEQ ID NO: 273685 - RNA, 19 nt, Homo sapiens
  misc_RNA (1)...(19): siRNA sense strand
cugcaaguuugaccucguu

SEQ ID NO: 273686 - RNA, 19 nt, Homo sapiens
  misc_RNA (1)...(19): siRNA sense strand
gcagcagccacaacagcaa

SEQ ID NO: 273687 - RNA, 19 nt, Homo sapiens
  misc_RNA (1)...(19): siRNA sense strand
ccagggacagcaguucauu

SEQ ID NO: 273688 - RNA, 19 nt, Homo sapiens
  misc_RNA (1)...(19): siRNA sense strand
gaaauucacucccucaaug

SEQ ID NO: 273689 - RNA, 19 nt, Homo sapiens
  misc_RNA (1)...(19): siRNA sense strand
gcagcuggauccucuauga

SEQ ID NO: 273690 - RNA, 19 nt, Homo sapiens
  misc_RNA (1)...(19): siRNA sense strand
gagagcggcugcuggauga

SEQ ID NO: 273691 - RNA, 19 nt, Homo sapiens
  misc_RNA (1)...(19): siRNA sense strand
ucuaugagaugcccaacua

SEQ ID NO: 273692 - RNA, 19 nt, Homo sapiens
  misc_RNA (1)...(19): siRNA sense strand
uacaggagguuucuugauu

SEQ ID NO: 273693 - RNA, 19 nt, Homo sapiens
  misc_RNA (1)...(19): siRNA sense strand
gcugcuggaugaucuauga

SEQ ID NO: 273694 - RNA, 19 nt, Homo sapiens
  misc_RNA (1)...(19): siRNA sense strand
gacgagucauggauuugua

SEQ ID NO: 273695 - RNA, 19 nt, Homo sapiens
  misc_RNA (1)...(19): siRNA sense strand
aaaguuggcucucuuagac

SEQ ID NO: 273696 - RNA, 19 nt, Homo sapiens
  misc_RNA (1)...(19): siRNA sense strand
uuagacgagucauggauuu

SEQ ID NO: 273697 - RNA, 19 nt, Homo sapiens
  misc_RNA (1)...(19): siRNA sense strand
gaaagaucaccuucuacga

SEQ ID NO: 273698 - RNA, 19 nt, Homo sapiens
  misc_RNA (1)...(19): siRNA sense strand
caaaguuggcucucuuaga

SEQ ID NO: 273699 - RNA, 19 nt, Homo sapiens
  misc_RNA (1)...(19): siRNA sense strand
acaggagguuucuugauug

SEQ ID NO: 273700 - RNA, 19 nt, Homo sapiens
  misc_RNA (1)...(19): siRNA sense strand
agucauggauuuguacuga

SEQ ID NO: 273701 - RNA, 19 nt, Homo sapiens
  misc_RNA (1)...(19): siRNA sense strand
gaguacaggagguuucuug

SEQ ID NO: 273702 - RNA, 19 nt, Homo sapiens
  misc_RNA (1)...(19): siRNA sense strand
caaccuacaacccuauuuc

SEQ ID NO: 273703 - RNA, 19 nt, Homo sapiens
  misc_RNA (1)...(19): siRNA sense strand
gcuggauccucuaugagau

SEQ ID NO: 273704 - RNA, 19 nt, Homo sapiens
  misc_RNA (1)...(19): siRNA sense strand
cuacgacagagaugaauug

SEQ ID NO: 273705 - RNA, 19 nt, Homo sapiens
  misc_RNA (1)...(19): siRNA sense strand
guacaggagguuucuugau

SEQ ID NO: 273706 - RNA, 19 nt, Homo sapiens
  misc_RNA (1)...(19): siRNA sense strand
gcuuccaccucacugaaau

SEQ ID NO: 273707 - RNA, 19 nt, Homo sapiens
  misc_RNA (1)...(19): siRNA sense strand
cuuacagaaugaagaucua

SEQ ID NO: 273708 - RNA, 19 nt, Homo sapiens
  misc_RNA (1)...(19): siRNA sense strand
gaauugaggggacaaaugu

SEQ ID NO: 273709 - RNA, 19 nt, Homo sapiens
  misc_RNA (1)...(19): siRNA sense strand
caggagguuucuugauugg

SEQ ID NO: 273710 - RNA, 19 nt, Homo sapiens
  misc_RNA (1)...(19): siRNA sense strand
gcgcuuacagaaugaagau

SEQ ID NO: 273711 - RNA, 19 nt, Homo sapiens
  misc_RNA (1)...(19): siRNA sense strand
gcuccaaaugccaaaguug

SEQ ID NO: 273712 - RNA, 19 nt, Homo sapiens
  misc_RNA (1)...(19): siRNA sense strand
gcuacgaaugcaccacuga

SEQ ID NO: 273713 - RNA, 19 nt, Homo sapiens
  misc_RNA (1)...(19): siRNA sense strand
gggcagcuggauccucuau

SEQ ID NO: 273714 - RNA, 19 nt, Homo sapiens
  misc_RNA (1)...(19): siRNA sense strand
ggcuccaaaugccaaaguu

SEQ ID NO: 273715 - RNA, 19 nt, Homo sapiens
  misc_RNA (1)...(19): siRNA sense strand
ggagagcucugacguuuga

SEQ ID NO: 273716 - RNA, 19 nt, Homo sapiens
  misc_RNA (1)...(19): siRNA sense strand
caacaacgcuaccuuccaa

SEQ ID NO: 273717 - RNA, 19 nt, Homo sapiens
  misc_RNA (1)...(19): siRNA sense strand
gaagguggcugugaagaug

SEQ ID NO: 273718 - RNA, 19 nt, Homo sapiens
  misc_RNA (1)...(19): siRNA sense strand
ccacgcagcugccuuacaa

SEQ ID NO: 273719 - RNA, 19 nt, Homo sapiens
  misc_RNA (1)...(19): siRNA sense strand
gcuaugagggcaacaguua

SEQ ID NO: 273720 - RNA, 19 nt, Homo sapiens
  misc_RNA (1)...(19): siRNA sense strand
ggaacaaccugcaguuugg

SEQ ID NO: 273721 - RNA, 19 nt, Homo sapiens
  misc_RNA (1)...(19): siRNA sense strand
ucaaguagauuuccaacau

SEQ ID NO: 273722 - RNA, 19 nt, Homo sapiens
  misc_RNA (1)...(19): siRNA sense strand
ccucggagcuggagccuuu

SEQ ID NO: 273723 - RNA, 19 nt, Homo sapiens
  misc_RNA (1)...(19): siRNA sense strand
ggagagagcgggacuauac

SEQ ID NO: 273724 - RNA, 19 nt, Homo sapiens
  misc_RNA (1)...(19): siRNA sense strand
ggaagaucaucgagagcua

SEQ ID NO: 273725 - RNA, 19 nt, Homo sapiens
  misc_RNA (1)...(19): siRNA sense strand
gcaggaaggugauguccau

SEQ ID NO: 273726 - RNA, 19 nt, Homo sapiens
  misc_RNA (1)...(19): siRNA sense strand
caaccucgaucaaguagau

SEQ ID NO: 273727 - RNA, 19 nt, Homo sapiens
  misc_RNA (1)...(19): siRNA sense strand
cagcguugauguuaacuuu

SEQ ID NO: 273728 - RNA, 19 nt, Homo sapiens
  misc_RNA (1)...(19): siRNA sense strand
ucuauaaacuggugaagga

SEQ ID NO: 273729 - RNA, 19 nt, Homo sapiens
  misc_RNA (1)...(19): siRNA sense strand
gaauauauacagcaucaug

SEQ ID NO: 273730 - RNA, 19 nt, Homo sapiens
  misc_RNA (1)...(19): siRNA sense strand
gcguugauguuaacuuuga

SEQ ID NO: 273731 - RNA, 19 nt, Homo sapiens
  misc_RNA (1)...(19): siRNA sense strand
gauguuaacuuugaugucu

SEQ ID NO: 273732 - RNA, 19 nt, Homo sapiens
  misc_RNA (1)...(19): siRNA sense strand
caaaugacuccuucucuga

SEQ ID NO: 273733 - RNA, 19 nt, Homo sapiens
  misc_RNA (1)...(19): siRNA sense strand
gggcaacaguuauacuuuc

SEQ ID NO: 273734 - RNA, 19 nt, Homo sapiens
  misc_RNA (1)...(19): siRNA sense strand
ggugaaggauggauaccaa

SEQ ID NO: 273735 - RNA, 19 nt, Homo sapiens
  misc_RNA (1)...(19): siRNA sense strand
gaacauccaccucgagaag

SEQ ID NO: 273736 - RNA, 19 nt, Homo sapiens
  misc_RNA (1)...(19): siRNA sense strand
caaguagauuuccaacaug

SEQ ID NO: 273737 - RNA, 19 nt, Homo sapiens
  misc_RNA (1)...(19): siRNA sense strand
caacaguuauacuuucauc

SEQ ID NO: 273738 - RNA, 19 nt, Homo sapiens
  misc_RNA (1)...(19): siRNA sense strand
gagcgggacuauaccaauc

SEQ ID NO: 273739 - RNA, 19 nt, Homo sapiens
  misc_RNA (1)...(19): siRNA sense strand
guaacgugcuguugaccaa

SEQ ID NO: 273740 - RNA, 19 nt, Homo sapiens
  misc_RNA (1)...(19): siRNA sense strand
ggacaccuauguggagaug

SEQ ID NO: 273741 - RNA, 19 nt, Homo sapiens
  misc_RNA (1)...(19): siRNA sense strand
ucaacaaucugacuuucau

SEQ ID NO: 273742 - RNA, 19 nt, Homo sapiens
  misc_RNA (1)...(19): siRNA sense strand
gagguaagcgucauaugga

SEQ ID NO: 273743 - RNA, 19 nt, Homo sapiens
  misc_RNA (1)...(19): siRNA sense strand
gaaggauggauaccaaaug

SEQ ID NO: 273744 - RNA, 19 nt, Homo sapiens
  misc_RNA (1)...(19): siRNA sense strand
gcacuccaccuccauguuc

SEQ ID NO: 273745 - RNA, 19 nt, Homo sapiens
  misc_RNA (1)...(19): siRNA sense strand
cuggagagcucugacguuu

SEQ ID NO: 273746 - RNA, 19 nt, Homo sapiens
  misc_RNA (1)...(19): siRNA sense strand
ucaaugcagugcccugaug

SEQ ID NO: 273747 - RNA, 19 nt, Homo sapiens
  misc_RNA (1)...(19): siRNA sense strand
ccagcagcguugauguuaa

SEQ ID NO: 273748 - RNA, 19 nt, Homo sapiens
  misc_RNA (1)...(19): siRNA sense strand
ggcaacaguuauacuuuca

SEQ ID NO: 273749 - RNA, 19 nt, Homo sapiens
  misc_RNA (1)...(19): siRNA sense strand
ccacagggccaaguucauu

SEQ ID NO: 273750 - RNA, 19 nt, Homo sapiens
  misc_RNA (1)...(19): siRNA sense strand
gaacaucgucaaccuucug

SEQ ID NO: 273751 - RNA, 19 nt, Homo sapiens
  misc_RNA (1)...(19): siRNA sense strand
ggaccuaucgcugcacuga

SEQ ID NO: 273752 - RNA, 19 nt, Homo sapiens
  misc_RNA (1)...(19): siRNA sense strand
uaugagggcaacaguuaua

SEQ ID NO: 273753 - RNA, 19 nt, Homo sapiens
  misc_RNA (1)...(19): siRNA sense strand
gagagugccuacuugaacu

SEQ ID NO: 273754 - RNA, 19 nt, Homo sapiens
  misc_RNA (1)...(19): siRNA sense strand
gccagcagcguugauguua

SEQ ID NO: 273755 - RNA, 19 nt, Homo sapiens
  misc_RNA (1)...(19): siRNA sense strand
cacaggagguggucguguu

SEQ ID NO: 273756 - RNA, 19 nt, Homo sapiens
  misc_RNA (1)...(19): siRNA sense strand
gcgcguaacgugcuguuga

SEQ ID NO: 273757 - RNA, 19 nt, Homo sapiens
  misc_RNA (1)...(19): siRNA sense strand
agcaagaccuggacaagga

SEQ ID NO: 273758 - RNA, 19 nt, Homo sapiens
  misc_RNA (1)...(19): siRNA sense strand
agggaggcgucgacuauaa

SEQ ID NO: 273759 - RNA, 19 nt, Homo sapiens
  misc_RNA (1)...(19): siRNA sense strand
cgagggaggcgucgacuau

SEQ ID NO: 273760 - RNA, 19 nt, Homo sapiens
  misc_RNA (1)...(19): siRNA sense strand
cgcaaucccucaacaaucu

SEQ ID NO: 273761 - RNA, 19 nt, Homo sapiens
  misc_RNA (1)...(19): siRNA sense strand
cagguccgcuggaagauca

SEQ ID NO: 273762 - RNA, 19 nt, Homo sapiens
  misc_RNA (1)...(19): siRNA sense strand
gggcucaaccucaaaguca

SEQ ID NO: 273763 - RNA, 19 nt, Homo sapiens
  misc_RNA (1)...(19): siRNA sense strand
caacaaucugacuuucaua

SEQ ID NO: 273764 - RNA, 19 nt, Homo sapiens
  misc_RNA (1)...(19): siRNA sense strand
guacaaguauaagcagaag

SEQ ID NO: 273765 - RNA, 19 nt, Homo sapiens
  misc_RNA (1)...(19): siRNA sense strand
gccaggagcccuuccacaa

SEQ ID NO: 273766 - RNA, 19 nt, Homo sapiens
  misc_RNA (1)...(19): siRNA sense strand
ccagagagcaucuuugacu

SEQ ID NO: 273767 - RNA, 19 nt, Homo sapiens
  misc_RNA (1)...(19): siRNA sense strand
ucccugagcuggucgugaa

SEQ ID NO: 273768 - RNA, 19 nt, Homo sapiens
  misc_RNA (1)...(19): siRNA sense strand
gaaagugcagaaagucauc

SEQ ID NO: 273769 - RNA, 19 nt, Homo sapiens
  misc_RNA (1)...(19): siRNA sense strand
gcaauggcagcguggaaug

SEQ ID NO: 273770 - RNA, 19 nt, Homo sapiens
  misc_RNA (1)...(19): siRNA sense strand
ggucauguggccaagauug

SEQ ID NO: 273771 - RNA, 19 nt, Homo sapiens
  misc_RNA (1)...(19): siRNA sense strand
ccacggcccaugcugauga

SEQ ID NO: 273772 - RNA, 19 nt, Homo sapiens
  misc_RNA (1)...(19): siRNA sense strand
gagggcaacaguuauacuu

SEQ ID NO: 273773 - RNA, 19 nt, Homo sapiens
  misc_RNA (1)...(19): siRNA sense strand
gaccuuagagcacaaccaa

SEQ ID NO: 273774 - RNA, 19 nt, Homo sapiens
  misc_RNA (1)...(19): siRNA sense strand
gaagaucaucgagagcuau

SEQ ID NO: 273775 - RNA, 19 nt, Homo sapiens
  misc_RNA (1)...(19): siRNA sense strand
cagcagcguugauguuaac

SEQ ID NO: 273776 - RNA, 19 nt, Homo sapiens
  misc_RNA (1)...(19): siRNA sense strand
gcuagggacaucaugaaug

SEQ ID NO: 273777 - RNA, 19 nt, Homo sapiens
  misc_RNA (1)...(19): siRNA sense strand
gagggaggcgucgacuaua

SEQ ID NO: 273778 - RNA, 19 nt, Homo sapiens
  misc_RNA (1)...(19): siRNA sense strand
gcagagcuggugcggauuc

SEQ ID NO: 273779 - RNA, 19 nt, Homo sapiens
  misc_RNA (1)...(19): siRNA sense strand
ggaccaggacgcacuacug

SEQ ID NO: 273780 - RNA, 19 nt, Homo sapiens
  misc_RNA (1)...(19): siRNA sense strand
cggaacaaccugcaguuug

SEQ ID NO: 273781 - RNA, 19 nt, Homo sapiens
  misc_RNA (1)...(19): siRNA sense strand
gcugacuguugagaccuua

SEQ ID NO: 273782 - RNA, 19 nt, Homo sapiens
  misc_RNA (1)...(19): siRNA sense strand
acccaggccugcaagguuu

SEQ ID NO: 273783 - RNA, 19 nt, Homo sapiens
  misc_RNA (1)...(19): siRNA sense strand
ccucaaccucgaucaagua

SEQ ID NO: 273784 - RNA, 19 nt, Homo sapiens
  misc_RNA (1)...(19): siRNA sense strand
ugucuccacuucuucaaau

SEQ ID NO: 273785 - RNA, 19 nt, Homo sapiens
  misc_RNA (1)...(19): siRNA sense strand
gcaccaacaacgcuaccuu

SEQ ID NO: 273786 - RNA, 19 nt, Homo sapiens
  misc_RNA (1)...(19): siRNA sense strand
cuuccucgcuuccaagaau

SEQ ID NO: 273787 - RNA, 19 nt, Homo sapiens
  misc_RNA (1)...(19): siRNA sense strand
acauccaccucgagaagaa

SEQ ID NO: 273788 - RNA, 19 nt, Homo sapiens
  misc_RNA (1)...(19): siRNA sense strand
uguccgagcugaagaucau

SEQ ID NO: 273789 - RNA, 19 nt, Homo sapiens
  misc_RNA (1)...(19): siRNA sense strand
auaagcagaagcccaagua

SEQ ID NO: 273790 - RNA, 19 nt, Homo sapiens
  misc_RNA (1)...(19): siRNA sense strand
acuggacccuguacucuga

SEQ ID NO: 273791 - RNA, 19 nt, Homo sapiens
  misc_RNA (1)...(19): siRNA sense strand
aaggauggauaccaaaugg

SEQ ID NO: 273792 - RNA, 19 nt, Homo sapiens
  misc_RNA (1)...(19): siRNA sense strand
ggcugaaagugcagaaagu

SEQ ID NO: 273793 - RNA, 19 nt, Homo sapiens
  misc_RNA (1)...(19): siRNA sense strand
ggaggcgucgacuauaaga

SEQ ID NO: 273794 - RNA, 19 nt, Homo sapiens
  misc_RNA (1)...(19): siRNA sense strand
ccaccucuaugucaaagac

SEQ ID NO: 273795 - RNA, 19 nt, Homo sapiens
  misc_RNA (1)...(19): siRNA sense strand
gagccaggacuaucaaugc

SEQ ID NO: 273796 - RNA, 19 nt, Homo sapiens
  misc_RNA (1)...(19): siRNA sense strand
ucaacuuucugcgaaggaa

SEQ ID NO: 273797 - RNA, 19 nt, Homo sapiens
  misc_RNA (1)...(19): siRNA sense strand
ccucaacaaucugacuuuc

SEQ ID NO: 273798 - RNA, 19 nt, Homo sapiens
  misc_RNA (1)...(19): siRNA sense strand
caacaugccggcaacuacu

SEQ ID NO: 273799 - RNA, 19 nt, Homo sapiens
  misc_RNA (1)...(19): siRNA sense strand
gaggaggagagcucuagug

SEQ ID NO: 273800 - RNA, 19 nt, Homo sapiens
  misc_RNA (1)...(19): siRNA sense strand
ccggaugaguuccucuuca

SEQ ID NO: 273801 - RNA, 19 nt, Homo sapiens
  misc_RNA (1)...(19): siRNA sense strand
acacauacaggcacaccuu

SEQ ID NO: 273802 - RNA, 19 nt, Homo sapiens
  misc_RNA (1)...(19): siRNA sense strand
cuaaugcuaccaccaagga

SEQ ID NO: 273803 - RNA, 19 nt, Homo sapiens
  misc_RNA (1)...(19): siRNA sense strand
gcagcauccucagcaccaa

SEQ ID NO: 273804 - RNA, 19 nt, Homo sapiens
  misc_RNA (1)...(19): siRNA sense strand
gaucugcuccuuccuucag

SEQ ID NO: 273805 - RNA, 19 nt, Homo sapiens
  misc_RNA (1)...(19): siRNA sense strand
gacuccaacuacauuguca

SEQ ID NO: 273806 - RNA, 19 nt, Homo sapiens
  misc_RNA (1)...(19): siRNA sense strand
ugaaugacuccaacuacau

SEQ ID NO: 273807 - RNA, 19 nt, Homo sapiens
  misc_RNA (1)...(19): siRNA sense strand
acaccuauguggagaugag

SEQ ID NO: 273808 - RNA, 19 nt, Homo sapiens
  misc_RNA (1)...(19): siRNA sense strand
ccauccaccucuaugucaa

SEQ ID NO: 273809 - RNA, 19 nt, Homo sapiens
  misc_RNA (1)...(19): siRNA sense strand
acggugaccuugcgaugug

SEQ ID NO: 273810 - RNA, 19 nt, Homo sapiens
  misc_RNA (1)...(19): siRNA sense strand
ugaggccugucuccacuuc

SEQ ID NO: 273811 - RNA, 19 nt, Homo sapiens
  misc_RNA (1)...(19): siRNA sense strand
gcgaccugcucaacuuucu

SEQ ID NO: 273812 - RNA, 19 nt, Homo sapiens
  misc_RNA (1)...(19): siRNA sense strand
ggucaucacggaguacugu

SEQ ID NO: 273813 - RNA, 19 nt, Homo sapiens
  misc_RNA (1)...(19): siRNA sense strand
ggcccaugcugaugagaag

SEQ ID NO: 273814 - RNA, 19 nt, Homo sapiens
  misc_RNA (1)...(19): siRNA sense strand
ugaaggauggauaccaaau

SEQ ID NO: 273815 - RNA, 19 nt, Homo sapiens
  misc_RNA (1)...(19): siRNA sense strand
ucacaaaucuucuggaaua

SEQ ID NO: 273816 - RNA, 19 nt, Homo sapiens
  misc_RNA (1)...(19): siRNA sense strand
gaaauugcccgcagcgauu

SEQ ID NO: 273817 - RNA, 19 nt, Homo sapiens
  misc_RNA (1)...(19): siRNA sense strand
ggucacaaaucuucuggaa

SEQ ID NO: 273818 - RNA, 19 nt, Homo sapiens
  misc_RNA (1)...(19): siRNA sense strand
gaagcagugucugugguuu

SEQ ID NO: 273819 - RNA, 19 nt, Homo sapiens
  misc_RNA (1)...(19): siRNA sense strand
gcaagaauacaacaaagag

SEQ ID NO: 273820 - RNA, 19 nt, Homo sapiens
  misc_RNA (1)...(19): siRNA sense strand
gaaaucugcgccauucaag

SEQ ID NO: 273821 - RNA, 19 nt, Homo sapiens
  misc_RNA (1)...(19): siRNA sense strand
ccgcagcgauugcagaaag

SEQ ID NO: 273822 - RNA, 19 nt, Homo sapiens
  misc_RNA (1)...(19): siRNA sense strand
ccuuuaagcacuaaugaaa

SEQ ID NO: 273823 - RNA, 19 nt, Homo sapiens
  misc_RNA (1)...(19): siRNA sense strand
acaaagagagcgaggacaa

SEQ ID NO: 273824 - RNA, 19 nt, Homo sapiens
  misc_RNA (1)...(19): siRNA sense strand
gaaauuaaaacccgucaau

SEQ ID NO: 273825 - RNA, 19 nt, Homo sapiens
  misc_RNA (1)...(19): siRNA sense strand
caugcaagaauacaacaaa

SEQ ID NO: 273826 - RNA, 19 nt, Homo sapiens
  misc_RNA (1)...(19): siRNA sense strand
caagaauacaacaaagaga

SEQ ID NO: 273827 - RNA, 19 nt, Homo sapiens
  misc_RNA (1)...(19): siRNA sense strand
aaucugcgccauucaagaa

SEQ ID NO: 273828 - RNA, 19 nt, Homo sapiens
  misc_RNA (1)...(19): siRNA sense strand
caaaucuucuggaauaccu

SEQ ID NO: 273829 - RNA, 19 nt, Homo sapiens
  misc_RNA (1)...(19): siRNA sense strand
ccucaaaugccaacgugaa

SEQ ID NO: 273830 - RNA, 19 nt, Homo sapiens
  misc_RNA (1)...(19): siRNA sense strand
caaaugccaacgugaagca

SEQ ID NO: 273831 - RNA, 19 nt, Homo sapiens
  misc_RNA (1)...(19): siRNA sense strand
agagagcgaggacaaguau

SEQ ID NO: 273832 - RNA, 19 nt, Homo sapiens
  misc_RNA (1)...(19): siRNA sense strand
agacaggggugcugaggaa

SEQ ID NO: 273833 - RNA, 19 nt, Homo sapiens
  misc_RNA (1)...(19): siRNA sense strand
aaucuucuggaauaccuua

SEQ ID NO: 273834 - RNA, 19 nt, Homo sapiens
  misc_RNA (1)...(19): siRNA sense strand
ugaagcagugucugugguu

SEQ ID NO: 273835 - RNA, 19 nt, Homo sapiens
  misc_RNA (1)...(19): siRNA sense strand
aagagagcgaggacaagua

SEQ ID NO: 273836 - RNA, 19 nt, Homo sapiens
  misc_RNA (1)...(19): siRNA sense strand
cuucaggucacaaaucuuc

SEQ ID NO: 273837 - RNA, 19 nt, Homo sapiens
  misc_RNA (1)...(19): siRNA sense strand
gaaaacuccaagcugaaaa

SEQ ID NO: 273838 - RNA, 19 nt, Homo sapiens
  misc_RNA (1)...(19): siRNA sense strand
aaagagagcgaggacaagu

SEQ ID NO: 273839 - RNA, 19 nt, Homo sapiens
  misc_RNA (1)...(19): siRNA sense strand
ggcaagagcugaugagguu

SEQ ID NO: 273840 - RNA, 19 nt, Homo sapiens
  misc_RNA (1)...(19): siRNA sense strand
ggacaucccagaagugguu

SEQ ID NO: 273841 - RNA, 19 nt, Homo sapiens
  misc_RNA (1)...(19): siRNA sense strand
ggaagacucugggcauucu

SEQ ID NO: 273842 - RNA, 19 nt, Homo sapiens
  misc_RNA (1)...(19): siRNA sense strand
ggagaacgucgcuauggaa

SEQ ID NO: 273843 - RNA, 19 nt, Homo sapiens
  misc_RNA (1)...(19): siRNA sense strand
gaacgucgcuauggaaccu

SEQ ID NO: 273844 - RNA, 19 nt, Homo sapiens
  misc_RNA (1)...(19): siRNA sense strand
cagcggacaucccagaagu

SEQ ID NO: 273845 - RNA, 19 nt, Homo sapiens
  misc_RNA (1)...(19): siRNA sense strand
cauccaggcucaaggaaaa

SEQ ID NO: 273846 - RNA, 19 nt, Homo sapiens
  misc_RNA (1)...(19): siRNA sense strand
cagaauaccagcgugcauu

SEQ ID NO: 273847 - RNA, 19 nt, Homo sapiens
  misc_RNA (1)...(19): siRNA sense strand
ucccagaagugguuguuuc

SEQ ID NO: 273848 - RNA, 19 nt, Homo sapiens
  misc_RNA (1)...(19): siRNA sense strand
gcauccaggcucaaggaaa

SEQ ID NO: 273849 - RNA, 19 nt, Homo sapiens
  misc_RNA (1)...(19): siRNA sense strand
gcaggagaacgucgcuaug

SEQ ID NO: 273850 - RNA, 19 nt, Homo sapiens
  misc_RNA (1)...(19): siRNA sense strand
aggagaacgucgcuaugga

SEQ ID NO: 273851 - RNA, 19 nt, Homo sapiens
  misc_RNA (1)...(19): siRNA sense strand
gcagauugcagcggacauc

SEQ ID NO: 273852 - RNA, 19 nt, Homo sapiens
  misc_RNA (1)...(19): siRNA sense strand
agaauaccagcgugcauug

SEQ ID NO: 273853 - RNA, 19 nt, Homo sapiens
  misc_RNA (1)...(19): siRNA sense strand
gggaagacucugggcauuc

SEQ ID NO: 273854 - RNA, 19 nt, Homo sapiens
  misc_RNA (1)...(19): siRNA sense strand
gcuauggaaccugcaucua

SEQ ID NO: 273855 - RNA, 19 nt, Homo sapiens
  misc_RNA (1)...(19): siRNA sense strand
cgccauccuugcugccauu

SEQ ID NO: 273856 - RNA, 19 nt, Homo sapiens
  misc_RNA (1)...(19): siRNA sense strand
gcagaauaccagcgugcau

SEQ ID NO: 273857 - RNA, 19 nt, Homo sapiens
  misc_RNA (1)...(19): siRNA sense strand
cauccuugcugccauucuc

SEQ ID NO: 273858 - RNA, 19 nt, Homo sapiens
  misc_RNA (1)...(19): siRNA sense strand
gcuguuuacucucugcuua

SEQ ID NO: 273859 - RNA, 19 nt, Homo sapiens
  misc_RNA (1)...(19): siRNA sense strand
gagauggccucagguggua

SEQ ID NO: 273860 - RNA, 19 nt, Homo sapiens
  misc_RNA (1)...(19): siRNA sense strand
ggccucaggugguaacuuu

SEQ ID NO: 273861 - RNA, 19 nt, Homo sapiens
  misc_RNA (1)...(19): siRNA sense strand
ggagggcaaugucucuauu

SEQ ID NO: 273862 - RNA, 19 nt, Homo sapiens
  misc_RNA (1)...(19): siRNA sense strand
uuuacucucugcuuacuuu

SEQ ID NO: 273863 - RNA, 19 nt, Homo sapiens
  misc_RNA (1)...(19): siRNA sense strand
aaauucaaggcaccuguua

SEQ ID NO: 273864 - RNA, 19 nt, Homo sapiens
  misc_RNA (1)...(19): siRNA sense strand
cuuccuaccuucugcuguu

SEQ ID NO: 273865 - RNA, 19 nt, Homo sapiens
  misc_RNA (1)...(19): siRNA sense strand
gagggcaaugucucuauuc

SEQ ID NO: 273866 - RNA, 19 nt, Homo sapiens
  misc_RNA (1)...(19): siRNA sense strand
gaagugaacugaugcguuu

SEQ ID NO: 273867 - RNA, 19 nt, Homo sapiens
  misc_RNA (1)...(19): siRNA sense strand
ggagaaaucugaagccaaa

SEQ ID NO: 273868 - RNA, 19 nt, Homo sapiens
  misc_RNA (1)...(19): siRNA sense strand
gaaguugucuguugaagaa

SEQ ID NO: 273869 - RNA, 19 nt, Homo sapiens
  misc_RNA (1)...(19): siRNA sense strand
gagauuaccuugcuuguug

SEQ ID NO: 273870 - RNA, 19 nt, Homo sapiens
  misc_RNA (1)...(19): siRNA sense strand
gaagagagagcaacucaua

SEQ ID NO: 273871 - RNA, 19 nt, Homo sapiens
  misc_RNA (1)...(19): siRNA sense strand
gaacagaugcugcuggaua

SEQ ID NO: 273872 - RNA, 19 nt, Homo sapiens
  misc_RNA (1)...(19): siRNA sense strand
ggagauggaugacuuuaau

SEQ ID NO: 273873 - RNA, 19 nt, Homo sapiens
  misc_RNA (1)...(19): siRNA sense strand
ucauggaucuucacaauuu

SEQ ID NO: 273874 - RNA, 19 nt, Homo sapiens
  misc_RNA (1)...(19): siRNA sense strand
ucaagaagguggagaagaa

SEQ ID NO: 273875 - RNA, 19 nt, Homo sapiens
  misc_RNA (1)...(19): siRNA sense strand
gaaauucuucugcaucaua

SEQ ID NO: 273876 - RNA, 19 nt, Homo sapiens
  misc_RNA (1)...(19): siRNA sense strand
gauaugagagugcaacuaa

SEQ ID NO: 273877 - RNA, 19 nt, Homo sapiens
  misc_RNA (1)...(19): siRNA sense strand
gaucaaugcucucaucaca

SEQ ID NO: 273878 - RNA, 19 nt, Homo sapiens
  misc_RNA (1)...(19): siRNA sense strand
agacaaagguggagaaauc

SEQ ID NO: 273879 - RNA, 19 nt, Homo sapiens
  misc_RNA (1)...(19): siRNA sense strand
gagcugagauggaugaagu

SEQ ID NO: 273880 - RNA, 19 nt, Homo sapiens
  misc_RNA (1)...(19): siRNA sense strand
ccaagaaguugucuguuga

SEQ ID NO: 273881 - RNA, 19 nt, Homo sapiens
  misc_RNA (1)...(19): siRNA sense strand
gggauuaauugaucaaaug

SEQ ID NO: 273882 - RNA, 19 nt, Homo sapiens
  misc_RNA (1)...(19): siRNA sense strand
gcacagucauugcaagaug

SEQ ID NO: 273883 - RNA, 19 nt, Homo sapiens
  misc_RNA (1)...(19): siRNA sense strand
gaugaugcauucuaacaug

SEQ ID NO: 273884 - RNA, 19 nt, Homo sapiens
  misc_RNA (1)...(19): siRNA sense strand
gaaccuagaucagaugaag

SEQ ID NO: 273885 - RNA, 19 nt, Homo sapiens
  misc_RNA (1)...(19): siRNA sense strand
gaaccacuauugcacugaa

SEQ ID NO: 273886 - RNA, 19 nt, Homo sapiens
  misc_RNA (1)...(19): siRNA sense strand
ggagaaagccagccgaguu

SEQ ID NO: 273887 - RNA, 19 nt, Homo sapiens
  misc_RNA (1)...(19): siRNA sense strand
caagaaggaucaagaaggu

SEQ ID NO: 273888 - RNA, 19 nt, Homo sapiens
  misc_RNA (1)...(19): siRNA sense strand
gaaccugaaugaggagaaa

SEQ ID NO: 273889 - RNA, 19 nt, Homo sapiens
  misc_RNA (1)...(19): siRNA sense strand
gaagaugccaagaaagaaa

SEQ ID NO: 273890 - RNA, 19 nt, Homo sapiens
  misc_RNA (1)...(19): siRNA sense strand
gaauguauuucccagauag

SEQ ID NO: 273891 - RNA, 19 nt, Homo sapiens
  misc_RNA (1)...(19): siRNA sense strand
gcauggagauggaugacuu

SEQ ID NO: 273892 - RNA, 19 nt, Homo sapiens
  misc_RNA (1)...(19): siRNA sense strand
gaaaagaaaucugugcaaa

SEQ ID NO: 273893 - RNA, 19 nt, Homo sapiens
  misc_RNA (1)...(19): siRNA sense strand
gauggacagucuucuagaa

SEQ ID NO: 273894 - RNA, 19 nt, Homo sapiens
  misc_RNA (1)...(19): siRNA sense strand
aauaucagcuuccucugua

SEQ ID NO: 273895 - RNA, 19 nt, Homo sapiens
  misc_RNA (1)...(19): siRNA sense strand
ugagauggaugaaguggaa

SEQ ID NO: 273896 - RNA, 19 nt, Homo sapiens
  misc_RNA (1)...(19): siRNA sense strand
gagaaagccagccgaguuu

SEQ ID NO: 273897 - RNA, 19 nt, Homo sapiens
  misc_RNA (1)...(19): siRNA sense strand
gcgagcaaguggagaauau

SEQ ID NO: 273898 - RNA, 19 nt, Homo sapiens
  misc_RNA (1)...(19): siRNA sense strand
gaaugaggcuguucugacu

SEQ ID NO: 273899 - RNA, 19 nt, Homo sapiens
  misc_RNA (1)...(19): siRNA sense strand
uaaagguguuggauucaaa

SEQ ID NO: 273900 - RNA, 19 nt, Homo sapiens
  misc_RNA (1)...(19): siRNA sense strand
gcgaguacuuccucuuuga

SEQ ID NO: 273901 - RNA, 19 nt, Homo sapiens
  misc_RNA (1)...(19): siRNA sense strand
agaaagagcugagauggau

SEQ ID NO: 273902 - RNA, 19 nt, Homo sapiens
  misc_RNA (1)...(19): siRNA sense strand
acaaauuucugauguggaa

SEQ ID NO: 273903 - RNA, 19 nt, Homo sapiens
  misc_RNA (1)...(19): siRNA sense strand
gcaugagaauuaagaagga

SEQ ID NO: 273904 - RNA, 19 nt, Homo sapiens
  misc_RNA (1)...(19): siRNA sense strand
ucaguugggugcaaacauu

SEQ ID NO: 273905 - RNA, 19 nt, Homo sapiens
  misc_RNA (1)...(19): siRNA sense strand
agaaauggcuucccucucu

SEQ ID NO: 273906 - RNA, 19 nt, Homo sapiens
  misc_RNA (1)...(19): siRNA sense strand
gaauuaagaaggagaagga

SEQ ID NO: 273907 - RNA, 19 nt, Homo sapiens
  misc_RNA (1)...(19): siRNA sense strand
caacaaguuuggaaucaag

SEQ ID NO: 273908 - RNA, 19 nt, Homo sapiens
  misc_RNA (1)...(19): siRNA sense strand
gaacaacaaguuuggaauc

SEQ ID NO: 273909 - RNA, 19 nt, Homo sapiens
  misc_RNA (1)...(19): siRNA sense strand
ggccagaccucaguacuau

SEQ ID NO: 273910 - RNA, 19 nt, Homo sapiens
  misc_RNA (1)...(19): siRNA sense strand
gagagcaacucauagacau

SEQ ID NO: 273911 - RNA, 19 nt, Homo sapiens
  misc_RNA (1)...(19): siRNA sense strand
gcaggaccuucgagagauu

SEQ ID NO: 273912 - RNA, 19 nt, Homo sapiens
  misc_RNA (1)...(19): siRNA sense strand
gaucagaugaagaaacaaa

SEQ ID NO: 273913 - RNA, 19 nt, Homo sapiens
  misc_RNA (1)...(19): siRNA sense strand
gcugaaaacuugcaaaaga

SEQ ID NO: 273914 - RNA, 19 nt, Homo sapiens
  misc_RNA (1)...(19): siRNA sense strand
cagacgagcuugcccaugu

SEQ ID NO: 273915 - RNA, 19 nt, Homo sapiens
  misc_RNA (1)...(19): siRNA sense strand
gcagaagcuucaagaucuu

SEQ ID NO: 273916 - RNA, 19 nt, Homo sapiens
  misc_RNA (1)...(19): siRNA sense strand
gagaauaucaagccagaga

SEQ ID NO: 273917 - RNA, 19 nt, Homo sapiens
  misc_RNA (1)...(19): siRNA sense strand
auaaggagcugggcgagua

SEQ ID NO: 273918 - RNA, 19 nt, Homo sapiens
  misc_RNA (1)...(19): siRNA sense strand
gcaacuaaauguguuugau

SEQ ID NO: 273919 - RNA, 19 nt, Homo sapiens
  misc_RNA (1)...(19): siRNA sense strand
uagaucagaugaagaaaca

SEQ ID NO: 273920 - RNA, 19 nt, Homo sapiens
  misc_RNA (1)...(19): siRNA sense strand
uuucugaacugaaggauga

SEQ ID NO: 273921 - RNA, 19 nt, Homo sapiens
  misc_RNA (1)...(19): siRNA sense strand
ggagaaacagcaaccuuug

SEQ ID NO: 273922 - RNA, 19 nt, Homo sapiens
  misc_RNA (1)...(19): siRNA sense strand
gaauaucaagccagagauu

SEQ ID NO: 273923 - RNA, 19 nt, Homo sapiens
  misc_RNA (1)...(19): siRNA sense strand
gagaaggacaucaucauca

SEQ ID NO: 273924 - RNA, 19 nt, Homo sapiens
  misc_RNA (1)...(19): siRNA sense strand
uaaacacagugaaggauuc

SEQ ID NO: 273925 - RNA, 19 nt, Homo sapiens
  misc_RNA (1)...(19): siRNA sense strand
caagaacagugagacauuc

SEQ ID NO: 273926 - RNA, 19 nt, Homo sapiens
  misc_RNA (1)...(19): siRNA sense strand
cccaagaaguugucuguug

SEQ ID NO: 273927 - RNA, 19 nt, Homo sapiens
  misc_RNA (1)...(19): siRNA sense strand
aacgugauguucagaauuu

SEQ ID NO: 273928 - RNA, 19 nt, Homo sapiens
  misc_RNA (1)...(19): siRNA sense strand
gagcagaagcuucaagauc

SEQ ID NO: 273929 - RNA, 19 nt, Homo sapiens
  misc_RNA (1)...(19): siRNA sense strand
gagauugagggauuaauug

SEQ ID NO: 273930 - RNA, 19 nt, Homo sapiens
  misc_RNA (1)...(19): siRNA sense strand
ugcaagauguuucagauga

SEQ ID NO: 273931 - RNA, 19 nt, Homo sapiens
  misc_RNA (1)...(19): siRNA sense strand
agaaggacaucaucaucaa

SEQ ID NO: 273932 - RNA, 19 nt, Homo sapiens
  misc_RNA (1)...(19): siRNA sense strand
cuucggagcugaccaagga

SEQ ID NO: 273933 - RNA, 19 nt, Homo sapiens
  misc_RNA (1)...(19): siRNA sense strand
ccagaccucaguacuauaa

SEQ ID NO: 273934 - RNA, 19 nt, Homo sapiens
  misc_RNA (1)...(19): siRNA sense strand
gauggugucccaauacuug

SEQ ID NO: 273935 - RNA, 19 nt, Homo sapiens
  misc_RNA (1)...(19): siRNA sense strand
uggaugaaguggaacguuu

SEQ ID NO: 273936 - RNA, 19 nt, Homo sapiens
  misc_RNA (1)...(19): siRNA sense strand
gagcaaaacuagccaagga

SEQ ID NO: 273937 - RNA, 19 nt, Homo sapiens
  misc_RNA (1)...(19): siRNA sense strand
gcacaggaacaguauaaca

SEQ ID NO: 273938 - RNA, 19 nt, Homo sapiens
  misc_RNA (1)...(19): siRNA sense strand
gaacuuuucgccaaacuua

SEQ ID NO: 273939 - RNA, 19 nt, Homo sapiens
  misc_RNA (1)...(19): siRNA sense strand
gagaaacagcaaccuuuga

SEQ ID NO: 273940 - RNA, 19 nt, Homo sapiens
  misc_RNA (1)...(19): siRNA sense strand
cagaaucucucaaucuuuu

SEQ ID NO: 273941 - RNA, 19 nt, Homo sapiens
  misc_RNA (1)...(19): siRNA sense strand
gcccaauucugcucauaga

SEQ ID NO: 273942 - RNA, 19 nt, Homo sapiens
  misc_RNA (1)...(19): siRNA sense strand
gauugagauugagggauua

SEQ ID NO: 273943 - RNA, 19 nt, Homo sapiens
  misc_RNA (1)...(19): siRNA sense strand
agauugagauugagggauu

SEQ ID NO: 273944 - RNA, 19 nt, Homo sapiens
  misc_RNA (1)...(19): siRNA sense strand
ugauguauauucaggaguu

SEQ ID NO: 273945 - RNA, 19 nt, Homo sapiens
  misc_RNA (1)...(19): siRNA sense strand
ccagaggacaugaaugaaa

SEQ ID NO: 273946 - RNA, 19 nt, Homo sapiens
  misc_RNA (1)...(19): siRNA sense strand
gguguuggauucaaagaca

SEQ ID NO: 273947 - RNA, 19 nt, Homo sapiens
  misc_RNA (1)...(19): siRNA sense strand
cagaggacaugaaugaaag

SEQ ID NO: 273948 - RNA, 19 nt, Homo sapiens
  misc_RNA (1)...(19): siRNA sense strand
gaucauucgcugcuugaaa

SEQ ID NO: 273949 - RNA, 19 nt, Homo sapiens
  misc_RNA (1)...(19): siRNA sense strand
ccaagaacagugagacauu

SEQ ID NO: 273950 - RNA, 19 nt, Homo sapiens
  misc_RNA (1)...(19): siRNA sense strand
acauggagacccucuauaa

SEQ ID NO: 273951 - RNA, 19 nt, Homo sapiens
  misc_RNA (1)...(19): siRNA sense strand
agaauguauuucccagaua

SEQ ID NO: 273952 - RNA, 19 nt, Homo sapiens
  misc_RNA (1)...(19): siRNA sense strand
gaaucaagaccauguugga

SEQ ID NO: 273953 - RNA, 19 nt, Homo sapiens
  misc_RNA (1)...(19): siRNA sense strand
ggacauucuuaaacgacuu

SEQ ID NO: 273954 - RNA, 19 nt, Homo sapiens
  misc_RNA (1)...(19): siRNA sense strand
gaaugacuaucccgauguc

SEQ ID NO: 273955 - RNA, 19 nt, Homo sapiens
  misc_RNA (1)...(19): siRNA sense strand
guucugccauuuggauuaa

SEQ ID NO: 273956 - RNA, 19 nt, Homo sapiens
  misc_RNA (1)...(19): siRNA sense strand
caacuaaauguguuugaug

SEQ ID NO: 273957 - RNA, 19 nt, Homo sapiens
  misc_RNA (1)...(19): siRNA sense strand
gcugaucaaugcucucauc

SEQ ID NO: 273958 - RNA, 19 nt, Homo sapiens
  misc_RNA (1)...(19): siRNA sense strand
gaggaccgcuuugagaaca

SEQ ID NO: 273959 - RNA, 19 nt, Homo sapiens
  misc_RNA (1)...(19): siRNA sense strand
ggaagaugccaagaaagaa

SEQ ID NO: 273960 - RNA, 19 nt, Homo sapiens
  misc_RNA (1)...(19): siRNA sense strand
acuggaagaugccaagaaa

SEQ ID NO: 273961 - RNA, 19 nt, Homo sapiens
  misc_RNA (1)...(19): siRNA sense strand
gcagagccacacuuccuuu

SEQ ID NO: 273962 - RNA, 19 nt, Homo sapiens
  misc_RNA (1)...(19): siRNA sense strand
ggagacagaagaaggaauc

SEQ ID NO: 273963 - RNA, 19 nt, Homo sapiens
  misc_RNA (1)...(19): siRNA sense strand
gagaaggagcggcuagaga

SEQ ID NO: 273964 - RNA, 19 nt, Homo sapiens
  misc_RNA (1)...(19): siRNA sense strand
ccaaggagaaggcagagaa

SEQ ID NO: 273965 - RNA, 19 nt, Homo sapiens
  misc_RNA (1)...(19): siRNA sense strand
gggcugauccugacuucaa

SEQ ID NO: 273966 - RNA, 19 nt, Homo sapiens
  misc_RNA (1)...(19): siRNA sense strand
uagcagagcuuaagaauga

SEQ ID NO: 273967 - RNA, 19 nt, Homo sapiens
  misc_RNA (1)...(19): siRNA sense strand
gaagagaaauggaagagaa

SEQ ID NO: 273968 - RNA, 19 nt, Homo sapiens
  misc_RNA (1)...(19): siRNA sense strand
gaaguucgaugaagaauuc

SEQ ID NO: 273969 - RNA, 19 nt, Homo sapiens
  misc_RNA (1)...(19): siRNA sense strand
gaucagagauacuaaauca

SEQ ID NO: 273970 - RNA, 19 nt, Homo sapiens
  misc_RNA (1)...(19): siRNA sense strand
gaagauacucaacgaauua

SEQ ID NO: 273971 - RNA, 19 nt, Homo sapiens
  misc_RNA (1)...(19): siRNA sense strand
gagcagaaauggaugauau

SEQ ID NO: 273972 - RNA, 19 nt, Homo sapiens
  misc_RNA (1)...(19): siRNA sense strand
agagaaagcugaacaagaa

SEQ ID NO: 273973 - RNA, 19 nt, Homo sapiens
  misc_RNA (1)...(19): siRNA sense strand
gaugaacgaucuuugaauu

SEQ ID NO: 273974 - RNA, 19 nt, Homo sapiens
  misc_RNA (1)...(19): siRNA sense strand
cgauuuaacucaucugaua

SEQ ID NO: 273975 - RNA, 19 nt, Homo sapiens
  misc_RNA (1)...(19): siRNA sense strand
caugaugacugaaauagua

SEQ ID NO: 273976 - RNA, 19 nt, Homo sapiens
  misc_RNA (1)...(19): siRNA sense strand
caaagaaguucgaugaaga

SEQ ID NO: 273977 - RNA, 19 nt, Homo sapiens
  misc_RNA (1)...(19): siRNA sense strand
gaagacauaagaaacguua

SEQ ID NO: 273978 - RNA, 19 nt, Homo sapiens
  misc_RNA (1)...(19): siRNA sense strand
gaucauaucgcaugccaua

SEQ ID NO: 273979 - RNA, 19 nt, Homo sapiens
  misc_RNA (1)...(19): siRNA sense strand
caaagaagaugaccuaacu

SEQ ID NO: 273980 - RNA, 19 nt, Homo sapiens
  misc_RNA (1)...(19): siRNA sense strand
ugaccuaacugaauuauca

SEQ ID NO: 273981 - RNA, 19 nt, Homo sapiens
  misc_RNA (1)...(19): siRNA sense strand
gaagaugaccuaacugaau

SEQ ID NO: 273982 - RNA, 19 nt, Homo sapiens
  misc_RNA (1)...(19): siRNA sense strand
aaagaacgcagaagcauua

SEQ ID NO: 273983 - RNA, 19 nt, Homo sapiens
  misc_RNA (1)...(19): siRNA sense strand
gaacaaggcgaaaguugaa

SEQ ID NO: 273984 - RNA, 19 nt, Homo sapiens
  misc_RNA (1)...(19): siRNA sense strand
gaaggacacugcugcugaa

SEQ ID NO: 273985 - RNA, 19 nt, Homo sapiens
  misc_RNA (1)...(19): siRNA sense strand
caaagaacuugaagcagaa

SEQ ID NO: 273986 - RNA, 19 nt, Homo sapiens
  misc_RNA (1)...(19): siRNA sense strand
gaauuacgaucggguauau

SEQ ID NO: 273987 - RNA, 19 nt, Homo sapiens
  misc_RNA (1)...(19): siRNA sense strand
gauugaacccacagaauua

SEQ ID NO: 273988 - RNA, 19 nt, Homo sapiens
  misc_RNA (1)...(19): siRNA sense strand
uaaaugcccuugucacuuc

SEQ ID NO: 273989 - RNA, 19 nt, Homo sapiens
  misc_RNA (1)...(19): siRNA sense strand
ucaggaagccuugcaauua

SEQ ID NO: 273990 - RNA, 19 nt, Homo sapiens
  misc_RNA (1)...(19): siRNA sense strand
caaauacaggcaaagauua

SEQ ID NO: 273991 - RNA, 19 nt, Homo sapiens
  misc_RNA (1)...(19): siRNA sense strand
gaaagugcaagcaaaguuu

SEQ ID NO: 273992 - RNA, 19 nt, Homo sapiens
  misc_RNA (1)...(19): siRNA sense strand
gcagaagcauuagaagaaa

SEQ ID NO: 273993 - RNA, 19 nt, Homo sapiens
  misc_RNA (1)...(19): siRNA sense strand
gaacgcagaagcauuagaa

SEQ ID NO: 273994 - RNA, 19 nt, Homo sapiens
  misc_RNA (1)...(19): siRNA sense strand
gcacaaguacucucaaguu

SEQ ID NO: 273995 - RNA, 19 nt, Homo sapiens
  misc_RNA (1)...(19): siRNA sense strand
gaaauaacagggaacgauu

SEQ ID NO: 273996 - RNA, 19 nt, Homo sapiens
  misc_RNA (1)...(19): siRNA sense strand
ugaugaagcucuaugagaa

SEQ ID NO: 273997 - RNA, 19 nt, Homo sapiens
  misc_RNA (1)...(19): siRNA sense strand
gaacucaggcucaagaaau

SEQ ID NO: 273998 - RNA, 19 nt, Homo sapiens
  misc_RNA (1)...(19): siRNA sense strand
gcucagccauuauaugaug

SEQ ID NO: 273999 - RNA, 19 nt, Homo sapiens
  misc_RNA (1)...(19): siRNA sense strand
gaacgugacaucaagaaau

SEQ ID NO: 274000 - RNA, 19 nt, Homo sapiens
  misc_RNA (1)...(19): siRNA sense strand
gaagacaaguuugagaauc

SEQ ID NO: 274001 - RNA, 19 nt, Homo sapiens
  misc_RNA (1)...(19): siRNA sense strand
ggacaugaaccuuaacgaa

SEQ ID NO: 274002 - RNA, 19 nt, Homo sapiens
  misc_RNA (1)...(19): siRNA sense strand
ggaaguauuggaucucuuu

SEQ ID NO: 274003 - RNA, 19 nt, Homo sapiens
  misc_RNA (1)...(19): siRNA sense strand
gaacgaucuuugaauuugu

SEQ ID NO: 274004 - RNA, 19 nt, Homo sapiens
  misc_RNA (1)...(19): siRNA sense strand
aagaucaacuuccuuugua

SEQ ID NO: 274005 - RNA, 19 nt, Homo sapiens
  misc_RNA (1)...(19): siRNA sense strand
gaagaacacauaaacaaca

SEQ ID NO: 274006 - RNA, 19 nt, Homo sapiens
  misc_RNA (1)...(19): siRNA sense strand
ccaggaauaucacuuaauc

SEQ ID NO: 274007 - RNA, 19 nt, Homo sapiens
  misc_RNA (1)...(19): siRNA sense strand
gcagaaauccagcaacuuc

SEQ ID NO: 274008 - RNA, 19 nt, Homo sapiens
  misc_RNA (1)...(19): siRNA sense strand
aaacaaagaagaugaccua

SEQ ID NO: 274009 - RNA, 19 nt, Homo sapiens
  misc_RNA (1)...(19): siRNA sense strand
gaucggguauaucagauga

SEQ ID NO: 274010 - RNA, 19 nt, Homo sapiens
  misc_RNA (1)...(19): siRNA sense strand
aaacaacccuuuugcauuu

SEQ ID NO: 274011 - RNA, 19 nt, Homo sapiens
  misc_RNA (1)...(19): siRNA sense strand
uaacaacuuuggccaugaa

SEQ ID NO: 274012 - RNA, 19 nt, Homo sapiens
  misc_RNA (1)...(19): siRNA sense strand
ugaacgaucuuugaauuug

SEQ ID NO: 274013 - RNA, 19 nt, Homo sapiens
  misc_RNA (1)...(19): siRNA sense strand
caaagaagaaagugaaaga

SEQ ID NO: 274014 - RNA, 19 nt, Homo sapiens
  misc_RNA (1)...(19): siRNA sense strand
caucaaaccaagcaucaua

SEQ ID NO: 274015 - RNA, 19 nt, Homo sapiens
  misc_RNA (1)...(19): siRNA sense strand
agacuggugugauggauaa

SEQ ID NO: 274016 - RNA, 19 nt, Homo sapiens
  misc_RNA (1)...(19): siRNA sense strand
aagaugaccuaacugaauu

SEQ ID NO: 274017 - RNA, 19 nt, Homo sapiens
  misc_RNA (1)...(19): siRNA sense strand
gugaaagaacugagaauuu

SEQ ID NO: 274018 - RNA, 19 nt, Homo sapiens
  misc_RNA (1)...(19): siRNA sense strand
uaaucuaccuuauggaaug

SEQ ID NO: 274019 - RNA, 19 nt, Homo sapiens
  misc_RNA (1)...(19): siRNA sense strand
gauccagacuucaaauaca

SEQ ID NO: 274020 - RNA, 19 nt, Homo sapiens
  misc_RNA (1)...(19): siRNA sense strand
caacaugaugacugaaaua

SEQ ID NO: 274021 - RNA, 19 nt, Homo sapiens
  misc_RNA (1)...(19): siRNA sense strand
gaaagugaaagaacugaga

SEQ ID NO: 274022 - RNA, 19 nt, Homo sapiens
  misc_RNA (1)...(19): siRNA sense strand
agaagauacucaacgaauu

SEQ ID NO: 274023 - RNA, 19 nt, Homo sapiens
  misc_RNA (1)...(19): siRNA sense strand
gauggauaaucuucuagaa

SEQ ID NO: 274024 - RNA, 19 nt, Homo sapiens
  misc_RNA (1)...(19): siRNA sense strand
gaacacauaaacaacauca

SEQ ID NO: 274025 - RNA, 19 nt, Homo sapiens
  misc_RNA (1)...(19): siRNA sense strand
agaauuaucugagaacugu

SEQ ID NO: 274026 - RNA, 19 nt, Homo sapiens
  misc_RNA (1)...(19): siRNA sense strand
caaaguuucagcucaaauu

SEQ ID NO: 274027 - RNA, 19 nt, Homo sapiens
  misc_RNA (1)...(19): siRNA sense strand
ugagaugguuguccaguau

SEQ ID NO: 274028 - RNA, 19 nt, Homo sapiens
  misc_RNA (1)...(19): siRNA sense strand
caguaacucuugccuguga

SEQ ID NO: 274029 - RNA, 19 nt, Homo sapiens
  misc_RNA (1)...(19): siRNA sense strand
gaauuuugcuacucagaua

SEQ ID NO: 274030 - RNA, 19 nt, Homo sapiens
  misc_RNA (1)...(19): siRNA sense strand
caaguacucucaaguucau

SEQ ID NO: 274031 - RNA, 19 nt, Homo sapiens
  misc_RNA (1)...(19): siRNA sense strand
ucaaauacaggcaaagauu

SEQ ID NO: 274032 - RNA, 19 nt, Homo sapiens
  misc_RNA (1)...(19): siRNA sense strand
ugaaggucuuggacucuua

SEQ ID NO: 274033 - RNA, 19 nt, Homo sapiens
  misc_RNA (1)...(19): siRNA sense strand
ggagguuaaugaagacaug

SEQ ID NO: 274034 - RNA, 19 nt, Homo sapiens
  misc_RNA (1)...(19): siRNA sense strand
cagcucagccauuauauga

SEQ ID NO: 274035 - RNA, 19 nt, Homo sapiens
  misc_RNA (1)...(19): siRNA sense strand
caaagagggugaugagacu

SEQ ID NO: 274036 - RNA, 19 nt, Homo sapiens
  misc_RNA (1)...(19): siRNA sense strand
caacuuccuuuguaagauc

SEQ ID NO: 274037 - RNA, 19 nt, Homo sapiens
  misc_RNA (1)...(19): siRNA sense strand
acaugaaccuuaacgaaga

SEQ ID NO: 274038 - RNA, 19 nt, Homo sapiens
  misc_RNA (1)...(19): siRNA sense strand
gccauuauaugaugaacga

SEQ ID NO: 274039 - RNA, 19 nt, Homo sapiens
  misc_RNA (1)...(19): siRNA sense strand
caaagacagugagcauaga

SEQ ID NO: 274040 - RNA, 19 nt, Homo sapiens
  misc_RNA (1)...(19): siRNA sense strand
agaguuaguucuucuuguu

SEQ ID NO: 274041 - RNA, 19 nt, Homo sapiens
  misc_RNA (1)...(19): siRNA sense strand
ugaaugaagucuaccaucu

SEQ ID NO: 274042 - RNA, 19 nt, Homo sapiens
  misc_RNA (1)...(19): siRNA sense strand
caacagcagcagaaagaaa

SEQ ID NO: 274043 - RNA, 19 nt, Homo sapiens
  misc_RNA (1)...(19): siRNA sense strand
ccucaaagcauuuaugaau

SEQ ID NO: 274044 - RNA, 19 nt, Homo sapiens
  misc_RNA (1)...(19): siRNA sense strand
gauuagacaucgauuuaac

SEQ ID NO: 274045 - RNA, 19 nt, Homo sapiens
  misc_RNA (1)...(19): siRNA sense strand
acaaucaggugcagcauuc

SEQ ID NO: 274046 - RNA, 19 nt, Homo sapiens
  misc_RNA (1)...(19): siRNA sense strand
cguagaaagugcaagcaaa

SEQ ID NO: 274047 - RNA, 19 nt, Homo sapiens
  misc_RNA (1)...(19): siRNA sense strand
ggcgaaaguugaagaaagu

SEQ ID NO: 274048 - RNA, 19 nt, Homo sapiens
  misc_RNA (1)...(19): siRNA sense strand
gaaccuuaacgaagagaaa

SEQ ID NO: 274049 - RNA, 19 nt, Homo sapiens
  misc_RNA (1)...(19): siRNA sense strand
gaagaaagugaaagaacug

SEQ ID NO: 274050 - RNA, 19 nt, Homo sapiens
  misc_RNA (1)...(19): siRNA sense strand
agacugggccuacaaagaa

SEQ ID NO: 274051 - RNA, 19 nt, Homo sapiens
  misc_RNA (1)...(19): siRNA sense strand
gagaaucaauuggucaaag

SEQ ID NO: 274052 - RNA, 19 nt, Homo sapiens
  misc_RNA (1)...(19): siRNA sense strand
gaaaguugaagaaagugaa

SEQ ID NO: 274053 - RNA, 19 nt, Homo sapiens
  misc_RNA (1)...(19): siRNA sense strand
augaugagcuugauauuca

SEQ ID NO: 274054 - RNA, 19 nt, Homo sapiens
  misc_RNA (1)...(19): siRNA sense strand
uggaggacaugaaccuuaa

SEQ ID NO: 274055 - RNA, 19 nt, Homo sapiens
  misc_RNA (1)...(19): siRNA sense strand
gugagaugguuguccagua

SEQ ID NO: 274056 - RNA, 19 nt, Homo sapiens
  misc_RNA (1)...(19): siRNA sense strand
ucuagaagcccuacaauca

SEQ ID NO: 274057 - RNA, 19 nt, Homo sapiens
  misc_RNA (1)...(19): siRNA sense strand
aaacccaaauugaacauuc

SEQ ID NO: 274058 - RNA, 19 nt, Homo sapiens
  misc_RNA (1)...(19): siRNA sense strand
gguuaagagucaaagaaga

SEQ ID NO: 274059 - RNA, 19 nt, Homo sapiens
  misc_RNA (1)...(19): siRNA sense strand
agaaucaauuggucaaaga

SEQ ID NO: 274060 - RNA, 19 nt, Homo sapiens
  misc_RNA (1)...(19): siRNA sense strand
gaaugaagucuaccaucuu

SEQ ID NO: 274061 - RNA, 19 nt, Homo sapiens
  misc_RNA (1)...(19): siRNA sense strand
gcagaaauggaugauauga

SEQ ID NO: 274062 - RNA, 19 nt, Homo sapiens
  misc_RNA (1)...(19): siRNA sense strand
gacaagaagaaucaguaua

SEQ ID NO: 274063 - RNA, 19 nt, Homo sapiens
  misc_RNA (1)...(19): siRNA sense strand
ugaauaugaugaccucugu

SEQ ID NO: 274064 - RNA, 19 nt, Homo sapiens
  misc_RNA (1)...(19): siRNA sense strand
uaagagaagagaaauggaa

SEQ ID NO: 274065 - RNA, 19 nt, Homo sapiens
  misc_RNA (1)...(19): siRNA sense strand
uacaaagacugcccgagaa

SEQ ID NO: 274066 - RNA, 19 nt, Homo sapiens
  misc_RNA (1)...(19): siRNA sense strand
uagcagagcuuaagaauga

SEQ ID NO: 274067 - RNA, 19 nt, Homo sapiens
  misc_RNA (1)...(19): siRNA sense strand
gaagagaaauggaagagaa

SEQ ID NO: 274068 - RNA, 19 nt, Homo sapiens
  misc_RNA (1)...(19): siRNA sense strand
gaaguucgaugaagaauuc

SEQ ID NO: 274069 - RNA, 19 nt, Homo sapiens
  misc_RNA (1)...(19): siRNA sense strand
gaucagagauacuaaauca

SEQ ID NO: 274070 - RNA, 19 nt, Homo sapiens
  misc_RNA (1)...(19): siRNA sense strand
gaagauacucaacgaauua

SEQ ID NO: 274071 - RNA, 19 nt, Homo sapiens
  misc_RNA (1)...(19): siRNA sense strand
gagcagaaauggaugauau

SEQ ID NO: 274072 - RNA, 19 nt, Homo sapiens
  misc_RNA (1)...(19): siRNA sense strand
agagaaagcugaacaagaa

SEQ ID NO: 274073 - RNA, 19 nt, Homo sapiens
  misc_RNA (1)...(19): siRNA sense strand
gaugaacgaucuuugaauu

SEQ ID NO: 274074 - RNA, 19 nt, Homo sapiens
  misc_RNA (1)...(19): siRNA sense strand
cgauuuaacucaucugaua

SEQ ID NO: 274075 - RNA, 19 nt, Homo sapiens
  misc_RNA (1)...(19): siRNA sense strand
caugaugacugaaauagua

SEQ ID NO: 274076 - RNA, 19 nt, Homo sapiens
  misc_RNA (1)...(19): siRNA sense strand
caaagaaguucgaugaaga

SEQ ID NO: 274077 - RNA, 19 nt, Homo sapiens
  misc_RNA (1)...(19): siRNA sense strand
gaagacauaagaaacguua

SEQ ID NO: 274078 - RNA, 19 nt, Homo sapiens
  misc_RNA (1)...(19): siRNA sense strand
gaucauaucgcaugccaua

SEQ ID NO: 274079 - RNA, 19 nt, Homo sapiens
  misc_RNA (1)...(19): siRNA sense strand
caaagaagaugaccuaacu

SEQ ID NO: 274080 - RNA, 19 nt, Homo sapiens
  misc_RNA (1)...(19): siRNA sense strand
ugaccuaacugaauuauca

SEQ ID NO: 274081 - RNA, 19 nt, Homo sapiens
  misc_RNA (1)...(19): siRNA sense strand
gaagaugaccuaacugaau

SEQ ID NO: 274082 - RNA, 19 nt, Homo sapiens
  misc_RNA (1)...(19): siRNA sense strand
aaagaacgcagaagcauua

SEQ ID NO: 274083 - RNA, 19 nt, Homo sapiens
  misc_RNA (1)...(19): siRNA sense strand
gaacaaggcgaaaguugaa

SEQ ID NO: 274084 - RNA, 19 nt, Homo sapiens
  misc_RNA (1)...(19): siRNA sense strand
gaaggacacugcugcugaa

SEQ ID NO: 274085 - RNA, 19 nt, Homo sapiens
  misc_RNA (1)...(19): siRNA sense strand
caaagaacuugaagcagaa

SEQ ID NO: 274086 - RNA, 19 nt, Homo sapiens
  misc_RNA (1)...(19): siRNA sense strand
gaauuacgaucggguauau

SEQ ID NO: 274087 - RNA, 19 nt, Homo sapiens
  misc_RNA (1)...(19): siRNA sense strand
gauugaacccacagaauua

SEQ ID NO: 274088 - RNA, 19 nt, Homo sapiens
  misc_RNA (1)...(19): siRNA sense strand
uaaaugcccuugucacuuc

SEQ ID NO: 274089 - RNA, 19 nt, Homo sapiens
  misc_RNA (1)...(19): siRNA sense strand
ucaggaagccuugcaauua

SEQ ID NO: 274090 - RNA, 19 nt, Homo sapiens
  misc_RNA (1)...(19): siRNA sense strand
caaauacaggcaaagauua

SEQ ID NO: 274091 - RNA, 19 nt, Homo sapiens
  misc_RNA (1)...(19): siRNA sense strand
gaaagugcaagcaaaguuu

SEQ ID NO: 274092 - RNA, 19 nt, Homo sapiens
  misc_RNA (1)...(19): siRNA sense strand
gcagaagcauuagaagaaa

SEQ ID NO: 274093 - RNA, 19 nt, Homo sapiens
  misc_RNA (1)...(19): siRNA sense strand
gaacgcagaagcauuagaa

SEQ ID NO: 274094 - RNA, 19 nt, Homo sapiens
  misc_RNA (1)...(19): siRNA sense strand
gcacaaguacucucaaguu

SEQ ID NO: 274095 - RNA, 19 nt, Homo sapiens
  misc_RNA (1)...(19): siRNA sense strand
gaaauaacagggaacgauu

SEQ ID NO: 274096 - RNA, 19 nt, Homo sapiens
  misc_RNA (1)...(19): siRNA sense strand
ugaugaagcucuaugagaa

SEQ ID NO: 274097 - RNA, 19 nt, Homo sapiens
  misc_RNA (1)...(19): siRNA sense strand
gaacucaggcucaagaaau

SEQ ID NO: 274098 - RNA, 19 nt, Homo sapiens
  misc_RNA (1)...(19): siRNA sense strand
gcucagccauuauaugaug

SEQ ID NO: 274099 - RNA, 19 nt, Homo sapiens
  misc_RNA (1)...(19): siRNA sense strand
gaacgugacaucaagaaau

SEQ ID NO: 274100 - RNA, 19 nt, Homo sapiens
  misc_RNA (1)...(19): siRNA sense strand
gaagacaaguuugagaauc

SEQ ID NO: 274101 - RNA, 19 nt, Homo sapiens
  misc_RNA (1)...(19): siRNA sense strand
ggacaugaaccuuaacgaa

SEQ ID NO: 274102 - RNA, 19 nt, Homo sapiens
  misc_RNA (1)...(19): siRNA sense strand
ggaaguauuggaucucuuu

SEQ ID NO: 274103 - RNA, 19 nt, Homo sapiens
  misc_RNA (1)...(19): siRNA sense strand
gaacgaucuuugaauuugu

SEQ ID NO: 274104 - RNA, 19 nt, Homo sapiens
  misc_RNA (1)...(19): siRNA sense strand
aagaucaacuuccuuugua

SEQ ID NO: 274105 - RNA, 19 nt, Homo sapiens
  misc_RNA (1)...(19): siRNA sense strand
gaagaacacauaaacaaca

SEQ ID NO: 274106 - RNA, 19 nt, Homo sapiens
  misc_RNA (1)...(19): siRNA sense strand
ccaggaauaucacuuaauc

SEQ ID NO: 274107 - RNA, 19 nt, Homo sapiens
  misc_RNA (1)...(19): siRNA sense strand
gcagaaauccagcaacuuc

SEQ ID NO: 274108 - RNA, 19 nt, Homo sapiens
  misc_RNA (1)...(19): siRNA sense strand
aaacaaagaagaugaccua

SEQ ID NO: 274109 - RNA, 19 nt, Homo sapiens
  misc_RNA (1)...(19): siRNA sense strand
gaucggguauaucagauga

SEQ ID NO: 274110 - RNA, 19 nt, Homo sapiens
  misc_RNA (1)...(19): siRNA sense strand
aaacaacccuuuugcauuu

SEQ ID NO: 274111 - RNA, 19 nt, Homo sapiens
  misc_RNA (1)...(19): siRNA sense strand
uaacaacuuuggccaugaa

SEQ ID NO: 274112 - RNA, 19 nt, Homo sapiens
  misc_RNA (1)...(19): siRNA sense strand
ugaacgaucuuugaauuug

SEQ ID NO: 274113 - RNA, 19 nt, Homo sapiens
  misc_RNA (1)...(19): siRNA sense strand
caaagaagaaagugaaaga

SEQ ID NO: 274114 - RNA, 19 nt, Homo sapiens
  misc_RNA (1)...(19): siRNA sense strand
caucaaaccaagcaucaua

SEQ ID NO: 274115 - RNA, 19 nt, Homo sapiens
  misc_RNA (1)...(19): siRNA sense strand
agacuggugugauggauaa

SEQ ID NO: 274116 - RNA, 19 nt, Homo sapiens
  misc_RNA (1)...(19): siRNA sense strand
aagaugaccuaacugaauu

SEQ ID NO: 274117 - RNA, 19 nt, Homo sapiens
  misc_RNA (1)...(19): siRNA sense strand
gugaaagaacugagaauuu

SEQ ID NO: 274118 - RNA, 19 nt, Homo sapiens
  misc_RNA (1)...(19): siRNA sense strand
uaaucuaccuuauggaaug

SEQ ID NO: 274119 - RNA, 19 nt, Homo sapiens
  misc_RNA (1)...(19): siRNA sense strand
gauccagacuucaaauaca

SEQ ID NO: 274120 - RNA, 19 nt, Homo sapiens
  misc_RNA (1)...(19): siRNA sense strand
caacaugaugacugaaaua

SEQ ID NO: 274121 - RNA, 19 nt, Homo sapiens
  misc_RNA (1)...(19): siRNA sense strand
gaaagugaaagaacugaga

SEQ ID NO: 274122 - RNA, 19 nt, Homo sapiens
  misc_RNA (1)...(19): siRNA sense strand
agaagauacucaacgaauu

SEQ ID NO: 274123 - RNA, 19 nt, Homo sapiens
  misc_RNA (1)...(19): siRNA sense strand
gauggauaaucuucuagaa

SEQ ID NO: 274124 - RNA, 19 nt, Homo sapiens
  misc_RNA (1)...(19): siRNA sense strand
gaacacauaaacaacauca

SEQ ID NO: 274125 - RNA, 19 nt, Homo sapiens
  misc_RNA (1)...(19): siRNA sense strand
agaauuaucugagaacugu

SEQ ID NO: 274126 - RNA, 19 nt, Homo sapiens
  misc_RNA (1)...(19): siRNA sense strand
caaaguuucagcucaaauu

SEQ ID NO: 274127 - RNA, 19 nt, Homo sapiens
  misc_RNA (1)...(19): siRNA sense strand
ugagaugguuguccaguau

SEQ ID NO: 274128 - RNA, 19 nt, Homo sapiens
  misc_RNA (1)...(19): siRNA sense strand
caguaacucuugccuguga

SEQ ID NO: 274129 - RNA, 19 nt, Homo sapiens
  misc_RNA (1)...(19): siRNA sense strand
gaauuuugcuacucagaua

SEQ ID NO: 274130 - RNA, 19 nt, Homo sapiens
  misc_RNA (1)...(19): siRNA sense strand
caaguacucucaaguucau

SEQ ID NO: 274131 - RNA, 19 nt, Homo sapiens
  misc_RNA (1)...(19): siRNA sense strand
ucaaauacaggcaaagauu

SEQ ID NO: 274132 - RNA, 19 nt, Homo sapiens
  misc_RNA (1)...(19): siRNA sense strand
ugaaggucuuggacucuua

SEQ ID NO: 274133 - RNA, 19 nt, Homo sapiens
  misc_RNA (1)...(19): siRNA sense strand
ggagguuaaugaagacaug

SEQ ID NO: 274134 - RNA, 19 nt, Homo sapiens
  misc_RNA (1)...(19): siRNA sense strand
cagcucagccauuauauga

SEQ ID NO: 274135 - RNA, 19 nt, Homo sapiens
  misc_RNA (1)...(19): siRNA sense strand
caaagagggugaugagacu

SEQ ID NO: 274136 - RNA, 19 nt, Homo sapiens
  misc_RNA (1)...(19): siRNA sense strand
caacuuccuuuguaagauc

SEQ ID NO: 274137 - RNA, 19 nt, Homo sapiens
  misc_RNA (1)...(19): siRNA sense strand
acaugaaccuuaacgaaga

SEQ ID NO: 274138 - RNA, 19 nt, Homo sapiens
  misc_RNA (1)...(19): siRNA sense strand
gccauuauaugaugaacga

SEQ ID NO: 274139 - RNA, 19 nt, Homo sapiens
  misc_RNA (1)...(19): siRNA sense strand
caaagacagugagcauaga

SEQ ID NO: 274140 - RNA, 19 nt, Homo sapiens
  misc_RNA (1)...(19): siRNA sense strand
agaguuaguucuucuuguu

SEQ ID NO: 274141 - RNA, 19 nt, Homo sapiens
  misc_RNA (1)...(19): siRNA sense strand
ugaaugaagucuaccaucu

SEQ ID NO: 274142 - RNA, 19 nt, Homo sapiens
  misc_RNA (1)...(19): siRNA sense strand
caacagcagcagaaagaaa

SEQ ID NO: 274143 - RNA, 19 nt, Homo sapiens
  misc_RNA (1)...(19): siRNA sense strand
ccucaaagcauuuaugaau

SEQ ID NO: 274144 - RNA, 19 nt, Homo sapiens
  misc_RNA (1)...(19): siRNA sense strand
gauuagacaucgauuuaac

SEQ ID NO: 274145 - RNA, 19 nt, Homo sapiens
  misc_RNA (1)...(19): siRNA sense strand
acaaucaggugcagcauuc

SEQ ID NO: 274146 - RNA, 19 nt, Homo sapiens
  misc_RNA (1)...(19): siRNA sense strand
cguagaaagugcaagcaaa

SEQ ID NO: 274147 - RNA, 19 nt, Homo sapiens
  misc_RNA (1)...(19): siRNA sense strand
ggcgaaaguugaagaaagu

SEQ ID NO: 274148 - RNA, 19 nt, Homo sapiens
  misc_RNA (1)...(19): siRNA sense strand
gaaccuuaacgaagagaaa

SEQ ID NO: 274149 - RNA, 19 nt, Homo sapiens
  misc_RNA (1)...(19): siRNA sense strand
gaagaaagugaaagaacug

SEQ ID NO: 274150 - RNA, 19 nt, Homo sapiens
  misc_RNA (1)...(19): siRNA sense strand
agacugggccuacaaagaa

SEQ ID NO: 274151 - RNA, 19 nt, Homo sapiens
  misc_RNA (1)...(19): siRNA sense strand
gagaaucaauuggucaaag

SEQ ID NO: 274152 - RNA, 19 nt, Homo sapiens
  misc_RNA (1)...(19): siRNA sense strand
gaaaguugaagaaagugaa

SEQ ID NO: 274153 - RNA, 19 nt, Homo sapiens
  misc_RNA (1)...(19): siRNA sense strand
augaugagcuugauauuca

SEQ ID NO: 274154 - RNA, 19 nt, Homo sapiens
  misc_RNA (1)...(19): siRNA sense strand
uggaggacaugaaccuuaa

SEQ ID NO: 274155 - RNA, 19 nt, Homo sapiens
  misc_RNA (1)...(19): siRNA sense strand
gugagaugguuguccagua

SEQ ID NO: 274156 - RNA, 19 nt, Homo sapiens
  misc_RNA (1)...(19): siRNA sense strand
ucuagaagcccuacaauca

SEQ ID NO: 274157 - RNA, 19 nt, Homo sapiens
  misc_RNA (1)...(19): siRNA sense strand
aaacccaaauugaacauuc

SEQ ID NO: 274158 - RNA, 19 nt, Homo sapiens
  misc_RNA (1)...(19): siRNA sense strand
gguuaagagucaaagaaga

SEQ ID NO: 274159 - RNA, 19 nt, Homo sapiens
  misc_RNA (1)...(19): siRNA sense strand
agaaucaauuggucaaaga

SEQ ID NO: 274160 - RNA, 19 nt, Homo sapiens
  misc_RNA (1)...(19): siRNA sense strand
gaaugaagucuaccaucuu

SEQ ID NO: 274161 - RNA, 19 nt, Homo sapiens
  misc_RNA (1)...(19): siRNA sense strand
gcagaaauggaugauauga

SEQ ID NO: 274162 - RNA, 19 nt, Homo sapiens
  misc_RNA (1)...(19): siRNA sense strand
gacaagaagaaucaguaua

SEQ ID NO: 274163 - RNA, 19 nt, Homo sapiens
  misc_RNA (1)...(19): siRNA sense strand
ugaauaugaugaccucugu

SEQ ID NO: 274164 - RNA, 19 nt, Homo sapiens
  misc_RNA (1)...(19): siRNA sense strand
uaagagaagagaaauggaa

SEQ ID NO: 274165 - RNA, 19 nt, Homo sapiens
  misc_RNA (1)...(19): siRNA sense strand
uacaaagacugcccgagaa

SEQ ID NO: 274166 - RNA, 19 nt, Homo sapiens
  misc_RNA (1)...(19): siRNA sense strand
ucaagaaacucuacaagaa

SEQ ID NO: 274167 - RNA, 19 nt, Homo sapiens
  misc_RNA (1)...(19): siRNA sense strand
ucacugaccugggcuacua

SEQ ID NO: 274168 - RNA, 19 nt, Homo sapiens
  misc_RNA (1)...(19): siRNA sense strand
gaaagccgcguacgaucua

SEQ ID NO: 274169 - RNA, 19 nt, Homo sapiens
  misc_RNA (1)...(19): siRNA sense strand
gagcacagucccaauaaca

SEQ ID NO: 274170 - RNA, 19 nt, Homo sapiens
  misc_RNA (1)...(19): siRNA sense strand
gcacagucccaauaacagu

SEQ ID NO: 274171 - RNA, 19 nt, Homo sapiens
  misc_RNA (1)...(19): siRNA sense strand
caccaccaauucaaucuca

SEQ ID NO: 274172 - RNA, 19 nt, Homo sapiens
  misc_RNA (1)...(19): siRNA sense strand
caagaaacucuacaagaac

SEQ ID NO: 274173 - RNA, 19 nt, Homo sapiens
  misc_RNA (1)...(19): siRNA sense strand
ccaagucggaauauaccua

SEQ ID NO: 274174 - RNA, 19 nt, Homo sapiens
  misc_RNA (1)...(19): siRNA sense strand
gugauuccauggccugcaa

SEQ ID NO: 274175 - RNA, 19 nt, Homo sapiens
  misc_RNA (1)...(19): siRNA sense strand
acaccuaccaccaccaauu

SEQ ID NO: 274176 - RNA, 19 nt, Homo sapiens
  misc_RNA (1)...(19): siRNA sense strand
ggagcacagucccaauaac

SEQ ID NO: 274177 - RNA, 19 nt, Homo sapiens
  misc_RNA (1)...(19): siRNA sense strand
gcccgagucuucugucacu

SEQ ID NO: 274178 - RNA, 19 nt, Homo sapiens
  misc_RNA (1)...(19): siRNA sense strand
gcagcauccucaccgacau

SEQ ID NO: 274179 - RNA, 19 nt, Homo sapiens
  misc_RNA (1)...(19): siRNA sense strand
ccaauaacagugauuccau

SEQ ID NO: 274180 - RNA, 19 nt, Homo sapiens
  misc_RNA (1)...(19): siRNA sense strand
gacaucuccagcucccuua

SEQ ID NO: 274181 - RNA, 19 nt, Homo sapiens
  misc_RNA (1)...(19): siRNA sense strand
cgaaagccgcguacgaucu

SEQ ID NO: 274182 - RNA, 19 nt, Homo sapiens
  misc_RNA (1)...(19): siRNA sense strand
gaggugcgcauggugaaug

SEQ ID NO: 274183 - RNA, 19 nt, Homo sapiens
  misc_RNA (1)...(19): siRNA sense strand
cuggagcacagucccaaua

SEQ ID NO: 274184 - RNA, 19 nt, Homo sapiens
  misc_RNA (1)...(19): siRNA sense strand
uggagcacagucccaauaa

SEQ ID NO: 274185 - RNA, 19 nt, Homo sapiens
  misc_RNA (1)...(19): siRNA sense strand
ucgcccaagucggaauaua

SEQ ID NO: 274186 - RNA, 19 nt, Homo sapiens
  misc_RNA (1)...(19): siRNA sense strand
aagcagaggugcgcauggu

SEQ ID NO: 274187 - RNA, 19 nt, Homo sapiens
  misc_RNA (1)...(19): siRNA sense strand
gaaggaggagccggaagca

SEQ ID NO: 274188 - RNA, 19 nt, Homo sapiens
  misc_RNA (1)...(19): siRNA sense strand
ccugguaucacgcacagaa

SEQ ID NO: 274189 - RNA, 19 nt, Homo sapiens
  misc_RNA (1)...(19): siRNA sense strand
caccuaccaccaccaauuc

SEQ ID NO: 274190 - RNA, 19 nt, Homo sapiens
  misc_RNA (1)...(19): siRNA sense strand
ccaccaauucaaucucaau

SEQ ID NO: 274191 - RNA, 19 nt, Homo sapiens
  misc_RNA (1)...(19): siRNA sense strand
gcagccagcucaaucaauu

SEQ ID NO: 274192 - RNA, 19 nt, Homo sapiens
  misc_RNA (1)...(19): siRNA sense strand
cagagaagguuucagaaga

SEQ ID NO: 274193 - RNA, 19 nt, Homo sapiens
  misc_RNA (1)...(19): siRNA sense strand
cguaaacccaggacuauuu

SEQ ID NO: 274194 - RNA, 19 nt, Homo sapiens
  misc_RNA (1)...(19): siRNA sense strand
caacuuugcccgagucuuc

SEQ ID NO: 274195 - RNA, 19 nt, Homo sapiens
  misc_RNA (1)...(19): siRNA sense strand
gcuuucagcuggccgcauu

SEQ ID NO: 274196 - RNA, 19 nt, Homo sapiens
  misc_RNA (1)...(19): siRNA sense strand
caaagcuuaugccgacuau

SEQ ID NO: 274197 - RNA, 19 nt, Homo sapiens
  misc_RNA (1)...(19): siRNA sense strand
ucgcugggauugacacaaa

SEQ ID NO: 274198 - RNA, 19 nt, Homo sapiens
  misc_RNA (1)...(19): siRNA sense strand
gaauggcaaaccaaagaaa

SEQ ID NO: 274199 - RNA, 19 nt, Homo sapiens
  misc_RNA (1)...(19): siRNA sense strand
gacuauuuauuccagcuuu

SEQ ID NO: 274200 - RNA, 19 nt, Homo sapiens
  misc_RNA (1)...(19): siRNA sense strand
uuacagagaagguuucaga

SEQ ID NO: 274201 - RNA, 19 nt, Homo sapiens
  misc_RNA (1)...(19): siRNA sense strand
gaagguuucagaagacuca

SEQ ID NO: 274202 - RNA, 19 nt, Homo sapiens
  misc_RNA (1)...(19): siRNA sense strand
gugaauggcaaaccaaaga

SEQ ID NO: 274203 - RNA, 19 nt, Homo sapiens
  misc_RNA (1)...(19): siRNA sense strand
ccaaagaaaguucguaaac

SEQ ID NO: 274204 - RNA, 19 nt, Homo sapiens
  misc_RNA (1)...(19): siRNA sense strand
ccaaccagccagagaaaga

SEQ ID NO: 274205 - RNA, 19 nt, Homo sapiens
  misc_RNA (1)...(19): siRNA sense strand
gcgacccaauggcguguaa

SEQ ID NO: 274206 - RNA, 19 nt, Homo sapiens
  misc_RNA (1)...(19): siRNA sense strand
caaagaaaguucguaaacc

SEQ ID NO: 274207 - RNA, 19 nt, Homo sapiens
  misc_RNA (1)...(19): siRNA sense strand
ucucaggaaucgccaacuu

SEQ ID NO: 274208 - RNA, 19 nt, Homo sapiens
  misc_RNA (1)...(19): siRNA sense strand
guucguaaacccaggacua

SEQ ID NO: 274209 - RNA, 19 nt, Homo sapiens
  misc_RNA (1)...(19): siRNA sense strand
gagaauggugaauggcaaa

SEQ ID NO: 274210 - RNA, 19 nt, Homo sapiens
  misc_RNA (1)...(19): siRNA sense strand
aaacccaggacuauuuauu

SEQ ID NO: 274211 - RNA, 19 nt, Homo sapiens
  misc_RNA (1)...(19): siRNA sense strand
ucaggaaucgccaacuuug

SEQ ID NO: 274212 - RNA, 19 nt, Homo sapiens
  misc_RNA (1)...(19): siRNA sense strand
ccuccgggacacucuauua

SEQ ID NO: 274213 - RNA, 19 nt, Homo sapiens
  misc_RNA (1)...(19): siRNA sense strand
gacaggaguguuugacaga

SEQ ID NO: 274214 - RNA, 19 nt, Homo sapiens
  misc_RNA (1)...(19): siRNA sense strand
ccaccaaccagccagagaa

SEQ ID NO: 274215 - RNA, 19 nt, Homo sapiens
  misc_RNA (1)...(19): siRNA sense strand
ccaaagcuuaugccgacua

SEQ ID NO: 274216 - RNA, 19 nt, Homo sapiens
  misc_RNA (1)...(19): siRNA sense strand
caccauccgucucaggaau

SEQ ID NO: 274217 - RNA, 19 nt, Homo sapiens
  misc_RNA (1)...(19): siRNA sense strand
cuaccgauucugacuacua

SEQ ID NO: 274218 - RNA, 19 nt, Homo sapiens
  misc_RNA (1)...(19): siRNA sense strand
aaacacaggugaaaaucug

SEQ ID NO: 274219 - RNA, 19 nt, Homo sapiens
  misc_RNA (1)...(19): siRNA sense strand
gacacaaacacaggugaaa

SEQ ID NO: 274220 - RNA, 19 nt, Homo sapiens
  misc_RNA (1)...(19): siRNA sense strand
gguuucagaagacucagua

SEQ ID NO: 274221 - RNA, 19 nt, Homo sapiens
  misc_RNA (1)...(19): siRNA sense strand
gagaagguuucagaagacu

SEQ ID NO: 274222 - RNA, 19 nt, Homo sapiens
  misc_RNA (1)...(19): siRNA sense strand
gaggugagaauggugaaug

SEQ ID NO: 274223 - RNA, 19 nt, Homo sapiens
  misc_RNA (1)...(19): siRNA sense strand
caaccagccagagaaagaa

SEQ ID NO: 274224 - RNA, 19 nt, Homo sapiens
  misc_RNA (1)...(19): siRNA sense strand
aagcuuaugccgacuauag

SEQ ID NO: 274225 - RNA, 19 nt, Homo sapiens
  misc_RNA (1)...(19): siRNA sense strand
gcuacccagccaaagcuua

SEQ ID NO: 274226 - RNA, 19 nt, Homo sapiens
  misc_RNA (1)...(19): siRNA sense strand
agagaagguuucagaagac

SEQ ID NO: 274227 - RNA, 19 nt, Homo sapiens
  misc_RNA (1)...(19): siRNA sense strand
aaccaaagaaaguucguaa

SEQ ID NO: 274228 - RNA, 19 nt, Homo sapiens
  misc_RNA (1)...(19): siRNA sense strand
cauccgauccggcgacuuc

SEQ ID NO: 274229 - RNA, 19 nt, Homo sapiens
  misc_RNA (1)...(19): siRNA sense strand
gcaccauccgucucaggaa

SEQ ID NO: 274230 - RNA, 19 nt, Homo sapiens
  misc_RNA (1)...(19): siRNA sense strand
cagcuggccgcauuacaga

SEQ ID NO: 274231 - RNA, 19 nt, Homo sapiens
  misc_RNA (1)...(19): siRNA sense strand
ugacacaaacacaggugaa

SEQ ID NO: 274232 - RNA, 19 nt, Homo sapiens
  misc_RNA (1)...(19): siRNA sense strand
acaggaguguuugacagaa

SEQ ID NO: 274233 - RNA, 19 nt, Homo sapiens
  misc_RNA (1)...(19): siRNA sense strand
ugaauggcaaaccaaagaa

SEQ ID NO: 274234 - RNA, 19 nt, Homo sapiens
  misc_RNA (1)...(19): siRNA sense strand
caggaguguuugacagaag

SEQ ID NO: 274235 - RNA, 19 nt, Homo sapiens
  misc_RNA (1)...(19): siRNA sense strand
cuacccagccaaagcuuau

SEQ ID NO: 274236 - RNA, 19 nt, Homo sapiens
  misc_RNA (1)...(19): siRNA sense strand
gcuggccgcauuacagaga

SEQ ID NO: 274237 - RNA, 19 nt, Homo sapiens
  misc_RNA (1)...(19): siRNA sense strand
ccagacguccgcagcuaug

SEQ ID NO: 274238 - RNA, 19 nt, Homo sapiens
  misc_RNA (1)...(19): siRNA sense strand
cagcuaccgauucugacua

SEQ ID NO: 274239 - RNA, 19 nt, Homo sapiens
  misc_RNA (1)...(19): siRNA sense strand
caccaaccagccagagaaa

SEQ ID NO: 274240 - RNA, 19 nt, Homo sapiens
  misc_RNA (1)...(19): siRNA sense strand
uaccgauucugacuacuac

SEQ ID NO: 274241 - RNA, 19 nt, Homo sapiens
  misc_RNA (1)...(19): siRNA sense strand
gcauuacagagaagguuuc

SEQ ID NO: 274242 - RNA, 19 nt, Homo sapiens
  misc_RNA (1)...(19): siRNA sense strand
ggacuauuuauuccagcuu

SEQ ID NO: 274243 - RNA, 19 nt, Homo sapiens
  misc_RNA (1)...(19): siRNA sense strand
uggcaaaccaaagaaaguu

SEQ ID NO: 274244 - RNA, 19 nt, Homo sapiens
  misc_RNA (1)...(19): siRNA sense strand
ccacaucuaccucaaauaa

SEQ ID NO: 274245 - RNA, 19 nt, Homo sapiens
  misc_RNA (1)...(19): siRNA sense strand
caaauaacucguugccuua

SEQ ID NO: 274246 - RNA, 19 nt, Homo sapiens
  misc_RNA (1)...(19): siRNA sense strand
ggaggaggauuacgaggau

SEQ ID NO: 274247 - RNA, 19 nt, Homo sapiens
  misc_RNA (1)...(19): siRNA sense strand
ggacagagagcccgagagu

SEQ ID NO: 274248 - RNA, 19 nt, Homo sapiens
  misc_RNA (1)...(19): siRNA sense strand
gcaugucgguggagaucaa

SEQ ID NO: 274249 - RNA, 19 nt, Homo sapiens
  misc_RNA (1)...(19): siRNA sense strand
ggacuuacgaggagcaguu

SEQ ID NO: 274250 - RNA, 19 nt, Homo sapiens
  misc_RNA (1)...(19): siRNA sense strand
ggagaucaacggcaucaug

SEQ ID NO: 274251 - RNA, 19 nt, Homo sapiens
  misc_RNA (1)...(19): siRNA sense strand
gaaacuacaggccgugaug

SEQ ID NO: 274252 - RNA, 19 nt, Homo sapiens
  misc_RNA (1)...(19): siRNA sense strand
ggacaugaagcccaaaugg

SEQ ID NO: 274253 - RNA, 19 nt, Homo sapiens
  misc_RNA (1)...(19): siRNA sense strand
ggacccaauacaugaagua

SEQ ID NO: 274254 - RNA, 19 nt, Homo sapiens
  misc_RNA (1)...(19): siRNA sense strand
aggaggagauggaggaaga

SEQ ID NO: 274255 - RNA, 19 nt, Homo sapiens
  misc_RNA (1)...(19): siRNA sense strand
gagaucaacggcaucaugu

SEQ ID NO: 274256 - RNA, 19 nt, Homo sapiens
  misc_RNA (1)...(19): siRNA sense strand
ggaauuccuggaugacuug

SEQ ID NO: 274257 - RNA, 19 nt, Homo sapiens
  misc_RNA (1)...(19): siRNA sense strand
uuaagcagcucuacgaacu

SEQ ID NO: 274258 - RNA, 19 nt, Homo sapiens
  misc_RNA (1)...(19): siRNA sense strand
caggagaggagcacuuuga

SEQ ID NO: 274259 - RNA, 19 nt, Homo sapiens
  misc_RNA (1)...(19): siRNA sense strand
caagaaagaggaggacuca

SEQ ID NO: 274260 - RNA, 19 nt, Homo sapiens
  misc_RNA (1)...(19): siRNA sense strand
uggaacagcugcgggagaa

SEQ ID NO: 274261 - RNA, 19 nt, Homo sapiens
  misc_RNA (1)...(19): siRNA sense strand
aagaagcuguggcgugaga

SEQ ID NO: 274262 - RNA, 19 nt, Homo sapiens
  misc_RNA (1)...(19): siRNA sense strand
gaucaacggcaucauguac

SEQ ID NO: 274263 - RNA, 19 nt, Homo sapiens
  misc_RNA (1)...(19): siRNA sense strand
cugcagagccuccggagaa

SEQ ID NO: 274264 - RNA, 19 nt, Homo sapiens
  misc_RNA (1)...(19): siRNA sense strand
aggaggaggaggaggauua

SEQ ID NO: 274265 - RNA, 19 nt, Homo sapiens
  misc_RNA (1)...(19): siRNA sense strand
ccaggacucugcugugaac

SEQ ID NO: 274266 - RNA, 19 nt, Homo sapiens
  misc_RNA (1)...(19): siRNA sense strand
gaugacuuguucagcuuca

SEQ ID NO: 274267 - RNA, 19 nt, Homo sapiens
  misc_RNA (1)...(19): siRNA sense strand
ucguggaggucaucaacaa

SEQ ID NO: 274268 - RNA, 19 nt, Homo sapiens
  misc_RNA (1)...(19): siRNA sense strand
acaucuaccucaaauaacu

SEQ ID NO: 274269 - RNA, 19 nt, Homo sapiens
  misc_RNA (1)...(19): siRNA sense strand
caaccucugcucccaacaa

SEQ ID NO: 274270 - RNA, 19 nt, Homo sapiens
  misc_RNA (1)...(19): siRNA sense strand
cgccaggacucugcuguga

SEQ ID NO: 274271 - RNA, 19 nt, Homo sapiens
  misc_RNA (1)...(19): siRNA sense strand
gcaacagcaucagcauguc

SEQ ID NO: 274272 - RNA, 19 nt, Homo sapiens
  misc_RNA (1)...(19): siRNA sense strand
gggaggaggaggagaugga

SEQ ID NO: 274273 - RNA, 19 nt, Homo sapiens
  misc_RNA (1)...(19): siRNA sense strand
cagagccuccggagaagaa

SEQ ID NO: 274274 - RNA, 19 nt, Homo sapiens
  misc_RNA (1)...(19): siRNA sense strand
uuugguggcucccucuuug

SEQ ID NO: 274275 - RNA, 19 nt, Homo sapiens
  misc_RNA (1)...(19): siRNA sense strand
uggaggucaucaacaagaa

SEQ ID NO: 274276 - RNA, 19 nt, Homo sapiens
  misc_RNA (1)...(19): siRNA sense strand
uggaugacuuguucagcuu

SEQ ID NO: 274277 - RNA, 19 nt, Homo sapiens
  misc_RNA (1)...(19): siRNA sense strand
aaccucugcucccaacaaa

SEQ ID NO: 274278 - RNA, 19 nt, Homo sapiens
  misc_RNA (1)...(19): siRNA sense strand
caucauguacacaggaguu

SEQ ID NO: 274279 - RNA, 19 nt, Homo sapiens
  misc_RNA (1)...(19): siRNA sense strand
gccaggagaggagcacuuu

SEQ ID NO: 274280 - RNA, 19 nt, Homo sapiens
  misc_RNA (1)...(19): siRNA sense strand
ccccuaagaucaagaaaga

SEQ ID NO: 274281 - RNA, 19 nt, Homo sapiens
  misc_RNA (1)...(19): siRNA sense strand
aaauaacucguugccuuaa

SEQ ID NO: 274282 - RNA, 19 nt, Homo sapiens
  misc_RNA (1)...(19): siRNA sense strand
ggaugcagcgggcucagau

SEQ ID NO: 274283 - RNA, 19 nt, Homo sapiens
  misc_RNA (1)...(19): siRNA sense strand
ggagcacuuugaggacaug

SEQ ID NO: 274284 - RNA, 19 nt, Homo sapiens
  misc_RNA (1)...(19): siRNA sense strand
guggaggucaucaacaaga

SEQ ID NO: 274285 - RNA, 19 nt, Homo sapiens
  misc_RNA (1)...(19): siRNA sense strand
cccaugagcauucggauca

SEQ ID NO: 274286 - RNA, 19 nt, Homo sapiens
  misc_RNA (1)...(19): siRNA sense strand
cuccacaucuaccucaaau

SEQ ID NO: 274287 - RNA, 19 nt, Homo sapiens
  misc_RNA (1)...(19): siRNA sense strand
cuuacgaggagcaguuuaa

SEQ ID NO: 274288 - RNA, 19 nt, Homo sapiens
  misc_RNA (1)...(19): siRNA sense strand
aacgugcacuccagcagaa

SEQ ID NO: 274289 - RNA, 19 nt, Homo sapiens
  misc_RNA (1)...(19): siRNA sense strand
gcucuccucacccaagcua

SEQ ID NO: 274290 - RNA, 19 nt, Homo sapiens
  misc_RNA (1)...(19): siRNA sense strand
cugcggacccaauacauga

SEQ ID NO: 274291 - RNA, 19 nt, Homo sapiens
  misc_RNA (1)...(19): siRNA sense strand
cccaauacaugaaguaccu

SEQ ID NO: 274292 - RNA, 19 nt, Homo sapiens
  misc_RNA (1)...(19): siRNA sense strand
cagcugcccaugagcauuc

SEQ ID NO: 274293 - RNA, 19 nt, Homo sapiens
  misc_RNA (1)...(19): siRNA sense strand
uccacacccuccacaucua

SEQ ID NO: 274294 - RNA, 19 nt, Homo sapiens
  misc_RNA (1)...(19): siRNA sense strand
gaagcuguggcgugagauc

SEQ ID NO: 274295 - RNA, 19 nt, Homo sapiens
  misc_RNA (1)...(19): siRNA sense strand
ggaggaaacaccggaacca

SEQ ID NO: 274296 - RNA, 19 nt, Homo sapiens
  misc_RNA (1)...(19): siRNA sense strand
cagccaagccuccgaaagc

SEQ ID NO: 274297 - RNA, 19 nt, Homo sapiens
  misc_RNA (1)...(19): siRNA sense strand
gcagagccuccggagaaga

SEQ ID NO: 274298 - RNA, 19 nt, Homo sapiens
  misc_RNA (1)...(19): siRNA sense strand
ucacccugcggacccaaua

SEQ ID NO: 274299 - RNA, 19 nt, Homo sapiens
  misc_RNA (1)...(19): siRNA sense strand
uuucagaucucccuuaaga

SEQ ID NO: 274300 - RNA, 19 nt, Homo sapiens
  misc_RNA (1)...(19): siRNA sense strand
gaacagggccacugacucu

SEQ ID NO: 274301 - RNA, 19 nt, Homo sapiens
  misc_RNA (1)...(19): siRNA sense strand
ccucaucccucaccacaga

SEQ ID NO: 274302 - RNA, 19 nt, Homo sapiens
  misc_RNA (1)...(19): siRNA sense strand
cccaggaggucacuucuga

SEQ ID NO: 274303 - RNA, 19 nt, Homo sapiens
  misc_RNA (1)...(19): siRNA sense strand
ggcuggaccuggaaacuga

SEQ ID NO: 274304 - RNA, 19 nt, Homo sapiens
  misc_RNA (1)...(19): siRNA sense strand
uggaccaccugaugaauau

SEQ ID NO: 274305 - RNA, 19 nt, Homo sapiens
  misc_RNA (1)...(19): siRNA sense strand
ucggagaacuuucagaucu

SEQ ID NO: 274306 - RNA, 19 nt, Homo sapiens
  misc_RNA (1)...(19): siRNA sense strand
ccucuucgacugugacuuu

SEQ ID NO: 274307 - RNA, 19 nt, Homo sapiens
  misc_RNA (1)...(19): siRNA sense strand
gcagaugguuauggugauc

SEQ ID NO: 274308 - RNA, 19 nt, Homo sapiens
  misc_RNA (1)...(19): siRNA sense strand
gagaagucacgcuaugaga

SEQ ID NO: 274309 - RNA, 19 nt, Homo sapiens
  misc_RNA (1)...(19): siRNA sense strand
gaggaguucaucagccuuu

SEQ ID NO: 274310 - RNA, 19 nt, Homo sapiens
  misc_RNA (1)...(19): siRNA sense strand
cagagcagaugguuauggu

SEQ ID NO: 274311 - RNA, 19 nt, Homo sapiens
  misc_RNA (1)...(19): siRNA sense strand
cacugacucugccaccaua

SEQ ID NO: 274312 - RNA, 19 nt, Homo sapiens
  misc_RNA (1)...(19): siRNA sense strand
gagcaagaaccgcuguugu

SEQ ID NO: 274313 - RNA, 19 nt, Homo sapiens
  misc_RNA (1)...(19): siRNA sense strand
gagggcauccagcucauug

SEQ ID NO: 274314 - RNA, 19 nt, Homo sapiens
  misc_RNA (1)...(19): siRNA sense strand
ggagaagucacgcuaugag

SEQ ID NO: 274315 - RNA, 19 nt, Homo sapiens
  misc_RNA (1)...(19): siRNA sense strand
gcagcuggaccaccugaug

SEQ ID NO: 274316 - RNA, 19 nt, Homo sapiens
  misc_RNA (1)...(19): siRNA sense strand
cacugaaucugaccaccaa

SEQ ID NO: 274317 - RNA, 19 nt, Homo sapiens
  misc_RNA (1)...(19): siRNA sense strand
gcaaacaaggcccgaucga

SEQ ID NO: 274318 - RNA, 19 nt, Homo sapiens
  misc_RNA (1)...(19): siRNA sense strand
ugacaucaccaacguccuu

SEQ ID NO: 274319 - RNA, 19 nt, Homo sapiens
  misc_RNA (1)...(19): siRNA sense strand
gggaucagcccugggaaga

SEQ ID NO: 274320 - RNA, 19 nt, Homo sapiens
  misc_RNA (1)...(19): siRNA sense strand
ggacucuucggagaacuuu

SEQ ID NO: 274321 - RNA, 19 nt, Homo sapiens
  misc_RNA (1)...(19): siRNA sense strand
ucaggaccuucguagcauu

SEQ ID NO: 274322 - RNA, 19 nt, Homo sapiens
  misc_RNA (1)...(19): siRNA sense strand
ccaagaaguccaagaacca

SEQ ID NO: 274323 - RNA, 19 nt, Homo sapiens
  misc_RNA (1)...(19): siRNA sense strand
gggagaagucacgcuauga

SEQ ID NO: 274324 - RNA, 19 nt, Homo sapiens
  misc_RNA (1)...(19): siRNA sense strand
ggagcaagaaccgcuguug

SEQ ID NO: 274325 - RNA, 19 nt, Homo sapiens
  misc_RNA (1)...(19): siRNA sense strand
cagcuggaccaccugauga

SEQ ID NO: 274326 - RNA, 19 nt, Homo sapiens
  misc_RNA (1)...(19): siRNA sense strand
acuuucagaucucccuuaa

SEQ ID NO: 274327 - RNA, 19 nt, Homo sapiens
  misc_RNA (1)...(19): siRNA sense strand
ucuaugacaucaccaacgu

SEQ ID NO: 274328 - RNA, 19 nt, Homo sapiens
  misc_RNA (1)...(19): siRNA sense strand
caaacaaggcccgaucgau

SEQ ID NO: 274329 - RNA, 19 nt, Homo sapiens
  misc_RNA (1)...(19): siRNA sense strand
cuggaccaccugaugaaua

SEQ ID NO: 274330 - RNA, 19 nt, Homo sapiens
  misc_RNA (1)...(19): siRNA sense strand
gaucccagccagucucuac

SEQ ID NO: 274331 - RNA, 19 nt, Homo sapiens
  misc_RNA (1)...(19): siRNA sense strand
gagaacagggccacugacu

SEQ ID NO: 274332 - RNA, 19 nt, Homo sapiens
  misc_RNA (1)...(19): siRNA sense strand
ccucgcagaucgucaucau

SEQ ID NO: 274333 - RNA, 19 nt, Homo sapiens
  misc_RNA (1)...(19): siRNA sense strand
ugaugaauaucuguacuac

SEQ ID NO: 274334 - RNA, 19 nt, Homo sapiens
  misc_RNA (1)...(19): siRNA sense strand
gagaccucuucgacuguga

SEQ ID NO: 274335 - RNA, 19 nt, Homo sapiens
  misc_RNA (1)...(19): siRNA sense strand
gcagagcagaugguuaugg

SEQ ID NO: 274336 - RNA, 19 nt, Homo sapiens
  misc_RNA (1)...(19): siRNA sense strand
agaucucccuuaagagcaa

SEQ ID NO: 274337 - RNA, 19 nt, Homo sapiens
  misc_RNA (1)...(19): siRNA sense strand
gcaucuaugacaucaccaa

SEQ ID NO: 274338 - RNA, 19 nt, Homo sapiens
  misc_RNA (1)...(19): siRNA sense strand
gaucucccuuaagagcaaa

SEQ ID NO: 274339 - RNA, 19 nt, Homo sapiens
  misc_RNA (1)...(19): siRNA sense strand
ggaccuucguagcauugca

SEQ ID NO: 274340 - RNA, 19 nt, Homo sapiens
  misc_RNA (1)...(19): siRNA sense strand
cggcgcaucuaugacauca

SEQ ID NO: 274341 - RNA, 19 nt, Homo sapiens
  misc_RNA (1)...(19): siRNA sense strand
ggggagaagucacgcuaug

SEQ ID NO: 274342 - RNA, 19 nt, Homo sapiens
  misc_RNA (1)...(19): siRNA sense strand
ugucaggaccuucguagca

SEQ ID NO: 274343 - RNA, 19 nt, Homo sapiens
  misc_RNA (1)...(19): siRNA sense strand
gagcggcacuugacaauga

SEQ ID NO: 274344 - RNA, 19 nt, Homo sapiens
  misc_RNA (1)...(19): siRNA sense strand
gaacgcagcacuucagaau

SEQ ID NO: 274345 - RNA, 19 nt, Homo sapiens
  misc_RNA (1)...(19): siRNA sense strand
ggaacugccugcacaaucu

SEQ ID NO: 274346 - RNA, 19 nt, Homo sapiens
  misc_RNA (1)...(19): siRNA sense strand
gggaugugcuggcucauug

SEQ ID NO: 274347 - RNA, 19 nt, Homo sapiens
  misc_RNA (1)...(19): siRNA sense strand
ucaagcagcagcaacaaua

SEQ ID NO: 274348 - RNA, 19 nt, Homo sapiens
  misc_RNA (1)...(19): siRNA sense strand
ggacaagaacgcagcacuu

SEQ ID NO: 274349 - RNA, 19 nt, Homo sapiens
  misc_RNA (1)...(19): siRNA sense strand
gacccaagcagaaguaaau

SEQ ID NO: 274350 - RNA, 19 nt, Homo sapiens
  misc_RNA (1)...(19): siRNA sense strand
uacauugccuucugcauca

SEQ ID NO: 274351 - RNA, 19 nt, Homo sapiens
  misc_RNA (1)...(19): siRNA sense strand
gugcucaacuccgccauga

SEQ ID NO: 274352 - RNA, 19 nt, Homo sapiens
  misc_RNA (1)...(19): siRNA sense strand
gcaucuacuuccuggugaa

SEQ ID NO: 274353 - RNA, 19 nt, Homo sapiens
  misc_RNA (1)...(19): siRNA sense strand
acgcagcacuucagaaugg

SEQ ID NO: 274354 - RNA, 19 nt, Homo sapiens
  misc_RNA (1)...(19): siRNA sense strand
ccaagcagaaguaaaucaa

SEQ ID NO: 274355 - RNA, 19 nt, Homo sapiens
  misc_RNA (1)...(19): siRNA sense strand
gacaagaacgcagcacuuc

SEQ ID NO: 274356 - RNA, 19 nt, Homo sapiens
  misc_RNA (1)...(19): siRNA sense strand
cuccgaaggucaaggaaga

SEQ ID NO: 274357 - RNA, 19 nt, Homo sapiens
  misc_RNA (1)...(19): siRNA sense strand
gcagcuucaucgucuugga

SEQ ID NO: 274358 - RNA, 19 nt, Homo sapiens
  misc_RNA (1)...(19): siRNA sense strand
ucugaugucuggcaagaag

SEQ ID NO: 274359 - RNA, 19 nt, Homo sapiens
  misc_RNA (1)...(19): siRNA sense strand
ccaccgugcucuucuuggu

SEQ ID NO: 274360 - RNA, 19 nt, Homo sapiens
  misc_RNA (1)...(19): siRNA sense strand
ucacaaccgcauguacuuu

SEQ ID NO: 274361 - RNA, 19 nt, Homo sapiens
  misc_RNA (1)...(19): siRNA sense strand
aaugggaucuucugcaacu

SEQ ID NO: 274362 - RNA, 19 nt, Homo sapiens
  misc_RNA (1)...(19): siRNA sense strand
cauccugcaucauggacaa

SEQ ID NO: 274363 - RNA, 19 nt, Homo sapiens
  misc_RNA (1)...(19): siRNA sense strand
gcucaacuccgccaugaac

SEQ ID NO: 274364 - RNA, 19 nt, Homo sapiens
  misc_RNA (1)...(19): siRNA sense strand
gccguaagguggccaacca

SEQ ID NO: 274365 - RNA, 19 nt, Homo sapiens
  misc_RNA (1)...(19): siRNA sense strand
caaggucaacauucugaug

SEQ ID NO: 274366 - RNA, 19 nt, Homo sapiens
  misc_RNA (1)...(19): siRNA sense strand
cuuacaaggucaacauucu

SEQ ID NO: 274367 - RNA, 19 nt, Homo sapiens
  misc_RNA (1)...(19): siRNA sense strand
caagaacgcagcacuucag

SEQ ID NO: 274368 - RNA, 19 nt, Homo sapiens
  misc_RNA (1)...(19): siRNA sense strand
gcgggagcauuaccaguac

SEQ ID NO: 274369 - RNA, 19 nt, Homo sapiens
  misc_RNA (1)...(19): siRNA sense strand
ucaccaccgugcucuucuu

SEQ ID NO: 274370 - RNA, 19 nt, Homo sapiens
  misc_RNA (1)...(19): siRNA sense strand
gcgcucgacccaagcagaa

SEQ ID NO: 274371 - RNA, 19 nt, Homo sapiens
  misc_RNA (1)...(19): siRNA sense strand
ggcguccaccugcagcuua

SEQ ID NO: 274372 - RNA, 19 nt, Homo sapiens
  misc_RNA (1)...(19): siRNA sense strand
uacaaggucaacauucuga

SEQ ID NO: 274373 - RNA, 19 nt, Homo sapiens
  misc_RNA (1)...(19): siRNA sense strand
guaaaucaagcagcagcaa

SEQ ID NO: 274374 - RNA, 19 nt, Homo sapiens
  misc_RNA (1)...(19): siRNA sense strand
ugaccaucgugauccucua

SEQ ID NO: 274375 - RNA, 19 nt, Homo sapiens
  misc_RNA (1)...(19): siRNA sense strand
ugcgggagcauuaccagua

SEQ ID NO: 274376 - RNA, 19 nt, Homo sapiens
  misc_RNA (1)...(19): siRNA sense strand
ggucaucugcagcuucauc

SEQ ID NO: 274377 - RNA, 19 nt, Homo sapiens
  misc_RNA (1)...(19): siRNA sense strand
agacccugcgggagcauua

SEQ ID NO: 274378 - RNA, 19 nt, Homo sapiens
  misc_RNA (1)...(19): siRNA sense strand
caagcagcagcaacaauag

SEQ ID NO: 274379 - RNA, 19 nt, Homo sapiens
  misc_RNA (1)...(19): siRNA sense strand
uucauccucuuccucauug

SEQ ID NO: 274380 - RNA, 19 nt, Homo sapiens
  misc_RNA (1)...(19): siRNA sense strand
gcucaccaccgugcucuuc

SEQ ID NO: 274381 - RNA, 19 nt, Homo sapiens
  misc_RNA (1)...(19): siRNA sense strand
aaaucaagcagcagcaaca

SEQ ID NO: 274382 - RNA, 19 nt, Homo sapiens
  misc_RNA (1)...(19): siRNA sense strand
ccaaauggauugcuucuga

SEQ ID NO: 274383 - RNA, 19 nt, Homo sapiens
  misc_RNA (1)...(19): siRNA sense strand
gaucuccucuuuaauguug

SEQ ID NO: 274384 - RNA, 19 nt, Homo sapiens
  misc_RNA (1)...(19): siRNA sense strand
gaacgauggugaauucaag

SEQ ID NO: 274385 - RNA, 19 nt, Homo sapiens
  misc_RNA (1)...(19): siRNA sense strand
acaagaacaucaucaagaa

SEQ ID NO: 274386 - RNA, 19 nt, Homo sapiens
  misc_RNA (1)...(19): siRNA sense strand
gccaaacgcugccaguauu

SEQ ID NO: 274387 - RNA, 19 nt, Homo sapiens
  misc_RNA (1)...(19): siRNA sense strand
gcacgagccgcaacgaaua

SEQ ID NO: 274388 - RNA, 19 nt, Homo sapiens
  misc_RNA (1)...(19): siRNA sense strand
caagcacgcuguuccaguu

SEQ ID NO: 274389 - RNA, 19 nt, Homo sapiens
  misc_RNA (1)...(19): siRNA sense strand
gcacagacaccaaauggau

SEQ ID NO: 274390 - RNA, 19 nt, Homo sapiens
  misc_RNA (1)...(19): siRNA sense strand
gacaagaacaucaucaaga

SEQ ID NO: 274391 - RNA, 19 nt, Homo sapiens
  misc_RNA (1)...(19): siRNA sense strand
ucagaaacaugagcauuug

SEQ ID NO: 274392 - RNA, 19 nt, Homo sapiens
  misc_RNA (1)...(19): siRNA sense strand
gaccaagucuccaucucuu

SEQ ID NO: 274393 - RNA, 19 nt, Homo sapiens
  misc_RNA (1)...(19): siRNA sense strand
ucagguuugugaccaauaa

SEQ ID NO: 274394 - RNA, 19 nt, Homo sapiens
  misc_RNA (1)...(19): siRNA sense strand
cagagcugcuucuccagua

SEQ ID NO: 274395 - RNA, 19 nt, Homo sapiens
  misc_RNA (1)...(19): siRNA sense strand
ggacugugaucagguuugu

SEQ ID NO: 274396 - RNA, 19 nt, Homo sapiens
  misc_RNA (1)...(19): siRNA sense strand
gcgauacuauuaugacaag

SEQ ID NO: 274397 - RNA, 19 nt, Homo sapiens
  misc_RNA (1)...(19): siRNA sense strand
ccucaaagcagaagaagug

SEQ ID NO: 274398 - RNA, 19 nt, Homo sapiens
  misc_RNA (1)...(19): siRNA sense strand
caacgaauacauccacuca

SEQ ID NO: 274399 - RNA, 19 nt, Homo sapiens
  misc_RNA (1)...(19): siRNA sense strand
caguacugcuuucuucaaa

SEQ ID NO: 274400 - RNA, 19 nt, Homo sapiens
  misc_RNA (1)...(19): siRNA sense strand
gagcagccuuaguccaguu

SEQ ID NO: 274401 - RNA, 19 nt, Homo sapiens
  misc_RNA (1)...(19): siRNA sense strand
guacugcuuucuucaaacu

SEQ ID NO: 274402 - RNA, 19 nt, Homo sapiens
  misc_RNA (1)...(19): siRNA sense strand
cagaagaaguggccaagcu

SEQ ID NO: 274403 - RNA, 19 nt, Homo sapiens
  misc_RNA (1)...(19): siRNA sense strand
gaucagaaacaugagcauu

SEQ ID NO: 274404 - RNA, 19 nt, Homo sapiens
  misc_RNA (1)...(19): siRNA sense strand
guacucguccuucaccauu

SEQ ID NO: 274405 - RNA, 19 nt, Homo sapiens
  misc_RNA (1)...(19): siRNA sense strand
gggcagaaguuuguguaca

SEQ ID NO: 274406 - RNA, 19 nt, Homo sapiens
  misc_RNA (1)...(19): siRNA sense strand
gagcccugcgauacuauua

SEQ ID NO: 274407 - RNA, 19 nt, Homo sapiens
  misc_RNA (1)...(19): siRNA sense strand
gcccugcgauacuauuaug

SEQ ID NO: 274408 - RNA, 19 nt, Homo sapiens
  misc_RNA (1)...(19): siRNA sense strand
ucaggacugugaucagguu

SEQ ID NO: 274409 - RNA, 19 nt, Homo sapiens
  misc_RNA (1)...(19): siRNA sense strand
gaucagguuugugaccaau

SEQ ID NO: 274410 - RNA, 19 nt, Homo sapiens
  misc_RNA (1)...(19): siRNA sense strand
ggcaguuccuguugcaguu

SEQ ID NO: 274411 - RNA, 19 nt, Homo sapiens
  misc_RNA (1)...(19): siRNA sense strand
caaucacgcuguggcaguu

SEQ ID NO: 274412 - RNA, 19 nt, Homo sapiens
  misc_RNA (1)...(19): siRNA sense strand
gaaacaugagcauuugauc

SEQ ID NO: 274413 - RNA, 19 nt, Homo sapiens
  misc_RNA (1)...(19): siRNA sense strand
ccaaacgcugccaguauuu

SEQ ID NO: 274414 - RNA, 19 nt, Homo sapiens
  misc_RNA (1)...(19): siRNA sense strand
gacaccaaauggauugcuu

SEQ ID NO: 274415 - RNA, 19 nt, Homo sapiens
  misc_RNA (1)...(19): siRNA sense strand
ugaauucaagcuccucaaa

SEQ ID NO: 274416 - RNA, 19 nt, Homo sapiens
  misc_RNA (1)...(19): siRNA sense strand
gaauucaagcuccucaaag

SEQ ID NO: 274417 - RNA, 19 nt, Homo sapiens
  misc_RNA (1)...(19): siRNA sense strand
ucccggagauccugaagau

SEQ ID NO: 274418 - RNA, 19 nt, Homo sapiens
  misc_RNA (1)...(19): siRNA sense strand
ccucuuuaauguugccaaa

SEQ ID NO: 274419 - RNA, 19 nt, Homo sapiens
  misc_RNA (1)...(19): siRNA sense strand
cucgaacgauggugaauuc

SEQ ID NO: 274420 - RNA, 19 nt, Homo sapiens
  misc_RNA (1)...(19): siRNA sense strand
acucguccuucaccauuaa

SEQ ID NO: 274421 - RNA, 19 nt, Homo sapiens
  misc_RNA (1)...(19): siRNA sense strand
ggugaucgggcagaaguuu

SEQ ID NO: 274422 - RNA, 19 nt, Homo sapiens
  misc_RNA (1)...(19): siRNA sense strand
caaaggcuuggaaaucuca

SEQ ID NO: 274423 - RNA, 19 nt, Homo sapiens
  misc_RNA (1)...(19): siRNA sense strand
ucuucaaacucucagaaau

SEQ ID NO: 274424 - RNA, 19 nt, Homo sapiens
  misc_RNA (1)...(19): siRNA sense strand
cggagauccugaagaugga

SEQ ID NO: 274425 - RNA, 19 nt, Homo sapiens
  misc_RNA (1)...(19): siRNA sense strand
ggccuguacucguccuuca

SEQ ID NO: 274426 - RNA, 19 nt, Homo sapiens
  misc_RNA (1)...(19): siRNA sense strand
uacucguccuucaccauua

SEQ ID NO: 274427 - RNA, 19 nt, Homo sapiens
  misc_RNA (1)...(19): siRNA sense strand
aaacaugagcauuugaucu

SEQ ID NO: 274428 - RNA, 19 nt, Homo sapiens
  misc_RNA (1)...(19): siRNA sense strand
acagacaccaaauggauug

SEQ ID NO: 274429 - RNA, 19 nt, Homo sapiens
  misc_RNA (1)...(19): siRNA sense strand
cgaacgauggugaauucaa

SEQ ID NO: 274430 - RNA, 19 nt, Homo sapiens
  misc_RNA (1)...(19): siRNA sense strand
ccaguacugcuuucuucaa

SEQ ID NO: 274431 - RNA, 19 nt, Homo sapiens
  misc_RNA (1)...(19): siRNA sense strand
ugacaagaacaucaucaag

SEQ ID NO: 274432 - RNA, 19 nt, Homo sapiens
  misc_RNA (1)...(19): siRNA sense strand
cuccaguacugcuuucuuc

SEQ ID NO: 274433 - RNA, 19 nt, Homo sapiens
  misc_RNA (1)...(19): siRNA sense strand
agaaggugaucgggcagaa

SEQ ID NO: 274434 - RNA, 19 nt, Homo sapiens
  misc_RNA (1)...(19): siRNA sense strand
caagaacaucaucaagaag

SEQ ID NO: 274435 - RNA, 19 nt, Homo sapiens
  misc_RNA (1)...(19): siRNA sense strand
cuucaaacucucagaaauc

SEQ ID NO: 274436 - RNA, 19 nt, Homo sapiens
  misc_RNA (1)...(19): siRNA sense strand
gcuccucaaagcagaagaa

SEQ ID NO: 274437 - RNA, 19 nt, Homo sapiens
  misc_RNA (1)...(19): siRNA sense strand
gagccgcaacgaauacauc

SEQ ID NO: 274438 - RNA, 19 nt, Homo sapiens
  misc_RNA (1)...(19): siRNA sense strand
cagaaacaugagcauuuga

SEQ ID NO: 274439 - RNA, 19 nt, Homo sapiens
  misc_RNA (1)...(19): siRNA sense strand
cacagacaccaaauggauu

SEQ ID NO: 274440 - RNA, 19 nt, Homo sapiens
  misc_RNA (1)...(19): siRNA sense strand
agaaacaugagcauuugau

SEQ ID NO: 274441 - RNA, 19 nt, Homo sapiens
  misc_RNA (1)...(19): siRNA sense strand
aaacgcugccaguauuuca

SEQ ID NO: 274442 - RNA, 19 nt, Homo sapiens
  misc_RNA (1)...(19): siRNA sense strand
acugugaucagguuuguga

SEQ ID NO: 274443 - RNA, 19 nt, Homo sapiens
  misc_RNA (1)...(19): siRNA sense strand
aauucaagcuccucaaagc

SEQ ID NO: 274444 - RNA, 19 nt, Homo sapiens
  misc_RNA (1)...(19): siRNA sense strand
ugccaaacgcugccaguau

SEQ ID NO: 274445 - RNA, 19 nt, Homo sapiens
  misc_RNA (1)...(19): siRNA sense strand
ccacaugccagugccaauc

SEQ ID NO: 274446 - RNA, 19 nt, Homo sapiens
  misc_RNA (1)...(19): siRNA sense strand
ucaccgcacagacaccaaa

SEQ ID NO: 274447 - RNA, 19 nt, Homo sapiens
  misc_RNA (1)...(19): siRNA sense strand
caaacgcugccaguauuuc

SEQ ID NO: 274448 - RNA, 19 nt, Homo sapiens
  misc_RNA (1)...(19): siRNA sense strand
gaacaagaccgaauggaua

SEQ ID NO: 274449 - RNA, 19 nt, Homo sapiens
  misc_RNA (1)...(19): siRNA sense strand
gaauaucagucgaaacuuu

SEQ ID NO: 274450 - RNA, 19 nt, Homo sapiens
  misc_RNA (1)...(19): siRNA sense strand
caucagagcuaacuuugaa

SEQ ID NO: 274451 - RNA, 19 nt, Homo sapiens
  misc_RNA (1)...(19): siRNA sense strand
ggacagaguugaucagucu

SEQ ID NO: 274452 - RNA, 19 nt, Homo sapiens
  misc_RNA (1)...(19): siRNA sense strand
acagagagauuacuccaaa

SEQ ID NO: 274453 - RNA, 19 nt, Homo sapiens
  misc_RNA (1)...(19): siRNA sense strand
ccagaaagacuaugugaaa

SEQ ID NO: 274454 - RNA, 19 nt, Homo sapiens
  misc_RNA (1)...(19): siRNA sense strand
gaaauuugguguggaacaa

SEQ ID NO: 274455 - RNA, 19 nt, Homo sapiens
  misc_RNA (1)...(19): siRNA sense strand
caaguaacaucagagcuaa

SEQ ID NO: 274456 - RNA, 19 nt, Homo sapiens
  misc_RNA (1)...(19): siRNA sense strand
uaagagcgccguuggcuuu

SEQ ID NO: 274457 - RNA, 19 nt, Homo sapiens
  misc_RNA (1)...(19): siRNA sense strand
uaacaucagagcuaacuuu

SEQ ID NO: 274458 - RNA, 19 nt, Homo sapiens
  misc_RNA (1)...(19): siRNA sense strand
ccaggagcauaucaacaua

SEQ ID NO: 274459 - RNA, 19 nt, Homo sapiens
  misc_RNA (1)...(19): siRNA sense strand
ccacgaauaucagucgaaa

SEQ ID NO: 274460 - RNA, 19 nt, Homo sapiens
  misc_RNA (1)...(19): siRNA sense strand
gagauuacuccaaagguuu

SEQ ID NO: 274461 - RNA, 19 nt, Homo sapiens
  misc_RNA (1)...(19): siRNA sense strand
gaagcaugccucccagaaa

SEQ ID NO: 274462 - RNA, 19 nt, Homo sapiens
  misc_RNA (1)...(19): siRNA sense strand
agaaggaucggauggauaa

SEQ ID NO: 274463 - RNA, 19 nt, Homo sapiens
  misc_RNA (1)...(19): siRNA sense strand
ggagaaggaacuugaaaca

SEQ ID NO: 274464 - RNA, 19 nt, Homo sapiens
  misc_RNA (1)...(19): siRNA sense strand
gcagaaggaucggauggau

SEQ ID NO: 274465 - RNA, 19 nt, Homo sapiens
  misc_RNA (1)...(19): siRNA sense strand
caaguuugguguccagaug

SEQ ID NO: 274466 - RNA, 19 nt, Homo sapiens
  misc_RNA (1)...(19): siRNA sense strand
ugaaugaugugagugagaa

SEQ ID NO: 274467 - RNA, 19 nt, Homo sapiens
  misc_RNA (1)...(19): siRNA sense strand
ggaacaagaccgaauggau

SEQ ID NO: 274468 - RNA, 19 nt, Homo sapiens
  misc_RNA (1)...(19): siRNA sense strand
uaagaaugcgucaaccuuu

SEQ ID NO: 274469 - RNA, 19 nt, Homo sapiens
  misc_RNA (1)...(19): siRNA sense strand
gagcauaucaacauacaca

SEQ ID NO: 274470 - RNA, 19 nt, Homo sapiens
  misc_RNA (1)...(19): siRNA sense strand
gaaaggguuuggaggaaaa

SEQ ID NO: 274471 - RNA, 19 nt, Homo sapiens
  misc_RNA (1)...(19): siRNA sense strand
gagggagaaugucuuucaa

SEQ ID NO: 274472 - RNA, 19 nt, Homo sapiens
  misc_RNA (1)...(19): siRNA sense strand
ggagcaagccagagccaaa

SEQ ID NO: 274473 - RNA, 19 nt, Homo sapiens
  misc_RNA (1)...(19): siRNA sense strand
agagauuacuccaaagguu

SEQ ID NO: 274474 - RNA, 19 nt, Homo sapiens
  misc_RNA (1)...(19): siRNA sense strand
ggacagcaccuacgaugag

SEQ ID NO: 274475 - RNA, 19 nt, Homo sapiens
  misc_RNA (1)...(19): siRNA sense strand
gcauggaggccgcugacua

SEQ ID NO: 274476 - RNA, 19 nt, Homo sapiens
  misc_RNA (1)...(19): siRNA sense strand
gggaucaccaggagaaauu

SEQ ID NO: 274477 - RNA, 19 nt, Homo sapiens
  misc_RNA (1)...(19): siRNA sense strand
gaagcacgagucccagaaa

SEQ ID NO: 274478 - RNA, 19 nt, Homo sapiens
  misc_RNA (1)...(19): siRNA sense strand
ggaugcggcuuccuucaag

SEQ ID NO: 274479 - RNA, 19 nt, Homo sapiens
  misc_RNA (1)...(19): siRNA sense strand
aaaccucgcuaaggagaaa

SEQ ID NO: 274480 - RNA, 19 nt, Homo sapiens
  misc_RNA (1)...(19): siRNA sense strand
ugaaaggguuuggaggaaa

SEQ ID NO: 274481 - RNA, 19 nt, Homo sapiens
  misc_RNA (1)...(19): siRNA sense strand
ucagucugcuguaggcuuu

SEQ ID NO: 274482 - RNA, 19 nt, Homo sapiens
  misc_RNA (1)...(19): siRNA sense strand
acaaguaacaucagagcua

SEQ ID NO: 274483 - RNA, 19 nt, Homo sapiens
  misc_RNA (1)...(19): siRNA sense strand
gugaaaggguuuggaggaa

SEQ ID NO: 274484 - RNA, 19 nt, Homo sapiens
  misc_RNA (1)...(19): siRNA sense strand
caagagcaucagacccuua

SEQ ID NO: 274485 - RNA, 19 nt, Homo sapiens
  misc_RNA (1)...(19): siRNA sense strand
aagaaugcgucaaccuuug

SEQ ID NO: 274486 - RNA, 19 nt, Homo sapiens
  misc_RNA (1)...(19): siRNA sense strand
aaagacuacuccagugguu

SEQ ID NO: 274487 - RNA, 19 nt, Homo sapiens
  misc_RNA (1)...(19): siRNA sense strand
agacagacaagacaaaugu

SEQ ID NO: 274488 - RNA, 19 nt, Homo sapiens
  misc_RNA (1)...(19): siRNA sense strand
caaaacaaguaacaucaga

SEQ ID NO: 274489 - RNA, 19 nt, Homo sapiens
  misc_RNA (1)...(19): siRNA sense strand
gagaagcacgagucacaga

SEQ ID NO: 274490 - RNA, 19 nt, Homo sapiens
  misc_RNA (1)...(19): siRNA sense strand
gaagcacgagucacagaga

SEQ ID NO: 274491 - RNA, 19 nt, Homo sapiens
  misc_RNA (1)...(19): siRNA sense strand
aagcaugccucccagaaag

SEQ ID NO: 274492 - RNA, 19 nt, Homo sapiens
  misc_RNA (1)...(19): siRNA sense strand
gcugagggagaaugucuuu

SEQ ID NO: 274493 - RNA, 19 nt, Homo sapiens
  misc_RNA (1)...(19): siRNA sense strand
gaucucauuugacccugau

SEQ ID NO: 274494 - RNA, 19 nt, Homo sapiens
  misc_RNA (1)...(19): siRNA sense strand
cagaaagacuaugugaaag

SEQ ID NO: 274495 - RNA, 19 nt, Homo sapiens
  misc_RNA (1)...(19): siRNA sense strand
gaucggauggauaagaaug

SEQ ID NO: 274496 - RNA, 19 nt, Homo sapiens
  misc_RNA (1)...(19): siRNA sense strand
cagaaggaucggauggaua

SEQ ID NO: 274497 - RNA, 19 nt, Homo sapiens
  misc_RNA (1)...(19): siRNA sense strand
uuaaggagaaggaacuuga

SEQ ID NO: 274498 - RNA, 19 nt, Homo sapiens
  misc_RNA (1)...(19): siRNA sense strand
gcucuucccagccaacuau

SEQ ID NO: 274499 - RNA, 19 nt, Homo sapiens
  misc_RNA (1)...(19): siRNA sense strand
cagaggcugucuaugaaag

SEQ ID NO: 274500 - RNA, 19 nt, Homo sapiens
  misc_RNA (1)...(19): siRNA sense strand
uacacaagcugagggagaa

SEQ ID NO: 274501 - RNA, 19 nt, Homo sapiens
  misc_RNA (1)...(19): siRNA sense strand
ggaaauuugguguggaaca

SEQ ID NO: 274502 - RNA, 19 nt, Homo sapiens
  misc_RNA (1)...(19): siRNA sense strand
acaaggacaaaguggauaa

SEQ ID NO: 274503 - RNA, 19 nt, Homo sapiens
  misc_RNA (1)...(19): siRNA sense strand
aacaagaccgaauggauaa

SEQ ID NO: 274504 - RNA, 19 nt, Homo sapiens
  misc_RNA (1)...(19): siRNA sense strand
gaacuugaaacaggaccaa

SEQ ID NO: 274505 - RNA, 19 nt, Homo sapiens
  misc_RNA (1)...(19): siRNA sense strand
gcaccuacgaugaguacga

SEQ ID NO: 274506 - RNA, 19 nt, Homo sapiens
  misc_RNA (1)...(19): siRNA sense strand
aggaucggauggauaagaa

SEQ ID NO: 274507 - RNA, 19 nt, Homo sapiens
  misc_RNA (1)...(19): siRNA sense strand
cgacaaggacaaaguggau

SEQ ID NO: 274508 - RNA, 19 nt, Homo sapiens
  misc_RNA (1)...(19): siRNA sense strand
gugagaaggagcaaagaug

SEQ ID NO: 274509 - RNA, 19 nt, Homo sapiens
  misc_RNA (1)...(19): siRNA sense strand
gacagacagacaagacaaa

SEQ ID NO: 274510 - RNA, 19 nt, Homo sapiens
  misc_RNA (1)...(19): siRNA sense strand
ugagggagaaugucuuuca

SEQ ID NO: 274511 - RNA, 19 nt, Homo sapiens
  misc_RNA (1)...(19): siRNA sense strand
gacaaggacaaaguggaua

SEQ ID NO: 274512 - RNA, 19 nt, Homo sapiens
  misc_RNA (1)...(19): siRNA sense strand
gcagacagacagacaagac

SEQ ID NO: 274513 - RNA, 19 nt, Homo sapiens
  misc_RNA (1)...(19): siRNA sense strand
agggaaauuugguguggaa

SEQ ID NO: 274514 - RNA, 19 nt, Homo sapiens
  misc_RNA (1)...(19): siRNA sense strand
gagcaucagacccuuaagg

SEQ ID NO: 274515 - RNA, 19 nt, Homo sapiens
  misc_RNA (1)...(19): siRNA sense strand
gcauaucaacauacacaag

SEQ ID NO: 274516 - RNA, 19 nt, Homo sapiens
  misc_RNA (1)...(19): siRNA sense strand
agacuacuccaaaggauuc

SEQ ID NO: 274517 - RNA, 19 nt, Homo sapiens
  misc_RNA (1)...(19): siRNA sense strand
uaaggagaaggaacuugaa

SEQ ID NO: 274518 - RNA, 19 nt, Homo sapiens
  misc_RNA (1)...(19): siRNA sense strand
gcacgagucacagagagau

SEQ ID NO: 274519 - RNA, 19 nt, Homo sapiens
  misc_RNA (1)...(19): siRNA sense strand
aagagcaucagacccuuaa

SEQ ID NO: 274520 - RNA, 19 nt, Homo sapiens
  misc_RNA (1)...(19): siRNA sense strand
gcacgagucccagaaagac

SEQ ID NO: 274521 - RNA, 19 nt, Homo sapiens
  misc_RNA (1)...(19): siRNA sense strand
cggagaagcacgagucaca

SEQ ID NO: 274522 - RNA, 19 nt, Homo sapiens
  misc_RNA (1)...(19): siRNA sense strand
ccagauggacagaguugau

SEQ ID NO: 274523 - RNA, 19 nt, Homo sapiens
  misc_RNA (1)...(19): siRNA sense strand
gacagcaccuacgaugagu

SEQ ID NO: 274524 - RNA, 19 nt, Homo sapiens
  misc_RNA (1)...(19): siRNA sense strand
gaaacaggaccaaaagcuu

SEQ ID NO: 274525 - RNA, 19 nt, Homo sapiens
  misc_RNA (1)...(19): siRNA sense strand
gagcgccguuggcuuugag

SEQ ID NO: 274526 - RNA, 19 nt, Homo sapiens
  misc_RNA (1)...(19): siRNA sense strand
guugaucagucugcuguag

SEQ ID NO: 274527 - RNA, 19 nt, Homo sapiens
  misc_RNA (1)...(19): siRNA sense strand
gccguuggcuuugaguauc

SEQ ID NO: 274528 - RNA, 19 nt, Homo sapiens
  misc_RNA (1)...(19): siRNA sense strand
gagagauuacuccaaaggu

SEQ ID NO: 274529 - RNA, 19 nt, Homo sapiens
  misc_RNA (1)...(19): siRNA sense strand
uugaaaaccucgcuaagga

SEQ ID NO: 274530 - RNA, 19 nt, Homo sapiens
  misc_RNA (1)...(19): siRNA sense strand
gcaccaggagcauaucaac

SEQ ID NO: 274531 - RNA, 19 nt, Homo sapiens
  misc_RNA (1)...(19): siRNA sense strand
uggcuucggaggcaaguuu

SEQ ID NO: 274532 - RNA, 19 nt, Homo sapiens
  misc_RNA (1)...(19): siRNA sense strand
aggagcauaucaacauaca

SEQ ID NO: 274533 - RNA, 19 nt, Homo sapiens
  misc_RNA (1)...(19): siRNA sense strand
auaagaaugcgucaaccuu

SEQ ID NO: 274534 - RNA, 19 nt, Homo sapiens
  misc_RNA (1)...(19): siRNA sense strand
aauuugguguggaacaaga

SEQ ID NO: 274535 - RNA, 19 nt, Homo sapiens
  misc_RNA (1)...(19): siRNA sense strand
ggaaguauggggugcagaa

SEQ ID NO: 274536 - RNA, 19 nt, Homo sapiens
  misc_RNA (1)...(19): siRNA sense strand
gagaaggaacuugaaacag

SEQ ID NO: 274537 - RNA, 19 nt, Homo sapiens
  misc_RNA (1)...(19): siRNA sense strand
ugagugagaaggagcaaag

SEQ ID NO: 274538 - RNA, 19 nt, Homo sapiens
  misc_RNA (1)...(19): siRNA sense strand
agaagcaugccucccagaa

SEQ ID NO: 274539 - RNA, 19 nt, Homo sapiens
  misc_RNA (1)...(19): siRNA sense strand
gcaaguuugguguccagau

SEQ ID NO: 274540 - RNA, 19 nt, Homo sapiens
  misc_RNA (1)...(19): siRNA sense strand
ggcuauggagggaaauuug

SEQ ID NO: 274541 - RNA, 19 nt, Homo sapiens
  misc_RNA (1)...(19): siRNA sense strand
agacagacagacaagacaa

SEQ ID NO: 274542 - RNA, 19 nt, Homo sapiens
  misc_RNA (1)...(19): siRNA sense strand
acgagucacagagagauua

SEQ ID NO: 274543 - RNA, 19 nt, Homo sapiens
  misc_RNA (1)...(19): siRNA sense strand
caagaccgaauggauaagu

SEQ ID NO: 274544 - RNA, 19 nt, Homo sapiens
  misc_RNA (1)...(19): siRNA sense strand
cauggaggccgcugacuac

SEQ ID NO: 274545 - RNA, 19 nt, Homo sapiens
  misc_RNA (1)...(19): siRNA sense strand
gauaagaaugcgucaaccu

SEQ ID NO: 274546 - RNA, 19 nt, Homo sapiens
  misc_RNA (1)...(19): siRNA sense strand
agaaagacuaugugaaagg

SEQ ID NO: 274547 - RNA, 19 nt, Homo sapiens
  misc_RNA (1)...(19): siRNA sense strand
cagagagauuacuccaaag

SEQ ID NO: 274548 - RNA, 19 nt, Homo sapiens
  misc_RNA (1)...(19): siRNA sense strand
gaacaagaccgaauggaua

SEQ ID NO: 274549 - RNA, 19 nt, Homo sapiens
  misc_RNA (1)...(19): siRNA sense strand
gaauaucagucgaaacuuu

SEQ ID NO: 274550 - RNA, 19 nt, Homo sapiens
  misc_RNA (1)...(19): siRNA sense strand
caucagagcuaacuuugaa

SEQ ID NO: 274551 - RNA, 19 nt, Homo sapiens
  misc_RNA (1)...(19): siRNA sense strand
ggacagaguugaucagucu

SEQ ID NO: 274552 - RNA, 19 nt, Homo sapiens
  misc_RNA (1)...(19): siRNA sense strand
acagagagauuacuccaaa

SEQ ID NO: 274553 - RNA, 19 nt, Homo sapiens
  misc_RNA (1)...(19): siRNA sense strand
ccagaaagacuaugugaaa

SEQ ID NO: 274554 - RNA, 19 nt, Homo sapiens
  misc_RNA (1)...(19): siRNA sense strand
gaaauuugguguggaacaa

SEQ ID NO: 274555 - RNA, 19 nt, Homo sapiens
  misc_RNA (1)...(19): siRNA sense strand
caaguaacaucagagcuaa

SEQ ID NO: 274556 - RNA, 19 nt, Homo sapiens
  misc_RNA (1)...(19): siRNA sense strand
uaagagcgccguuggcuuu

SEQ ID NO: 274557 - RNA, 19 nt, Homo sapiens
  misc_RNA (1)...(19): siRNA sense strand
uaacaucagagcuaacuuu

SEQ ID NO: 274558 - RNA, 19 nt, Homo sapiens
  misc_RNA (1)...(19): siRNA sense strand
ccaggagcauaucaacaua

SEQ ID NO: 274559 - RNA, 19 nt, Homo sapiens
  misc_RNA (1)...(19): siRNA sense strand
ccacgaauaucagucgaaa

SEQ ID NO: 274560 - RNA, 19 nt, Homo sapiens
  misc_RNA (1)...(19): siRNA sense strand
gagauuacuccaaagguuu

SEQ ID NO: 274561 - RNA, 19 nt, Homo sapiens
  misc_RNA (1)...(19): siRNA sense strand
gaagcaugccucccagaaa

SEQ ID NO: 274562 - RNA, 19 nt, Homo sapiens
  misc_RNA (1)...(19): siRNA sense strand
agaaggaucggauggauaa

SEQ ID NO: 274563 - RNA, 19 nt, Homo sapiens
  misc_RNA (1)...(19): siRNA sense strand
ggagaaggaacuugaaaca

SEQ ID NO: 274564 - RNA, 19 nt, Homo sapiens
  misc_RNA (1)...(19): siRNA sense strand
gcagaaggaucggauggau

SEQ ID NO: 274565 - RNA, 19 nt, Homo sapiens
  misc_RNA (1)...(19): siRNA sense strand
caaguuugguguccagaug

SEQ ID NO: 274566 - RNA, 19 nt, Homo sapiens
  misc_RNA (1)...(19): siRNA sense strand
ugaaugaugugagugagaa

SEQ ID NO: 274567 - RNA, 19 nt, Homo sapiens
  misc_RNA (1)...(19): siRNA sense strand
ggaacaagaccgaauggau

SEQ ID NO: 274568 - RNA, 19 nt, Homo sapiens
  misc_RNA (1)...(19): siRNA sense strand
uaagaaugcgucaaccuuu

SEQ ID NO: 274569 - RNA, 19 nt, Homo sapiens
  misc_RNA (1)...(19): siRNA sense strand
gagcauaucaacauacaca

SEQ ID NO: 274570 - RNA, 19 nt, Homo sapiens
  misc_RNA (1)...(19): siRNA sense strand
gaaaggguuuggaggaaaa

SEQ ID NO: 274571 - RNA, 19 nt, Homo sapiens
  misc_RNA (1)...(19): siRNA sense strand
gagggagaaugucuuucaa

SEQ ID NO: 274572 - RNA, 19 nt, Homo sapiens
  misc_RNA (1)...(19): siRNA sense strand
ggagcaagccagagccaaa

SEQ ID NO: 274573 - RNA, 19 nt, Homo sapiens
  misc_RNA (1)...(19): siRNA sense strand
agagauuacuccaaagguu

SEQ ID NO: 274574 - RNA, 19 nt, Homo sapiens
  misc_RNA (1)...(19): siRNA sense strand
ggacagcaccuacgaugag

SEQ ID NO: 274575 - RNA, 19 nt, Homo sapiens
  misc_RNA (1)...(19): siRNA sense strand
gcauggaggccgcugacua

SEQ ID NO: 274576 - RNA, 19 nt, Homo sapiens
  misc_RNA (1)...(19): siRNA sense strand
gggaucaccaggagaaauu

SEQ ID NO: 274577 - RNA, 19 nt, Homo sapiens
  misc_RNA (1)...(19): siRNA sense strand
gaagcacgagucccagaaa

SEQ ID NO: 274578 - RNA, 19 nt, Homo sapiens
  misc_RNA (1)...(19): siRNA sense strand
ggaugcggcuuccuucaag

SEQ ID NO: 274579 - RNA, 19 nt, Homo sapiens
  misc_RNA (1)...(19): siRNA sense strand
aaaccucgcuaaggagaaa

SEQ ID NO: 274580 - RNA, 19 nt, Homo sapiens
  misc_RNA (1)...(19): siRNA sense strand
ugaaaggguuuggaggaaa

SEQ ID NO: 274581 - RNA, 19 nt, Homo sapiens
  misc_RNA (1)...(19): siRNA sense strand
ucagucugcuguaggcuuu

SEQ ID NO: 274582 - RNA, 19 nt, Homo sapiens
  misc_RNA (1)...(19): siRNA sense strand
acaaguaacaucagagcua

SEQ ID NO: 274583 - RNA, 19 nt, Homo sapiens
  misc_RNA (1)...(19): siRNA sense strand
gugaaaggguuuggaggaa

SEQ ID NO: 274584 - RNA, 19 nt, Homo sapiens
  misc_RNA (1)...(19): siRNA sense strand
caagagcaucagacccuua

SEQ ID NO: 274585 - RNA, 19 nt, Homo sapiens
  misc_RNA (1)...(19): siRNA sense strand
aagaaugcgucaaccuuug

SEQ ID NO: 274586 - RNA, 19 nt, Homo sapiens
  misc_RNA (1)...(19): siRNA sense strand
aaagacuacuccagugguu

SEQ ID NO: 274587 - RNA, 19 nt, Homo sapiens
  misc_RNA (1)...(19): siRNA sense strand
agacagacaagacaaaugu

SEQ ID NO: 274588 - RNA, 19 nt, Homo sapiens
  misc_RNA (1)...(19): siRNA sense strand
caaaacaaguaacaucaga

SEQ ID NO: 274589 - RNA, 19 nt, Homo sapiens
  misc_RNA (1)...(19): siRNA sense strand
gagaagcacgagucacaga

SEQ ID NO: 274590 - RNA, 19 nt, Homo sapiens
  misc_RNA (1)...(19): siRNA sense strand
gaagcacgagucacagaga

SEQ ID NO: 274591 - RNA, 19 nt, Homo sapiens
  misc_RNA (1)...(19): siRNA sense strand
aagcaugccucccagaaag

SEQ ID NO: 274592 - RNA, 19 nt, Homo sapiens
  misc_RNA (1)...(19): siRNA sense strand
gcugagggagaaugucuuu

SEQ ID NO: 274593 - RNA, 19 nt, Homo sapiens
  misc_RNA (1)...(19): siRNA sense strand
gaucucauuugacccugau

SEQ ID NO: 274594 - RNA, 19 nt, Homo sapiens
  misc_RNA (1)...(19): siRNA sense strand
cagaaagacuaugugaaag

SEQ ID NO: 274595 - RNA, 19 nt, Homo sapiens
  misc_RNA (1)...(19): siRNA sense strand
gaucggauggauaagaaug

SEQ ID NO: 274596 - RNA, 19 nt, Homo sapiens
  misc_RNA (1)...(19): siRNA sense strand
cagaaggaucggauggaua

SEQ ID NO: 274597 - RNA, 19 nt, Homo sapiens
  misc_RNA (1)...(19): siRNA sense strand
uuaaggagaaggaacuuga

SEQ ID NO: 274598 - RNA, 19 nt, Homo sapiens
  misc_RNA (1)...(19): siRNA sense strand
gcucuucccagccaacuau

SEQ ID NO: 274599 - RNA, 19 nt, Homo sapiens
  misc_RNA (1)...(19): siRNA sense strand
cagaggcugucuaugaaag

SEQ ID NO: 274600 - RNA, 19 nt, Homo sapiens
  misc_RNA (1)...(19): siRNA sense strand
uacacaagcugagggagaa

SEQ ID NO: 274601 - RNA, 19 nt, Homo sapiens
  misc_RNA (1)...(19): siRNA sense strand
ggaaauuugguguggaaca

SEQ ID NO: 274602 - RNA, 19 nt, Homo sapiens
  misc_RNA (1)...(19): siRNA sense strand
acaaggacaaaguggauaa

SEQ ID NO: 274603 - RNA, 19 nt, Homo sapiens
  misc_RNA (1)...(19): siRNA sense strand
aacaagaccgaauggauaa

SEQ ID NO: 274604 - RNA, 19 nt, Homo sapiens
  misc_RNA (1)...(19): siRNA sense strand
gaacuugaaacaggaccaa

SEQ ID NO: 274605 - RNA, 19 nt, Homo sapiens
  misc_RNA (1)...(19): siRNA sense strand
gcaccuacgaugaguacga

SEQ ID NO: 274606 - RNA, 19 nt, Homo sapiens
  misc_RNA (1)...(19): siRNA sense strand
aggaucggauggauaagaa

SEQ ID NO: 274607 - RNA, 19 nt, Homo sapiens
  misc_RNA (1)...(19): siRNA sense strand
cgacaaggacaaaguggau

SEQ ID NO: 274608 - RNA, 19 nt, Homo sapiens
  misc_RNA (1)...(19): siRNA sense strand
gugagaaggagcaaagaug

SEQ ID NO: 274609 - RNA, 19 nt, Homo sapiens
  misc_RNA (1)...(19): siRNA sense strand
gacagacagacaagacaaa

SEQ ID NO: 274610 - RNA, 19 nt, Homo sapiens
  misc_RNA (1)...(19): siRNA sense strand
ugagggagaaugucuuuca

SEQ ID NO: 274611 - RNA, 19 nt, Homo sapiens
  misc_RNA (1)...(19): siRNA sense strand
gacaaggacaaaguggaua

SEQ ID NO: 274612 - RNA, 19 nt, Homo sapiens
  misc_RNA (1)...(19): siRNA sense strand
gcagacagacagacaagac

SEQ ID NO: 274613 - RNA, 19 nt, Homo sapiens
  misc_RNA (1)...(19): siRNA sense strand
agggaaauuugguguggaa

SEQ ID NO: 274614 - RNA, 19 nt, Homo sapiens
  misc_RNA (1)...(19): siRNA sense strand
gagcaucagacccuuaagg

SEQ ID NO: 274615 - RNA, 19 nt, Homo sapiens
  misc_RNA (1)...(19): siRNA sense strand
gcauaucaacauacacaag

SEQ ID NO: 274616 - RNA, 19 nt, Homo sapiens
  misc_RNA (1)...(19): siRNA sense strand
agacuacuccaaaggauuc

SEQ ID NO: 274617 - RNA, 19 nt, Homo sapiens
  misc_RNA (1)...(19): siRNA sense strand
uaaggagaaggaacuugaa

SEQ ID NO: 274618 - RNA, 19 nt, Homo sapiens
  misc_RNA (1)...(19): siRNA sense strand
gcacgagucacagagagau

SEQ ID NO: 274619 - RNA, 19 nt, Homo sapiens
  misc_RNA (1)...(19): siRNA sense strand
aagagcaucagacccuuaa

SEQ ID NO: 274620 - RNA, 19 nt, Homo sapiens
  misc_RNA (1)...(19): siRNA sense strand
gcacgagucccagaaagac

SEQ ID NO: 274621 - RNA, 19 nt, Homo sapiens
  misc_RNA (1)...(19): siRNA sense strand
cggagaagcacgagucaca

SEQ ID NO: 274622 - RNA, 19 nt, Homo sapiens
  misc_RNA (1)...(19): siRNA sense strand
ccagauggacagaguugau

SEQ ID NO: 274623 - RNA, 19 nt, Homo sapiens
  misc_RNA (1)...(19): siRNA sense strand
gacagcaccuacgaugagu

SEQ ID NO: 274624 - RNA, 19 nt, Homo sapiens
  misc_RNA (1)...(19): siRNA sense strand
gaaacaggaccaaaagcuu

SEQ ID NO: 274625 - RNA, 19 nt, Homo sapiens
  misc_RNA (1)...(19): siRNA sense strand
gagcgccguuggcuuugag

SEQ ID NO: 274626 - RNA, 19 nt, Homo sapiens
  misc_RNA (1)...(19): siRNA sense strand
guugaucagucugcuguag

SEQ ID NO: 274627 - RNA, 19 nt, Homo sapiens
  misc_RNA (1)...(19): siRNA sense strand
gccguuggcuuugaguauc

SEQ ID NO: 274628 - RNA, 19 nt, Homo sapiens
  misc_RNA (1)...(19): siRNA sense strand
gagagauuacuccaaaggu

SEQ ID NO: 274629 - RNA, 19 nt, Homo sapiens
  misc_RNA (1)...(19): siRNA sense strand
uugaaaaccucgcuaagga

SEQ ID NO: 274630 - RNA, 19 nt, Homo sapiens
  misc_RNA (1)...(19): siRNA sense strand
gcaccaggagcauaucaac

SEQ ID NO: 274631 - RNA, 19 nt, Homo sapiens
  misc_RNA (1)...(19): siRNA sense strand
uggcuucggaggcaaguuu

SEQ ID NO: 274632 - RNA, 19 nt, Homo sapiens
  misc_RNA (1)...(19): siRNA sense strand
aggagcauaucaacauaca

SEQ ID NO: 274633 - RNA, 19 nt, Homo sapiens
  misc_RNA (1)...(19): siRNA sense strand
auaagaaugcgucaaccuu

SEQ ID NO: 274634 - RNA, 19 nt, Homo sapiens
  misc_RNA (1)...(19): siRNA sense strand
aauuugguguggaacaaga

SEQ ID NO: 274635 - RNA, 19 nt, Homo sapiens
  misc_RNA (1)...(19): siRNA sense strand
ggaaguauggggugcagaa

SEQ ID NO: 274636 - RNA, 19 nt, Homo sapiens
  misc_RNA (1)...(19): siRNA sense strand
gagaaggaacuugaaacag

SEQ ID NO: 274637 - RNA, 19 nt, Homo sapiens
  misc_RNA (1)...(19): siRNA sense strand
ugagugagaaggagcaaag

SEQ ID NO: 274638 - RNA, 19 nt, Homo sapiens
  misc_RNA (1)...(19): siRNA sense strand
agaagcaugccucccagaa

SEQ ID NO: 274639 - RNA, 19 nt, Homo sapiens
  misc_RNA (1)...(19): siRNA sense strand
gcaaguuugguguccagau

SEQ ID NO: 274640 - RNA, 19 nt, Homo sapiens
  misc_RNA (1)...(19): siRNA sense strand
ggcuauggagggaaauuug

SEQ ID NO: 274641 - RNA, 19 nt, Homo sapiens
  misc_RNA (1)...(19): siRNA sense strand
agacagacagacaagacaa

SEQ ID NO: 274642 - RNA, 19 nt, Homo sapiens
  misc_RNA (1)...(19): siRNA sense strand
acgagucacagagagauua

SEQ ID NO: 274643 - RNA, 19 nt, Homo sapiens
  misc_RNA (1)...(19): siRNA sense strand
caagaccgaauggauaagu

SEQ ID NO: 274644 - RNA, 19 nt, Homo sapiens
  misc_RNA (1)...(19): siRNA sense strand
cauggaggccgcugacuac

SEQ ID NO: 274645 - RNA, 19 nt, Homo sapiens
  misc_RNA (1)...(19): siRNA sense strand
gauaagaaugcgucaaccu

SEQ ID NO: 274646 - RNA, 19 nt, Homo sapiens
  misc_RNA (1)...(19): siRNA sense strand
agaaagacuaugugaaagg

SEQ ID NO: 274647 - RNA, 19 nt, Homo sapiens
  misc_RNA (1)...(19): siRNA sense strand
cagagagauuacuccaaag

SEQ ID NO: 274648 - RNA, 19 nt, Homo sapiens
  misc_RNA (1)...(19): siRNA sense strand
gcaaaccacagaugaauua

SEQ ID NO: 274649 - RNA, 19 nt, Homo sapiens
  misc_RNA (1)...(19): siRNA sense strand
acaagaggauccuucauaa

SEQ ID NO: 274650 - RNA, 19 nt, Homo sapiens
  misc_RNA (1)...(19): siRNA sense strand
gggaaaagauuuaccuaua

SEQ ID NO: 274651 - RNA, 19 nt, Homo sapiens
  misc_RNA (1)...(19): siRNA sense strand
aaccacagaugaauuauga

SEQ ID NO: 274652 - RNA, 19 nt, Homo sapiens
  misc_RNA (1)...(19): siRNA sense strand
agaaggagguggaggguau

SEQ ID NO: 274653 - RNA, 19 nt, Homo sapiens
  misc_RNA (1)...(19): siRNA sense strand
gaagaguuccgccauguca

SEQ ID NO: 274654 - RNA, 19 nt, Homo sapiens
  misc_RNA (1)...(19): siRNA sense strand
gaaaugcaaaccacagaug

SEQ ID NO: 274655 - RNA, 19 nt, Homo sapiens
  misc_RNA (1)...(19): siRNA sense strand
gggaauuugucaucaagga

SEQ ID NO: 274656 - RNA, 19 nt, Homo sapiens
  misc_RNA (1)...(19): siRNA sense strand
caagaggauccuucauaaa

SEQ ID NO: 274657 - RNA, 19 nt, Homo sapiens
  misc_RNA (1)...(19): siRNA sense strand
aacauucggucaaguggua

SEQ ID NO: 274658 - RNA, 19 nt, Homo sapiens
  misc_RNA (1)...(19): siRNA sense strand
cagauacuauuacaacaag

SEQ ID NO: 274659 - RNA, 19 nt, Homo sapiens
  misc_RNA (1)...(19): siRNA sense strand
aacaagaggauccuucaua

SEQ ID NO: 274660 - RNA, 19 nt, Homo sapiens
  misc_RNA (1)...(19): siRNA sense strand
ucggucaagugguaagaua

SEQ ID NO: 274661 - RNA, 19 nt, Homo sapiens
  misc_RNA (1)...(19): siRNA sense strand
acagaugaauuaugacaag

SEQ ID NO: 274662 - RNA, 19 nt, Homo sapiens
  misc_RNA (1)...(19): siRNA sense strand
gugguaagauacaaacucu

SEQ ID NO: 274663 - RNA, 19 nt, Homo sapiens
  misc_RNA (1)...(19): siRNA sense strand
gcccucagauacuauuaca

SEQ ID NO: 274664 - RNA, 19 nt, Homo sapiens
  misc_RNA (1)...(19): siRNA sense strand
ggaaaugcaaaccacagau

SEQ ID NO: 274665 - RNA, 19 nt, Homo sapiens
  misc_RNA (1)...(19): siRNA sense strand
ccaacuacccauucaucaa

SEQ ID NO: 274666 - RNA, 19 nt, Homo sapiens
  misc_RNA (1)...(19): siRNA sense strand
gguggaggguaucaguuuc

SEQ ID NO: 274667 - RNA, 19 nt, Homo sapiens
  misc_RNA (1)...(19): siRNA sense strand
ccacagaugaauuaugaca

SEQ ID NO: 274668 - RNA, 19 nt, Homo sapiens
  misc_RNA (1)...(19): siRNA sense strand
caacuacccauucaucaac

SEQ ID NO: 274669 - RNA, 19 nt, Homo sapiens
  misc_RNA (1)...(19): siRNA sense strand
ggagguggaggguaucagu

SEQ ID NO: 274670 - RNA, 19 nt, Homo sapiens
  misc_RNA (1)...(19): siRNA sense strand
aaaugcaaaccacagauga

SEQ ID NO: 274671 - RNA, 19 nt, Homo sapiens
  misc_RNA (1)...(19): siRNA sense strand
ggucaagugguaagauaca

SEQ ID NO: 274672 - RNA, 19 nt, Homo sapiens
  misc_RNA (1)...(19): siRNA sense strand
aagaggauccuucauaaaa

SEQ ID NO: 274673 - RNA, 19 nt, Homo sapiens
  misc_RNA (1)...(19): siRNA sense strand
ucaagugguaagauacaaa

SEQ ID NO: 274674 - RNA, 19 nt, Homo sapiens
  misc_RNA (1)...(19): siRNA sense strand
ggaauuugucaucaaggau

SEQ ID NO: 274675 - RNA, 19 nt, Homo sapiens
  misc_RNA (1)...(19): siRNA sense strand
gaggauccuucauaaaaca

SEQ ID NO: 274676 - RNA, 19 nt, Homo sapiens
  misc_RNA (1)...(19): siRNA sense strand
ccucagauacuauuacaac

SEQ ID NO: 274677 - RNA, 19 nt, Homo sapiens
  misc_RNA (1)...(19): siRNA sense strand
caucaacauucggucaagu

SEQ ID NO: 274678 - RNA, 19 nt, Homo sapiens
  misc_RNA (1)...(19): siRNA sense strand
gauacuauuacaacaagag

SEQ ID NO: 274679 - RNA, 19 nt, Homo sapiens
  misc_RNA (1)...(19): siRNA sense strand
gagguggaggguaucaguu

SEQ ID NO: 274680 - RNA, 19 nt, Homo sapiens
  misc_RNA (1)...(19): siRNA sense strand
gcuguagcaucguggaaaa

SEQ ID NO: 274681 - RNA, 19 nt, Homo sapiens
  misc_RNA (1)...(19): siRNA sense strand
gcccaacuacccauucauc

SEQ ID NO: 274682 - RNA, 19 nt, Homo sapiens
  misc_RNA (1)...(19): siRNA sense strand
aaaccacagaugaauuaug

SEQ ID NO: 274683 - RNA, 19 nt, Homo sapiens
  misc_RNA (1)...(19): siRNA sense strand
acaacaagaggauccuuca

SEQ ID NO: 274684 - RNA, 19 nt, Homo sapiens
  misc_RNA (1)...(19): siRNA sense strand
caacaagaggauccuucau

SEQ ID NO: 274685 - RNA, 19 nt, Homo sapiens
  misc_RNA (1)...(19): siRNA sense strand
ggaagaagccuccaaugaa

SEQ ID NO: 274686 - RNA, 19 nt, Homo sapiens
  misc_RNA (1)...(19): siRNA sense strand
cuacacagccgacuaguua

SEQ ID NO: 274687 - RNA, 19 nt, Homo sapiens
  misc_RNA (1)...(19): siRNA sense strand
guacaaggauuaaaugaca

SEQ ID NO: 274688 - RNA, 19 nt, Homo sapiens
  misc_RNA (1)...(19): siRNA sense strand
gaagaagccuccaaugaac

SEQ ID NO: 274689 - RNA, 19 nt, Homo sapiens
  misc_RNA (1)...(19): siRNA sense strand
gcagagaucggcccuacua

SEQ ID NO: 274690 - RNA, 19 nt, Homo sapiens
  misc_RNA (1)...(19): siRNA sense strand
ugacaacagugcaauuuau

SEQ ID NO: 274691 - RNA, 19 nt, Homo sapiens
  misc_RNA (1)...(19): siRNA sense strand
ggaaugguuugaugggaaa

SEQ ID NO: 274692 - RNA, 19 nt, Homo sapiens
  misc_RNA (1)...(19): siRNA sense strand
gaacagaugggaggaagaa

SEQ ID NO: 274693 - RNA, 19 nt, Homo sapiens
  misc_RNA (1)...(19): siRNA sense strand
caacagugcaauuuaugua

SEQ ID NO: 274694 - RNA, 19 nt, Homo sapiens
  misc_RNA (1)...(19): siRNA sense strand
ggaaacaagcccacugaga

SEQ ID NO: 274695 - RNA, 19 nt, Homo sapiens
  misc_RNA (1)...(19): siRNA sense strand
caacaaagcuauggaaccu

SEQ ID NO: 274696 - RNA, 19 nt, Homo sapiens
  misc_RNA (1)...(19): siRNA sense strand
gaacuucgccuggagaaca

SEQ ID NO: 274697 - RNA, 19 nt, Homo sapiens
  misc_RNA (1)...(19): siRNA sense strand
acaaagcuauggaaccuau

SEQ ID NO: 274698 - RNA, 19 nt, Homo sapiens
  misc_RNA (1)...(19): siRNA sense strand
ggaccgagguggcuuuggu

SEQ ID NO: 274699 - RNA, 19 nt, Homo sapiens
  misc_RNA (1)...(19): siRNA sense strand
gaguagcuauggucaacaa

SEQ ID NO: 274700 - RNA, 19 nt, Homo sapiens
  misc_RNA (1)...(19): siRNA sense strand
gaugaagacucugacaaca

SEQ ID NO: 274701 - RNA, 19 nt, Homo sapiens
  misc_RNA (1)...(19): siRNA sense strand
ugaagacucugacaacagu

SEQ ID NO: 274702 - RNA, 19 nt, Homo sapiens
  misc_RNA (1)...(19): siRNA sense strand
guuaugaucagagcaguua

SEQ ID NO: 274703 - RNA, 19 nt, Homo sapiens
  misc_RNA (1)...(19): siRNA sense strand
cagccaagcuccaagucaa

SEQ ID NO: 274704 - RNA, 19 nt, Homo sapiens
  misc_RNA (1)...(19): siRNA sense strand
cggaagaagccuccaauga

SEQ ID NO: 274705 - RNA, 19 nt, Homo sapiens
  misc_RNA (1)...(19): siRNA sense strand
ucagaccacugcaaccuau

SEQ ID NO: 274706 - RNA, 19 nt, Homo sapiens
  misc_RNA (1)...(19): siRNA sense strand
caagggagcaaacuuaaag

SEQ ID NO: 274707 - RNA, 19 nt, Homo sapiens
  misc_RNA (1)...(19): siRNA sense strand
gcacucagccugcuuaucc

SEQ ID NO: 274708 - RNA, 19 nt, Homo sapiens
  misc_RNA (1)...(19): siRNA sense strand
gauauggacagaguaacua

SEQ ID NO: 274709 - RNA, 19 nt, Homo sapiens
  misc_RNA (1)...(19): siRNA sense strand
gcaguuacucucagcagaa

SEQ ID NO: 274710 - RNA, 19 nt, Homo sapiens
  misc_RNA (1)...(19): siRNA sense strand
gacagccucccacugguua

SEQ ID NO: 274711 - RNA, 19 nt, Homo sapiens
  misc_RNA (1)...(19): siRNA sense strand
ggacguggaggaccuggaa

SEQ ID NO: 274712 - RNA, 19 nt, Homo sapiens
  misc_RNA (1)...(19): siRNA sense strand
caagaccgcaggauggaaa

SEQ ID NO: 274713 - RNA, 19 nt, Homo sapiens
  misc_RNA (1)...(19): siRNA sense strand
gaugaaggaccagaucuug

SEQ ID NO: 274714 - RNA, 19 nt, Homo sapiens
  misc_RNA (1)...(19): siRNA sense strand
ggacagccucccacugguu

SEQ ID NO: 274715 - RNA, 19 nt, Homo sapiens
  misc_RNA (1)...(19): siRNA sense strand
ucacugcaccuccauccua

SEQ ID NO: 274716 - RNA, 19 nt, Homo sapiens
  misc_RNA (1)...(19): siRNA sense strand
ggacagcagaguagcuaug

SEQ ID NO: 274717 - RNA, 19 nt, Homo sapiens
  misc_RNA (1)...(19): siRNA sense strand
gaccuuugauggaacagau

SEQ ID NO: 274718 - RNA, 19 nt, Homo sapiens
  misc_RNA (1)...(19): siRNA sense strand
ugccaaggcugccguggaa

SEQ ID NO: 274719 - RNA, 19 nt, Homo sapiens
  misc_RNA (1)...(19): siRNA sense strand
gggcagaccgccuaugcaa

SEQ ID NO: 274720 - RNA, 19 nt, Homo sapiens
  misc_RNA (1)...(19): siRNA sense strand
ggacaaggaaacaggaaag

SEQ ID NO: 274721 - RNA, 19 nt, Homo sapiens
  misc_RNA (1)...(19): siRNA sense strand
caagcuccaagucaauaua

SEQ ID NO: 274722 - RNA, 19 nt, Homo sapiens
  misc_RNA (1)...(19): siRNA sense strand
uaugauaccaccacugcua

SEQ ID NO: 274723 - RNA, 19 nt, Homo sapiens
  misc_RNA (1)...(19): siRNA sense strand
uuucaagggagcaaacuua

SEQ ID NO: 274724 - RNA, 19 nt, Homo sapiens
  misc_RNA (1)...(19): siRNA sense strand
ccagcccacucaaggauau

SEQ ID NO: 274725 - RNA, 19 nt, Homo sapiens
  misc_RNA (1)...(19): siRNA sense strand
cuaugcaacuucuuaugga

SEQ ID NO: 274726 - RNA, 19 nt, Homo sapiens
  misc_RNA (1)...(19): siRNA sense strand
gcagcagccucccacuagu

SEQ ID NO: 274727 - RNA, 19 nt, Homo sapiens
  misc_RNA (1)...(19): siRNA sense strand
ccuaggauauggacagagu

SEQ ID NO: 274728 - RNA, 19 nt, Homo sapiens
  misc_RNA (1)...(19): siRNA sense strand
gcagaccgccuaugcaacu

SEQ ID NO: 274729 - RNA, 19 nt, Homo sapiens
  misc_RNA (1)...(19): siRNA sense strand
gguuugaugggaaagauuu

SEQ ID NO: 274730 - RNA, 19 nt, Homo sapiens
  misc_RNA (1)...(19): siRNA sense strand
ggaaacaggaaagcccaaa

SEQ ID NO: 274731 - RNA, 19 nt, Homo sapiens
  misc_RNA (1)...(19): siRNA sense strand
acaucuaccuggacaagga

SEQ ID NO: 274732 - RNA, 19 nt, Homo sapiens
  misc_RNA (1)...(19): siRNA sense strand
gacaacagugcaauuuaug

SEQ ID NO: 274733 - RNA, 19 nt, Homo sapiens
  misc_RNA (1)...(19): siRNA sense strand
gccaagcuccaagucaaua

SEQ ID NO: 274734 - RNA, 19 nt, Homo sapiens
  misc_RNA (1)...(19): siRNA sense strand
ggaugaaggaccagaucuu

SEQ ID NO: 274735 - RNA, 19 nt, Homo sapiens
  misc_RNA (1)...(19): siRNA sense strand
cauaugggcaacaaagcua

SEQ ID NO: 274736 - RNA, 19 nt, Homo sapiens
  misc_RNA (1)...(19): siRNA sense strand
uggcagacuucuuuaagca

SEQ ID NO: 274737 - RNA, 19 nt, Homo sapiens
  misc_RNA (1)...(19): siRNA sense strand
cagaguagcuauggucaac

SEQ ID NO: 274738 - RNA, 19 nt, Homo sapiens
  misc_RNA (1)...(19): siRNA sense strand
ccuaccagcuauuccucua

SEQ ID NO: 274739 - RNA, 19 nt, Homo sapiens
  misc_RNA (1)...(19): siRNA sense strand
gggcaacaaagcuauggaa

SEQ ID NO: 274740 - RNA, 19 nt, Homo sapiens
  misc_RNA (1)...(19): siRNA sense strand
ccacaguguccuaugaaga

SEQ ID NO: 274741 - RNA, 19 nt, Homo sapiens
  misc_RNA (1)...(19): siRNA sense strand
uaaaugacagugugacucu

SEQ ID NO: 274742 - RNA, 19 nt, Homo sapiens
  misc_RNA (1)...(19): siRNA sense strand
ugaaggaccagaucuugau

SEQ ID NO: 274743 - RNA, 19 nt, Homo sapiens
  misc_RNA (1)...(19): siRNA sense strand
ccgccuaugcaacuucuua

SEQ ID NO: 274744 - RNA, 19 nt, Homo sapiens
  misc_RNA (1)...(19): siRNA sense strand
uaggauauggacagaguaa

SEQ ID NO: 274745 - RNA, 19 nt, Homo sapiens
  misc_RNA (1)...(19): siRNA sense strand
cagagugcaaccaguguaa

SEQ ID NO: 274746 - RNA, 19 nt, Homo sapiens
  misc_RNA (1)...(19): siRNA sense strand
ucaagggagcaaacuuaaa

SEQ ID NO: 274747 - RNA, 19 nt, Homo sapiens
  misc_RNA (1)...(19): siRNA sense strand
gccguggaaugguuugaug

SEQ ID NO: 274748 - RNA, 19 nt, Homo sapiens
  misc_RNA (1)...(19): siRNA sense strand
guuaagaugaacaagagaa

SEQ ID NO: 274749 - RNA, 19 nt, Homo sapiens
  misc_RNA (1)...(19): siRNA sense strand
gagacuagucaaccucaau

SEQ ID NO: 274750 - RNA, 19 nt, Homo sapiens
  misc_RNA (1)...(19): siRNA sense strand
ccaggcauaugggcaacaa

SEQ ID NO: 274751 - RNA, 19 nt, Homo sapiens
  misc_RNA (1)...(19): siRNA sense strand
cagugugacucuagaugau

SEQ ID NO: 274752 - RNA, 19 nt, Homo sapiens
  misc_RNA (1)...(19): siRNA sense strand
ggauuaaaugacaguguga

SEQ ID NO: 274753 - RNA, 19 nt, Homo sapiens
  misc_RNA (1)...(19): siRNA sense strand
ggauauggacagaguaacu

SEQ ID NO: 274754 - RNA, 19 nt, Homo sapiens
  misc_RNA (1)...(19): siRNA sense strand
gcuauggacagcagaguag

SEQ ID NO: 274755 - RNA, 19 nt, Homo sapiens
  misc_RNA (1)...(19): siRNA sense strand
gaaacaggaaagcccaaag

SEQ ID NO: 274756 - RNA, 19 nt, Homo sapiens
  misc_RNA (1)...(19): siRNA sense strand
cugacaacagugcaauuua

SEQ ID NO: 274757 - RNA, 19 nt, Homo sapiens
  misc_RNA (1)...(19): siRNA sense strand
acagugcaauuuauguaca

SEQ ID NO: 274758 - RNA, 19 nt, Homo sapiens
  misc_RNA (1)...(19): siRNA sense strand
caaccagcccagccuagga

SEQ ID NO: 274759 - RNA, 19 nt, Homo sapiens
  misc_RNA (1)...(19): siRNA sense strand
ccaaggcugccguggaaug

SEQ ID NO: 274760 - RNA, 19 nt, Homo sapiens
  misc_RNA (1)...(19): siRNA sense strand
cagugcaauuuauguacaa

SEQ ID NO: 274761 - RNA, 19 nt, Homo sapiens
  misc_RNA (1)...(19): siRNA sense strand
gcagaguagcuauggucaa

SEQ ID NO: 274762 - RNA, 19 nt, Homo sapiens
  misc_RNA (1)...(19): siRNA sense strand
cggauuacaguaccuauag

SEQ ID NO: 274763 - RNA, 19 nt, Homo sapiens
  misc_RNA (1)...(19): siRNA sense strand
ugcaauuuauguacaagga

SEQ ID NO: 274764 - RNA, 19 nt, Homo sapiens
  misc_RNA (1)...(19): siRNA sense strand
ggucaacaaagcagcuaug

SEQ ID NO: 274765 - RNA, 19 nt, Homo sapiens
  misc_RNA (1)...(19): siRNA sense strand
uggcuuugguggaggaaga

SEQ ID NO: 274766 - RNA, 19 nt, Homo sapiens
  misc_RNA (1)...(19): siRNA sense strand
cagcagccucccacuaguu

SEQ ID NO: 274767 - RNA, 19 nt, Homo sapiens
  misc_RNA (1)...(19): siRNA sense strand
uaccagcuauuccucuaca

SEQ ID NO: 274768 - RNA, 19 nt, Homo sapiens
  misc_RNA (1)...(19): siRNA sense strand
acagaugggaggaagaaga

SEQ ID NO: 274769 - RNA, 19 nt, Homo sapiens
  misc_RNA (1)...(19): siRNA sense strand
ucugacaacagugcaauuu

SEQ ID NO: 274770 - RNA, 19 nt, Homo sapiens
  misc_RNA (1)...(19): siRNA sense strand
acagugugacucuagauga

SEQ ID NO: 274771 - RNA, 19 nt, Homo sapiens
  misc_RNA (1)...(19): siRNA sense strand
ccuauggacagcccacuga

SEQ ID NO: 274772 - RNA, 19 nt, Homo sapiens
  misc_RNA (1)...(19): siRNA sense strand
ggaacagaugggaggaaga

SEQ ID NO: 274773 - RNA, 19 nt, Homo sapiens
  misc_RNA (1)...(19): siRNA sense strand
gacagugugacucuagaug

SEQ ID NO: 274774 - RNA, 19 nt, Homo sapiens
  misc_RNA (1)...(19): siRNA sense strand
aaacaagcccacugagacu

SEQ ID NO: 274775 - RNA, 19 nt, Homo sapiens
  misc_RNA (1)...(19): siRNA sense strand
acucaaggauaugcacaga

SEQ ID NO: 274776 - RNA, 19 nt, Homo sapiens
  misc_RNA (1)...(19): siRNA sense strand
gcgaugccacaguguccua

SEQ ID NO: 274777 - RNA, 19 nt, Homo sapiens
  misc_RNA (1)...(19): siRNA sense strand
aaaugacagugugacucua

SEQ ID NO: 274778 - RNA, 19 nt, Homo sapiens
  misc_RNA (1)...(19): siRNA sense strand
gcaauuuauguacaaggau

SEQ ID NO: 274779 - RNA, 19 nt, Homo sapiens
  misc_RNA (1)...(19): siRNA sense strand
ggauuacaguaccuauagc

SEQ ID NO: 274780 - RNA, 19 nt, Homo sapiens
  misc_RNA (1)...(19): siRNA sense strand
uagcuauggucaacaaagc

SEQ ID NO: 274781 - RNA, 19 nt, Homo sapiens
  misc_RNA (1)...(19): siRNA sense strand
acacagccgacuaguuaug

SEQ ID NO: 274782 - RNA, 19 nt, Homo sapiens
  misc_RNA (1)...(19): siRNA sense strand
gcauaugggcaacaaagcu

SEQ ID NO: 274783 - RNA, 19 nt, Homo sapiens
  misc_RNA (1)...(19): siRNA sense strand
cacagaccacccaggcaua

SEQ ID NO: 274784 - RNA, 19 nt, Homo sapiens
  misc_RNA (1)...(19): siRNA sense strand
cuacaguuauccccaggua

SEQ ID NO: 274785 - RNA, 19 nt, Homo sapiens
  misc_RNA (1)...(19): siRNA sense strand
ggaagaagccuccaaugaa

SEQ ID NO: 274786 - RNA, 19 nt, Homo sapiens
  misc_RNA (1)...(19): siRNA sense strand
cuacacagccgacuaguua

SEQ ID NO: 274787 - RNA, 19 nt, Homo sapiens
  misc_RNA (1)...(19): siRNA sense strand
guacaaggauuaaaugaca

SEQ ID NO: 274788 - RNA, 19 nt, Homo sapiens
  misc_RNA (1)...(19): siRNA sense strand
gaagaagccuccaaugaac

SEQ ID NO: 274789 - RNA, 19 nt, Homo sapiens
  misc_RNA (1)...(19): siRNA sense strand
gcagagaucggcccuacua

SEQ ID NO: 274790 - RNA, 19 nt, Homo sapiens
  misc_RNA (1)...(19): siRNA sense strand
ugacaacagugcaauuuau

SEQ ID NO: 274791 - RNA, 19 nt, Homo sapiens
  misc_RNA (1)...(19): siRNA sense strand
ggaaugguuugaugggaaa

SEQ ID NO: 274792 - RNA, 19 nt, Homo sapiens
  misc_RNA (1)...(19): siRNA sense strand
gaacagaugggaggaagaa

SEQ ID NO: 274793 - RNA, 19 nt, Homo sapiens
  misc_RNA (1)...(19): siRNA sense strand
caacagugcaauuuaugua

SEQ ID NO: 274794 - RNA, 19 nt, Homo sapiens
  misc_RNA (1)...(19): siRNA sense strand
ggaaacaagcccacugaga

SEQ ID NO: 274795 - RNA, 19 nt, Homo sapiens
  misc_RNA (1)...(19): siRNA sense strand
caacaaagcuauggaaccu

SEQ ID NO: 274796 - RNA, 19 nt, Homo sapiens
  misc_RNA (1)...(19): siRNA sense strand
gaacuucgccuggagaaca

SEQ ID NO: 274797 - RNA, 19 nt, Homo sapiens
  misc_RNA (1)...(19): siRNA sense strand
acaaagcuauggaaccuau

SEQ ID NO: 274798 - RNA, 19 nt, Homo sapiens
  misc_RNA (1)...(19): siRNA sense strand
ggaccgagguggcuuuggu

SEQ ID NO: 274799 - RNA, 19 nt, Homo sapiens
  misc_RNA (1)...(19): siRNA sense strand
gaguagcuauggucaacaa

SEQ ID NO: 274800 - RNA, 19 nt, Homo sapiens
  misc_RNA (1)...(19): siRNA sense strand
gaugaagacucugacaaca

SEQ ID NO: 274801 - RNA, 19 nt, Homo sapiens
  misc_RNA (1)...(19): siRNA sense strand
ugaagacucugacaacagu

SEQ ID NO: 274802 - RNA, 19 nt, Homo sapiens
  misc_RNA (1)...(19): siRNA sense strand
guuaugaucagagcaguua

SEQ ID NO: 274803 - RNA, 19 nt, Homo sapiens
  misc_RNA (1)...(19): siRNA sense strand
cagccaagcuccaagucaa

SEQ ID NO: 274804 - RNA, 19 nt, Homo sapiens
  misc_RNA (1)...(19): siRNA sense strand
cggaagaagccuccaauga

SEQ ID NO: 274805 - RNA, 19 nt, Homo sapiens
  misc_RNA (1)...(19): siRNA sense strand
ucagaccacugcaaccuau

SEQ ID NO: 274806 - RNA, 19 nt, Homo sapiens
  misc_RNA (1)...(19): siRNA sense strand
caagggagcaaacuuaaag

SEQ ID NO: 274807 - RNA, 19 nt, Homo sapiens
  misc_RNA (1)...(19): siRNA sense strand
gcacucagccugcuuaucc

SEQ ID NO: 274808 - RNA, 19 nt, Homo sapiens
  misc_RNA (1)...(19): siRNA sense strand
gauauggacagaguaacua

SEQ ID NO: 274809 - RNA, 19 nt, Homo sapiens
  misc_RNA (1)...(19): siRNA sense strand
gcaguuacucucagcagaa

SEQ ID NO: 274810 - RNA, 19 nt, Homo sapiens
  misc_RNA (1)...(19): siRNA sense strand
gacagccucccacugguua

SEQ ID NO: 274811 - RNA, 19 nt, Homo sapiens
  misc_RNA (1)...(19): siRNA sense strand
ggacguggaggaccuggaa

SEQ ID NO: 274812 - RNA, 19 nt, Homo sapiens
  misc_RNA (1)...(19): siRNA sense strand
caagaccgcaggauggaaa

SEQ ID NO: 274813 - RNA, 19 nt, Homo sapiens
  misc_RNA (1)...(19): siRNA sense strand
gaugaaggaccagaucuug

SEQ ID NO: 274814 - RNA, 19 nt, Homo sapiens
  misc_RNA (1)...(19): siRNA sense strand
ggacagccucccacugguu

SEQ ID NO: 274815 - RNA, 19 nt, Homo sapiens
  misc_RNA (1)...(19): siRNA sense strand
ucacugcaccuccauccua

SEQ ID NO: 274816 - RNA, 19 nt, Homo sapiens
  misc_RNA (1)...(19): siRNA sense strand
ggacagcagaguagcuaug

SEQ ID NO: 274817 - RNA, 19 nt, Homo sapiens
  misc_RNA (1)...(19): siRNA sense strand
gaccuuugauggaacagau

SEQ ID NO: 274818 - RNA, 19 nt, Homo sapiens
  misc_RNA (1)...(19): siRNA sense strand
ugccaaggcugccguggaa

SEQ ID NO: 274819 - RNA, 19 nt, Homo sapiens
  misc_RNA (1)...(19): siRNA sense strand
gggcagaccgccuaugcaa

SEQ ID NO: 274820 - RNA, 19 nt, Homo sapiens
  misc_RNA (1)...(19): siRNA sense strand
ggacaaggaaacaggaaag

SEQ ID NO: 274821 - RNA, 19 nt, Homo sapiens
  misc_RNA (1)...(19): siRNA sense strand
caagcuccaagucaauaua

SEQ ID NO: 274822 - RNA, 19 nt, Homo sapiens
  misc_RNA (1)...(19): siRNA sense strand
uaugauaccaccacugcua

SEQ ID NO: 274823 - RNA, 19 nt, Homo sapiens
  misc_RNA (1)...(19): siRNA sense strand
uuucaagggagcaaacuua

SEQ ID NO: 274824 - RNA, 19 nt, Homo sapiens
  misc_RNA (1)...(19): siRNA sense strand
ccagcccacucaaggauau

SEQ ID NO: 274825 - RNA, 19 nt, Homo sapiens
  misc_RNA (1)...(19): siRNA sense strand
cuaugcaacuucuuaugga

SEQ ID NO: 274826 - RNA, 19 nt, Homo sapiens
  misc_RNA (1)...(19): siRNA sense strand
gcagcagccucccacuagu

SEQ ID NO: 274827 - RNA, 19 nt, Homo sapiens
  misc_RNA (1)...(19): siRNA sense strand
ccuaggauauggacagagu

SEQ ID NO: 274828 - RNA, 19 nt, Homo sapiens
  misc_RNA (1)...(19): siRNA sense strand
gcagaccgccuaugcaacu

SEQ ID NO: 274829 - RNA, 19 nt, Homo sapiens
  misc_RNA (1)...(19): siRNA sense strand
gguuugaugggaaagauuu

SEQ ID NO: 274830 - RNA, 19 nt, Homo sapiens
  misc_RNA (1)...(19): siRNA sense strand
ggaaacaggaaagcccaaa

SEQ ID NO: 274831 - RNA, 19 nt, Homo sapiens
  misc_RNA (1)...(19): siRNA sense strand
acaucuaccuggacaagga

SEQ ID NO: 274832 - RNA, 19 nt, Homo sapiens
  misc_RNA (1)...(19): siRNA sense strand
gacaacagugcaauuuaug

SEQ ID NO: 274833 - RNA, 19 nt, Homo sapiens
  misc_RNA (1)...(19): siRNA sense strand
gccaagcuccaagucaaua

SEQ ID NO: 274834 - RNA, 19 nt, Homo sapiens
  misc_RNA (1)...(19): siRNA sense strand
ggaugaaggaccagaucuu

SEQ ID NO: 274835 - RNA, 19 nt, Homo sapiens
  misc_RNA (1)...(19): siRNA sense strand
cauaugggcaacaaagcua

SEQ ID NO: 274836 - RNA, 19 nt, Homo sapiens
  misc_RNA (1)...(19): siRNA sense strand
uggcagacuucuuuaagca

SEQ ID NO: 274837 - RNA, 19 nt, Homo sapiens
  misc_RNA (1)...(19): siRNA sense strand
cagaguagcuauggucaac

SEQ ID NO: 274838 - RNA, 19 nt, Homo sapiens
  misc_RNA (1)...(19): siRNA sense strand
ccuaccagcuauuccucua

SEQ ID NO: 274839 - RNA, 19 nt, Homo sapiens
  misc_RNA (1)...(19): siRNA sense strand
gggcaacaaagcuauggaa

SEQ ID NO: 274840 - RNA, 19 nt, Homo sapiens
  misc_RNA (1)...(19): siRNA sense strand
ccacaguguccuaugaaga

SEQ ID NO: 274841 - RNA, 19 nt, Homo sapiens
  misc_RNA (1)...(19): siRNA sense strand
uaaaugacagugugacucu

SEQ ID NO: 274842 - RNA, 19 nt, Homo sapiens
  misc_RNA (1)...(19): siRNA sense strand
ugaaggaccagaucuugau

SEQ ID NO: 274843 - RNA, 19 nt, Homo sapiens
  misc_RNA (1)...(19): siRNA sense strand
ccgccuaugcaacuucuua

SEQ ID NO: 274844 - RNA, 19 nt, Homo sapiens
  misc_RNA (1)...(19): siRNA sense strand
uaggauauggacagaguaa

SEQ ID NO: 274845 - RNA, 19 nt, Homo sapiens
  misc_RNA (1)...(19): siRNA sense strand
cagagugcaaccaguguaa

SEQ ID NO: 274846 - RNA, 19 nt, Homo sapiens
  misc_RNA (1)...(19): siRNA sense strand
ucaagggagcaaacuuaaa

SEQ ID NO: 274847 - RNA, 19 nt, Homo sapiens
  misc_RNA (1)...(19): siRNA sense strand
gccguggaaugguuugaug

SEQ ID NO: 274848 - RNA, 19 nt, Homo sapiens
  misc_RNA (1)...(19): siRNA sense strand
guuaagaugaacaagagaa

SEQ ID NO: 274849 - RNA, 19 nt, Homo sapiens
  misc_RNA (1)...(19): siRNA sense strand
gagacuagucaaccucaau

SEQ ID NO: 274850 - RNA, 19 nt, Homo sapiens
  misc_RNA (1)...(19): siRNA sense strand
ccaggcauaugggcaacaa

SEQ ID NO: 274851 - RNA, 19 nt, Homo sapiens
  misc_RNA (1)...(19): siRNA sense strand
cagugugacucuagaugau

SEQ ID NO: 274852 - RNA, 19 nt, Homo sapiens
  misc_RNA (1)...(19): siRNA sense strand
ggauuaaaugacaguguga

SEQ ID NO: 274853 - RNA, 19 nt, Homo sapiens
  misc_RNA (1)...(19): siRNA sense strand
ggauauggacagaguaacu

SEQ ID NO: 274854 - RNA, 19 nt, Homo sapiens
  misc_RNA (1)...(19): siRNA sense strand
gcuauggacagcagaguag

SEQ ID NO: 274855 - RNA, 19 nt, Homo sapiens
  misc_RNA (1)...(19): siRNA sense strand
gaaacaggaaagcccaaag

SEQ ID NO: 274856 - RNA, 19 nt, Homo sapiens
  misc_RNA (1)...(19): siRNA sense strand
cugacaacagugcaauuua

SEQ ID NO: 274857 - RNA, 19 nt, Homo sapiens
  misc_RNA (1)...(19): siRNA sense strand
acagugcaauuuauguaca

SEQ ID NO: 274858 - RNA, 19 nt, Homo sapiens
  misc_RNA (1)...(19): siRNA sense strand
caaccagcccagccuagga

SEQ ID NO: 274859 - RNA, 19 nt, Homo sapiens
  misc_RNA (1)...(19): siRNA sense strand
ccaaggcugccguggaaug

SEQ ID NO: 274860 - RNA, 19 nt, Homo sapiens
  misc_RNA (1)...(19): siRNA sense strand
cagugcaauuuauguacaa

SEQ ID NO: 274861 - RNA, 19 nt, Homo sapiens
  misc_RNA (1)...(19): siRNA sense strand
gcagaguagcuauggucaa

SEQ ID NO: 274862 - RNA, 19 nt, Homo sapiens
  misc_RNA (1)...(19): siRNA sense strand
cggauuacaguaccuauag

SEQ ID NO: 274863 - RNA, 19 nt, Homo sapiens
  misc_RNA (1)...(19): siRNA sense strand
ugcaauuuauguacaagga

SEQ ID NO: 274864 - RNA, 19 nt, Homo sapiens
  misc_RNA (1)...(19): siRNA sense strand
ggucaacaaagcagcuaug

SEQ ID NO: 274865 - RNA, 19 nt, Homo sapiens
  misc_RNA (1)...(19): siRNA sense strand
uggcuuugguggaggaaga

SEQ ID NO: 274866 - RNA, 19 nt, Homo sapiens
  misc_RNA (1)...(19): siRNA sense strand
cagcagccucccacuaguu

SEQ ID NO: 274867 - RNA, 19 nt, Homo sapiens
  misc_RNA (1)...(19): siRNA sense strand
uaccagcuauuccucuaca

SEQ ID NO: 274868 - RNA, 19 nt, Homo sapiens
  misc_RNA (1)...(19): siRNA sense strand
acagaugggaggaagaaga

SEQ ID NO: 274869 - RNA, 19 nt, Homo sapiens
  misc_RNA (1)...(19): siRNA sense strand
ucugacaacagugcaauuu

SEQ ID NO: 274870 - RNA, 19 nt, Homo sapiens
  misc_RNA (1)...(19): siRNA sense strand
acagugugacucuagauga

SEQ ID NO: 274871 - RNA, 19 nt, Homo sapiens
  misc_RNA (1)...(19): siRNA sense strand
ccuauggacagcccacuga

SEQ ID NO: 274872 - RNA, 19 nt, Homo sapiens
  misc_RNA (1)...(19): siRNA sense strand
ggaacagaugggaggaaga

SEQ ID NO: 274873 - RNA, 19 nt, Homo sapiens
  misc_RNA (1)...(19): siRNA sense strand
gacagugugacucuagaug

SEQ ID NO: 274874 - RNA, 19 nt, Homo sapiens
  misc_RNA (1)...(19): siRNA sense strand
aaacaagcccacugagacu

SEQ ID NO: 274875 - RNA, 19 nt, Homo sapiens
  misc_RNA (1)...(19): siRNA sense strand
acucaaggauaugcacaga

SEQ ID NO: 274876 - RNA, 19 nt, Homo sapiens
  misc_RNA (1)...(19): siRNA sense strand
gcgaugccacaguguccua

SEQ ID NO: 274877 - RNA, 19 nt, Homo sapiens
  misc_RNA (1)...(19): siRNA sense strand
aaaugacagugugacucua

SEQ ID NO: 274878 - RNA, 19 nt, Homo sapiens
  misc_RNA (1)...(19): siRNA sense strand
gcaauuuauguacaaggau

SEQ ID NO: 274879 - RNA, 19 nt, Homo sapiens
  misc_RNA (1)...(19): siRNA sense strand
ggauuacaguaccuauagc

SEQ ID NO: 274880 - RNA, 19 nt, Homo sapiens
  misc_RNA (1)...(19): siRNA sense strand
uagcuauggucaacaaagc

SEQ ID NO: 274881 - RNA, 19 nt, Homo sapiens
  misc_RNA (1)...(19): siRNA sense strand
acacagccgacuaguuaug

SEQ ID NO: 274882 - RNA, 19 nt, Homo sapiens
  misc_RNA (1)...(19): siRNA sense strand
gcauaugggcaacaaagcu

SEQ ID NO: 274883 - RNA, 19 nt, Homo sapiens
  misc_RNA (1)...(19): siRNA sense strand
cacagaccacccaggcaua

SEQ ID NO: 274884 - RNA, 19 nt, Homo sapiens
  misc_RNA (1)...(19): siRNA sense strand
cuacaguuauccccaggua

SEQ ID NO: 274885 - RNA, 19 nt, Homo sapiens
  misc_RNA (1)...(19): siRNA sense strand
ggagaaagaucauuacuua

SEQ ID NO: 274886 - RNA, 19 nt, Homo sapiens
  misc_RNA (1)...(19): siRNA sense strand
gaaaucaccuacucaauaa

SEQ ID NO: 274887 - RNA, 19 nt, Homo sapiens
  misc_RNA (1)...(19): siRNA sense strand
caucagagccuguuuauua

SEQ ID NO: 274888 - RNA, 19 nt, Homo sapiens
  misc_RNA (1)...(19): siRNA sense strand
gaacacauauuagagguua

SEQ ID NO: 274889 - RNA, 19 nt, Homo sapiens
  misc_RNA (1)...(19): siRNA sense strand
gaacuaacauggcugguuu

SEQ ID NO: 274890 - RNA, 19 nt, Homo sapiens
  misc_RNA (1)...(19): siRNA sense strand
gaacaugcuuugacaguuu

SEQ ID NO: 274891 - RNA, 19 nt, Homo sapiens
  misc_RNA (1)...(19): siRNA sense strand
gaacgaauaugaaguggaa

SEQ ID NO: 274892 - RNA, 19 nt, Homo sapiens
  misc_RNA (1)...(19): siRNA sense strand
ggucagaggugucagcuua

SEQ ID NO: 274893 - RNA, 19 nt, Homo sapiens
  misc_RNA (1)...(19): siRNA sense strand
gaaagaagaugcaccuguu

SEQ ID NO: 274894 - RNA, 19 nt, Homo sapiens
  misc_RNA (1)...(19): siRNA sense strand
gaaacaaucuggaccgaaa

SEQ ID NO: 274895 - RNA, 19 nt, Homo sapiens
  misc_RNA (1)...(19): siRNA sense strand
gaaacaggcuggauuacaa

SEQ ID NO: 274896 - RNA, 19 nt, Homo sapiens
  misc_RNA (1)...(19): siRNA sense strand
uaaaggaacuugaccauga

SEQ ID NO: 274897 - RNA, 19 nt, Homo sapiens
  misc_RNA (1)...(19): siRNA sense strand
gaacagaagucaaacuaca

SEQ ID NO: 274898 - RNA, 19 nt, Homo sapiens
  misc_RNA (1)...(19): siRNA sense strand
gaaugagcauggcaaauuu

SEQ ID NO: 274899 - RNA, 19 nt, Homo sapiens
  misc_RNA (1)...(19): siRNA sense strand
caagauggguguuuacauu

SEQ ID NO: 274900 - RNA, 19 nt, Homo sapiens
  misc_RNA (1)...(19): siRNA sense strand
ggacagauauuuacuuugg

SEQ ID NO: 274901 - RNA, 19 nt, Homo sapiens
  misc_RNA (1)...(19): siRNA sense strand
gaauauacaggacucauua

SEQ ID NO: 274902 - RNA, 19 nt, Homo sapiens
  misc_RNA (1)...(19): siRNA sense strand
gaaccuuucuauaccuuua

SEQ ID NO: 274903 - RNA, 19 nt, Homo sapiens
  misc_RNA (1)...(19): siRNA sense strand
gaagguauaugugaagaaa

SEQ ID NO: 274904 - RNA, 19 nt, Homo sapiens
  misc_RNA (1)...(19): siRNA sense strand
gaggauaguugcuucauga

SEQ ID NO: 274905 - RNA, 19 nt, Homo sapiens
  misc_RNA (1)...(19): siRNA sense strand
gaacauuuacucagacaua

SEQ ID NO: 274906 - RNA, 19 nt, Homo sapiens
  misc_RNA (1)...(19): siRNA sense strand
ggaaggagaaagaucauua

SEQ ID NO: 274907 - RNA, 19 nt, Homo sapiens
  misc_RNA (1)...(19): siRNA sense strand
gaggacagauauuuacuuu

SEQ ID NO: 274908 - RNA, 19 nt, Homo sapiens
  misc_RNA (1)...(19): siRNA sense strand
gauaaagacucaaaugcuu

SEQ ID NO: 274909 - RNA, 19 nt, Homo sapiens
  misc_RNA (1)...(19): siRNA sense strand
gauaguugcuucaugauug

SEQ ID NO: 274910 - RNA, 19 nt, Homo sapiens
  misc_RNA (1)...(19): siRNA sense strand
gaaucgaccucccauuauu

SEQ ID NO: 274911 - RNA, 19 nt, Homo sapiens
  misc_RNA (1)...(19): siRNA sense strand
ggaagugaauggaaacuau

SEQ ID NO: 274912 - RNA, 19 nt, Homo sapiens
  misc_RNA (1)...(19): siRNA sense strand
caaggaagcucguucacaa

SEQ ID NO: 274913 - RNA, 19 nt, Homo sapiens
  misc_RNA (1)...(19): siRNA sense strand
uagaagaugugaacgauaa

SEQ ID NO: 274914 - RNA, 19 nt, Homo sapiens
  misc_RNA (1)...(19): siRNA sense strand
ggaguaugauuuaauggua

SEQ ID NO: 274915 - RNA, 19 nt, Homo sapiens
  misc_RNA (1)...(19): siRNA sense strand
ucacaugauuggaguaaua

SEQ ID NO: 274916 - RNA, 19 nt, Homo sapiens
  misc_RNA (1)...(19): siRNA sense strand
gauugaagcuggaaaugaa

SEQ ID NO: 274917 - RNA, 19 nt, Homo sapiens
  misc_RNA (1)...(19): siRNA sense strand
gaaaugaacaugggaaauu

SEQ ID NO: 274918 - RNA, 19 nt, Homo sapiens
  misc_RNA (1)...(19): siRNA sense strand
gcaagaugaacacauauua

SEQ ID NO: 274919 - RNA, 19 nt, Homo sapiens
  misc_RNA (1)...(19): siRNA sense strand
uaaaggccauuccugcuua

SEQ ID NO: 274920 - RNA, 19 nt, Homo sapiens
  misc_RNA (1)...(19): siRNA sense strand
gaauaguacuuguagagaa

SEQ ID NO: 274921 - RNA, 19 nt, Homo sapiens
  misc_RNA (1)...(19): siRNA sense strand
ggcaauaccuucucaaugu

SEQ ID NO: 274922 - RNA, 19 nt, Homo sapiens
  misc_RNA (1)...(19): siRNA sense strand
gcaaccggcucucucuaua

SEQ ID NO: 274923 - RNA, 19 nt, Homo sapiens
  misc_RNA (1)...(19): siRNA sense strand
gaaaguaucacuagaagau

SEQ ID NO: 274924 - RNA, 19 nt, Homo sapiens
  misc_RNA (1)...(19): siRNA sense strand
gagauccgauacuccauua

SEQ ID NO: 274925 - RNA, 19 nt, Homo sapiens
  misc_RNA (1)...(19): siRNA sense strand
caaagaaagucaccuaaag

SEQ ID NO: 274926 - RNA, 19 nt, Homo sapiens
  misc_RNA (1)...(19): siRNA sense strand
ggcaggagcucccuuuaaa

SEQ ID NO: 274927 - RNA, 19 nt, Homo sapiens
  misc_RNA (1)...(19): siRNA sense strand
caacccagaucgcagauuu

SEQ ID NO: 274928 - RNA, 19 nt, Homo sapiens
  misc_RNA (1)...(19): siRNA sense strand
ggaagucauugaauccuuu

SEQ ID NO: 274929 - RNA, 19 nt, Homo sapiens
  misc_RNA (1)...(19): siRNA sense strand
ggaaggaauuggaaucguu

SEQ ID NO: 274930 - RNA, 19 nt, Homo sapiens
  misc_RNA (1)...(19): siRNA sense strand
gaugaacccuguaagaaug

SEQ ID NO: 274931 - RNA, 19 nt, Homo sapiens
  misc_RNA (1)...(19): siRNA sense strand
gaacugaugccucggguuu

SEQ ID NO: 274932 - RNA, 19 nt, Homo sapiens
  misc_RNA (1)...(19): siRNA sense strand
ggaaacagcuacgugaaau

SEQ ID NO: 274933 - RNA, 19 nt, Homo sapiens
  misc_RNA (1)...(19): siRNA sense strand
gagaucaacagacaaguua

SEQ ID NO: 274934 - RNA, 19 nt, Homo sapiens
  misc_RNA (1)...(19): siRNA sense strand
gaacuaucaucacucagaa

SEQ ID NO: 274935 - RNA, 19 nt, Homo sapiens
  misc_RNA (1)...(19): siRNA sense strand
ggaaugagcauggcaaauu

SEQ ID NO: 274936 - RNA, 19 nt, Homo sapiens
  misc_RNA (1)...(19): siRNA sense strand
gagcuugacaccuuaaaua

SEQ ID NO: 274937 - RNA, 19 nt, Homo sapiens
  misc_RNA (1)...(19): siRNA sense strand
gagagacaauuaccagauu

SEQ ID NO: 274938 - RNA, 19 nt, Homo sapiens
  misc_RNA (1)...(19): siRNA sense strand
gcaagagucaugaucauuu

SEQ ID NO: 274939 - RNA, 19 nt, Homo sapiens
  misc_RNA (1)...(19): siRNA sense strand
gaaguaagguacaaaauug

SEQ ID NO: 274940 - RNA, 19 nt, Homo sapiens
  misc_RNA (1)...(19): siRNA sense strand
ugacauacauugacauuag

SEQ ID NO: 274941 - RNA, 19 nt, Homo sapiens
  misc_RNA (1)...(19): siRNA sense strand
ccaguucucuucuguuaaa

SEQ ID NO: 274942 - RNA, 19 nt, Homo sapiens
  misc_RNA (1)...(19): siRNA sense strand
gguccacccuucuucuuua

SEQ ID NO: 274943 - RNA, 19 nt, Homo sapiens
  misc_RNA (1)...(19): siRNA sense strand
gaagcucguucacaauuga

SEQ ID NO: 274944 - RNA, 19 nt, Homo sapiens
  misc_RNA (1)...(19): siRNA sense strand
gagcagaaauaagugaauu

SEQ ID NO: 274945 - RNA, 19 nt, Homo sapiens
  misc_RNA (1)...(19): siRNA sense strand
gaggaaaucauuggaguua

SEQ ID NO: 274946 - RNA, 19 nt, Homo sapiens
  misc_RNA (1)...(19): siRNA sense strand
agacacaggugaacugaaa

SEQ ID NO: 274947 - RNA, 19 nt, Homo sapiens
  misc_RNA (1)...(19): siRNA sense strand
ggaaguagaguaauucaga

SEQ ID NO: 274948 - RNA, 19 nt, Homo sapiens
  misc_RNA (1)...(19): siRNA sense strand
gagagaggacagauauuua

SEQ ID NO: 274949 - RNA, 19 nt, Homo sapiens
  misc_RNA (1)...(19): siRNA sense strand
gagaagagccucagcuguu

SEQ ID NO: 274950 - RNA, 19 nt, Homo sapiens
  misc_RNA (1)...(19): siRNA sense strand
gagcaaauaaccacuguuu

SEQ ID NO: 274951 - RNA, 19 nt, Homo sapiens
  misc_RNA (1)...(19): siRNA sense strand
uuacaacacuggucucauu

SEQ ID NO: 274952 - RNA, 19 nt, Homo sapiens
  misc_RNA (1)...(19): siRNA sense strand
ggaagaaguccucaaguug

SEQ ID NO: 274953 - RNA, 19 nt, Homo sapiens
  misc_RNA (1)...(19): siRNA sense strand
gaaagaucauuacuuacug

SEQ ID NO: 274954 - RNA, 19 nt, Homo sapiens
  misc_RNA (1)...(19): siRNA sense strand
agaaaucaccuacucaaua

SEQ ID NO: 274955 - RNA, 19 nt, Homo sapiens
  misc_RNA (1)...(19): siRNA sense strand
gaugguggcuucuguagau

SEQ ID NO: 274956 - RNA, 19 nt, Homo sapiens
  misc_RNA (1)...(19): siRNA sense strand
gcaaaucagugcuguggau

SEQ ID NO: 274957 - RNA, 19 nt, Homo sapiens
  misc_RNA (1)...(19): siRNA sense strand
gaagauacagcgccagaaa

SEQ ID NO: 274958 - RNA, 19 nt, Homo sapiens
  misc_RNA (1)...(19): siRNA sense strand
ggauacaaaugacuugaga

SEQ ID NO: 274959 - RNA, 19 nt, Homo sapiens
  misc_RNA (1)...(19): siRNA sense strand
ccaagugacucaagaaaca

SEQ ID NO: 274960 - RNA, 19 nt, Homo sapiens
  misc_RNA (1)...(19): siRNA sense strand
gcaaagaugaacccuguaa

SEQ ID NO: 274961 - RNA, 19 nt, Homo sapiens
  misc_RNA (1)...(19): siRNA sense strand
ggagcaagcuguuuaucau

SEQ ID NO: 274962 - RNA, 19 nt, Homo sapiens
  misc_RNA (1)...(19): siRNA sense strand
gcacaguccugcuuuccuu

SEQ ID NO: 274963 - RNA, 19 nt, Homo sapiens
  misc_RNA (1)...(19): siRNA sense strand
ggaacaucaugaacacuuu

SEQ ID NO: 274964 - RNA, 19 nt, Homo sapiens
  misc_RNA (1)...(19): siRNA sense strand
gcaaagaaagucaccuaaa

SEQ ID NO: 274965 - RNA, 19 nt, Homo sapiens
  misc_RNA (1)...(19): siRNA sense strand
gagcacuccuuaaagauug

SEQ ID NO: 274966 - RNA, 19 nt, Homo sapiens
  misc_RNA (1)...(19): siRNA sense strand
caugagcacuccuuaaaga

SEQ ID NO: 274967 - RNA, 19 nt, Homo sapiens
  misc_RNA (1)...(19): siRNA sense strand
acagcaagaugaacacaua

SEQ ID NO: 274968 - RNA, 19 nt, Homo sapiens
  misc_RNA (1)...(19): siRNA sense strand
ggacagggacccagcauau

SEQ ID NO: 274969 - RNA, 19 nt, Homo sapiens
  misc_RNA (1)...(19): siRNA sense strand
gaugaggauucuucccaua

SEQ ID NO: 274970 - RNA, 19 nt, Homo sapiens
  misc_RNA (1)...(19): siRNA sense strand
caacagacaaguuacauau

SEQ ID NO: 274971 - RNA, 19 nt, Homo sapiens
  misc_RNA (1)...(19): siRNA sense strand
ggaaccaacggccaaguua

SEQ ID NO: 274972 - RNA, 19 nt, Homo sapiens
  misc_RNA (1)...(19): siRNA sense strand
ugauaacccuccuguguuu

SEQ ID NO: 274973 - RNA, 19 nt, Homo sapiens
  misc_RNA (1)...(19): siRNA sense strand
gaaucagccucaauuaaca

SEQ ID NO: 274974 - RNA, 19 nt, Homo sapiens
  misc_RNA (1)...(19): siRNA sense strand
caacccaccuacauuuauu

SEQ ID NO: 274975 - RNA, 19 nt, Homo sapiens
  misc_RNA (1)...(19): siRNA sense strand
ggagguacauagugaaauc

SEQ ID NO: 274976 - RNA, 19 nt, Homo sapiens
  misc_RNA (1)...(19): siRNA sense strand
caacuugaaucaguauuug

SEQ ID NO: 274977 - RNA, 19 nt, Homo sapiens
  misc_RNA (1)...(19): siRNA sense strand
ggaaguggcccuggaauug

SEQ ID NO: 274978 - RNA, 19 nt, Homo sapiens
  misc_RNA (1)...(19): siRNA sense strand
caacuucugcacaagauua

SEQ ID NO: 274979 - RNA, 19 nt, Homo sapiens
  misc_RNA (1)...(19): siRNA sense strand
gacaaccuguucucuguuu

SEQ ID NO: 274980 - RNA, 19 nt, Homo sapiens
  misc_RNA (1)...(19): siRNA sense strand
gaaagaaagcaaagaaagu

SEQ ID NO: 274981 - RNA, 19 nt, Homo sapiens
  misc_RNA (1)...(19): siRNA sense strand
auacaggacucauuaguga

SEQ ID NO: 274982 - RNA, 19 nt, Homo sapiens
  misc_RNA (1)...(19): siRNA sense strand
gaaauacaggugaugcuuu

SEQ ID NO: 274983 - RNA, 19 nt, Homo sapiens
  misc_RNA (1)...(19): siRNA sense strand
gaaguaaccaagcggagua

SEQ ID NO: 274984 - RNA, 19 nt, Homo sapiens
  misc_RNA (1)...(19): siRNA sense strand
gaaccuggauaacuaugug

SEQ ID NO: 274985 - RNA, 19 nt, Homo sapiens
  misc_RNA (1)...(19): siRNA sense strand
gcagaaaguuugcaaguaa

SEQ ID NO: 274986 - RNA, 19 nt, Homo sapiens
  misc_RNA (1)...(19): siRNA sense strand
ggagugaccugaagaauuc

SEQ ID NO: 274987 - RNA, 19 nt, Homo sapiens
  misc_RNA (1)...(19): siRNA sense strand
gaagaagucugauauugug

SEQ ID NO: 274988 - RNA, 19 nt, Homo sapiens
  misc_RNA (1)...(19): siRNA sense strand
uaaagcagauucccauuaa

SEQ ID NO: 274989 - RNA, 19 nt, Homo sapiens
  misc_RNA (1)...(19): siRNA sense strand
ggaaaguacuguccaaaug

SEQ ID NO: 274990 - RNA, 19 nt, Homo sapiens
  misc_RNA (1)...(19): siRNA sense strand
gaagaugcacgaucaguua

SEQ ID NO: 274991 - RNA, 19 nt, Homo sapiens
  misc_RNA (1)...(19): siRNA sense strand
gaacaacggcugcuaaaga

SEQ ID NO: 274992 - RNA, 19 nt, Homo sapiens
  misc_RNA (1)...(19): siRNA sense strand
gagaagaagucugauauug

SEQ ID NO: 274993 - RNA, 19 nt, Homo sapiens
  misc_RNA (1)...(19): siRNA sense strand
gaacagauagauccuagua

SEQ ID NO: 274994 - RNA, 19 nt, Homo sapiens
  misc_RNA (1)...(19): siRNA sense strand
gaagagaauugaagaaucu

SEQ ID NO: 274995 - RNA, 19 nt, Homo sapiens
  misc_RNA (1)...(19): siRNA sense strand
gaagaaggaugaacuaaaa

SEQ ID NO: 274996 - RNA, 19 nt, Homo sapiens
  misc_RNA (1)...(19): siRNA sense strand
gaucaucacuauacaacaa

SEQ ID NO: 274997 - RNA, 19 nt, Homo sapiens
  misc_RNA (1)...(19): siRNA sense strand
gaauuacgguuacuggaaa

SEQ ID NO: 274998 - RNA, 19 nt, Homo sapiens
  misc_RNA (1)...(19): siRNA sense strand
guauucaucuucuggcuua

SEQ ID NO: 274999 - RNA, 19 nt, Homo sapiens
  misc_RNA (1)...(19): siRNA sense strand
gaaaucagguguaguucug

SEQ ID NO: 275000 - RNA, 19 nt, Homo sapiens
  misc_RNA (1)...(19): siRNA sense strand
gggcacagcuccaucagaa

SEQ ID NO: 275001 - RNA, 19 nt, Homo sapiens
  misc_RNA (1)...(19): siRNA sense strand
aaacagaauuggagaaguu

SEQ ID NO: 275002 - RNA, 19 nt, Homo sapiens
  misc_RNA (1)...(19): siRNA sense strand
gaaagaggauaccggaugu

SEQ ID NO: 275003 - RNA, 19 nt, Homo sapiens
  misc_RNA (1)...(19): siRNA sense strand
cgacaaagccacaaugaaa

SEQ ID NO: 275004 - RNA, 19 nt, Homo sapiens
  misc_RNA (1)...(19): siRNA sense strand
gcagagaugaucaagguua

SEQ ID NO: 275005 - RNA, 19 nt, Homo sapiens
  misc_RNA (1)...(19): siRNA sense strand
gaaaguacuguccaaauga

SEQ ID NO: 275006 - RNA, 19 nt, Homo sapiens
  misc_RNA (1)...(19): siRNA sense strand
gaauauguccuuucuguau

SEQ ID NO: 275007 - RNA, 19 nt, Homo sapiens
  misc_RNA (1)...(19): siRNA sense strand
gaacaacuuaguaggauaa

SEQ ID NO: 275008 - RNA, 19 nt, Homo sapiens
  misc_RNA (1)...(19): siRNA sense strand
caaaacaggucaucacuaa

SEQ ID NO: 275009 - RNA, 19 nt, Homo sapiens
  misc_RNA (1)...(19): siRNA sense strand
gaaagagccaccuccagua

SEQ ID NO: 275010 - RNA, 19 nt, Homo sapiens
  misc_RNA (1)...(19): siRNA sense strand
gagaggcuauccaaauuug

SEQ ID NO: 275011 - RNA, 19 nt, Homo sapiens
  misc_RNA (1)...(19): siRNA sense strand
ugaagaagaugcacgauca

SEQ ID NO: 275012 - RNA, 19 nt, Homo sapiens
  misc_RNA (1)...(19): siRNA sense strand
caacuuaguaggauaauga

SEQ ID NO: 275013 - RNA, 19 nt, Homo sapiens
  misc_RNA (1)...(19): siRNA sense strand
agaaagagcucacuaucau

SEQ ID NO: 275014 - RNA, 19 nt, Homo sapiens
  misc_RNA (1)...(19): siRNA sense strand
ggaagaaggaugaacuaaa

SEQ ID NO: 275015 - RNA, 19 nt, Homo sapiens
  misc_RNA (1)...(19): siRNA sense strand
gaauaugcaucuacuuuac

SEQ ID NO: 275016 - RNA, 19 nt, Homo sapiens
  misc_RNA (1)...(19): siRNA sense strand
aaacuucuguugcuguuaa

SEQ ID NO: 275017 - RNA, 19 nt, Homo sapiens
  misc_RNA (1)...(19): siRNA sense strand
gaggagacauuuuaucaua

SEQ ID NO: 275018 - RNA, 19 nt, Homo sapiens
  misc_RNA (1)...(19): siRNA sense strand
gaauguccauaaagagauu

SEQ ID NO: 275019 - RNA, 19 nt, Homo sapiens
  misc_RNA (1)...(19): siRNA sense strand
ggacagaggagacauuuua

SEQ ID NO: 275020 - RNA, 19 nt, Homo sapiens
  misc_RNA (1)...(19): siRNA sense strand
gaucauguggaauaacuua

SEQ ID NO: 275021 - RNA, 19 nt, Homo sapiens
  misc_RNA (1)...(19): siRNA sense strand
uaagaaaucagguguaguu

SEQ ID NO: 275022 - RNA, 19 nt, Homo sapiens
  misc_RNA (1)...(19): siRNA sense strand
gaaaggagaggcuauccaa

SEQ ID NO: 275023 - RNA, 19 nt, Homo sapiens
  misc_RNA (1)...(19): siRNA sense strand
ugggaaaccuggugaauau

SEQ ID NO: 275024 - RNA, 19 nt, Homo sapiens
  misc_RNA (1)...(19): siRNA sense strand
cagccugucuacaucauua

SEQ ID NO: 275025 - RNA, 19 nt, Homo sapiens
  misc_RNA (1)...(19): siRNA sense strand
gcaauaugaucaucccaau

SEQ ID NO: 275026 - RNA, 19 nt, Homo sapiens
  misc_RNA (1)...(19): siRNA sense strand
gugaauauguccuuucugu

SEQ ID NO: 275027 - RNA, 19 nt, Homo sapiens
  misc_RNA (1)...(19): siRNA sense strand
gaaccuuuguaaucaaguu

SEQ ID NO: 275028 - RNA, 19 nt, Homo sapiens
  misc_RNA (1)...(19): siRNA sense strand
ucaaacauuccucaacuua

SEQ ID NO: 275029 - RNA, 19 nt, Homo sapiens
  misc_RNA (1)...(19): siRNA sense strand
aauagaagcucaagaacug

SEQ ID NO: 275030 - RNA, 19 nt, Homo sapiens
  misc_RNA (1)...(19): siRNA sense strand
gagaugcacugaagcaaag

SEQ ID NO: 275031 - RNA, 19 nt, Homo sapiens
  misc_RNA (1)...(19): siRNA sense strand
uaaccagucuugucacaga

SEQ ID NO: 275032 - RNA, 19 nt, Homo sapiens
  misc_RNA (1)...(19): siRNA sense strand
gaaaugaauucugccaaag

SEQ ID NO: 275033 - RNA, 19 nt, Homo sapiens
  misc_RNA (1)...(19): siRNA sense strand
ucaguuacaucuauggaaa

SEQ ID NO: 275034 - RNA, 19 nt, Homo sapiens
  misc_RNA (1)...(19): siRNA sense strand
guacuguccaaaugaauua

SEQ ID NO: 275035 - RNA, 19 nt, Homo sapiens
  misc_RNA (1)...(19): siRNA sense strand
caccggaagcucuuaauua

SEQ ID NO: 275036 - RNA, 19 nt, Homo sapiens
  misc_RNA (1)...(19): siRNA sense strand
gaugcaagaagaaaugaua

SEQ ID NO: 275037 - RNA, 19 nt, Homo sapiens
  misc_RNA (1)...(19): siRNA sense strand
gcagauagaggcagagaug

SEQ ID NO: 275038 - RNA, 19 nt, Homo sapiens
  misc_RNA (1)...(19): siRNA sense strand
ggucaucacuaagaaauca

SEQ ID NO: 275039 - RNA, 19 nt, Homo sapiens
  misc_RNA (1)...(19): siRNA sense strand
ccaaaauucucaagcaaua

SEQ ID NO: 275040 - RNA, 19 nt, Homo sapiens
  misc_RNA (1)...(19): siRNA sense strand
cuugaacucuggaccuuua

SEQ ID NO: 275041 - RNA, 19 nt, Homo sapiens
  misc_RNA (1)...(19): siRNA sense strand
cagaauagaagcucaagaa

SEQ ID NO: 275042 - RNA, 19 nt, Homo sapiens
  misc_RNA (1)...(19): siRNA sense strand
ggaauuacgguuacuggaa

SEQ ID NO: 275043 - RNA, 19 nt, Homo sapiens
  misc_RNA (1)...(19): siRNA sense strand
gcaagaaaaugaugggaaa

SEQ ID NO: 275044 - RNA, 19 nt, Homo sapiens
  misc_RNA (1)...(19): siRNA sense strand
gaagaaaaguuacauaggu

SEQ ID NO: 275045 - RNA, 19 nt, Homo sapiens
  misc_RNA (1)...(19): siRNA sense strand
gauagauccuaguacagaa

SEQ ID NO: 275046 - RNA, 19 nt, Homo sapiens
  misc_RNA (1)...(19): siRNA sense strand
cggaagcucuuaauuaugg

SEQ ID NO: 275047 - RNA, 19 nt, Homo sapiens
  misc_RNA (1)...(19): siRNA sense strand
gaaaaucagugacuuugga

SEQ ID NO: 275048 - RNA, 19 nt, Homo sapiens
  misc_RNA (1)...(19): siRNA sense strand
uuucauagauguucacaga

SEQ ID NO: 275049 - RNA, 19 nt, Homo sapiens
  misc_RNA (1)...(19): siRNA sense strand
gauauugugcuucugcuaa

SEQ ID NO: 275050 - RNA, 19 nt, Homo sapiens
  misc_RNA (1)...(19): siRNA sense strand
ggagaggcuauccaaauuu

SEQ ID NO: 275051 - RNA, 19 nt, Homo sapiens
  misc_RNA (1)...(19): siRNA sense strand
cagaggaaauagugaaugu

SEQ ID NO: 275052 - RNA, 19 nt, Homo sapiens
  misc_RNA (1)...(19): siRNA sense strand
gaugaaguguugggauuau

SEQ ID NO: 275053 - RNA, 19 nt, Homo sapiens
  misc_RNA (1)...(19): siRNA sense strand
guauauaagggcacauuaa

SEQ ID NO: 275054 - RNA, 19 nt, Homo sapiens
  misc_RNA (1)...(19): siRNA sense strand
aaacaggucaucacuaaga

SEQ ID NO: 275055 - RNA, 19 nt, Homo sapiens
  misc_RNA (1)...(19): siRNA sense strand
cagcagacagaacaacuua

SEQ ID NO: 275056 - RNA, 19 nt, Homo sapiens
  misc_RNA (1)...(19): siRNA sense strand
gagauacaguucagagagu

SEQ ID NO: 275057 - RNA, 19 nt, Homo sapiens
  misc_RNA (1)...(19): siRNA sense strand
uguuguaucucgagaguaa

SEQ ID NO: 275058 - RNA, 19 nt, Homo sapiens
  misc_RNA (1)...(19): siRNA sense strand
gagaucauguggaauaacu

SEQ ID NO: 275059 - RNA, 19 nt, Homo sapiens
  misc_RNA (1)...(19): siRNA sense strand
gaacaagaaauagaguuug

SEQ ID NO: 275060 - RNA, 19 nt, Homo sapiens
  misc_RNA (1)...(19): siRNA sense strand
gauaaccagucuugucaca

SEQ ID NO: 275061 - RNA, 19 nt, Homo sapiens
  misc_RNA (1)...(19): siRNA sense strand
acagauagauccuaguaca

SEQ ID NO: 275062 - RNA, 19 nt, Homo sapiens
  misc_RNA (1)...(19): siRNA sense strand
ucacuaucaucaagagaaa

SEQ ID NO: 275063 - RNA, 19 nt, Homo sapiens
  misc_RNA (1)...(19): siRNA sense strand
gaaaaucgcccuaaguuca

SEQ ID NO: 275064 - RNA, 19 nt, Homo sapiens
  misc_RNA (1)...(19): siRNA sense strand
cggaagaacuuaugcaaac

SEQ ID NO: 275065 - RNA, 19 nt, Homo sapiens
  misc_RNA (1)...(19): siRNA sense strand
uaaaagcacucaaagguau

SEQ ID NO: 275066 - RNA, 19 nt, Homo sapiens
  misc_RNA (1)...(19): siRNA sense strand
aaaguacuguccaaaugaa

SEQ ID NO: 275067 - RNA, 19 nt, Homo sapiens
  misc_RNA (1)...(19): siRNA sense strand
ugucauauugggagaauua

SEQ ID NO: 275068 - RNA, 19 nt, Homo sapiens
  misc_RNA (1)...(19): siRNA sense strand
gaaauggauucucagucau

SEQ ID NO: 275069 - RNA, 19 nt, Homo sapiens
  misc_RNA (1)...(19): siRNA sense strand
gaaagaaaggagaggcuau

SEQ ID NO: 275070 - RNA, 19 nt, Homo sapiens
  misc_RNA (1)...(19): siRNA sense strand
caccuccaguaguaaauua

SEQ ID NO: 275071 - RNA, 19 nt, Homo sapiens
  misc_RNA (1)...(19): siRNA sense strand
gcacagaaggaauuacuag

SEQ ID NO: 275072 - RNA, 19 nt, Homo sapiens
  misc_RNA (1)...(19): siRNA sense strand
cagcugagaugcacugaag

SEQ ID NO: 275073 - RNA, 19 nt, Homo sapiens
  misc_RNA (1)...(19): siRNA sense strand
ggaagaacuuaugcaaaca

SEQ ID NO: 275074 - RNA, 19 nt, Homo sapiens
  misc_RNA (1)...(19): siRNA sense strand
gaugaauacagccagauaa

SEQ ID NO: 275075 - RNA, 19 nt, Homo sapiens
  misc_RNA (1)...(19): siRNA sense strand
gggagugaccugaagaauu

SEQ ID NO: 275076 - RNA, 19 nt, Homo sapiens
  misc_RNA (1)...(19): siRNA sense strand
uuaaagcagauucccauua

SEQ ID NO: 275077 - RNA, 19 nt, Homo sapiens
  misc_RNA (1)...(19): siRNA sense strand
gcgagagagucaugggaaa

SEQ ID NO: 275078 - RNA, 19 nt, Homo sapiens
  misc_RNA (1)...(19): siRNA sense strand
gagaagagaauugaagaau

SEQ ID NO: 275079 - RNA, 19 nt, Homo sapiens
  misc_RNA (1)...(19): siRNA sense strand
aacaacggcugcuaaagaa

SEQ ID NO: 275080 - RNA, 19 nt, Homo sapiens
  misc_RNA (1)...(19): siRNA sense strand
gcacagcuccaucagaauc

SEQ ID NO: 275081 - RNA, 19 nt, Homo sapiens
  misc_RNA (1)...(19): siRNA sense strand
augcagcuauagacaauua

SEQ ID NO: 275082 - RNA, 19 nt, Homo sapiens
  misc_RNA (1)...(19): siRNA sense strand
agagccaccuccaguagua

SEQ ID NO: 275083 - RNA, 19 nt, Homo sapiens
  misc_RNA (1)...(19): siRNA sense strand
caaaucagcaagcaagaga

SEQ ID NO: 275084 - RNA, 19 nt, Homo sapiens
  misc_RNA (1)...(19): siRNA sense strand
aggagaggcuauccaaauu

SEQ ID NO: 275085 - RNA, 19 nt, Homo sapiens
  misc_RNA (1)...(19): siRNA sense strand
gaacagcgccuacaguauu

SEQ ID NO: 275086 - RNA, 19 nt, Homo sapiens
  misc_RNA (1)...(19): siRNA sense strand
gagaacagcgccuacagua

SEQ ID NO: 275087 - RNA, 19 nt, Homo sapiens
  misc_RNA (1)...(19): siRNA sense strand
gagcugggcuauaauacgu

SEQ ID NO: 275088 - RNA, 19 nt, Homo sapiens
  misc_RNA (1)...(19): siRNA sense strand
ggcgguaccuggccaugaa

SEQ ID NO: 275089 - RNA, 19 nt, Homo sapiens
  misc_RNA (1)...(19): siRNA sense strand
ccacagggaccacgagaug

SEQ ID NO: 275090 - RNA, 19 nt, Homo sapiens
  misc_RNA (1)...(19): siRNA sense strand
uccacgagcugggcuauaa

SEQ ID NO: 275091 - RNA, 19 nt, Homo sapiens
  misc_RNA (1)...(19): siRNA sense strand
ggagaacagcgccuacagu

SEQ ID NO: 275092 - RNA, 19 nt, Homo sapiens
  misc_RNA (1)...(19): siRNA sense strand
agaagcagagcccggauaa

SEQ ID NO: 275093 - RNA, 19 nt, Homo sapiens
  misc_RNA (1)...(19): siRNA sense strand
aacagcgccuacaguauuu

SEQ ID NO: 275094 - RNA, 19 nt, Homo sapiens
  misc_RNA (1)...(19): siRNA sense strand
gcugggcuauaauacguau

SEQ ID NO: 275095 - RNA, 19 nt, Homo sapiens
  misc_RNA (1)...(19): siRNA sense strand
cacgagcugggcuauaaua

SEQ ID NO: 275096 - RNA, 19 nt, Homo sapiens
  misc_RNA (1)...(19): siRNA sense strand
cagaagcagagcccggaua

SEQ ID NO: 275097 - RNA, 19 nt, Homo sapiens
  misc_RNA (1)...(19): siRNA sense strand
gcgccgagagacuguggua

SEQ ID NO: 275098 - RNA, 19 nt, Homo sapiens
  misc_RNA (1)...(19): siRNA sense strand
ugugguacgugucugugaa

SEQ ID NO: 275099 - RNA, 19 nt, Homo sapiens
  misc_RNA (1)...(19): siRNA sense strand
caguggaggugggcauugu

SEQ ID NO: 275100 - RNA, 19 nt, Homo sapiens
  misc_RNA (1)...(19): siRNA sense strand
cagcgccgagugcgaguuu

SEQ ID NO: 275101 - RNA, 19 nt, Homo sapiens
  misc_RNA (1)...(19): siRNA sense strand
ggagcccucucacguucag

SEQ ID NO: 275102 - RNA, 19 nt, Homo sapiens
  misc_RNA (1)...(19): siRNA sense strand
gcaguggaggugggcauug

SEQ ID NO: 275103 - RNA, 19 nt, Homo sapiens
  misc_RNA (1)...(19): siRNA sense strand
agaagaagaucaccuugaa

SEQ ID NO: 275104 - RNA, 19 nt, Homo sapiens
  misc_RNA (1)...(19): siRNA sense strand
agaagaagguggugaucaa

SEQ ID NO: 275105 - RNA, 19 nt, Homo sapiens
  misc_RNA (1)...(19): siRNA sense strand
ccaaggaggccgagaagaa

SEQ ID NO: 275106 - RNA, 19 nt, Homo sapiens
  misc_RNA (1)...(19): siRNA sense strand
gagaagaagaucaccuuga

SEQ ID NO: 275107 - RNA, 19 nt, Homo sapiens
  misc_RNA (1)...(19): siRNA sense strand
aagcagggcuggcagaaca

SEQ ID NO: 275108 - RNA, 19 nt, Homo sapiens
  misc_RNA (1)...(19): siRNA sense strand
ugagcgagcagaauuacua

SEQ ID NO: 275109 - RNA, 19 nt, Homo sapiens
  misc_RNA (1)...(19): siRNA sense strand
ccuacaacauguucgagaa

SEQ ID NO: 275110 - RNA, 19 nt, Homo sapiens
  misc_RNA (1)...(19): siRNA sense strand
ugaacggcaucuaccaguu

SEQ ID NO: 275111 - RNA, 19 nt, Homo sapiens
  misc_RNA (1)...(19): siRNA sense strand
gacccggacuccuacaaca

SEQ ID NO: 275112 - RNA, 19 nt, Homo sapiens
  misc_RNA (1)...(19): siRNA sense strand
cgacugcacgaaauacuga

SEQ ID NO: 275113 - RNA, 19 nt, Homo sapiens
  misc_RNA (1)...(19): siRNA sense strand
gagaagaagguggugauca

SEQ ID NO: 275114 - RNA, 19 nt, Homo sapiens
  misc_RNA (1)...(19): siRNA sense strand
gaacagcauccgccacaac

SEQ ID NO: 275115 - RNA, 19 nt, Homo sapiens
  misc_RNA (1)...(19): siRNA sense strand
gccacaaccucucgcucaa

SEQ ID NO: 275116 - RNA, 19 nt, Homo sapiens
  misc_RNA (1)...(19): siRNA sense strand
ggacuccuacaacauguuc

SEQ ID NO: 275117 - RNA, 19 nt, Homo sapiens
  misc_RNA (1)...(19): siRNA sense strand
agaagguggugaucaagag

SEQ ID NO: 275118 - RNA, 19 nt, Homo sapiens
  misc_RNA (1)...(19): siRNA sense strand
uaccugagcgagcagaauu

SEQ ID NO: 275119 - RNA, 19 nt, Homo sapiens
  misc_RNA (1)...(19): siRNA sense strand
gaagaagguggugaucaag

SEQ ID NO: 275120 - RNA, 19 nt, Homo sapiens
  misc_RNA (1)...(19): siRNA sense strand
gaagaagaucaccuugaac

SEQ ID NO: 275121 - RNA, 19 nt, Homo sapiens
  misc_RNA (1)...(19): siRNA sense strand
cggcccagcagcaaacuuu

SEQ ID NO: 275122 - RNA, 19 nt, Homo sapiens
  misc_RNA (1)...(19): siRNA sense strand
caaggaggccgagaagaag

SEQ ID NO: 275123 - RNA, 19 nt, Homo sapiens
  misc_RNA (1)...(19): siRNA sense strand
ccuacgacugcacgaaaua

SEQ ID NO: 275124 - RNA, 19 nt, Homo sapiens
  misc_RNA (1)...(19): siRNA sense strand
ccgagaagaagaucaccuu

SEQ ID NO: 275125 - RNA, 19 nt, Homo sapiens
  misc_RNA (1)...(19): siRNA sense strand
caucuaccaguucaucaug

SEQ ID NO: 275126 - RNA, 19 nt, Homo sapiens
  misc_RNA (1)...(19): siRNA sense strand
gcaucuaccaguucaucau

SEQ ID NO: 275127 - RNA, 19 nt, Homo sapiens
  misc_RNA (1)...(19): siRNA sense strand
ccaacgugcgggagauguu

SEQ ID NO: 275128 - RNA, 19 nt, Homo sapiens
  misc_RNA (1)...(19): siRNA sense strand
gcaaugagccuuccucuga

SEQ ID NO: 275129 - RNA, 19 nt, Homo sapiens
  misc_RNA (1)...(19): siRNA sense strand
ggagggagcugacugauac

SEQ ID NO: 275130 - RNA, 19 nt, Homo sapiens
  misc_RNA (1)...(19): siRNA sense strand
gggauagccucucuuacua

SEQ ID NO: 275131 - RNA, 19 nt, Homo sapiens
  misc_RNA (1)...(19): siRNA sense strand
acaguuaucuccagaagaa

SEQ ID NO: 275132 - RNA, 19 nt, Homo sapiens
  misc_RNA (1)...(19): siRNA sense strand
gaacaguuaucuccagaag

SEQ ID NO: 275133 - RNA, 19 nt, Homo sapiens
  misc_RNA (1)...(19): siRNA sense strand
ggagacagaccaacuagaa

SEQ ID NO: 275134 - RNA, 19 nt, Homo sapiens
  misc_RNA (1)...(19): siRNA sense strand
gaagggaaaggaauaagau

SEQ ID NO: 275135 - RNA, 19 nt, Homo sapiens
  misc_RNA (1)...(19): siRNA sense strand
gggcaagguggaacaguua

SEQ ID NO: 275136 - RNA, 19 nt, Homo sapiens
  misc_RNA (1)...(19): siRNA sense strand
agaccgagcccuuugauga

SEQ ID NO: 275137 - RNA, 19 nt, Homo sapiens
  misc_RNA (1)...(19): siRNA sense strand
cagaccaacuagaagauga

SEQ ID NO: 275138 - RNA, 19 nt, Homo sapiens
  misc_RNA (1)...(19): siRNA sense strand
ccugcaagaucccugauga

SEQ ID NO: 275139 - RNA, 19 nt, Homo sapiens
  misc_RNA (1)...(19): siRNA sense strand
ggaggagggagcugacuga

SEQ ID NO: 275140 - RNA, 19 nt, Homo sapiens
  misc_RNA (1)...(19): siRNA sense strand
ccaaccugcugaaggagaa

SEQ ID NO: 275141 - RNA, 19 nt, Homo sapiens
  misc_RNA (1)...(19): siRNA sense strand
gaaccugucaagagcauca

SEQ ID NO: 275142 - RNA, 19 nt, Homo sapiens
  misc_RNA (1)...(19): siRNA sense strand
gaugagaagucugcuuugc

SEQ ID NO: 275143 - RNA, 19 nt, Homo sapiens
  misc_RNA (1)...(19): siRNA sense strand
cgaagggaaaggaauaaga

SEQ ID NO: 275144 - RNA, 19 nt, Homo sapiens
  misc_RNA (1)...(19): siRNA sense strand
agacagaccaacuagaaga

SEQ ID NO: 275145 - RNA, 19 nt, Homo sapiens
  misc_RNA (1)...(19): siRNA sense strand
gaagaugagaagucugcuu

SEQ ID NO: 275146 - RNA, 19 nt, Homo sapiens
  misc_RNA (1)...(19): siRNA sense strand
gaagaccgagcccuuugau

SEQ ID NO: 275147 - RNA, 19 nt, Homo sapiens
  misc_RNA (1)...(19): siRNA sense strand
aagaugagaagucugcuuu

SEQ ID NO: 275148 - RNA, 19 nt, Homo sapiens
  misc_RNA (1)...(19): siRNA sense strand
gcccaagcccucaguggaa

SEQ ID NO: 275149 - RNA, 19 nt, Homo sapiens
  misc_RNA (1)...(19): siRNA sense strand
gcugaagaccgagcccuuu

SEQ ID NO: 275150 - RNA, 19 nt, Homo sapiens
  misc_RNA (1)...(19): siRNA sense strand
gcacugcuuacacgucuuc

SEQ ID NO: 275151 - RNA, 19 nt, Homo sapiens
  misc_RNA (1)...(19): siRNA sense strand
ccaacuagaagaugagaag

SEQ ID NO: 275152 - RNA, 19 nt, Homo sapiens
  misc_RNA (1)...(19): siRNA sense strand
uugccaaccugcugaagga

SEQ ID NO: 275153 - RNA, 19 nt, Homo sapiens
  misc_RNA (1)...(19): siRNA sense strand
ggaacaguuaucuccagaa

SEQ ID NO: 275154 - RNA, 19 nt, Homo sapiens
  misc_RNA (1)...(19): siRNA sense strand
aggagaauccgaagggaaa

SEQ ID NO: 275155 - RNA, 19 nt, Homo sapiens
  misc_RNA (1)...(19): siRNA sense strand
gggcuggcguugugaagac

SEQ ID NO: 275156 - RNA, 19 nt, Homo sapiens
  misc_RNA (1)...(19): siRNA sense strand
cacccugccucuccucaau

SEQ ID NO: 275157 - RNA, 19 nt, Homo sapiens
  misc_RNA (1)...(19): siRNA sense strand
uccagaagaagaagagaaa

SEQ ID NO: 275158 - RNA, 19 nt, Homo sapiens
  misc_RNA (1)...(19): siRNA sense strand
ugaagaccgagcccuuuga

SEQ ID NO: 275159 - RNA, 19 nt, Homo sapiens
  misc_RNA (1)...(19): siRNA sense strand
agcaugggcucgccuguca

SEQ ID NO: 275160 - RNA, 19 nt, Homo sapiens
  misc_RNA (1)...(19): siRNA sense strand
gcugacugauacacuccaa

SEQ ID NO: 275161 - RNA, 19 nt, Homo sapiens
  misc_RNA (1)...(19): siRNA sense strand
acuagaagaugagaagucu

SEQ ID NO: 275162 - RNA, 19 nt, Homo sapiens
  misc_RNA (1)...(19): siRNA sense strand
gagacagaccaacuagaag

SEQ ID NO: 275163 - RNA, 19 nt, Homo sapiens
  misc_RNA (1)...(19): siRNA sense strand
ggauagccucucuuacuac

SEQ ID NO: 275164 - RNA, 19 nt, Homo sapiens
  misc_RNA (1)...(19): siRNA sense strand
agaccgagauugccaaccu

SEQ ID NO: 275165 - RNA, 19 nt, Homo sapiens
  misc_RNA (1)...(19): siRNA sense strand
gcaagguggaacaguuauc

SEQ ID NO: 275166 - RNA, 19 nt, Homo sapiens
  misc_RNA (1)...(19): siRNA sense strand
acucccagcugcacugcuu

SEQ ID NO: 275167 - RNA, 19 nt, Homo sapiens
  misc_RNA (1)...(19): siRNA sense strand
ugccagacauggaccuauc

SEQ ID NO: 275168 - RNA, 19 nt, Homo sapiens
  misc_RNA (1)...(19): siRNA sense strand
cgucuccagugccaacuuc

SEQ ID NO: 275169 - RNA, 19 nt, Homo sapiens
  misc_RNA (1)...(19): siRNA sense strand
gacagaccaacuagaagau

SEQ ID NO: 275170 - RNA, 19 nt, Homo sapiens
  misc_RNA (1)...(19): siRNA sense strand
caagguggaacaguuaucu

SEQ ID NO: 275171 - RNA, 19 nt, Homo sapiens
  misc_RNA (1)...(19): siRNA sense strand
gucuguggcuucccuugau

SEQ ID NO: 275172 - RNA, 19 nt, Homo sapiens
  misc_RNA (1)...(19): siRNA sense strand
aggagggagcugacugaua

SEQ ID NO: 275173 - RNA, 19 nt, Homo sapiens
  misc_RNA (1)...(19): siRNA sense strand
gcaguuacgugcaaagcuu

SEQ ID NO: 275174 - RNA, 19 nt, Homo sapiens
  misc_RNA (1)...(19): siRNA sense strand
cuggaaaccucaucaagga

SEQ ID NO: 275175 - RNA, 19 nt, Homo sapiens
  misc_RNA (1)...(19): siRNA sense strand
ggacagcuuccuccuacug

SEQ ID NO: 275176 - RNA, 19 nt, Homo sapiens
  misc_RNA (1)...(19): siRNA sense strand
gagggaggaggaagaggaa

SEQ ID NO: 275177 - RNA, 19 nt, Homo sapiens
  misc_RNA (1)...(19): siRNA sense strand
cagcuagugcucucuggaa

SEQ ID NO: 275178 - RNA, 19 nt, Homo sapiens
  misc_RNA (1)...(19): siRNA sense strand
gcaguuacgugcaaagcuu

SEQ ID NO: 275179 - RNA, 19 nt, Homo sapiens
  misc_RNA (1)...(19): siRNA sense strand
cuggaaaccucaucaagga

SEQ ID NO: 275180 - RNA, 19 nt, Homo sapiens
  misc_RNA (1)...(19): siRNA sense strand
ggacagcuuccuccuacug

SEQ ID NO: 275181 - RNA, 19 nt, Homo sapiens
  misc_RNA (1)...(19): siRNA sense strand
gagggaggaggaagaggaa

SEQ ID NO: 275182 - RNA, 19 nt, Homo sapiens
  misc_RNA (1)...(19): siRNA sense strand
cagcuagugcucucuggaa

SEQ ID NO: 275183 - RNA, 19 nt, Homo sapiens
  misc_RNA (1)...(19): siRNA sense strand
ggacauaucuuacaucaca

SEQ ID NO: 275184 - RNA, 19 nt, Homo sapiens
  misc_RNA (1)...(19): siRNA sense strand
gaagagaucacgaggaaua

SEQ ID NO: 275185 - RNA, 19 nt, Homo sapiens
  misc_RNA (1)...(19): siRNA sense strand
guugagaacuuguugcuua

SEQ ID NO: 275186 - RNA, 19 nt, Homo sapiens
  misc_RNA (1)...(19): siRNA sense strand
gaacagagccaucauucaa

SEQ ID NO: 275187 - RNA, 19 nt, Homo sapiens
  misc_RNA (1)...(19): siRNA sense strand
gaagaucuguuguccaauc

SEQ ID NO: 275188 - RNA, 19 nt, Homo sapiens
  misc_RNA (1)...(19): siRNA sense strand
gaauugcagugaugucauu

SEQ ID NO: 275189 - RNA, 19 nt, Homo sapiens
  misc_RNA (1)...(19): siRNA sense strand
gaaggaggguuugcauuug

SEQ ID NO: 275190 - RNA, 19 nt, Homo sapiens
  misc_RNA (1)...(19): siRNA sense strand
uaaagaggcuauuauccaa

SEQ ID NO: 275191 - RNA, 19 nt, Homo sapiens
  misc_RNA (1)...(19): siRNA sense strand
gagaacuuguugcuuagua

SEQ ID NO: 275192 - RNA, 19 nt, Homo sapiens
  misc_RNA (1)...(19): siRNA sense strand
guaugaagcucaagaugug

SEQ ID NO: 275193 - RNA, 19 nt, Homo sapiens
  misc_RNA (1)...(19): siRNA sense strand
gcagagaguaugcauuaaa

SEQ ID NO: 275194 - RNA, 19 nt, Homo sapiens
  misc_RNA (1)...(19): siRNA sense strand
gagcgagucugcccugaug

SEQ ID NO: 275195 - RNA, 19 nt, Homo sapiens
  misc_RNA (1)...(19): siRNA sense strand
agagugaggugucagauga

SEQ ID NO: 275196 - RNA, 19 nt, Homo sapiens
  misc_RNA (1)...(19): siRNA sense strand
cgaaggaggguuugcauuu

SEQ ID NO: 275197 - RNA, 19 nt, Homo sapiens
  misc_RNA (1)...(19): siRNA sense strand
gaacgacuuugaagaucug

SEQ ID NO: 275198 - RNA, 19 nt, Homo sapiens
  misc_RNA (1)...(19): siRNA sense strand
uggcagagaguaugcauua

SEQ ID NO: 275199 - RNA, 19 nt, Homo sapiens
  misc_RNA (1)...(19): siRNA sense strand
gcacacagccaaggccuaa

SEQ ID NO: 275200 - RNA, 19 nt, Homo sapiens
  misc_RNA (1)...(19): siRNA sense strand
ugggagaacucgagcauga

SEQ ID NO: 275201 - RNA, 19 nt, Homo sapiens
  misc_RNA (1)...(19): siRNA sense strand
caaagaccauugcagagau

SEQ ID NO: 275202 - RNA, 19 nt, Homo sapiens
  misc_RNA (1)...(19): siRNA sense strand
uagaacaccagaaaucaua

SEQ ID NO: 275203 - RNA, 19 nt, Homo sapiens
  misc_RNA (1)...(19): siRNA sense strand
ggagagcccagcaagauga

SEQ ID NO: 275204 - RNA, 19 nt, Homo sapiens
  misc_RNA (1)...(19): siRNA sense strand
gaacgccaccacugugaaa

SEQ ID NO: 275205 - RNA, 19 nt, Homo sapiens
  misc_RNA (1)...(19): siRNA sense strand
gagcagcacgccaagauga

SEQ ID NO: 275206 - RNA, 19 nt, Homo sapiens
  misc_RNA (1)...(19): siRNA sense strand
ccacgaccaucucgcacua

SEQ ID NO: 275207 - RNA, 19 nt, Homo sapiens
  misc_RNA (1)...(19): siRNA sense strand
aggaagagaucacgaggaa

SEQ ID NO: 275208 - RNA, 19 nt, Homo sapiens
  misc_RNA (1)...(19): siRNA sense strand
gacaagaugcgggacuuua

SEQ ID NO: 275209 - RNA, 19 nt, Homo sapiens
  misc_RNA (1)...(19): siRNA sense strand
caccagaaaucauagacuu

SEQ ID NO: 275210 - RNA, 19 nt, Homo sapiens
  misc_RNA (1)...(19): siRNA sense strand
gagaacgacuuugaagauc

SEQ ID NO: 275211 - RNA, 19 nt, Homo sapiens
  misc_RNA (1)...(19): siRNA sense strand
caacaccaauguauagaac

SEQ ID NO: 275212 - RNA, 19 nt, Homo sapiens
  misc_RNA (1)...(19): siRNA sense strand
ggacgcgugugacauucaa

SEQ ID NO: 275213 - RNA, 19 nt, Homo sapiens
  misc_RNA (1)...(19): siRNA sense strand
uccaguccgucgcuaauua

SEQ ID NO: 275214 - RNA, 19 nt, Homo sapiens
  misc_RNA (1)...(19): siRNA sense strand
cagaaaucauagacuugua

SEQ ID NO: 275215 - RNA, 19 nt, Homo sapiens
  misc_RNA (1)...(19): siRNA sense strand
ccauuaagcugugugacuu

SEQ ID NO: 275216 - RNA, 19 nt, Homo sapiens
  misc_RNA (1)...(19): siRNA sense strand
ccaugaagauguuccagau

SEQ ID NO: 275217 - RNA, 19 nt, Homo sapiens
  misc_RNA (1)...(19): siRNA sense strand
agacuuguauuccaacuuc

SEQ ID NO: 275218 - RNA, 19 nt, Homo sapiens
  misc_RNA (1)...(19): siRNA sense strand
gacaagaaagggccaaaga

SEQ ID NO: 275219 - RNA, 19 nt, Homo sapiens
  misc_RNA (1)...(19): siRNA sense strand
uugaagaucuguuguccaa

SEQ ID NO: 275220 - RNA, 19 nt, Homo sapiens
  misc_RNA (1)...(19): siRNA sense strand
ggcagagacuggugcagaa

SEQ ID NO: 275221 - RNA, 19 nt, Homo sapiens
  misc_RNA (1)...(19): siRNA sense strand
ugaaauuugccaaguauga

SEQ ID NO: 275222 - RNA, 19 nt, Homo sapiens
  misc_RNA (1)...(19): siRNA sense strand
cagagaguaugcauuaaag

SEQ ID NO: 275223 - RNA, 19 nt, Homo sapiens
  misc_RNA (1)...(19): siRNA sense strand
uacaucacauccagaauug

SEQ ID NO: 275224 - RNA, 19 nt, Homo sapiens
  misc_RNA (1)...(19): siRNA sense strand
guauagaacaccagaaauc

SEQ ID NO: 275225 - RNA, 19 nt, Homo sapiens
  misc_RNA (1)...(19): siRNA sense strand
aagggcagcugguggaauu

SEQ ID NO: 275226 - RNA, 19 nt, Homo sapiens
  misc_RNA (1)...(19): siRNA sense strand
acagagccaucauucaaga

SEQ ID NO: 275227 - RNA, 19 nt, Homo sapiens
  misc_RNA (1)...(19): siRNA sense strand
gcauuaaagaggcuauuau

SEQ ID NO: 275228 - RNA, 19 nt, Homo sapiens
  misc_RNA (1)...(19): siRNA sense strand
gguuugcauuuguguauga

SEQ ID NO: 275229 - RNA, 19 nt, Homo sapiens
  misc_RNA (1)...(19): siRNA sense strand
ccaagucucccaucacaga

SEQ ID NO: 275230 - RNA, 19 nt, Homo sapiens
  misc_RNA (1)...(19): siRNA sense strand
gcgacacgguucugaagau

SEQ ID NO: 275231 - RNA, 19 nt, Homo sapiens
  misc_RNA (1)...(19): siRNA sense strand
ggucggaguuugagaacca

SEQ ID NO: 275232 - RNA, 19 nt, Homo sapiens
  misc_RNA (1)...(19): siRNA sense strand
gaacaccagaaaucauaga

SEQ ID NO: 275233 - RNA, 19 nt, Homo sapiens
  misc_RNA (1)...(19): siRNA sense strand
agaacuuguugcuuaguaa

SEQ ID NO: 275234 - RNA, 19 nt, Homo sapiens
  misc_RNA (1)...(19): siRNA sense strand
ccaaagaccauugcagaga

SEQ ID NO: 275235 - RNA, 19 nt, Homo sapiens
  misc_RNA (1)...(19): siRNA sense strand
ugugaaauuugccaaguau

SEQ ID NO: 275236 - RNA, 19 nt, Homo sapiens
  misc_RNA (1)...(19): siRNA sense strand
gcaaggagacgugcucauc

SEQ ID NO: 275237 - RNA, 19 nt, Homo sapiens
  misc_RNA (1)...(19): siRNA sense strand
uuacaucacauccagaauu

SEQ ID NO: 275238 - RNA, 19 nt, Homo sapiens
  misc_RNA (1)...(19): siRNA sense strand
ucauagacuuguauuccaa

SEQ ID NO: 275239 - RNA, 19 nt, Homo sapiens
  misc_RNA (1)...(19): siRNA sense strand
cuccaggucugacaagaaa

SEQ ID NO: 275240 - RNA, 19 nt, Homo sapiens
  misc_RNA (1)...(19): siRNA sense strand
ucagaacccggacccauuu

SEQ ID NO: 275241 - RNA, 19 nt, Homo sapiens
  misc_RNA (1)...(19): siRNA sense strand
gaugcgggacuuuaagauu

SEQ ID NO: 275242 - RNA, 19 nt, Homo sapiens
  misc_RNA (1)...(19): siRNA sense strand
gaucuguuguccaaucaag

SEQ ID NO: 275243 - RNA, 19 nt, Homo sapiens
  misc_RNA (1)...(19): siRNA sense strand
ggacccauuugcugaccuu

SEQ ID NO: 275244 - RNA, 19 nt, Homo sapiens
  misc_RNA (1)...(19): siRNA sense strand
cgccaccacugugaaauuu

SEQ ID NO: 275245 - RNA, 19 nt, Homo sapiens
  misc_RNA (1)...(19): siRNA sense strand
gcuccacggcucaguauga

SEQ ID NO: 275246 - RNA, 19 nt, Homo sapiens
  misc_RNA (1)...(19): siRNA sense strand
ugagaacgacuuugaagau

SEQ ID NO: 275247 - RNA, 19 nt, Homo sapiens
  misc_RNA (1)...(19): siRNA sense strand
gccucgaacuucaguguga

SEQ ID NO: 275248 - RNA, 19 nt, Homo sapiens
  misc_RNA (1)...(19): siRNA sense strand
gcuauuauccaaugaagag

SEQ ID NO: 275249 - RNA, 19 nt, Homo sapiens
  misc_RNA (1)...(19): siRNA sense strand
gaggauggagcgaaacuuc

SEQ ID NO: 275250 - RNA, 19 nt, Homo sapiens
  misc_RNA (1)...(19): siRNA sense strand
ccggauuuauuucaaguga

SEQ ID NO: 275251 - RNA, 19 nt, Homo sapiens
  misc_RNA (1)...(19): siRNA sense strand
acaagaugcgggacuuuaa

SEQ ID NO: 275252 - RNA, 19 nt, Homo sapiens
  misc_RNA (1)...(19): siRNA sense strand
gcacuaugccgucuacaac

SEQ ID NO: 275253 - RNA, 19 nt, Homo sapiens
  misc_RNA (1)...(19): siRNA sense strand
aagaggcuauuauccaaug

SEQ ID NO: 275254 - RNA, 19 nt, Homo sapiens
  misc_RNA (1)...(19): siRNA sense strand
ggaggagcagcaagacauu

SEQ ID NO: 275255 - RNA, 19 nt, Homo sapiens
  misc_RNA (1)...(19): siRNA sense strand
guaaccaagggaccauuaa

SEQ ID NO: 275256 - RNA, 19 nt, Homo sapiens
  misc_RNA (1)...(19): siRNA sense strand
gcgagaagcaggauaucug

SEQ ID NO: 275257 - RNA, 19 nt, Homo sapiens
  misc_RNA (1)...(19): siRNA sense strand
gaaagggccaaagaccauu

SEQ ID NO: 275258 - RNA, 19 nt, Homo sapiens
  misc_RNA (1)...(19): siRNA sense strand
gagaguaugcauuaaagag

SEQ ID NO: 275259 - RNA, 19 nt, Homo sapiens
  misc_RNA (1)...(19): siRNA sense strand
gaaaagaacagagccauca

SEQ ID NO: 275260 - RNA, 19 nt, Homo sapiens
  misc_RNA (1)...(19): siRNA sense strand
augaagauguuccagauuc

SEQ ID NO: 275261 - RNA, 19 nt, Homo sapiens
  misc_RNA (1)...(19): siRNA sense strand
gaauagucaaugggaagua

SEQ ID NO: 275262 - RNA, 19 nt, Homo sapiens
  misc_RNA (1)...(19): siRNA sense strand
acacgguucugaagaucuu

SEQ ID NO: 275263 - RNA, 19 nt, Homo sapiens
  misc_RNA (1)...(19): siRNA sense strand
gagaucacgaggaauacaa

SEQ ID NO: 275264 - RNA, 19 nt, Homo sapiens
  misc_RNA (1)...(19): siRNA sense strand
gaagagaaggaggcagaga

SEQ ID NO: 275265 - RNA, 19 nt, Homo sapiens
  misc_RNA (1)...(19): siRNA sense strand
uaagauugaagauggcaaa

SEQ ID NO: 275266 - RNA, 19 nt, Homo sapiens
  misc_RNA (1)...(19): siRNA sense strand
gcgccaugcugcaggugaa

SEQ ID NO: 275267 - RNA, 19 nt, Homo sapiens
  misc_RNA (1)...(19): siRNA sense strand
aaagaacagagccaucauu

SEQ ID NO: 275268 - RNA, 19 nt, Homo sapiens
  misc_RNA (1)...(19): siRNA sense strand
aaagaccauugcagagaug

SEQ ID NO: 275269 - RNA, 19 nt, Homo sapiens
  misc_RNA (1)...(19): siRNA sense strand
cgacuuugaagaucuguug

SEQ ID NO: 275270 - RNA, 19 nt, Homo sapiens
  misc_RNA (1)...(19): siRNA sense strand
uaacuaugccucgaacuuc

SEQ ID NO: 275271 - RNA, 19 nt, Homo sapiens
  misc_RNA (1)...(19): siRNA sense strand
gcagagacuggugcagaaa

SEQ ID NO: 275272 - RNA, 19 nt, Homo sapiens
  misc_RNA (1)...(19): siRNA sense strand
augcgggacuuuaagauug

SEQ ID NO: 275273 - RNA, 19 nt, Homo sapiens
  misc_RNA (1)...(19): siRNA sense strand
ggcagagaguaugcauuaa

SEQ ID NO: 275274 - RNA, 19 nt, Homo sapiens
  misc_RNA (1)...(19): siRNA sense strand
ucgaagaugugcgguuguu

SEQ ID NO: 275275 - RNA, 19 nt, Homo sapiens
  misc_RNA (1)...(19): siRNA sense strand
caucuggccaucccacaaa

SEQ ID NO: 275276 - RNA, 19 nt, Homo sapiens
  misc_RNA (1)...(19): siRNA sense strand
caggagagcccagcaagau

SEQ ID NO: 275277 - RNA, 19 nt, Homo sapiens
  misc_RNA (1)...(19): siRNA sense strand
uuaaagaggcuauuaucca

SEQ ID NO: 275278 - RNA, 19 nt, Homo sapiens
  misc_RNA (1)...(19): siRNA sense strand
cugugaaauuugccaagua

SEQ ID NO: 275279 - RNA, 19 nt, Homo sapiens
  misc_RNA (1)...(19): siRNA sense strand
cccgaacauuguccaguuu

SEQ ID NO: 275280 - RNA, 19 nt, Homo sapiens
  misc_RNA (1)...(19): siRNA sense strand
aaggaggguuugcauuugu

SEQ ID NO: 275281 - RNA, 19 nt, Homo sapiens
  misc_RNA (1)...(19): siRNA sense strand
gagccaucauucaagaagu

SEQ ID NO: 275282 - RNA, 19 nt, Homo sapiens
  misc_RNA (1)...(19): siRNA sense strand
gggaggagcagcaagacau

SEQ ID NO: 275283 - RNA, 19 nt, Homo sapiens
  misc_RNA (1)...(19): siRNA sense strand
gaugaaacgugucuauuug

SEQ ID NO: 275284 - RNA, 19 nt, Homo sapiens
  misc_RNA (1)...(19): siRNA sense strand
caaagaaucuaccguugaa

SEQ ID NO: 275285 - RNA, 19 nt, Homo sapiens
  misc_RNA (1)...(19): siRNA sense strand
gaucuggccuugugguuaa

SEQ ID NO: 275286 - RNA, 19 nt, Homo sapiens
  misc_RNA (1)...(19): siRNA sense strand
ggaccuggccucucugaua

SEQ ID NO: 275287 - RNA, 19 nt, Homo sapiens
  misc_RNA (1)...(19): siRNA sense strand
ggaugaaacgugucuauuu

SEQ ID NO: 275288 - RNA, 19 nt, Homo sapiens
  misc_RNA (1)...(19): siRNA sense strand
gaacaagaagaaacacuuu

SEQ ID NO: 275289 - RNA, 19 nt, Homo sapiens
  misc_RNA (1)...(19): siRNA sense strand
gcaaaugcccaaacaaguu

SEQ ID NO: 275290 - RNA, 19 nt, Homo sapiens
  misc_RNA (1)...(19): siRNA sense strand
gcaaaucuccaacucuaaa

SEQ ID NO: 275291 - RNA, 19 nt, Homo sapiens
  misc_RNA (1)...(19): siRNA sense strand
ugaagaagaucccaugcaa

SEQ ID NO: 275292 - RNA, 19 nt, Homo sapiens
  misc_RNA (1)...(19): siRNA sense strand
aagcaaaucuccaacucua

SEQ ID NO: 275293 - RNA, 19 nt, Homo sapiens
  misc_RNA (1)...(19): siRNA sense strand
ggacaugaauccagauaac

SEQ ID NO: 275294 - RNA, 19 nt, Homo sapiens
  misc_RNA (1)...(19): siRNA sense strand
gaauccagauaacuacuug

SEQ ID NO: 275295 - RNA, 19 nt, Homo sapiens
  misc_RNA (1)...(19): siRNA sense strand
gaagcuaauuugcuaccaa

SEQ ID NO: 275296 - RNA, 19 nt, Homo sapiens
  misc_RNA (1)...(19): siRNA sense strand
ggaggaggcugggaaacuu

SEQ ID NO: 275297 - RNA, 19 nt, Homo sapiens
  misc_RNA (1)...(19): siRNA sense strand
gaccuggccucucugauau

SEQ ID NO: 275298 - RNA, 19 nt, Homo sapiens
  misc_RNA (1)...(19): siRNA sense strand
gagacaauacagcaaauuu

SEQ ID NO: 275299 - RNA, 19 nt, Homo sapiens
  misc_RNA (1)...(19): siRNA sense strand
gcagacaugaagcuaauuu

SEQ ID NO: 275300 - RNA, 19 nt, Homo sapiens
  misc_RNA (1)...(19): siRNA sense strand
cagaaacuaugcaggagaa

SEQ ID NO: 275301 - RNA, 19 nt, Homo sapiens
  misc_RNA (1)...(19): siRNA sense strand
acaugaagcuaauuugcua

SEQ ID NO: 275302 - RNA, 19 nt, Homo sapiens
  misc_RNA (1)...(19): siRNA sense strand
gaaggagauuacagcagaa

SEQ ID NO: 275303 - RNA, 19 nt, Homo sapiens
  misc_RNA (1)...(19): siRNA sense strand
ugaaacgugucuauuugaa

SEQ ID NO: 275304 - RNA, 19 nt, Homo sapiens
  misc_RNA (1)...(19): siRNA sense strand
cuaacaagcccacaaagaa

SEQ ID NO: 275305 - RNA, 19 nt, Homo sapiens
  misc_RNA (1)...(19): siRNA sense strand
cagcagacaugaagcuaau

SEQ ID NO: 275306 - RNA, 19 nt, Homo sapiens
  misc_RNA (1)...(19): siRNA sense strand
aagaagaucuggccuugug

SEQ ID NO: 275307 - RNA, 19 nt, Homo sapiens
  misc_RNA (1)...(19): siRNA sense strand
aaagaguacaggaaacuua

SEQ ID NO: 275308 - RNA, 19 nt, Homo sapiens
  misc_RNA (1)...(19): siRNA sense strand
gaagaagaucccaugcaaa

SEQ ID NO: 275309 - RNA, 19 nt, Homo sapiens
  misc_RNA (1)...(19): siRNA sense strand
aaacgugucuauuugaauc

SEQ ID NO: 275310 - RNA, 19 nt, Homo sapiens
  misc_RNA (1)...(19): siRNA sense strand
caaagcaaaucuccaacuc

SEQ ID NO: 275311 - RNA, 19 nt, Homo sapiens
  misc_RNA (1)...(19): siRNA sense strand
cuaauuugcuaccaaugaa

SEQ ID NO: 275312 - RNA, 19 nt, Homo sapiens
  misc_RNA (1)...(19): siRNA sense strand
ugaagauccuccuugcaaa

SEQ ID NO: 275313 - RNA, 19 nt, Homo sapiens
  misc_RNA (1)...(19): siRNA sense strand
caucaaagucuucuggaaa

SEQ ID NO: 275314 - RNA, 19 nt, Homo sapiens
  misc_RNA (1)...(19): siRNA sense strand
aaacuaugcaggagaaauu

SEQ ID NO: 275315 - RNA, 19 nt, Homo sapiens
  misc_RNA (1)...(19): siRNA sense strand
gcuaauuugcuaccaauga

SEQ ID NO: 275316 - RNA, 19 nt, Homo sapiens
  misc_RNA (1)...(19): siRNA sense strand
gaagauccuccuugcaaau

SEQ ID NO: 275317 - RNA, 19 nt, Homo sapiens
  misc_RNA (1)...(19): siRNA sense strand
gcuaacaagcccacaaaga

SEQ ID NO: 275318 - RNA, 19 nt, Homo sapiens
  misc_RNA (1)...(19): siRNA sense strand
guuauaaggcuaagaagga

SEQ ID NO: 275319 - RNA, 19 nt, Homo sapiens
  misc_RNA (1)...(19): siRNA sense strand
gguggucucugccaguuau

SEQ ID NO: 275320 - RNA, 19 nt, Homo sapiens
  misc_RNA (1)...(19): siRNA sense strand
uaacaagcccacaaagaau

SEQ ID NO: 275321 - RNA, 19 nt, Homo sapiens
  misc_RNA (1)...(19): siRNA sense strand
caggaaacuuacuggauga

SEQ ID NO: 275322 - RNA, 19 nt, Homo sapiens
  misc_RNA (1)...(19): siRNA sense strand
gcagaucucccguguggau

SEQ ID NO: 275323 - RNA, 19 nt, Homo sapiens
  misc_RNA (1)...(19): siRNA sense strand
gaaacgugucuauuugaau

SEQ ID NO: 275324 - RNA, 19 nt, Homo sapiens
  misc_RNA (1)...(19): siRNA sense strand
ccaguuauaaggcuaagaa

SEQ ID NO: 275325 - RNA, 19 nt, Homo sapiens
  misc_RNA (1)...(19): siRNA sense strand
ccagagacaauacagcaaa

SEQ ID NO: 275326 - RNA, 19 nt, Homo sapiens
  misc_RNA (1)...(19): siRNA sense strand
uuaggaugcugcacaacaa

SEQ ID NO: 275327 - RNA, 19 nt, Homo sapiens
  misc_RNA (1)...(19): siRNA sense strand
gccuugcucugucaacuug

SEQ ID NO: 275328 - RNA, 19 nt, Homo sapiens
  misc_RNA (1)...(19): siRNA sense strand
caaaugcccaaacaaguuc

SEQ ID NO: 275329 - RNA, 19 nt, Homo sapiens
  misc_RNA (1)...(19): siRNA sense strand
aaacgaauuucugaagauc

SEQ ID NO: 275330 - RNA, 19 nt, Homo sapiens
  misc_RNA (1)...(19): siRNA sense strand
aaucuaccguugaagaaga

SEQ ID NO: 275331 - RNA, 19 nt, Homo sapiens
  misc_RNA (1)...(19): siRNA sense strand
acaaagaaucuaccguuga

SEQ ID NO: 275332 - RNA, 19 nt, Homo sapiens
  misc_RNA (1)...(19): siRNA sense strand
gcuaagaaggaaauuaagu

SEQ ID NO: 275333 - RNA, 19 nt, Homo sapiens
  misc_RNA (1)...(19): siRNA sense strand
uggagaaguuggacaaugg

SEQ ID NO: 275334 - RNA, 19 nt, Homo sapiens
  misc_RNA (1)...(19): siRNA sense strand
aggcuaagaaggaaauuaa

SEQ ID NO: 275335 - RNA, 19 nt, Homo sapiens
  misc_RNA (1)...(19): siRNA sense strand
gaugaugcagugaaacgaa

SEQ ID NO: 275336 - RNA, 19 nt, Homo sapiens
  misc_RNA (1)...(19): siRNA sense strand
ucaucaaagucuucuggaa

SEQ ID NO: 275337 - RNA, 19 nt, Homo sapiens
  misc_RNA (1)...(19): siRNA sense strand
caccuucuccuucaucaaa

SEQ ID NO: 275338 - RNA, 19 nt, Homo sapiens
  misc_RNA (1)...(19): siRNA sense strand
gcuagagcuuggccggauu

SEQ ID NO: 275339 - RNA, 19 nt, Homo sapiens
  misc_RNA (1)...(19): siRNA sense strand
gacaauacagcaaauuucu

SEQ ID NO: 275340 - RNA, 19 nt, Homo sapiens
  misc_RNA (1)...(19): siRNA sense strand
cagagacaauacagcaaau

SEQ ID NO: 275341 - RNA, 19 nt, Homo sapiens
  misc_RNA (1)...(19): siRNA sense strand
gaaacuaugcaggagaaau

SEQ ID NO: 275342 - RNA, 19 nt, Homo sapiens
  misc_RNA (1)...(19): siRNA sense strand
ucauuaggaugcugcacaa

SEQ ID NO: 275343 - RNA, 19 nt, Homo sapiens
  misc_RNA (1)...(19): siRNA sense strand
acaugaauccagauaacua

SEQ ID NO: 275344 - RNA, 19 nt, Homo sapiens
  misc_RNA (1)...(19): siRNA sense strand
gagauuacagcagaaacuu

SEQ ID NO: 275345 - RNA, 19 nt, Homo sapiens
  misc_RNA (1)...(19): siRNA sense strand
cuaagaaggaaauuaagug

SEQ ID NO: 275346 - RNA, 19 nt, Homo sapiens
  misc_RNA (1)...(19): siRNA sense strand
gaggaggcugggaaacuuu

SEQ ID NO: 275347 - RNA, 19 nt, Homo sapiens
  misc_RNA (1)...(19): siRNA sense strand
caagcaacccagagaagug

SEQ ID NO: 275348 - RNA, 19 nt, Homo sapiens
  misc_RNA (1)...(19): siRNA sense strand
ccacaagcaacccagagaa

SEQ ID NO: 275349 - RNA, 19 nt, Homo sapiens
  misc_RNA (1)...(19): siRNA sense strand
uuauaaggcuaagaaggaa

SEQ ID NO: 275350 - RNA, 19 nt, Homo sapiens
  misc_RNA (1)...(19): siRNA sense strand
gagauugaacaagaagaaa

SEQ ID NO: 275351 - RNA, 19 nt, Homo sapiens
  misc_RNA (1)...(19): siRNA sense strand
aagcuaauuugcuaccaau

SEQ ID NO: 275352 - RNA, 19 nt, Homo sapiens
  misc_RNA (1)...(19): siRNA sense strand
ggagauuacagcagaaacu

SEQ ID NO: 275353 - RNA, 19 nt, Homo sapiens
  misc_RNA (1)...(19): siRNA sense strand
ugaacaagaagaaacacuu

SEQ ID NO: 275354 - RNA, 19 nt, Homo sapiens
  misc_RNA (1)...(19): siRNA sense strand
gauugaacaagaagaaaca

SEQ ID NO: 275355 - RNA, 19 nt, Homo sapiens
  misc_RNA (1)...(19): siRNA sense strand
cugaagauccuccuugcaa

SEQ ID NO: 275356 - RNA, 19 nt, Homo sapiens
  misc_RNA (1)...(19): siRNA sense strand
caaaacauccccuauccaa

SEQ ID NO: 275357 - RNA, 19 nt, Homo sapiens
  misc_RNA (1)...(19): siRNA sense strand
agacaauacagcaaauuuc

SEQ ID NO: 275358 - RNA, 19 nt, Homo sapiens
  misc_RNA (1)...(19): siRNA sense strand
gcaucaguauagccaaugg

SEQ ID NO: 275359 - RNA, 19 nt, Homo sapiens
  misc_RNA (1)...(19): siRNA sense strand
gcccaaacaaguucugugu

SEQ ID NO: 275360 - RNA, 19 nt, Homo sapiens
  misc_RNA (1)...(19): siRNA sense strand
gaugcagugaaacgaauuu

SEQ ID NO: 275361 - RNA, 19 nt, Homo sapiens
  misc_RNA (1)...(19): siRNA sense strand
aagaaucuaccguugaaga

SEQ ID NO: 275362 - RNA, 19 nt, Homo sapiens
  misc_RNA (1)...(19): siRNA sense strand
gagccuccugguuugauaa

SEQ ID NO: 275363 - RNA, 19 nt, Homo sapiens
  misc_RNA (1)...(19): siRNA sense strand
ccagcagacaugaagcuaa

SEQ ID NO: 275364 - RNA, 19 nt, Homo sapiens
  misc_RNA (1)...(19): siRNA sense strand
caguggaccuggccucucu

SEQ ID NO: 275365 - RNA, 19 nt, Homo sapiens
  misc_RNA (1)...(19): siRNA sense strand
gauuacagcagaaacuuuu

SEQ ID NO: 275366 - RNA, 19 nt, Homo sapiens
  misc_RNA (1)...(19): siRNA sense strand
gcaggguauuuguugaaac

SEQ ID NO: 275367 - RNA, 19 nt, Homo sapiens
  misc_RNA (1)...(19): siRNA sense strand
agagauugaacaagaagaa

SEQ ID NO: 275368 - RNA, 19 nt, Homo sapiens
  misc_RNA (1)...(19): siRNA sense strand
ggaaacuuacuggaugaug

SEQ ID NO: 275369 - RNA, 19 nt, Homo sapiens
  misc_RNA (1)...(19): siRNA sense strand
agaaucuaccguugaagaa

SEQ ID NO: 275370 - RNA, 19 nt, Homo sapiens
  misc_RNA (1)...(19): siRNA sense strand
aagaagaucccaugcaaaa

SEQ ID NO: 275371 - RNA, 19 nt, Homo sapiens
  misc_RNA (1)...(19): siRNA sense strand
cagaaacuuuuauggagaa

SEQ ID NO: 275372 - RNA, 19 nt, Homo sapiens
  misc_RNA (1)...(19): siRNA sense strand
gaaucuaccguugaagaag

SEQ ID NO: 275373 - RNA, 19 nt, Homo sapiens
  misc_RNA (1)...(19): siRNA sense strand
gccgaaugcugcagaucuc

SEQ ID NO: 275374 - RNA, 19 nt, Homo sapiens
  misc_RNA (1)...(19): siRNA sense strand
gacaugaagcuaauuugcu

SEQ ID NO: 275375 - RNA, 19 nt, Homo sapiens
  misc_RNA (1)...(19): siRNA sense strand
ggaugcugcacaacaaaca

SEQ ID NO: 275376 - RNA, 19 nt, Homo sapiens
  misc_RNA (1)...(19): siRNA sense strand
gaugcuaacaagcccacaa

SEQ ID NO: 275377 - RNA, 19 nt, Homo sapiens
  misc_RNA (1)...(19): siRNA sense strand
caacucuaaaggacaugaa

SEQ ID NO: 275378 - RNA, 19 nt, Homo sapiens
  misc_RNA (1)...(19): siRNA sense strand
ccaaagcaaaucuccaacu

SEQ ID NO: 275379 - RNA, 19 nt, Homo sapiens
  misc_RNA (1)...(19): siRNA sense strand
ugcaggguauuuguugaaa

SEQ ID NO: 275380 - RNA, 19 nt, Homo sapiens
  misc_RNA (1)...(19): siRNA sense strand
agaucuggccuugugguua

SEQ ID NO: 275381 - RNA, 19 nt, Homo sapiens
  misc_RNA (1)...(19): siRNA sense strand
caacuugcagaaacuaugc

SEQ ID NO: 275382 - RNA, 19 nt, Homo sapiens
  misc_RNA (1)...(19): siRNA sense strand
guggaugaaacgugucuau

SEQ ID NO: 275383 - RNA, 19 nt, Homo sapiens
  misc_RNA (1)...(19): siRNA sense strand
gaugaaacgugucuauuug

SEQ ID NO: 275384 - RNA, 19 nt, Homo sapiens
  misc_RNA (1)...(19): siRNA sense strand
caaagaaucuaccguugaa

SEQ ID NO: 275385 - RNA, 19 nt, Homo sapiens
  misc_RNA (1)...(19): siRNA sense strand
gaucuggccuugugguuaa

SEQ ID NO: 275386 - RNA, 19 nt, Homo sapiens
  misc_RNA (1)...(19): siRNA sense strand
ggaccuggccucucugaua

SEQ ID NO: 275387 - RNA, 19 nt, Homo sapiens
  misc_RNA (1)...(19): siRNA sense strand
ggaugaaacgugucuauuu

SEQ ID NO: 275388 - RNA, 19 nt, Homo sapiens
  misc_RNA (1)...(19): siRNA sense strand
gaacaagaagaaacacuuu

SEQ ID NO: 275389 - RNA, 19 nt, Homo sapiens
  misc_RNA (1)...(19): siRNA sense strand
gcaaaugcccaaacaaguu

SEQ ID NO: 275390 - RNA, 19 nt, Homo sapiens
  misc_RNA (1)...(19): siRNA sense strand
gcaaaucuccaacucuaaa

SEQ ID NO: 275391 - RNA, 19 nt, Homo sapiens
  misc_RNA (1)...(19): siRNA sense strand
ugaagaagaucccaugcaa

SEQ ID NO: 275392 - RNA, 19 nt, Homo sapiens
  misc_RNA (1)...(19): siRNA sense strand
aagcaaaucuccaacucua

SEQ ID NO: 275393 - RNA, 19 nt, Homo sapiens
  misc_RNA (1)...(19): siRNA sense strand
ggacaugaauccagauaac

SEQ ID NO: 275394 - RNA, 19 nt, Homo sapiens
  misc_RNA (1)...(19): siRNA sense strand
gaauccagauaacuacuug

SEQ ID NO: 275395 - RNA, 19 nt, Homo sapiens
  misc_RNA (1)...(19): siRNA sense strand
gaagcuaauuugcuaccaa

SEQ ID NO: 275396 - RNA, 19 nt, Homo sapiens
  misc_RNA (1)...(19): siRNA sense strand
ggaggaggcugggaaacuu

SEQ ID NO: 275397 - RNA, 19 nt, Homo sapiens
  misc_RNA (1)...(19): siRNA sense strand
gaccuggccucucugauau

SEQ ID NO: 275398 - RNA, 19 nt, Homo sapiens
  misc_RNA (1)...(19): siRNA sense strand
gagacaauacagcaaauuu

SEQ ID NO: 275399 - RNA, 19 nt, Homo sapiens
  misc_RNA (1)...(19): siRNA sense strand
gcagacaugaagcuaauuu

SEQ ID NO: 275400 - RNA, 19 nt, Homo sapiens
  misc_RNA (1)...(19): siRNA sense strand
cagaaacuaugcaggagaa

SEQ ID NO: 275401 - RNA, 19 nt, Homo sapiens
  misc_RNA (1)...(19): siRNA sense strand
acaugaagcuaauuugcua

SEQ ID NO: 275402 - RNA, 19 nt, Homo sapiens
  misc_RNA (1)...(19): siRNA sense strand
gaaggagauuacagcagaa

SEQ ID NO: 275403 - RNA, 19 nt, Homo sapiens
  misc_RNA (1)...(19): siRNA sense strand
ugaaacgugucuauuugaa

SEQ ID NO: 275404 - RNA, 19 nt, Homo sapiens
  misc_RNA (1)...(19): siRNA sense strand
cuaacaagcccacaaagaa

SEQ ID NO: 275405 - RNA, 19 nt, Homo sapiens
  misc_RNA (1)...(19): siRNA sense strand
cagcagacaugaagcuaau

SEQ ID NO: 275406 - RNA, 19 nt, Homo sapiens
  misc_RNA (1)...(19): siRNA sense strand
aagaagaucuggccuugug

SEQ ID NO: 275407 - RNA, 19 nt, Homo sapiens
  misc_RNA (1)...(19): siRNA sense strand
aaagaguacaggaaacuua

SEQ ID NO: 275408 - RNA, 19 nt, Homo sapiens
  misc_RNA (1)...(19): siRNA sense strand
gaagaagaucccaugcaaa

SEQ ID NO: 275409 - RNA, 19 nt, Homo sapiens
  misc_RNA (1)...(19): siRNA sense strand
aaacgugucuauuugaauc

SEQ ID NO: 275410 - RNA, 19 nt, Homo sapiens
  misc_RNA (1)...(19): siRNA sense strand
caaagcaaaucuccaacuc

SEQ ID NO: 275411 - RNA, 19 nt, Homo sapiens
  misc_RNA (1)...(19): siRNA sense strand
cuaauuugcuaccaaugaa

SEQ ID NO: 275412 - RNA, 19 nt, Homo sapiens
  misc_RNA (1)...(19): siRNA sense strand
ugaagauccuccuugcaaa

SEQ ID NO: 275413 - RNA, 19 nt, Homo sapiens
  misc_RNA (1)...(19): siRNA sense strand
caucaaagucuucuggaaa

SEQ ID NO: 275414 - RNA, 19 nt, Homo sapiens
  misc_RNA (1)...(19): siRNA sense strand
aaacuaugcaggagaaauu

SEQ ID NO: 275415 - RNA, 19 nt, Homo sapiens
  misc_RNA (1)...(19): siRNA sense strand
gcuaauuugcuaccaauga

SEQ ID NO: 275416 - RNA, 19 nt, Homo sapiens
  misc_RNA (1)...(19): siRNA sense strand
gaagauccuccuugcaaau

SEQ ID NO: 275417 - RNA, 19 nt, Homo sapiens
  misc_RNA (1)...(19): siRNA sense strand
gcuaacaagcccacaaaga

SEQ ID NO: 275418 - RNA, 19 nt, Homo sapiens
  misc_RNA (1)...(19): siRNA sense strand
guuauaaggcuaagaagga

SEQ ID NO: 275419 - RNA, 19 nt, Homo sapiens
  misc_RNA (1)...(19): siRNA sense strand
gguggucucugccaguuau

SEQ ID NO: 275420 - RNA, 19 nt, Homo sapiens
  misc_RNA (1)...(19): siRNA sense strand
uaacaagcccacaaagaau

SEQ ID NO: 275421 - RNA, 19 nt, Homo sapiens
  misc_RNA (1)...(19): siRNA sense strand
caggaaacuuacuggauga

SEQ ID NO: 275422 - RNA, 19 nt, Homo sapiens
  misc_RNA (1)...(19): siRNA sense strand
gcagaucucccguguggau

SEQ ID NO: 275423 - RNA, 19 nt, Homo sapiens
  misc_RNA (1)...(19): siRNA sense strand
gaaacgugucuauuugaau

SEQ ID NO: 275424 - RNA, 19 nt, Homo sapiens
  misc_RNA (1)...(19): siRNA sense strand
ccaguuauaaggcuaagaa

SEQ ID NO: 275425 - RNA, 19 nt, Homo sapiens
  misc_RNA (1)...(19): siRNA sense strand
ccagagacaauacagcaaa

SEQ ID NO: 275426 - RNA, 19 nt, Homo sapiens
  misc_RNA (1)...(19): siRNA sense strand
uuaggaugcugcacaacaa

SEQ ID NO: 275427 - RNA, 19 nt, Homo sapiens
  misc_RNA (1)...(19): siRNA sense strand
gccuugcucugucaacuug

SEQ ID NO: 275428 - RNA, 19 nt, Homo sapiens
  misc_RNA (1)...(19): siRNA sense strand
caaaugcccaaacaaguuc

SEQ ID NO: 275429 - RNA, 19 nt, Homo sapiens
  misc_RNA (1)...(19): siRNA sense strand
aaacgaauuucugaagauc

SEQ ID NO: 275430 - RNA, 19 nt, Homo sapiens
  misc_RNA (1)...(19): siRNA sense strand
aaucuaccguugaagaaga

SEQ ID NO: 275431 - RNA, 19 nt, Homo sapiens
  misc_RNA (1)...(19): siRNA sense strand
acaaagaaucuaccguuga

SEQ ID NO: 275432 - RNA, 19 nt, Homo sapiens
  misc_RNA (1)...(19): siRNA sense strand
gcuaagaaggaaauuaagu

SEQ ID NO: 275433 - RNA, 19 nt, Homo sapiens
  misc_RNA (1)...(19): siRNA sense strand
uggagaaguuggacaaugg

SEQ ID NO: 275434 - RNA, 19 nt, Homo sapiens
  misc_RNA (1)...(19): siRNA sense strand
aggcuaagaaggaaauuaa

SEQ ID NO: 275435 - RNA, 19 nt, Homo sapiens
  misc_RNA (1)...(19): siRNA sense strand
gaugaugcagugaaacgaa

SEQ ID NO: 275436 - RNA, 19 nt, Homo sapiens
  misc_RNA (1)...(19): siRNA sense strand
ucaucaaagucuucuggaa

SEQ ID NO: 275437 - RNA, 19 nt, Homo sapiens
  misc_RNA (1)...(19): siRNA sense strand
caccuucuccuucaucaaa

SEQ ID NO: 275438 - RNA, 19 nt, Homo sapiens
  misc_RNA (1)...(19): siRNA sense strand
gcuagagcuuggccggauu

SEQ ID NO: 275439 - RNA, 19 nt, Homo sapiens
  misc_RNA (1)...(19): siRNA sense strand
gacaauacagcaaauuucu

SEQ ID NO: 275440 - RNA, 19 nt, Homo sapiens
  misc_RNA (1)...(19): siRNA sense strand
cagagacaauacagcaaau

SEQ ID NO: 275441 - RNA, 19 nt, Homo sapiens
  misc_RNA (1)...(19): siRNA sense strand
gaaacuaugcaggagaaau

SEQ ID NO: 275442 - RNA, 19 nt, Homo sapiens
  misc_RNA (1)...(19): siRNA sense strand
ucauuaggaugcugcacaa

SEQ ID NO: 275443 - RNA, 19 nt, Homo sapiens
  misc_RNA (1)...(19): siRNA sense strand
acaugaauccagauaacua

SEQ ID NO: 275444 - RNA, 19 nt, Homo sapiens
  misc_RNA (1)...(19): siRNA sense strand
gagauuacagcagaaacuu

SEQ ID NO: 275445 - RNA, 19 nt, Homo sapiens
  misc_RNA (1)...(19): siRNA sense strand
cuaagaaggaaauuaagug

SEQ ID NO: 275446 - RNA, 19 nt, Homo sapiens
  misc_RNA (1)...(19): siRNA sense strand
gaggaggcugggaaacuuu

SEQ ID NO: 275447 - RNA, 19 nt, Homo sapiens
  misc_RNA (1)...(19): siRNA sense strand
caagcaacccagagaagug

SEQ ID NO: 275448 - RNA, 19 nt, Homo sapiens
  misc_RNA (1)...(19): siRNA sense strand
ccacaagcaacccagagaa

SEQ ID NO: 275449 - RNA, 19 nt, Homo sapiens
  misc_RNA (1)...(19): siRNA sense strand
uuauaaggcuaagaaggaa

SEQ ID NO: 275450 - RNA, 19 nt, Homo sapiens
  misc_RNA (1)...(19): siRNA sense strand
gagauugaacaagaagaaa

SEQ ID NO: 275451 - RNA, 19 nt, Homo sapiens
  misc_RNA (1)...(19): siRNA sense strand
aagcuaauuugcuaccaau

SEQ ID NO: 275452 - RNA, 19 nt, Homo sapiens
  misc_RNA (1)...(19): siRNA sense strand
ggagauuacagcagaaacu

SEQ ID NO: 275453 - RNA, 19 nt, Homo sapiens
  misc_RNA (1)...(19): siRNA sense strand
ugaacaagaagaaacacuu

SEQ ID NO: 275454 - RNA, 19 nt, Homo sapiens
  misc_RNA (1)...(19): siRNA sense strand
gauugaacaagaagaaaca

SEQ ID NO: 275455 - RNA, 19 nt, Homo sapiens
  misc_RNA (1)...(19): siRNA sense strand
cugaagauccuccuugcaa

SEQ ID NO: 275456 - RNA, 19 nt, Homo sapiens
  misc_RNA (1)...(19): siRNA sense strand
caaaacauccccuauccaa

SEQ ID NO: 275457 - RNA, 19 nt, Homo sapiens
  misc_RNA (1)...(19): siRNA sense strand
agacaauacagcaaauuuc

SEQ ID NO: 275458 - RNA, 19 nt, Homo sapiens
  misc_RNA (1)...(19): siRNA sense strand
gcaucaguauagccaaugg

SEQ ID NO: 275459 - RNA, 19 nt, Homo sapiens
  misc_RNA (1)...(19): siRNA sense strand
gcccaaacaaguucugugu

SEQ ID NO: 275460 - RNA, 19 nt, Homo sapiens
  misc_RNA (1)...(19): siRNA sense strand
gaugcagugaaacgaauuu

SEQ ID NO: 275461 - RNA, 19 nt, Homo sapiens
  misc_RNA (1)...(19): siRNA sense strand
aagaaucuaccguugaaga

SEQ ID NO: 275462 - RNA, 19 nt, Homo sapiens
  misc_RNA (1)...(19): siRNA sense strand
gagccuccugguuugauaa

SEQ ID NO: 275463 - RNA, 19 nt, Homo sapiens
  misc_RNA (1)...(19): siRNA sense strand
ccagcagacaugaagcuaa

SEQ ID NO: 275464 - RNA, 19 nt, Homo sapiens
  misc_RNA (1)...(19): siRNA sense strand
caguggaccuggccucucu

SEQ ID NO: 275465 - RNA, 19 nt, Homo sapiens
  misc_RNA (1)...(19): siRNA sense strand
gauuacagcagaaacuuuu

SEQ ID NO: 275466 - RNA, 19 nt, Homo sapiens
  misc_RNA (1)...(19): siRNA sense strand
gcaggguauuuguugaaac

SEQ ID NO: 275467 - RNA, 19 nt, Homo sapiens
  misc_RNA (1)...(19): siRNA sense strand
agagauugaacaagaagaa

SEQ ID NO: 275468 - RNA, 19 nt, Homo sapiens
  misc_RNA (1)...(19): siRNA sense strand
ggaaacuuacuggaugaug

SEQ ID NO: 275469 - RNA, 19 nt, Homo sapiens
  misc_RNA (1)...(19): siRNA sense strand
agaaucuaccguugaagaa

SEQ ID NO: 275470 - RNA, 19 nt, Homo sapiens
  misc_RNA (1)...(19): siRNA sense strand
aagaagaucccaugcaaaa

SEQ ID NO: 275471 - RNA, 19 nt, Homo sapiens
  misc_RNA (1)...(19): siRNA sense strand
cagaaacuuuuauggagaa

SEQ ID NO: 275472 - RNA, 19 nt, Homo sapiens
  misc_RNA (1)...(19): siRNA sense strand
gaaucuaccguugaagaag

SEQ ID NO: 275473 - RNA, 19 nt, Homo sapiens
  misc_RNA (1)...(19): siRNA sense strand
gccgaaugcugcagaucuc

SEQ ID NO: 275474 - RNA, 19 nt, Homo sapiens
  misc_RNA (1)...(19): siRNA sense strand
gacaugaagcuaauuugcu

SEQ ID NO: 275475 - RNA, 19 nt, Homo sapiens
  misc_RNA (1)...(19): siRNA sense strand
ggaugcugcacaacaaaca

SEQ ID NO: 275476 - RNA, 19 nt, Homo sapiens
  misc_RNA (1)...(19): siRNA sense strand
gaugcuaacaagcccacaa

SEQ ID NO: 275477 - RNA, 19 nt, Homo sapiens
  misc_RNA (1)...(19): siRNA sense strand
caacucuaaaggacaugaa

SEQ ID NO: 275478 - RNA, 19 nt, Homo sapiens
  misc_RNA (1)...(19): siRNA sense strand
ccaaagcaaaucuccaacu

SEQ ID NO: 275479 - RNA, 19 nt, Homo sapiens
  misc_RNA (1)...(19): siRNA sense strand
ugcaggguauuuguugaaa

SEQ ID NO: 275480 - RNA, 19 nt, Homo sapiens
  misc_RNA (1)...(19): siRNA sense strand
agaucuggccuugugguua

SEQ ID NO: 275481 - RNA, 19 nt, Homo sapiens
  misc_RNA (1)...(19): siRNA sense strand
caacuugcagaaacuaugc

SEQ ID NO: 275482 - RNA, 19 nt, Homo sapiens
  misc_RNA (1)...(19): siRNA sense strand
guggaugaaacgugucuau

SEQ ID NO: 275483 - RNA, 19 nt, Homo sapiens
  misc_RNA (1)...(19): siRNA sense strand
gaagagccuugggaaacaa

SEQ ID NO: 275484 - RNA, 19 nt, Homo sapiens
  misc_RNA (1)...(19): siRNA sense strand
gagaagagccuugggaaac

SEQ ID NO: 275485 - RNA, 19 nt, Homo sapiens
  misc_RNA (1)...(19): siRNA sense strand
gcacccagauccgcaugga

SEQ ID NO: 275486 - RNA, 19 nt, Homo sapiens
  misc_RNA (1)...(19): siRNA sense strand
agaagagccuugggaaaca

SEQ ID NO: 275487 - RNA, 19 nt, Homo sapiens
  misc_RNA (1)...(19): siRNA sense strand
agagaagagccuugggaaa

SEQ ID NO: 275488 - RNA, 19 nt, Homo sapiens
  misc_RNA (1)...(19): siRNA sense strand
gggaaacaacuuuuaugaa

SEQ ID NO: 275489 - RNA, 19 nt, Homo sapiens
  misc_RNA (1)...(19): siRNA sense strand
cgaugacccuccccgcaua

SEQ ID NO: 275490 - RNA, 19 nt, Homo sapiens
  misc_RNA (1)...(19): siRNA sense strand
acaaagaugucuccaauua

SEQ ID NO: 275491 - RNA, 19 nt, Homo sapiens
  misc_RNA (1)...(19): siRNA sense strand
ggaaacagcuccuaacauc

SEQ ID NO: 275492 - RNA, 19 nt, Homo sapiens
  misc_RNA (1)...(19): siRNA sense strand
gcaaagauguuauaagaca

SEQ ID NO: 275493 - RNA, 19 nt, Homo sapiens
  misc_RNA (1)...(19): siRNA sense strand
cagcaaagauguuauaaga

SEQ ID NO: 275494 - RNA, 19 nt, Homo sapiens
  misc_RNA (1)...(19): siRNA sense strand
caacuuaggcauugaaaua

SEQ ID NO: 275495 - RNA, 19 nt, Homo sapiens
  misc_RNA (1)...(19): siRNA sense strand
gaaagacgguacaagguau

SEQ ID NO: 275496 - RNA, 19 nt, Homo sapiens
  misc_RNA (1)...(19): siRNA sense strand
ccacaaagaugucuccaau

SEQ ID NO: 275497 - RNA, 19 nt, Homo sapiens
  misc_RNA (1)...(19): siRNA sense strand
gcaacucuguguuuauauu

SEQ ID NO: 275498 - RNA, 19 nt, Homo sapiens
  misc_RNA (1)...(19): siRNA sense strand
gcauguacuuggagacaaa

SEQ ID NO: 275499 - RNA, 19 nt, Homo sapiens
  misc_RNA (1)...(19): siRNA sense strand
gcccaacuauggauauauu

SEQ ID NO: 275500 - RNA, 19 nt, Homo sapiens
  misc_RNA (1)...(19): siRNA sense strand
gauauaaggccaauuacug

SEQ ID NO: 275501 - RNA, 19 nt, Homo sapiens
  misc_RNA (1)...(19): siRNA sense strand
gaauccaacuuaggcauug

SEQ ID NO: 275502 - RNA, 19 nt, Homo sapiens
  misc_RNA (1)...(19): siRNA sense strand
cagcagcgauggcucuuug

SEQ ID NO: 275503 - RNA, 19 nt, Homo sapiens
  misc_RNA (1)...(19): siRNA sense strand
agauacaaauccucaguaa

SEQ ID NO: 275504 - RNA, 19 nt, Homo sapiens
  misc_RNA (1)...(19): siRNA sense strand
gcauugaugugaagacagu

SEQ ID NO: 275505 - RNA, 19 nt, Homo sapiens
  misc_RNA (1)...(19): siRNA sense strand
gguacaagguauacuggaa

SEQ ID NO: 275506 - RNA, 19 nt, Homo sapiens
  misc_RNA (1)...(19): siRNA sense strand
caaagaugucuccaauuaa

SEQ ID NO: 275507 - RNA, 19 nt, Homo sapiens
  misc_RNA (1)...(19): siRNA sense strand
cugcaacucuguguuuaua

SEQ ID NO: 275508 - RNA, 19 nt, Homo sapiens
  misc_RNA (1)...(19): siRNA sense strand
gauuaucgcuccuaaaaga

SEQ ID NO: 275509 - RNA, 19 nt, Homo sapiens
  misc_RNA (1)...(19): siRNA sense strand
ugaaagacgguacaaggua

SEQ ID NO: 275510 - RNA, 19 nt, Homo sapiens
  misc_RNA (1)...(19): siRNA sense strand
ggaauccgaucucugaaac

SEQ ID NO: 275511 - RNA, 19 nt, Homo sapiens
  misc_RNA (1)...(19): siRNA sense strand
acccaaauguugcuucuuu

SEQ ID NO: 275512 - RNA, 19 nt, Homo sapiens
  misc_RNA (1)...(19): siRNA sense strand
gcagagcauugaugugaag

SEQ ID NO: 275513 - RNA, 19 nt, Homo sapiens
  misc_RNA (1)...(19): siRNA sense strand
ccaaauguugcuucuuuaa

SEQ ID NO: 275514 - RNA, 19 nt, Homo sapiens
  misc_RNA (1)...(19): siRNA sense strand
ucaaacaaccugaauccaa

SEQ ID NO: 275515 - RNA, 19 nt, Homo sapiens
  misc_RNA (1)...(19): siRNA sense strand
cccaaauguugcuucuuua

SEQ ID NO: 275516 - RNA, 19 nt, Homo sapiens
  misc_RNA (1)...(19): siRNA sense strand
uggagagugugaauuugua

SEQ ID NO: 275517 - RNA, 19 nt, Homo sapiens
  misc_RNA (1)...(19): siRNA sense strand
caaccugaauccaacuuag

SEQ ID NO: 275518 - RNA, 19 nt, Homo sapiens
  misc_RNA (1)...(19): siRNA sense strand
gagcauugaugugaagaca

SEQ ID NO: 275519 - RNA, 19 nt, Homo sapiens
  misc_RNA (1)...(19): siRNA sense strand
caguggaucuaaaugagaa

SEQ ID NO: 275520 - RNA, 19 nt, Homo sapiens
  misc_RNA (1)...(19): siRNA sense strand
uaaugcaaguggauggaaa

SEQ ID NO: 275521 - RNA, 19 nt, Homo sapiens
  misc_RNA (1)...(19): siRNA sense strand
ugagaauggucaugaucuu

SEQ ID NO: 275522 - RNA, 19 nt, Homo sapiens
  misc_RNA (1)...(19): siRNA sense strand
caaauccucaguaaacuuc

SEQ ID NO: 275523 - RNA, 19 nt, Homo sapiens
  misc_RNA (1)...(19): siRNA sense strand
gaaacagcuccuaacauca

SEQ ID NO: 275524 - RNA, 19 nt, Homo sapiens
  misc_RNA (1)...(19): siRNA sense strand
gauacaaauccucaguaaa

SEQ ID NO: 275525 - RNA, 19 nt, Homo sapiens
  misc_RNA (1)...(19): siRNA sense strand
uuuggaagaugacgauuau

SEQ ID NO: 275526 - RNA, 19 nt, Homo sapiens
  misc_RNA (1)...(19): siRNA sense strand
caguaaacuucgucuggaa

SEQ ID NO: 275527 - RNA, 19 nt, Homo sapiens
  misc_RNA (1)...(19): siRNA sense strand
auacaaauccucaguaaac

SEQ ID NO: 275528 - RNA, 19 nt, Homo sapiens
  misc_RNA (1)...(19): siRNA sense strand
caucaaaccuaugaaagac

SEQ ID NO: 275529 - RNA, 19 nt, Homo sapiens
  misc_RNA (1)...(19): siRNA sense strand
caacggaaacaaucauuac

SEQ ID NO: 275530 - RNA, 19 nt, Homo sapiens
  misc_RNA (1)...(19): siRNA sense strand
uguaaugcauguacuugga

SEQ ID NO: 275531 - RNA, 19 nt, Homo sapiens
  misc_RNA (1)...(19): siRNA sense strand
acaacggaaacaaucauua

SEQ ID NO: 275532 - RNA, 19 nt, Homo sapiens
  misc_RNA (1)...(19): siRNA sense strand
cgucgagacuccuacaaca

SEQ ID NO: 275533 - RNA, 19 nt, Homo sapiens
  misc_RNA (1)...(19): siRNA sense strand
ggcagagcauugaugugaa

SEQ ID NO: 275534 - RNA, 19 nt, Homo sapiens
  misc_RNA (1)...(19): siRNA sense strand
gugaagacaguguugcaaa

SEQ ID NO: 275535 - RNA, 19 nt, Homo sapiens
  misc_RNA (1)...(19): siRNA sense strand
guacaagguauacuggaau

SEQ ID NO: 275536 - RNA, 19 nt, Homo sapiens
  misc_RNA (1)...(19): siRNA sense strand
ggucaugaucuugcuguaa

SEQ ID NO: 275537 - RNA, 19 nt, Homo sapiens
  misc_RNA (1)...(19): siRNA sense strand
gagaauggucaugaucuug

SEQ ID NO: 275538 - RNA, 19 nt, Homo sapiens
  misc_RNA (1)...(19): siRNA sense strand
uccgaucucugaaacuuga

SEQ ID NO: 275539 - RNA, 19 nt, Homo sapiens
  misc_RNA (1)...(19): siRNA sense strand
ggaucuaaaugagaacagu

SEQ ID NO: 275540 - RNA, 19 nt, Homo sapiens
  misc_RNA (1)...(19): siRNA sense strand
uggcagagcauugauguga

SEQ ID NO: 275541 - RNA, 19 nt, Homo sapiens
  misc_RNA (1)...(19): siRNA sense strand
aauccgaucucugaaacuu

SEQ ID NO: 275542 - RNA, 19 nt, Homo sapiens
  misc_RNA (1)...(19): siRNA sense strand
ucauuaccaugccuacaga

SEQ ID NO: 275543 - RNA, 19 nt, Homo sapiens
  misc_RNA (1)...(19): siRNA sense strand
cggaaacaaucauuaccau

SEQ ID NO: 275544 - RNA, 19 nt, Homo sapiens
  misc_RNA (1)...(19): siRNA sense strand
ccaacuauggauauauuug

SEQ ID NO: 275545 - RNA, 19 nt, Homo sapiens
  misc_RNA (1)...(19): siRNA sense strand
gcuguacucccacaaagau

SEQ ID NO: 275546 - RNA, 19 nt, Homo sapiens
  misc_RNA (1)...(19): siRNA sense strand
uggaagaugacgauuauca

SEQ ID NO: 275547 - RNA, 19 nt, Homo sapiens
  misc_RNA (1)...(19): siRNA sense strand
ggaugggauuggauuaucg

SEQ ID NO: 275548 - RNA, 19 nt, Homo sapiens
  misc_RNA (1)...(19): siRNA sense strand
gaagggauuuuggucuuga

SEQ ID NO: 275549 - RNA, 19 nt, Homo sapiens
  misc_RNA (1)...(19): siRNA sense strand
gucaugaucuugcuguaac

SEQ ID NO: 275550 - RNA, 19 nt, Homo sapiens
  misc_RNA (1)...(19): siRNA sense strand
ugaagacaguguugcaaaa

SEQ ID NO: 275551 - RNA, 19 nt, Homo sapiens
  misc_RNA (1)...(19): siRNA sense strand
ggagagugugaauuuguau

SEQ ID NO: 275552 - RNA, 19 nt, Homo sapiens
  misc_RNA (1)...(19): siRNA sense strand
gagagugugaauuuguauu

SEQ ID NO: 275553 - RNA, 19 nt, Homo sapiens
  misc_RNA (1)...(19): siRNA sense strand
aaacagcuccuaacaucag

SEQ ID NO: 275554 - RNA, 19 nt, Homo sapiens
  misc_RNA (1)...(19): siRNA sense strand
gagaagaugggcugaaucc

SEQ ID NO: 275555 - RNA, 19 nt, Homo sapiens
  misc_RNA (1)...(19): siRNA sense strand
guauuuggcagagcauuga

SEQ ID NO: 275556 - RNA, 19 nt, Homo sapiens
  misc_RNA (1)...(19): siRNA sense strand
aaagacgguacaagguaua

SEQ ID NO: 275557 - RNA, 19 nt, Homo sapiens
  misc_RNA (1)...(19): siRNA sense strand
gacaaaacacuaaaucuuc

SEQ ID NO: 275558 - RNA, 19 nt, Homo sapiens
  misc_RNA (1)...(19): siRNA sense strand
uaagauacaaauccucagu

SEQ ID NO: 275559 - RNA, 19 nt, Homo sapiens
  misc_RNA (1)...(19): siRNA sense strand
gaaaauuccagcgauggua

SEQ ID NO: 275560 - RNA, 19 nt, Homo sapiens
  misc_RNA (1)...(19): siRNA sense strand
agacaguguugcaaaauug

SEQ ID NO: 275561 - RNA, 19 nt, Homo sapiens
  misc_RNA (1)...(19): siRNA sense strand
gguauuuggcagagcauug

SEQ ID NO: 275562 - RNA, 19 nt, Homo sapiens
  misc_RNA (1)...(19): siRNA sense strand
aaacccaaauguugcuucu

SEQ ID NO: 275563 - RNA, 19 nt, Homo sapiens
  misc_RNA (1)...(19): siRNA sense strand
acuggaauccgaucucuga

SEQ ID NO: 275564 - RNA, 19 nt, Homo sapiens
  misc_RNA (1)...(19): siRNA sense strand
uaccaugccuacagagucu

SEQ ID NO: 275565 - RNA, 19 nt, Homo sapiens
  misc_RNA (1)...(19): siRNA sense strand
aggagaagaugggcugaau

SEQ ID NO: 275566 - RNA, 19 nt, Homo sapiens
  misc_RNA (1)...(19): siRNA sense strand
gaauggucaugaucuugcu

SEQ ID NO: 275567 - RNA, 19 nt, Homo sapiens
  misc_RNA (1)...(19): siRNA sense strand
ugaauccaacuuaggcauu

SEQ ID NO: 275568 - RNA, 19 nt, Homo sapiens
  misc_RNA (1)...(19): siRNA sense strand
gcuccuaacaucagcaaag

SEQ ID NO: 275569 - RNA, 19 nt, Homo sapiens
  misc_RNA (1)...(19): siRNA sense strand
cucugaaacuugacaugaa

SEQ ID NO: 275570 - RNA, 19 nt, Homo sapiens
  misc_RNA (1)...(19): siRNA sense strand
uacaagguauacuggaauc

SEQ ID NO: 275571 - RNA, 19 nt, Homo sapiens
  misc_RNA (1)...(19): siRNA sense strand
ugacgauuaucacgcuaca

SEQ ID NO: 275572 - RNA, 19 nt, Homo sapiens
  misc_RNA (1)...(19): siRNA sense strand
ggagaagaugggcugaauc

SEQ ID NO: 275573 - RNA, 19 nt, Homo sapiens
  misc_RNA (1)...(19): siRNA sense strand
uaaacuucgucuggaaaca

SEQ ID NO: 275574 - RNA, 19 nt, Homo sapiens
  misc_RNA (1)...(19): siRNA sense strand
aacugcaacucuguguuua

SEQ ID NO: 275575 - RNA, 19 nt, Homo sapiens
  misc_RNA (1)...(19): siRNA sense strand
aagauacaaauccucagua

SEQ ID NO: 275576 - RNA, 19 nt, Homo sapiens
  misc_RNA (1)...(19): siRNA sense strand
gcagcgauggcucuuugga

SEQ ID NO: 275577 - RNA, 19 nt, Homo sapiens
  misc_RNA (1)...(19): siRNA sense strand
gcucaaacaaccugaaucc

SEQ ID NO: 275578 - RNA, 19 nt, Homo sapiens
  misc_RNA (1)...(19): siRNA sense strand
ccaguggaucuaaaugaga

SEQ ID NO: 275579 - RNA, 19 nt, Homo sapiens
  misc_RNA (1)...(19): siRNA sense strand
gcuacaacggaaacaauca

SEQ ID NO: 275580 - RNA, 19 nt, Homo sapiens
  misc_RNA (1)...(19): siRNA sense strand
ccauuaagauacaaauccu

SEQ ID NO: 275581 - RNA, 19 nt, Homo sapiens
  misc_RNA (1)...(19): siRNA sense strand
cuccuaacaucagcaaaga

SEQ ID NO: 275582 - RNA, 19 nt, Homo sapiens
  misc_RNA (1)...(19): siRNA sense strand
cagcgauggcucuuuggaa

SEQ ID NO: 275583 - RNA, 19 nt, Homo sapiens
  misc_RNA (1)...(19): siRNA sense strand
cagaagggauuuuggucuu

SEQ ID NO: 275584 - RNA, 19 nt, Homo sapiens
  misc_RNA (1)...(19): siRNA sense strand
acaaccugaauccaacuua

SEQ ID NO: 275585 - RNA, 19 nt, Homo sapiens
  misc_RNA (1)...(19): siRNA sense strand
ucucugaaacuugacauga

SEQ ID NO: 275586 - RNA, 19 nt, Homo sapiens
  misc_RNA (1)...(19): siRNA sense strand
gguaacagacacaccaaaa

SEQ ID NO: 275587 - RNA, 19 nt, Homo sapiens
  misc_RNA (1)...(19): siRNA sense strand
uuccagcgaugguaguaga

SEQ ID NO: 275588 - RNA, 19 nt, Homo sapiens
  misc_RNA (1)...(19): siRNA sense strand
gcaggcccuugcuguacuc

SEQ ID NO: 275589 - RNA, 19 nt, Homo sapiens
  misc_RNA (1)...(19): siRNA sense strand
uggaugggauuggauuauc

SEQ ID NO: 275590 - RNA, 19 nt, Homo sapiens
  misc_RNA (1)...(19): siRNA sense strand
gguauucccuucacuauaa

SEQ ID NO: 275591 - RNA, 19 nt, Homo sapiens
  misc_RNA (1)...(19): siRNA sense strand
acaaauggauucagauuga

SEQ ID NO: 275592 - RNA, 19 nt, Homo sapiens
  misc_RNA (1)...(19): siRNA sense strand
guacaacccucgauacugu

SEQ ID NO: 275593 - RNA, 19 nt, Homo sapiens
  misc_RNA (1)...(19): siRNA sense strand
gcacagaaugguuuguuua

SEQ ID NO: 275594 - RNA, 19 nt, Homo sapiens
  misc_RNA (1)...(19): siRNA sense strand
gaaagaaacacaaauggau

SEQ ID NO: 275595 - RNA, 19 nt, Homo sapiens
  misc_RNA (1)...(19): siRNA sense strand
caagagaaguauucacaug

SEQ ID NO: 275596 - RNA, 19 nt, Homo sapiens
  misc_RNA (1)...(19): siRNA sense strand
cggcagagcuccauacuca

SEQ ID NO: 275597 - RNA, 19 nt, Homo sapiens
  misc_RNA (1)...(19): siRNA sense strand
aaacacaaauggauucaga

SEQ ID NO: 275598 - RNA, 19 nt, Homo sapiens
  misc_RNA (1)...(19): siRNA sense strand
agacagagcuggccuccuu

SEQ ID NO: 275599 - RNA, 19 nt, Homo sapiens
  misc_RNA (1)...(19): siRNA sense strand
ugaagaagcucuauaagac

SEQ ID NO: 275600 - RNA, 19 nt, Homo sapiens
  misc_RNA (1)...(19): siRNA sense strand
cuccaugacuuuagacuua

SEQ ID NO: 275601 - RNA, 19 nt, Homo sapiens
  misc_RNA (1)...(19): siRNA sense strand
uaaaggagccaaagucuuc

SEQ ID NO: 275602 - RNA, 19 nt, Homo sapiens
  misc_RNA (1)...(19): siRNA sense strand
ccucacugaucuuauauuu

SEQ ID NO: 275603 - RNA, 19 nt, Homo sapiens
  misc_RNA (1)...(19): siRNA sense strand
ggaaagaaacacaaaugga

SEQ ID NO: 275604 - RNA, 19 nt, Homo sapiens
  misc_RNA (1)...(19): siRNA sense strand
guacagaacaucaucuaug

SEQ ID NO: 275605 - RNA, 19 nt, Homo sapiens
  misc_RNA (1)...(19): siRNA sense strand
gcaaucuaaugauaaagga

SEQ ID NO: 275606 - RNA, 19 nt, Homo sapiens
  misc_RNA (1)...(19): siRNA sense strand
gacuuuagacuuagcuuua

SEQ ID NO: 275607 - RNA, 19 nt, Homo sapiens
  misc_RNA (1)...(19): siRNA sense strand
gcagagcuccauacucauu

SEQ ID NO: 275608 - RNA, 19 nt, Homo sapiens
  misc_RNA (1)...(19): siRNA sense strand
gaagucaccucuacaacac

SEQ ID NO: 275609 - RNA, 19 nt, Homo sapiens
  misc_RNA (1)...(19): siRNA sense strand
aaaugugugugcaaucuaa

SEQ ID NO: 275610 - RNA, 19 nt, Homo sapiens
  misc_RNA (1)...(19): siRNA sense strand
gaagauaugauagcuacaa

SEQ ID NO: 275611 - RNA, 19 nt, Homo sapiens
  misc_RNA (1)...(19): siRNA sense strand
gaaguauucacaugucuau

SEQ ID NO: 275612 - RNA, 19 nt, Homo sapiens
  misc_RNA (1)...(19): siRNA sense strand
gacauaugcuaccaaggaa

SEQ ID NO: 275613 - RNA, 19 nt, Homo sapiens
  misc_RNA (1)...(19): siRNA sense strand
gggcccagcuuccuucaau

SEQ ID NO: 275614 - RNA, 19 nt, Homo sapiens
  misc_RNA (1)...(19): siRNA sense strand
gagccaaagucuucuagca

SEQ ID NO: 275615 - RNA, 19 nt, Homo sapiens
  misc_RNA (1)...(19): siRNA sense strand
gaagugggacaacuggauu

SEQ ID NO: 275616 - RNA, 19 nt, Homo sapiens
  misc_RNA (1)...(19): siRNA sense strand
ccauacucauuuaccuuua

SEQ ID NO: 275617 - RNA, 19 nt, Homo sapiens
  misc_RNA (1)...(19): siRNA sense strand
agaagaggcugcugaggau

SEQ ID NO: 275618 - RNA, 19 nt, Homo sapiens
  misc_RNA (1)...(19): siRNA sense strand
acacaagugcucaggcuua

SEQ ID NO: 275619 - RNA, 19 nt, Homo sapiens
  misc_RNA (1)...(19): siRNA sense strand
gaagaagcucuauaagaca

SEQ ID NO: 275620 - RNA, 19 nt, Homo sapiens
  misc_RNA (1)...(19): siRNA sense strand
caaagugcaccugucguua

SEQ ID NO: 275621 - RNA, 19 nt, Homo sapiens
  misc_RNA (1)...(19): siRNA sense strand
gauaugauagcuacaaagu

SEQ ID NO: 275622 - RNA, 19 nt, Homo sapiens
  misc_RNA (1)...(19): siRNA sense strand
ucaauugccuauaaagagu

SEQ ID NO: 275623 - RNA, 19 nt, Homo sapiens
  misc_RNA (1)...(19): siRNA sense strand
ugugugcaaucuaaugaua

SEQ ID NO: 275624 - RNA, 19 nt, Homo sapiens
  misc_RNA (1)...(19): siRNA sense strand
gaagcucuauaagacauau

SEQ ID NO: 275625 - RNA, 19 nt, Homo sapiens
  misc_RNA (1)...(19): siRNA sense strand
gcagaggucaggaaacugu

SEQ ID NO: 275626 - RNA, 19 nt, Homo sapiens
  misc_RNA (1)...(19): siRNA sense strand
agacauaugcuaccaagga

SEQ ID NO: 275627 - RNA, 19 nt, Homo sapiens
  misc_RNA (1)...(19): siRNA sense strand
uaaagaguacgaagauaug

SEQ ID NO: 275628 - RNA, 19 nt, Homo sapiens
  misc_RNA (1)...(19): siRNA sense strand
gccaagaccgucaugugua

SEQ ID NO: 275629 - RNA, 19 nt, Homo sapiens
  misc_RNA (1)...(19): siRNA sense strand
cccaacaaauuccuccuuu

SEQ ID NO: 275630 - RNA, 19 nt, Homo sapiens
  misc_RNA (1)...(19): siRNA sense strand
acaugaagaagcucuauaa

SEQ ID NO: 275631 - RNA, 19 nt, Homo sapiens
  misc_RNA (1)...(19): siRNA sense strand
aaagugcaccugucguuaa

SEQ ID NO: 275632 - RNA, 19 nt, Homo sapiens
  misc_RNA (1)...(19): siRNA sense strand
ccagcuuccuucaaucuga

SEQ ID NO: 275633 - RNA, 19 nt, Homo sapiens
  misc_RNA (1)...(19): siRNA sense strand
gagcuuugcacuacaugaa

SEQ ID NO: 275634 - RNA, 19 nt, Homo sapiens
  misc_RNA (1)...(19): siRNA sense strand
cauguguaccugccaaaua

SEQ ID NO: 275635 - RNA, 19 nt, Homo sapiens
  misc_RNA (1)...(19): siRNA sense strand
caagugcucaggcuuauca

SEQ ID NO: 275636 - RNA, 19 nt, Homo sapiens
  misc_RNA (1)...(19): siRNA sense strand
gagcauccuucagcacaga

SEQ ID NO: 275637 - RNA, 19 nt, Homo sapiens
  misc_RNA (1)...(19): siRNA sense strand
cagccuccuucaaccuuua

SEQ ID NO: 275638 - RNA, 19 nt, Homo sapiens
  misc_RNA (1)...(19): siRNA sense strand
agagcuccauacucauuua

SEQ ID NO: 275639 - RNA, 19 nt, Homo sapiens
  misc_RNA (1)...(19): siRNA sense strand
ucaaaugugugugcaaucu

SEQ ID NO: 275640 - RNA, 19 nt, Homo sapiens
  misc_RNA (1)...(19): siRNA sense strand
gcucaauugccuauaaaga

SEQ ID NO: 275641 - RNA, 19 nt, Homo sapiens
  misc_RNA (1)...(19): siRNA sense strand
ccaagaccgucauguguac

SEQ ID NO: 275642 - RNA, 19 nt, Homo sapiens
  misc_RNA (1)...(19): siRNA sense strand
gauaaaggagccaaagucu

SEQ ID NO: 275643 - RNA, 19 nt, Homo sapiens
  misc_RNA (1)...(19): siRNA sense strand
guacgaagauaugauagcu

SEQ ID NO: 275644 - RNA, 19 nt, Homo sapiens
  misc_RNA (1)...(19): siRNA sense strand
agaguacgaagauaugaua

SEQ ID NO: 275645 - RNA, 19 nt, Homo sapiens
  misc_RNA (1)...(19): siRNA sense strand
cgguauggcucuccaguuc

SEQ ID NO: 275646 - RNA, 19 nt, Homo sapiens
  misc_RNA (1)...(19): siRNA sense strand
caaucugagugaauacuuc

SEQ ID NO: 275647 - RNA, 19 nt, Homo sapiens
  misc_RNA (1)...(19): siRNA sense strand
gagaaguauucacaugucu

SEQ ID NO: 275648 - RNA, 19 nt, Homo sapiens
  misc_RNA (1)...(19): siRNA sense strand
uuaguggccuccaacaaga

SEQ ID NO: 275649 - RNA, 19 nt, Homo sapiens
  misc_RNA (1)...(19): siRNA sense strand
cagucuugcuguacaauau

SEQ ID NO: 275650 - RNA, 19 nt, Homo sapiens
  misc_RNA (1)...(19): siRNA sense strand
cacagaaugguuuguuuaa

SEQ ID NO: 275651 - RNA, 19 nt, Homo sapiens
  misc_RNA (1)...(19): siRNA sense strand
gcuuugcacuacaugaaga

SEQ ID NO: 275652 - RNA, 19 nt, Homo sapiens
  misc_RNA (1)...(19): siRNA sense strand
agugugagcuccaugacuu

SEQ ID NO: 275653 - RNA, 19 nt, Homo sapiens
  misc_RNA (1)...(19): siRNA sense strand
gagaccagguaacaggaau

SEQ ID NO: 275654 - RNA, 19 nt, Homo sapiens
  misc_RNA (1)...(19): siRNA sense strand
gggagaagcucagauugcu

SEQ ID NO: 275655 - RNA, 19 nt, Homo sapiens
  misc_RNA (1)...(19): siRNA sense strand
uaaccuggaucgcauuacu

SEQ ID NO: 275656 - RNA, 19 nt, Homo sapiens
  misc_RNA (1)...(19): siRNA sense strand
caaauggauucagauugau

SEQ ID NO: 275657 - RNA, 19 nt, Homo sapiens
  misc_RNA (1)...(19): siRNA sense strand
acacaaauggauucagauu

SEQ ID NO: 275658 - RNA, 19 nt, Homo sapiens
  misc_RNA (1)...(19): siRNA sense strand
guauucccuucacuauaaa

SEQ ID NO: 275659 - RNA, 19 nt, Homo sapiens
  misc_RNA (1)...(19): siRNA sense strand
gaauacuucagacaauuuc

SEQ ID NO: 275660 - RNA, 19 nt, Homo sapiens
  misc_RNA (1)...(19): siRNA sense strand
ccagagcuuugcacuacau

SEQ ID NO: 275661 - RNA, 19 nt, Homo sapiens
  misc_RNA (1)...(19): siRNA sense strand
ccucugcugucaaaugugu

SEQ ID NO: 275662 - RNA, 19 nt, Homo sapiens
  misc_RNA (1)...(19): siRNA sense strand
agagaaguauucacauguc

SEQ ID NO: 275663 - RNA, 19 nt, Homo sapiens
  misc_RNA (1)...(19): siRNA sense strand
aagaagcucuauaagacau

SEQ ID NO: 275664 - RNA, 19 nt, Homo sapiens
  misc_RNA (1)...(19): siRNA sense strand
uggcucaauugccuauaaa

SEQ ID NO: 275665 - RNA, 19 nt, Homo sapiens
  misc_RNA (1)...(19): siRNA sense strand
ugagcuccaugacuuuaga

SEQ ID NO: 275666 - RNA, 19 nt, Homo sapiens
  misc_RNA (1)...(19): siRNA sense strand
cagccagacuccagagcuu

SEQ ID NO: 275667 - RNA, 19 nt, Homo sapiens
  misc_RNA (1)...(19): siRNA sense strand
cacaagugcucaggcuuau

SEQ ID NO: 275668 - RNA, 19 nt, Homo sapiens
  misc_RNA (1)...(19): siRNA sense strand
caaaugugugugcaaucua

SEQ ID NO: 275669 - RNA, 19 nt, Homo sapiens
  misc_RNA (1)...(19): siRNA sense strand
gaauuuggaaagaaacaca

SEQ ID NO: 275670 - RNA, 19 nt, Homo sapiens
  misc_RNA (1)...(19): siRNA sense strand
gcaguuggacaucgguaug

SEQ ID NO: 275671 - RNA, 19 nt, Homo sapiens
  misc_RNA (1)...(19): siRNA sense strand
ggagaccagguaacaggaa

SEQ ID NO: 275672 - RNA, 19 nt, Homo sapiens
  misc_RNA (1)...(19): siRNA sense strand
cuauaaagaguacgaagau

SEQ ID NO: 275673 - RNA, 19 nt, Homo sapiens
  misc_RNA (1)...(19): siRNA sense strand
ccgcagaggucaggaaacu

SEQ ID NO: 275674 - RNA, 19 nt, Homo sapiens
  misc_RNA (1)...(19): siRNA sense strand
ugucaaaugugugugcaau

SEQ ID NO: 275675 - RNA, 19 nt, Homo sapiens
  misc_RNA (1)...(19): siRNA sense strand
acaaagugcaccugucguu

SEQ ID NO: 275676 - RNA, 19 nt, Homo sapiens
  misc_RNA (1)...(19): siRNA sense strand
gcugguauucccuucacua

SEQ ID NO: 275677 - RNA, 19 nt, Homo sapiens
  misc_RNA (1)...(19): siRNA sense strand
ccagccuccuucaaccuuu

SEQ ID NO: 275678 - RNA, 19 nt, Homo sapiens
  misc_RNA (1)...(19): siRNA sense strand
agaagucaccucuacaaca

SEQ ID NO: 275679 - RNA, 19 nt, Homo sapiens
  misc_RNA (1)...(19): siRNA sense strand
caguuugaauuuggaaaga

SEQ ID NO: 275680 - RNA, 19 nt, Homo sapiens
  misc_RNA (1)...(19): siRNA sense strand
augaagaagcucuauaaga

SEQ ID NO: 275681 - RNA, 19 nt, Homo sapiens
  misc_RNA (1)...(19): siRNA sense strand
caauugccuauaaagagua

SEQ ID NO: 275682 - RNA, 19 nt, Homo sapiens
  misc_RNA (1)...(19): siRNA sense strand
acucacaguuugaauuugg

SEQ ID NO: 275683 - RNA, 19 nt, Homo sapiens
  misc_RNA (1)...(19): siRNA sense strand
cuccagagcuuugcacuac

SEQ ID NO: 275684 - RNA, 19 nt, Homo sapiens
  misc_RNA (1)...(19): siRNA sense strand
acagguacaacccucgaua

SEQ ID NO: 275685 - RNA, 19 nt, Homo sapiens
  misc_RNA (1)...(19): siRNA sense strand
gcuuaucacagcugguauu

SEQ ID NO: 275686 - RNA, 19 nt, Homo sapiens
  misc_RNA (1)...(19): siRNA sense strand
cuucagcacagaaugguuu

SEQ ID NO: 275687 - RNA, 19 nt, Homo sapiens
  misc_RNA (1)...(19): siRNA sense strand
uauaagacauaugcuacca

SEQ ID NO: 275688 - RNA, 19 nt, Homo sapiens
  misc_RNA (1)...(19): siRNA sense strand
ccuauaaagaguacgaaga

SEQ ID NO: 275689 - RNA, 19 nt, Homo sapiens
  misc_RNA (1)...(19): siRNA sense strand
cuauuagccuugguucuca

SEQ ID NO: 275690 - RNA, 19 nt, Homo sapiens
  misc_RNA (1)...(19): siRNA sense strand
gaagauacauaugaacgaa

SEQ ID NO: 275691 - RNA, 19 nt, Homo sapiens
  misc_RNA (1)...(19): siRNA sense strand
gggagaagauacauaugaa

SEQ ID NO: 275692 - RNA, 19 nt, Homo sapiens
  misc_RNA (1)...(19): siRNA sense strand
gaggacauucccauaauuu

SEQ ID NO: 275693 - RNA, 19 nt, Homo sapiens
  misc_RNA (1)...(19): siRNA sense strand
ggaaagugcaacgauuaua

SEQ ID NO: 275694 - RNA, 19 nt, Homo sapiens
  misc_RNA (1)...(19): siRNA sense strand
acgcauaccugauugucua

SEQ ID NO: 275695 - RNA, 19 nt, Homo sapiens
  misc_RNA (1)...(19): siRNA sense strand
cagaggacauucccauaau

SEQ ID NO: 275696 - RNA, 19 nt, Homo sapiens
  misc_RNA (1)...(19): siRNA sense strand
gaaagugcaacgauuauac

SEQ ID NO: 275697 - RNA, 19 nt, Homo sapiens
  misc_RNA (1)...(19): siRNA sense strand
acaagaauauggccuucaa

SEQ ID NO: 275698 - RNA, 19 nt, Homo sapiens
  misc_RNA (1)...(19): siRNA sense strand
ugaccucucuguacucuag

SEQ ID NO: 275699 - RNA, 19 nt, Homo sapiens
  misc_RNA (1)...(19): siRNA sense strand
cgauuauacuccuggauau

SEQ ID NO: 275700 - RNA, 19 nt, Homo sapiens
  misc_RNA (1)...(19): siRNA sense strand
agaggacauucccauaauu

SEQ ID NO: 275701 - RNA, 19 nt, Homo sapiens
  misc_RNA (1)...(19): siRNA sense strand
acagaggacauucccauaa

SEQ ID NO: 275702 - RNA, 19 nt, Homo sapiens
  misc_RNA (1)...(19): siRNA sense strand
gcugggagaagauacauau

SEQ ID NO: 275703 - RNA, 19 nt, Homo sapiens
  misc_RNA (1)...(19): siRNA sense strand
gacagaggacauucccaua

SEQ ID NO: 275704 - RNA, 19 nt, Homo sapiens
  misc_RNA (1)...(19): siRNA sense strand
agaaagagccccaccagua

SEQ ID NO: 275705 - RNA, 19 nt, Homo sapiens
  misc_RNA (1)...(19): siRNA sense strand
gcgaggugcugggagaaga

SEQ ID NO: 275706 - RNA, 19 nt, Homo sapiens
  misc_RNA (1)...(19): siRNA sense strand
gggaaagugcaacgauuau

SEQ ID NO: 275707 - RNA, 19 nt, Homo sapiens
  misc_RNA (1)...(19): siRNA sense strand
caucugagcugcgaaucca

SEQ ID NO: 275708 - RNA, 19 nt, Homo sapiens
  misc_RNA (1)...(19): siRNA sense strand
gccgagaagugucuguauc

SEQ ID NO: 275709 - RNA, 19 nt, Homo sapiens
  misc_RNA (1)...(19): siRNA sense strand
caacgugaaggagcuguuu

SEQ ID NO: 275710 - RNA, 19 nt, Homo sapiens
  misc_RNA (1)...(19): siRNA sense strand
gccaugaccucucuguacu

SEQ ID NO: 275711 - RNA, 19 nt, Homo sapiens
  misc_RNA (1)...(19): siRNA sense strand
ccugugcagugguguuuga

SEQ ID NO: 275712 - RNA, 19 nt, Homo sapiens
  misc_RNA (1)...(19): siRNA sense strand
ccuucaagcucaaguccaa

SEQ ID NO: 275713 - RNA, 19 nt, Homo sapiens
  misc_RNA (1)...(19): siRNA sense strand
ggacagcaaggagaagaau

SEQ ID NO: 275714 - RNA, 19 nt, Homo sapiens
  misc_RNA (1)...(19): siRNA sense strand
ugggagaagauacauauga

SEQ ID NO: 275715 - RNA, 19 nt, Homo sapiens
  misc_RNA (1)...(19): siRNA sense strand
acagcaaggagaagaauga

SEQ ID NO: 275716 - RNA, 19 nt, Homo sapiens
  misc_RNA (1)...(19): siRNA sense strand
acgauuauacuccuggaua

SEQ ID NO: 275717 - RNA, 19 nt, Homo sapiens
  misc_RNA (1)...(19): siRNA sense strand
ggacauucccauaauuuug

SEQ ID NO: 275718 - RNA, 19 nt, Homo sapiens
  misc_RNA (1)...(19): siRNA sense strand
ggggaaagugcaacgauua

SEQ ID NO: 275719 - RNA, 19 nt, Homo sapiens
  misc_RNA (1)...(19): siRNA sense strand
ggagagcaugcccaggaaa

SEQ ID NO: 275720 - RNA, 19 nt, Homo sapiens
  misc_RNA (1)...(19): siRNA sense strand
guguuugacugcaaguuca

SEQ ID NO: 275721 - RNA, 19 nt, Homo sapiens
  misc_RNA (1)...(19): siRNA sense strand
ucacagaccgagcgagcuu

SEQ ID NO: 275722 - RNA, 19 nt, Homo sapiens
  misc_RNA (1)...(19): siRNA sense strand
ggagcuguuugagggcauu

SEQ ID NO: 275723 - RNA, 19 nt, Homo sapiens
  misc_RNA (1)...(19): siRNA sense strand
gaggugcugggagaagaua

SEQ ID NO: 275724 - RNA, 19 nt, Homo sapiens
  misc_RNA (1)...(19): siRNA sense strand
gagagcaugcccaggaaag

SEQ ID NO: 275725 - RNA, 19 nt, Homo sapiens
  misc_RNA (1)...(19): siRNA sense strand
ccgagaagugucuguauca

SEQ ID NO: 275726 - RNA, 19 nt, Homo sapiens
  misc_RNA (1)...(19): siRNA sense strand
gaaagagccccaccaguac

SEQ ID NO: 275727 - RNA, 19 nt, Homo sapiens
  misc_RNA (1)...(19): siRNA sense strand
gauuauacuccuggauaug

SEQ ID NO: 275728 - RNA, 19 nt, Homo sapiens
  misc_RNA (1)...(19): siRNA sense strand
agucagggaacaccuacua

SEQ ID NO: 275729 - RNA, 19 nt, Homo sapiens
  misc_RNA (1)...(19): siRNA sense strand
agucaucuccucugaguca

SEQ ID NO: 275730 - RNA, 19 nt, Homo sapiens
  misc_RNA (1)...(19): siRNA sense strand
ggagaagauacauaugaac

SEQ ID NO: 275731 - RNA, 19 nt, Homo sapiens
  misc_RNA (1)...(19): siRNA sense strand
gguguuugacugcaaguuc

SEQ ID NO: 275732 - RNA, 19 nt, Homo sapiens
  misc_RNA (1)...(19): siRNA sense strand
uuagugcggugccgagaag

SEQ ID NO: 275733 - RNA, 19 nt, Homo sapiens
  misc_RNA (1)...(19): siRNA sense strand
cuggauaugugggaaaaua

SEQ ID NO: 275734 - RNA, 19 nt, Homo sapiens
  misc_RNA (1)...(19): siRNA sense strand
ggacgcauaccugauuguc

SEQ ID NO: 275735 - RNA, 19 nt, Homo sapiens
  misc_RNA (1)...(19): siRNA sense strand
caugaccucucuguacucu

SEQ ID NO: 275736 - RNA, 19 nt, Homo sapiens
  misc_RNA (1)...(19): siRNA sense strand
aggagagcaugcccaggaa

SEQ ID NO: 275737 - RNA, 19 nt, Homo sapiens
  misc_RNA (1)...(19): siRNA sense strand
gaagauacauaugaacgaa

SEQ ID NO: 275738 - RNA, 19 nt, Homo sapiens
  misc_RNA (1)...(19): siRNA sense strand
gggagaagauacauaugaa

SEQ ID NO: 275739 - RNA, 19 nt, Homo sapiens
  misc_RNA (1)...(19): siRNA sense strand
gaggacauucccauaauuu

SEQ ID NO: 275740 - RNA, 19 nt, Homo sapiens
  misc_RNA (1)...(19): siRNA sense strand
ggaaagugcaacgauuaua

SEQ ID NO: 275741 - RNA, 19 nt, Homo sapiens
  misc_RNA (1)...(19): siRNA sense strand
acgcauaccugauugucua

SEQ ID NO: 275742 - RNA, 19 nt, Homo sapiens
  misc_RNA (1)...(19): siRNA sense strand
cagaggacauucccauaau

SEQ ID NO: 275743 - RNA, 19 nt, Homo sapiens
  misc_RNA (1)...(19): siRNA sense strand
gaaagugcaacgauuauac

SEQ ID NO: 275744 - RNA, 19 nt, Homo sapiens
  misc_RNA (1)...(19): siRNA sense strand
acaagaauauggccuucaa

SEQ ID NO: 275745 - RNA, 19 nt, Homo sapiens
  misc_RNA (1)...(19): siRNA sense strand
ugaccucucuguacucuag

SEQ ID NO: 275746 - RNA, 19 nt, Homo sapiens
  misc_RNA (1)...(19): siRNA sense strand
cgauuauacuccuggauau

SEQ ID NO: 275747 - RNA, 19 nt, Homo sapiens
  misc_RNA (1)...(19): siRNA sense strand
agaggacauucccauaauu

SEQ ID NO: 275748 - RNA, 19 nt, Homo sapiens
  misc_RNA (1)...(19): siRNA sense strand
acagaggacauucccauaa

SEQ ID NO: 275749 - RNA, 19 nt, Homo sapiens
  misc_RNA (1)...(19): siRNA sense strand
gcugggagaagauacauau

SEQ ID NO: 275750 - RNA, 19 nt, Homo sapiens
  misc_RNA (1)...(19): siRNA sense strand
gacagaggacauucccaua

SEQ ID NO: 275751 - RNA, 19 nt, Homo sapiens
  misc_RNA (1)...(19): siRNA sense strand
agaaagagccccaccagua

SEQ ID NO: 275752 - RNA, 19 nt, Homo sapiens
  misc_RNA (1)...(19): siRNA sense strand
gcgaggugcugggagaaga

SEQ ID NO: 275753 - RNA, 19 nt, Homo sapiens
  misc_RNA (1)...(19): siRNA sense strand
gggaaagugcaacgauuau

SEQ ID NO: 275754 - RNA, 19 nt, Homo sapiens
  misc_RNA (1)...(19): siRNA sense strand
caucugagcugcgaaucca

SEQ ID NO: 275755 - RNA, 19 nt, Homo sapiens
  misc_RNA (1)...(19): siRNA sense strand
gccgagaagugucuguauc

SEQ ID NO: 275756 - RNA, 19 nt, Homo sapiens
  misc_RNA (1)...(19): siRNA sense strand
caacgugaaggagcuguuu

SEQ ID NO: 275757 - RNA, 19 nt, Homo sapiens
  misc_RNA (1)...(19): siRNA sense strand
gccaugaccucucuguacu

SEQ ID NO: 275758 - RNA, 19 nt, Homo sapiens
  misc_RNA (1)...(19): siRNA sense strand
ccugugcagugguguuuga

SEQ ID NO: 275759 - RNA, 19 nt, Homo sapiens
  misc_RNA (1)...(19): siRNA sense strand
ccuucaagcucaaguccaa

SEQ ID NO: 275760 - RNA, 19 nt, Homo sapiens
  misc_RNA (1)...(19): siRNA sense strand
ggacagcaaggagaagaau

SEQ ID NO: 275761 - RNA, 19 nt, Homo sapiens
  misc_RNA (1)...(19): siRNA sense strand
ugggagaagauacauauga

SEQ ID NO: 275762 - RNA, 19 nt, Homo sapiens
  misc_RNA (1)...(19): siRNA sense strand
acagcaaggagaagaauga

SEQ ID NO: 275763 - RNA, 19 nt, Homo sapiens
  misc_RNA (1)...(19): siRNA sense strand
acgauuauacuccuggaua

SEQ ID NO: 275764 - RNA, 19 nt, Homo sapiens
  misc_RNA (1)...(19): siRNA sense strand
ggacauucccauaauuuug

SEQ ID NO: 275765 - RNA, 19 nt, Homo sapiens
  misc_RNA (1)...(19): siRNA sense strand
ggggaaagugcaacgauua

SEQ ID NO: 275766 - RNA, 19 nt, Homo sapiens
  misc_RNA (1)...(19): siRNA sense strand
ggagagcaugcccaggaaa

SEQ ID NO: 275767 - RNA, 19 nt, Homo sapiens
  misc_RNA (1)...(19): siRNA sense strand
guguuugacugcaaguuca

SEQ ID NO: 275768 - RNA, 19 nt, Homo sapiens
  misc_RNA (1)...(19): siRNA sense strand
ucacagaccgagcgagcuu

SEQ ID NO: 275769 - RNA, 19 nt, Homo sapiens
  misc_RNA (1)...(19): siRNA sense strand
ggagcuguuugagggcauu

SEQ ID NO: 275770 - RNA, 19 nt, Homo sapiens
  misc_RNA (1)...(19): siRNA sense strand
gaggugcugggagaagaua

SEQ ID NO: 275771 - RNA, 19 nt, Homo sapiens
  misc_RNA (1)...(19): siRNA sense strand
gagagcaugcccaggaaag

SEQ ID NO: 275772 - RNA, 19 nt, Homo sapiens
  misc_RNA (1)...(19): siRNA sense strand
ccgagaagugucuguauca

SEQ ID NO: 275773 - RNA, 19 nt, Homo sapiens
  misc_RNA (1)...(19): siRNA sense strand
gaaagagccccaccaguac

SEQ ID NO: 275774 - RNA, 19 nt, Homo sapiens
  misc_RNA (1)...(19): siRNA sense strand
gauuauacuccuggauaug

SEQ ID NO: 275775 - RNA, 19 nt, Homo sapiens
  misc_RNA (1)...(19): siRNA sense strand
agucagggaacaccuacua

SEQ ID NO: 275776 - RNA, 19 nt, Homo sapiens
  misc_RNA (1)...(19): siRNA sense strand
agucaucuccucugaguca

SEQ ID NO: 275777 - RNA, 19 nt, Homo sapiens
  misc_RNA (1)...(19): siRNA sense strand
ggagaagauacauaugaac

SEQ ID NO: 275778 - RNA, 19 nt, Homo sapiens
  misc_RNA (1)...(19): siRNA sense strand
gguguuugacugcaaguuc

SEQ ID NO: 275779 - RNA, 19 nt, Homo sapiens
  misc_RNA (1)...(19): siRNA sense strand
uuagugcggugccgagaag

SEQ ID NO: 275780 - RNA, 19 nt, Homo sapiens
  misc_RNA (1)...(19): siRNA sense strand
cuggauaugugggaaaaua

SEQ ID NO: 275781 - RNA, 19 nt, Homo sapiens
  misc_RNA (1)...(19): siRNA sense strand
ggacgcauaccugauuguc

SEQ ID NO: 275782 - RNA, 19 nt, Homo sapiens
  misc_RNA (1)...(19): siRNA sense strand
caugaccucucuguacucu

SEQ ID NO: 275783 - RNA, 19 nt, Homo sapiens
  misc_RNA (1)...(19): siRNA sense strand
aggagagcaugcccaggaa

SEQ ID NO: 275784 - RNA, 19 nt, Homo sapiens
  misc_RNA (1)...(19): siRNA sense strand
ggagugugcugaagaccua

SEQ ID NO: 275785 - RNA, 19 nt, Homo sapiens
  misc_RNA (1)...(19): siRNA sense strand
agacauggcccaguucaua

SEQ ID NO: 275786 - RNA, 19 nt, Homo sapiens
  misc_RNA (1)...(19): siRNA sense strand
gaagcgggacaccaaguuu

SEQ ID NO: 275787 - RNA, 19 nt, Homo sapiens
  misc_RNA (1)...(19): siRNA sense strand
uggcccaguucauacauuu

SEQ ID NO: 275788 - RNA, 19 nt, Homo sapiens
  misc_RNA (1)...(19): siRNA sense strand
ggauggcuccugugacuag

SEQ ID NO: 275789 - RNA, 19 nt, Homo sapiens
  misc_RNA (1)...(19): siRNA sense strand
gugcugaagaccuaagaaa

SEQ ID NO: 275790 - RNA, 19 nt, Homo sapiens
  misc_RNA (1)...(19): siRNA sense strand
aagcgggacaccaaguuua

SEQ ID NO: 275791 - RNA, 19 nt, Homo sapiens
  misc_RNA (1)...(19): siRNA sense strand
agcaagacauggcccaguu

SEQ ID NO: 275792 - RNA, 19 nt, Homo sapiens
  misc_RNA (1)...(19): siRNA sense strand
gcccaguucauacauuuau

SEQ ID NO: 275793 - RNA, 19 nt, Homo sapiens
  misc_RNA (1)...(19): siRNA sense strand
cagaacagcagcaagacau

SEQ ID NO: 275794 - RNA, 19 nt, Homo sapiens
  misc_RNA (1)...(19): siRNA sense strand
gcaagacauggcccaguuc

SEQ ID NO: 275795 - RNA, 19 nt, Homo sapiens
  misc_RNA (1)...(19): siRNA sense strand
caagacauggcccaguuca

SEQ ID NO: 275796 - RNA, 19 nt, Homo sapiens
  misc_RNA (1)...(19): siRNA sense strand
gugaggagugugcugaaga

SEQ ID NO: 275797 - RNA, 19 nt, Homo sapiens
  misc_RNA (1)...(19): siRNA sense strand
ggcccaguucauacauuua

SEQ ID NO: 275798 - RNA, 19 nt, Homo sapiens
  misc_RNA (1)...(19): siRNA sense strand
ugaggagugugcugaagac

SEQ ID NO: 275799 - RNA, 19 nt, Homo sapiens
  misc_RNA (1)...(19): siRNA sense strand
gacauggcccaguucauac

SEQ ID NO: 275800 - RNA, 19 nt, Homo sapiens
  misc_RNA (1)...(19): siRNA sense strand
cccaguucauacauuuauu

SEQ ID NO: 275801 - RNA, 19 nt, Homo sapiens
  misc_RNA (1)...(19): siRNA sense strand
gaaauucccacucauguuu

SEQ ID NO: 275802 - RNA, 19 nt, Homo sapiens
  misc_RNA (1)...(19): siRNA sense strand
gaagagugcuugaaauuuu

SEQ ID NO: 275803 - RNA, 19 nt, Homo sapiens
  misc_RNA (1)...(19): siRNA sense strand
gggagaagcccaacuguuu

SEQ ID NO: 275804 - RNA, 19 nt, Homo sapiens
  misc_RNA (1)...(19): siRNA sense strand
gaucucgccuugcggauuu

SEQ ID NO: 275805 - RNA, 19 nt, Homo sapiens
  misc_RNA (1)...(19): siRNA sense strand
cacagaagcugaaauccaa

SEQ ID NO: 275806 - RNA, 19 nt, Homo sapiens
  misc_RNA (1)...(19): siRNA sense strand
ggcaauggcuccgauguga

SEQ ID NO: 275807 - RNA, 19 nt, Homo sapiens
  misc_RNA (1)...(19): siRNA sense strand
agaagucgcucuacaacug

SEQ ID NO: 275808 - RNA, 19 nt, Homo sapiens
  misc_RNA (1)...(19): siRNA sense strand
gcagccagccuucccagua

SEQ ID NO: 275809 - RNA, 19 nt, Homo sapiens
  misc_RNA (1)...(19): siRNA sense strand
aacagcagauugucagaua

SEQ ID NO: 275810 - RNA, 19 nt, Homo sapiens
  misc_RNA (1)...(19): siRNA sense strand
ccaccagcguguccaauga

SEQ ID NO: 275811 - RNA, 19 nt, Homo sapiens
  misc_RNA (1)...(19): siRNA sense strand
agaacugccugcgcauuua

SEQ ID NO: 275812 - RNA, 19 nt, Homo sapiens
  misc_RNA (1)...(19): siRNA sense strand
uagaagagugcuugaaauu

SEQ ID NO: 275813 - RNA, 19 nt, Homo sapiens
  misc_RNA (1)...(19): siRNA sense strand
ccacugcccuccggguuaa

SEQ ID NO: 275814 - RNA, 19 nt, Homo sapiens
  misc_RNA (1)...(19): siRNA sense strand
cagcagauugucagauaua

SEQ ID NO: 275815 - RNA, 19 nt, Homo sapiens
  misc_RNA (1)...(19): siRNA sense strand
ggagaagcccaacuguuug

SEQ ID NO: 275816 - RNA, 19 nt, Homo sapiens
  misc_RNA (1)...(19): siRNA sense strand
gagaagcccaacuguuuga

SEQ ID NO: 275817 - RNA, 19 nt, Homo sapiens
  misc_RNA (1)...(19): siRNA sense strand
gcacagaagcugaaaucca

SEQ ID NO: 275818 - RNA, 19 nt, Homo sapiens
  misc_RNA (1)...(19): siRNA sense strand
cuagaagagugcuugaaau

SEQ ID NO: 275819 - RNA, 19 nt, Homo sapiens
  misc_RNA (1)...(19): siRNA sense strand
guaugaagaaggagaagaa

SEQ ID NO: 275820 - RNA, 19 nt, Homo sapiens
  misc_RNA (1)...(19): siRNA sense strand
ccuccaagcuguggucuga

SEQ ID NO: 275821 - RNA, 19 nt, Homo sapiens
  misc_RNA (1)...(19): siRNA sense strand
aagcugaaauccaaugugu

SEQ ID NO: 275822 - RNA, 19 nt, Homo sapiens
  misc_RNA (1)...(19): siRNA sense strand
gccaccgugugcaaauuua

SEQ ID NO: 275823 - RNA, 19 nt, Homo sapiens
  misc_RNA (1)...(19): siRNA sense strand
cagcagggucugagaauga

SEQ ID NO: 275824 - RNA, 19 nt, Homo sapiens
  misc_RNA (1)...(19): siRNA sense strand
gcccaacuguuugaauuug

SEQ ID NO: 275825 - RNA, 19 nt, Homo sapiens
  misc_RNA (1)...(19): siRNA sense strand
aagcccaacuguuugaauu

SEQ ID NO: 275826 - RNA, 19 nt, Homo sapiens
  misc_RNA (1)...(19): siRNA sense strand
gcaaggagaccaacuucag

SEQ ID NO: 275827 - RNA, 19 nt, Homo sapiens
  misc_RNA (1)...(19): siRNA sense strand
cagauugucagauauauuc

SEQ ID NO: 275828 - RNA, 19 nt, Homo sapiens
  misc_RNA (1)...(19): siRNA sense strand
gcagauugucagauauauu

SEQ ID NO: 275829 - RNA, 19 nt, Homo sapiens
  misc_RNA (1)...(19): siRNA sense strand
gaagaacugccugcgcauu

SEQ ID NO: 275830 - RNA, 19 nt, Homo sapiens
  misc_RNA (1)...(19): siRNA sense strand
caaauuuacaggcacagaa

SEQ ID NO: 275831 - RNA, 19 nt, Homo sapiens
  misc_RNA (1)...(19): siRNA sense strand
gcaagacgaauuacaucug

SEQ ID NO: 275832 - RNA, 19 nt, Homo sapiens
  misc_RNA (1)...(19): siRNA sense strand
uguccacccuauuaucuuu

SEQ ID NO: 275833 - RNA, 19 nt, Homo sapiens
  misc_RNA (1)...(19): siRNA sense strand
ccaguuaacagcagauugu

SEQ ID NO: 275834 - RNA, 19 nt, Homo sapiens
  misc_RNA (1)...(19): siRNA sense strand
aaaugcaauucaagccuuu

SEQ ID NO: 275835 - RNA, 19 nt, Homo sapiens
  misc_RNA (1)...(19): siRNA sense strand
ccuagaagagugcuugaaa

SEQ ID NO: 275836 - RNA, 19 nt, Homo sapiens
  misc_RNA (1)...(19): siRNA sense strand
agaagagugcuugaaauuu

SEQ ID NO: 275837 - RNA, 19 nt, Homo sapiens
  misc_RNA (1)...(19): siRNA sense strand
ccgccuggauugcgugaaa

SEQ ID NO: 275838 - RNA, 19 nt, Homo sapiens
  misc_RNA (1)...(19): siRNA sense strand
uggaggcccugaagcagaa

SEQ ID NO: 275839 - RNA, 19 nt, Homo sapiens
  misc_RNA (1)...(19): siRNA sense strand
ccacauaaccacaaaauca

SEQ ID NO: 275840 - RNA, 19 nt, Homo sapiens
  misc_RNA (1)...(19): siRNA sense strand
cgacgacauuugcaagaag

SEQ ID NO: 275841 - RNA, 19 nt, Homo sapiens
  misc_RNA (1)...(19): siRNA sense strand
ugaagaaggagaagaacug

SEQ ID NO: 275842 - RNA, 19 nt, Homo sapiens
  misc_RNA (1)...(19): siRNA sense strand
gaacaacugccuggaugca

SEQ ID NO: 275843 - RNA, 19 nt, Homo sapiens
  misc_RNA (1)...(19): siRNA sense strand
aagcagaagucgcucuaca

SEQ ID NO: 275844 - RNA, 19 nt, Homo sapiens
  misc_RNA (1)...(19): siRNA sense strand
gcagaagucgcucuacaac

SEQ ID NO: 275845 - RNA, 19 nt, Homo sapiens
  misc_RNA (1)...(19): siRNA sense strand
ccagccacauaaccacaaa

SEQ ID NO: 275846 - RNA, 19 nt, Homo sapiens
  misc_RNA (1)...(19): siRNA sense strand
gacgacauuugcaagaagu

SEQ ID NO: 275847 - RNA, 19 nt, Homo sapiens
  misc_RNA (1)...(19): siRNA sense strand
gcagcugucuaaaggaaaa

SEQ ID NO: 275848 - RNA, 19 nt, Homo sapiens
  misc_RNA (1)...(19): siRNA sense strand
aagaacugccugcgcauuu

SEQ ID NO: 275849 - RNA, 19 nt, Homo sapiens
  misc_RNA (1)...(19): siRNA sense strand
acacaccucuguauuucca

SEQ ID NO: 275850 - RNA, 19 nt, Homo sapiens
  misc_RNA (1)...(19): siRNA sense strand
caacagugggaacgaccua

SEQ ID NO: 275851 - RNA, 19 nt, Homo sapiens
  misc_RNA (1)...(19): siRNA sense strand
gguggucccauucauauca

SEQ ID NO: 275852 - RNA, 19 nt, Homo sapiens
  misc_RNA (1)...(19): siRNA sense strand
ugaaauucccacucauguu

SEQ ID NO: 275853 - RNA, 19 nt, Homo sapiens
  misc_RNA (1)...(19): siRNA sense strand
uccaaugugucgggcaaua

SEQ ID NO: 275854 - RNA, 19 nt, Homo sapiens
  misc_RNA (1)...(19): siRNA sense strand
acaaggcccuccggcaguu

SEQ ID NO: 275855 - RNA, 19 nt, Homo sapiens
  misc_RNA (1)...(19): siRNA sense strand
gaagcccaacuguuugaau

SEQ ID NO: 275856 - RNA, 19 nt, Homo sapiens
  misc_RNA (1)...(19): siRNA sense strand
caacugccagccagaguca

SEQ ID NO: 275857 - RNA, 19 nt, Homo sapiens
  misc_RNA (1)...(19): siRNA sense strand
gaacugccugcgcauuuac

SEQ ID NO: 275858 - RNA, 19 nt, Homo sapiens
  misc_RNA (1)...(19): siRNA sense strand
gaagcugaaauccaaugug

SEQ ID NO: 275859 - RNA, 19 nt, Homo sapiens
  misc_RNA (1)...(19): siRNA sense strand
ccaacuguuugaauuugca

SEQ ID NO: 275860 - RNA, 19 nt, Homo sapiens
  misc_RNA (1)...(19): siRNA sense strand
gcaaauuuacaggcacaga

SEQ ID NO: 275861 - RNA, 19 nt, Homo sapiens
  misc_RNA (1)...(19): siRNA sense strand
cagccagccuucccaguac

SEQ ID NO: 275862 - RNA, 19 nt, Homo sapiens
  misc_RNA (1)...(19): siRNA sense strand
cauaugaaccaguuaacag

SEQ ID NO: 275863 - RNA, 19 nt, Homo sapiens
  misc_RNA (1)...(19): siRNA sense strand
ccagcagggucugagaaug

SEQ ID NO: 275864 - RNA, 19 nt, Homo sapiens
  misc_RNA (1)...(19): siRNA sense strand
gggcaaggagaccaacuuc

SEQ ID NO: 275865 - RNA, 19 nt, Homo sapiens
  misc_RNA (1)...(19): siRNA sense strand
ccaaguaccgcacgcuaag

SEQ ID NO: 275866 - RNA, 19 nt, Homo sapiens
  misc_RNA (1)...(19): siRNA sense strand
ugaagcagaagucgcucua

SEQ ID NO: 275867 - RNA, 19 nt, Homo sapiens
  misc_RNA (1)...(19): siRNA sense strand
ucgacgacauuugcaagaa

SEQ ID NO: 275868 - RNA, 19 nt, Homo sapiens
  misc_RNA (1)...(19): siRNA sense strand
gcuacggaaugcucuucug

SEQ ID NO: 275869 - RNA, 19 nt, Homo sapiens
  misc_RNA (1)...(19): siRNA sense strand
gcucuguccacccuauuau

SEQ ID NO: 275870 - RNA, 19 nt, Homo sapiens
  misc_RNA (1)...(19): siRNA sense strand
gcauuuacuggagcaugua

SEQ ID NO: 275871 - RNA, 19 nt, Homo sapiens
  misc_RNA (1)...(19): siRNA sense strand
gggcaauacacaccucugu

SEQ ID NO: 275872 - RNA, 19 nt, Homo sapiens
  misc_RNA (1)...(19): siRNA sense strand
acagcagauugucagauau

SEQ ID NO: 275873 - RNA, 19 nt, Homo sapiens
  misc_RNA (1)...(19): siRNA sense strand
ccugugugcuccuaugaag

SEQ ID NO: 275874 - RNA, 19 nt, Homo sapiens
  misc_RNA (1)...(19): siRNA sense strand
gcuggaggauuccccauau

SEQ ID NO: 275875 - RNA, 19 nt, Homo sapiens
  misc_RNA (1)...(19): siRNA sense strand
aagcacagcuacggaaugc

SEQ ID NO: 275876 - RNA, 19 nt, Homo sapiens
  misc_RNA (1)...(19): siRNA sense strand
caagcacagcuacggaaug

SEQ ID NO: 275877 - RNA, 19 nt, Homo sapiens
  misc_RNA (1)...(19): siRNA sense strand
caaccucgacgacauuugc

SEQ ID NO: 275878 - RNA, 19 nt, Homo sapiens
  misc_RNA (1)...(19): siRNA sense strand
cgcauuuacuggagcaugu

SEQ ID NO: 275879 - RNA, 19 nt, Homo sapiens
  misc_RNA (1)...(19): siRNA sense strand
gggcuuauuggcacaguca

SEQ ID NO: 275880 - RNA, 19 nt, Homo sapiens
  misc_RNA (1)...(19): siRNA sense strand
uccacccuauuaucuuuaa

SEQ ID NO: 275881 - RNA, 19 nt, Homo sapiens
  misc_RNA (1)...(19): siRNA sense strand
ccggguggucccauucaua

SEQ ID NO: 275882 - RNA, 19 nt, Homo sapiens
  misc_RNA (1)...(19): siRNA sense strand
auucaagccuuuggcaaug

SEQ ID NO: 275883 - RNA, 19 nt, Homo sapiens
  misc_RNA (1)...(19): siRNA sense strand
cggguggucccauucauau

SEQ ID NO: 275884 - RNA, 19 nt, Homo sapiens
  misc_RNA (1)...(19): siRNA sense strand
accagagccugcagggaaa

SEQ ID NO: 275885 - RNA, 19 nt, Homo sapiens
  misc_RNA (1)...(19): siRNA sense strand
caaugugucgggcaauaca

SEQ ID NO: 275886 - RNA, 19 nt, Homo sapiens
  misc_RNA (1)...(19): siRNA sense strand
ccauggaggcccugaagca

SEQ ID NO: 275887 - RNA, 19 nt, Homo sapiens
  misc_RNA (1)...(19): siRNA sense strand
acuccugcaagacgaauua

SEQ ID NO: 275888 - RNA, 19 nt, Homo sapiens
  misc_RNA (1)...(19): siRNA sense strand
gaaauucccacucauguuu

SEQ ID NO: 275889 - RNA, 19 nt, Homo sapiens
  misc_RNA (1)...(19): siRNA sense strand
gaagagugcuugaaauuuu

SEQ ID NO: 275890 - RNA, 19 nt, Homo sapiens
  misc_RNA (1)...(19): siRNA sense strand
gggagaagcccaacuguuu

SEQ ID NO: 275891 - RNA, 19 nt, Homo sapiens
  misc_RNA (1)...(19): siRNA sense strand
gaucucgccuugcggauuu

SEQ ID NO: 275892 - RNA, 19 nt, Homo sapiens
  misc_RNA (1)...(19): siRNA sense strand
cacagaagcugaaauccaa

SEQ ID NO: 275893 - RNA, 19 nt, Homo sapiens
  misc_RNA (1)...(19): siRNA sense strand
ggcaauggcuccgauguga

SEQ ID NO: 275894 - RNA, 19 nt, Homo sapiens
  misc_RNA (1)...(19): siRNA sense strand
agaagucgcucuacaacug

SEQ ID NO: 275895 - RNA, 19 nt, Homo sapiens
  misc_RNA (1)...(19): siRNA sense strand
gcagccagccuucccagua

SEQ ID NO: 275896 - RNA, 19 nt, Homo sapiens
  misc_RNA (1)...(19): siRNA sense strand
aacagcagauugucagaua

SEQ ID NO: 275897 - RNA, 19 nt, Homo sapiens
  misc_RNA (1)...(19): siRNA sense strand
ccaccagcguguccaauga

SEQ ID NO: 275898 - RNA, 19 nt, Homo sapiens
  misc_RNA (1)...(19): siRNA sense strand
agaacugccugcgcauuua

SEQ ID NO: 275899 - RNA, 19 nt, Homo sapiens
  misc_RNA (1)...(19): siRNA sense strand
uagaagagugcuugaaauu

SEQ ID NO: 275900 - RNA, 19 nt, Homo sapiens
  misc_RNA (1)...(19): siRNA sense strand
ccacugcccuccggguuaa

SEQ ID NO: 275901 - RNA, 19 nt, Homo sapiens
  misc_RNA (1)...(19): siRNA sense strand
cagcagauugucagauaua

SEQ ID NO: 275902 - RNA, 19 nt, Homo sapiens
  misc_RNA (1)...(19): siRNA sense strand
ggagaagcccaacuguuug

SEQ ID NO: 275903 - RNA, 19 nt, Homo sapiens
  misc_RNA (1)...(19): siRNA sense strand
gagaagcccaacuguuuga

SEQ ID NO: 275904 - RNA, 19 nt, Homo sapiens
  misc_RNA (1)...(19): siRNA sense strand
gcacagaagcugaaaucca

SEQ ID NO: 275905 - RNA, 19 nt, Homo sapiens
  misc_RNA (1)...(19): siRNA sense strand
cuagaagagugcuugaaau

SEQ ID NO: 275906 - RNA, 19 nt, Homo sapiens
  misc_RNA (1)...(19): siRNA sense strand
guaugaagaaggagaagaa

SEQ ID NO: 275907 - RNA, 19 nt, Homo sapiens
  misc_RNA (1)...(19): siRNA sense strand
ccuccaagcuguggucuga

SEQ ID NO: 275908 - RNA, 19 nt, Homo sapiens
  misc_RNA (1)...(19): siRNA sense strand
aagcugaaauccaaugugu

SEQ ID NO: 275909 - RNA, 19 nt, Homo sapiens
  misc_RNA (1)...(19): siRNA sense strand
gccaccgugugcaaauuua

SEQ ID NO: 275910 - RNA, 19 nt, Homo sapiens
  misc_RNA (1)...(19): siRNA sense strand
cagcagggucugagaauga

SEQ ID NO: 275911 - RNA, 19 nt, Homo sapiens
  misc_RNA (1)...(19): siRNA sense strand
gcccaacuguuugaauuug

SEQ ID NO: 275912 - RNA, 19 nt, Homo sapiens
  misc_RNA (1)...(19): siRNA sense strand
aagcccaacuguuugaauu

SEQ ID NO: 275913 - RNA, 19 nt, Homo sapiens
  misc_RNA (1)...(19): siRNA sense strand
gcaaggagaccaacuucag

SEQ ID NO: 275914 - RNA, 19 nt, Homo sapiens
  misc_RNA (1)...(19): siRNA sense strand
cagauugucagauauauuc

SEQ ID NO: 275915 - RNA, 19 nt, Homo sapiens
  misc_RNA (1)...(19): siRNA sense strand
gcagauugucagauauauu

SEQ ID NO: 275916 - RNA, 19 nt, Homo sapiens
  misc_RNA (1)...(19): siRNA sense strand
gaagaacugccugcgcauu

SEQ ID NO: 275917 - RNA, 19 nt, Homo sapiens
  misc_RNA (1)...(19): siRNA sense strand
caaauuuacaggcacagaa

SEQ ID NO: 275918 - RNA, 19 nt, Homo sapiens
  misc_RNA (1)...(19): siRNA sense strand
gcaagacgaauuacaucug

SEQ ID NO: 275919 - RNA, 19 nt, Homo sapiens
  misc_RNA (1)...(19): siRNA sense strand
uguccacccuauuaucuuu

SEQ ID NO: 275920 - RNA, 19 nt, Homo sapiens
  misc_RNA (1)...(19): siRNA sense strand
ccaguuaacagcagauugu

SEQ ID NO: 275921 - RNA, 19 nt, Homo sapiens
  misc_RNA (1)...(19): siRNA sense strand
aaaugcaauucaagccuuu

SEQ ID NO: 275922 - RNA, 19 nt, Homo sapiens
  misc_RNA (1)...(19): siRNA sense strand
ccuagaagagugcuugaaa

SEQ ID NO: 275923 - RNA, 19 nt, Homo sapiens
  misc_RNA (1)...(19): siRNA sense strand
agaagagugcuugaaauuu

SEQ ID NO: 275924 - RNA, 19 nt, Homo sapiens
  misc_RNA (1)...(19): siRNA sense strand
ccgccuggauugcgugaaa

SEQ ID NO: 275925 - RNA, 19 nt, Homo sapiens
  misc_RNA (1)...(19): siRNA sense strand
uggaggcccugaagcagaa

SEQ ID NO: 275926 - RNA, 19 nt, Homo sapiens
  misc_RNA (1)...(19): siRNA sense strand
ccacauaaccacaaaauca

SEQ ID NO: 275927 - RNA, 19 nt, Homo sapiens
  misc_RNA (1)...(19): siRNA sense strand
cgacgacauuugcaagaag

SEQ ID NO: 275928 - RNA, 19 nt, Homo sapiens
  misc_RNA (1)...(19): siRNA sense strand
ugaagaaggagaagaacug

SEQ ID NO: 275929 - RNA, 19 nt, Homo sapiens
  misc_RNA (1)...(19): siRNA sense strand
gaacaacugccuggaugca

SEQ ID NO: 275930 - RNA, 19 nt, Homo sapiens
  misc_RNA (1)...(19): siRNA sense strand
aagcagaagucgcucuaca

SEQ ID NO: 275931 - RNA, 19 nt, Homo sapiens
  misc_RNA (1)...(19): siRNA sense strand
gcagaagucgcucuacaac

SEQ ID NO: 275932 - RNA, 19 nt, Homo sapiens
  misc_RNA (1)...(19): siRNA sense strand
ccagccacauaaccacaaa

SEQ ID NO: 275933 - RNA, 19 nt, Homo sapiens
  misc_RNA (1)...(19): siRNA sense strand
gacgacauuugcaagaagu

SEQ ID NO: 275934 - RNA, 19 nt, Homo sapiens
  misc_RNA (1)...(19): siRNA sense strand
gcagcugucuaaaggaaaa

SEQ ID NO: 275935 - RNA, 19 nt, Homo sapiens
  misc_RNA (1)...(19): siRNA sense strand
aagaacugccugcgcauuu

SEQ ID NO: 275936 - RNA, 19 nt, Homo sapiens
  misc_RNA (1)...(19): siRNA sense strand
acacaccucuguauuucca

SEQ ID NO: 275937 - RNA, 19 nt, Homo sapiens
  misc_RNA (1)...(19): siRNA sense strand
caacagugggaacgaccua

SEQ ID NO: 275938 - RNA, 19 nt, Homo sapiens
  misc_RNA (1)...(19): siRNA sense strand
gguggucccauucauauca

SEQ ID NO: 275939 - RNA, 19 nt, Homo sapiens
  misc_RNA (1)...(19): siRNA sense strand
ugaaauucccacucauguu

SEQ ID NO: 275940 - RNA, 19 nt, Homo sapiens
  misc_RNA (1)...(19): siRNA sense strand
uccaaugugucgggcaaua

SEQ ID NO: 275941 - RNA, 19 nt, Homo sapiens
  misc_RNA (1)...(19): siRNA sense strand
acaaggcccuccggcaguu

SEQ ID NO: 275942 - RNA, 19 nt, Homo sapiens
  misc_RNA (1)...(19): siRNA sense strand
gaagcccaacuguuugaau

SEQ ID NO: 275943 - RNA, 19 nt, Homo sapiens
  misc_RNA (1)...(19): siRNA sense strand
caacugccagccagaguca

SEQ ID NO: 275944 - RNA, 19 nt, Homo sapiens
  misc_RNA (1)...(19): siRNA sense strand
gaacugccugcgcauuuac

SEQ ID NO: 275945 - RNA, 19 nt, Homo sapiens
  misc_RNA (1)...(19): siRNA sense strand
gaagcugaaauccaaugug

SEQ ID NO: 275946 - RNA, 19 nt, Homo sapiens
  misc_RNA (1)...(19): siRNA sense strand
ccaacuguuugaauuugca

SEQ ID NO: 275947 - RNA, 19 nt, Homo sapiens
  misc_RNA (1)...(19): siRNA sense strand
gcaaauuuacaggcacaga

SEQ ID NO: 275948 - RNA, 19 nt, Homo sapiens
  misc_RNA (1)...(19): siRNA sense strand
cagccagccuucccaguac

SEQ ID NO: 275949 - RNA, 19 nt, Homo sapiens
  misc_RNA (1)...(19): siRNA sense strand
cauaugaaccaguuaacag

SEQ ID NO: 275950 - RNA, 19 nt, Homo sapiens
  misc_RNA (1)...(19): siRNA sense strand
ccagcagggucugagaaug

SEQ ID NO: 275951 - RNA, 19 nt, Homo sapiens
  misc_RNA (1)...(19): siRNA sense strand
gggcaaggagaccaacuuc

SEQ ID NO: 275952 - RNA, 19 nt, Homo sapiens
  misc_RNA (1)...(19): siRNA sense strand
ccaaguaccgcacgcuaag

SEQ ID NO: 275953 - RNA, 19 nt, Homo sapiens
  misc_RNA (1)...(19): siRNA sense strand
ugaagcagaagucgcucua

SEQ ID NO: 275954 - RNA, 19 nt, Homo sapiens
  misc_RNA (1)...(19): siRNA sense strand
ucgacgacauuugcaagaa

SEQ ID NO: 275955 - RNA, 19 nt, Homo sapiens
  misc_RNA (1)...(19): siRNA sense strand
gcuacggaaugcucuucug

SEQ ID NO: 275956 - RNA, 19 nt, Homo sapiens
  misc_RNA (1)...(19): siRNA sense strand
gcucuguccacccuauuau

SEQ ID NO: 275957 - RNA, 19 nt, Homo sapiens
  misc_RNA (1)...(19): siRNA sense strand
gcauuuacuggagcaugua

SEQ ID NO: 275958 - RNA, 19 nt, Homo sapiens
  misc_RNA (1)...(19): siRNA sense strand
gggcaauacacaccucugu

SEQ ID NO: 275959 - RNA, 19 nt, Homo sapiens
  misc_RNA (1)...(19): siRNA sense strand
acagcagauugucagauau

SEQ ID NO: 275960 - RNA, 19 nt, Homo sapiens
  misc_RNA (1)...(19): siRNA sense strand
ccugugugcuccuaugaag

SEQ ID NO: 275961 - RNA, 19 nt, Homo sapiens
  misc_RNA (1)...(19): siRNA sense strand
gcuggaggauuccccauau

SEQ ID NO: 275962 - RNA, 19 nt, Homo sapiens
  misc_RNA (1)...(19): siRNA sense strand
aagcacagcuacggaaugc

SEQ ID NO: 275963 - RNA, 19 nt, Homo sapiens
  misc_RNA (1)...(19): siRNA sense strand
caagcacagcuacggaaug

SEQ ID NO: 275964 - RNA, 19 nt, Homo sapiens
  misc_RNA (1)...(19): siRNA sense strand
caaccucgacgacauuugc

SEQ ID NO: 275965 - RNA, 19 nt, Homo sapiens
  misc_RNA (1)...(19): siRNA sense strand
cgcauuuacuggagcaugu

SEQ ID NO: 275966 - RNA, 19 nt, Homo sapiens
  misc_RNA (1)...(19): siRNA sense strand
gggcuuauuggcacaguca

SEQ ID NO: 275967 - RNA, 19 nt, Homo sapiens
  misc_RNA (1)...(19): siRNA sense strand
uccacccuauuaucuuuaa

SEQ ID NO: 275968 - RNA, 19 nt, Homo sapiens
  misc_RNA (1)...(19): siRNA sense strand
ccggguggucccauucaua

SEQ ID NO: 275969 - RNA, 19 nt, Homo sapiens
  misc_RNA (1)...(19): siRNA sense strand
auucaagccuuuggcaaug

SEQ ID NO: 275970 - RNA, 19 nt, Homo sapiens
  misc_RNA (1)...(19): siRNA sense strand
cggguggucccauucauau

SEQ ID NO: 275971 - RNA, 19 nt, Homo sapiens
  misc_RNA (1)...(19): siRNA sense strand
accagagccugcagggaaa

SEQ ID NO: 275972 - RNA, 19 nt, Homo sapiens
  misc_RNA (1)...(19): siRNA sense strand
caaugugucgggcaauaca

SEQ ID NO: 275973 - RNA, 19 nt, Homo sapiens
  misc_RNA (1)...(19): siRNA sense strand
ccauggaggcccugaagca

SEQ ID NO: 275974 - RNA, 19 nt, Homo sapiens
  misc_RNA (1)...(19): siRNA sense strand
acuccugcaagacgaauua

SEQ ID NO: 275975 - RNA, 19 nt, Homo sapiens
  misc_RNA (1)...(19): siRNA sense strand
gcaaauagggcuucacaua

SEQ ID NO: 275976 - RNA, 19 nt, Homo sapiens
  misc_RNA (1)...(19): siRNA sense strand
ggacagaacuuugauccuu

SEQ ID NO: 275977 - RNA, 19 nt, Homo sapiens
  misc_RNA (1)...(19): siRNA sense strand
gacagaacuuugauccuua

SEQ ID NO: 275978 - RNA, 19 nt, Homo sapiens
  misc_RNA (1)...(19): siRNA sense strand
ggaaaugacuggcaaugca

SEQ ID NO: 275979 - RNA, 19 nt, Homo sapiens
  misc_RNA (1)...(19): siRNA sense strand
caacaugagugucuuacug

SEQ ID NO: 275980 - RNA, 19 nt, Homo sapiens
  misc_RNA (1)...(19): siRNA sense strand
gcacuggucuguccacucu

SEQ ID NO: 275981 - RNA, 19 nt, Homo sapiens
  misc_RNA (1)...(19): siRNA sense strand
ccaccaagcuaaccucaug

SEQ ID NO: 275982 - RNA, 19 nt, Homo sapiens
  misc_RNA (1)...(19): siRNA sense strand
ccacacaagugcacguuug

SEQ ID NO: 275983 - RNA, 19 nt, Homo sapiens
  misc_RNA (1)...(19): siRNA sense strand
guccucgacuugaacauua

SEQ ID NO: 275984 - RNA, 19 nt, Homo sapiens
  misc_RNA (1)...(19): siRNA sense strand
aggcucagcuuguguguaa

SEQ ID NO: 275985 - RNA, 19 nt, Homo sapiens
  misc_RNA (1)...(19): siRNA sense strand
acacucagcuggacuuugu

SEQ ID NO: 275986 - RNA, 19 nt, Homo sapiens
  misc_RNA (1)...(19): siRNA sense strand
ggacccaacuugcccaauc

SEQ ID NO: 275987 - RNA, 19 nt, Homo sapiens
  misc_RNA (1)...(19): siRNA sense strand
gagaagccguauguaugua

SEQ ID NO: 275988 - RNA, 19 nt, Homo sapiens
  misc_RNA (1)...(19): siRNA sense strand
uauauggacuucccaccua

SEQ ID NO: 275989 - RNA, 19 nt, Homo sapiens
  misc_RNA (1)...(19): siRNA sense strand
gcaccaaacgcuauacaga

SEQ ID NO: 275990 - RNA, 19 nt, Homo sapiens
  misc_RNA (1)...(19): siRNA sense strand
gcacgagggcugcaguaaa

SEQ ID NO: 275991 - RNA, 19 nt, Homo sapiens
  misc_RNA (1)...(19): siRNA sense strand
ccucaacucuagugccuaa

SEQ ID NO: 275992 - RNA, 19 nt, Homo sapiens
  misc_RNA (1)...(19): siRNA sense strand
ggccuugccuggacuuuga

SEQ ID NO: 275993 - RNA, 19 nt, Homo sapiens
  misc_RNA (1)...(19): siRNA sense strand
caaauagggcuucacauag

SEQ ID NO: 275994 - RNA, 19 nt, Homo sapiens
  misc_RNA (1)...(19): siRNA sense strand
cuagagggcuacaggaaga

SEQ ID NO: 275995 - RNA, 19 nt, Homo sapiens
  misc_RNA (1)...(19): siRNA sense strand
ccucguagcuuucaucaac

SEQ ID NO: 275996 - RNA, 19 nt, Homo sapiens
  misc_RNA (1)...(19): siRNA sense strand
cagcuuguguguaauuaug

SEQ ID NO: 275997 - RNA, 19 nt, Homo sapiens
  misc_RNA (1)...(19): siRNA sense strand
ccaaugagaagccguaugu

SEQ ID NO: 275998 - RNA, 19 nt, Homo sapiens
  misc_RNA (1)...(19): siRNA sense strand
cuacugauacucugggaua

SEQ ID NO: 275999 - RNA, 19 nt, Homo sapiens
  misc_RNA (1)...(19): siRNA sense strand
gcgagaagccacacaagug

SEQ ID NO: 276000 - RNA, 19 nt, Homo sapiens
  misc_RNA (1)...(19): siRNA sense strand
cuaccagagucccaaguuu

SEQ ID NO: 276001 - RNA, 19 nt, Homo sapiens
  misc_RNA (1)...(19): siRNA sense strand
gcaguaaagccuucagcaa

SEQ ID NO: 276002 - RNA, 19 nt, Homo sapiens
  misc_RNA (1)...(19): siRNA sense strand
aguaaagccuucagcaaug

SEQ ID NO: 276003 - RNA, 19 nt, Homo sapiens
  misc_RNA (1)...(19): siRNA sense strand
gcuaugggccucucaaagu

SEQ ID NO: 276004 - RNA, 19 nt, Homo sapiens
  misc_RNA (1)...(19): siRNA sense strand
aaauagggcuucacauagg

SEQ ID NO: 276005 - RNA, 19 nt, Homo sapiens
  misc_RNA (1)...(19): siRNA sense strand
ugagaaugcugccauggau

SEQ ID NO: 276006 - RNA, 19 nt, Homo sapiens
  misc_RNA (1)...(19): siRNA sense strand
ggagaagccgagccgagua

SEQ ID NO: 276007 - RNA, 19 nt, Homo sapiens
  misc_RNA (1)...(19): siRNA sense strand
cacgagggcugcaguaaag

SEQ ID NO: 276008 - RNA, 19 nt, Homo sapiens
  misc_RNA (1)...(19): siRNA sense strand
caucaacuccggccaauag

SEQ ID NO: 276009 - RNA, 19 nt, Homo sapiens
  misc_RNA (1)...(19): siRNA sense strand
ggacgagggaccuugcauu

SEQ ID NO: 276010 - RNA, 19 nt, Homo sapiens
  misc_RNA (1)...(19): siRNA sense strand
cugaagaccucuccagcuu

SEQ ID NO: 276011 - RNA, 19 nt, Homo sapiens
  misc_RNA (1)...(19): siRNA sense strand
ggagaagcgugagccugaa

SEQ ID NO: 276012 - RNA, 19 nt, Homo sapiens
  misc_RNA (1)...(19): siRNA sense strand
caucagcucugccuauacu

SEQ ID NO: 276013 - RNA, 19 nt, Homo sapiens
  misc_RNA (1)...(19): siRNA sense strand
gagcugaggcccuucaaag

SEQ ID NO: 276014 - RNA, 19 nt, Homo sapiens
  misc_RNA (1)...(19): siRNA sense strand
ccaguguccucgacuugaa

SEQ ID NO: 276015 - RNA, 19 nt, Homo sapiens
  misc_RNA (1)...(19): siRNA sense strand
gacccaacuugcccaauca

SEQ ID NO: 276016 - RNA, 19 nt, Homo sapiens
  misc_RNA (1)...(19): siRNA sense strand
gcagggagugcagccaaua

SEQ ID NO: 276017 - RNA, 19 nt, Homo sapiens
  misc_RNA (1)...(19): siRNA sense strand
ccgaaggacagguauguaa

SEQ ID NO: 276018 - RNA, 19 nt, Homo sapiens
  misc_RNA (1)...(19): siRNA sense strand
aagcuccagugaacacaua

SEQ ID NO: 276019 - RNA, 19 nt, Homo sapiens
  misc_RNA (1)...(19): siRNA sense strand
cagcuagaguccagagguu

SEQ ID NO: 276020 - RNA, 19 nt, Homo sapiens
  misc_RNA (1)...(19): siRNA sense strand
ggagugcagccaauacaga

SEQ ID NO: 276021 - RNA, 19 nt, Homo sapiens
  misc_RNA (1)...(19): siRNA sense strand
gacgagggaccuugcauug

SEQ ID NO: 276022 - RNA, 19 nt, Homo sapiens
  misc_RNA (1)...(19): siRNA sense strand
ggugagaagccauacaugu

SEQ ID NO: 276023 - RNA, 19 nt, Homo sapiens
  misc_RNA (1)...(19): siRNA sense strand
caguaaagccuucagcaau

SEQ ID NO: 276024 - RNA, 19 nt, Homo sapiens
  misc_RNA (1)...(19): siRNA sense strand
ucacaagucagguuccuau

SEQ ID NO: 276025 - RNA, 19 nt, Homo sapiens
  misc_RNA (1)...(19): siRNA sense strand
gcucagcuuguguguaauu

SEQ ID NO: 276026 - RNA, 19 nt, Homo sapiens
  misc_RNA (1)...(19): siRNA sense strand
agacagugguguggaaaug

SEQ ID NO: 276027 - RNA, 19 nt, Homo sapiens
  misc_RNA (1)...(19): siRNA sense strand
ggaauuugacucccaagag

SEQ ID NO: 276028 - RNA, 19 nt, Homo sapiens
  misc_RNA (1)...(19): siRNA sense strand
gggcaacaugagugucuua

SEQ ID NO: 276029 - RNA, 19 nt, Homo sapiens
  misc_RNA (1)...(19): siRNA sense strand
ugagaagccguauguaugu

SEQ ID NO: 276030 - RNA, 19 nt, Homo sapiens
  misc_RNA (1)...(19): siRNA sense strand
gagaagccgagccgaguau

SEQ ID NO: 276031 - RNA, 19 nt, Homo sapiens
  misc_RNA (1)...(19): siRNA sense strand
gaagccguauguauguaag

SEQ ID NO: 276032 - RNA, 19 nt, Homo sapiens
  misc_RNA (1)...(19): siRNA sense strand
cgagggaccuugcauugcu

SEQ ID NO: 276033 - RNA, 19 nt, Homo sapiens
  misc_RNA (1)...(19): siRNA sense strand
caccauccauuucuacagu

SEQ ID NO: 276034 - RNA, 19 nt, Homo sapiens
  misc_RNA (1)...(19): siRNA sense strand
gugagaagccauacaugug

SEQ ID NO: 276035 - RNA, 19 nt, Homo sapiens
  misc_RNA (1)...(19): siRNA sense strand
uggacucucuugaucuuga

SEQ ID NO: 276036 - RNA, 19 nt, Homo sapiens
  misc_RNA (1)...(19): siRNA sense strand
gccugaaucuguguaugaa

SEQ ID NO: 276037 - RNA, 19 nt, Homo sapiens
  misc_RNA (1)...(19): siRNA sense strand
cuaugggccucucaaagug

SEQ ID NO: 276038 - RNA, 19 nt, Homo sapiens
  misc_RNA (1)...(19): siRNA sense strand
gagccaagcaccagaaucg

SEQ ID NO: 276039 - RNA, 19 nt, Homo sapiens
  misc_RNA (1)...(19): siRNA sense strand
guaaagccuucagcaaugc

SEQ ID NO: 276040 - RNA, 19 nt, Homo sapiens
  misc_RNA (1)...(19): siRNA sense strand
cuugccagcugaagucuga

SEQ ID NO: 276041 - RNA, 19 nt, Homo sapiens
  misc_RNA (1)...(19): siRNA sense strand
ggacuucccaccuacugau

SEQ ID NO: 276042 - RNA, 19 nt, Homo sapiens
  misc_RNA (1)...(19): siRNA sense strand
gagcacgagggcugcagua

SEQ ID NO: 276043 - RNA, 19 nt, Homo sapiens
  misc_RNA (1)...(19): siRNA sense strand
gcagacacacuggcgagaa

SEQ ID NO: 276044 - RNA, 19 nt, Homo sapiens
  misc_RNA (1)...(19): siRNA sense strand
ccuggacucucuugaucuu

SEQ ID NO: 276045 - RNA, 19 nt, Homo sapiens
  misc_RNA (1)...(19): siRNA sense strand
gggcaaauagggcuucaca

SEQ ID NO: 276046 - RNA, 19 nt, Homo sapiens
  misc_RNA (1)...(19): siRNA sense strand
gcuuguguguaauuauguu

SEQ ID NO: 276047 - RNA, 19 nt, Homo sapiens
  misc_RNA (1)...(19): siRNA sense strand
ugaacauuauggacaagug

SEQ ID NO: 276048 - RNA, 19 nt, Homo sapiens
  misc_RNA (1)...(19): siRNA sense strand
cuacggucaucucuccauu

SEQ ID NO: 276049 - RNA, 19 nt, Homo sapiens
  misc_RNA (1)...(19): siRNA sense strand
acaggaagagccagaaguu

SEQ ID NO: 276050 - RNA, 19 nt, Homo sapiens
  misc_RNA (1)...(19): siRNA sense strand
cccaaccucugucuacuca

SEQ ID NO: 276051 - RNA, 19 nt, Homo sapiens
  misc_RNA (1)...(19): siRNA sense strand
gccagagggugccaugaag

SEQ ID NO: 276052 - RNA, 19 nt, Homo sapiens
  misc_RNA (1)...(19): siRNA sense strand
aaugagaagccguauguau

SEQ ID NO: 276053 - RNA, 19 nt, Homo sapiens
  misc_RNA (1)...(19): siRNA sense strand
cuucaaagcccaguacaug

SEQ ID NO: 276054 - RNA, 19 nt, Homo sapiens
  misc_RNA (1)...(19): siRNA sense strand
ccaccaaucaguagcuaug

SEQ ID NO: 276055 - RNA, 19 nt, Homo sapiens
  misc_RNA (1)...(19): siRNA sense strand
ugagaagccauacaugugu

SEQ ID NO: 276056 - RNA, 19 nt, Homo sapiens
  misc_RNA (1)...(19): siRNA sense strand
cagacacacuggcgagaag

SEQ ID NO: 276057 - RNA, 19 nt, Homo sapiens
  misc_RNA (1)...(19): siRNA sense strand
agcaucagcucugccuaua

SEQ ID NO: 276058 - RNA, 19 nt, Homo sapiens
  misc_RNA (1)...(19): siRNA sense strand
gagccugaaucuguguaug

SEQ ID NO: 276059 - RNA, 19 nt, Homo sapiens
  misc_RNA (1)...(19): siRNA sense strand
gggcagcucuggacauacc

SEQ ID NO: 276060 - RNA, 19 nt, Homo sapiens
  misc_RNA (1)...(19): siRNA sense strand
caccgagggcccacucuuu

SEQ ID NO: 276061 - RNA, 19 nt, Homo sapiens
  misc_RNA (1)...(19): siRNA sense strand
uacagacagugguguggaa

SEQ ID NO: 276062 - RNA, 19 nt, Homo sapiens
  misc_RNA (1)...(19): siRNA sense strand
gaagggugccggaagucau

SEQ ID NO: 276063 - RNA, 19 nt, Homo sapiens
  misc_RNA (1)...(19): siRNA sense strand
accaaacgcuauacagauc

SEQ ID NO: 276064 - RNA, 19 nt, Homo sapiens
  misc_RNA (1)...(19): siRNA sense strand
ccaacuugcccaaucacaa

SEQ ID NO: 276065 - RNA, 19 nt, Homo sapiens
  misc_RNA (1)...(19): siRNA sense strand
auauggaccuggcuuugga

SEQ ID NO: 276066 - RNA, 19 nt, Homo sapiens
  misc_RNA (1)...(19): siRNA sense strand
cagcaucagcucugccuau

SEQ ID NO: 276067 - RNA, 19 nt, Homo sapiens
  misc_RNA (1)...(19): siRNA sense strand
guuaugggccagccagaga

SEQ ID NO: 276068 - RNA, 19 nt, Homo sapiens
  misc_RNA (1)...(19): siRNA sense strand
gggcugaguccuccuccuu

SEQ ID NO: 276069 - RNA, 19 nt, Homo sapiens
  misc_RNA (1)...(19): siRNA sense strand
caccaaacgcuauacagau

SEQ ID NO: 276070 - RNA, 19 nt, Homo sapiens
  misc_RNA (1)...(19): siRNA sense strand
ggagcugaggcccuucaaa

SEQ ID NO: 276071 - RNA, 19 nt, Homo sapiens
  misc_RNA (1)...(19): siRNA sense strand
ccaugaaaauuuuguagug

SEQ ID NO: 276072 - RNA, 19 nt, Homo sapiens
  misc_RNA (1)...(19): siRNA sense strand
gugcuaaagcuccagugaa

SEQ ID NO: 276073 - RNA, 19 nt, Homo sapiens
  misc_RNA (1)...(19): siRNA sense strand
gaucggauagguggucuuc

SEQ ID NO: 276074 - RNA, 19 nt, Homo sapiens
  misc_RNA (1)...(19): siRNA sense strand
agucugagcuggacaugcu

SEQ ID NO: 276075 - RNA, 19 nt, Homo sapiens
  misc_RNA (1)...(19): siRNA sense strand
gcacaccgcugcucaaaga

SEQ ID NO: 276076 - RNA, 19 nt, Homo sapiens
  misc_RNA (1)...(19): siRNA sense strand
ucaagucacucaaggauuc

SEQ ID NO: 276077 - RNA, 19 nt, Homo sapiens
  misc_RNA (1)...(19): siRNA sense strand
gcacgagggcugcaacaaa

SEQ ID NO: 276078 - RNA, 19 nt, Homo sapiens
  misc_RNA (1)...(19): siRNA sense strand
gcaaacacaugaccaccau

SEQ ID NO: 276079 - RNA, 19 nt, Homo sapiens
  misc_RNA (1)...(19): siRNA sense strand
ccaagaagcagcgcaauga

SEQ ID NO: 276080 - RNA, 19 nt, Homo sapiens
  misc_RNA (1)...(19): siRNA sense strand
gcacuggcuucucugacaa

SEQ ID NO: 276081 - RNA, 19 nt, Homo sapiens
  misc_RNA (1)...(19): siRNA sense strand
cgucaacccugucgccauu

SEQ ID NO: 276082 - RNA, 19 nt, Homo sapiens
  misc_RNA (1)...(19): siRNA sense strand
cagacgacguggugcagua

SEQ ID NO: 276083 - RNA, 19 nt, Homo sapiens
  misc_RNA (1)...(19): siRNA sense strand
ggagaagccauaugugugu

SEQ ID NO: 276084 - RNA, 19 nt, Homo sapiens
  misc_RNA (1)...(19): siRNA sense strand
uggcugaccucaaggaaga

SEQ ID NO: 276085 - RNA, 19 nt, Homo sapiens
  misc_RNA (1)...(19): siRNA sense strand
gcccucaccuccaucaaug

SEQ ID NO: 276086 - RNA, 19 nt, Homo sapiens
  misc_RNA (1)...(19): siRNA sense strand
gcgagaacguggcgaugga

SEQ ID NO: 276087 - RNA, 19 nt, Homo sapiens
  misc_RNA (1)...(19): siRNA sense strand
gcaacaaagccuucuccaa

SEQ ID NO: 276088 - RNA, 19 nt, Homo sapiens
  misc_RNA (1)...(19): siRNA sense strand
aggcugagguggucaucua

SEQ ID NO: 276089 - RNA, 19 nt, Homo sapiens
  misc_RNA (1)...(19): siRNA sense strand
gcaccaagagauacacaga

SEQ ID NO: 276090 - RNA, 19 nt, Homo sapiens
  misc_RNA (1)...(19): siRNA sense strand
uggagaaccugaagacaca

SEQ ID NO: 276091 - RNA, 19 nt, Homo sapiens
  misc_RNA (1)...(19): siRNA sense strand
gaaggagaagcucaaguca

SEQ ID NO: 276092 - RNA, 19 nt, Homo sapiens
  misc_RNA (1)...(19): siRNA sense strand
gagaagaaggaguuugugu

SEQ ID NO: 276093 - RNA, 19 nt, Homo sapiens
  misc_RNA (1)...(19): siRNA sense strand
gagaagcucaagucacuca

SEQ ID NO: 276094 - RNA, 19 nt, Homo sapiens
  misc_RNA (1)...(19): siRNA sense strand
gggagaagaaggaguuugu

SEQ ID NO: 276095 - RNA, 19 nt, Homo sapiens
  misc_RNA (1)...(19): siRNA sense strand
cacgagggcugcaacaaag

SEQ ID NO: 276096 - RNA, 19 nt, Homo sapiens
  misc_RNA (1)...(19): siRNA sense strand
aggagcagcuggugcauca

SEQ ID NO: 276097 - RNA, 19 nt, Homo sapiens
  misc_RNA (1)...(19): siRNA sense strand
aggagaagcucaagucacu

SEQ ID NO: 276098 - RNA, 19 nt, Homo sapiens
  misc_RNA (1)...(19): siRNA sense strand
gcucaagucacucaaggau

SEQ ID NO: 276099 - RNA, 19 nt, Homo sapiens
  misc_RNA (1)...(19): siRNA sense strand
ugagugacaccaaccagaa

SEQ ID NO: 276100 - RNA, 19 nt, Homo sapiens
  misc_RNA (1)...(19): siRNA sense strand
cagcugcgcaaacacauga

SEQ ID NO: 276101 - RNA, 19 nt, Homo sapiens
  misc_RNA (1)...(19): siRNA sense strand
caccgcugcucaaagagaa

SEQ ID NO: 276102 - RNA, 19 nt, Homo sapiens
  misc_RNA (1)...(19): siRNA sense strand
gcagcaacugucugaguga

SEQ ID NO: 276103 - RNA, 19 nt, Homo sapiens
  misc_RNA (1)...(19): siRNA sense strand
gggaagacugcaccaagga

SEQ ID NO: 276104 - RNA, 19 nt, Homo sapiens
  misc_RNA (1)...(19): siRNA sense strand
ucaagaaggagaagcucaa

SEQ ID NO: 276105 - RNA, 19 nt, Homo sapiens
  misc_RNA (1)...(19): siRNA sense strand
caacgagaaacccuacauc

SEQ ID NO: 276106 - RNA, 19 nt, Homo sapiens
  misc_RNA (1)...(19): siRNA sense strand
agaacaagcagagcaguga

SEQ ID NO: 276107 - RNA, 19 nt, Homo sapiens
  misc_RNA (1)...(19): siRNA sense strand
gagcagcuggugcaucaca

SEQ ID NO: 276108 - RNA, 19 nt, Homo sapiens
  misc_RNA (1)...(19): siRNA sense strand
gcacccacuccaacgagaa

SEQ ID NO: 276109 - RNA, 19 nt, Homo sapiens
  misc_RNA (1)...(19): siRNA sense strand
ggacugccugcacgucaga

SEQ ID NO: 276110 - RNA, 19 nt, Homo sapiens
  misc_RNA (1)...(19): siRNA sense strand
agaaggagaagcucaaguc

SEQ ID NO: 276111 - RNA, 19 nt, Homo sapiens
  misc_RNA (1)...(19): siRNA sense strand
gcacgucagagccaucaag

SEQ ID NO: 276112 - RNA, 19 nt, Homo sapiens
  misc_RNA (1)...(19): siRNA sense strand
ggaugccaguuaggcuuug

SEQ ID NO: 276113 - RNA, 19 nt, Homo sapiens
  misc_RNA (1)...(19): siRNA sense strand
gcuggugcaucacaucaac

SEQ ID NO: 276114 - RNA, 19 nt, Homo sapiens
  misc_RNA (1)...(19): siRNA sense strand
gcgagaagccccacaagug

SEQ ID NO: 276115 - RNA, 19 nt, Homo sapiens
  misc_RNA (1)...(19): siRNA sense strand
gcgccaagcaccagaaucg

SEQ ID NO: 276116 - RNA, 19 nt, Homo sapiens
  misc_RNA (1)...(19): siRNA sense strand
gaagcucaagucacucaag

SEQ ID NO: 276117 - RNA, 19 nt, Homo sapiens
  misc_RNA (1)...(19): siRNA sense strand
ucaacccugucgccauuca

SEQ ID NO: 276118 - RNA, 19 nt, Homo sapiens
  misc_RNA (1)...(19): siRNA sense strand
ggagaagaaggaguuugug

SEQ ID NO: 276119 - RNA, 19 nt, Homo sapiens
  misc_RNA (1)...(19): siRNA sense strand
ggaggacgaccuggugcuu

SEQ ID NO: 276120 - RNA, 19 nt, Homo sapiens
  misc_RNA (1)...(19): siRNA sense strand
caggcugcaccaagagaua

SEQ ID NO: 276121 - RNA, 19 nt, Homo sapiens
  misc_RNA (1)...(19): siRNA sense strand
cgagcgaggugaccaugcu

SEQ ID NO: 276122 - RNA, 19 nt, Homo sapiens
  misc_RNA (1)...(19): siRNA sense strand
cagcagcaacugucugagu

SEQ ID NO: 276123 - RNA, 19 nt, Homo sapiens
  misc_RNA (1)...(19): siRNA sense strand
gcacaccgcugcucaaaga

SEQ ID NO: 276124 - RNA, 19 nt, Homo sapiens
  misc_RNA (1)...(19): siRNA sense strand
ucaagucacucaaggauuc

SEQ ID NO: 276125 - RNA, 19 nt, Homo sapiens
  misc_RNA (1)...(19): siRNA sense strand
gcacgagggcugcaacaaa

SEQ ID NO: 276126 - RNA, 19 nt, Homo sapiens
  misc_RNA (1)...(19): siRNA sense strand
gcaaacacaugaccaccau

SEQ ID NO: 276127 - RNA, 19 nt, Homo sapiens
  misc_RNA (1)...(19): siRNA sense strand
ccaagaagcagcgcaauga

SEQ ID NO: 276128 - RNA, 19 nt, Homo sapiens
  misc_RNA (1)...(19): siRNA sense strand
gcacuggcuucucugacaa

SEQ ID NO: 276129 - RNA, 19 nt, Homo sapiens
  misc_RNA (1)...(19): siRNA sense strand
cgucaacccugucgccauu

SEQ ID NO: 276130 - RNA, 19 nt, Homo sapiens
  misc_RNA (1)...(19): siRNA sense strand
cagacgacguggugcagua

SEQ ID NO: 276131 - RNA, 19 nt, Homo sapiens
  misc_RNA (1)...(19): siRNA sense strand
ggagaagccauaugugugu

SEQ ID NO: 276132 - RNA, 19 nt, Homo sapiens
  misc_RNA (1)...(19): siRNA sense strand
uggcugaccucaaggaaga

SEQ ID NO: 276133 - RNA, 19 nt, Homo sapiens
  misc_RNA (1)...(19): siRNA sense strand
gcccucaccuccaucaaug

SEQ ID NO: 276134 - RNA, 19 nt, Homo sapiens
  misc_RNA (1)...(19): siRNA sense strand
gcgagaacguggcgaugga

SEQ ID NO: 276135 - RNA, 19 nt, Homo sapiens
  misc_RNA (1)...(19): siRNA sense strand
gcaacaaagccuucuccaa

SEQ ID NO: 276136 - RNA, 19 nt, Homo sapiens
  misc_RNA (1)...(19): siRNA sense strand
aggcugagguggucaucua

SEQ ID NO: 276137 - RNA, 19 nt, Homo sapiens
  misc_RNA (1)...(19): siRNA sense strand
gcaccaagagauacacaga

SEQ ID NO: 276138 - RNA, 19 nt, Homo sapiens
  misc_RNA (1)...(19): siRNA sense strand
uggagaaccugaagacaca

SEQ ID NO: 276139 - RNA, 19 nt, Homo sapiens
  misc_RNA (1)...(19): siRNA sense strand
gaaggagaagcucaaguca

SEQ ID NO: 276140 - RNA, 19 nt, Homo sapiens
  misc_RNA (1)...(19): siRNA sense strand
gagaagaaggaguuugugu

SEQ ID NO: 276141 - RNA, 19 nt, Homo sapiens
  misc_RNA (1)...(19): siRNA sense strand
gagaagcucaagucacuca

SEQ ID NO: 276142 - RNA, 19 nt, Homo sapiens
  misc_RNA (1)...(19): siRNA sense strand
gggagaagaaggaguuugu

SEQ ID NO: 276143 - RNA, 19 nt, Homo sapiens
  misc_RNA (1)...(19): siRNA sense strand
cacgagggcugcaacaaag

SEQ ID NO: 276144 - RNA, 19 nt, Homo sapiens
  misc_RNA (1)...(19): siRNA sense strand
aggagcagcuggugcauca

SEQ ID NO: 276145 - RNA, 19 nt, Homo sapiens
  misc_RNA (1)...(19): siRNA sense strand
aggagaagcucaagucacu

SEQ ID NO: 276146 - RNA, 19 nt, Homo sapiens
  misc_RNA (1)...(19): siRNA sense strand
gcucaagucacucaaggau

SEQ ID NO: 276147 - RNA, 19 nt, Homo sapiens
  misc_RNA (1)...(19): siRNA sense strand
ugagugacaccaaccagaa

SEQ ID NO: 276148 - RNA, 19 nt, Homo sapiens
  misc_RNA (1)...(19): siRNA sense strand
cagcugcgcaaacacauga

SEQ ID NO: 276149 - RNA, 19 nt, Homo sapiens
  misc_RNA (1)...(19): siRNA sense strand
caccgcugcucaaagagaa

SEQ ID NO: 276150 - RNA, 19 nt, Homo sapiens
  misc_RNA (1)...(19): siRNA sense strand
gcagcaacugucugaguga

SEQ ID NO: 276151 - RNA, 19 nt, Homo sapiens
  misc_RNA (1)...(19): siRNA sense strand
gggaagacugcaccaagga

SEQ ID NO: 276152 - RNA, 19 nt, Homo sapiens
  misc_RNA (1)...(19): siRNA sense strand
ucaagaaggagaagcucaa

SEQ ID NO: 276153 - RNA, 19 nt, Homo sapiens
  misc_RNA (1)...(19): siRNA sense strand
caacgagaaacccuacauc

SEQ ID NO: 276154 - RNA, 19 nt, Homo sapiens
  misc_RNA (1)...(19): siRNA sense strand
agaacaagcagagcaguga

SEQ ID NO: 276155 - RNA, 19 nt, Homo sapiens
  misc_RNA (1)...(19): siRNA sense strand
gagcagcuggugcaucaca

SEQ ID NO: 276156 - RNA, 19 nt, Homo sapiens
  misc_RNA (1)...(19): siRNA sense strand
gcacccacuccaacgagaa

SEQ ID NO: 276157 - RNA, 19 nt, Homo sapiens
  misc_RNA (1)...(19): siRNA sense strand
ggacugccugcacgucaga

SEQ ID NO: 276158 - RNA, 19 nt, Homo sapiens
  misc_RNA (1)...(19): siRNA sense strand
agaaggagaagcucaaguc

SEQ ID NO: 276159 - RNA, 19 nt, Homo sapiens
  misc_RNA (1)...(19): siRNA sense strand
gcacgucagagccaucaag

SEQ ID NO: 276160 - RNA, 19 nt, Homo sapiens
  misc_RNA (1)...(19): siRNA sense strand
ggaugccaguuaggcuuug

SEQ ID NO: 276161 - RNA, 19 nt, Homo sapiens
  misc_RNA (1)...(19): siRNA sense strand
gcuggugcaucacaucaac

SEQ ID NO: 276162 - RNA, 19 nt, Homo sapiens
  misc_RNA (1)...(19): siRNA sense strand
gcgagaagccccacaagug

SEQ ID NO: 276163 - RNA, 19 nt, Homo sapiens
  misc_RNA (1)...(19): siRNA sense strand
gcgccaagcaccagaaucg

SEQ ID NO: 276164 - RNA, 19 nt, Homo sapiens
  misc_RNA (1)...(19): siRNA sense strand
gaagcucaagucacucaag

SEQ ID NO: 276165 - RNA, 19 nt, Homo sapiens
  misc_RNA (1)...(19): siRNA sense strand
ucaacccugucgccauuca

SEQ ID NO: 276166 - RNA, 19 nt, Homo sapiens
  misc_RNA (1)...(19): siRNA sense strand
ggagaagaaggaguuugug

SEQ ID NO: 276167 - RNA, 19 nt, Homo sapiens
  misc_RNA (1)...(19): siRNA sense strand
ggaggacgaccuggugcuu

SEQ ID NO: 276168 - RNA, 19 nt, Homo sapiens
  misc_RNA (1)...(19): siRNA sense strand
caggcugcaccaagagaua

SEQ ID NO: 276169 - RNA, 19 nt, Homo sapiens
  misc_RNA (1)...(19): siRNA sense strand
cgagcgaggugaccaugcu

SEQ ID NO: 276170 - RNA, 19 nt, Homo sapiens
  misc_RNA (1)...(19): siRNA sense strand
cagcagcaacugucugagu

SEQ ID NO: 276171 - RNA, 19 nt, Homo sapiens
  misc_RNA (1)...(19): siRNA sense strand
uccugaacaugaugaccua

SEQ ID NO: 276172 - RNA, 19 nt, Homo sapiens
  misc_RNA (1)...(19): siRNA sense strand
gcacaccgcugcucaaaga

SEQ ID NO: 276173 - RNA, 19 nt, Homo sapiens
  misc_RNA (1)...(19): siRNA sense strand
ucaagucacucaaggauuc

SEQ ID NO: 276174 - RNA, 19 nt, Homo sapiens
  misc_RNA (1)...(19): siRNA sense strand
gcacgagggcugcaacaaa

SEQ ID NO: 276175 - RNA, 19 nt, Homo sapiens
  misc_RNA (1)...(19): siRNA sense strand
gcaaacacaugaccaccau

SEQ ID NO: 276176 - RNA, 19 nt, Homo sapiens
  misc_RNA (1)...(19): siRNA sense strand
ccaagaagcagcgcaauga

SEQ ID NO: 276177 - RNA, 19 nt, Homo sapiens
  misc_RNA (1)...(19): siRNA sense strand
gcacuggcuucucugacaa

SEQ ID NO: 276178 - RNA, 19 nt, Homo sapiens
  misc_RNA (1)...(19): siRNA sense strand
cgucaacccugucgccauu

SEQ ID NO: 276179 - RNA, 19 nt, Homo sapiens
  misc_RNA (1)...(19): siRNA sense strand
cagacgacguggugcagua

SEQ ID NO: 276180 - RNA, 19 nt, Homo sapiens
  misc_RNA (1)...(19): siRNA sense strand
ggagaagccauaugugugu

SEQ ID NO: 276181 - RNA, 19 nt, Homo sapiens
  misc_RNA (1)...(19): siRNA sense strand
uggcugaccucaaggaaga

SEQ ID NO: 276182 - RNA, 19 nt, Homo sapiens
  misc_RNA (1)...(19): siRNA sense strand
gcccucaccuccaucaaug

SEQ ID NO: 276183 - RNA, 19 nt, Homo sapiens
  misc_RNA (1)...(19): siRNA sense strand
gcgagaacguggcgaugga

SEQ ID NO: 276184 - RNA, 19 nt, Homo sapiens
  misc_RNA (1)...(19): siRNA sense strand
gcaacaaagccuucuccaa

SEQ ID NO: 276185 - RNA, 19 nt, Homo sapiens
  misc_RNA (1)...(19): siRNA sense strand
aggcugagguggucaucua

SEQ ID NO: 276186 - RNA, 19 nt, Homo sapiens
  misc_RNA (1)...(19): siRNA sense strand
gcaccaagagauacacaga

SEQ ID NO: 276187 - RNA, 19 nt, Homo sapiens
  misc_RNA (1)...(19): siRNA sense strand
uggagaaccugaagacaca

SEQ ID NO: 276188 - RNA, 19 nt, Homo sapiens
  misc_RNA (1)...(19): siRNA sense strand
gaaggagaagcucaaguca

SEQ ID NO: 276189 - RNA, 19 nt, Homo sapiens
  misc_RNA (1)...(19): siRNA sense strand
gagaagaaggaguuugugu

SEQ ID NO: 276190 - RNA, 19 nt, Homo sapiens
  misc_RNA (1)...(19): siRNA sense strand
gagaagcucaagucacuca

SEQ ID NO: 276191 - RNA, 19 nt, Homo sapiens
  misc_RNA (1)...(19): siRNA sense strand
gggagaagaaggaguuugu

SEQ ID NO: 276192 - RNA, 19 nt, Homo sapiens
  misc_RNA (1)...(19): siRNA sense strand
cacgagggcugcaacaaag

SEQ ID NO: 276193 - RNA, 19 nt, Homo sapiens
  misc_RNA (1)...(19): siRNA sense strand
aggagcagcuggugcauca

SEQ ID NO: 276194 - RNA, 19 nt, Homo sapiens
  misc_RNA (1)...(19): siRNA sense strand
aggagaagcucaagucacu

SEQ ID NO: 276195 - RNA, 19 nt, Homo sapiens
  misc_RNA (1)...(19): siRNA sense strand
gcucaagucacucaaggau

SEQ ID NO: 276196 - RNA, 19 nt, Homo sapiens
  misc_RNA (1)...(19): siRNA sense strand
ugagugacaccaaccagaa

SEQ ID NO: 276197 - RNA, 19 nt, Homo sapiens
  misc_RNA (1)...(19): siRNA sense strand
cagcugcgcaaacacauga

SEQ ID NO: 276198 - RNA, 19 nt, Homo sapiens
  misc_RNA (1)...(19): siRNA sense strand
caccgcugcucaaagagaa

SEQ ID NO: 276199 - RNA, 19 nt, Homo sapiens
  misc_RNA (1)...(19): siRNA sense strand
gcagcaacugucugaguga

SEQ ID NO: 276200 - RNA, 19 nt, Homo sapiens
  misc_RNA (1)...(19): siRNA sense strand
gggaagacugcaccaagga

SEQ ID NO: 276201 - RNA, 19 nt, Homo sapiens
  misc_RNA (1)...(19): siRNA sense strand
ucaagaaggagaagcucaa

SEQ ID NO: 276202 - RNA, 19 nt, Homo sapiens
  misc_RNA (1)...(19): siRNA sense strand
caacgagaaacccuacauc

SEQ ID NO: 276203 - RNA, 19 nt, Homo sapiens
  misc_RNA (1)...(19): siRNA sense strand
agaacaagcagagcaguga

SEQ ID NO: 276204 - RNA, 19 nt, Homo sapiens
  misc_RNA (1)...(19): siRNA sense strand
gagcagcuggugcaucaca

SEQ ID NO: 276205 - RNA, 19 nt, Homo sapiens
  misc_RNA (1)...(19): siRNA sense strand
gcacccacuccaacgagaa

SEQ ID NO: 276206 - RNA, 19 nt, Homo sapiens
  misc_RNA (1)...(19): siRNA sense strand
ggacugccugcacgucaga

SEQ ID NO: 276207 - RNA, 19 nt, Homo sapiens
  misc_RNA (1)...(19): siRNA sense strand
agaaggagaagcucaaguc

SEQ ID NO: 276208 - RNA, 19 nt, Homo sapiens
  misc_RNA (1)...(19): siRNA sense strand
gcacgucagagccaucaag

SEQ ID NO: 276209 - RNA, 19 nt, Homo sapiens
  misc_RNA (1)...(19): siRNA sense strand
ggaugccaguuaggcuuug

SEQ ID NO: 276210 - RNA, 19 nt, Homo sapiens
  misc_RNA (1)...(19): siRNA sense strand
gcuggugcaucacaucaac

SEQ ID NO: 276211 - RNA, 19 nt, Homo sapiens
  misc_RNA (1)...(19): siRNA sense strand
gcgagaagccccacaagug

SEQ ID NO: 276212 - RNA, 19 nt, Homo sapiens
  misc_RNA (1)...(19): siRNA sense strand
gcgccaagcaccagaaucg

SEQ ID NO: 276213 - RNA, 19 nt, Homo sapiens
  misc_RNA (1)...(19): siRNA sense strand
gaagcucaagucacucaag

SEQ ID NO: 276214 - RNA, 19 nt, Homo sapiens
  misc_RNA (1)...(19): siRNA sense strand
ucaacccugucgccauuca

SEQ ID NO: 276215 - RNA, 19 nt, Homo sapiens
  misc_RNA (1)...(19): siRNA sense strand
ggagaagaaggaguuugug

SEQ ID NO: 276216 - RNA, 19 nt, Homo sapiens
  misc_RNA (1)...(19): siRNA sense strand
ggaggacgaccuggugcuu

SEQ ID NO: 276217 - RNA, 19 nt, Homo sapiens
  misc_RNA (1)...(19): siRNA sense strand
caggcugcaccaagagaua

SEQ ID NO: 276218 - RNA, 19 nt, Homo sapiens
  misc_RNA (1)...(19): siRNA sense strand
cgagcgaggugaccaugcu

SEQ ID NO: 276219 - RNA, 19 nt, Homo sapiens
  misc_RNA (1)...(19): siRNA sense strand
cagcagcaacugucugagu

SEQ ID NO: 276220 - RNA, 19 nt, Homo sapiens
  misc_RNA (1)...(19): siRNA sense strand
uccugaacaugaugaccua

SEQ ID NO: 276221 - RNA, 19 nt, Homo sapiens
  misc_RNA (1)...(19): siRNA sense strand
gcacaccgcugcucaaaga

SEQ ID NO: 276222 - RNA, 19 nt, Homo sapiens
  misc_RNA (1)...(19): siRNA sense strand
ucaagucacucaaggauuc

SEQ ID NO: 276223 - RNA, 19 nt, Homo sapiens
  misc_RNA (1)...(19): siRNA sense strand
gcacgagggcugcaacaaa

SEQ ID NO: 276224 - RNA, 19 nt, Homo sapiens
  misc_RNA (1)...(19): siRNA sense strand
gcaaacacaugaccaccau

SEQ ID NO: 276225 - RNA, 19 nt, Homo sapiens
  misc_RNA (1)...(19): siRNA sense strand
ccaagaagcagcgcaauga

SEQ ID NO: 276226 - RNA, 19 nt, Homo sapiens
  misc_RNA (1)...(19): siRNA sense strand
gcacuggcuucucugacaa

SEQ ID NO: 276227 - RNA, 19 nt, Homo sapiens
  misc_RNA (1)...(19): siRNA sense strand
cgucaacccugucgccauu

SEQ ID NO: 276228 - RNA, 19 nt, Homo sapiens
  misc_RNA (1)...(19): siRNA sense strand
cagacgacguggugcagua

SEQ ID NO: 276229 - RNA, 19 nt, Homo sapiens
  misc_RNA (1)...(19): siRNA sense strand
ggagaagccauaugugugu

SEQ ID NO: 276230 - RNA, 19 nt, Homo sapiens
  misc_RNA (1)...(19): siRNA sense strand
uggcugaccucaaggaaga

SEQ ID NO: 276231 - RNA, 19 nt, Homo sapiens
  misc_RNA (1)...(19): siRNA sense strand
gcccucaccuccaucaaug

SEQ ID NO: 276232 - RNA, 19 nt, Homo sapiens
  misc_RNA (1)...(19): siRNA sense strand
gcgagaacguggcgaugga

SEQ ID NO: 276233 - RNA, 19 nt, Homo sapiens
  misc_RNA (1)...(19): siRNA sense strand
gcaacaaagccuucuccaa

SEQ ID NO: 276234 - RNA, 19 nt, Homo sapiens
  misc_RNA (1)...(19): siRNA sense strand
aggcugagguggucaucua

SEQ ID NO: 276235 - RNA, 19 nt, Homo sapiens
  misc_RNA (1)...(19): siRNA sense strand
gcaccaagagauacacaga

SEQ ID NO: 276236 - RNA, 19 nt, Homo sapiens
  misc_RNA (1)...(19): siRNA sense strand
uggagaaccugaagacaca

SEQ ID NO: 276237 - RNA, 19 nt, Homo sapiens
  misc_RNA (1)...(19): siRNA sense strand
gaaggagaagcucaaguca

SEQ ID NO: 276238 - RNA, 19 nt, Homo sapiens
  misc_RNA (1)...(19): siRNA sense strand
gagaagaaggaguuugugu

SEQ ID NO: 276239 - RNA, 19 nt, Homo sapiens
  misc_RNA (1)...(19): siRNA sense strand
gagaagcucaagucacuca

SEQ ID NO: 276240 - RNA, 19 nt, Homo sapiens
  misc_RNA (1)...(19): siRNA sense strand
gggagaagaaggaguuugu

SEQ ID NO: 276241 - RNA, 19 nt, Homo sapiens
  misc_RNA (1)...(19): siRNA sense strand
cacgagggcugcaacaaag

SEQ ID NO: 276242 - RNA, 19 nt, Homo sapiens
  misc_RNA (1)...(19): siRNA sense strand
aggagcagcuggugcauca

SEQ ID NO: 276243 - RNA, 19 nt, Homo sapiens
  misc_RNA (1)...(19): siRNA sense strand
aggagaagcucaagucacu

SEQ ID NO: 276244 - RNA, 19 nt, Homo sapiens
  misc_RNA (1)...(19): siRNA sense strand
gcucaagucacucaaggau

SEQ ID NO: 276245 - RNA, 19 nt, Homo sapiens
  misc_RNA (1)...(19): siRNA sense strand
ugagugacaccaaccagaa

SEQ ID NO: 276246 - RNA, 19 nt, Homo sapiens
  misc_RNA (1)...(19): siRNA sense strand
cagcugcgcaaacacauga

SEQ ID NO: 276247 - RNA, 19 nt, Homo sapiens
  misc_RNA (1)...(19): siRNA sense strand
caccgcugcucaaagagaa

SEQ ID NO: 276248 - RNA, 19 nt, Homo sapiens
  misc_RNA (1)...(19): siRNA sense strand
gcagcaacugucugaguga

SEQ ID NO: 276249 - RNA, 19 nt, Homo sapiens
  misc_RNA (1)...(19): siRNA sense strand
gggaagacugcaccaagga

SEQ ID NO: 276250 - RNA, 19 nt, Homo sapiens
  misc_RNA (1)...(19): siRNA sense strand
ucaagaaggagaagcucaa

SEQ ID NO: 276251 - RNA, 19 nt, Homo sapiens
  misc_RNA (1)...(19): siRNA sense strand
caacgagaaacccuacauc

SEQ ID NO: 276252 - RNA, 19 nt, Homo sapiens
  misc_RNA (1)...(19): siRNA sense strand
agaacaagcagagcaguga

SEQ ID NO: 276253 - RNA, 19 nt, Homo sapiens
  misc_RNA (1)...(19): siRNA sense strand
gagcagcuggugcaucaca

SEQ ID NO: 276254 - RNA, 19 nt, Homo sapiens
  misc_RNA (1)...(19): siRNA sense strand
gcacccacuccaacgagaa

SEQ ID NO: 276255 - RNA, 19 nt, Homo sapiens
  misc_RNA (1)...(19): siRNA sense strand
ggacugccugcacgucaga

SEQ ID NO: 276256 - RNA, 19 nt, Homo sapiens
  misc_RNA (1)...(19): siRNA sense strand
agaaggagaagcucaaguc

SEQ ID NO: 276257 - RNA, 19 nt, Homo sapiens
  misc_RNA (1)...(19): siRNA sense strand
gcacgucagagccaucaag

SEQ ID NO: 276258 - RNA, 19 nt, Homo sapiens
  misc_RNA (1)...(19): siRNA sense strand
ggaugccaguuaggcuuug

SEQ ID NO: 276259 - RNA, 19 nt, Homo sapiens
  misc_RNA (1)...(19): siRNA sense strand
gcuggugcaucacaucaac

SEQ ID NO: 276260 - RNA, 19 nt, Homo sapiens
  misc_RNA (1)...(19): siRNA sense strand
gcgagaagccccacaagug

SEQ ID NO: 276261 - RNA, 19 nt, Homo sapiens
  misc_RNA (1)...(19): siRNA sense strand
gcgccaagcaccagaaucg

SEQ ID NO: 276262 - RNA, 19 nt, Homo sapiens
  misc_RNA (1)...(19): siRNA sense strand
gaagcucaagucacucaag

SEQ ID NO: 276263 - RNA, 19 nt, Homo sapiens
  misc_RNA (1)...(19): siRNA sense strand
ucaacccugucgccauuca

SEQ ID NO: 276264 - RNA, 19 nt, Homo sapiens
  misc_RNA (1)...(19): siRNA sense strand
ggagaagaaggaguuugug

SEQ ID NO: 276265 - RNA, 19 nt, Homo sapiens
  misc_RNA (1)...(19): siRNA sense strand
ggaggacgaccuggugcuu

SEQ ID NO: 276266 - RNA, 19 nt, Homo sapiens
  misc_RNA (1)...(19): siRNA sense strand
caggcugcaccaagagaua

SEQ ID NO: 276267 - RNA, 19 nt, Homo sapiens
  misc_RNA (1)...(19): siRNA sense strand
cgagcgaggugaccaugcu

SEQ ID NO: 276268 - RNA, 19 nt, Homo sapiens
  misc_RNA (1)...(19): siRNA sense strand
cagcagcaacugucugagu

SEQ ID NO: 276269 - RNA, 19 nt, Homo sapiens
  misc_RNA (1)...(19): siRNA sense strand
ggagucaccugcaucauuu

SEQ ID NO: 276270 - RNA, 19 nt, Homo sapiens
  misc_RNA (1)...(19): siRNA sense strand
gaaaguccaucucagcauu

SEQ ID NO: 276271 - RNA, 19 nt, Homo sapiens
  misc_RNA (1)...(19): siRNA sense strand
cgagagagcugcagaauac

SEQ ID NO: 276272 - RNA, 19 nt, Homo sapiens
  misc_RNA (1)...(19): siRNA sense strand
gguaacaacuccuaugaug

SEQ ID NO: 276273 - RNA, 19 nt, Homo sapiens
  misc_RNA (1)...(19): siRNA sense strand
ucaaagaaaucuacaguca

SEQ ID NO: 276274 - RNA, 19 nt, Homo sapiens
  misc_RNA (1)...(19): siRNA sense strand
ggaggaugcugauaaggaa

SEQ ID NO: 276275 - RNA, 19 nt, Homo sapiens
  misc_RNA (1)...(19): siRNA sense strand
caaccuggcugacuccauu

SEQ ID NO: 276276 - RNA, 19 nt, Homo sapiens
  misc_RNA (1)...(19): siRNA sense strand
gaaaugugcugcaguccau

SEQ ID NO: 276277 - RNA, 19 nt, Homo sapiens
  misc_RNA (1)...(19): siRNA sense strand
guucaaggcuaucaucuau

SEQ ID NO: 276278 - RNA, 19 nt, Homo sapiens
  misc_RNA (1)...(19): siRNA sense strand
ggacugcggccucuucuaa

SEQ ID NO: 276279 - RNA, 19 nt, Homo sapiens
  misc_RNA (1)...(19): siRNA sense strand
cagaauaccagcuuaauga

SEQ ID NO: 276280 - RNA, 19 nt, Homo sapiens
  misc_RNA (1)...(19): siRNA sense strand
cagcauauguaaccacaaa

SEQ ID NO: 276281 - RNA, 19 nt, Homo sapiens
  misc_RNA (1)...(19): siRNA sense strand
gaagaucauucaccaggau

SEQ ID NO: 276282 - RNA, 19 nt, Homo sapiens
  misc_RNA (1)...(19): siRNA sense strand
aaagaaaucuacagucaca

SEQ ID NO: 276283 - RNA, 19 nt, Homo sapiens
  misc_RNA (1)...(19): siRNA sense strand
gcgaaaagaugucaaagaa

SEQ ID NO: 276284 - RNA, 19 nt, Homo sapiens
  misc_RNA (1)...(19): siRNA sense strand
acaaagaacuggccaagag

SEQ ID NO: 276285 - RNA, 19 nt, Homo sapiens
  misc_RNA (1)...(19): siRNA sense strand
gggcagagauccgagagaa

SEQ ID NO: 276286 - RNA, 19 nt, Homo sapiens
  misc_RNA (1)...(19): siRNA sense strand
gguggaagaugacgaagug

SEQ ID NO: 276287 - RNA, 19 nt, Homo sapiens
  misc_RNA (1)...(19): siRNA sense strand
gcaggaggaugcugauaag

SEQ ID NO: 276288 - RNA, 19 nt, Homo sapiens
  misc_RNA (1)...(19): siRNA sense strand
ccaaggagcuagaaaagaa

SEQ ID NO: 276289 - RNA, 19 nt, Homo sapiens
  misc_RNA (1)...(19): siRNA sense strand
uaacaacuccuaugaugau

SEQ ID NO: 276290 - RNA, 19 nt, Homo sapiens
  misc_RNA (1)...(19): siRNA sense strand
ggauggcuauucaccagaa

SEQ ID NO: 276291 - RNA, 19 nt, Homo sapiens
  misc_RNA (1)...(19): siRNA sense strand
gaaaucuacagucacauga

SEQ ID NO: 276292 - RNA, 19 nt, Homo sapiens
  misc_RNA (1)...(19): siRNA sense strand
gcauauguaaccacaaauu

SEQ ID NO: 276293 - RNA, 19 nt, Homo sapiens
  misc_RNA (1)...(19): siRNA sense strand
cugaguaccucccuaguga

SEQ ID NO: 276294 - RNA, 19 nt, Homo sapiens
  misc_RNA (1)...(19): siRNA sense strand
gcuaucaucuauggaaaug

SEQ ID NO: 276295 - RNA, 19 nt, Homo sapiens
  misc_RNA (1)...(19): siRNA sense strand
cacagaaugucaaauuugu

SEQ ID NO: 276296 - RNA, 19 nt, Homo sapiens
  misc_RNA (1)...(19): siRNA sense strand
gcagaauaccagcuuaaug

SEQ ID NO: 276297 - RNA, 19 nt, Homo sapiens
  misc_RNA (1)...(19): siRNA sense strand
cuuacuaccugaaccaauu

SEQ ID NO: 276298 - RNA, 19 nt, Homo sapiens
  misc_RNA (1)...(19): siRNA sense strand
uuaaugacuccgcaucuua

SEQ ID NO: 276299 - RNA, 19 nt, Homo sapiens
  misc_RNA (1)...(19): siRNA sense strand
ucaaggcuaucaucuaugg

SEQ ID NO: 276300 - RNA, 19 nt, Homo sapiens
  misc_RNA (1)...(19): siRNA sense strand
uaucaucuauggaaaugug

SEQ ID NO: 276301 - RNA, 19 nt, Homo sapiens
  misc_RNA (1)...(19): siRNA sense strand
aagaaugccuggaguucaa

SEQ ID NO: 276302 - RNA, 19 nt, Homo sapiens
  misc_RNA (1)...(19): siRNA sense strand
ggaagaugacgaagugaau

SEQ ID NO: 276303 - RNA, 19 nt, Homo sapiens
  misc_RNA (1)...(19): siRNA sense strand
gggagucaccugcaucauu

SEQ ID NO: 276304 - RNA, 19 nt, Homo sapiens
  misc_RNA (1)...(19): siRNA sense strand
gaaagagcaccaucgucaa

SEQ ID NO: 276305 - RNA, 19 nt, Homo sapiens
  misc_RNA (1)...(19): siRNA sense strand
gaauuacagacccugagua

SEQ ID NO: 276306 - RNA, 19 nt, Homo sapiens
  misc_RNA (1)...(19): siRNA sense strand
ucaccaggauggcuauuca

SEQ ID NO: 276307 - RNA, 19 nt, Homo sapiens
  misc_RNA (1)...(19): siRNA sense strand
guaacaacuccuaugauga

SEQ ID NO: 276308 - RNA, 19 nt, Homo sapiens
  misc_RNA (1)...(19): siRNA sense strand
gcagagauccgagagaaag

SEQ ID NO: 276309 - RNA, 19 nt, Homo sapiens
  misc_RNA (1)...(19): siRNA sense strand
gaagaaugccuggaguuca

SEQ ID NO: 276310 - RNA, 19 nt, Homo sapiens
  misc_RNA (1)...(19): siRNA sense strand
ccacacugggcaucgauua

SEQ ID NO: 276311 - RNA, 19 nt, Homo sapiens
  misc_RNA (1)...(19): siRNA sense strand
uaaagagccaguuccuuga

SEQ ID NO: 276312 - RNA, 19 nt, Homo sapiens
  misc_RNA (1)...(19): siRNA sense strand
aaagagcaccaucgucaaa

SEQ ID NO: 276313 - RNA, 19 nt, Homo sapiens
  misc_RNA (1)...(19): siRNA sense strand
cuacagauacacagaaugu

SEQ ID NO: 276314 - RNA, 19 nt, Homo sapiens
  misc_RNA (1)...(19): siRNA sense strand
guaccucccuagugagcaa

SEQ ID NO: 276315 - RNA, 19 nt, Homo sapiens
  misc_RNA (1)...(19): siRNA sense strand
cgaagugaaucguaugcau

SEQ ID NO: 276316 - RNA, 19 nt, Homo sapiens
  misc_RNA (1)...(19): siRNA sense strand
acacagaaugucaaauuug

SEQ ID NO: 276317 - RNA, 19 nt, Homo sapiens
  misc_RNA (1)...(19): siRNA sense strand
gcaccaucgucaaacagau

SEQ ID NO: 276318 - RNA, 19 nt, Homo sapiens
  misc_RNA (1)...(19): siRNA sense strand
gcuccgauccagagucaaa

SEQ ID NO: 276319 - RNA, 19 nt, Homo sapiens
  misc_RNA (1)...(19): siRNA sense strand
gcaugagucuuugcaucug

SEQ ID NO: 276320 - RNA, 19 nt, Homo sapiens
  misc_RNA (1)...(19): siRNA sense strand
gaagaugacgaagugaauc

SEQ ID NO: 276321 - RNA, 19 nt, Homo sapiens
  misc_RNA (1)...(19): siRNA sense strand
ugaugcaguuacagauauu

SEQ ID NO: 276322 - RNA, 19 nt, Homo sapiens
  misc_RNA (1)...(19): siRNA sense strand
gugcuccgauccagaguca

SEQ ID NO: 276323 - RNA, 19 nt, Homo sapiens
  misc_RNA (1)...(19): siRNA sense strand
cuacuuccauuguccucuu

SEQ ID NO: 276324 - RNA, 19 nt, Homo sapiens
  misc_RNA (1)...(19): siRNA sense strand
ccucagugccuaugauaug

SEQ ID NO: 276325 - RNA, 19 nt, Homo sapiens
  misc_RNA (1)...(19): siRNA sense strand
gauccgagagaaagaagug

SEQ ID NO: 276326 - RNA, 19 nt, Homo sapiens
  misc_RNA (1)...(19): siRNA sense strand
cagaaugucaaauuugugu

SEQ ID NO: 276327 - RNA, 19 nt, Homo sapiens
  misc_RNA (1)...(19): siRNA sense strand
caagagguccaaggagcua

SEQ ID NO: 276328 - RNA, 19 nt, Homo sapiens
  misc_RNA (1)...(19): siRNA sense strand
gaugguaacaacuccuaug

SEQ ID NO: 276329 - RNA, 19 nt, Homo sapiens
  misc_RNA (1)...(19): siRNA sense strand
uugaugcaguuacagauau

SEQ ID NO: 276330 - RNA, 19 nt, Homo sapiens
  misc_RNA (1)...(19): siRNA sense strand
ggcgacagcucaacaaccu

SEQ ID NO: 276331 - RNA, 19 nt, Homo sapiens
  misc_RNA (1)...(19): siRNA sense strand
gaugcaguuacagauauua

SEQ ID NO: 276332 - RNA, 19 nt, Homo sapiens
  misc_RNA (1)...(19): siRNA sense strand
gcauuuguuuuccagagua

SEQ ID NO: 276333 - RNA, 19 nt, Homo sapiens
  misc_RNA (1)...(19): siRNA sense strand
uuacuaccugaaccaauua

SEQ ID NO: 276334 - RNA, 19 nt, Homo sapiens
  misc_RNA (1)...(19): siRNA sense strand
gcccucagugccuaugaua

SEQ ID NO: 276335 - RNA, 19 nt, Homo sapiens
  misc_RNA (1)...(19): siRNA sense strand
cauauguaaccacaaauuc

SEQ ID NO: 276336 - RNA, 19 nt, Homo sapiens
  misc_RNA (1)...(19): siRNA sense strand
ggaguucaaggcuaucauc

SEQ ID NO: 276337 - RNA, 19 nt, Homo sapiens
  misc_RNA (1)...(19): siRNA sense strand
acagauacacagaauguca

SEQ ID NO: 276338 - RNA, 19 nt, Homo sapiens
  misc_RNA (1)...(19): siRNA sense strand
gagggagucaccugcauca

SEQ ID NO: 276339 - RNA, 19 nt, Homo sapiens
  misc_RNA (1)...(19): siRNA sense strand
cuaccugaaccaauuagaa

SEQ ID NO: 276340 - RNA, 19 nt, Homo sapiens
  misc_RNA (1)...(19): siRNA sense strand
ucgagagagcugcagaaua

SEQ ID NO: 276341 - RNA, 19 nt, Homo sapiens
  misc_RNA (1)...(19): siRNA sense strand
cagaagaaugccuggaguu

SEQ ID NO: 276342 - RNA, 19 nt, Homo sapiens
  misc_RNA (1)...(19): siRNA sense strand
caaggacugcggccucuuc

SEQ ID NO: 276343 - RNA, 19 nt, Homo sapiens
  misc_RNA (1)...(19): siRNA sense strand
agaaaucuacagucacaug

SEQ ID NO: 276344 - RNA, 19 nt, Homo sapiens
  misc_RNA (1)...(19): siRNA sense strand
gaauaccagcuuaaugacu

SEQ ID NO: 276345 - RNA, 19 nt, Homo sapiens
  misc_RNA (1)...(19): siRNA sense strand
gacaaagaacuggccaaga

SEQ ID NO: 276346 - RNA, 19 nt, Homo sapiens
  misc_RNA (1)...(19): siRNA sense strand
ccauuguccucuuucucaa

SEQ ID NO: 276347 - RNA, 19 nt, Homo sapiens
  misc_RNA (1)...(19): siRNA sense strand
cuuaaugacuccgcaucuu

SEQ ID NO: 276348 - RNA, 19 nt, Homo sapiens
  misc_RNA (1)...(19): siRNA sense strand
ugcaggaggaugcugauaa

SEQ ID NO: 276349 - RNA, 19 nt, Homo sapiens
  misc_RNA (1)...(19): siRNA sense strand
caugagucuuugcaucugu

SEQ ID NO: 276350 - RNA, 19 nt, Homo sapiens
  misc_RNA (1)...(19): siRNA sense strand
uuacauaaagagccaguuc

SEQ ID NO: 276351 - RNA, 19 nt, Homo sapiens
  misc_RNA (1)...(19): siRNA sense strand
guccaucucagcauuuguu

SEQ ID NO: 276352 - RNA, 19 nt, Homo sapiens
  misc_RNA (1)...(19): siRNA sense strand
gcugguggaagaugacgaa

SEQ ID NO: 276353 - RNA, 19 nt, Homo sapiens
  misc_RNA (1)...(19): siRNA sense strand
ccagugcugaggacaaaga

SEQ ID NO: 276354 - RNA, 19 nt, Homo sapiens
  misc_RNA (1)...(19): siRNA sense strand
aaaguccaucucagcauuu

SEQ ID NO: 276355 - RNA, 19 nt, Homo sapiens
  misc_RNA (1)...(19): siRNA sense strand
auaaggaagccaagacugu

SEQ ID NO: 276356 - RNA, 19 nt, Homo sapiens
  misc_RNA (1)...(19): siRNA sense strand
agagcaccaucgucaaaca

SEQ ID NO: 276357 - RNA, 19 nt, Homo sapiens
  misc_RNA (1)...(19): siRNA sense strand
aagugaaucguaugcauga

SEQ ID NO: 276358 - RNA, 19 nt, Homo sapiens
  misc_RNA (1)...(19): siRNA sense strand
auauggugcugguggaaga

SEQ ID NO: 276359 - RNA, 19 nt, Homo sapiens
  misc_RNA (1)...(19): siRNA sense strand
caucgauuaugcugaacca

SEQ ID NO: 276360 - RNA, 19 nt, Homo sapiens
  misc_RNA (1)...(19): siRNA sense strand
cagauacacagaaugucaa

SEQ ID NO: 276361 - RNA, 19 nt, Homo sapiens
  misc_RNA (1)...(19): siRNA sense strand
uuacagacccugaguaccu

SEQ ID NO: 276362 - RNA, 19 nt, Homo sapiens
  misc_RNA (1)...(19): siRNA sense strand
gagcucguggaggucauua

SEQ ID NO: 276363 - RNA, 19 nt, Homo sapiens
  misc_RNA (1)...(19): siRNA sense strand
agaguaugaugguaacaac

SEQ ID NO: 276364 - RNA, 19 nt, Homo sapiens
  misc_RNA (1)...(19): siRNA sense strand
agccagugcugaggacaaa

SEQ ID NO: 276365 - RNA, 19 nt, Homo sapiens
  misc_RNA (1)...(19): siRNA sense strand
ugacuccgcaucuuacuac

SEQ ID NO: 276366 - RNA, 19 nt, Homo sapiens
  misc_RNA (1)...(19): siRNA sense strand
gagccagugcugaggacaa

SEQ ID NO: 276367 - RNA, 19 nt, Homo sapiens
  misc_RNA (1)...(19): siRNA sense strand
cagaguaugaugguaacaa

SEQ ID NO: 276368 - RNA, 19 nt, Homo sapiens
  misc_RNA (1)...(19): siRNA sense strand
aggcuaucaucuauggaaa

SEQ ID NO: 276369 - RNA, 19 nt, Homo sapiens
  misc_RNA (1)...(19): siRNA sense strand
ggaaauacauaucgaauga

SEQ ID NO: 276370 - RNA, 19 nt, Homo sapiens
  misc_RNA (1)...(19): siRNA sense strand
aaacugaacugcagaauuu

SEQ ID NO: 276371 - RNA, 19 nt, Homo sapiens
  misc_RNA (1)...(19): siRNA sense strand
gcacuuaucucauuuaaca

SEQ ID NO: 276372 - RNA, 19 nt, Homo sapiens
  misc_RNA (1)...(19): siRNA sense strand
caagaugacuuugacauua

SEQ ID NO: 276373 - RNA, 19 nt, Homo sapiens
  misc_RNA (1)...(19): siRNA sense strand
uaacaaaacuggcucauua

SEQ ID NO: 276374 - RNA, 19 nt, Homo sapiens
  misc_RNA (1)...(19): siRNA sense strand
caaccaaacugauccaaga

SEQ ID NO: 276375 - RNA, 19 nt, Homo sapiens
  misc_RNA (1)...(19): siRNA sense strand
gaucauguuuggcauuaaa

SEQ ID NO: 276376 - RNA, 19 nt, Homo sapiens
  misc_RNA (1)...(19): siRNA sense strand
gcucucaccugauagauga

SEQ ID NO: 276377 - RNA, 19 nt, Homo sapiens
  misc_RNA (1)...(19): siRNA sense strand
gaaaugcuguuccaaggau

SEQ ID NO: 276378 - RNA, 19 nt, Homo sapiens
  misc_RNA (1)...(19): siRNA sense strand
gaacugggccaccuuguug

SEQ ID NO: 276379 - RNA, 19 nt, Homo sapiens
  misc_RNA (1)...(19): siRNA sense strand
ccacugacauuaagcauuc

SEQ ID NO: 276380 - RNA, 19 nt, Homo sapiens
  misc_RNA (1)...(19): siRNA sense strand
caugaagggugaaauaguu

SEQ ID NO: 276381 - RNA, 19 nt, Homo sapiens
  misc_RNA (1)...(19): siRNA sense strand
gcagauuauucuaaacuug

SEQ ID NO: 276382 - RNA, 19 nt, Homo sapiens
  misc_RNA (1)...(19): siRNA sense strand
gaaagggacuggaaaacuu

SEQ ID NO: 276383 - RNA, 19 nt, Homo sapiens
  misc_RNA (1)...(19): siRNA sense strand
uaucagacaugccauaaca

SEQ ID NO: 276384 - RNA, 19 nt, Homo sapiens
  misc_RNA (1)...(19): siRNA sense strand
gaaguauacucaguucaau

SEQ ID NO: 276385 - RNA, 19 nt, Homo sapiens
  misc_RNA (1)...(19): siRNA sense strand
ggacguggauguggugguu

SEQ ID NO: 276386 - RNA, 19 nt, Homo sapiens
  misc_RNA (1)...(19): siRNA sense strand
ggagaagaauggaaauaac

SEQ ID NO: 276387 - RNA, 19 nt, Homo sapiens
  misc_RNA (1)...(19): siRNA sense strand
uuaaacacgucccauuuga

SEQ ID NO: 276388 - RNA, 19 nt, Homo sapiens
  misc_RNA (1)...(19): siRNA sense strand
ucaaaucuaucgaucuuca

SEQ ID NO: 276389 - RNA, 19 nt, Homo sapiens
  misc_RNA (1)...(19): siRNA sense strand
gaaccuccgaguugcaaua

SEQ ID NO: 276390 - RNA, 19 nt, Homo sapiens
  misc_RNA (1)...(19): siRNA sense strand
gaauggaaauaaccgaaag

SEQ ID NO: 276391 - RNA, 19 nt, Homo sapiens
  misc_RNA (1)...(19): siRNA sense strand
gcccagagcauccuaagaa

SEQ ID NO: 276392 - RNA, 19 nt, Homo sapiens
  misc_RNA (1)...(19): siRNA sense strand
cuaguccuguuuccaaaua

SEQ ID NO: 276393 - RNA, 19 nt, Homo sapiens
  misc_RNA (1)...(19): siRNA sense strand
uaagaaguauacucaguuc

SEQ ID NO: 276394 - RNA, 19 nt, Homo sapiens
  misc_RNA (1)...(19): siRNA sense strand
gacauuaagcauuccauaa

SEQ ID NO: 276395 - RNA, 19 nt, Homo sapiens
  misc_RNA (1)...(19): siRNA sense strand
caugcuggcuguaugauug

SEQ ID NO: 276396 - RNA, 19 nt, Homo sapiens
  misc_RNA (1)...(19): siRNA sense strand
ggaagucagugggaccauu

SEQ ID NO: 276397 - RNA, 19 nt, Homo sapiens
  misc_RNA (1)...(19): siRNA sense strand
uggaugcacuuaucucauu

SEQ ID NO: 276398 - RNA, 19 nt, Homo sapiens
  misc_RNA (1)...(19): siRNA sense strand
gcauguggcuaggugauga

SEQ ID NO: 276399 - RNA, 19 nt, Homo sapiens
  misc_RNA (1)...(19): siRNA sense strand
ugaacuugauguuguggua

SEQ ID NO: 276400 - RNA, 19 nt, Homo sapiens
  misc_RNA (1)...(19): siRNA sense strand
cagcaugaagggugaaaua

SEQ ID NO: 276401 - RNA, 19 nt, Homo sapiens
  misc_RNA (1)...(19): siRNA sense strand
ggaugcacuuaucucauuu

SEQ ID NO: 276402 - RNA, 19 nt, Homo sapiens
  misc_RNA (1)...(19): siRNA sense strand
guggcuaggugaugaugua

SEQ ID NO: 276403 - RNA, 19 nt, Homo sapiens
  misc_RNA (1)...(19): siRNA sense strand
aaacuucucucagccaaga

SEQ ID NO: 276404 - RNA, 19 nt, Homo sapiens
  misc_RNA (1)...(19): siRNA sense strand
ccgaucauguuuggcauua

SEQ ID NO: 276405 - RNA, 19 nt, Homo sapiens
  misc_RNA (1)...(19): siRNA sense strand
cauccaagcugcgaaacuu

SEQ ID NO: 276406 - RNA, 19 nt, Homo sapiens
  misc_RNA (1)...(19): siRNA sense strand
ucucaaaucuaucgaucuu

SEQ ID NO: 276407 - RNA, 19 nt, Homo sapiens
  misc_RNA (1)...(19): siRNA sense strand
guacccuuguucaaagaua

SEQ ID NO: 276408 - RNA, 19 nt, Homo sapiens
  misc_RNA (1)...(19): siRNA sense strand
gaacaccugugaucaaccu

SEQ ID NO: 276409 - RNA, 19 nt, Homo sapiens
  misc_RNA (1)...(19): siRNA sense strand
gaagccugauaucaugauu

SEQ ID NO: 276410 - RNA, 19 nt, Homo sapiens
  misc_RNA (1)...(19): siRNA sense strand
ggaaucggugguggaauua

SEQ ID NO: 276411 - RNA, 19 nt, Homo sapiens
  misc_RNA (1)...(19): siRNA sense strand
gaaauuuggccaaggaaag

SEQ ID NO: 276412 - RNA, 19 nt, Homo sapiens
  misc_RNA (1)...(19): siRNA sense strand
ccugaagccugauaucaug

SEQ ID NO: 276413 - RNA, 19 nt, Homo sapiens
  misc_RNA (1)...(19): siRNA sense strand
auacucaguucaauccuaa

SEQ ID NO: 276414 - RNA, 19 nt, Homo sapiens
  misc_RNA (1)...(19): siRNA sense strand
guuaagaaguauacucagu

SEQ ID NO: 276415 - RNA, 19 nt, Homo sapiens
  misc_RNA (1)...(19): siRNA sense strand
uagugaagcugccagaugu

SEQ ID NO: 276416 - RNA, 19 nt, Homo sapiens
  misc_RNA (1)...(19): siRNA sense strand
aggaaucggugguggaauu

SEQ ID NO: 276417 - RNA, 19 nt, Homo sapiens
  misc_RNA (1)...(19): siRNA sense strand
agacaaugauggcaacugu

SEQ ID NO: 276418 - RNA, 19 nt, Homo sapiens
  misc_RNA (1)...(19): siRNA sense strand
ggaacucuguggaccuuag

SEQ ID NO: 276419 - RNA, 19 nt, Homo sapiens
  misc_RNA (1)...(19): siRNA sense strand
gaaggaauugugcugcauu

SEQ ID NO: 276420 - RNA, 19 nt, Homo sapiens
  misc_RNA (1)...(19): siRNA sense strand
ggaccaugaucgcauccuu

SEQ ID NO: 276421 - RNA, 19 nt, Homo sapiens
  misc_RNA (1)...(19): siRNA sense strand
gaagucagugggaccauug

SEQ ID NO: 276422 - RNA, 19 nt, Homo sapiens
  misc_RNA (1)...(19): siRNA sense strand
gauugaacaagaugacuuu

SEQ ID NO: 276423 - RNA, 19 nt, Homo sapiens
  misc_RNA (1)...(19): siRNA sense strand
gaauuauccaucagcauga

SEQ ID NO: 276424 - RNA, 19 nt, Homo sapiens
  misc_RNA (1)...(19): siRNA sense strand
gaccauugaugacucuauc

SEQ ID NO: 276425 - RNA, 19 nt, Homo sapiens
  misc_RNA (1)...(19): siRNA sense strand
caacacgcaggaucuacua

SEQ ID NO: 276426 - RNA, 19 nt, Homo sapiens
  misc_RNA (1)...(19): siRNA sense strand
aaagagaugguucgaguga

SEQ ID NO: 276427 - RNA, 19 nt, Homo sapiens
  misc_RNA (1)...(19): siRNA sense strand
ggaaauuuggccaaggaaa

SEQ ID NO: 276428 - RNA, 19 nt, Homo sapiens
  misc_RNA (1)...(19): siRNA sense strand
gaaagcugcggguuugugu

SEQ ID NO: 276429 - RNA, 19 nt, Homo sapiens
  misc_RNA (1)...(19): siRNA sense strand
ucagacaugccauaacaaa

SEQ ID NO: 276430 - RNA, 19 nt, Homo sapiens
  misc_RNA (1)...(19): siRNA sense strand
gggacgaaccuccgaguug

SEQ ID NO: 276431 - RNA, 19 nt, Homo sapiens
  misc_RNA (1)...(19): siRNA sense strand
guuaaacacgucccauuug

SEQ ID NO: 276432 - RNA, 19 nt, Homo sapiens
  misc_RNA (1)...(19): siRNA sense strand
agagaugguucgagugaug

SEQ ID NO: 276433 - RNA, 19 nt, Homo sapiens
  misc_RNA (1)...(19): siRNA sense strand
gcagagcagcaccugauau

SEQ ID NO: 276434 - RNA, 19 nt, Homo sapiens
  misc_RNA (1)...(19): siRNA sense strand
ggguuuguguugcuacuug

SEQ ID NO: 276435 - RNA, 19 nt, Homo sapiens
  misc_RNA (1)...(19): siRNA sense strand
ggaacagcuuugggucuug

SEQ ID NO: 276436 - RNA, 19 nt, Homo sapiens
  misc_RNA (1)...(19): siRNA sense strand
ggaaaacuuuguuacacuu

SEQ ID NO: 276437 - RNA, 19 nt, Homo sapiens
  misc_RNA (1)...(19): siRNA sense strand
uauacucaguucaauccua

SEQ ID NO: 276438 - RNA, 19 nt, Homo sapiens
  misc_RNA (1)...(19): siRNA sense strand
agaagggcauugagcauca

SEQ ID NO: 276439 - RNA, 19 nt, Homo sapiens
  misc_RNA (1)...(19): siRNA sense strand
gaagaagggcauugagcau

SEQ ID NO: 276440 - RNA, 19 nt, Homo sapiens
  misc_RNA (1)...(19): siRNA sense strand
caagaacaaagacuacaug

SEQ ID NO: 276441 - RNA, 19 nt, Homo sapiens
  misc_RNA (1)...(19): siRNA sense strand
ggaaggaauugugcugcau

SEQ ID NO: 276442 - RNA, 19 nt, Homo sapiens
  misc_RNA (1)...(19): siRNA sense strand
augaaucccucccuuguga

SEQ ID NO: 276443 - RNA, 19 nt, Homo sapiens
  misc_RNA (1)...(19): siRNA sense strand
guugugaacauccuccaua

SEQ ID NO: 276444 - RNA, 19 nt, Homo sapiens
  misc_RNA (1)...(19): siRNA sense strand
ugaacaagaugacuuugac

SEQ ID NO: 276445 - RNA, 19 nt, Homo sapiens
  misc_RNA (1)...(19): siRNA sense strand
caaggaaagggacuggaaa

SEQ ID NO: 276446 - RNA, 19 nt, Homo sapiens
  misc_RNA (1)...(19): siRNA sense strand
cuuguaaccgugcagauua

SEQ ID NO: 276447 - RNA, 19 nt, Homo sapiens
  misc_RNA (1)...(19): siRNA sense strand
gaacaagaugacuuugaca

SEQ ID NO: 276448 - RNA, 19 nt, Homo sapiens
  misc_RNA (1)...(19): siRNA sense strand
gcauacgccucuggaaugg

SEQ ID NO: 276449 - RNA, 19 nt, Homo sapiens
  misc_RNA (1)...(19): siRNA sense strand
acaguacccuuguucaaag

SEQ ID NO: 276450 - RNA, 19 nt, Homo sapiens
  misc_RNA (1)...(19): siRNA sense strand
uaacauuggaugcacuuau

SEQ ID NO: 276451 - RNA, 19 nt, Homo sapiens
  misc_RNA (1)...(19): siRNA sense strand
gcuaggugaugauguaaaa

SEQ ID NO: 276452 - RNA, 19 nt, Homo sapiens
  misc_RNA (1)...(19): siRNA sense strand
ucagugggaccauugauga

SEQ ID NO: 276453 - RNA, 19 nt, Homo sapiens
  misc_RNA (1)...(19): siRNA sense strand
gcugccagauguccuuaau

SEQ ID NO: 276454 - RNA, 19 nt, Homo sapiens
  misc_RNA (1)...(19): siRNA sense strand
acaccaggcuacacacaau

SEQ ID NO: 276455 - RNA, 19 nt, Homo sapiens
  misc_RNA (1)...(19): siRNA sense strand
gaccaugaucgcauccuuu

SEQ ID NO: 276456 - RNA, 19 nt, Homo sapiens
  misc_RNA (1)...(19): siRNA sense strand
aaggaaauuuggccaagga

SEQ ID NO: 276457 - RNA, 19 nt, Homo sapiens
  misc_RNA (1)...(19): siRNA sense strand
uaagugccuuggccguuga

SEQ ID NO: 276458 - RNA, 19 nt, Homo sapiens
  misc_RNA (1)...(19): siRNA sense strand
gggaacacgucagauugga

SEQ ID NO: 276459 - RNA, 19 nt, Homo sapiens
  misc_RNA (1)...(19): siRNA sense strand
gaugcacuuaucucauuua

SEQ ID NO: 276460 - RNA, 19 nt, Homo sapiens
  misc_RNA (1)...(19): siRNA sense strand
ugacauuaagcauuccaua

SEQ ID NO: 276461 - RNA, 19 nt, Homo sapiens
  misc_RNA (1)...(19): siRNA sense strand
ccugauaucaugauuguuc

SEQ ID NO: 276462 - RNA, 19 nt, Homo sapiens
  misc_RNA (1)...(19): siRNA sense strand
ccaaggaaagggacuggaa

SEQ ID NO: 276463 - RNA, 19 nt, Homo sapiens
  misc_RNA (1)...(19): siRNA sense strand
cauaucgaaugauugaaca

SEQ ID NO: 276464 - RNA, 19 nt, Homo sapiens
  misc_RNA (1)...(19): siRNA sense strand
gcaugaagggugaaauagu

SEQ ID NO: 276465 - RNA, 19 nt, Homo sapiens
  misc_RNA (1)...(19): siRNA sense strand
gagcagcaccugauaucca

SEQ ID NO: 276466 - RNA, 19 nt, Homo sapiens
  misc_RNA (1)...(19): siRNA sense strand
agaaguauacucaguucaa

SEQ ID NO: 276467 - RNA, 19 nt, Homo sapiens
  misc_RNA (1)...(19): siRNA sense strand
acaagaugacuuugacauu

SEQ ID NO: 276468 - RNA, 19 nt, Homo sapiens
  misc_RNA (1)...(19): siRNA sense strand
acuuggcucucaccugaua

SEQ ID NO: 276469 - RNA, 19 nt, Homo sapiens
  misc_RNA (1)...(19): siRNA sense strand
gaaaggaaaucaaggagua

SEQ ID NO: 276470 - RNA, 19 nt, Homo sapiens
  misc_RNA (1)...(19): siRNA sense strand
aaagguggcugucugauaa

SEQ ID NO: 276471 - RNA, 19 nt, Homo sapiens
  misc_RNA (1)...(19): siRNA sense strand
gaaagguggcugucugaua

SEQ ID NO: 276472 - RNA, 19 nt, Homo sapiens
  misc_RNA (1)...(19): siRNA sense strand
ggacaagaaucccuucaag

SEQ ID NO: 276473 - RNA, 19 nt, Homo sapiens
  misc_RNA (1)...(19): siRNA sense strand
agaaggaccuguugaagau

SEQ ID NO: 276474 - RNA, 19 nt, Homo sapiens
  misc_RNA (1)...(19): siRNA sense strand
gagaaggaccuguugaaga

SEQ ID NO: 276475 - RNA, 19 nt, Homo sapiens
  misc_RNA (1)...(19): siRNA sense strand
uggagcagcugaagaaaga

SEQ ID NO: 276476 - RNA, 19 nt, Homo sapiens
  misc_RNA (1)...(19): siRNA sense strand
acacaagaauuccgauuuc

SEQ ID NO: 276477 - RNA, 19 nt, Homo sapiens
  misc_RNA (1)...(19): siRNA sense strand
gagaaagguggcugucuga

SEQ ID NO: 276478 - RNA, 19 nt, Homo sapiens
  misc_RNA (1)...(19): siRNA sense strand
gaauuccgauuuccaaagc

SEQ ID NO: 276479 - RNA, 19 nt, Homo sapiens
  misc_RNA (1)...(19): siRNA sense strand
caagaauuccgauuuccaa

SEQ ID NO: 276480 - RNA, 19 nt, Homo sapiens
  misc_RNA (1)...(19): siRNA sense strand
gcgagaaggaccuguugaa

SEQ ID NO: 276481 - RNA, 19 nt, Homo sapiens
  misc_RNA (1)...(19): siRNA sense strand
gcugaagaaagaagugaaa

SEQ ID NO: 276482 - RNA, 19 nt, Homo sapiens
  misc_RNA (1)...(19): siRNA sense strand
aaacgauccuuuucucaaa

SEQ ID NO: 276483 - RNA, 19 nt, Homo sapiens
  misc_RNA (1)...(19): siRNA sense strand
ccaaagcgggaaaggaaau

SEQ ID NO: 276484 - RNA, 19 nt, Homo sapiens
  misc_RNA (1)...(19): siRNA sense strand
aaacacaagaauuccgauu

SEQ ID NO: 276485 - RNA, 19 nt, Homo sapiens
  misc_RNA (1)...(19): siRNA sense strand
aacacaagaauuccgauuu

SEQ ID NO: 276486 - RNA, 19 nt, Homo sapiens
  misc_RNA (1)...(19): siRNA sense strand
guacguggaggcccaagca

SEQ ID NO: 276487 - RNA, 19 nt, Homo sapiens
  misc_RNA (1)...(19): siRNA sense strand
gaaggaccuguugaagaug

SEQ ID NO: 276488 - RNA, 19 nt, Homo sapiens
  misc_RNA (1)...(19): siRNA sense strand
gagcagcugaagaaagaag

SEQ ID NO: 276489 - RNA, 19 nt, Homo sapiens
  misc_RNA (1)...(19): siRNA sense strand
cgggaaaggaaaucaagga

SEQ ID NO: 276490 - RNA, 19 nt, Homo sapiens
  misc_RNA (1)...(19): siRNA sense strand
cagcgagaaggaccuguug

SEQ ID NO: 276491 - RNA, 19 nt, Homo sapiens
  misc_RNA (1)...(19): siRNA sense strand
gaacggagcuuccaagacu

SEQ ID NO: 276492 - RNA, 19 nt, Homo sapiens
  misc_RNA (1)...(19): siRNA sense strand
caucauauccgcaggcuua

SEQ ID NO: 276493 - RNA, 19 nt, Homo sapiens
  misc_RNA (1)...(19): siRNA sense strand
ggaaaguccucgcugauca

SEQ ID NO: 276494 - RNA, 19 nt, Homo sapiens
  misc_RNA (1)...(19): siRNA sense strand
gcuaugagauguccaagga

SEQ ID NO: 276495 - RNA, 19 nt, Homo sapiens
  misc_RNA (1)...(19): siRNA sense strand
uuucagaccuacuuucuua

SEQ ID NO: 276496 - RNA, 19 nt, Homo sapiens
  misc_RNA (1)...(19): siRNA sense strand
gacauccaguugugaauuu

SEQ ID NO: 276497 - RNA, 19 nt, Homo sapiens
  misc_RNA (1)...(19): siRNA sense strand
gaagauugcucgggaugug

SEQ ID NO: 276498 - RNA, 19 nt, Homo sapiens
  misc_RNA (1)...(19): siRNA sense strand
gaaacgugguuacaagaca

SEQ ID NO: 276499 - RNA, 19 nt, Homo sapiens
  misc_RNA (1)...(19): siRNA sense strand
cgccagcacuuuaugagua

SEQ ID NO: 276500 - RNA, 19 nt, Homo sapiens
  misc_RNA (1)...(19): siRNA sense strand
guacagagcagccaacagu

SEQ ID NO: 276501 - RNA, 19 nt, Homo sapiens
  misc_RNA (1)...(19): siRNA sense strand
gagaaacucagcuacuuug

SEQ ID NO: 276502 - RNA, 19 nt, Homo sapiens
  misc_RNA (1)...(19): siRNA sense strand
guaugugacuggagaacuu

SEQ ID NO: 276503 - RNA, 19 nt, Homo sapiens
  misc_RNA (1)...(19): siRNA sense strand
gaagcauuauuuccaucaa

SEQ ID NO: 276504 - RNA, 19 nt, Homo sapiens
  misc_RNA (1)...(19): siRNA sense strand
gggagucugugacccauca

SEQ ID NO: 276505 - RNA, 19 nt, Homo sapiens
  misc_RNA (1)...(19): siRNA sense strand
gagaaacgugguuacaaga

SEQ ID NO: 276506 - RNA, 19 nt, Homo sapiens
  misc_RNA (1)...(19): siRNA sense strand
agagaaacgugguuacaag

SEQ ID NO: 276507 - RNA, 19 nt, Homo sapiens
  misc_RNA (1)...(19): siRNA sense strand
gcuacgacccaaaucgaua

SEQ ID NO: 276508 - RNA, 19 nt, Homo sapiens
  misc_RNA (1)...(19): siRNA sense strand
gcgugaagcagaagaagaa

SEQ ID NO: 276509 - RNA, 19 nt, Homo sapiens
  misc_RNA (1)...(19): siRNA sense strand
gaaaguccucgcugaucaa

SEQ ID NO: 276510 - RNA, 19 nt, Homo sapiens
  misc_RNA (1)...(19): siRNA sense strand
ggccauacccgauacuuuc

SEQ ID NO: 276511 - RNA, 19 nt, Homo sapiens
  misc_RNA (1)...(19): siRNA sense strand
gggcagagaaacgugguua

SEQ ID NO: 276512 - RNA, 19 nt, Homo sapiens
  misc_RNA (1)...(19): siRNA sense strand
gugguugccuggaagcauu

SEQ ID NO: 276513 - RNA, 19 nt, Homo sapiens
  misc_RNA (1)...(19): siRNA sense strand
caacuggcccaacccaaga

SEQ ID NO: 276514 - RNA, 19 nt, Homo sapiens
  misc_RNA (1)...(19): siRNA sense strand
gccagcacuuuaugaguau

SEQ ID NO: 276515 - RNA, 19 nt, Homo sapiens
  misc_RNA (1)...(19): siRNA sense strand
ggaggaggaggaagaggaa

SEQ ID NO: 276516 - RNA, 19 nt, Homo sapiens
  misc_RNA (1)...(19): siRNA sense strand
uaccuggccucccgaauuc

SEQ ID NO: 276517 - RNA, 19 nt, Homo sapiens
  misc_RNA (1)...(19): siRNA sense strand
gcagagaaacgugguuaca

SEQ ID NO: 276518 - RNA, 19 nt, Homo sapiens
  misc_RNA (1)...(19): siRNA sense strand
gacaucguccugcuuauca

SEQ ID NO: 276519 - RNA, 19 nt, Homo sapiens
  misc_RNA (1)...(19): siRNA sense strand
gauauccgacauccaguug

SEQ ID NO: 276520 - RNA, 19 nt, Homo sapiens
  misc_RNA (1)...(19): siRNA sense strand
agaagcaguugcaggacaa

SEQ ID NO: 276521 - RNA, 19 nt, Homo sapiens
  misc_RNA (1)...(19): siRNA sense strand
ccaaggcggcucggaauga

SEQ ID NO: 276522 - RNA, 19 nt, Homo sapiens
  misc_RNA (1)...(19): siRNA sense strand
ggcggaaagucgugagugu

SEQ ID NO: 276523 - RNA, 19 nt, Homo sapiens
  misc_RNA (1)...(19): siRNA sense strand
cuaccuggccucccgaauu

SEQ ID NO: 276524 - RNA, 19 nt, Homo sapiens
  misc_RNA (1)...(19): siRNA sense strand
ggacauccgggagguguau

SEQ ID NO: 276525 - RNA, 19 nt, Homo sapiens
  misc_RNA (1)...(19): siRNA sense strand
aggcuacagugaacagaaa

SEQ ID NO: 276526 - RNA, 19 nt, Homo sapiens
  misc_RNA (1)...(19): siRNA sense strand
caaggcggcucggaaugau

SEQ ID NO: 276527 - RNA, 19 nt, Homo sapiens
  misc_RNA (1)...(19): siRNA sense strand
gaauuucccgccagcacuu

SEQ ID NO: 276528 - RNA, 19 nt, Homo sapiens
  misc_RNA (1)...(19): siRNA sense strand
cccaagagcgcuacaagga

SEQ ID NO: 276529 - RNA, 19 nt, Homo sapiens
  misc_RNA (1)...(19): siRNA sense strand
gggcuuacuccucugagaa

SEQ ID NO: 276530 - RNA, 19 nt, Homo sapiens
  misc_RNA (1)...(19): siRNA sense strand
cccgauacuuucagaccua

SEQ ID NO: 276531 - RNA, 19 nt, Homo sapiens
  misc_RNA (1)...(19): siRNA sense strand
gggccauacccgauacuuu

SEQ ID NO: 276532 - RNA, 19 nt, Homo sapiens
  misc_RNA (1)...(19): siRNA sense strand
gcagcuggcgggagaagau

SEQ ID NO: 276533 - RNA, 19 nt, Homo sapiens
  misc_RNA (1)...(19): siRNA sense strand
ccacaggauccuaguagug

SEQ ID NO: 276534 - RNA, 19 nt, Homo sapiens
  misc_RNA (1)...(19): siRNA sense strand
ucugacaucguccugcuua

SEQ ID NO: 276535 - RNA, 19 nt, Homo sapiens
  misc_RNA (1)...(19): siRNA sense strand
gauaccgacugcauuuuga

SEQ ID NO: 276536 - RNA, 19 nt, Homo sapiens
  misc_RNA (1)...(19): siRNA sense strand
cgacauccaguugugaauu

SEQ ID NO: 276537 - RNA, 19 nt, Homo sapiens
  misc_RNA (1)...(19): siRNA sense strand
uauccgacauccaguugug

SEQ ID NO: 276538 - RNA, 19 nt, Homo sapiens
  misc_RNA (1)...(19): siRNA sense strand
gagguagagaggagaaaga

SEQ ID NO: 276539 - RNA, 19 nt, Homo sapiens
  misc_RNA (1)...(19): siRNA sense strand
gcucaguucuggacuuucc

SEQ ID NO: 276540 - RNA, 19 nt, Homo sapiens
  misc_RNA (1)...(19): siRNA sense strand
ccaaggagcaacuaaugag

SEQ ID NO: 276541 - RNA, 19 nt, Homo sapiens
  misc_RNA (1)...(19): siRNA sense strand
uggcucaguucuggacuuu

SEQ ID NO: 276542 - RNA, 19 nt, Homo sapiens
  misc_RNA (1)...(19): siRNA sense strand
ggagcuaugagauguccaa

SEQ ID NO: 276543 - RNA, 19 nt, Homo sapiens
  misc_RNA (1)...(19): siRNA sense strand
cagagaaacgugguuacaa

SEQ ID NO: 276544 - RNA, 19 nt, Homo sapiens
  misc_RNA (1)...(19): siRNA sense strand
cauacccgauacuuucaga

SEQ ID NO: 276545 - RNA, 19 nt, Homo sapiens
  misc_RNA (1)...(19): siRNA sense strand
aguccucgcugaucaaugg

SEQ ID NO: 276546 - RNA, 19 nt, Homo sapiens
  misc_RNA (1)...(19): siRNA sense strand
uguguggguuucccuaaug

SEQ ID NO: 276547 - RNA, 19 nt, Homo sapiens
  misc_RNA (1)...(19): siRNA sense strand
ucagcuacuuugagcacaa

SEQ ID NO: 276548 - RNA, 19 nt, Homo sapiens
  misc_RNA (1)...(19): siRNA sense strand
guccaaggagcaacuaaug

SEQ ID NO: 276549 - RNA, 19 nt, Homo sapiens
  misc_RNA (1)...(19): siRNA sense strand
gcagcuguggcggguguua

SEQ ID NO: 276550 - RNA, 19 nt, Homo sapiens
  misc_RNA (1)...(19): siRNA sense strand
ggccucaucuucccaucuc

SEQ ID NO: 276551 - RNA, 19 nt, Homo sapiens
  misc_RNA (1)...(19): siRNA sense strand
gauacuuucagaccuacuu

SEQ ID NO: 276552 - RNA, 19 nt, Homo sapiens
  misc_RNA (1)...(19): siRNA sense strand
gcagaagaagaagcaguug

SEQ ID NO: 276553 - RNA, 19 nt, Homo sapiens
  misc_RNA (1)...(19): siRNA sense strand
gcacuuuaugaguauguga

SEQ ID NO: 276554 - RNA, 19 nt, Homo sapiens
  misc_RNA (1)...(19): siRNA sense strand
agcacaaucuggagacaug

SEQ ID NO: 276555 - RNA, 19 nt, Homo sapiens
  misc_RNA (1)...(19): siRNA sense strand
gggaaaguccucgcugauc

SEQ ID NO: 276556 - RNA, 19 nt, Homo sapiens
  misc_RNA (1)...(19): siRNA sense strand
gacaaacgggagcggaaga

SEQ ID NO: 276557 - RNA, 19 nt, Homo sapiens
  misc_RNA (1)...(19): siRNA sense strand
ugaagcagaagaagaagca

SEQ ID NO: 276558 - RNA, 19 nt, Homo sapiens
  misc_RNA (1)...(19): siRNA sense strand
gaugggcugcgcuccaguu

SEQ ID NO: 276559 - RNA, 19 nt, Homo sapiens
  misc_RNA (1)...(19): siRNA sense strand
ggcuuacuccucugagaaa

SEQ ID NO: 276560 - RNA, 19 nt, Homo sapiens
  misc_RNA (1)...(19): siRNA sense strand
ccaagagcgcuacaaggau

SEQ ID NO: 276561 - RNA, 19 nt, Homo sapiens
  misc_RNA (1)...(19): siRNA sense strand
ccuuggagcuaugagaugu

SEQ ID NO: 276562 - RNA, 19 nt, Homo sapiens
  misc_RNA (1)...(19): siRNA sense strand
aagagagggcuucaagaug

SEQ ID NO: 276563 - RNA, 19 nt, Homo sapiens
  misc_RNA (1)...(19): siRNA sense strand
ugugaagccugggcagaga

SEQ ID NO: 276564 - RNA, 19 nt, Homo sapiens
  misc_RNA (1)...(19): siRNA sense strand
gauccuaguagugucuuga

SEQ ID NO: 276565 - RNA, 19 nt, Homo sapiens
  misc_RNA (1)...(19): siRNA sense strand
agaagaagaagcaguugca

SEQ ID NO: 276566 - RNA, 19 nt, Homo sapiens
  misc_RNA (1)...(19): siRNA sense strand
gagucugugacccaucaua

SEQ ID NO: 276567 - RNA, 19 nt, Homo sapiens
  misc_RNA (1)...(19): siRNA sense strand
gaggagguagagaggagaa

SEQ ID NO: 276568 - RNA, 19 nt, Homo sapiens
  misc_RNA (1)...(19): siRNA sense strand
cagcuacuuugagcacaau

SEQ ID NO: 276569 - RNA, 19 nt, Homo sapiens
  misc_RNA (1)...(19): siRNA sense strand
cccgccagcucuugugguu

SEQ ID NO: 276570 - RNA, 19 nt, Homo sapiens
  misc_RNA (1)...(19): siRNA sense strand
cacaggauccuaguagugu

SEQ ID NO: 276571 - RNA, 19 nt, Homo sapiens
  misc_RNA (1)...(19): siRNA sense strand
uggagcagcagacugauuc

SEQ ID NO: 276572 - RNA, 19 nt, Homo sapiens
  misc_RNA (1)...(19): siRNA sense strand
gcuguguggguuucccuaa

SEQ ID NO: 276573 - RNA, 19 nt, Homo sapiens
  misc_RNA (1)...(19): siRNA sense strand
gcacacaccugaaacaugu

SEQ ID NO: 276574 - RNA, 19 nt, Homo sapiens
  misc_RNA (1)...(19): siRNA sense strand
ccaaacagcagcuagaaua

SEQ ID NO: 276575 - RNA, 19 nt, Homo sapiens
  misc_RNA (1)...(19): siRNA sense strand
gcaaacuccucaauaugau

SEQ ID NO: 276576 - RNA, 19 nt, Homo sapiens
  misc_RNA (1)...(19): siRNA sense strand
ucugcaaacuccucaauau

SEQ ID NO: 276577 - RNA, 19 nt, Homo sapiens
  misc_RNA (1)...(19): siRNA sense strand
gguguucgccugcuuguug

SEQ ID NO: 276578 - RNA, 19 nt, Homo sapiens
  misc_RNA (1)...(19): siRNA sense strand
ugcaaacuccucaauauga

SEQ ID NO: 276579 - RNA, 19 nt, Homo sapiens
  misc_RNA (1)...(19): siRNA sense strand
ucaauaugaucuucuccau

SEQ ID NO: 276580 - RNA, 19 nt, Homo sapiens
  misc_RNA (1)...(19): siRNA sense strand
uguggguccuggugaagua

SEQ ID NO: 276581 - RNA, 19 nt, Homo sapiens
  misc_RNA (1)...(19): siRNA sense strand
gaauacgcccugcucaucu

SEQ ID NO: 276582 - RNA, 19 nt, Homo sapiens
  misc_RNA (1)...(19): siRNA sense strand
auuccgaacucacguggua

SEQ ID NO: 276583 - RNA, 19 nt, Homo sapiens
  misc_RNA (1)...(19): siRNA sense strand
ccagagagcaccaccuuuu

SEQ ID NO: 276584 - RNA, 19 nt, Homo sapiens
  misc_RNA (1)...(19): siRNA sense strand
gcuuuaacccggugcucua

SEQ ID NO: 276585 - RNA, 19 nt, Homo sapiens
  misc_RNA (1)...(19): siRNA sense strand
cuacaacuucacccuguuu

SEQ ID NO: 276586 - RNA, 19 nt, Homo sapiens
  misc_RNA (1)...(19): siRNA sense strand
uccacaaggugcuuucuuc

SEQ ID NO: 276587 - RNA, 19 nt, Homo sapiens
  misc_RNA (1)...(19): siRNA sense strand
uuaacccggugcucuaugu

SEQ ID NO: 276588 - RNA, 19 nt, Homo sapiens
  misc_RNA (1)...(19): siRNA sense strand
uggagucccucaccaacau

SEQ ID NO: 276589 - RNA, 19 nt, Homo sapiens
  misc_RNA (1)...(19): siRNA sense strand
caacuucacccuguuucug

SEQ ID NO: 276590 - RNA, 19 nt, Homo sapiens
  misc_RNA (1)...(19): siRNA sense strand
guaccucaccuccgucuac

SEQ ID NO: 276591 - RNA, 19 nt, Homo sapiens
  misc_RNA (1)...(19): siRNA sense strand
caaacagcagcuagaauac

SEQ ID NO: 276592 - RNA, 19 nt, Homo sapiens
  misc_RNA (1)...(19): siRNA sense strand
cuacagcagcaucuucuuc

SEQ ID NO: 276593 - RNA, 19 nt, Homo sapiens
  misc_RNA (1)...(19): siRNA sense strand
ggccaaacagcagcuagaa

SEQ ID NO: 276594 - RNA, 19 nt, Homo sapiens
  misc_RNA (1)...(19): siRNA sense strand
gcugggugcugggagacuu

SEQ ID NO: 276595 - RNA, 19 nt, Homo sapiens
  misc_RNA (1)...(19): siRNA sense strand
gagacuuccucugcaaacu

SEQ ID NO: 276596 - RNA, 19 nt, Homo sapiens
  misc_RNA (1)...(19): siRNA sense strand
gggagacuuccucugcaaa

SEQ ID NO: 276597 - RNA, 19 nt, Homo sapiens
  misc_RNA (1)...(19): siRNA sense strand
ggguccuggugaaguauga

SEQ ID NO: 276598 - RNA, 19 nt, Homo sapiens
  misc_RNA (1)...(19): siRNA sense strand
ugggagacuuccucugcaa

SEQ ID NO: 276599 - RNA, 19 nt, Homo sapiens
  misc_RNA (1)...(19): siRNA sense strand
ccuacaacuucacccuguu

SEQ ID NO: 276600 - RNA, 19 nt, Homo sapiens
  misc_RNA (1)...(19): siRNA sense strand
ggagacuuccucugcaaac

SEQ ID NO: 276601 - RNA, 19 nt, Homo sapiens
  misc_RNA (1)...(19): siRNA sense strand
caacaucuucauccucaac

SEQ ID NO: 276602 - RNA, 19 nt, Homo sapiens
  misc_RNA (1)...(19): siRNA sense strand
agaauacgcccugcucauc

SEQ ID NO: 276603 - RNA, 19 nt, Homo sapiens
  misc_RNA (1)...(19): siRNA sense strand
gcacggucaagcucaucuu

SEQ ID NO: 276604 - RNA, 19 nt, Homo sapiens
  misc_RNA (1)...(19): siRNA sense strand
gaacuuccgcagcauauug

SEQ ID NO: 276605 - RNA, 19 nt, Homo sapiens
  misc_RNA (1)...(19): siRNA sense strand
caacgucucucaggacaau

SEQ ID NO: 276606 - RNA, 19 nt, Homo sapiens
  misc_RNA (1)...(19): siRNA sense strand
caacacggccgucauccuu

SEQ ID NO: 276607 - RNA, 19 nt, Homo sapiens
  misc_RNA (1)...(19): siRNA sense strand
gaaggucgccagccugugu

SEQ ID NO: 276608 - RNA, 19 nt, Homo sapiens
  misc_RNA (1)...(19): siRNA sense strand
cgucauccuuguaauccua

SEQ ID NO: 276609 - RNA, 19 nt, Homo sapiens
  misc_RNA (1)...(19): siRNA sense strand
ccacugccguuccucuaug

SEQ ID NO: 276610 - RNA, 19 nt, Homo sapiens
  misc_RNA (1)...(19): siRNA sense strand
ugaugagcguggaccgaua

SEQ ID NO: 276611 - RNA, 19 nt, Homo sapiens
  misc_RNA (1)...(19): siRNA sense strand
guucugcccuucuucucuu

SEQ ID NO: 276612 - RNA, 19 nt, Homo sapiens
  misc_RNA (1)...(19): siRNA sense strand
ugaagacggugaccaacgu

SEQ ID NO: 276613 - RNA, 19 nt, Homo sapiens
  misc_RNA (1)...(19): siRNA sense strand
acacggccgucauccuugu

SEQ ID NO: 276614 - RNA, 19 nt, Homo sapiens
  misc_RNA (1)...(19): siRNA sense strand
cuuucuagaugacaacuuc

SEQ ID NO: 276615 - RNA, 19 nt, Homo sapiens
  misc_RNA (1)...(19): siRNA sense strand
gguacugcccgucaacauc

SEQ ID NO: 276616 - RNA, 19 nt, Homo sapiens
  misc_RNA (1)...(19): siRNA sense strand
caguauguccuacgucauc

SEQ ID NO: 276617 - RNA, 19 nt, Homo sapiens
  misc_RNA (1)...(19): siRNA sense strand
ccgagcaggucugguucaa

SEQ ID NO: 276618 - RNA, 19 nt, Homo sapiens
  misc_RNA (1)...(19): siRNA sense strand
ggaaagauuugguguugua

SEQ ID NO: 276619 - RNA, 19 nt, Homo sapiens
  misc_RNA (1)...(19): siRNA sense strand
gcagaacgauccucgaauu

SEQ ID NO: 276620 - RNA, 19 nt, Homo sapiens
  misc_RNA (1)...(19): siRNA sense strand
cagaggagcucaucaagaa

SEQ ID NO: 276621 - RNA, 19 nt, Homo sapiens
  misc_RNA (1)...(19): siRNA sense strand
guacagauaugagaaauuc

SEQ ID NO: 276622 - RNA, 19 nt, Homo sapiens
  misc_RNA (1)...(19): siRNA sense strand
ggaagaacauccuggacaa

SEQ ID NO: 276623 - RNA, 19 nt, Homo sapiens
  misc_RNA (1)...(19): siRNA sense strand
augcugagcucuucuauaa

SEQ ID NO: 276624 - RNA, 19 nt, Homo sapiens
  misc_RNA (1)...(19): siRNA sense strand
gaggaacgacgacauuaua

SEQ ID NO: 276625 - RNA, 19 nt, Homo sapiens
  misc_RNA (1)...(19): siRNA sense strand
guagagauccuaaacaaga

SEQ ID NO: 276626 - RNA, 19 nt, Homo sapiens
  misc_RNA (1)...(19): siRNA sense strand
gcauucgggugguugauaa

SEQ ID NO: 276627 - RNA, 19 nt, Homo sapiens
  misc_RNA (1)...(19): siRNA sense strand
gggaacggcugcucuugaa

SEQ ID NO: 276628 - RNA, 19 nt, Homo sapiens
  misc_RNA (1)...(19): siRNA sense strand
gcagcaggcaguagaauuu

SEQ ID NO: 276629 - RNA, 19 nt, Homo sapiens
  misc_RNA (1)...(19): siRNA sense strand
cagcugagguguccguaaa

SEQ ID NO: 276630 - RNA, 19 nt, Homo sapiens
  misc_RNA (1)...(19): siRNA sense strand
ucaagaagcugcaguacag

SEQ ID NO: 276631 - RNA, 19 nt, Homo sapiens
  misc_RNA (1)...(19): siRNA sense strand
caggaaagauuugguguug

SEQ ID NO: 276632 - RNA, 19 nt, Homo sapiens
  misc_RNA (1)...(19): siRNA sense strand
cagacggccuggaaccuua

SEQ ID NO: 276633 - RNA, 19 nt, Homo sapiens
  misc_RNA (1)...(19): siRNA sense strand
gugaaacacuagaccacua

SEQ ID NO: 276634 - RNA, 19 nt, Homo sapiens
  misc_RNA (1)...(19): siRNA sense strand
cagagaagccugugaacaa

SEQ ID NO: 276635 - RNA, 19 nt, Homo sapiens
  misc_RNA (1)...(19): siRNA sense strand
agaacaagcuccucaugga

SEQ ID NO: 276636 - RNA, 19 nt, Homo sapiens
  misc_RNA (1)...(19): siRNA sense strand
gcccugcgcuacuuuaaga

SEQ ID NO: 276637 - RNA, 19 nt, Homo sapiens
  misc_RNA (1)...(19): siRNA sense strand
ccacuaugaucccgacuau

SEQ ID NO: 276638 - RNA, 19 nt, Homo sapiens
  misc_RNA (1)...(19): siRNA sense strand
ggaacgacgacauuauaaa

SEQ ID NO: 276639 - RNA, 19 nt, Homo sapiens
  misc_RNA (1)...(19): siRNA sense strand
gaacgauccucgaauucag

SEQ ID NO: 276640 - RNA, 19 nt, Homo sapiens
  misc_RNA (1)...(19): siRNA sense strand
aaacagaccgggaagagaa

SEQ ID NO: 276641 - RNA, 19 nt, Homo sapiens
  misc_RNA (1)...(19): siRNA sense strand
gaacgacgacauuauaaac

SEQ ID NO: 276642 - RNA, 19 nt, Homo sapiens
  misc_RNA (1)...(19): siRNA sense strand
cagaagagauccugaagcu

SEQ ID NO: 276643 - RNA, 19 nt, Homo sapiens
  misc_RNA (1)...(19): siRNA sense strand
ugaagcugauggacaaauu

SEQ ID NO: 276644 - RNA, 19 nt, Homo sapiens
  misc_RNA (1)...(19): siRNA sense strand
gcugagcucuucuauaaaa

SEQ ID NO: 276645 - RNA, 19 nt, Homo sapiens
  misc_RNA (1)...(19): siRNA sense strand
gaagaacaagcuccucaug

SEQ ID NO: 276646 - RNA, 19 nt, Homo sapiens
  misc_RNA (1)...(19): siRNA sense strand
gacgagcugucccucauug

SEQ ID NO: 276647 - RNA, 19 nt, Homo sapiens
  misc_RNA (1)...(19): siRNA sense strand
ccguaaagauuccagagaa

SEQ ID NO: 276648 - RNA, 19 nt, Homo sapiens
  misc_RNA (1)...(19): siRNA sense strand
uaacuucaacuccuacuug

SEQ ID NO: 276649 - RNA, 19 nt, Homo sapiens
  misc_RNA (1)...(19): siRNA sense strand
ucacggagcacuucaacaa

SEQ ID NO: 276650 - RNA, 19 nt, Homo sapiens
  misc_RNA (1)...(19): siRNA sense strand
agagaagccugugaacaaa

SEQ ID NO: 276651 - RNA, 19 nt, Homo sapiens
  misc_RNA (1)...(19): siRNA sense strand
caaauuccacucacccaaa

SEQ ID NO: 276652 - RNA, 19 nt, Homo sapiens
  misc_RNA (1)...(19): siRNA sense strand
uaugggaacugucucugaa

SEQ ID NO: 276653 - RNA, 19 nt, Homo sapiens
  misc_RNA (1)...(19): siRNA sense strand
guucucaucucucuuccuu

SEQ ID NO: 276654 - RNA, 19 nt, Homo sapiens
  misc_RNA (1)...(19): siRNA sense strand
ggagaaagagaaggaaguu

SEQ ID NO: 276655 - RNA, 19 nt, Homo sapiens
  misc_RNA (1)...(19): siRNA sense strand
gaacugucucugaaaauua

SEQ ID NO: 276656 - RNA, 19 nt, Homo sapiens
  misc_RNA (1)...(19): siRNA sense strand
caagagaacgccaucaaag

SEQ ID NO: 276657 - RNA, 19 nt, Homo sapiens
  misc_RNA (1)...(19): siRNA sense strand
gagaagagccccaacuuga

SEQ ID NO: 276658 - RNA, 19 nt, Homo sapiens
  misc_RNA (1)...(19): siRNA sense strand
gcaguacagauaugagaaa

SEQ ID NO: 276659 - RNA, 19 nt, Homo sapiens
  misc_RNA (1)...(19): siRNA sense strand
caaagaggcaacagacaga

SEQ ID NO: 276660 - RNA, 19 nt, Homo sapiens
  misc_RNA (1)...(19): siRNA sense strand
ggaggaacgacgacauuau

SEQ ID NO: 276661 - RNA, 19 nt, Homo sapiens
  misc_RNA (1)...(19): siRNA sense strand
gaacggcugcucuugaagu

SEQ ID NO: 276662 - RNA, 19 nt, Homo sapiens
  misc_RNA (1)...(19): siRNA sense strand
ggaggcagccacucauaug

SEQ ID NO: 276663 - RNA, 19 nt, Homo sapiens
  misc_RNA (1)...(19): siRNA sense strand
caagacgacugggauguca

SEQ ID NO: 276664 - RNA, 19 nt, Homo sapiens
  misc_RNA (1)...(19): siRNA sense strand
caucaaggcugugcuggau

SEQ ID NO: 276665 - RNA, 19 nt, Homo sapiens
  misc_RNA (1)...(19): siRNA sense strand
ugagcuggcuggaggagaa

SEQ ID NO: 276666 - RNA, 19 nt, Homo sapiens
  misc_RNA (1)...(19): siRNA sense strand
ggaacugucucugaaaauu

SEQ ID NO: 276667 - RNA, 19 nt, Homo sapiens
  misc_RNA (1)...(19): siRNA sense strand
cuacugagacugacaggaa

SEQ ID NO: 276668 - RNA, 19 nt, Homo sapiens
  misc_RNA (1)...(19): siRNA sense strand
ucucaucucucuuccuuca

SEQ ID NO: 276669 - RNA, 19 nt, Homo sapiens
  misc_RNA (1)...(19): siRNA sense strand
ugcggaagcugaauaacuu

SEQ ID NO: 276670 - RNA, 19 nt, Homo sapiens
  misc_RNA (1)...(19): siRNA sense strand
ucaacaacauguccuacug

SEQ ID NO: 276671 - RNA, 19 nt, Homo sapiens
  misc_RNA (1)...(19): siRNA sense strand
agacugacaggaaagauuu

SEQ ID NO: 276672 - RNA, 19 nt, Homo sapiens
  misc_RNA (1)...(19): siRNA sense strand
acuaugaucccgacuauga

SEQ ID NO: 276673 - RNA, 19 nt, Homo sapiens
  misc_RNA (1)...(19): siRNA sense strand
agagaacgccaucaaagaa

SEQ ID NO: 276674 - RNA, 19 nt, Homo sapiens
  misc_RNA (1)...(19): siRNA sense strand
gccgaguacugcacacuga

SEQ ID NO: 276675 - RNA, 19 nt, Homo sapiens
  misc_RNA (1)...(19): siRNA sense strand
agaagccugugaacaaaga

SEQ ID NO: 276676 - RNA, 19 nt, Homo sapiens
  misc_RNA (1)...(19): siRNA sense strand
cgacgacauuauaaacuuc

SEQ ID NO: 276677 - RNA, 19 nt, Homo sapiens
  misc_RNA (1)...(19): siRNA sense strand
ucaagaagcgcgucagcaa

SEQ ID NO: 276678 - RNA, 19 nt, Homo sapiens
  misc_RNA (1)...(19): siRNA sense strand
gagacugacaggaaagauu

SEQ ID NO: 276679 - RNA, 19 nt, Homo sapiens
  misc_RNA (1)...(19): siRNA sense strand
gcugagguguccguaaaga

SEQ ID NO: 276680 - RNA, 19 nt, Homo sapiens
  misc_RNA (1)...(19): siRNA sense strand
gaccacaacgaaauuaugu

SEQ ID NO: 276681 - RNA, 19 nt, Homo sapiens
  misc_RNA (1)...(19): siRNA sense strand
gaacauaacaaggagaaaa

SEQ ID NO: 276682 - RNA, 19 nt, Homo sapiens
  misc_RNA (1)...(19): siRNA sense strand
ugagguguccguaaagauu

SEQ ID NO: 276683 - RNA, 19 nt, Homo sapiens
  misc_RNA (1)...(19): siRNA sense strand
gaaagagaaggaaguuguc

SEQ ID NO: 276684 - RNA, 19 nt, Homo sapiens
  misc_RNA (1)...(19): siRNA sense strand
cggcaucccucgcaguaug

SEQ ID NO: 276685 - RNA, 19 nt, Homo sapiens
  misc_RNA (1)...(19): siRNA sense strand
gcacagcucagcccucucu

SEQ ID NO: 276686 - RNA, 19 nt, Homo sapiens
  misc_RNA (1)...(19): siRNA sense strand
ggcaauugauaagaaggua

SEQ ID NO: 276687 - RNA, 19 nt, Homo sapiens
  misc_RNA (1)...(19): siRNA sense strand
agguagagauccuaaacaa

SEQ ID NO: 276688 - RNA, 19 nt, Homo sapiens
  misc_RNA (1)...(19): siRNA sense strand
ucaagagaacgccaucaaa

SEQ ID NO: 276689 - RNA, 19 nt, Homo sapiens
  misc_RNA (1)...(19): siRNA sense strand
gaagcugcaguacagauau

SEQ ID NO: 276690 - RNA, 19 nt, Homo sapiens
  misc_RNA (1)...(19): siRNA sense strand
agacggacaucccagagau

SEQ ID NO: 276691 - RNA, 19 nt, Homo sapiens
  misc_RNA (1)...(19): siRNA sense strand
cagcaggcaguagaauuua

SEQ ID NO: 276692 - RNA, 19 nt, Homo sapiens
  misc_RNA (1)...(19): siRNA sense strand
ggaguugacagaagagauc

SEQ ID NO: 276693 - RNA, 19 nt, Homo sapiens
  misc_RNA (1)...(19): siRNA sense strand
ugacagaccgcgagguaga

SEQ ID NO: 276694 - RNA, 19 nt, Homo sapiens
  misc_RNA (1)...(19): siRNA sense strand
agaaagagaaggaaguugu

SEQ ID NO: 276695 - RNA, 19 nt, Homo sapiens
  misc_RNA (1)...(19): siRNA sense strand
uggacaagguggaccagaa

SEQ ID NO: 276696 - RNA, 19 nt, Homo sapiens
  misc_RNA (1)...(19): siRNA sense strand
gagucugggucuccauuuc

SEQ ID NO: 276697 - RNA, 19 nt, Homo sapiens
  misc_RNA (1)...(19): siRNA sense strand
gagauggugacgacuguga

SEQ ID NO: 276698 - RNA, 19 nt, Homo sapiens
  misc_RNA (1)...(19): siRNA sense strand
gacaaaauggcaauugaua

SEQ ID NO: 276699 - RNA, 19 nt, Homo sapiens
  misc_RNA (1)...(19): siRNA sense strand
gcaacagacagauuucuac

SEQ ID NO: 276700 - RNA, 19 nt, Homo sapiens
  misc_RNA (1)...(19): siRNA sense strand
gaugcugagcucuucuaua

SEQ ID NO: 276701 - RNA, 19 nt, Homo sapiens
  misc_RNA (1)...(19): siRNA sense strand
cagcauugccacccaagaa

SEQ ID NO: 276702 - RNA, 19 nt, Homo sapiens
  misc_RNA (1)...(19): siRNA sense strand
ggcaacagacagauuucua

SEQ ID NO: 276703 - RNA, 19 nt, Homo sapiens
  misc_RNA (1)...(19): siRNA sense strand
uggaaggcgugaacucaga

SEQ ID NO: 276704 - RNA, 19 nt, Homo sapiens
  misc_RNA (1)...(19): siRNA sense strand
auaagaagguacuggagau

SEQ ID NO: 276705 - RNA, 19 nt, Homo sapiens
  misc_RNA (1)...(19): siRNA sense strand
gcaggcaguagaauuuaug

SEQ ID NO: 276706 - RNA, 19 nt, Homo sapiens
  misc_RNA (1)...(19): siRNA sense strand
ugacagaagagauccugaa

SEQ ID NO: 276707 - RNA, 19 nt, Homo sapiens
  misc_RNA (1)...(19): siRNA sense strand
ucaagaucaugaagcacuu

SEQ ID NO: 276708 - RNA, 19 nt, Homo sapiens
  misc_RNA (1)...(19): siRNA sense strand
ggaccuugcacgacuuuca

SEQ ID NO: 276709 - RNA, 19 nt, Homo sapiens
  misc_RNA (1)...(19): siRNA sense strand
ggacaagguggaccagaag

SEQ ID NO: 276710 - RNA, 19 nt, Homo sapiens
  misc_RNA (1)...(19): siRNA sense strand
ggugcuggaggccaucuua

SEQ ID NO: 276711 - RNA, 19 nt, Homo sapiens
  misc_RNA (1)...(19): siRNA sense strand
ccagaggagcucaucaaga

SEQ ID NO: 276712 - RNA, 19 nt, Homo sapiens
  misc_RNA (1)...(19): siRNA sense strand
gaagcugauggacaaauuc

SEQ ID NO: 276713 - RNA, 19 nt, Homo sapiens
  misc_RNA (1)...(19): siRNA sense strand
gcggaggaacgacgacauu

SEQ ID NO: 276714 - RNA, 19 nt, Homo sapiens
  misc_RNA (1)...(19): siRNA sense strand
gggaaacccagacuacauc

SEQ ID NO: 276715 - RNA, 19 nt, Homo sapiens
  misc_RNA (1)...(19): siRNA sense strand
agaggcaacagacagauuu

SEQ ID NO: 276716 - RNA, 19 nt, Homo sapiens
  misc_RNA (1)...(19): siRNA sense strand
gcccuuugcugcuauucug

SEQ ID NO: 276717 - RNA, 19 nt, Homo sapiens
  misc_RNA (1)...(19): siRNA sense strand
aagagaacgccaucaaaga

SEQ ID NO: 276718 - RNA, 19 nt, Homo sapiens
  misc_RNA (1)...(19): siRNA sense strand
ggaaagauuugguguugua

SEQ ID NO: 276719 - RNA, 19 nt, Homo sapiens
  misc_RNA (1)...(19): siRNA sense strand
gcagaacgauccucgaauu

SEQ ID NO: 276720 - RNA, 19 nt, Homo sapiens
  misc_RNA (1)...(19): siRNA sense strand
cagaggagcucaucaagaa

SEQ ID NO: 276721 - RNA, 19 nt, Homo sapiens
  misc_RNA (1)...(19): siRNA sense strand
guacagauaugagaaauuc

SEQ ID NO: 276722 - RNA, 19 nt, Homo sapiens
  misc_RNA (1)...(19): siRNA sense strand
ggaagaacauccuggacaa

SEQ ID NO: 276723 - RNA, 19 nt, Homo sapiens
  misc_RNA (1)...(19): siRNA sense strand
augcugagcucuucuauaa

SEQ ID NO: 276724 - RNA, 19 nt, Homo sapiens
  misc_RNA (1)...(19): siRNA sense strand
gaggaacgacgacauuaua

SEQ ID NO: 276725 - RNA, 19 nt, Homo sapiens
  misc_RNA (1)...(19): siRNA sense strand
guagagauccuaaacaaga

SEQ ID NO: 276726 - RNA, 19 nt, Homo sapiens
  misc_RNA (1)...(19): siRNA sense strand
gcauucgggugguugauaa

SEQ ID NO: 276727 - RNA, 19 nt, Homo sapiens
  misc_RNA (1)...(19): siRNA sense strand
gggaacggcugcucuugaa

SEQ ID NO: 276728 - RNA, 19 nt, Homo sapiens
  misc_RNA (1)...(19): siRNA sense strand
gcagcaggcaguagaauuu

SEQ ID NO: 276729 - RNA, 19 nt, Homo sapiens
  misc_RNA (1)...(19): siRNA sense strand
cagcugagguguccguaaa

SEQ ID NO: 276730 - RNA, 19 nt, Homo sapiens
  misc_RNA (1)...(19): siRNA sense strand
ucaagaagcugcaguacag

SEQ ID NO: 276731 - RNA, 19 nt, Homo sapiens
  misc_RNA (1)...(19): siRNA sense strand
caggaaagauuugguguug

SEQ ID NO: 276732 - RNA, 19 nt, Homo sapiens
  misc_RNA (1)...(19): siRNA sense strand
cagacggccuggaaccuua

SEQ ID NO: 276733 - RNA, 19 nt, Homo sapiens
  misc_RNA (1)...(19): siRNA sense strand
gugaaacacuagaccacua

SEQ ID NO: 276734 - RNA, 19 nt, Homo sapiens
  misc_RNA (1)...(19): siRNA sense strand
cagagaagccugugaacaa

SEQ ID NO: 276735 - RNA, 19 nt, Homo sapiens
  misc_RNA (1)...(19): siRNA sense strand
agaacaagcuccucaugga

SEQ ID NO: 276736 - RNA, 19 nt, Homo sapiens
  misc_RNA (1)...(19): siRNA sense strand
gcccugcgcuacuuuaaga

SEQ ID NO: 276737 - RNA, 19 nt, Homo sapiens
  misc_RNA (1)...(19): siRNA sense strand
ccacuaugaucccgacuau

SEQ ID NO: 276738 - RNA, 19 nt, Homo sapiens
  misc_RNA (1)...(19): siRNA sense strand
ggaacgacgacauuauaaa

SEQ ID NO: 276739 - RNA, 19 nt, Homo sapiens
  misc_RNA (1)...(19): siRNA sense strand
gaacgauccucgaauucag

SEQ ID NO: 276740 - RNA, 19 nt, Homo sapiens
  misc_RNA (1)...(19): siRNA sense strand
aaacagaccgggaagagaa

SEQ ID NO: 276741 - RNA, 19 nt, Homo sapiens
  misc_RNA (1)...(19): siRNA sense strand
gaacgacgacauuauaaac

SEQ ID NO: 276742 - RNA, 19 nt, Homo sapiens
  misc_RNA (1)...(19): siRNA sense strand
cagaagagauccugaagcu

SEQ ID NO: 276743 - RNA, 19 nt, Homo sapiens
  misc_RNA (1)...(19): siRNA sense strand
ugaagcugauggacaaauu

SEQ ID NO: 276744 - RNA, 19 nt, Homo sapiens
  misc_RNA (1)...(19): siRNA sense strand
gcugagcucuucuauaaaa

SEQ ID NO: 276745 - RNA, 19 nt, Homo sapiens
  misc_RNA (1)...(19): siRNA sense strand
gaagaacaagcuccucaug

SEQ ID NO: 276746 - RNA, 19 nt, Homo sapiens
  misc_RNA (1)...(19): siRNA sense strand
gacgagcugucccucauug

SEQ ID NO: 276747 - RNA, 19 nt, Homo sapiens
  misc_RNA (1)...(19): siRNA sense strand
ccguaaagauuccagagaa

SEQ ID NO: 276748 - RNA, 19 nt, Homo sapiens
  misc_RNA (1)...(19): siRNA sense strand
uaacuucaacuccuacuug

SEQ ID NO: 276749 - RNA, 19 nt, Homo sapiens
  misc_RNA (1)...(19): siRNA sense strand
ucacggagcacuucaacaa

SEQ ID NO: 276750 - RNA, 19 nt, Homo sapiens
  misc_RNA (1)...(19): siRNA sense strand
agagaagccugugaacaaa

SEQ ID NO: 276751 - RNA, 19 nt, Homo sapiens
  misc_RNA (1)...(19): siRNA sense strand
caaauuccacucacccaaa

SEQ ID NO: 276752 - RNA, 19 nt, Homo sapiens
  misc_RNA (1)...(19): siRNA sense strand
uaugggaacugucucugaa

SEQ ID NO: 276753 - RNA, 19 nt, Homo sapiens
  misc_RNA (1)...(19): siRNA sense strand
guucucaucucucuuccuu

SEQ ID NO: 276754 - RNA, 19 nt, Homo sapiens
  misc_RNA (1)...(19): siRNA sense strand
ggagaaagagaaggaaguu

SEQ ID NO: 276755 - RNA, 19 nt, Homo sapiens
  misc_RNA (1)...(19): siRNA sense strand
gaacugucucugaaaauua

SEQ ID NO: 276756 - RNA, 19 nt, Homo sapiens
  misc_RNA (1)...(19): siRNA sense strand
caagagaacgccaucaaag

SEQ ID NO: 276757 - RNA, 19 nt, Homo sapiens
  misc_RNA (1)...(19): siRNA sense strand
gagaagagccccaacuuga

SEQ ID NO: 276758 - RNA, 19 nt, Homo sapiens
  misc_RNA (1)...(19): siRNA sense strand
gcaguacagauaugagaaa

SEQ ID NO: 276759 - RNA, 19 nt, Homo sapiens
  misc_RNA (1)...(19): siRNA sense strand
caaagaggcaacagacaga

SEQ ID NO: 276760 - RNA, 19 nt, Homo sapiens
  misc_RNA (1)...(19): siRNA sense strand
ggaggaacgacgacauuau

SEQ ID NO: 276761 - RNA, 19 nt, Homo sapiens
  misc_RNA (1)...(19): siRNA sense strand
gaacggcugcucuugaagu

SEQ ID NO: 276762 - RNA, 19 nt, Homo sapiens
  misc_RNA (1)...(19): siRNA sense strand
ggaggcagccacucauaug

SEQ ID NO: 276763 - RNA, 19 nt, Homo sapiens
  misc_RNA (1)...(19): siRNA sense strand
caagacgacugggauguca

SEQ ID NO: 276764 - RNA, 19 nt, Homo sapiens
  misc_RNA (1)...(19): siRNA sense strand
caucaaggcugugcuggau

SEQ ID NO: 276765 - RNA, 19 nt, Homo sapiens
  misc_RNA (1)...(19): siRNA sense strand
ugagcuggcuggaggagaa

SEQ ID NO: 276766 - RNA, 19 nt, Homo sapiens
  misc_RNA (1)...(19): siRNA sense strand
ggaacugucucugaaaauu

SEQ ID NO: 276767 - RNA, 19 nt, Homo sapiens
  misc_RNA (1)...(19): siRNA sense strand
cuacugagacugacaggaa

SEQ ID NO: 276768 - RNA, 19 nt, Homo sapiens
  misc_RNA (1)...(19): siRNA sense strand
ucucaucucucuuccuuca

SEQ ID NO: 276769 - RNA, 19 nt, Homo sapiens
  misc_RNA (1)...(19): siRNA sense strand
ugcggaagcugaauaacuu

SEQ ID NO: 276770 - RNA, 19 nt, Homo sapiens
  misc_RNA (1)...(19): siRNA sense strand
ucaacaacauguccuacug

SEQ ID NO: 276771 - RNA, 19 nt, Homo sapiens
  misc_RNA (1)...(19): siRNA sense strand
agacugacaggaaagauuu

SEQ ID NO: 276772 - RNA, 19 nt, Homo sapiens
  misc_RNA (1)...(19): siRNA sense strand
acuaugaucccgacuauga

SEQ ID NO: 276773 - RNA, 19 nt, Homo sapiens
  misc_RNA (1)...(19): siRNA sense strand
agagaacgccaucaaagaa

SEQ ID NO: 276774 - RNA, 19 nt, Homo sapiens
  misc_RNA (1)...(19): siRNA sense strand
gccgaguacugcacacuga

SEQ ID NO: 276775 - RNA, 19 nt, Homo sapiens
  misc_RNA (1)...(19): siRNA sense strand
agaagccugugaacaaaga

SEQ ID NO: 276776 - RNA, 19 nt, Homo sapiens
  misc_RNA (1)...(19): siRNA sense strand
cgacgacauuauaaacuuc

SEQ ID NO: 276777 - RNA, 19 nt, Homo sapiens
  misc_RNA (1)...(19): siRNA sense strand
ucaagaagcgcgucagcaa

SEQ ID NO: 276778 - RNA, 19 nt, Homo sapiens
  misc_RNA (1)...(19): siRNA sense strand
gagacugacaggaaagauu

SEQ ID NO: 276779 - RNA, 19 nt, Homo sapiens
  misc_RNA (1)...(19): siRNA sense strand
gcugagguguccguaaaga

SEQ ID NO: 276780 - RNA, 19 nt, Homo sapiens
  misc_RNA (1)...(19): siRNA sense strand
gaccacaacgaaauuaugu

SEQ ID NO: 276781 - RNA, 19 nt, Homo sapiens
  misc_RNA (1)...(19): siRNA sense strand
gaacauaacaaggagaaaa

SEQ ID NO: 276782 - RNA, 19 nt, Homo sapiens
  misc_RNA (1)...(19): siRNA sense strand
ugagguguccguaaagauu

SEQ ID NO: 276783 - RNA, 19 nt, Homo sapiens
  misc_RNA (1)...(19): siRNA sense strand
gaaagagaaggaaguuguc

SEQ ID NO: 276784 - RNA, 19 nt, Homo sapiens
  misc_RNA (1)...(19): siRNA sense strand
cggcaucccucgcaguaug

SEQ ID NO: 276785 - RNA, 19 nt, Homo sapiens
  misc_RNA (1)...(19): siRNA sense strand
gcacagcucagcccucucu

SEQ ID NO: 276786 - RNA, 19 nt, Homo sapiens
  misc_RNA (1)...(19): siRNA sense strand
ggcaauugauaagaaggua

SEQ ID NO: 276787 - RNA, 19 nt, Homo sapiens
  misc_RNA (1)...(19): siRNA sense strand
agguagagauccuaaacaa

SEQ ID NO: 276788 - RNA, 19 nt, Homo sapiens
  misc_RNA (1)...(19): siRNA sense strand
ucaagagaacgccaucaaa

SEQ ID NO: 276789 - RNA, 19 nt, Homo sapiens
  misc_RNA (1)...(19): siRNA sense strand
gaagcugcaguacagauau

SEQ ID NO: 276790 - RNA, 19 nt, Homo sapiens
  misc_RNA (1)...(19): siRNA sense strand
agacggacaucccagagau

SEQ ID NO: 276791 - RNA, 19 nt, Homo sapiens
  misc_RNA (1)...(19): siRNA sense strand
cagcaggcaguagaauuua

SEQ ID NO: 276792 - RNA, 19 nt, Homo sapiens
  misc_RNA (1)...(19): siRNA sense strand
ggaguugacagaagagauc

SEQ ID NO: 276793 - RNA, 19 nt, Homo sapiens
  misc_RNA (1)...(19): siRNA sense strand
ugacagaccgcgagguaga

SEQ ID NO: 276794 - RNA, 19 nt, Homo sapiens
  misc_RNA (1)...(19): siRNA sense strand
agaaagagaaggaaguugu

SEQ ID NO: 276795 - RNA, 19 nt, Homo sapiens
  misc_RNA (1)...(19): siRNA sense strand
uggacaagguggaccagaa

SEQ ID NO: 276796 - RNA, 19 nt, Homo sapiens
  misc_RNA (1)...(19): siRNA sense strand
gagucugggucuccauuuc

SEQ ID NO: 276797 - RNA, 19 nt, Homo sapiens
  misc_RNA (1)...(19): siRNA sense strand
gagauggugacgacuguga

SEQ ID NO: 276798 - RNA, 19 nt, Homo sapiens
  misc_RNA (1)...(19): siRNA sense strand
gacaaaauggcaauugaua

SEQ ID NO: 276799 - RNA, 19 nt, Homo sapiens
  misc_RNA (1)...(19): siRNA sense strand
gcaacagacagauuucuac

SEQ ID NO: 276800 - RNA, 19 nt, Homo sapiens
  misc_RNA (1)...(19): siRNA sense strand
gaugcugagcucuucuaua

SEQ ID NO: 276801 - RNA, 19 nt, Homo sapiens
  misc_RNA (1)...(19): siRNA sense strand
cagcauugccacccaagaa

SEQ ID NO: 276802 - RNA, 19 nt, Homo sapiens
  misc_RNA (1)...(19): siRNA sense strand
ggcaacagacagauuucua

SEQ ID NO: 276803 - RNA, 19 nt, Homo sapiens
  misc_RNA (1)...(19): siRNA sense strand
uggaaggcgugaacucaga

SEQ ID NO: 276804 - RNA, 19 nt, Homo sapiens
  misc_RNA (1)...(19): siRNA sense strand
auaagaagguacuggagau

SEQ ID NO: 276805 - RNA, 19 nt, Homo sapiens
  misc_RNA (1)...(19): siRNA sense strand
gcaggcaguagaauuuaug

SEQ ID NO: 276806 - RNA, 19 nt, Homo sapiens
  misc_RNA (1)...(19): siRNA sense strand
ugacagaagagauccugaa

SEQ ID NO: 276807 - RNA, 19 nt, Homo sapiens
  misc_RNA (1)...(19): siRNA sense strand
ucaagaucaugaagcacuu

SEQ ID NO: 276808 - RNA, 19 nt, Homo sapiens
  misc_RNA (1)...(19): siRNA sense strand
ggaccuugcacgacuuuca

SEQ ID NO: 276809 - RNA, 19 nt, Homo sapiens
  misc_RNA (1)...(19): siRNA sense strand
ggacaagguggaccagaag

SEQ ID NO: 276810 - RNA, 19 nt, Homo sapiens
  misc_RNA (1)...(19): siRNA sense strand
ggugcuggaggccaucuua

SEQ ID NO: 276811 - RNA, 19 nt, Homo sapiens
  misc_RNA (1)...(19): siRNA sense strand
ccagaggagcucaucaaga

SEQ ID NO: 276812 - RNA, 19 nt, Homo sapiens
  misc_RNA (1)...(19): siRNA sense strand
gaagcugauggacaaauuc

SEQ ID NO: 276813 - RNA, 19 nt, Homo sapiens
  misc_RNA (1)...(19): siRNA sense strand
gcggaggaacgacgacauu

SEQ ID NO: 276814 - RNA, 19 nt, Homo sapiens
  misc_RNA (1)...(19): siRNA sense strand
gggaaacccagacuacauc

SEQ ID NO: 276815 - RNA, 19 nt, Homo sapiens
  misc_RNA (1)...(19): siRNA sense strand
agaggcaacagacagauuu

SEQ ID NO: 276816 - RNA, 19 nt, Homo sapiens
  misc_RNA (1)...(19): siRNA sense strand
gcccuuugcugcuauucug

SEQ ID NO: 276817 - RNA, 19 nt, Homo sapiens
  misc_RNA (1)...(19): siRNA sense strand
aagagaacgccaucaaaga

SEQ ID NO: 276818 - RNA, 19 nt, Homo sapiens
  misc_RNA (1)...(19): siRNA sense strand
guggaggucugguucaaga

SEQ ID NO: 276819 - RNA, 19 nt, Homo sapiens
  misc_RNA (1)...(19): siRNA sense strand
ccaaauggcgacaccagaa

SEQ ID NO: 276820 - RNA, 19 nt, Homo sapiens
  misc_RNA (1)...(19): siRNA sense strand
ccaguauccugacgugagu

SEQ ID NO: 276821 - RNA, 19 nt, Homo sapiens
  misc_RNA (1)...(19): siRNA sense strand
gcguggaggucugguucaa

SEQ ID NO: 276822 - RNA, 19 nt, Homo sapiens
  misc_RNA (1)...(19): siRNA sense strand
caaauggcgacaccagaag

SEQ ID NO: 276823 - RNA, 19 nt, Homo sapiens
  misc_RNA (1)...(19): siRNA sense strand
ggucugcacugacaucuuc

SEQ ID NO: 276824 - RNA, 19 nt, Homo sapiens
  misc_RNA (1)...(19): siRNA sense strand
ggucucaccuuccacauca

SEQ ID NO: 276825 - RNA, 19 nt, Homo sapiens
  misc_RNA (1)...(19): siRNA sense strand
gcuccagggucugcacuga

SEQ ID NO: 276826 - RNA, 19 nt, Homo sapiens
  misc_RNA (1)...(19): siRNA sense strand
uggccucacugcagagaaa

SEQ ID NO: 276827 - RNA, 19 nt, Homo sapiens
  misc_RNA (1)...(19): siRNA sense strand
cguuggcccugcccaguaa

SEQ ID NO: 276828 - RNA, 19 nt, Homo sapiens
  misc_RNA (1)...(19): siRNA sense strand
cagcuggacgggaaaguga

SEQ ID NO: 276829 - RNA, 19 nt, Homo sapiens
  misc_RNA (1)...(19): siRNA sense strand
ccagcacccucgcuacaag

SEQ ID NO: 276830 - RNA, 19 nt, Homo sapiens
  misc_RNA (1)...(19): siRNA sense strand
ucaguaggcagcuccuuug

SEQ ID NO: 276831 - RNA, 19 nt, Homo sapiens
  misc_RNA (1)...(19): siRNA sense strand
gucaguaggcagcuccuuu

SEQ ID NO: 276832 - RNA, 19 nt, Homo sapiens
  misc_RNA (1)...(19): siRNA sense strand
gcccguacauggccucacu

SEQ ID NO: 276833 - RNA, 19 nt, Homo sapiens
  misc_RNA (1)...(19): siRNA sense strand
cgccuuacguguccuggau

SEQ ID NO: 276834 - RNA, 19 nt, Homo sapiens
  misc_RNA (1)...(19): siRNA sense strand
gaacgaccucgcgcugcuu

SEQ ID NO: 276835 - RNA, 19 nt, Homo sapiens
  misc_RNA (1)...(19): siRNA sense strand
ccucaaagguggcuacaaa

SEQ ID NO: 276836 - RNA, 19 nt, Homo sapiens
  misc_RNA (1)...(19): siRNA sense strand
gaaagcggcacccaagaaa

SEQ ID NO: 276837 - RNA, 19 nt, Homo sapiens
  misc_RNA (1)...(19): siRNA sense strand
gcuacgacguggagaagaa

SEQ ID NO: 276838 - RNA, 19 nt, Homo sapiens
  misc_RNA (1)...(19): siRNA sense strand
gaacaacagccgcauuaag

SEQ ID NO: 276839 - RNA, 19 nt, Homo sapiens
  misc_RNA (1)...(19): siRNA sense strand
aagaacaacagccgcauua

SEQ ID NO: 276840 - RNA, 19 nt, Homo sapiens
  misc_RNA (1)...(19): siRNA sense strand
gaagaacaacagccgcauu

SEQ ID NO: 276841 - RNA, 19 nt, Homo sapiens
  misc_RNA (1)...(19): siRNA sense strand
ccuucaagcucaacaagaa

SEQ ID NO: 276842 - RNA, 19 nt, Homo sapiens
  misc_RNA (1)...(19): siRNA sense strand
ggcaacgggugcaucuaaa

SEQ ID NO: 276843 - RNA, 19 nt, Homo sapiens
  misc_RNA (1)...(19): siRNA sense strand
gcaaagaaaccugcuaagg

SEQ ID NO: 276844 - RNA, 19 nt, Homo sapiens
  misc_RNA (1)...(19): siRNA sense strand
uuaagagccugguaagcaa

SEQ ID NO: 276845 - RNA, 19 nt, Homo sapiens
  misc_RNA (1)...(19): siRNA sense strand
gaaggcguccuccguggaa

SEQ ID NO: 276846 - RNA, 19 nt, Homo sapiens
  misc_RNA (1)...(19): siRNA sense strand
guaaagcccaagaaaguag

SEQ ID NO: 276847 - RNA, 19 nt, Homo sapiens
  misc_RNA (1)...(19): siRNA sense strand
gcagcagccuccaagaaaa

SEQ ID NO: 276848 - RNA, 19 nt, Homo sapiens
  misc_RNA (1)...(19): siRNA sense strand
gcaagaaggcaaagaaacc

SEQ ID NO: 276849 - RNA, 19 nt, Homo sapiens
  misc_RNA (1)...(19): siRNA sense strand
agaaagcggcacccaagaa

SEQ ID NO: 276850 - RNA, 19 nt, Homo sapiens
  misc_RNA (1)...(19): siRNA sense strand
ggcauuaagagccugguaa

SEQ ID NO: 276851 - RNA, 19 nt, Homo sapiens
  misc_RNA (1)...(19): siRNA sense strand
ggaaauccuccaagaaucc

SEQ ID NO: 276852 - RNA, 19 nt, Homo sapiens
  misc_RNA (1)...(19): siRNA sense strand
cuaaagcuaaggcuguaaa

SEQ ID NO: 276853 - RNA, 19 nt, Homo sapiens
  misc_RNA (1)...(19): siRNA sense strand
uguaaagcccaagaaagua

SEQ ID NO: 276854 - RNA, 19 nt, Homo sapiens
  misc_RNA (1)...(19): siRNA sense strand
uaaaagcccugcuaaagcu

SEQ ID NO: 276855 - RNA, 19 nt, Homo sapiens
  misc_RNA (1)...(19): siRNA sense strand
cgcauuaagcugggcauua

SEQ ID NO: 276856 - RNA, 19 nt, Homo sapiens
  misc_RNA (1)...(19): siRNA sense strand
gcauuaagagccugguaag

SEQ ID NO: 276857 - RNA, 19 nt, Homo sapiens
  misc_RNA (1)...(19): siRNA sense strand
ccaagaaaguagcuaaaag

SEQ ID NO: 276858 - RNA, 19 nt, Homo sapiens
  misc_RNA (1)...(19): siRNA sense strand
cuguaaagcccaagaaagu

SEQ ID NO: 276859 - RNA, 19 nt, Homo sapiens
  misc_RNA (1)...(19): siRNA sense strand
ugcagcagccuccaagaaa

SEQ ID NO: 276860 - RNA, 19 nt, Homo sapiens
  misc_RNA (1)...(19): siRNA sense strand
gcccaagaaaguagcuaaa

SEQ ID NO: 276861 - RNA, 19 nt, Homo sapiens
  misc_RNA (1)...(19): siRNA sense strand
aggcaacgggugcaucuaa

SEQ ID NO: 276862 - RNA, 19 nt, Homo sapiens
  misc_RNA (1)...(19): siRNA sense strand
aggcaaagaaaccugcuaa

SEQ ID NO: 276863 - RNA, 19 nt, Homo sapiens
  misc_RNA (1)...(19): siRNA sense strand
gaagccaaagacugccaaa

SEQ ID NO: 276864 - RNA, 19 nt, Homo sapiens
  misc_RNA (1)...(19): siRNA sense strand
aaacuguaaagcccaagaa

SEQ ID NO: 276865 - RNA, 19 nt, Homo sapiens
  misc_RNA (1)...(19): siRNA sense strand
ccaaggcuagggugacgaa

SEQ ID NO: 276866 - RNA, 19 nt, Homo sapiens
  misc_RNA (1)...(19): siRNA sense strand
ugcuaaagcuaaggcugua

SEQ ID NO: 276867 - RNA, 19 nt, Homo sapiens
  misc_RNA (1)...(19): siRNA sense strand
gcuaaaagcccugcuaaag

SEQ ID NO: 276868 - RNA, 19 nt, Homo sapiens
  misc_RNA (1)...(19): siRNA sense strand
gucguuggcagcucuuaaa

SEQ ID NO: 276869 - RNA, 19 nt, Homo sapiens
  misc_RNA (1)...(19): siRNA sense strand
uggcaagaaggcaaagaaa

SEQ ID NO: 276870 - RNA, 19 nt, Homo sapiens
  misc_RNA (1)...(19): siRNA sense strand
gagcgucaagacuccgaaa

SEQ ID NO: 276871 - RNA, 19 nt, Homo sapiens
  misc_RNA (1)...(19): siRNA sense strand
gggcauuaagagccuggua

SEQ ID NO: 276872 - RNA, 19 nt, Homo sapiens
  misc_RNA (1)...(19): siRNA sense strand
gagccucggguuccuucaa

SEQ ID NO: 276873 - RNA, 19 nt, Homo sapiens
  misc_RNA (1)...(19): siRNA sense strand
gaaggcagcuccgaagaaa

SEQ ID NO: 276874 - RNA, 19 nt, Homo sapiens
  misc_RNA (1)...(19): siRNA sense strand
uaucugagcuuaucaccaa

SEQ ID NO: 276875 - RNA, 19 nt, Homo sapiens
  misc_RNA (1)...(19): siRNA sense strand
gaaaacaccucagccaaaa

SEQ ID NO: 276876 - RNA, 19 nt, Homo sapiens
  misc_RNA (1)...(19): siRNA sense strand
caacagccguaucaagcuu

SEQ ID NO: 276877 - RNA, 19 nt, Homo sapiens
  misc_RNA (1)...(19): siRNA sense strand
ccaagaagcccaagaaggu

SEQ ID NO: 276878 - RNA, 19 nt, Homo sapiens
  misc_RNA (1)...(19): siRNA sense strand
ccaagaaaguggccaagag

SEQ ID NO: 276879 - RNA, 19 nt, Homo sapiens
  misc_RNA (1)...(19): siRNA sense strand
ggaagccgaagguuacaaa

SEQ ID NO: 276880 - RNA, 19 nt, Homo sapiens
  misc_RNA (1)...(19): siRNA sense strand
gaagaaggcaggcgcaacu

SEQ ID NO: 276881 - RNA, 19 nt, Homo sapiens
  misc_RNA (1)...(19): siRNA sense strand
ccuucaaacucaacaagaa

SEQ ID NO: 276882 - RNA, 19 nt, Homo sapiens
  misc_RNA (1)...(19): siRNA sense strand
caagaaaguggccaagagu

SEQ ID NO: 276883 - RNA, 19 nt, Homo sapiens
  misc_RNA (1)...(19): siRNA sense strand
guaucaagcuuggccucaa

SEQ ID NO: 276884 - RNA, 19 nt, Homo sapiens
  misc_RNA (1)...(19): siRNA sense strand
aaacaacagccguaucaag

SEQ ID NO: 276885 - RNA, 19 nt, Homo sapiens
  misc_RNA (1)...(19): siRNA sense strand
aaagacuccuaagaaggua

SEQ ID NO: 276886 - RNA, 19 nt, Homo sapiens
  misc_RNA (1)...(19): siRNA sense strand
aggcgcaacugcugggaaa

SEQ ID NO: 276887 - RNA, 19 nt, Homo sapiens
  misc_RNA (1)...(19): siRNA sense strand
cagccaagaagcccaagaa

SEQ ID NO: 276888 - RNA, 19 nt, Homo sapiens
  misc_RNA (1)...(19): siRNA sense strand
agaaggcagcuccgaagaa

SEQ ID NO: 276889 - RNA, 19 nt, Homo sapiens
  misc_RNA (1)...(19): siRNA sense strand
cccaguaucugagcuuauc

SEQ ID NO: 276890 - RNA, 19 nt, Homo sapiens
  misc_RNA (1)...(19): siRNA sense strand
gaguccagcuaaggccaaa

SEQ ID NO: 276891 - RNA, 19 nt, Homo sapiens
  misc_RNA (1)...(19): siRNA sense strand
gcuucuggcuccuucaaac

SEQ ID NO: 276892 - RNA, 19 nt, Homo sapiens
  misc_RNA (1)...(19): siRNA sense strand
ccacuugcuccuaccauuc

SEQ ID NO: 276893 - RNA, 19 nt, Homo sapiens
  misc_RNA (1)...(19): siRNA sense strand
gcgcagccaagccuaggaa

SEQ ID NO: 276894 - RNA, 19 nt, Homo sapiens
  misc_RNA (1)...(19): siRNA sense strand
cuucaaacucaacaagaaa

SEQ ID NO: 276895 - RNA, 19 nt, Homo sapiens
  misc_RNA (1)...(19): siRNA sense strand
ugaaaacaccucagccaaa

SEQ ID NO: 276896 - RNA, 19 nt, Homo sapiens
  misc_RNA (1)...(19): siRNA sense strand
caaagguaccggugcuucu

SEQ ID NO: 276897 - RNA, 19 nt, Homo sapiens
  misc_RNA (1)...(19): siRNA sense strand
cuccuaagaagguaaagaa

SEQ ID NO: 276898 - RNA, 19 nt, Homo sapiens
  misc_RNA (1)...(19): siRNA sense strand
gcaguggcagcuucuaagg

SEQ ID NO: 276899 - RNA, 19 nt, Homo sapiens
  misc_RNA (1)...(19): siRNA sense strand
ccagggagcuccucacuaa

SEQ ID NO: 276900 - RNA, 19 nt, Homo sapiens
  misc_RNA (1)...(19): siRNA sense strand
gaaagcccgugaguucaua

SEQ ID NO: 276901 - RNA, 19 nt, Homo sapiens
  misc_RNA (1)...(19): siRNA sense strand
uuacaaggaugcuuugaaa

SEQ ID NO: 276902 - RNA, 19 nt, Homo sapiens
  misc_RNA (1)...(19): siRNA sense strand
cauuagaccucaccucuga

SEQ ID NO: 276903 - RNA, 19 nt, Homo sapiens
  misc_RNA (1)...(19): siRNA sense strand
cagcuucucuucugaguga

SEQ ID NO: 276904 - RNA, 19 nt, Homo sapiens
  misc_RNA (1)...(19): siRNA sense strand
gcaggaacauuaccuagag

SEQ ID NO: 276905 - RNA, 19 nt, Homo sapiens
  misc_RNA (1)...(19): siRNA sense strand
uccaagagcucauucagaa

SEQ ID NO: 276906 - RNA, 19 nt, Homo sapiens
  misc_RNA (1)...(19): siRNA sense strand
gaggaaaguaguagaguuu

SEQ ID NO: 276907 - RNA, 19 nt, Homo sapiens
  misc_RNA (1)...(19): siRNA sense strand
ucagacaccuugcuagaga

SEQ ID NO: 276908 - RNA, 19 nt, Homo sapiens
  misc_RNA (1)...(19): siRNA sense strand
ugaagcagccuaucacaaa

SEQ ID NO: 276909 - RNA, 19 nt, Homo sapiens
  misc_RNA (1)...(19): siRNA sense strand
gcagagaugcugacgaaug

SEQ ID NO: 276910 - RNA, 19 nt, Homo sapiens
  misc_RNA (1)...(19): siRNA sense strand
cagagaugcugacgaaugu

SEQ ID NO: 276911 - RNA, 19 nt, Homo sapiens
  misc_RNA (1)...(19): siRNA sense strand
gcgagcccuuguucacuua

SEQ ID NO: 276912 - RNA, 19 nt, Homo sapiens
  misc_RNA (1)...(19): siRNA sense strand
ugacuccuaugucuuugua

SEQ ID NO: 276913 - RNA, 19 nt, Homo sapiens
  misc_RNA (1)...(19): siRNA sense strand
gguuucuucuccucaaaua

SEQ ID NO: 276914 - RNA, 19 nt, Homo sapiens
  misc_RNA (1)...(19): siRNA sense strand
ccucaaauaucaagugaag

SEQ ID NO: 276915 - RNA, 19 nt, Homo sapiens
  misc_RNA (1)...(19): siRNA sense strand
gaagcagccuaucacaaag

SEQ ID NO: 276916 - RNA, 19 nt, Homo sapiens
  misc_RNA (1)...(19): siRNA sense strand
gggaggaauuccagucuuc

SEQ ID NO: 276917 - RNA, 19 nt, Homo sapiens
  misc_RNA (1)...(19): siRNA sense strand
uaaagaauaccgucccuau

SEQ ID NO: 276918 - RNA, 19 nt, Homo sapiens
  misc_RNA (1)...(19): siRNA sense strand
caggaaagcccgugaguuc

SEQ ID NO: 276919 - RNA, 19 nt, Homo sapiens
  misc_RNA (1)...(19): siRNA sense strand
gcagcccaguagaugaaua

SEQ ID NO: 276920 - RNA, 19 nt, Homo sapiens
  misc_RNA (1)...(19): siRNA sense strand
gagcuccucacuaaaguuu

SEQ ID NO: 276921 - RNA, 19 nt, Homo sapiens
  misc_RNA (1)...(19): siRNA sense strand
aggcagagaugcugacgaa

SEQ ID NO: 276922 - RNA, 19 nt, Homo sapiens
  misc_RNA (1)...(19): siRNA sense strand
agacagcgaguccuugaua

SEQ ID NO: 276923 - RNA, 19 nt, Homo sapiens
  misc_RNA (1)...(19): siRNA sense strand
cagaagucauuaagaggaa

SEQ ID NO: 276924 - RNA, 19 nt, Homo sapiens
  misc_RNA (1)...(19): siRNA sense strand
gagcccuuguucacuuaua

SEQ ID NO: 276925 - RNA, 19 nt, Homo sapiens
  misc_RNA (1)...(19): siRNA sense strand
agagagagcccaggccaua

SEQ ID NO: 276926 - RNA, 19 nt, Homo sapiens
  misc_RNA (1)...(19): siRNA sense strand
gagcccaggccauaauuga

SEQ ID NO: 276927 - RNA, 19 nt, Homo sapiens
  misc_RNA (1)...(19): siRNA sense strand
cuucuccucugcuuuauug

SEQ ID NO: 276928 - RNA, 19 nt, Homo sapiens
  misc_RNA (1)...(19): siRNA sense strand
uaauugacaccacagauga

SEQ ID NO: 276929 - RNA, 19 nt, Homo sapiens
  misc_RNA (1)...(19): siRNA sense strand
gaaagauguggaagagaga

SEQ ID NO: 276930 - RNA, 19 nt, Homo sapiens
  misc_RNA (1)...(19): siRNA sense strand
ucacuuauacacuggauga

SEQ ID NO: 276931 - RNA, 19 nt, Homo sapiens
  misc_RNA (1)...(19): siRNA sense strand
cccaguagaugaauauaca

SEQ ID NO: 276932 - RNA, 19 nt, Homo sapiens
  misc_RNA (1)...(19): siRNA sense strand
ucccagaguucuccuguga

SEQ ID NO: 276933 - RNA, 19 nt, Homo sapiens
  misc_RNA (1)...(19): siRNA sense strand
ccuaucuccucacuacuuu

SEQ ID NO: 276934 - RNA, 19 nt, Homo sapiens
  misc_RNA (1)...(19): siRNA sense strand
cugaguaucaucuucauaa

SEQ ID NO: 276935 - RNA, 19 nt, Homo sapiens
  misc_RNA (1)...(19): siRNA sense strand
gagaaguggacccugauga

SEQ ID NO: 276936 - RNA, 19 nt, Homo sapiens
  misc_RNA (1)...(19): siRNA sense strand
caugucuccucucuacuuu

SEQ ID NO: 276937 - RNA, 19 nt, Homo sapiens
  misc_RNA (1)...(19): siRNA sense strand
cuucuucuccuacacuuua

SEQ ID NO: 276938 - RNA, 19 nt, Homo sapiens
  misc_RNA (1)...(19): siRNA sense strand
ugaugacuccuaugucuuu

SEQ ID NO: 276939 - RNA, 19 nt, Homo sapiens
  misc_RNA (1)...(19): siRNA sense strand
ggacccugaugacuccuau

SEQ ID NO: 276940 - RNA, 19 nt, Homo sapiens
  misc_RNA (1)...(19): siRNA sense strand
ggaaagcccgugaguucau

SEQ ID NO: 276941 - RNA, 19 nt, Homo sapiens
  misc_RNA (1)...(19): siRNA sense strand
caagugaagcagccuauca

SEQ ID NO: 276942 - RNA, 19 nt, Homo sapiens
  misc_RNA (1)...(19): siRNA sense strand
ucaaauaucaagugaagca

SEQ ID NO: 276943 - RNA, 19 nt, Homo sapiens
  misc_RNA (1)...(19): siRNA sense strand
agaggaaaguaguagaguu

SEQ ID NO: 276944 - RNA, 19 nt, Homo sapiens
  misc_RNA (1)...(19): siRNA sense strand
gcccgugaguucauagaga

SEQ ID NO: 276945 - RNA, 19 nt, Homo sapiens
  misc_RNA (1)...(19): siRNA sense strand
cgaaugucaucagcaggua

SEQ ID NO: 276946 - RNA, 19 nt, Homo sapiens
  misc_RNA (1)...(19): siRNA sense strand
ccagucuccucuccagauu

SEQ ID NO: 276947 - RNA, 19 nt, Homo sapiens
  misc_RNA (1)...(19): siRNA sense strand
uaccgucccuauuaccuuu

SEQ ID NO: 276948 - RNA, 19 nt, Homo sapiens
  misc_RNA (1)...(19): siRNA sense strand
caagagcucauucagaagu

SEQ ID NO: 276949 - RNA, 19 nt, Homo sapiens
  misc_RNA (1)...(19): siRNA sense strand
gcauuucccugagagaagu

SEQ ID NO: 276950 - RNA, 19 nt, Homo sapiens
  misc_RNA (1)...(19): siRNA sense strand
ccagucuccucuccagauu

SEQ ID NO: 276951 - RNA, 19 nt, Homo sapiens
  misc_RNA (1)...(19): siRNA sense strand
ccagucuccucuccagauu

SEQ ID NO: 276952 - RNA, 19 nt, Homo sapiens
  misc_RNA (1)...(19): siRNA sense strand
uagcgagucuucuccaaag

SEQ ID NO: 276953 - RNA, 19 nt, Homo sapiens
  misc_RNA (1)...(19): siRNA sense strand
ccagucuccucuccagauu

SEQ ID NO: 276954 - RNA, 19 nt, Homo sapiens
  misc_RNA (1)...(19): siRNA sense strand
ccagucuccucuccagauu

SEQ ID NO: 276955 - RNA, 19 nt, Homo sapiens
  misc_RNA (1)...(19): siRNA sense strand
ccagucuccucuccagauu

SEQ ID NO: 276956 - RNA, 19 nt, Homo sapiens
  misc_RNA (1)...(19): siRNA sense strand
ccagucuccucuccagauu

SEQ ID NO: 276957 - RNA, 19 nt, Homo sapiens
  misc_RNA (1)...(19): siRNA sense strand
ccagucuccucuccagauu

SEQ ID NO: 276958 - RNA, 19 nt, Homo sapiens
  misc_RNA (1)...(19): siRNA sense strand
cuucuucuccucugcuuua

SEQ ID NO: 276959 - RNA, 19 nt, Homo sapiens
  misc_RNA (1)...(19): siRNA sense strand
cagaaccgccuccugauuc

SEQ ID NO: 276960 - RNA, 19 nt, Homo sapiens
  misc_RNA (1)...(19): siRNA sense strand
acaccuugcuagagaguga

SEQ ID NO: 276961 - RNA, 19 nt, Homo sapiens
  misc_RNA (1)...(19): siRNA sense strand
gagggagcacuuugccuuu

SEQ ID NO: 276962 - RNA, 19 nt, Homo sapiens
  misc_RNA (1)...(19): siRNA sense strand
gagcgacgacacccuguau

SEQ ID NO: 276963 - RNA, 19 nt, Homo sapiens
  misc_RNA (1)...(19): siRNA sense strand
ggacaaggauaugccuacu

SEQ ID NO: 276964 - RNA, 19 nt, Homo sapiens
  misc_RNA (1)...(19): siRNA sense strand
ccuaugaccuccuccuucu

SEQ ID NO: 276965 - RNA, 19 nt, Homo sapiens
  misc_RNA (1)...(19): siRNA sense strand
gagagagcccaggccauaa

SEQ ID NO: 276966 - RNA, 19 nt, Homo sapiens
  misc_RNA (1)...(19): siRNA sense strand
ccagaaccgccuccugauu

SEQ ID NO: 276967 - RNA, 19 nt, Homo sapiens
  misc_RNA (1)...(19): siRNA sense strand
ccugaugacuccuaugucu

SEQ ID NO: 276968 - RNA, 19 nt, Homo sapiens
  misc_RNA (1)...(19): siRNA sense strand
uauacaaguuccucagaca

SEQ ID NO: 276969 - RNA, 19 nt, Homo sapiens
  misc_RNA (1)...(19): siRNA sense strand
cgagucuucuccaaaguuc

SEQ ID NO: 276970 - RNA, 19 nt, Homo sapiens
  misc_RNA (1)...(19): siRNA sense strand
ccucucuccucuccacuuu

SEQ ID NO: 276971 - RNA, 19 nt, Homo sapiens
  misc_RNA (1)...(19): siRNA sense strand
gagaggacucccugucuuc

SEQ ID NO: 276972 - RNA, 19 nt, Homo sapiens
  misc_RNA (1)...(19): siRNA sense strand
cuucuccucuacuuuauug

SEQ ID NO: 276973 - RNA, 19 nt, Homo sapiens
  misc_RNA (1)...(19): siRNA sense strand
ccuaugaccuccuccuucu

SEQ ID NO: 276974 - RNA, 19 nt, Homo sapiens
  misc_RNA (1)...(19): siRNA sense strand
cuucuccucuacuuuauug

SEQ ID NO: 276975 - RNA, 19 nt, Homo sapiens
  misc_RNA (1)...(19): siRNA sense strand
ccucacuacuuuccucaga

SEQ ID NO: 276976 - RNA, 19 nt, Homo sapiens
  misc_RNA (1)...(19): siRNA sense strand
cuccaaaguucccaugaga

SEQ ID NO: 276977 - RNA, 19 nt, Homo sapiens
  misc_RNA (1)...(19): siRNA sense strand
ccucacuacuuuccucaga

SEQ ID NO: 276978 - RNA, 19 nt, Homo sapiens
  misc_RNA (1)...(19): siRNA sense strand
ccucacuacuuuccucaga

SEQ ID NO: 276979 - RNA, 19 nt, Homo sapiens
  misc_RNA (1)...(19): siRNA sense strand
ccucacuacuuuccucaga

SEQ ID NO: 276980 - RNA, 19 nt, Homo sapiens
  misc_RNA (1)...(19): siRNA sense strand
gagagaacucacaguacuu

SEQ ID NO: 276981 - RNA, 19 nt, Homo sapiens
  misc_RNA (1)...(19): siRNA sense strand
acucuucuccuccucguua

SEQ ID NO: 276982 - RNA, 19 nt, Homo sapiens
  misc_RNA (1)...(19): siRNA sense strand
gggagcuccucacuaaagu

SEQ ID NO: 276983 - RNA, 19 nt, Homo sapiens
  misc_RNA (1)...(19): siRNA sense strand
aguaucaucuucauaaagg

SEQ ID NO: 276984 - RNA, 19 nt, Homo sapiens
  misc_RNA (1)...(19): siRNA sense strand
gacagcgaguccuugauag

SEQ ID NO: 276985 - RNA, 19 nt, Homo sapiens
  misc_RNA (1)...(19): siRNA sense strand
agagagugauuccuugaca

SEQ ID NO: 276986 - RNA, 19 nt, Homo sapiens
  misc_RNA (1)...(19): siRNA sense strand
gaacucacaguacuuuuga

SEQ ID NO: 276987 - RNA, 19 nt, Homo sapiens
  misc_RNA (1)...(19): siRNA sense strand
ccaaaguucccaugagagu

SEQ ID NO: 276988 - RNA, 19 nt, Homo sapiens
  misc_RNA (1)...(19): siRNA sense strand
gcuccucacuaaaguuugg

SEQ ID NO: 276989 - RNA, 19 nt, Homo sapiens
  misc_RNA (1)...(19): siRNA sense strand
gggaugugcugaguggaau

SEQ ID NO: 276990 - RNA, 19 nt, Homo sapiens
  misc_RNA (1)...(19): siRNA sense strand
acuccuaugucuuuguaaa

SEQ ID NO: 276991 - RNA, 19 nt, Homo sapiens
  misc_RNA (1)...(19): siRNA sense strand
gggcuacuuuccugugauc

SEQ ID NO: 276992 - RNA, 19 nt, Homo sapiens
  misc_RNA (1)...(19): siRNA sense strand
cgagucuucuccagaguuc

SEQ ID NO: 276993 - RNA, 19 nt, Homo sapiens
  misc_RNA (1)...(19): siRNA sense strand
cagcagcccaguagaugaa

SEQ ID NO: 276994 - RNA, 19 nt, Homo sapiens
  misc_RNA (1)...(19): siRNA sense strand
cuacuuuccugugaucuuc

SEQ ID NO: 276995 - RNA, 19 nt, Homo sapiens
  misc_RNA (1)...(19): siRNA sense strand
agugcaagcuccaguguca

SEQ ID NO: 276996 - RNA, 19 nt, Homo sapiens
  misc_RNA (1)...(19): siRNA sense strand
ugauucgacugccacagaa

SEQ ID NO: 276997 - RNA, 19 nt, Homo sapiens
  misc_RNA (1)...(19): siRNA sense strand
gagagcccaggccauaauu

SEQ ID NO: 276998 - RNA, 19 nt, Homo sapiens
  misc_RNA (1)...(19): siRNA sense strand
gggaggugcccaacucuuc

SEQ ID NO: 276999 - RNA, 19 nt, Homo sapiens
  misc_RNA (1)...(19): siRNA sense strand
gcuaugacguggagaagaa

SEQ ID NO: 277000 - RNA, 19 nt, Homo sapiens
  misc_RNA (1)...(19): siRNA sense strand
uguccgagcucauuacuaa

SEQ ID NO: 277001 - RNA, 19 nt, Homo sapiens
  misc_RNA (1)...(19): siRNA sense strand
gaacaacagccgcaucaag

SEQ ID NO: 277002 - RNA, 19 nt, Homo sapiens
  misc_RNA (1)...(19): siRNA sense strand
gaaggcggcagccaagaaa

SEQ ID NO: 277003 - RNA, 19 nt, Homo sapiens
  misc_RNA (1)...(19): siRNA sense strand
cgagaagacucccgugaag

SEQ ID NO: 277004 - RNA, 19 nt, Homo sapiens
  misc_RNA (1)...(19): siRNA sense strand
ucaagagccuggugagcaa

SEQ ID NO: 277005 - RNA, 19 nt, Homo sapiens
  misc_RNA (1)...(19): siRNA sense strand
gcucauuacuaaagcuguu

SEQ ID NO: 277006 - RNA, 19 nt, Homo sapiens
  misc_RNA (1)...(19): siRNA sense strand
ccuucaaacucaacaagaa

SEQ ID NO: 277007 - RNA, 19 nt, Homo sapiens
  misc_RNA (1)...(19): siRNA sense strand
ccaaggcggcuaaaccaaa

SEQ ID NO: 277008 - RNA, 19 nt, Homo sapiens
  misc_RNA (1)...(19): siRNA sense strand
gcaucaagcugggucucaa

SEQ ID NO: 277009 - RNA, 19 nt, Homo sapiens
  misc_RNA (1)...(19): siRNA sense strand
caaggcggcuaaaccaaag

SEQ ID NO: 277010 - RNA, 19 nt, Homo sapiens
  misc_RNA (1)...(19): siRNA sense strand
cgaaagcagccaagccaaa

SEQ ID NO: 277011 - RNA, 19 nt, Homo sapiens
  misc_RNA (1)...(19): siRNA sense strand
gcgcagcggcguaucuuug

SEQ ID NO: 277012 - RNA, 19 nt, Homo sapiens
  misc_RNA (1)...(19): siRNA sense strand
agaagacucccgugaagaa

SEQ ID NO: 277013 - RNA, 19 nt, Homo sapiens
  misc_RNA (1)...(19): siRNA sense strand
gaaggccaaagcaguuaaa

SEQ ID NO: 277014 - RNA, 19 nt, Homo sapiens
  misc_RNA (1)...(19): siRNA sense strand
gcgaaggccaaagcaguua

SEQ ID NO: 277015 - RNA, 19 nt, Homo sapiens
  misc_RNA (1)...(19): siRNA sense strand
agacucccgugaagaagaa

SEQ ID NO: 277016 - RNA, 19 nt, Homo sapiens
  misc_RNA (1)...(19): siRNA sense strand
gagaagacucccgugaaga

SEQ ID NO: 277017 - RNA, 19 nt, Homo sapiens
  misc_RNA (1)...(19): siRNA sense strand
cagcaggagcggcgaagaa

SEQ ID NO: 277018 - RNA, 19 nt, Homo sapiens
  misc_RNA (1)...(19): siRNA sense strand
gaaagcagccaagccaaaa

SEQ ID NO: 277019 - RNA, 19 nt, Homo sapiens
  misc_RNA (1)...(19): siRNA sense strand
ccaaggcagccaagccaaa

SEQ ID NO: 277020 - RNA, 19 nt, Homo sapiens
  misc_RNA (1)...(19): siRNA sense strand
cggcgaagaagcccaagaa

SEQ ID NO: 277021 - RNA, 19 nt, Homo sapiens
  misc_RNA (1)...(19): siRNA sense strand
uuuggccgcucucaagaaa

SEQ ID NO: 277022 - RNA, 19 nt, Homo sapiens
  misc_RNA (1)...(19): siRNA sense strand
ccgagaagacucccgugaa

SEQ ID NO: 277023 - RNA, 19 nt, Homo sapiens
  misc_RNA (1)...(19): siRNA sense strand
cgaaggccaaagcaguuaa

SEQ ID NO: 277024 - RNA, 19 nt, Homo sapiens
  misc_RNA (1)...(19): siRNA sense strand
agaaggcggcagccaagaa

SEQ ID NO: 277025 - RNA, 19 nt, Homo sapiens
  misc_RNA (1)...(19): siRNA sense strand
gagcgcagcggcguaucuu

SEQ ID NO: 277026 - RNA, 19 nt, Homo sapiens
  misc_RNA (1)...(19): siRNA sense strand
aagaacaacagccgcauca

SEQ ID NO: 277027 - RNA, 19 nt, Homo sapiens
  misc_RNA (1)...(19): siRNA sense strand
gaagacucccgugaagaag

SEQ ID NO: 277028 - RNA, 19 nt, Homo sapiens
  misc_RNA (1)...(19): siRNA sense strand
ucggguuccuucaaacuca

SEQ ID NO: 277029 - RNA, 19 nt, Homo sapiens
  misc_RNA (1)...(19): siRNA sense strand
cgcgucggguuccuucaaa

SEQ ID NO: 277030 - RNA, 19 nt, Homo sapiens
  misc_RNA (1)...(19): siRNA sense strand
gaagaagacuccgaagaag

SEQ ID NO: 277031 - RNA, 19 nt, Homo sapiens
  misc_RNA (1)...(19): siRNA sense strand
aagaauaacagccgcauua

SEQ ID NO: 277032 - RNA, 19 nt, Homo sapiens
  misc_RNA (1)...(19): siRNA sense strand
ugaagaagacuccgaagaa

SEQ ID NO: 277033 - RNA, 19 nt, Homo sapiens
  misc_RNA (1)...(19): siRNA sense strand
gcuacgacguggagaagaa

SEQ ID NO: 277034 - RNA, 19 nt, Homo sapiens
  misc_RNA (1)...(19): siRNA sense strand
ccuuuaaacucaacaagaa

SEQ ID NO: 277035 - RNA, 19 nt, Homo sapiens
  misc_RNA (1)...(19): siRNA sense strand
cuaagaagaaggcaacuaa

SEQ ID NO: 277036 - RNA, 19 nt, Homo sapiens
  misc_RNA (1)...(19): siRNA sense strand
gaagaaggcaacuaagaag

SEQ ID NO: 277037 - RNA, 19 nt, Homo sapiens
  misc_RNA (1)...(19): siRNA sense strand
gcauuaagcugggccucaa

SEQ ID NO: 277038 - RNA, 19 nt, Homo sapiens
  misc_RNA (1)...(19): siRNA sense strand
caagaaggcggcugccaaa

SEQ ID NO: 277039 - RNA, 19 nt, Homo sapiens
  misc_RNA (1)...(19): siRNA sense strand
caaagccgcuaagcccaaa

SEQ ID NO: 277040 - RNA, 19 nt, Homo sapiens
  misc_RNA (1)...(19): siRNA sense strand
agaagaaggcaacuaagaa

SEQ ID NO: 277041 - RNA, 19 nt, Homo sapiens
  misc_RNA (1)...(19): siRNA sense strand
gaauaacagccgcauuaag

SEQ ID NO: 277042 - RNA, 19 nt, Homo sapiens
  misc_RNA (1)...(19): siRNA sense strand
gaagaauaacagccgcauu

SEQ ID NO: 277043 - RNA, 19 nt, Homo sapiens
  misc_RNA (1)...(19): siRNA sense strand
aagaagaaggcaacuaaga

SEQ ID NO: 277044 - RNA, 19 nt, Homo sapiens
  misc_RNA (1)...(19): siRNA sense strand
gcgcaauggccuuucuuug

SEQ ID NO: 277045 - RNA, 19 nt, Homo sapiens
  misc_RNA (1)...(19): siRNA sense strand
ggagcgcaauggccuuucu

SEQ ID NO: 277046 - RNA, 19 nt, Homo sapiens
  misc_RNA (1)...(19): siRNA sense strand
gcuucuggcuccuuuaaac

SEQ ID NO: 277047 - RNA, 19 nt, Homo sapiens
  misc_RNA (1)...(19): siRNA sense strand
gugaagaagacuccgaaga

SEQ ID NO: 277048 - RNA, 19 nt, Homo sapiens
  misc_RNA (1)...(19): siRNA sense strand
gcuaagaagaaggcaacua

SEQ ID NO: 277049 - RNA, 19 nt, Homo sapiens
  misc_RNA (1)...(19): siRNA sense strand
agaauaacagccgcauuaa

SEQ ID NO: 277050 - RNA, 19 nt, Homo sapiens
  misc_RNA (1)...(19): siRNA sense strand
aauaacagccgcauuaagc

SEQ ID NO: 277051 - RNA, 19 nt, Homo sapiens
  misc_RNA (1)...(19): siRNA sense strand
gccaagcccaaggcaguua

SEQ ID NO: 277052 - RNA, 19 nt, Homo sapiens
  misc_RNA (1)...(19): siRNA sense strand
gugcuucuggcuccuuuaa

SEQ ID NO: 277053 - RNA, 19 nt, Homo sapiens
  misc_RNA (1)...(19): siRNA sense strand
uggcgaagagcccuaagaa

SEQ ID NO: 277054 - RNA, 19 nt, Homo sapiens
  misc_RNA (1)...(19): siRNA sense strand
cgcaauggccuuucuuugg

SEQ ID NO: 277055 - RNA, 19 nt, Homo sapiens
  misc_RNA (1)...(19): siRNA sense strand
gaaggcggcaaagcccaaa

SEQ ID NO: 277056 - RNA, 19 nt, Homo sapiens
  misc_RNA (1)...(19): siRNA sense strand
ggcuguggcugcuucuaag

SEQ ID NO: 277057 - RNA, 19 nt, Homo sapiens
  misc_RNA (1)...(19): siRNA sense strand
caaagcagcaaaaccuaaa

SEQ ID NO: 277058 - RNA, 19 nt, Homo sapiens
  misc_RNA (1)...(19): siRNA sense strand
ccaagcccaaggcaguuaa

SEQ ID NO: 277059 - RNA, 19 nt, Homo sapiens
  misc_RNA (1)...(19): siRNA sense strand
caaagcccaaagccgcuaa

SEQ ID NO: 277060 - RNA, 19 nt, Homo sapiens
  misc_RNA (1)...(19): siRNA sense strand
guaagaaggugauuccuaa

SEQ ID NO: 277061 - RNA, 19 nt, Homo sapiens
  misc_RNA (1)...(19): siRNA sense strand
gaauaacagccgcaucaaa

SEQ ID NO: 277062 - RNA, 19 nt, Homo sapiens
  misc_RNA (1)...(19): siRNA sense strand
gaaaggccacaucuaagaa

SEQ ID NO: 277063 - RNA, 19 nt, Homo sapiens
  misc_RNA (1)...(19): siRNA sense strand
gacccaacaucaugaaguu

SEQ ID NO: 277064 - RNA, 19 nt, Homo sapiens
  misc_RNA (1)...(19): siRNA sense strand
ggccacaucuaagaaguaa

SEQ ID NO: 277065 - RNA, 19 nt, Homo sapiens
  misc_RNA (1)...(19): siRNA sense strand
gcaucaaacugucccucaa

SEQ ID NO: 277066 - RNA, 19 nt, Homo sapiens
  misc_RNA (1)...(19): siRNA sense strand
ccaagaagcugguuuuauc

SEQ ID NO: 277067 - RNA, 19 nt, Homo sapiens
  misc_RNA (1)...(19): siRNA sense strand
ggcaagggcuucgaaguca

SEQ ID NO: 277068 - RNA, 19 nt, Homo sapiens
  misc_RNA (1)...(19): siRNA sense strand
ccaauaagagagccaagaa

SEQ ID NO: 277069 - RNA, 19 nt, Homo sapiens
  misc_RNA (1)...(19): siRNA sense strand
gcaagggcuucgaagucaa

SEQ ID NO: 277070 - RNA, 19 nt, Homo sapiens
  misc_RNA (1)...(19): siRNA sense strand
gagaaacuuccaaccaaga

SEQ ID NO: 277071 - RNA, 19 nt, Homo sapiens
  misc_RNA (1)...(19): siRNA sense strand
gaaguuaauguuagaaagg

SEQ ID NO: 277072 - RNA, 19 nt, Homo sapiens
  misc_RNA (1)...(19): siRNA sense strand
agaaaggccacaucuaaga

SEQ ID NO: 277073 - RNA, 19 nt, Homo sapiens
  misc_RNA (1)...(19): siRNA sense strand
gauaagugcaagucgcaaa

SEQ ID NO: 277074 - RNA, 19 nt, Homo sapiens
  misc_RNA (1)...(19): siRNA sense strand
cuaaaggagccaaggguaa

SEQ ID NO: 277075 - RNA, 19 nt, Homo sapiens
  misc_RNA (1)...(19): siRNA sense strand
gaacgaguagguaugucuu

SEQ ID NO: 277076 - RNA, 19 nt, Homo sapiens
  misc_RNA (1)...(19): siRNA sense strand
cgagagcgacaacuccuaa

SEQ ID NO: 277077 - RNA, 19 nt, Homo sapiens
  misc_RNA (1)...(19): siRNA sense strand
cagcagaagagcccaguga

SEQ ID NO: 277078 - RNA, 19 nt, Homo sapiens
  misc_RNA (1)...(19): siRNA sense strand
ccaacaucaugaaguuaau

SEQ ID NO: 277079 - RNA, 19 nt, Homo sapiens
  misc_RNA (1)...(19): siRNA sense strand
gaguagguaugucuuuggu

SEQ ID NO: 277080 - RNA, 19 nt, Homo sapiens
  misc_RNA (1)...(19): siRNA sense strand
aagaauaacagccgcauca

SEQ ID NO: 277081 - RNA, 19 nt, Homo sapiens
  misc_RNA (1)...(19): siRNA sense strand
gcagaagagcccagugaag

SEQ ID NO: 277082 - RNA, 19 nt, Homo sapiens
  misc_RNA (1)...(19): siRNA sense strand
ucaagagcuuagugaacaa

SEQ ID NO: 277083 - RNA, 19 nt, Homo sapiens
  misc_RNA (1)...(19): siRNA sense strand
cucaagagcuuagugaaca

SEQ ID NO: 277084 - RNA, 19 nt, Homo sapiens
  misc_RNA (1)...(19): siRNA sense strand
ucacaggaacgaguaggua

SEQ ID NO: 277085 - RNA, 19 nt, Homo sapiens
  misc_RNA (1)...(19): siRNA sense strand
caagggcuucgaagucaaa

SEQ ID NO: 277086 - RNA, 19 nt, Homo sapiens
  misc_RNA (1)...(19): siRNA sense strand
ccggcuggcuugauaagug

SEQ ID NO: 277087 - RNA, 19 nt, Homo sapiens
  misc_RNA (1)...(19): siRNA sense strand
uccgguuccuuuaagcuua

SEQ ID NO: 277088 - RNA, 19 nt, Homo sapiens
  misc_RNA (1)...(19): siRNA sense strand
guaagcaacagcagaagag

SEQ ID NO: 277089 - RNA, 19 nt, Homo sapiens
  misc_RNA (1)...(19): siRNA sense strand
gguaagcaacagcagaaga

SEQ ID NO: 277090 - RNA, 19 nt, Homo sapiens
  misc_RNA (1)...(19): siRNA sense strand
gagccaaggguaagcaaca

SEQ ID NO: 277091 - RNA, 19 nt, Homo sapiens
  misc_RNA (1)...(19): siRNA sense strand
cccaacaucaugaaguuaa

SEQ ID NO: 277092 - RNA, 19 nt, Homo sapiens
  misc_RNA (1)...(19): siRNA sense strand
ggaacgaguagguaugucu

SEQ ID NO: 277093 - RNA, 19 nt, Homo sapiens
  misc_RNA (1)...(19): siRNA sense strand
aaauugacccaacaucaug

SEQ ID NO: 277094 - RNA, 19 nt, Homo sapiens
  misc_RNA (1)...(19): siRNA sense strand
ccaagaagcgagggaggaa

SEQ ID NO: 277095 - RNA, 19 nt, Homo sapiens
  misc_RNA (1)...(19): siRNA sense strand
uaacagccgcaucaaacug

SEQ ID NO: 277096 - RNA, 19 nt, Homo sapiens
  misc_RNA (1)...(19): siRNA sense strand
guuaggagcgggagaaagg

SEQ ID NO: 277097 - RNA, 19 nt, Homo sapiens
  misc_RNA (1)...(19): siRNA sense strand
uaagaaggugauuccuaaa

SEQ ID NO: 277098 - RNA, 19 nt, Homo sapiens
  misc_RNA (1)...(19): siRNA sense strand
aauaacagccgcaucaaac

SEQ ID NO: 277099 - RNA, 19 nt, Homo sapiens
  misc_RNA (1)...(19): siRNA sense strand
gugcuuccgguuccuuuaa

SEQ ID NO: 277100 - RNA, 19 nt, Homo sapiens
  misc_RNA (1)...(19): siRNA sense strand
ggagcgggagaaaggcuaa

SEQ ID NO: 277101 - RNA, 19 nt, Homo sapiens
  misc_RNA (1)...(19): siRNA sense strand
caacaucaugaaguuaaug

SEQ ID NO: 277102 - RNA, 19 nt, Homo sapiens
  misc_RNA (1)...(19): siRNA sense strand
uaaaggagccaaggguaag

SEQ ID NO: 277103 - RNA, 19 nt, Homo sapiens
  misc_RNA (1)...(19): siRNA sense strand
aguaagaaggugauuccua

SEQ ID NO: 277104 - RNA, 19 nt, Homo sapiens
  misc_RNA (1)...(19): siRNA sense strand
cgacaacuccuaaaacugu

SEQ ID NO: 277105 - RNA, 19 nt, Homo sapiens
  misc_RNA (1)...(19): siRNA sense strand
gugccgaaccucucugugu

SEQ ID NO: 277106 - RNA, 19 nt, Homo sapiens
  misc_RNA (1)...(19): siRNA sense strand
caaaauugacccaacauca

SEQ ID NO: 277107 - RNA, 19 nt, Homo sapiens
  misc_RNA (1)...(19): siRNA sense strand
agaaacuuccaaccaagaa

SEQ ID NO: 277108 - RNA, 19 nt, Homo sapiens
  misc_RNA (1)...(19): siRNA sense strand
gagagcgacaacuccuaaa

SEQ ID NO: 277109 - RNA, 19 nt, Homo sapiens
  misc_RNA (1)...(19): siRNA sense strand
auuccuaaaucuaccagaa

SEQ ID NO: 277110 - RNA, 19 nt, Homo sapiens
  misc_RNA (1)...(19): siRNA sense strand
aagaaggugauuccuaaau

SEQ ID NO: 277111 - RNA, 19 nt, Homo sapiens
  misc_RNA (1)...(19): siRNA sense strand
caaagugccgaaccucucu

SEQ ID NO: 277112 - RNA, 19 nt, Homo sapiens
  misc_RNA (1)...(19): siRNA sense strand
acgaguagguaugucuuug

SEQ ID NO: 277113 - RNA, 19 nt, Homo sapiens
  misc_RNA (1)...(19): siRNA sense strand
ggugcuuccgguuccuuua

SEQ ID NO: 277114 - RNA, 19 nt, Homo sapiens
  misc_RNA (1)...(19): siRNA sense strand
cuaaaucuaccagaagcaa

SEQ ID NO: 277115 - RNA, 19 nt, Homo sapiens
  misc_RNA (1)...(19): siRNA sense strand
gcaaacagcuggccacgaa

SEQ ID NO: 277116 - RNA, 19 nt, Homo sapiens
  misc_RNA (1)...(19): siRNA sense strand
ccaguuggcucgccggaua

SEQ ID NO: 277117 - RNA, 19 nt, Homo sapiens
  misc_RNA (1)...(19): siRNA sense strand
gcuaagagagucaccauca

SEQ ID NO: 277118 - RNA, 19 nt, Homo sapiens
  misc_RNA (1)...(19): siRNA sense strand
gagauucgucguuaucaga

SEQ ID NO: 277119 - RNA, 19 nt, Homo sapiens
  misc_RNA (1)...(19): siRNA sense strand
gcccaaagacauccaguug

SEQ ID NO: 277120 - RNA, 19 nt, Homo sapiens
  misc_RNA (1)...(19): siRNA sense strand
ggagaucgcgcaggauuuc

SEQ ID NO: 277121 - RNA, 19 nt, Homo sapiens
  misc_RNA (1)...(19): siRNA sense strand
cacgaaagccgccaggaaa

SEQ ID NO: 277122 - RNA, 19 nt, Homo sapiens
  misc_RNA (1)...(19): siRNA sense strand
uaagagagucaccaucaug

SEQ ID NO: 277123 - RNA, 19 nt, Homo sapiens
  misc_RNA (1)...(19): siRNA sense strand
ccacgaaagccgccaggaa

SEQ ID NO: 277124 - RNA, 19 nt, Homo sapiens
  misc_RNA (1)...(19): siRNA sense strand
gugggucuguucgaagaua

SEQ ID NO: 277125 - RNA, 19 nt, Homo sapiens
  misc_RNA (1)...(19): siRNA sense strand
uucgagagauucgucguua

SEQ ID NO: 277126 - RNA, 19 nt, Homo sapiens
  misc_RNA (1)...(19): siRNA sense strand
ucaccaucaugcccaaaga

SEQ ID NO: 277127 - RNA, 19 nt, Homo sapiens
  misc_RNA (1)...(19): siRNA sense strand
gaucgcgcaggauuucaaa

SEQ ID NO: 277128 - RNA, 19 nt, Homo sapiens
  misc_RNA (1)...(19): siRNA sense strand
cgagagauucgucguuauc

SEQ ID NO: 277129 - RNA, 19 nt, Homo sapiens
  misc_RNA (1)...(19): siRNA sense strand
cuaagagagucaccaucau

SEQ ID NO: 277130 - RNA, 19 nt, Homo sapiens
  misc_RNA (1)...(19): siRNA sense strand
gggagaucgcgcaggauuu

SEQ ID NO: 277131 - RNA, 19 nt, Homo sapiens
  misc_RNA (1)...(19): siRNA sense strand
caucaugcccaaagacauc

SEQ ID NO: 277132 - RNA, 19 nt, Homo sapiens
  misc_RNA (1)...(19): siRNA sense strand
ugugugccauccacgcuaa

SEQ ID NO: 277133 - RNA, 19 nt, Homo sapiens
  misc_RNA (1)...(19): siRNA sense strand
gagagauucgucguuauca

SEQ ID NO: 277134 - RNA, 19 nt, Homo sapiens
  misc_RNA (1)...(19): siRNA sense strand
cgaagauaccaaccugugu

SEQ ID NO: 277135 - RNA, 19 nt, Homo sapiens
  misc_RNA (1)...(19): siRNA sense strand
uggugggucuguucgaaga

SEQ ID NO: 277136 - RNA, 19 nt, Homo sapiens
  misc_RNA (1)...(19): siRNA sense strand
ucgagagauucgucguuau

SEQ ID NO: 277137 - RNA, 19 nt, Homo sapiens
  misc_RNA (1)...(19): siRNA sense strand
ccuggugggucuguucgaa

SEQ ID NO: 277138 - RNA, 19 nt, Homo sapiens
  misc_RNA (1)...(19): siRNA sense strand
caaggaggcugccauugug

SEQ ID NO: 277139 - RNA, 19 nt, Homo sapiens
  misc_RNA (1)...(19): siRNA sense strand
cagaggaguuuaccuacaa

SEQ ID NO: 277140 - RNA, 19 nt, Homo sapiens
  misc_RNA (1)...(19): siRNA sense strand
acauguaccuggucauuga

SEQ ID NO: 277141 - RNA, 19 nt, Homo sapiens
  misc_RNA (1)...(19): siRNA sense strand
gcagaggaguuuaccuaca

SEQ ID NO: 277142 - RNA, 19 nt, Homo sapiens
  misc_RNA (1)...(19): siRNA sense strand
caucaacaaccucaaguuu

SEQ ID NO: 277143 - RNA, 19 nt, Homo sapiens
  misc_RNA (1)...(19): siRNA sense strand
gagaaggaccaguucaaga

SEQ ID NO: 277144 - RNA, 19 nt, Homo sapiens
  misc_RNA (1)...(19): siRNA sense strand
ggaccaugcuggcgggaau

SEQ ID NO: 277145 - RNA, 19 nt, Homo sapiens
  misc_RNA (1)...(19): siRNA sense strand
cuucaggacacauuuguua

SEQ ID NO: 277146 - RNA, 19 nt, Homo sapiens
  misc_RNA (1)...(19): siRNA sense strand
gcagggagaaggaccaguu

SEQ ID NO: 277147 - RNA, 19 nt, Homo sapiens
  misc_RNA (1)...(19): siRNA sense strand
ggacacaagagucuacugu

SEQ ID NO: 277148 - RNA, 19 nt, Homo sapiens
  misc_RNA (1)...(19): siRNA sense strand
ccaaggaggcugccauugu

SEQ ID NO: 277149 - RNA, 19 nt, Homo sapiens
  misc_RNA (1)...(19): siRNA sense strand
ucaacaaccucaaguuugc

SEQ ID NO: 277150 - RNA, 19 nt, Homo sapiens
  misc_RNA (1)...(19): siRNA sense strand
gaaggaccaguucaagaug

SEQ ID NO: 277151 - RNA, 19 nt, Homo sapiens
  misc_RNA (1)...(19): siRNA sense strand
ggaaugagaaacuggucaa

SEQ ID NO: 277152 - RNA, 19 nt, Homo sapiens
  misc_RNA (1)...(19): siRNA sense strand
ggacugcggaugagaugug

SEQ ID NO: 277153 - RNA, 19 nt, Homo sapiens
  misc_RNA (1)...(19): siRNA sense strand
ucacucaccuguccacacu

SEQ ID NO: 277154 - RNA, 19 nt, Homo sapiens
  misc_RNA (1)...(19): siRNA sense strand
caggacacauuuguuacuu

SEQ ID NO: 277155 - RNA, 19 nt, Homo sapiens
  misc_RNA (1)...(19): siRNA sense strand
gaccaaggaggcugccauu

SEQ ID NO: 277156 - RNA, 19 nt, Homo sapiens
  misc_RNA (1)...(19): siRNA sense strand
agaaggaccaguucaagau

SEQ ID NO: 277157 - RNA, 19 nt, Homo sapiens
  misc_RNA (1)...(19): siRNA sense strand
ugaccgacaacuacaugua

SEQ ID NO: 277158 - RNA, 19 nt, Homo sapiens
  misc_RNA (1)...(19): siRNA sense strand
ggagaaggaccaguucaag

SEQ ID NO: 277159 - RNA, 19 nt, Homo sapiens
  misc_RNA (1)...(19): siRNA sense strand
gggagaaggaccaguucaa

SEQ ID NO: 277160 - RNA, 19 nt, Homo sapiens
  misc_RNA (1)...(19): siRNA sense strand
uggcagaggaguuuaccua

SEQ ID NO: 277161 - RNA, 19 nt, Homo sapiens
  misc_RNA (1)...(19): siRNA sense strand
ggcccugacucacaagauc

SEQ ID NO: 277162 - RNA, 19 nt, Homo sapiens
  misc_RNA (1)...(19): siRNA sense strand
ccacacuucaggacacauu

SEQ ID NO: 277163 - RNA, 19 nt, Homo sapiens
  misc_RNA (1)...(19): siRNA sense strand
ccaaggagaaguacagcau

SEQ ID NO: 277164 - RNA, 19 nt, Homo sapiens
  misc_RNA (1)...(19): siRNA sense strand
cuacauguaccuggucauu

SEQ ID NO: 277165 - RNA, 19 nt, Homo sapiens
  misc_RNA (1)...(19): siRNA sense strand
gcugcgggaaguucuauga

SEQ ID NO: 277166 - RNA, 19 nt, Homo sapiens
  misc_RNA (1)...(19): siRNA sense strand
gaagggacugcggaugaga

SEQ ID NO: 277167 - RNA, 19 nt, Homo sapiens
  misc_RNA (1)...(19): siRNA sense strand
cggaugagauguguaaagc

SEQ ID NO: 277168 - RNA, 19 nt, Homo sapiens
  misc_RNA (1)...(19): siRNA sense strand
ggccacgaguacaccauca

SEQ ID NO: 277169 - RNA, 19 nt, Homo sapiens
  misc_RNA (1)...(19): siRNA sense strand
ugacucacaagaucacuca

SEQ ID NO: 277170 - RNA, 19 nt, Homo sapiens
  misc_RNA (1)...(19): siRNA sense strand
cugcggaugagauguguaa

SEQ ID NO: 277171 - RNA, 19 nt, Homo sapiens
  misc_RNA (1)...(19): siRNA sense strand
ugaagggacugcggaugag

SEQ ID NO: 277172 - RNA, 19 nt, Homo sapiens
  misc_RNA (1)...(19): siRNA sense strand
gaccgacaacuacauguac

SEQ ID NO: 277173 - RNA, 19 nt, Homo sapiens
  misc_RNA (1)...(19): siRNA sense strand
gcggaugagauguguaaag

SEQ ID NO: 277174 - RNA, 19 nt, Homo sapiens
  misc_RNA (1)...(19): siRNA sense strand
agaaggagcugaacgaaau

SEQ ID NO: 277175 - RNA, 19 nt, Homo sapiens
  misc_RNA (1)...(19): siRNA sense strand
caagaagaccgacgugaaa

SEQ ID NO: 277176 - RNA, 19 nt, Homo sapiens
  misc_RNA (1)...(19): siRNA sense strand
gagcagcaacgacaagaaa

SEQ ID NO: 277177 - RNA, 19 nt, Homo sapiens
  misc_RNA (1)...(19): siRNA sense strand
ggaagaaggagcugaacga

SEQ ID NO: 277178 - RNA, 19 nt, Homo sapiens
  misc_RNA (1)...(19): siRNA sense strand
ugaaagaggagaagaggaa

SEQ ID NO: 277179 - RNA, 19 nt, Homo sapiens
  misc_RNA (1)...(19): siRNA sense strand
cuacaucgccuaccucaug

SEQ ID NO: 277180 - RNA, 19 nt, Homo sapiens
  misc_RNA (1)...(19): siRNA sense strand
gagcugaacgaaaucuuga

SEQ ID NO: 277181 - RNA, 19 nt, Homo sapiens
  misc_RNA (1)...(19): siRNA sense strand
gaagaaggagcugaacgaa

SEQ ID NO: 277182 - RNA, 19 nt, Homo sapiens
  misc_RNA (1)...(19): siRNA sense strand
ccacgagggcuacccguuu

SEQ ID NO: 277183 - RNA, 19 nt, Homo sapiens
  misc_RNA (1)...(19): siRNA sense strand
ucaagaagaccgacgugaa

SEQ ID NO: 277184 - RNA, 19 nt, Homo sapiens
  misc_RNA (1)...(19): siRNA sense strand
uuccauggcuggcucauug

SEQ ID NO: 277185 - RNA, 19 nt, Homo sapiens
  misc_RNA (1)...(19): siRNA sense strand
ggagcugaacgaaaucuug

SEQ ID NO: 277186 - RNA, 19 nt, Homo sapiens
  misc_RNA (1)...(19): siRNA sense strand
cacgagggcuacccguuug

SEQ ID NO: 277187 - RNA, 19 nt, Homo sapiens
  misc_RNA (1)...(19): siRNA sense strand
gcugaacgaaaucuugaaa

SEQ ID NO: 277188 - RNA, 19 nt, Homo sapiens
  misc_RNA (1)...(19): siRNA sense strand
gccuggaccacucccauua

SEQ ID NO: 277189 - RNA, 19 nt, Homo sapiens
  misc_RNA (1)...(19): siRNA sense strand
aggcagagaucaagaagac

SEQ ID NO: 277190 - RNA, 19 nt, Homo sapiens
  misc_RNA (1)...(19): siRNA sense strand
ggacucagagcaucaacag

SEQ ID NO: 277191 - RNA, 19 nt, Homo sapiens
  misc_RNA (1)...(19): siRNA sense strand
acaccaaacucuccaaaau

SEQ ID NO: 277192 - RNA, 19 nt, Homo sapiens
  misc_RNA (1)...(19): siRNA sense strand
gaagaccgacgugaaagag

SEQ ID NO: 277193 - RNA, 19 nt, Homo sapiens
  misc_RNA (1)...(19): siRNA sense strand
ucaaggcagagaucaagaa

SEQ ID NO: 277194 - RNA, 19 nt, Homo sapiens
  misc_RNA (1)...(19): siRNA sense strand
cgacaccaaacucuccaaa

SEQ ID NO: 277195 - RNA, 19 nt, Homo sapiens
  misc_RNA (1)...(19): siRNA sense strand
aagaaggagcugaacgaaa

SEQ ID NO: 277196 - RNA, 19 nt, Homo sapiens
  misc_RNA (1)...(19): siRNA sense strand
gaaggagcugaacgaaauc

SEQ ID NO: 277197 - RNA, 19 nt, Homo sapiens
  misc_RNA (1)...(19): siRNA sense strand
ugaacgaaaucuugaaaag

SEQ ID NO: 277198 - RNA, 19 nt, Homo sapiens
  misc_RNA (1)...(19): siRNA sense strand
gcacagugagcagcaacga

SEQ ID NO: 277199 - RNA, 19 nt, Homo sapiens
  misc_RNA (1)...(19): siRNA sense strand
gcaggacucagagcaucaa

SEQ ID NO: 277200 - RNA, 19 nt, Homo sapiens
  misc_RNA (1)...(19): siRNA sense strand
agaagaccgacgugaaaga

SEQ ID NO: 277201 - RNA, 19 nt, Homo sapiens
  misc_RNA (1)...(19): siRNA sense strand
aagaggagaagaggaagaa

SEQ ID NO: 277202 - RNA, 19 nt, Homo sapiens
  misc_RNA (1)...(19): siRNA sense strand
agaggaagaaggagcugaa

SEQ ID NO: 277203 - RNA, 19 nt, Homo sapiens
  misc_RNA (1)...(19): siRNA sense strand
gaagaugaccuuuacauga

SEQ ID NO: 277204 - RNA, 19 nt, Homo sapiens
  misc_RNA (1)...(19): siRNA sense strand
gauuaucacuggauucuuu

SEQ ID NO: 277205 - RNA, 19 nt, Homo sapiens
  misc_RNA (1)...(19): siRNA sense strand
gagaauggcuguacaaugc

SEQ ID NO: 277206 - RNA, 19 nt, Homo sapiens
  misc_RNA (1)...(19): siRNA sense strand
aaucacagcugcuuauauu

SEQ ID NO: 277207 - RNA, 19 nt, Homo sapiens
  misc_RNA (1)...(19): siRNA sense strand
gaagaagggacaacaauau

SEQ ID NO: 277208 - RNA, 19 nt, Homo sapiens
  misc_RNA (1)...(19): siRNA sense strand
ggaaauguuugcaaucugu

SEQ ID NO: 277209 - RNA, 19 nt, Homo sapiens
  misc_RNA (1)...(19): siRNA sense strand
ggaagaagggacaacaaua

SEQ ID NO: 277210 - RNA, 19 nt, Homo sapiens
  misc_RNA (1)...(19): siRNA sense strand
gaaagggccugucagucuu

SEQ ID NO: 277211 - RNA, 19 nt, Homo sapiens
  misc_RNA (1)...(19): siRNA sense strand
gaaacuccuuguugcauga

SEQ ID NO: 277212 - RNA, 19 nt, Homo sapiens
  misc_RNA (1)...(19): siRNA sense strand
ugaaacaccuauagaguau

SEQ ID NO: 277213 - RNA, 19 nt, Homo sapiens
  misc_RNA (1)...(19): siRNA sense strand
guacagaaacuccuuguug

SEQ ID NO: 277214 - RNA, 19 nt, Homo sapiens
  misc_RNA (1)...(19): siRNA sense strand
ugugagagguuucuaugua

SEQ ID NO: 277215 - RNA, 19 nt, Homo sapiens
  misc_RNA (1)...(19): siRNA sense strand
ccaaacggauaauuacuau

SEQ ID NO: 277216 - RNA, 19 nt, Homo sapiens
  misc_RNA (1)...(19): siRNA sense strand
ggaaaaccauuguuguuaa

SEQ ID NO: 277217 - RNA, 19 nt, Homo sapiens
  misc_RNA (1)...(19): siRNA sense strand
caauguagcuuuggugaug

SEQ ID NO: 277218 - RNA, 19 nt, Homo sapiens
  misc_RNA (1)...(19): siRNA sense strand
agaagaagaucccaugguu

SEQ ID NO: 277219 - RNA, 19 nt, Homo sapiens
  misc_RNA (1)...(19): siRNA sense strand
ccacuuauaucuggaagaa

SEQ ID NO: 277220 - RNA, 19 nt, Homo sapiens
  misc_RNA (1)...(19): siRNA sense strand
ggucauagaugggaacuca

SEQ ID NO: 277221 - RNA, 19 nt, Homo sapiens
  misc_RNA (1)...(19): siRNA sense strand
aaacagacaguucuaauug

SEQ ID NO: 277222 - RNA, 19 nt, Homo sapiens
  misc_RNA (1)...(19): siRNA sense strand
gccaagauguuugcaauug

SEQ ID NO: 277223 - RNA, 19 nt, Homo sapiens
  misc_RNA (1)...(19): siRNA sense strand
gauauuggauggcuuuuaa

SEQ ID NO: 277224 - RNA, 19 nt, Homo sapiens
  misc_RNA (1)...(19): siRNA sense strand
ucaagaagauccagacuac

SEQ ID NO: 277225 - RNA, 19 nt, Homo sapiens
  misc_RNA (1)...(19): siRNA sense strand
gcuaguaggucucauaaaa

SEQ ID NO: 277226 - RNA, 19 nt, Homo sapiens
  misc_RNA (1)...(19): siRNA sense strand
gaugggaacucagaagaug

SEQ ID NO: 277227 - RNA, 19 nt, Homo sapiens
  misc_RNA (1)...(19): siRNA sense strand
aagaacaacuuccacgaaa

SEQ ID NO: 277228 - RNA, 19 nt, Homo sapiens
  misc_RNA (1)...(19): siRNA sense strand
gaaauaucgucauggucuu

SEQ ID NO: 277229 - RNA, 19 nt, Homo sapiens
  misc_RNA (1)...(19): siRNA sense strand
cuauguauccugagaauaa

SEQ ID NO: 277230 - RNA, 19 nt, Homo sapiens
  misc_RNA (1)...(19): siRNA sense strand
caaacagacaguucuaauu

SEQ ID NO: 277231 - RNA, 19 nt, Homo sapiens
  misc_RNA (1)...(19): siRNA sense strand
gacgaaguguggauuaugu

SEQ ID NO: 277232 - RNA, 19 nt, Homo sapiens
  misc_RNA (1)...(19): siRNA sense strand
guauguaguucucaucaau

SEQ ID NO: 277233 - RNA, 19 nt, Homo sapiens
  misc_RNA (1)...(19): siRNA sense strand
gaggaaauaucgucauggu

SEQ ID NO: 277234 - RNA, 19 nt, Homo sapiens
  misc_RNA (1)...(19): siRNA sense strand
gaacauucuccucuucuug

SEQ ID NO: 277235 - RNA, 19 nt, Homo sapiens
  misc_RNA (1)...(19): siRNA sense strand
gauccagacuacuuaagga

SEQ ID NO: 277236 - RNA, 19 nt, Homo sapiens
  misc_RNA (1)...(19): siRNA sense strand
gaacucagaagaugaccuu

SEQ ID NO: 277237 - RNA, 19 nt, Homo sapiens
  misc_RNA (1)...(19): siRNA sense strand
gaagauccagacuacuuaa

SEQ ID NO: 277238 - RNA, 19 nt, Homo sapiens
  misc_RNA (1)...(19): siRNA sense strand
ggaacauucuccucuucuu

SEQ ID NO: 277239 - RNA, 19 nt, Homo sapiens
  misc_RNA (1)...(19): siRNA sense strand
caaaucagccacuuauauc

SEQ ID NO: 277240 - RNA, 19 nt, Homo sapiens
  misc_RNA (1)...(19): siRNA sense strand
uguuauacaugucgaguuu

SEQ ID NO: 277241 - RNA, 19 nt, Homo sapiens
  misc_RNA (1)...(19): siRNA sense strand
ucacuggauucuuuccuuu

SEQ ID NO: 277242 - RNA, 19 nt, Homo sapiens
  misc_RNA (1)...(19): siRNA sense strand
agacagaugagucacauaa

SEQ ID NO: 277243 - RNA, 19 nt, Homo sapiens
  misc_RNA (1)...(19): siRNA sense strand
ggauuaaaguugucauggu

SEQ ID NO: 277244 - RNA, 19 nt, Homo sapiens
  misc_RNA (1)...(19): siRNA sense strand
ccucagcaguguaagauau

SEQ ID NO: 277245 - RNA, 19 nt, Homo sapiens
  misc_RNA (1)...(19): siRNA sense strand
aagaugaccuuuacaugau

SEQ ID NO: 277246 - RNA, 19 nt, Homo sapiens
  misc_RNA (1)...(19): siRNA sense strand
uaaccuacccugggauuaa

SEQ ID NO: 277247 - RNA, 19 nt, Homo sapiens
  misc_RNA (1)...(19): siRNA sense strand
gugagagguuucuauguau

SEQ ID NO: 277248 - RNA, 19 nt, Homo sapiens
  misc_RNA (1)...(19): siRNA sense strand
acagacaguucuaauuguu

SEQ ID NO: 277249 - RNA, 19 nt, Homo sapiens
  misc_RNA (1)...(19): siRNA sense strand
gagacaaaucagccacuua

SEQ ID NO: 277250 - RNA, 19 nt, Homo sapiens
  misc_RNA (1)...(19): siRNA sense strand
aauaugacauggugcuuga

SEQ ID NO: 277251 - RNA, 19 nt, Homo sapiens
  misc_RNA (1)...(19): siRNA sense strand
acaaaucagccacuuauau

SEQ ID NO: 277252 - RNA, 19 nt, Homo sapiens
  misc_RNA (1)...(19): siRNA sense strand
ggaaucacagcugcuuaua

SEQ ID NO: 277253 - RNA, 19 nt, Homo sapiens
  misc_RNA (1)...(19): siRNA sense strand
gaauggcuguacaaugcaa

SEQ ID NO: 277254 - RNA, 19 nt, Homo sapiens
  misc_RNA (1)...(19): siRNA sense strand
cuucaugucucucuacuca

SEQ ID NO: 277255 - RNA, 19 nt, Homo sapiens
  misc_RNA (1)...(19): siRNA sense strand
gaaucacagcugcuuauau

SEQ ID NO: 277256 - RNA, 19 nt, Homo sapiens
  misc_RNA (1)...(19): siRNA sense strand
cuuguuaacuguccagcua

SEQ ID NO: 277257 - RNA, 19 nt, Homo sapiens
  misc_RNA (1)...(19): siRNA sense strand
uaagauauuggauggcuuu

SEQ ID NO: 277258 - RNA, 19 nt, Homo sapiens
  misc_RNA (1)...(19): siRNA sense strand
ccagacuacuuaaggaaau

SEQ ID NO: 277259 - RNA, 19 nt, Homo sapiens
  misc_RNA (1)...(19): siRNA sense strand
agacaaaucagccacuuau

SEQ ID NO: 277260 - RNA, 19 nt, Homo sapiens
  misc_RNA (1)...(19): siRNA sense strand
cauggugcuugauguauga

SEQ ID NO: 277261 - RNA, 19 nt, Homo sapiens
  misc_RNA (1)...(19): siRNA sense strand
auacacagcucgaucuaag

SEQ ID NO: 277262 - RNA, 19 nt, Homo sapiens
  misc_RNA (1)...(19): siRNA sense strand
agaaagcucgcaacacgua

SEQ ID NO: 277263 - RNA, 19 nt, Homo sapiens
  misc_RNA (1)...(19): siRNA sense strand
acagaugagucacauaaag

SEQ ID NO: 277264 - RNA, 19 nt, Homo sapiens
  misc_RNA (1)...(19): siRNA sense strand
uagaggaaauaucgucaug

SEQ ID NO: 277265 - RNA, 19 nt, Homo sapiens
  misc_RNA (1)...(19): siRNA sense strand
gggccugucagucuuauuu

SEQ ID NO: 277266 - RNA, 19 nt, Homo sapiens
  misc_RNA (1)...(19): siRNA sense strand
ggggagauguccagauuuu

SEQ ID NO: 277267 - RNA, 19 nt, Homo sapiens
  misc_RNA (1)...(19): siRNA sense strand
agaagauccagacuacuua

SEQ ID NO: 277268 - RNA, 19 nt, Homo sapiens
  misc_RNA (1)...(19): siRNA sense strand
uggauucuuuccuuucuuu

SEQ ID NO: 277269 - RNA, 19 nt, Homo sapiens
  misc_RNA (1)...(19): siRNA sense strand
cugaaacaccuauagagua

SEQ ID NO: 277270 - RNA, 19 nt, Homo sapiens
  misc_RNA (1)...(19): siRNA sense strand
aaagagaagucauguacac

SEQ ID NO: 277271 - RNA, 19 nt, Homo sapiens
  misc_RNA (1)...(19): siRNA sense strand
ccauuuauaaggagucuaa

SEQ ID NO: 277272 - RNA, 19 nt, Homo sapiens
  misc_RNA (1)...(19): siRNA sense strand
caucacaccucaucaucca

SEQ ID NO: 277273 - RNA, 19 nt, Homo sapiens
  misc_RNA (1)...(19): siRNA sense strand
gacaaaucagccacuuaua

SEQ ID NO: 277274 - RNA, 19 nt, Homo sapiens
  misc_RNA (1)...(19): siRNA sense strand
gggcacaucaggaaggaaa

SEQ ID NO: 277275 - RNA, 19 nt, Homo sapiens
  misc_RNA (1)...(19): siRNA sense strand
aaacaccuauagaguaucu

SEQ ID NO: 277276 - RNA, 19 nt, Homo sapiens
  misc_RNA (1)...(19): siRNA sense strand
ggagauguccagauuuuaa

SEQ ID NO: 277277 - RNA, 19 nt, Homo sapiens
  misc_RNA (1)...(19): siRNA sense strand
uugcaucgcugccuaucaa

SEQ ID NO: 277278 - RNA, 19 nt, Homo sapiens
  misc_RNA (1)...(19): siRNA sense strand
gcuauugggucaugcuuuu

SEQ ID NO: 277279 - RNA, 19 nt, Homo sapiens
  misc_RNA (1)...(19): siRNA sense strand
gguaaaauuuggaacauuc

SEQ ID NO: 277280 - RNA, 19 nt, Homo sapiens
  misc_RNA (1)...(19): siRNA sense strand
ggcaaccaauguagcuuug

SEQ ID NO: 277281 - RNA, 19 nt, Homo sapiens
  misc_RNA (1)...(19): siRNA sense strand
gggacgaaguguggauuau

SEQ ID NO: 277282 - RNA, 19 nt, Homo sapiens
  misc_RNA (1)...(19): siRNA sense strand
ucacagcugcuuauauugu

SEQ ID NO: 277283 - RNA, 19 nt, Homo sapiens
  misc_RNA (1)...(19): siRNA sense strand
guaguucucaucaauaagu

SEQ ID NO: 277284 - RNA, 19 nt, Homo sapiens
  misc_RNA (1)...(19): siRNA sense strand
gggcaaccaauguagcuuu

SEQ ID NO: 277285 - RNA, 19 nt, Homo sapiens
  misc_RNA (1)...(19): siRNA sense strand
gaauuuaugggcaaccaau

SEQ ID NO: 277286 - RNA, 19 nt, Homo sapiens
  misc_RNA (1)...(19): siRNA sense strand
cagaugagucacauaaaga

SEQ ID NO: 277287 - RNA, 19 nt, Homo sapiens
  misc_RNA (1)...(19): siRNA sense strand
cacagcugcuuauauuguu

SEQ ID NO: 277288 - RNA, 19 nt, Homo sapiens
  misc_RNA (1)...(19): siRNA sense strand
auuguuggcuaccaguuua

SEQ ID NO: 277289 - RNA, 19 nt, Homo sapiens
  misc_RNA (1)...(19): siRNA sense strand
ccaaacagacaguucuaau

SEQ ID NO: 277290 - RNA, 19 nt, Homo sapiens
  misc_RNA (1)...(19): siRNA sense strand
ggacgaaguguggauuaug

SEQ ID NO: 277291 - RNA, 19 nt, Homo sapiens
  misc_RNA (1)...(19): siRNA sense strand
aagaagauccagacuacuu

SEQ ID NO: 277292 - RNA, 19 nt, Homo sapiens
  misc_RNA (1)...(19): siRNA sense strand
ccacaguaauccagcucuu

SEQ ID NO: 277293 - RNA, 19 nt, Homo sapiens
  misc_RNA (1)...(19): siRNA sense strand
acucagaagaugaccuuua

SEQ ID NO: 277294 - RNA, 19 nt, Homo sapiens
  misc_RNA (1)...(19): siRNA sense strand
acuuauaucuggaagaaca

SEQ ID NO: 277295 - RNA, 19 nt, Homo sapiens
  misc_RNA (1)...(19): siRNA sense strand
guuggaacguugcucuaug

SEQ ID NO: 277296 - RNA, 19 nt, Homo sapiens
  misc_RNA (1)...(19): siRNA sense strand
ccuccuggguggugugauu

SEQ ID NO: 277297 - RNA, 19 nt, Homo sapiens
  misc_RNA (1)...(19): siRNA sense strand
ccgccaagauguuugcaau

SEQ ID NO: 277298 - RNA, 19 nt, Homo sapiens
  misc_RNA (1)...(19): siRNA sense strand
ccagcuaguaggucucaua

SEQ ID NO: 277299 - RNA, 19 nt, Homo sapiens
  misc_RNA (1)...(19): siRNA sense strand
guacaaugcaaugugguuu

SEQ ID NO: 277300 - RNA, 19 nt, Homo sapiens
  misc_RNA (1)...(19): siRNA sense strand
agaaagggccugucagucu

SEQ ID NO: 277301 - RNA, 19 nt, Homo sapiens
  misc_RNA (1)...(19): siRNA sense strand
uggauuauguacagguuug

SEQ ID NO: 277302 - RNA, 19 nt, Homo sapiens
  misc_RNA (1)...(19): siRNA sense strand
uaacgcaauuggucuuguc

SEQ ID NO: 277303 - RNA, 19 nt, Homo sapiens
  misc_RNA (1)...(19): siRNA sense strand
cgacagaggcccuggaaag

SEQ ID NO: 277304 - RNA, 19 nt, Homo sapiens
  misc_RNA (1)...(19): siRNA sense strand
aggcgucgcuggacaaguu

SEQ ID NO: 277305 - RNA, 19 nt, Homo sapiens
  misc_RNA (1)...(19): siRNA sense strand
gcagcaacgucggcgucua

SEQ ID NO: 277306 - RNA, 19 nt, Homo sapiens
  misc_RNA (1)...(19): siRNA sense strand
ggccacugccugcugguaa

SEQ ID NO: 277307 - RNA, 19 nt, Homo sapiens
  misc_RNA (1)...(19): siRNA sense strand
cggcgcugguuuccgagua

SEQ ID NO: 277308 - RNA, 19 nt, Homo sapiens
  misc_RNA (1)...(19): siRNA sense strand
gcacuaccccggagacuuc

SEQ ID NO: 277309 - RNA, 19 nt, Homo sapiens
  misc_RNA (1)...(19): siRNA sense strand
gagaggaccaucauugugu

SEQ ID NO: 277310 - RNA, 19 nt, Homo sapiens
  misc_RNA (1)...(19): siRNA sense strand
gaagagcaucgacgacauc

SEQ ID NO: 277311 - RNA, 19 nt, Homo sapiens
  misc_RNA (1)...(19): siRNA sense strand
ugaagagcaucgacgacau

SEQ ID NO: 277312 - RNA, 19 nt, Homo sapiens
  misc_RNA (1)...(19): siRNA sense strand
ccucuguccugaccgagaa

SEQ ID NO: 277313 - RNA, 19 nt, Homo sapiens
  misc_RNA (1)...(19): siRNA sense strand
gcgacgcggugaagagcau

SEQ ID NO: 277314 - RNA, 19 nt, Homo sapiens
  misc_RNA (1)...(19): siRNA sense strand
ugagaggaccaucauugug

SEQ ID NO: 277315 - RNA, 19 nt, Homo sapiens
  misc_RNA (1)...(19): siRNA sense strand
agaccuacuucccgcacuu

SEQ ID NO: 277316 - RNA, 19 nt, Homo sapiens
  misc_RNA (1)...(19): siRNA sense strand
acugagaggaccaucauug

SEQ ID NO: 277317 - RNA, 19 nt, Homo sapiens
  misc_RNA (1)...(19): siRNA sense strand
gcagaccaagaccuacuuc

SEQ ID NO: 277318 - RNA, 19 nt, Homo sapiens
  misc_RNA (1)...(19): siRNA sense strand
ccagaaacauacccauuua

SEQ ID NO: 277319 - RNA, 19 nt, Homo sapiens
  misc_RNA (1)...(19): siRNA sense strand
gcaaaucaguacaaacaaa

SEQ ID NO: 277320 - RNA, 19 nt, Homo sapiens
  misc_RNA (1)...(19): siRNA sense strand
ugauaggaaugcaguaaua

SEQ ID NO: 277321 - RNA, 19 nt, Homo sapiens
  misc_RNA (1)...(19): siRNA sense strand
ggaggaagauaccaacuag

SEQ ID NO: 277322 - RNA, 19 nt, Homo sapiens
  misc_RNA (1)...(19): siRNA sense strand
gauaccaacuagagauaaa

SEQ ID NO: 277323 - RNA, 19 nt, Homo sapiens
  misc_RNA (1)...(19): siRNA sense strand
gaagauaccaacuagagau

SEQ ID NO: 277324 - RNA, 19 nt, Homo sapiens
  misc_RNA (1)...(19): siRNA sense strand
aaacagacagcucgacuuu

SEQ ID NO: 277325 - RNA, 19 nt, Homo sapiens
  misc_RNA (1)...(19): siRNA sense strand
gaaacauacccauuuaauc

SEQ ID NO: 277326 - RNA, 19 nt, Homo sapiens
  misc_RNA (1)...(19): siRNA sense strand
ucaaggaggugcugaagag

SEQ ID NO: 277327 - RNA, 19 nt, Homo sapiens
  misc_RNA (1)...(19): siRNA sense strand
gcacgguauuauugucauu

SEQ ID NO: 277328 - RNA, 19 nt, Homo sapiens
  misc_RNA (1)...(19): siRNA sense strand
gaauuaagaggagaaauag

SEQ ID NO: 277329 - RNA, 19 nt, Homo sapiens
  misc_RNA (1)...(19): siRNA sense strand
acagacagcucgacuuugg

SEQ ID NO: 277330 - RNA, 19 nt, Homo sapiens
  misc_RNA (1)...(19): siRNA sense strand
gaaucaagcgggaguucaa

SEQ ID NO: 277331 - RNA, 19 nt, Homo sapiens
  misc_RNA (1)...(19): siRNA sense strand
uagcaaaucaguacaaaca

SEQ ID NO: 277332 - RNA, 19 nt, Homo sapiens
  misc_RNA (1)...(19): siRNA sense strand
guuuggauauccugaaaga

SEQ ID NO: 277333 - RNA, 19 nt, Homo sapiens
  misc_RNA (1)...(19): siRNA sense strand
caaacaaaaucccgaaaug

SEQ ID NO: 277334 - RNA, 19 nt, Homo sapiens
  misc_RNA (1)...(19): siRNA sense strand
uguagagacugcaacagaa

SEQ ID NO: 277335 - RNA, 19 nt, Homo sapiens
  misc_RNA (1)...(19): siRNA sense strand
ggaagauaccaacuagaga

SEQ ID NO: 277336 - RNA, 19 nt, Homo sapiens
  misc_RNA (1)...(19): siRNA sense strand
ccuaagguccgguuuauca

SEQ ID NO: 277337 - RNA, 19 nt, Homo sapiens
  misc_RNA (1)...(19): siRNA sense strand
aaacauacccauuuaaucc

SEQ ID NO: 277338 - RNA, 19 nt, Homo sapiens
  misc_RNA (1)...(19): siRNA sense strand
cagaaacauacccauuuaa

SEQ ID NO: 277339 - RNA, 19 nt, Homo sapiens
  misc_RNA (1)...(19): siRNA sense strand
agacacaccauaugaagga

SEQ ID NO: 277340 - RNA, 19 nt, Homo sapiens
  misc_RNA (1)...(19): siRNA sense strand
ucaaugggcagcugcaaug

SEQ ID NO: 277341 - RNA, 19 nt, Homo sapiens
  misc_RNA (1)...(19): siRNA sense strand
uaauauuaguuccgucaca

SEQ ID NO: 277342 - RNA, 19 nt, Homo sapiens
  misc_RNA (1)...(19): siRNA sense strand
uggauauccugaaagauca

SEQ ID NO: 277343 - RNA, 19 nt, Homo sapiens
  misc_RNA (1)...(19): siRNA sense strand
ucacaggggcuauuuguuu

SEQ ID NO: 277344 - RNA, 19 nt, Homo sapiens
  misc_RNA (1)...(19): siRNA sense strand
guagagacugcaacagaau

SEQ ID NO: 277345 - RNA, 19 nt, Homo sapiens
  misc_RNA (1)...(19): siRNA sense strand
gaaaaccuaugugcuaugg

SEQ ID NO: 277346 - RNA, 19 nt, Homo sapiens
  misc_RNA (1)...(19): siRNA sense strand
ggccuugucuucaaaauca

SEQ ID NO: 277347 - RNA, 19 nt, Homo sapiens
  misc_RNA (1)...(19): siRNA sense strand
aagauaccaacuagagaua

SEQ ID NO: 277348 - RNA, 19 nt, Homo sapiens
  misc_RNA (1)...(19): siRNA sense strand
auaguggccuugucuucaa

SEQ ID NO: 277349 - RNA, 19 nt, Homo sapiens
  misc_RNA (1)...(19): siRNA sense strand
aagguccgguuuaucacua

SEQ ID NO: 277350 - RNA, 19 nt, Homo sapiens
  misc_RNA (1)...(19): siRNA sense strand
gguauuauugucauugcaa

SEQ ID NO: 277351 - RNA, 19 nt, Homo sapiens
  misc_RNA (1)...(19): siRNA sense strand
gauaggaaugcaguaauag

SEQ ID NO: 277352 - RNA, 19 nt, Homo sapiens
  misc_RNA (1)...(19): siRNA sense strand
caaacagacagcucgacuu

SEQ ID NO: 277353 - RNA, 19 nt, Homo sapiens
  misc_RNA (1)...(19): siRNA sense strand
ccuaugugcuaugggcuuu

SEQ ID NO: 277354 - RNA, 19 nt, Homo sapiens
  misc_RNA (1)...(19): siRNA sense strand
cauaugaaggaggaagaua

SEQ ID NO: 277355 - RNA, 19 nt, Homo sapiens
  misc_RNA (1)...(19): siRNA sense strand
uaauaguggccuugucuuc

SEQ ID NO: 277356 - RNA, 19 nt, Homo sapiens
  misc_RNA (1)...(19): siRNA sense strand
accagaaacauacccauuu

SEQ ID NO: 277357 - RNA, 19 nt, Homo sapiens
  misc_RNA (1)...(19): siRNA sense strand
ggauguagagacugcaaca

SEQ ID NO: 277358 - RNA, 19 nt, Homo sapiens
  misc_RNA (1)...(19): siRNA sense strand
uaugugcuaugggcuuuga

SEQ ID NO: 277359 - RNA, 19 nt, Homo sapiens
  misc_RNA (1)...(19): siRNA sense strand
ugaaggaggaagauaccaa

SEQ ID NO: 277360 - RNA, 19 nt, Homo sapiens
  misc_RNA (1)...(19): siRNA sense strand
ccagacacaccauaugaag

SEQ ID NO: 277361 - RNA, 19 nt, Homo sapiens
  misc_RNA (1)...(19): siRNA sense strand
aguagcaaaucaguacaaa

SEQ ID NO: 277362 - RNA, 19 nt, Homo sapiens
  misc_RNA (1)...(19): siRNA sense strand
acuaaaauauggcauccua

SEQ ID NO: 277363 - RNA, 19 nt, Homo sapiens
  misc_RNA (1)...(19): siRNA sense strand
gaauugcuucugaguaacu

SEQ ID NO: 277364 - RNA, 19 nt, Homo sapiens
  misc_RNA (1)...(19): siRNA sense strand
uaggaaugcaguaauagug

SEQ ID NO: 277365 - RNA, 19 nt, Homo sapiens
  misc_RNA (1)...(19): siRNA sense strand
uaccagaaacauacccauu

SEQ ID NO: 277366 - RNA, 19 nt, Homo sapiens
  misc_RNA (1)...(19): siRNA sense strand
gcucgacuuugggcacaug

SEQ ID NO: 277367 - RNA, 19 nt, Homo sapiens
  misc_RNA (1)...(19): siRNA sense strand
agcaggaccuccagacaca

SEQ ID NO: 277368 - RNA, 19 nt, Homo sapiens
  misc_RNA (1)...(19): siRNA sense strand
uagagacugcaacagaauu

SEQ ID NO: 277369 - RNA, 19 nt, Homo sapiens
  misc_RNA (1)...(19): siRNA sense strand
uaguggccuugucuucaaa

SEQ ID NO: 277370 - RNA, 19 nt, Homo sapiens
  misc_RNA (1)...(19): siRNA sense strand
guaauaguggccuugucuu

SEQ ID NO: 277371 - RNA, 19 nt, Homo sapiens
  misc_RNA (1)...(19): siRNA sense strand
gcaguaauaguggccuugu

SEQ ID NO: 277372 - RNA, 19 nt, Homo sapiens
  misc_RNA (1)...(19): siRNA sense strand
uuggauauccugaaagauc

SEQ ID NO: 277373 - RNA, 19 nt, Homo sapiens
  misc_RNA (1)...(19): siRNA sense strand
gaggaagauaccaacuaga

SEQ ID NO: 277374 - RNA, 19 nt, Homo sapiens
  misc_RNA (1)...(19): siRNA sense strand
gaccuccagacacaccaua

SEQ ID NO: 277375 - RNA, 19 nt, Homo sapiens
  misc_RNA (1)...(19): siRNA sense strand
ggggcuauuuguuuggaua

SEQ ID NO: 277376 - RNA, 19 nt, Homo sapiens
  misc_RNA (1)...(19): siRNA sense strand
uagaaaaccuaugugcuau

SEQ ID NO: 277377 - RNA, 19 nt, Homo sapiens
  misc_RNA (1)...(19): siRNA sense strand
cgacuuugggcacaugugu

SEQ ID NO: 277378 - RNA, 19 nt, Homo sapiens
  misc_RNA (1)...(19): siRNA sense strand
aggaggaagauaccaacua

SEQ ID NO: 277379 - RNA, 19 nt, Homo sapiens
  misc_RNA (1)...(19): siRNA sense strand
cagcugcagagccagauga

SEQ ID NO: 277380 - RNA, 19 nt, Homo sapiens
  misc_RNA (1)...(19): siRNA sense strand
gucauugcaagcacuauug

SEQ ID NO: 277381 - RNA, 19 nt, Homo sapiens
  misc_RNA (1)...(19): siRNA sense strand
cuccagacacaccauauga

SEQ ID NO: 277382 - RNA, 19 nt, Homo sapiens
  misc_RNA (1)...(19): siRNA sense strand
ggagauaucugugccugua

SEQ ID NO: 277383 - RNA, 19 nt, Homo sapiens
  misc_RNA (1)...(19): siRNA sense strand
ggagagaaacgucgugauu

SEQ ID NO: 277384 - RNA, 19 nt, Homo sapiens
  misc_RNA (1)...(19): siRNA sense strand
ggucuucauugaugucaua

SEQ ID NO: 277385 - RNA, 19 nt, Homo sapiens
  misc_RNA (1)...(19): siRNA sense strand
ccacugaucuggauugagu

SEQ ID NO: 277386 - RNA, 19 nt, Homo sapiens
  misc_RNA (1)...(19): siRNA sense strand
agaacgaggucuucauuga

SEQ ID NO: 277387 - RNA, 19 nt, Homo sapiens
  misc_RNA (1)...(19): siRNA sense strand
agagaaacgucgugauuug

SEQ ID NO: 277388 - RNA, 19 nt, Homo sapiens
  misc_RNA (1)...(19): siRNA sense strand
ccgaggguaucaaguauaa

SEQ ID NO: 277389 - RNA, 19 nt, Homo sapiens
  misc_RNA (1)...(19): siRNA sense strand
gucgugauuuggaguauua

SEQ ID NO: 277390 - RNA, 19 nt, Homo sapiens
  misc_RNA (1)...(19): siRNA sense strand
caguagagcuggaggaugu

SEQ ID NO: 277391 - RNA, 19 nt, Homo sapiens
  misc_RNA (1)...(19): siRNA sense strand
acuuugagcucaugucaua

SEQ ID NO: 277392 - RNA, 19 nt, Homo sapiens
  misc_RNA (1)...(19): siRNA sense strand
ggccaacgguguggagaua

SEQ ID NO: 277393 - RNA, 19 nt, Homo sapiens
  misc_RNA (1)...(19): siRNA sense strand
gagagaaacgucgugauuu

SEQ ID NO: 277394 - RNA, 19 nt, Homo sapiens
  misc_RNA (1)...(19): siRNA sense strand
ggauugagucugucauuga

SEQ ID NO: 277395 - RNA, 19 nt, Homo sapiens
  misc_RNA (1)...(19): siRNA sense strand
gguaucaaguauaagaaga

SEQ ID NO: 277396 - RNA, 19 nt, Homo sapiens
  misc_RNA (1)...(19): siRNA sense strand
gagcauccgggacaacuuu

SEQ ID NO: 277397 - RNA, 19 nt, Homo sapiens
  misc_RNA (1)...(19): siRNA sense strand
gaaaucgucgguaccauca

SEQ ID NO: 277398 - RNA, 19 nt, Homo sapiens
  misc_RNA (1)...(19): siRNA sense strand
gaacgaggucuucauugau

SEQ ID NO: 277399 - RNA, 19 nt, Homo sapiens
  misc_RNA (1)...(19): siRNA sense strand
ccaucaagcucaagguguu

SEQ ID NO: 277400 - RNA, 19 nt, Homo sapiens
  misc_RNA (1)...(19): siRNA sense strand
gaguggcgauuaccaacuu

SEQ ID NO: 277401 - RNA, 19 nt, Homo sapiens
  misc_RNA (1)...(19): siRNA sense strand
gcuccgaggguaucaagua

SEQ ID NO: 277402 - RNA, 19 nt, Homo sapiens
  misc_RNA (1)...(19): siRNA sense strand
gaggguaucaaguauaaga

SEQ ID NO: 277403 - RNA, 19 nt, Homo sapiens
  misc_RNA (1)...(19): siRNA sense strand
ugagcaagauugagcacuu

SEQ ID NO: 277404 - RNA, 19 nt, Homo sapiens
  misc_RNA (1)...(19): siRNA sense strand
gagcaagauugagcacuuc

SEQ ID NO: 277405 - RNA, 19 nt, Homo sapiens
  misc_RNA (1)...(19): siRNA sense strand
gugcggcucucucgcuuug

SEQ ID NO: 277406 - RNA, 19 nt, Homo sapiens
  misc_RNA (1)...(19): siRNA sense strand
cuucaugccuuugcuggua

SEQ ID NO: 277407 - RNA, 19 nt, Homo sapiens
  misc_RNA (1)...(19): siRNA sense strand
gcaagaacaaaucaguaga

SEQ ID NO: 277408 - RNA, 19 nt, Homo sapiens
  misc_RNA (1)...(19): siRNA sense strand
guauaagacaauagaggua

SEQ ID NO: 277409 - RNA, 19 nt, Homo sapiens
  misc_RNA (1)...(19): siRNA sense strand
cagcaagaacaaaucagua

SEQ ID NO: 277410 - RNA, 19 nt, Homo sapiens
  misc_RNA (1)...(19): siRNA sense strand
uggacgagcucauggacuu

SEQ ID NO: 277411 - RNA, 19 nt, Homo sapiens
  misc_RNA (1)...(19): siRNA sense strand
gguguacuccuuccuguau

SEQ ID NO: 277412 - RNA, 19 nt, Homo sapiens
  misc_RNA (1)...(19): siRNA sense strand
gauugagucugucauugag

SEQ ID NO: 277413 - RNA, 19 nt, Homo sapiens
  misc_RNA (1)...(19): siRNA sense strand
ucaagccacugaucuggau

SEQ ID NO: 277414 - RNA, 19 nt, Homo sapiens
  misc_RNA (1)...(19): siRNA sense strand
acacagcaaccucuacuug

SEQ ID NO: 277415 - RNA, 19 nt, Homo sapiens
  misc_RNA (1)...(19): siRNA sense strand
guuaagggcaagccauuga

SEQ ID NO: 277416 - RNA, 19 nt, Homo sapiens
  misc_RNA (1)...(19): siRNA sense strand
uguacuccuuccuguauaa

SEQ ID NO: 277417 - RNA, 19 nt, Homo sapiens
  misc_RNA (1)...(19): siRNA sense strand
gcguggagaucauggucaa

SEQ ID NO: 277418 - RNA, 19 nt, Homo sapiens
  misc_RNA (1)...(19): siRNA sense strand
cgccucggcugucuucauu

SEQ ID NO: 277419 - RNA, 19 nt, Homo sapiens
  misc_RNA (1)...(19): siRNA sense strand
caagauugagcacuucaug

SEQ ID NO: 277420 - RNA, 19 nt, Homo sapiens
  misc_RNA (1)...(19): siRNA sense strand
gcagcaagaacaaaucagu

SEQ ID NO: 277421 - RNA, 19 nt, Homo sapiens
  misc_RNA (1)...(19): siRNA sense strand
aacgaggucuucauugaug

SEQ ID NO: 277422 - RNA, 19 nt, Homo sapiens
  misc_RNA (1)...(19): siRNA sense strand
ccaacgguguggagauauc

SEQ ID NO: 277423 - RNA, 19 nt, Homo sapiens
  misc_RNA (1)...(19): siRNA sense strand
guguacuccuuccuguaua

SEQ ID NO: 277424 - RNA, 19 nt, Homo sapiens
  misc_RNA (1)...(19): siRNA sense strand
gauguggccaugagcaaga

SEQ ID NO: 277425 - RNA, 19 nt, Homo sapiens
  misc_RNA (1)...(19): siRNA sense strand
ucaaguauaagaagaacga

SEQ ID NO: 277426 - RNA, 19 nt, Homo sapiens
  misc_RNA (1)...(19): siRNA sense strand
gcuggaggauguaaaauuc

SEQ ID NO: 277427 - RNA, 19 nt, Homo sapiens
  misc_RNA (1)...(19): siRNA sense strand
caagaacaaaucaguagag

SEQ ID NO: 277428 - RNA, 19 nt, Homo sapiens
  misc_RNA (1)...(19): siRNA sense strand
gaagaucauugagaaaagu

SEQ ID NO: 277429 - RNA, 19 nt, Homo sapiens
  misc_RNA (1)...(19): siRNA sense strand
ucaaacacagcaaccucua

SEQ ID NO: 277430 - RNA, 19 nt, Homo sapiens
  misc_RNA (1)...(19): siRNA sense strand
gauuuggaguauuaagucu

SEQ ID NO: 277431 - RNA, 19 nt, Homo sapiens
  misc_RNA (1)...(19): siRNA sense strand
ugaucuggauugagucugu

SEQ ID NO: 277432 - RNA, 19 nt, Homo sapiens
  misc_RNA (1)...(19): siRNA sense strand
gccaccacaucgaagaaug

SEQ ID NO: 277433 - RNA, 19 nt, Homo sapiens
  misc_RNA (1)...(19): siRNA sense strand
acagcaaccucuacuuggu

SEQ ID NO: 277434 - RNA, 19 nt, Homo sapiens
  misc_RNA (1)...(19): siRNA sense strand
gauccagguccgauacaug

SEQ ID NO: 277435 - RNA, 19 nt, Homo sapiens
  misc_RNA (1)...(19): siRNA sense strand
ggacgagcucauggacuuu

SEQ ID NO: 277436 - RNA, 19 nt, Homo sapiens
  misc_RNA (1)...(19): siRNA sense strand
cuucauugaugucauagag

SEQ ID NO: 277437 - RNA, 19 nt, Homo sapiens
  misc_RNA (1)...(19): siRNA sense strand
ucacccagaguggcgauua

SEQ ID NO: 277438 - RNA, 19 nt, Homo sapiens
  misc_RNA (1)...(19): siRNA sense strand
cagguccgauacaugaaga

SEQ ID NO: 277439 - RNA, 19 nt, Homo sapiens
  misc_RNA (1)...(19): siRNA sense strand
caucgaagaaugccaaugc

SEQ ID NO: 277440 - RNA, 19 nt, Homo sapiens
  misc_RNA (1)...(19): siRNA sense strand
gcccuggguucgcuacauc

SEQ ID NO: 277441 - RNA, 19 nt, Homo sapiens
  misc_RNA (1)...(19): siRNA sense strand
uugagucugucauugagaa

SEQ ID NO: 277442 - RNA, 19 nt, Homo sapiens
  misc_RNA (1)...(19): siRNA sense strand
uggauugagucugucauug

SEQ ID NO: 277443 - RNA, 19 nt, Homo sapiens
  misc_RNA (1)...(19): siRNA sense strand
gaucagccgcaacuacaag

SEQ ID NO: 277444 - RNA, 19 nt, Homo sapiens
  misc_RNA (1)...(19): siRNA sense strand
ucacucagcagagcaacaa

SEQ ID NO: 277445 - RNA, 19 nt, Homo sapiens
  misc_RNA (1)...(19): siRNA sense strand
caacuacaagggcgaugug

SEQ ID NO: 277446 - RNA, 19 nt, Homo sapiens
  misc_RNA (1)...(19): siRNA sense strand
ccaaugccucccuggugua

SEQ ID NO: 277447 - RNA, 19 nt, Homo sapiens
  misc_RNA (1)...(19): siRNA sense strand
gagaaacgucgugauuugg

SEQ ID NO: 277448 - RNA, 19 nt, Homo sapiens
  misc_RNA (1)...(19): siRNA sense strand
ucaaugaccgcgugcucuu

SEQ ID NO: 277449 - RNA, 19 nt, Homo sapiens
  misc_RNA (1)...(19): siRNA sense strand
agucugucauugagaaguu

SEQ ID NO: 277450 - RNA, 19 nt, Homo sapiens
  misc_RNA (1)...(19): siRNA sense strand
ccagaguggcgauuaccaa

SEQ ID NO: 277451 - RNA, 19 nt, Homo sapiens
  misc_RNA (1)...(19): siRNA sense strand
ccaaggggcaguuuaagaa

SEQ ID NO: 277452 - RNA, 19 nt, Homo sapiens
  misc_RNA (1)...(19): siRNA sense strand
ucaaccugcuggucaaugc

SEQ ID NO: 277453 - RNA, 19 nt, Homo sapiens
  misc_RNA (1)...(19): siRNA sense strand
ggcgauuaccaacuucgua

SEQ ID NO: 277454 - RNA, 19 nt, Homo sapiens
  misc_RNA (1)...(19): siRNA sense strand
ggccagguccacuuccuau

SEQ ID NO: 277455 - RNA, 19 nt, Homo sapiens
  misc_RNA (1)...(19): siRNA sense strand
ggauccagguccgauacau

SEQ ID NO: 277456 - RNA, 19 nt, Homo sapiens
  misc_RNA (1)...(19): siRNA sense strand
gcaacuacaagggcgaugu

SEQ ID NO: 277457 - RNA, 19 nt, Homo sapiens
  misc_RNA (1)...(19): siRNA sense strand
gacaacgaccgcaccaucu

SEQ ID NO: 277458 - RNA, 19 nt, Homo sapiens
  misc_RNA (1)...(19): siRNA sense strand
guagagcuggaggauguaa

SEQ ID NO: 277459 - RNA, 19 nt, Homo sapiens
  misc_RNA (1)...(19): siRNA sense strand
caacggcagcguccuucug

SEQ ID NO: 277460 - RNA, 19 nt, Homo sapiens
  misc_RNA (1)...(19): siRNA sense strand
agaaacgucgugauuugga

SEQ ID NO: 277461 - RNA, 19 nt, Homo sapiens
  misc_RNA (1)...(19): siRNA sense strand
ccucggcugucuucauucu

SEQ ID NO: 277462 - RNA, 19 nt, Homo sapiens
  misc_RNA (1)...(19): siRNA sense strand
gggcagcgccaaguaugug

SEQ ID NO: 277463 - RNA, 19 nt, Homo sapiens
  misc_RNA (1)...(19): siRNA sense strand
aaucgucgguaccaucaag

SEQ ID NO: 277464 - RNA, 19 nt, Homo sapiens
  misc_RNA (1)...(19): siRNA sense strand
uugagcacuucaugccuuu

SEQ ID NO: 277465 - RNA, 19 nt, Homo sapiens
  misc_RNA (1)...(19): siRNA sense strand
aguaugugccggagagaaa

SEQ ID NO: 277466 - RNA, 19 nt, Homo sapiens
  misc_RNA (1)...(19): siRNA sense strand
ucacuggccgcagcaagaa

SEQ ID NO: 277467 - RNA, 19 nt, Homo sapiens
  misc_RNA (1)...(19): siRNA sense strand
ccagguccacuuccuaugg

SEQ ID NO: 277468 - RNA, 19 nt, Homo sapiens
  misc_RNA (1)...(19): siRNA sense strand
gaccgcaccaucuccuuca

SEQ ID NO: 277469 - RNA, 19 nt, Homo sapiens
  misc_RNA (1)...(19): siRNA sense strand
gcaacgugcucaucuuuga

SEQ ID NO: 277470 - RNA, 19 nt, Homo sapiens
  misc_RNA (1)...(19): siRNA sense strand
gagaucgacucccuguuug

SEQ ID NO: 277471 - RNA, 19 nt, Homo sapiens
  misc_RNA (1)...(19): siRNA sense strand
ggucaggcccuaccauuga

SEQ ID NO: 277472 - RNA, 19 nt, Homo sapiens
  misc_RNA (1)...(19): siRNA sense strand
ccauugaggagguggauua

SEQ ID NO: 277473 - RNA, 19 nt, Homo sapiens
  misc_RNA (1)...(19): siRNA sense strand
ugaccaagaugaaggagau

SEQ ID NO: 277474 - RNA, 19 nt, Homo sapiens
  misc_RNA (1)...(19): siRNA sense strand
uggaggaguucaagagaaa

SEQ ID NO: 277475 - RNA, 19 nt, Homo sapiens
  misc_RNA (1)...(19): siRNA sense strand
gaagagcgccguggaggau

SEQ ID NO: 277476 - RNA, 19 nt, Homo sapiens
  misc_RNA (1)...(19): siRNA sense strand
gaucaacgacggagacaag

SEQ ID NO: 277477 - RNA, 19 nt, Homo sapiens
  misc_RNA (1)...(19): siRNA sense strand
gaucgacgacggcaucuuc

SEQ ID NO: 277478 - RNA, 19 nt, Homo sapiens
  misc_RNA (1)...(19): siRNA sense strand
gcgcaacgugcucaucuuu

SEQ ID NO: 277479 - RNA, 19 nt, Homo sapiens
  misc_RNA (1)...(19): siRNA sense strand
guggaggaguucaagagaa

SEQ ID NO: 277480 - RNA, 19 nt, Homo sapiens
  misc_RNA (1)...(19): siRNA sense strand
gagagggugucagccaaga

SEQ ID NO: 277481 - RNA, 19 nt, Homo sapiens
  misc_RNA (1)...(19): siRNA sense strand
agaacgcccuggaguccua

SEQ ID NO: 277482 - RNA, 19 nt, Homo sapiens
  misc_RNA (1)...(19): siRNA sense strand
agaaggacaucagccagaa

SEQ ID NO: 277483 - RNA, 19 nt, Homo sapiens
  misc_RNA (1)...(19): siRNA sense strand
agagggccaugacgaaaga

SEQ ID NO: 277484 - RNA, 19 nt, Homo sapiens
  misc_RNA (1)...(19): siRNA sense strand
gcgcugaacccgcagaaca

SEQ ID NO: 277485 - RNA, 19 nt, Homo sapiens
  misc_RNA (1)...(19): siRNA sense strand
cgugaugacugcccugauc

SEQ ID NO: 277486 - RNA, 19 nt, Homo sapiens
  misc_RNA (1)...(19): siRNA sense strand
ccaagcagacgcagaucuu

SEQ ID NO: 277487 - RNA, 19 nt, Homo sapiens
  misc_RNA (1)...(19): siRNA sense strand
ggacgaguuugagcacaag

SEQ ID NO: 277488 - RNA, 19 nt, Homo sapiens
  misc_RNA (1)...(19): siRNA sense strand
gcgagagggccaugacgaa

SEQ ID NO: 277489 - RNA, 19 nt, Homo sapiens
  misc_RNA (1)...(19): siRNA sense strand
ccaaggugcaggugagcua

SEQ ID NO: 277490 - RNA, 19 nt, Homo sapiens
  misc_RNA (1)...(19): siRNA sense strand
gggaggacuuugacaacag

SEQ ID NO: 277491 - RNA, 19 nt, Homo sapiens
  misc_RNA (1)...(19): siRNA sense strand
ggacaucagccagaacaag

SEQ ID NO: 277492 - RNA, 19 nt, Homo sapiens
  misc_RNA (1)...(19): siRNA sense strand
ccgagaaggacgaguuuga

SEQ ID NO: 277493 - RNA, 19 nt, Homo sapiens
  misc_RNA (1)...(19): siRNA sense strand
gaccugaacaagagcauca

SEQ ID NO: 277494 - RNA, 19 nt, Homo sapiens
  misc_RNA (1)...(19): siRNA sense strand
ccaccaagcagacgcagau

SEQ ID NO: 277495 - RNA, 19 nt, Homo sapiens
  misc_RNA (1)...(19): siRNA sense strand
ugcaggaggcggagaagua

SEQ ID NO: 277496 - RNA, 19 nt, Homo sapiens
  misc_RNA (1)...(19): siRNA sense strand
ugacgaaagacaacaaucu

SEQ ID NO: 277497 - RNA, 19 nt, Homo sapiens
  misc_RNA (1)...(19): siRNA sense strand
agaaccagguggcgcugaa

SEQ ID NO: 277498 - RNA, 19 nt, Homo sapiens
  misc_RNA (1)...(19): siRNA sense strand
guccuacgccuucaacaug

SEQ ID NO: 277499 - RNA, 19 nt, Homo sapiens
  misc_RNA (1)...(19): siRNA sense strand
gacgaaagacaacaaucug

SEQ ID NO: 277500 - RNA, 19 nt, Homo sapiens
  misc_RNA (1)...(19): siRNA sense strand
ggacaaggcccagauucac

SEQ ID NO: 277501 - RNA, 19 nt, Homo sapiens
  misc_RNA (1)...(19): siRNA sense strand
gcugugcuccgaccuguuc

SEQ ID NO: 277502 - RNA, 19 nt, Homo sapiens
  misc_RNA (1)...(19): siRNA sense strand
gagagggccaugacgaaag

SEQ ID NO: 277503 - RNA, 19 nt, Homo sapiens
  misc_RNA (1)...(19): siRNA sense strand
cgagagggccaugacgaaa

SEQ ID NO: 277504 - RNA, 19 nt, Homo sapiens
  misc_RNA (1)...(19): siRNA sense strand
ggcgcgaccugaacaagag

SEQ ID NO: 277505 - RNA, 19 nt, Homo sapiens
  misc_RNA (1)...(19): siRNA sense strand
gggagaccaaggcauucua

SEQ ID NO: 277506 - RNA, 19 nt, Homo sapiens
  misc_RNA (1)...(19): siRNA sense strand
caaggaugcgggugugauc

SEQ ID NO: 277507 - RNA, 19 nt, Homo sapiens
  misc_RNA (1)...(19): siRNA sense strand
gggucaggcccuaccauug

SEQ ID NO: 277508 - RNA, 19 nt, Homo sapiens
  misc_RNA (1)...(19): siRNA sense strand
agagcgccguggaggauga

SEQ ID NO: 277509 - RNA, 19 nt, Homo sapiens
  misc_RNA (1)...(19): siRNA sense strand
uugagggcaucgacuucua

SEQ ID NO: 277510 - RNA, 19 nt, Homo sapiens
  misc_RNA (1)...(19): siRNA sense strand
ggccgagaaggacgaguuu

SEQ ID NO: 277511 - RNA, 19 nt, Homo sapiens
  misc_RNA (1)...(19): siRNA sense strand
gcaggaggcggagaaguac

SEQ ID NO: 277512 - RNA, 19 nt, Homo sapiens
  misc_RNA (1)...(19): siRNA sense strand
ccaacggcauccugaacgu

SEQ ID NO: 277513 - RNA, 19 nt, Homo sapiens
  misc_RNA (1)...(19): siRNA sense strand
caucaucagcggacuguac

SEQ ID NO: 277514 - RNA, 19 nt, Homo sapiens
  misc_RNA (1)...(19): siRNA sense strand
guggugcagucggacauga

SEQ ID NO: 277515 - RNA, 19 nt, Homo sapiens
  misc_RNA (1)...(19): siRNA sense strand
ggagaccaaggcauucuac

SEQ ID NO: 277516 - RNA, 19 nt, Homo sapiens
  misc_RNA (1)...(19): siRNA sense strand
gggugcugauccaggugua

SEQ ID NO: 277517 - RNA, 19 nt, Homo sapiens
  misc_RNA (1)...(19): siRNA sense strand
gaagguucuggacaagugu

SEQ ID NO: 277518 - RNA, 19 nt, Homo sapiens
  misc_RNA (1)...(19): siRNA sense strand
uccuacgccuucaacauga

SEQ ID NO: 277519 - RNA, 19 nt, Homo sapiens
  misc_RNA (1)...(19): siRNA sense strand
acaugaagcacuggccuuu

SEQ ID NO: 277520 - RNA, 19 nt, Homo sapiens
  misc_RNA (1)...(19): siRNA sense strand
gaauaaauguagccacuuu

SEQ ID NO: 277521 - RNA, 19 nt, Homo sapiens
  misc_RNA (1)...(19): siRNA sense strand
ggagagcauuccagcaguu

SEQ ID NO: 277522 - RNA, 19 nt, Homo sapiens
  misc_RNA (1)...(19): siRNA sense strand
guacgaggccuacaacaug

SEQ ID NO: 277523 - RNA, 19 nt, Homo sapiens
  misc_RNA (1)...(19): siRNA sense strand
caggacacacugaauaaua

SEQ ID NO: 277524 - RNA, 19 nt, Homo sapiens
  misc_RNA (1)...(19): siRNA sense strand
aggacacacugaauaauaa

SEQ ID NO: 277525 - RNA, 19 nt, Homo sapiens
  misc_RNA (1)...(19): siRNA sense strand
ccagcgcccuguccuauga

SEQ ID NO: 277526 - RNA, 19 nt, Homo sapiens
  misc_RNA (1)...(19): siRNA sense strand
caaagaacaacaaguacuu

SEQ ID NO: 277527 - RNA, 19 nt, Homo sapiens
  misc_RNA (1)...(19): siRNA sense strand
gauaucauccaaagaacaa

SEQ ID NO: 277528 - RNA, 19 nt, Homo sapiens
  misc_RNA (1)...(19): siRNA sense strand
uggaggaguuugaggauga

SEQ ID NO: 277529 - RNA, 19 nt, Homo sapiens
  misc_RNA (1)...(19): siRNA sense strand
ucgcuucgccucccaauuu

SEQ ID NO: 277530 - RNA, 19 nt, Homo sapiens
  misc_RNA (1)...(19): siRNA sense strand
gcuccaggcugaagacuac

SEQ ID NO: 277531 - RNA, 19 nt, Homo sapiens
  misc_RNA (1)...(19): siRNA sense strand
ccaccacgcucaaccucuu

SEQ ID NO: 277532 - RNA, 19 nt, Homo sapiens
  misc_RNA (1)...(19): siRNA sense strand
gggcuguucuccugcauca

SEQ ID NO: 277533 - RNA, 19 nt, Homo sapiens
  misc_RNA (1)...(19): siRNA sense strand
ggaugacccucugcuagug

SEQ ID NO: 277534 - RNA, 19 nt, Homo sapiens
  misc_RNA (1)...(19): siRNA sense strand
ccaagaaauuccugaacgu

SEQ ID NO: 277535 - RNA, 19 nt, Homo sapiens
  misc_RNA (1)...(19): siRNA sense strand
gagcauuccagcaguucua

SEQ ID NO: 277536 - RNA, 19 nt, Homo sapiens
  misc_RNA (1)...(19): siRNA sense strand
uaauaauucucugggcaaa

SEQ ID NO: 277537 - RNA, 19 nt, Homo sapiens
  misc_RNA (1)...(19): siRNA sense strand
agaaauuccugaacgucuu

SEQ ID NO: 277538 - RNA, 19 nt, Homo sapiens
  misc_RNA (1)...(19): siRNA sense strand
ccaaggagcccgagcacau

SEQ ID NO: 277539 - RNA, 19 nt, Homo sapiens
  misc_RNA (1)...(19): siRNA sense strand
ggaggaguuugaggaugaa

SEQ ID NO: 277540 - RNA, 19 nt, Homo sapiens
  misc_RNA (1)...(19): siRNA sense strand
ggacuccacgccugaugaa

SEQ ID NO: 277541 - RNA, 19 nt, Homo sapiens
  misc_RNA (1)...(19): siRNA sense strand
ggacacacugaauaauaau

SEQ ID NO: 277542 - RNA, 19 nt, Homo sapiens
  misc_RNA (1)...(19): siRNA sense strand
ccucugugcugcuaugcaa

SEQ ID NO: 277543 - RNA, 19 nt, Homo sapiens
  misc_RNA (1)...(19): siRNA sense strand
cagcacagccacccagaug

SEQ ID NO: 277544 - RNA, 19 nt, Homo sapiens
  misc_RNA (1)...(19): siRNA sense strand
gcaguucuacaagcaguuu

SEQ ID NO: 277545 - RNA, 19 nt, Homo sapiens
  misc_RNA (1)...(19): siRNA sense strand
gaaauuccugaacgucuuc

SEQ ID NO: 277546 - RNA, 19 nt, Homo sapiens
  misc_RNA (1)...(19): siRNA sense strand
acacgcuggugguagauga

SEQ ID NO: 277547 - RNA, 19 nt, Homo sapiens
  misc_RNA (1)...(19): siRNA sense strand
ccgagaugcugcagaugga

SEQ ID NO: 277548 - RNA, 19 nt, Homo sapiens
  misc_RNA (1)...(19): siRNA sense strand
caaguacacgcugguggua

SEQ ID NO: 277549 - RNA, 19 nt, Homo sapiens
  misc_RNA (1)...(19): siRNA sense strand
gcagacaccaccgcaugaa

SEQ ID NO: 277550 - RNA, 19 nt, Homo sapiens
  misc_RNA (1)...(19): siRNA sense strand
agacuacagugacgagagu

SEQ ID NO: 277551 - RNA, 19 nt, Homo sapiens
  misc_RNA (1)...(19): siRNA sense strand
cggcucaccgugcacuuua

SEQ ID NO: 277552 - RNA, 19 nt, Homo sapiens
  misc_RNA (1)...(19): siRNA sense strand
guuugugccucgacacgaa

SEQ ID NO: 277553 - RNA, 19 nt, Homo sapiens
  misc_RNA (1)...(19): siRNA sense strand
caccgucuaugacaacugu

SEQ ID NO: 277554 - RNA, 19 nt, Homo sapiens
  misc_RNA (1)...(19): siRNA sense strand
ggugguagaugagcaugca

SEQ ID NO: 277555 - RNA, 19 nt, Homo sapiens
  misc_RNA (1)...(19): siRNA sense strand
ucugaagacuccaccaaag

SEQ ID NO: 277556 - RNA, 19 nt, Homo sapiens
  misc_RNA (1)...(19): siRNA sense strand
agacgaacuugagcuggaa

SEQ ID NO: 277557 - RNA, 19 nt, Homo sapiens
  misc_RNA (1)...(19): siRNA sense strand
gggcaaugacguccucugu

SEQ ID NO: 277558 - RNA, 19 nt, Homo sapiens
  misc_RNA (1)...(19): siRNA sense strand
ggaauaaauguagccacuu

SEQ ID NO: 277559 - RNA, 19 nt, Homo sapiens
  misc_RNA (1)...(19): siRNA sense strand
gguacgaggccuacaacau

SEQ ID NO: 277560 - RNA, 19 nt, Homo sapiens
  misc_RNA (1)...(19): siRNA sense strand
caaguacuuuggguucauc

SEQ ID NO: 277561 - RNA, 19 nt, Homo sapiens
  misc_RNA (1)...(19): siRNA sense strand
auccaaagaacaacaagua

SEQ ID NO: 277562 - RNA, 19 nt, Homo sapiens
  misc_RNA (1)...(19): siRNA sense strand
caguccagguucccuauca

SEQ ID NO: 277563 - RNA, 19 nt, Homo sapiens
  misc_RNA (1)...(19): siRNA sense strand
ccaggccgaugugcgacua

SEQ ID NO: 277564 - RNA, 19 nt, Homo sapiens
  misc_RNA (1)...(19): siRNA sense strand
gacguccucugugcugcua

SEQ ID NO: 277565 - RNA, 19 nt, Homo sapiens
  misc_RNA (1)...(19): siRNA sense strand
ugaguguggcaucagcuua

SEQ ID NO: 277566 - RNA, 19 nt, Homo sapiens
  misc_RNA (1)...(19): siRNA sense strand
ccacgucuuugugucugaa

SEQ ID NO: 277567 - RNA, 19 nt, Homo sapiens
  misc_RNA (1)...(19): siRNA sense strand
ccaaagaacaacaaguacu

SEQ ID NO: 277568 - RNA, 19 nt, Homo sapiens
  misc_RNA (1)...(19): siRNA sense strand
gugucuuuccugccuauua

SEQ ID NO: 277569 - RNA, 19 nt, Homo sapiens
  misc_RNA (1)...(19): siRNA sense strand
gcuguucuccugcaucauc

SEQ ID NO: 277570 - RNA, 19 nt, Homo sapiens
  misc_RNA (1)...(19): siRNA sense strand
gaacccgacguccauuucu

SEQ ID NO: 277571 - RNA, 19 nt, Homo sapiens
  misc_RNA (1)...(19): siRNA sense strand
cuccaucagugaagaggaa

SEQ ID NO: 277572 - RNA, 19 nt, Homo sapiens
  misc_RNA (1)...(19): siRNA sense strand
acacgaagacgaacuugag

SEQ ID NO: 277573 - RNA, 19 nt, Homo sapiens
  misc_RNA (1)...(19): siRNA sense strand
aguacacgcuggugguaga

SEQ ID NO: 277574 - RNA, 19 nt, Homo sapiens
  misc_RNA (1)...(19): siRNA sense strand
gagagccggaugucaguca

SEQ ID NO: 277575 - RNA, 19 nt, Homo sapiens
  misc_RNA (1)...(19): siRNA sense strand
ggcucaccgugcacuuuaa

SEQ ID NO: 277576 - RNA, 19 nt, Homo sapiens
  misc_RNA (1)...(19): siRNA sense strand
caaggagcccgagcacaug

SEQ ID NO: 277577 - RNA, 19 nt, Homo sapiens
  misc_RNA (1)...(19): siRNA sense strand
gacguccauuucuccaaga

SEQ ID NO: 277578 - RNA, 19 nt, Homo sapiens
  misc_RNA (1)...(19): siRNA sense strand
ggccaucggagaggaauau

SEQ ID NO: 277579 - RNA, 19 nt, Homo sapiens
  misc_RNA (1)...(19): siRNA sense strand
gacacgaagacgaacuuga

SEQ ID NO: 277580 - RNA, 19 nt, Homo sapiens
  misc_RNA (1)...(19): siRNA sense strand
gagaccgaauccacuacca

SEQ ID NO: 277581 - RNA, 19 nt, Homo sapiens
  misc_RNA (1)...(19): siRNA sense strand
aagaacaacaaguacuuug

SEQ ID NO: 277582 - RNA, 19 nt, Homo sapiens
  misc_RNA (1)...(19): siRNA sense strand
acaucagccuggaggaguu

SEQ ID NO: 277583 - RNA, 19 nt, Homo sapiens
  misc_RNA (1)...(19): siRNA sense strand
agacaccaccgcaugaaca

SEQ ID NO: 277584 - RNA, 19 nt, Homo sapiens
  misc_RNA (1)...(19): siRNA sense strand
ugucuuuccugccuauuac

SEQ ID NO: 277585 - RNA, 19 nt, Homo sapiens
  misc_RNA (1)...(19): siRNA sense strand
caucggagaggaauaugag

SEQ ID NO: 277586 - RNA, 19 nt, Homo sapiens
  misc_RNA (1)...(19): siRNA sense strand
ugaaguuccugggcucagu

SEQ ID NO: 277587 - RNA, 19 nt, Homo sapiens
  misc_RNA (1)...(19): siRNA sense strand
gggugucuuuccugccuau

SEQ ID NO: 277588 - RNA, 19 nt, Homo sapiens
  misc_RNA (1)...(19): siRNA sense strand
cagagugacuuaggaauua

SEQ ID NO: 277589 - RNA, 19 nt, Homo sapiens
  misc_RNA (1)...(19): siRNA sense strand
ggaaggagccgcagagcuu

SEQ ID NO: 277590 - RNA, 19 nt, Homo sapiens
  misc_RNA (1)...(19): siRNA sense strand
ugacagcacugcagaccaa

SEQ ID NO: 277591 - RNA, 19 nt, Homo sapiens
  misc_RNA (1)...(19): siRNA sense strand
ggucucaccugauaauuac

SEQ ID NO: 277592 - RNA, 19 nt, Homo sapiens
  misc_RNA (1)...(19): siRNA sense strand
ggaagaggaggccggauug

SEQ ID NO: 277593 - RNA, 19 nt, Homo sapiens
  misc_RNA (1)...(19): siRNA sense strand
acauggaccucaggguuua

SEQ ID NO: 277594 - RNA, 19 nt, Homo sapiens
  misc_RNA (1)...(19): siRNA sense strand
gacauggaccucaggguuu

SEQ ID NO: 277595 - RNA, 19 nt, Homo sapiens
  misc_RNA (1)...(19): siRNA sense strand
caagaagcccaaagguuga

SEQ ID NO: 277596 - RNA, 19 nt, Homo sapiens
  misc_RNA (1)...(19): siRNA sense strand
ccuacucacuucucucuug

SEQ ID NO: 277597 - RNA, 19 nt, Homo sapiens
  misc_RNA (1)...(19): siRNA sense strand
cgaaguuacuggugauucu

SEQ ID NO: 277598 - RNA, 19 nt, Homo sapiens
  misc_RNA (1)...(19): siRNA sense strand
ggcagcgccucgaaacuga

SEQ ID NO: 277599 - RNA, 19 nt, Homo sapiens
  misc_RNA (1)...(19): siRNA sense strand
gggaagaggaggccggauu

SEQ ID NO: 277600 - RNA, 19 nt, Homo sapiens
  misc_RNA (1)...(19): siRNA sense strand
gaagaggaggccggauuga

SEQ ID NO: 277601 - RNA, 19 nt, Homo sapiens
  misc_RNA (1)...(19): siRNA sense strand
uuggauggguacaauguuu

SEQ ID NO: 277602 - RNA, 19 nt, Homo sapiens
  misc_RNA (1)...(19): siRNA sense strand
auaauuacggugacucuaa

SEQ ID NO: 277603 - RNA, 19 nt, Homo sapiens
  misc_RNA (1)...(19): siRNA sense strand
guggaaguuuacaauaaug

SEQ ID NO: 277604 - RNA, 19 nt, Homo sapiens
  misc_RNA (1)...(19): siRNA sense strand
ccacagagugacuuaggaa

SEQ ID NO: 277605 - RNA, 19 nt, Homo sapiens
  misc_RNA (1)...(19): siRNA sense strand
gugauucucugcauuucuc

SEQ ID NO: 277606 - RNA, 19 nt, Homo sapiens
  misc_RNA (1)...(19): siRNA sense strand
gcccuguucugccgcuuga

SEQ ID NO: 277607 - RNA, 19 nt, Homo sapiens
  misc_RNA (1)...(19): siRNA sense strand
acagagugacuuaggaauu

SEQ ID NO: 277608 - RNA, 19 nt, Homo sapiens
  misc_RNA (1)...(19): siRNA sense strand
gcaggaagggcaggaagga

SEQ ID NO: 277609 - RNA, 19 nt, Homo sapiens
  misc_RNA (1)...(19): siRNA sense strand
cauaguggaaguuuacaau

SEQ ID NO: 277610 - RNA, 19 nt, Homo sapiens
  misc_RNA (1)...(19): siRNA sense strand
gcaggugcaggcucgacua

SEQ ID NO: 277611 - RNA, 19 nt, Homo sapiens
  misc_RNA (1)...(19): siRNA sense strand
gauaauuacggugacucua

SEQ ID NO: 277612 - RNA, 19 nt, Homo sapiens
  misc_RNA (1)...(19): siRNA sense strand
ucagagcgcggucuuugga

SEQ ID NO: 277613 - RNA, 19 nt, Homo sapiens
  misc_RNA (1)...(19): siRNA sense strand
uaauuacggugacucuaac

SEQ ID NO: 277614 - RNA, 19 nt, Homo sapiens
  misc_RNA (1)...(19): siRNA sense strand
aaagguugaagucuccaua

SEQ ID NO: 277615 - RNA, 19 nt, Homo sapiens
  misc_RNA (1)...(19): siRNA sense strand
ggugcaggcucgacuacag

SEQ ID NO: 277616 - RNA, 19 nt, Homo sapiens
  misc_RNA (1)...(19): siRNA sense strand
gcggaaagagcuauaccau

SEQ ID NO: 277617 - RNA, 19 nt, Homo sapiens
  misc_RNA (1)...(19): siRNA sense strand
ugacccacagagugacuua

SEQ ID NO: 277618 - RNA, 19 nt, Homo sapiens
  misc_RNA (1)...(19): siRNA sense strand
gagcaaacagaggcaggaa

SEQ ID NO: 277619 - RNA, 19 nt, Homo sapiens
  misc_RNA (1)...(19): siRNA sense strand
gguugaagucuccauagug

SEQ ID NO: 277620 - RNA, 19 nt, Homo sapiens
  misc_RNA (1)...(19): siRNA sense strand
ucucuuggauggguacaau

SEQ ID NO: 277621 - RNA, 19 nt, Homo sapiens
  misc_RNA (1)...(19): siRNA sense strand
agagugacuuaggaauuau

SEQ ID NO: 277622 - RNA, 19 nt, Homo sapiens
  misc_RNA (1)...(19): siRNA sense strand
ggccaaagacagcauugca

SEQ ID NO: 277623 - RNA, 19 nt, Homo sapiens
  misc_RNA (1)...(19): siRNA sense strand
ucucagagcgcggucuuug

SEQ ID NO: 277624 - RNA, 19 nt, Homo sapiens
  misc_RNA (1)...(19): siRNA sense strand
ccacagccuccugcucuga

SEQ ID NO: 277625 - RNA, 19 nt, Homo sapiens
  misc_RNA (1)...(19): siRNA sense strand
ggauggacggacagagguu

SEQ ID NO: 277626 - RNA, 19 nt, Homo sapiens
  misc_RNA (1)...(19): siRNA sense strand
ggccuucccagaugacaug

SEQ ID NO: 277627 - RNA, 19 nt, Homo sapiens
  misc_RNA (1)...(19): siRNA sense strand
cagagugacuuaggaauua

SEQ ID NO: 277628 - RNA, 19 nt, Homo sapiens
  misc_RNA (1)...(19): siRNA sense strand
ggaaggagccgcagagcuu

SEQ ID NO: 277629 - RNA, 19 nt, Homo sapiens
  misc_RNA (1)...(19): siRNA sense strand
ugacagcacugcagaccaa

SEQ ID NO: 277630 - RNA, 19 nt, Homo sapiens
  misc_RNA (1)...(19): siRNA sense strand
ggucucaccugauaauuac

SEQ ID NO: 277631 - RNA, 19 nt, Homo sapiens
  misc_RNA (1)...(19): siRNA sense strand
ggaagaggaggccggauug

SEQ ID NO: 277632 - RNA, 19 nt, Homo sapiens
  misc_RNA (1)...(19): siRNA sense strand
acauggaccucaggguuua

SEQ ID NO: 277633 - RNA, 19 nt, Homo sapiens
  misc_RNA (1)...(19): siRNA sense strand
gacauggaccucaggguuu

SEQ ID NO: 277634 - RNA, 19 nt, Homo sapiens
  misc_RNA (1)...(19): siRNA sense strand
caagaagcccaaagguuga

SEQ ID NO: 277635 - RNA, 19 nt, Homo sapiens
  misc_RNA (1)...(19): siRNA sense strand
ccuacucacuucucucuug

SEQ ID NO: 277636 - RNA, 19 nt, Homo sapiens
  misc_RNA (1)...(19): siRNA sense strand
cgaaguuacuggugauucu

SEQ ID NO: 277637 - RNA, 19 nt, Homo sapiens
  misc_RNA (1)...(19): siRNA sense strand
ggcagcgccucgaaacuga

SEQ ID NO: 277638 - RNA, 19 nt, Homo sapiens
  misc_RNA (1)...(19): siRNA sense strand
gggaagaggaggccggauu

SEQ ID NO: 277639 - RNA, 19 nt, Homo sapiens
  misc_RNA (1)...(19): siRNA sense strand
gaagaggaggccggauuga

SEQ ID NO: 277640 - RNA, 19 nt, Homo sapiens
  misc_RNA (1)...(19): siRNA sense strand
uuggauggguacaauguuu

SEQ ID NO: 277641 - RNA, 19 nt, Homo sapiens
  misc_RNA (1)...(19): siRNA sense strand
auaauuacggugacucuaa

SEQ ID NO: 277642 - RNA, 19 nt, Homo sapiens
  misc_RNA (1)...(19): siRNA sense strand
guggaaguuuacaauaaug

SEQ ID NO: 277643 - RNA, 19 nt, Homo sapiens
  misc_RNA (1)...(19): siRNA sense strand
ccacagagugacuuaggaa

SEQ ID NO: 277644 - RNA, 19 nt, Homo sapiens
  misc_RNA (1)...(19): siRNA sense strand
gugauucucugcauuucuc

SEQ ID NO: 277645 - RNA, 19 nt, Homo sapiens
  misc_RNA (1)...(19): siRNA sense strand
gcccuguucugccgcuuga

SEQ ID NO: 277646 - RNA, 19 nt, Homo sapiens
  misc_RNA (1)...(19): siRNA sense strand
acagagugacuuaggaauu

SEQ ID NO: 277647 - RNA, 19 nt, Homo sapiens
  misc_RNA (1)...(19): siRNA sense strand
gcaggaagggcaggaagga

SEQ ID NO: 277648 - RNA, 19 nt, Homo sapiens
  misc_RNA (1)...(19): siRNA sense strand
cauaguggaaguuuacaau

SEQ ID NO: 277649 - RNA, 19 nt, Homo sapiens
  misc_RNA (1)...(19): siRNA sense strand
gcaggugcaggcucgacua

SEQ ID NO: 277650 - RNA, 19 nt, Homo sapiens
  misc_RNA (1)...(19): siRNA sense strand
gauaauuacggugacucua

SEQ ID NO: 277651 - RNA, 19 nt, Homo sapiens
  misc_RNA (1)...(19): siRNA sense strand
ucagagcgcggucuuugga

SEQ ID NO: 277652 - RNA, 19 nt, Homo sapiens
  misc_RNA (1)...(19): siRNA sense strand
uaauuacggugacucuaac

SEQ ID NO: 277653 - RNA, 19 nt, Homo sapiens
  misc_RNA (1)...(19): siRNA sense strand
aaagguugaagucuccaua

SEQ ID NO: 277654 - RNA, 19 nt, Homo sapiens
  misc_RNA (1)...(19): siRNA sense strand
ggugcaggcucgacuacag

SEQ ID NO: 277655 - RNA, 19 nt, Homo sapiens
  misc_RNA (1)...(19): siRNA sense strand
gcggaaagagcuauaccau

SEQ ID NO: 277656 - RNA, 19 nt, Homo sapiens
  misc_RNA (1)...(19): siRNA sense strand
ugacccacagagugacuua

SEQ ID NO: 277657 - RNA, 19 nt, Homo sapiens
  misc_RNA (1)...(19): siRNA sense strand
gagcaaacagaggcaggaa

SEQ ID NO: 277658 - RNA, 19 nt, Homo sapiens
  misc_RNA (1)...(19): siRNA sense strand
gguugaagucuccauagug

SEQ ID NO: 277659 - RNA, 19 nt, Homo sapiens
  misc_RNA (1)...(19): siRNA sense strand
ucucuuggauggguacaau

SEQ ID NO: 277660 - RNA, 19 nt, Homo sapiens
  misc_RNA (1)...(19): siRNA sense strand
agagugacuuaggaauuau

SEQ ID NO: 277661 - RNA, 19 nt, Homo sapiens
  misc_RNA (1)...(19): siRNA sense strand
ggccaaagacagcauugca

SEQ ID NO: 277662 - RNA, 19 nt, Homo sapiens
  misc_RNA (1)...(19): siRNA sense strand
ucucagagcgcggucuuug

SEQ ID NO: 277663 - RNA, 19 nt, Homo sapiens
  misc_RNA (1)...(19): siRNA sense strand
ccacagccuccugcucuga

SEQ ID NO: 277664 - RNA, 19 nt, Homo sapiens
  misc_RNA (1)...(19): siRNA sense strand
ggauggacggacagagguu

SEQ ID NO: 277665 - RNA, 19 nt, Homo sapiens
  misc_RNA (1)...(19): siRNA sense strand
ggccuucccagaugacaug

SEQ ID NO: 277666 - RNA, 19 nt, Homo sapiens
  misc_RNA (1)...(19): siRNA sense strand
gcaaucaccuuacauccaa

SEQ ID NO: 277667 - RNA, 19 nt, Homo sapiens
  misc_RNA (1)...(19): siRNA sense strand
gagcugggauuucuaacaa

SEQ ID NO: 277668 - RNA, 19 nt, Homo sapiens
  misc_RNA (1)...(19): siRNA sense strand
ggaagaggcugaggccaaa

SEQ ID NO: 277669 - RNA, 19 nt, Homo sapiens
  misc_RNA (1)...(19): siRNA sense strand
acaagaagcugaaucaaca

SEQ ID NO: 277670 - RNA, 19 nt, Homo sapiens
  misc_RNA (1)...(19): siRNA sense strand
gaaccuagagcccaacaaa

SEQ ID NO: 277671 - RNA, 19 nt, Homo sapiens
  misc_RNA (1)...(19): siRNA sense strand
gaucagcccuagaguggaa

SEQ ID NO: 277672 - RNA, 19 nt, Homo sapiens
  misc_RNA (1)...(19): siRNA sense strand
gaaucuacgucccaagaga

SEQ ID NO: 277673 - RNA, 19 nt, Homo sapiens
  misc_RNA (1)...(19): siRNA sense strand
gaugucaacuucuuauuac

SEQ ID NO: 277674 - RNA, 19 nt, Homo sapiens
  misc_RNA (1)...(19): siRNA sense strand
ugacagagcugggauuucu

SEQ ID NO: 277675 - RNA, 19 nt, Homo sapiens
  misc_RNA (1)...(19): siRNA sense strand
ggagccagguucuaaguca

SEQ ID NO: 277676 - RNA, 19 nt, Homo sapiens
  misc_RNA (1)...(19): siRNA sense strand
cgaugucaacuucuuauua

SEQ ID NO: 277677 - RNA, 19 nt, Homo sapiens
  misc_RNA (1)...(19): siRNA sense strand
gagccagcauugagacaaa

SEQ ID NO: 277678 - RNA, 19 nt, Homo sapiens
  misc_RNA (1)...(19): siRNA sense strand
auaaagugaugucaggaua

SEQ ID NO: 277679 - RNA, 19 nt, Homo sapiens
  misc_RNA (1)...(19): siRNA sense strand
gcacggauucccucaagaa

SEQ ID NO: 277680 - RNA, 19 nt, Homo sapiens
  misc_RNA (1)...(19): siRNA sense strand
gaagaugucggagcccaua

SEQ ID NO: 277681 - RNA, 19 nt, Homo sapiens
  misc_RNA (1)...(19): siRNA sense strand
ccucaaggcucauccacaa

SEQ ID NO: 277682 - RNA, 19 nt, Homo sapiens
  misc_RNA (1)...(19): siRNA sense strand
ggacgucgccacaugagaa

SEQ ID NO: 277683 - RNA, 19 nt, Homo sapiens
  misc_RNA (1)...(19): siRNA sense strand
gggaucaucuucagacaca

SEQ ID NO: 277684 - RNA, 19 nt, Homo sapiens
  misc_RNA (1)...(19): siRNA sense strand
ccucauggcucaacuccuu

SEQ ID NO: 277685 - RNA, 19 nt, Homo sapiens
  misc_RNA (1)...(19): siRNA sense strand
ccacagcaaucaccuuaca

SEQ ID NO: 277686 - RNA, 19 nt, Homo sapiens
  misc_RNA (1)...(19): siRNA sense strand
agagacaccugaacaguca

SEQ ID NO: 277687 - RNA, 19 nt, Homo sapiens
  misc_RNA (1)...(19): siRNA sense strand
ggacgugcacuucuggaaa

SEQ ID NO: 277688 - RNA, 19 nt, Homo sapiens
  misc_RNA (1)...(19): siRNA sense strand
cacagacacuaccaggaua

SEQ ID NO: 277689 - RNA, 19 nt, Homo sapiens
  misc_RNA (1)...(19): siRNA sense strand
aaagggugcugcucacuca

SEQ ID NO: 277690 - RNA, 19 nt, Homo sapiens
  misc_RNA (1)...(19): siRNA sense strand
gauccaauacccaacagaa

SEQ ID NO: 277691 - RNA, 19 nt, Homo sapiens
  misc_RNA (1)...(19): siRNA sense strand
ucagugugcucuccaagug

SEQ ID NO: 277692 - RNA, 19 nt, Homo sapiens
  misc_RNA (1)...(19): siRNA sense strand
uaacaaaacuucaggaacu

SEQ ID NO: 277693 - RNA, 19 nt, Homo sapiens
  misc_RNA (1)...(19): siRNA sense strand
gcauugagacaaagacaug

SEQ ID NO: 277694 - RNA, 19 nt, Homo sapiens
  misc_RNA (1)...(19): siRNA sense strand
ccauugggcugguguccuu

SEQ ID NO: 277695 - RNA, 19 nt, Homo sapiens
  misc_RNA (1)...(19): siRNA sense strand
gggcgcaagucccagaaga

SEQ ID NO: 277696 - RNA, 19 nt, Homo sapiens
  misc_RNA (1)...(19): siRNA sense strand
ggaaagccuucuggaacau

SEQ ID NO: 277697 - RNA, 19 nt, Homo sapiens
  misc_RNA (1)...(19): siRNA sense strand
caccacagcaaucaccuua

SEQ ID NO: 277698 - RNA, 19 nt, Homo sapiens
  misc_RNA (1)...(19): siRNA sense strand
ggaaaagaaucuauaacuc

SEQ ID NO: 277699 - RNA, 19 nt, Homo sapiens
  misc_RNA (1)...(19): siRNA sense strand
gcugcucacucaacaggaa

SEQ ID NO: 277700 - RNA, 19 nt, Homo sapiens
  misc_RNA (1)...(19): siRNA sense strand
ccacaccagaggccuauaa

SEQ ID NO: 277701 - RNA, 19 nt, Homo sapiens
  misc_RNA (1)...(19): siRNA sense strand
caacaggagccagcauuga

SEQ ID NO: 277702 - RNA, 19 nt, Homo sapiens
  misc_RNA (1)...(19): siRNA sense strand
gaacagucagacaagcaaa

SEQ ID NO: 277703 - RNA, 19 nt, Homo sapiens
  misc_RNA (1)...(19): siRNA sense strand
uggaaagccuucuggaaca

SEQ ID NO: 277704 - RNA, 19 nt, Homo sapiens
  misc_RNA (1)...(19): siRNA sense strand
ggacaacauagccuucuuc

SEQ ID NO: 277705 - RNA, 19 nt, Homo sapiens
  misc_RNA (1)...(19): siRNA sense strand
ucaacaagaagcugaauca

SEQ ID NO: 277706 - RNA, 19 nt, Homo sapiens
  misc_RNA (1)...(19): siRNA sense strand
gggcacggauucccucaag

SEQ ID NO: 277707 - RNA, 19 nt, Homo sapiens
  misc_RNA (1)...(19): siRNA sense strand
gacgugcacuucuggaaag

SEQ ID NO: 277708 - RNA, 19 nt, Homo sapiens
  misc_RNA (1)...(19): siRNA sense strand
agaaucagaugugggauca

SEQ ID NO: 277709 - RNA, 19 nt, Homo sapiens
  misc_RNA (1)...(19): siRNA sense strand
gaaccuggacgugcacuuc

SEQ ID NO: 277710 - RNA, 19 nt, Homo sapiens
  misc_RNA (1)...(19): siRNA sense strand
uaucgucucuggccaacau

SEQ ID NO: 277711 - RNA, 19 nt, Homo sapiens
  misc_RNA (1)...(19): siRNA sense strand
ucacagacacuaccaggau

SEQ ID NO: 277712 - RNA, 19 nt, Homo sapiens
  misc_RNA (1)...(19): siRNA sense strand
ccucuacuccucacccaua

SEQ ID NO: 277713 - RNA, 19 nt, Homo sapiens
  misc_RNA (1)...(19): siRNA sense strand
gugaaggacaggacaguga

SEQ ID NO: 277714 - RNA, 19 nt, Homo sapiens
  misc_RNA (1)...(19): siRNA sense strand
gaaaaccagugcucggaau

SEQ ID NO: 277715 - RNA, 19 nt, Homo sapiens
  misc_RNA (1)...(19): siRNA sense strand
gcaagucccagaagauguc

SEQ ID NO: 277716 - RNA, 19 nt, Homo sapiens
  misc_RNA (1)...(19): siRNA sense strand
aaagugaugucaggauaca

SEQ ID NO: 277717 - RNA, 19 nt, Homo sapiens
  misc_RNA (1)...(19): siRNA sense strand
gaucaucuucagacacaga

SEQ ID NO: 277718 - RNA, 19 nt, Homo sapiens
  misc_RNA (1)...(19): siRNA sense strand
ccacacagaugccccucua

SEQ ID NO: 277719 - RNA, 19 nt, Homo sapiens
  misc_RNA (1)...(19): siRNA sense strand
acagagcugggauuucuaa

SEQ ID NO: 277720 - RNA, 19 nt, Homo sapiens
  misc_RNA (1)...(19): siRNA sense strand
ccucacccauagucaagaa

SEQ ID NO: 277721 - RNA, 19 nt, Homo sapiens
  misc_RNA (1)...(19): siRNA sense strand
gcgcaagucccagaagaug

SEQ ID NO: 277722 - RNA, 19 nt, Homo sapiens
  misc_RNA (1)...(19): siRNA sense strand
gcgcaccuccugcacaaau

SEQ ID NO: 277723 - RNA, 19 nt, Homo sapiens
  misc_RNA (1)...(19): siRNA sense strand
cugagugggucacagauuc

SEQ ID NO: 277724 - RNA, 19 nt, Homo sapiens
  misc_RNA (1)...(19): siRNA sense strand
cugcagaccaucuccauug

SEQ ID NO: 277725 - RNA, 19 nt, Homo sapiens
  misc_RNA (1)...(19): siRNA sense strand
cacgagcccuaccucaaga

SEQ ID NO: 277726 - RNA, 19 nt, Homo sapiens
  misc_RNA (1)...(19): siRNA sense strand
caagagacaccugaacagu

SEQ ID NO: 277727 - RNA, 19 nt, Homo sapiens
  misc_RNA (1)...(19): siRNA sense strand
caacgagacaggccucagu

SEQ ID NO: 277728 - RNA, 19 nt, Homo sapiens
  misc_RNA (1)...(19): siRNA sense strand
caacaagaagcugaaucaa

SEQ ID NO: 277729 - RNA, 19 nt, Homo sapiens
  misc_RNA (1)...(19): siRNA sense strand
ccuccgaugucaacuucuu

SEQ ID NO: 277730 - RNA, 19 nt, Homo sapiens
  misc_RNA (1)...(19): siRNA sense strand
gcugggauuucuaacaaaa

SEQ ID NO: 277731 - RNA, 19 nt, Homo sapiens
  misc_RNA (1)...(19): siRNA sense strand
ccacgagcccuaccucaag

SEQ ID NO: 277732 - RNA, 19 nt, Homo sapiens
  misc_RNA (1)...(19): siRNA sense strand
gaagcccgcaccacagcaa

SEQ ID NO: 277733 - RNA, 19 nt, Homo sapiens
  misc_RNA (1)...(19): siRNA sense strand
gccgccagcucucucuuca

SEQ ID NO: 277734 - RNA, 19 nt, Homo sapiens
  misc_RNA (1)...(19): siRNA sense strand
uggcgcaccuccugcacaa

SEQ ID NO: 277735 - RNA, 19 nt, Homo sapiens
  misc_RNA (1)...(19): siRNA sense strand
ggccauuccugcagaccau

SEQ ID NO: 277736 - RNA, 19 nt, Homo sapiens
  misc_RNA (1)...(19): siRNA sense strand
cuacaaacgcaacgagaca

SEQ ID NO: 277737 - RNA, 19 nt, Homo sapiens
  misc_RNA (1)...(19): siRNA sense strand
caucaucuccaucgacuac

SEQ ID NO: 277738 - RNA, 19 nt, Homo sapiens
  misc_RNA (1)...(19): siRNA sense strand
ucaacaggagccagcauug

SEQ ID NO: 277739 - RNA, 19 nt, Homo sapiens
  misc_RNA (1)...(19): siRNA sense strand
uggaagugcuaucgucucu

SEQ ID NO: 277740 - RNA, 19 nt, Homo sapiens
  misc_RNA (1)...(19): siRNA sense strand
ggagaccccugcacaacau

SEQ ID NO: 277741 - RNA, 19 nt, Homo sapiens
  misc_RNA (1)...(19): siRNA sense strand
cugcacaaaucccgcuaug

SEQ ID NO: 277742 - RNA, 19 nt, Homo sapiens
  misc_RNA (1)...(19): siRNA sense strand
acauggaccugcgcacaau

SEQ ID NO: 277743 - RNA, 19 nt, Homo sapiens
  misc_RNA (1)...(19): siRNA sense strand
caaucaccuuacauccaaa

SEQ ID NO: 277744 - RNA, 19 nt, Homo sapiens
  misc_RNA (1)...(19): siRNA sense strand
gcagccugauaaaguccaa

SEQ ID NO: 277745 - RNA, 19 nt, Homo sapiens
  misc_RNA (1)...(19): siRNA sense strand
ucgucaggcucaucuccua

SEQ ID NO: 277746 - RNA, 19 nt, Homo sapiens
  misc_RNA (1)...(19): siRNA sense strand
aaagccuucuggaacauca

SEQ ID NO: 277747 - RNA, 19 nt, Homo sapiens
  misc_RNA (1)...(19): siRNA sense strand
ucaaggcucauccacaaca

SEQ ID NO: 277748 - RNA, 19 nt, Homo sapiens
  misc_RNA (1)...(19): siRNA sense strand
gcuaggaaaagaaucuaua

SEQ ID NO: 277749 - RNA, 19 nt, Homo sapiens
  misc_RNA (1)...(19): siRNA sense strand
caaggcucauccacaacau

SEQ ID NO: 277750 - RNA, 19 nt, Homo sapiens
  misc_RNA (1)...(19): siRNA sense strand
guucuaagucagugucuag

SEQ ID NO: 277751 - RNA, 19 nt, Homo sapiens
  misc_RNA (1)...(19): siRNA sense strand
acccgaagccuuugagaug

SEQ ID NO: 277752 - RNA, 19 nt, Homo sapiens
  misc_RNA (1)...(19): siRNA sense strand
ucuggaacaucaccgagau

SEQ ID NO: 277753 - RNA, 19 nt, Homo sapiens
  misc_RNA (1)...(19): siRNA sense strand
ggagccagcauugagacaa

SEQ ID NO: 277754 - RNA, 19 nt, Homo sapiens
  misc_RNA (1)...(19): siRNA sense strand
gcaccacagcaaucaccuu

SEQ ID NO: 277755 - RNA, 19 nt, Homo sapiens
  misc_RNA (1)...(19): siRNA sense strand
gaccugggcuaggaaaaga

SEQ ID NO: 277756 - RNA, 19 nt, Homo sapiens
  misc_RNA (1)...(19): siRNA sense strand
gcuggaggagugcuucuuc

SEQ ID NO: 277757 - RNA, 19 nt, Homo sapiens
  misc_RNA (1)...(19): siRNA sense strand
caaaggaaaaucugguuau

SEQ ID NO: 277758 - RNA, 19 nt, Homo sapiens
  misc_RNA (1)...(19): siRNA sense strand
gguucuaagucagugucua

SEQ ID NO: 277759 - RNA, 19 nt, Homo sapiens
  misc_RNA (1)...(19): siRNA sense strand
gacgucgccacaugagaaa

SEQ ID NO: 277760 - RNA, 19 nt, Homo sapiens
  misc_RNA (1)...(19): siRNA sense strand
cggauucccucaagaaccu

SEQ ID NO: 277761 - RNA, 19 nt, Homo sapiens
  misc_RNA (1)...(19): siRNA sense strand
cgccuaugcuggugcaaag

SEQ ID NO: 277762 - RNA, 19 nt, Homo sapiens
  misc_RNA (1)...(19): siRNA sense strand
ggcgggaaccucugcuuca

SEQ ID NO: 277763 - RNA, 19 nt, Homo sapiens
  misc_RNA (1)...(19): siRNA sense strand
gaaagccuucuggaacauc

SEQ ID NO: 277764 - RNA, 19 nt, Homo sapiens
  misc_RNA (1)...(19): siRNA sense strand
uugagcggaucacacagaa

SEQ ID NO: 277765 - RNA, 19 nt, Homo sapiens
  misc_RNA (1)...(19): siRNA sense strand
gaagauggcugaguugguu

SEQ ID NO: 277766 - RNA, 19 nt, Homo sapiens
  misc_RNA (1)...(19): siRNA sense strand
gagacgagcuuccaaguag

SEQ ID NO: 277767 - RNA, 19 nt, Homo sapiens
  misc_RNA (1)...(19): siRNA sense strand
ugaaaguccugcaccauuu

SEQ ID NO: 277768 - RNA, 19 nt, Homo sapiens
  misc_RNA (1)...(19): siRNA sense strand
guaggaagauggcugaguu

SEQ ID NO: 277769 - RNA, 19 nt, Homo sapiens
  misc_RNA (1)...(19): siRNA sense strand
ggaagcugcucacccaaga

SEQ ID NO: 277770 - RNA, 19 nt, Homo sapiens
  misc_RNA (1)...(19): siRNA sense strand
ggagugucaucagaaauuu

SEQ ID NO: 277771 - RNA, 19 nt, Homo sapiens
  misc_RNA (1)...(19): siRNA sense strand
gaaaccagcuaugugaaag

SEQ ID NO: 277772 - RNA, 19 nt, Homo sapiens
  misc_RNA (1)...(19): siRNA sense strand
uggcugaguugguucauuu

SEQ ID NO: 277773 - RNA, 19 nt, Homo sapiens
  misc_RNA (1)...(19): siRNA sense strand
ggagacgagcuuccaagua

SEQ ID NO: 277774 - RNA, 19 nt, Homo sapiens
  misc_RNA (1)...(19): siRNA sense strand
gggaggagcugaguguguu

SEQ ID NO: 277775 - RNA, 19 nt, Homo sapiens
  misc_RNA (1)...(19): siRNA sense strand
ccacuaccaucaacuauac

SEQ ID NO: 277776 - RNA, 19 nt, Homo sapiens
  misc_RNA (1)...(19): siRNA sense strand
ggacuucuuuccugugauc

SEQ ID NO: 277777 - RNA, 19 nt, Homo sapiens
  misc_RNA (1)...(19): siRNA sense strand
ccagggagccauucacaaa

SEQ ID NO: 277778 - RNA, 19 nt, Homo sapiens
  misc_RNA (1)...(19): siRNA sense strand
gggagugucaucagaaauu

SEQ ID NO: 277779 - RNA, 19 nt, Homo sapiens
  misc_RNA (1)...(19): siRNA sense strand
ucagaaauuuccaggacuu

SEQ ID NO: 277780 - RNA, 19 nt, Homo sapiens
  misc_RNA (1)...(19): siRNA sense strand
gaaaguccugcaccauuug

SEQ ID NO: 277781 - RNA, 19 nt, Homo sapiens
  misc_RNA (1)...(19): siRNA sense strand
cagcaaagccuccgaguac

SEQ ID NO: 277782 - RNA, 19 nt, Homo sapiens
  misc_RNA (1)...(19): siRNA sense strand
gaaauuuccaggacuucuu

SEQ ID NO: 277783 - RNA, 19 nt, Homo sapiens
  misc_RNA (1)...(19): siRNA sense strand
gcaaagccuccgaguacuu

SEQ ID NO: 277784 - RNA, 19 nt, Homo sapiens
  misc_RNA (1)...(19): siRNA sense strand
gauaaucguccuggccaua

SEQ ID NO: 277785 - RNA, 19 nt, Homo sapiens
  misc_RNA (1)...(19): siRNA sense strand
gaacaggaagggccaagca

SEQ ID NO: 277786 - RNA, 19 nt, Homo sapiens
  misc_RNA (1)...(19): siRNA sense strand
guugaaaccagcuauguga

SEQ ID NO: 277787 - RNA, 19 nt, Homo sapiens
  misc_RNA (1)...(19): siRNA sense strand
gcaucgaggugguggaagu

SEQ ID NO: 277788 - RNA, 19 nt, Homo sapiens
  misc_RNA (1)...(19): siRNA sense strand
caagggcccucguugaaac

SEQ ID NO: 277789 - RNA, 19 nt, Homo sapiens
  misc_RNA (1)...(19): siRNA sense strand
gugaaaguccugcaccauu

SEQ ID NO: 277790 - RNA, 19 nt, Homo sapiens
  misc_RNA (1)...(19): siRNA sense strand
ccugugaucuucagcaaag

SEQ ID NO: 277791 - RNA, 19 nt, Homo sapiens
  misc_RNA (1)...(19): siRNA sense strand
ugaaaccagcuaugugaaa

SEQ ID NO: 277792 - RNA, 19 nt, Homo sapiens
  misc_RNA (1)...(19): siRNA sense strand
gcacugcaagccugaggaa

SEQ ID NO: 277793 - RNA, 19 nt, Homo sapiens
  misc_RNA (1)...(19): siRNA sense strand
caaguagcacucaguagga

SEQ ID NO: 277794 - RNA, 19 nt, Homo sapiens
  misc_RNA (1)...(19): siRNA sense strand
cagcaacgaagaacaggaa

SEQ ID NO: 277795 - RNA, 19 nt, Homo sapiens
  misc_RNA (1)...(19): siRNA sense strand
aaucagaucgugcccaaga

SEQ ID NO: 277796 - RNA, 19 nt, Homo sapiens
  misc_RNA (1)...(19): siRNA sense strand
caaagccuccgaguacuug

SEQ ID NO: 277797 - RNA, 19 nt, Homo sapiens
  misc_RNA (1)...(19): siRNA sense strand
ccaagggcccucguugaaa

SEQ ID NO: 277798 - RNA, 19 nt, Homo sapiens
  misc_RNA (1)...(19): siRNA sense strand
guacuugcagcuggucuuu

SEQ ID NO: 277799 - RNA, 19 nt, Homo sapiens
  misc_RNA (1)...(19): siRNA sense strand
ucagcaaagccuccgagua

SEQ ID NO: 277800 - RNA, 19 nt, Homo sapiens
  misc_RNA (1)...(19): siRNA sense strand
gcugcucacccaagauuug

SEQ ID NO: 277801 - RNA, 19 nt, Homo sapiens
  misc_RNA (1)...(19): siRNA sense strand
ggaagauggcugaguuggu

SEQ ID NO: 277802 - RNA, 19 nt, Homo sapiens
  misc_RNA (1)...(19): siRNA sense strand
ccucuacucuaguggaagu

SEQ ID NO: 277803 - RNA, 19 nt, Homo sapiens
  misc_RNA (1)...(19): siRNA sense strand
caagauuuggugcaggaaa

SEQ ID NO: 277804 - RNA, 19 nt, Homo sapiens
  misc_RNA (1)...(19): siRNA sense strand
aaauuuccaggacuucuuu

SEQ ID NO: 277805 - RNA, 19 nt, Homo sapiens
  misc_RNA (1)...(19): siRNA sense strand
guagcacucaguaggaaga

SEQ ID NO: 277806 - RNA, 19 nt, Homo sapiens
  misc_RNA (1)...(19): siRNA sense strand
cugcaccauuugcuaaaga

SEQ ID NO: 277807 - RNA, 19 nt, Homo sapiens
  misc_RNA (1)...(19): siRNA sense strand
uaaucguccuggccauaau

SEQ ID NO: 277808 - RNA, 19 nt, Homo sapiens
  misc_RNA (1)...(19): siRNA sense strand
aaguagcacucaguaggaa

SEQ ID NO: 277809 - RNA, 19 nt, Homo sapiens
  misc_RNA (1)...(19): siRNA sense strand
uccaagggcccucguugaa

SEQ ID NO: 277810 - RNA, 19 nt, Homo sapiens
  misc_RNA (1)...(19): siRNA sense strand
cccacuaccaucaacuaua

SEQ ID NO: 277811 - RNA, 19 nt, Homo sapiens
  misc_RNA (1)...(19): siRNA sense strand
ucacaaaggcagaaaugcu

SEQ ID NO: 277812 - RNA, 19 nt, Homo sapiens
  misc_RNA (1)...(19): siRNA sense strand
aagcugcucacccaagauu

SEQ ID NO: 277813 - RNA, 19 nt, Homo sapiens
  misc_RNA (1)...(19): siRNA sense strand
guccugcaccauuugcuaa

SEQ ID NO: 277814 - RNA, 19 nt, Homo sapiens
  misc_RNA (1)...(19): siRNA sense strand
guccaagggcccucguuga

SEQ ID NO: 277815 - RNA, 19 nt, Homo sapiens
  misc_RNA (1)...(19): siRNA sense strand
ggaaggacauggccuccaa

SEQ ID NO: 277816 - RNA, 19 nt, Homo sapiens
  misc_RNA (1)...(19): siRNA sense strand
ggagaaguuugacaaguuc

SEQ ID NO: 277817 - RNA, 19 nt, Homo sapiens
  misc_RNA (1)...(19): siRNA sense strand
ggacauggccuccaacuac

SEQ ID NO: 277818 - RNA, 19 nt, Homo sapiens
  misc_RNA (1)...(19): siRNA sense strand
uggagaaguuugacaaguu

SEQ ID NO: 277819 - RNA, 19 nt, Homo sapiens
  misc_RNA (1)...(19): siRNA sense strand
gaagucagaggacgagaug

SEQ ID NO: 277820 - RNA, 19 nt, Homo sapiens
  misc_RNA (1)...(19): siRNA sense strand
gacauggccuccaacuaca

SEQ ID NO: 277821 - RNA, 19 nt, Homo sapiens
  misc_RNA (1)...(19): siRNA sense strand
acaaggcccuggagcuguu

SEQ ID NO: 277822 - RNA, 19 nt, Homo sapiens
  misc_RNA (1)...(19): siRNA sense strand
gaagguggaggcugacauc

SEQ ID NO: 277823 - RNA, 19 nt, Homo sapiens
  misc_RNA (1)...(19): siRNA sense strand
caucaugaggcagagauua

SEQ ID NO: 277824 - RNA, 19 nt, Homo sapiens
  misc_RNA (1)...(19): siRNA sense strand
gguggcauccuuaagaaga

SEQ ID NO: 277825 - RNA, 19 nt, Homo sapiens
  misc_RNA (1)...(19): siRNA sense strand
guggcauccuuaagaagaa

SEQ ID NO: 277826 - RNA, 19 nt, Homo sapiens
  misc_RNA (1)...(19): siRNA sense strand
ggaaugcaucauccagguu

SEQ ID NO: 277827 - RNA, 19 nt, Homo sapiens
  misc_RNA (1)...(19): siRNA sense strand
guccucaucaggcucuuua

SEQ ID NO: 277828 - RNA, 19 nt, Homo sapiens
  misc_RNA (1)...(19): siRNA sense strand
acaaggagcugggcuucca

SEQ ID NO: 277829 - RNA, 19 nt, Homo sapiens
  misc_RNA (1)...(19): siRNA sense strand
uggguggcauccuuaagaa

SEQ ID NO: 277830 - RNA, 19 nt, Homo sapiens
  misc_RNA (1)...(19): siRNA sense strand
gcccuggguggcauccuua

SEQ ID NO: 277831 - RNA, 19 nt, Homo sapiens
  misc_RNA (1)...(19): siRNA sense strand
gaguucaucucggaaugca

SEQ ID NO: 277832 - RNA, 19 nt, Homo sapiens
  misc_RNA (1)...(19): siRNA sense strand
agucagaggacgagaugaa

SEQ ID NO: 277833 - RNA, 19 nt, Homo sapiens
  misc_RNA (1)...(19): siRNA sense strand
gaauuaaacugcagauaug

SEQ ID NO: 277834 - RNA, 19 nt, Homo sapiens
  misc_RNA (1)...(19): siRNA sense strand
gaacaagugugaugugaau

SEQ ID NO: 277835 - RNA, 19 nt, Homo sapiens
  misc_RNA (1)...(19): siRNA sense strand
gaacuggauucgcaacauu

SEQ ID NO: 277836 - RNA, 19 nt, Homo sapiens
  misc_RNA (1)...(19): siRNA sense strand
ccagagauaucaaagcaaa

SEQ ID NO: 277837 - RNA, 19 nt, Homo sapiens
  misc_RNA (1)...(19): siRNA sense strand
ggacacagccggucaggaa

SEQ ID NO: 277838 - RNA, 19 nt, Homo sapiens
  misc_RNA (1)...(19): siRNA sense strand
ccauaggaauugacuuuaa

SEQ ID NO: 277839 - RNA, 19 nt, Homo sapiens
  misc_RNA (1)...(19): siRNA sense strand
gaagaccuguguccuguuc

SEQ ID NO: 277840 - RNA, 19 nt, Homo sapiens
  misc_RNA (1)...(19): siRNA sense strand
gggaacaagugugauguga

SEQ ID NO: 277841 - RNA, 19 nt, Homo sapiens
  misc_RNA (1)...(19): siRNA sense strand
agagacaaguuuccaagga

SEQ ID NO: 277842 - RNA, 19 nt, Homo sapiens
  misc_RNA (1)...(19): siRNA sense strand
gagcaaccagggagucaaa

SEQ ID NO: 277843 - RNA, 19 nt, Homo sapiens
  misc_RNA (1)...(19): siRNA sense strand
ggaacuggauucgcaacau

SEQ ID NO: 277844 - RNA, 19 nt, Homo sapiens
  misc_RNA (1)...(19): siRNA sense strand
caccauaggaauugacuuu

SEQ ID NO: 277845 - RNA, 19 nt, Homo sapiens
  misc_RNA (1)...(19): siRNA sense strand
gagaauuaaacugcagaua

SEQ ID NO: 277846 - RNA, 19 nt, Homo sapiens
  misc_RNA (1)...(19): siRNA sense strand
ggaacaagugugaugugaa

SEQ ID NO: 277847 - RNA, 19 nt, Homo sapiens
  misc_RNA (1)...(19): siRNA sense strand
gaucacaacggccuacuac

SEQ ID NO: 277848 - RNA, 19 nt, Homo sapiens
  misc_RNA (1)...(19): siRNA sense strand
gcgcgaaggccaacaucaa

SEQ ID NO: 277849 - RNA, 19 nt, Homo sapiens
  misc_RNA (1)...(19): siRNA sense strand
ugaugugaaugacaagaga

SEQ ID NO: 277850 - RNA, 19 nt, Homo sapiens
  misc_RNA (1)...(19): siRNA sense strand
gcagaagaggagcagcuuu

SEQ ID NO: 277851 - RNA, 19 nt, Homo sapiens
  misc_RNA (1)...(19): siRNA sense strand
cgccagagauaucaaagca

SEQ ID NO: 277852 - RNA, 19 nt, Homo sapiens
  misc_RNA (1)...(19): siRNA sense strand
gaaugacaagagacaaguu

SEQ ID NO: 277853 - RNA, 19 nt, Homo sapiens
  misc_RNA (1)...(19): siRNA sense strand
gaacgguuucggacgauca

SEQ ID NO: 277854 - RNA, 19 nt, Homo sapiens
  misc_RNA (1)...(19): siRNA sense strand
acaagugugaugugaauga

SEQ ID NO: 277855 - RNA, 19 nt, Homo sapiens
  misc_RNA (1)...(19): siRNA sense strand
aaagcuggcccucgacuau

SEQ ID NO: 277856 - RNA, 19 nt, Homo sapiens
  misc_RNA (1)...(19): siRNA sense strand
ccgauguguucuucuguga

SEQ ID NO: 277857 - RNA, 19 nt, Homo sapiens
  misc_RNA (1)...(19): siRNA sense strand
cgacaucaccaacgagaag

SEQ ID NO: 277858 - RNA, 19 nt, Homo sapiens
  misc_RNA (1)...(19): siRNA sense strand
agagcucgauggcaagaga

SEQ ID NO: 277859 - RNA, 19 nt, Homo sapiens
  misc_RNA (1)...(19): siRNA sense strand
gccuucaacuccacuuuua

SEQ ID NO: 277860 - RNA, 19 nt, Homo sapiens
  misc_RNA (1)...(19): siRNA sense strand
cucgauggcaagagaauua

SEQ ID NO: 277861 - RNA, 19 nt, Homo sapiens
  misc_RNA (1)...(19): siRNA sense strand
gcgaaggccaacaucaaug

SEQ ID NO: 277862 - RNA, 19 nt, Homo sapiens
  misc_RNA (1)...(19): siRNA sense strand
ccucgacuauggaaucaag

SEQ ID NO: 277863 - RNA, 19 nt, Homo sapiens
  misc_RNA (1)...(19): siRNA sense strand
ucacaacggccuacuacag

SEQ ID NO: 277864 - RNA, 19 nt, Homo sapiens
  misc_RNA (1)...(19): siRNA sense strand
aaugacaagagacaaguuu

SEQ ID NO: 277865 - RNA, 19 nt, Homo sapiens
  misc_RNA (1)...(19): siRNA sense strand
agugugaugugaaugacaa

SEQ ID NO: 277866 - RNA, 19 nt, Homo sapiens
  misc_RNA (1)...(19): siRNA sense strand
ggaagaccuguguccuguu

SEQ ID NO: 277867 - RNA, 19 nt, Homo sapiens
  misc_RNA (1)...(19): siRNA sense strand
ucuacgacaucaccaacga

SEQ ID NO: 277868 - RNA, 19 nt, Homo sapiens
  misc_RNA (1)...(19): siRNA sense strand
uaucuccaccauaggaauu

SEQ ID NO: 277869 - RNA, 19 nt, Homo sapiens
  misc_RNA (1)...(19): siRNA sense strand
ucacaccggaccagcagaa

SEQ ID NO: 277870 - RNA, 19 nt, Homo sapiens
  misc_RNA (1)...(19): siRNA sense strand
gcgaagaccuacgauuacc

SEQ ID NO: 277871 - RNA, 19 nt, Homo sapiens
  misc_RNA (1)...(19): siRNA sense strand
gcccucgacuauggaauca

SEQ ID NO: 277872 - RNA, 19 nt, Homo sapiens
  misc_RNA (1)...(19): siRNA sense strand
ggcgaagaccuacgauuac

SEQ ID NO: 277873 - RNA, 19 nt, Homo sapiens
  misc_RNA (1)...(19): siRNA sense strand
cagaagaggagcagcuuuu

SEQ ID NO: 277874 - RNA, 19 nt, Homo sapiens
  misc_RNA (1)...(19): siRNA sense strand
gauggcaagagaauuaaac

SEQ ID NO: 277875 - RNA, 19 nt, Homo sapiens
  misc_RNA (1)...(19): siRNA sense strand
gacuauggaaucaaguuca

SEQ ID NO: 277876 - RNA, 19 nt, Homo sapiens
  misc_RNA (1)...(19): siRNA sense strand
gaugugcacucauuucgaa

SEQ ID NO: 277877 - RNA, 19 nt, Homo sapiens
  misc_RNA (1)...(19): siRNA sense strand
gaagagcacccacuguuug

SEQ ID NO: 277878 - RNA, 19 nt, Homo sapiens
  misc_RNA (1)...(19): siRNA sense strand
gaauaugccuacgugcuaa

SEQ ID NO: 277879 - RNA, 19 nt, Homo sapiens
  misc_RNA (1)...(19): siRNA sense strand
gcagugaccucccaaacca

SEQ ID NO: 277880 - RNA, 19 nt, Homo sapiens
  misc_RNA (1)...(19): siRNA sense strand
ggacuggucugagcuauac

SEQ ID NO: 277881 - RNA, 19 nt, Homo sapiens
  misc_RNA (1)...(19): siRNA sense strand
guaauggagggaagaauuu

SEQ ID NO: 277882 - RNA, 19 nt, Homo sapiens
  misc_RNA (1)...(19): siRNA sense strand
uggcuaugguggccuguua

SEQ ID NO: 277883 - RNA, 19 nt, Homo sapiens
  misc_RNA (1)...(19): siRNA sense strand
gacuggaugugcacucauu

SEQ ID NO: 277884 - RNA, 19 nt, Homo sapiens
  misc_RNA (1)...(19): siRNA sense strand
cgaagagcacccacuguuu

SEQ ID NO: 277885 - RNA, 19 nt, Homo sapiens
  misc_RNA (1)...(19): siRNA sense strand
aagcacaaguggcgaauca

SEQ ID NO: 277886 - RNA, 19 nt, Homo sapiens
  misc_RNA (1)...(19): siRNA sense strand
cagccugccuggucacuga

SEQ ID NO: 277887 - RNA, 19 nt, Homo sapiens
  misc_RNA (1)...(19): siRNA sense strand
gagccacgaugacccaaag

SEQ ID NO: 277888 - RNA, 19 nt, Homo sapiens
  misc_RNA (1)...(19): siRNA sense strand
gaauuucccagccaucuuc

SEQ ID NO: 277889 - RNA, 19 nt, Homo sapiens
  misc_RNA (1)...(19): siRNA sense strand
gcacaaguggcgaaucauc

SEQ ID NO: 277890 - RNA, 19 nt, Homo sapiens
  misc_RNA (1)...(19): siRNA sense strand
guucuucgcuccacucacu

SEQ ID NO: 277891 - RNA, 19 nt, Homo sapiens
  misc_RNA (1)...(19): siRNA sense strand
cacgaugacccaaaggaua

SEQ ID NO: 277892 - RNA, 19 nt, Homo sapiens
  misc_RNA (1)...(19): siRNA sense strand
agaauaugccuacgugcua

SEQ ID NO: 277893 - RNA, 19 nt, Homo sapiens
  misc_RNA (1)...(19): siRNA sense strand
cguaauggagggaagaauu

SEQ ID NO: 277894 - RNA, 19 nt, Homo sapiens
  misc_RNA (1)...(19): siRNA sense strand
uggaggaccugagugaaga

SEQ ID NO: 277895 - RNA, 19 nt, Homo sapiens
  misc_RNA (1)...(19): siRNA sense strand
ggacaucuaggcaccucaa

SEQ ID NO: 277896 - RNA, 19 nt, Homo sapiens
  misc_RNA (1)...(19): siRNA sense strand
acgaugacccaaaggauaa

SEQ ID NO: 277897 - RNA, 19 nt, Homo sapiens
  misc_RNA (1)...(19): siRNA sense strand
caaguggaguuugcagaca

SEQ ID NO: 277898 - RNA, 19 nt, Homo sapiens
  misc_RNA (1)...(19): siRNA sense strand
cccaaaggauaagaaagaa

SEQ ID NO: 277899 - RNA, 19 nt, Homo sapiens
  misc_RNA (1)...(19): siRNA sense strand
ccaaaggauaagaaagaaa

SEQ ID NO: 277900 - RNA, 19 nt, Homo sapiens
  misc_RNA (1)...(19): siRNA sense strand
ucgaagagcacccacuguu

SEQ ID NO: 277901 - RNA, 19 nt, Homo sapiens
  misc_RNA (1)...(19): siRNA sense strand
gaaaguucuacguaaugga

SEQ ID NO: 277902 - RNA, 19 nt, Homo sapiens
  misc_RNA (1)...(19): siRNA sense strand
gagcuacacgacuggaugu

SEQ ID NO: 277903 - RNA, 19 nt, Homo sapiens
  misc_RNA (1)...(19): siRNA sense strand
aguggaguuugcagacaua

SEQ ID NO: 277904 - RNA, 19 nt, Homo sapiens
  misc_RNA (1)...(19): siRNA sense strand
caucuaggcaccucaacug

SEQ ID NO: 277905 - RNA, 19 nt, Homo sapiens
  misc_RNA (1)...(19): siRNA sense strand
acccaaaggauaagaaaga

SEQ ID NO: 277906 - RNA, 19 nt, Homo sapiens
  misc_RNA (1)...(19): siRNA sense strand
gauggacuggucugagcua

SEQ ID NO: 277907 - RNA, 19 nt, Homo sapiens
  misc_RNA (1)...(19): siRNA sense strand
ugacccaaaggauaagaaa

SEQ ID NO: 277908 - RNA, 19 nt, Homo sapiens
  misc_RNA (1)...(19): siRNA sense strand
ccgaugugcuggagcuaca

SEQ ID NO: 277909 - RNA, 19 nt, Homo sapiens
  misc_RNA (1)...(19): siRNA sense strand
uguauaccauaaccgaugu

SEQ ID NO: 277910 - RNA, 19 nt, Homo sapiens
  misc_RNA (1)...(19): siRNA sense strand
caucagucccacccugcua

SEQ ID NO: 277911 - RNA, 19 nt, Homo sapiens
  misc_RNA (1)...(19): siRNA sense strand
gcuauacccagaguucuuc

SEQ ID NO: 277912 - RNA, 19 nt, Homo sapiens
  misc_RNA (1)...(19): siRNA sense strand
aagagcacccacuguuuga

SEQ ID NO: 277913 - RNA, 19 nt, Homo sapiens
  misc_RNA (1)...(19): siRNA sense strand
ugagcuauacccagaguuc

SEQ ID NO: 277914 - RNA, 19 nt, Homo sapiens
  misc_RNA (1)...(19): siRNA sense strand
cacaaguggcgaaucauca

SEQ ID NO: 277915 - RNA, 19 nt, Homo sapiens
  misc_RNA (1)...(19): siRNA sense strand
ggaugugcacucauuucga

SEQ ID NO: 277916 - RNA, 19 nt, Homo sapiens
  misc_RNA (1)...(19): siRNA sense strand
ccacgaugacccaaaggau

SEQ ID NO: 277917 - RNA, 19 nt, Homo sapiens
  misc_RNA (1)...(19): siRNA sense strand
gaugugcacucauuucgaa

SEQ ID NO: 277918 - RNA, 19 nt, Homo sapiens
  misc_RNA (1)...(19): siRNA sense strand
gaagagcacccacuguuug

SEQ ID NO: 277919 - RNA, 19 nt, Homo sapiens
  misc_RNA (1)...(19): siRNA sense strand
gaauaugccuacgugcuaa

SEQ ID NO: 277920 - RNA, 19 nt, Homo sapiens
  misc_RNA (1)...(19): siRNA sense strand
ggacuggucugagcuauac

SEQ ID NO: 277921 - RNA, 19 nt, Homo sapiens
  misc_RNA (1)...(19): siRNA sense strand
uggcuaugguggccuguua

SEQ ID NO: 277922 - RNA, 19 nt, Homo sapiens
  misc_RNA (1)...(19): siRNA sense strand
gacuggaugugcacucauu

SEQ ID NO: 277923 - RNA, 19 nt, Homo sapiens
  misc_RNA (1)...(19): siRNA sense strand
cgaagagcacccacuguuu

SEQ ID NO: 277924 - RNA, 19 nt, Homo sapiens
  misc_RNA (1)...(19): siRNA sense strand
aagcacaaguggcgaauca

SEQ ID NO: 277925 - RNA, 19 nt, Homo sapiens
  misc_RNA (1)...(19): siRNA sense strand
gagccacgaugacccaaag

SEQ ID NO: 277926 - RNA, 19 nt, Homo sapiens
  misc_RNA (1)...(19): siRNA sense strand
gcacaaguggcgaaucauc

SEQ ID NO: 277927 - RNA, 19 nt, Homo sapiens
  misc_RNA (1)...(19): siRNA sense strand
guucuucgcuccacucacu

SEQ ID NO: 277928 - RNA, 19 nt, Homo sapiens
  misc_RNA (1)...(19): siRNA sense strand
cacgaugacccaaaggaua

SEQ ID NO: 277929 - RNA, 19 nt, Homo sapiens
  misc_RNA (1)...(19): siRNA sense strand
agaauaugccuacgugcua

SEQ ID NO: 277930 - RNA, 19 nt, Homo sapiens
  misc_RNA (1)...(19): siRNA sense strand
acgaugacccaaaggauaa

SEQ ID NO: 277931 - RNA, 19 nt, Homo sapiens
  misc_RNA (1)...(19): siRNA sense strand
caaguggaguuugcagaca

SEQ ID NO: 277932 - RNA, 19 nt, Homo sapiens
  misc_RNA (1)...(19): siRNA sense strand
cccaaaggauaagaaagaa

SEQ ID NO: 277933 - RNA, 19 nt, Homo sapiens
  misc_RNA (1)...(19): siRNA sense strand
ccaaaggauaagaaagaaa

SEQ ID NO: 277934 - RNA, 19 nt, Homo sapiens
  misc_RNA (1)...(19): siRNA sense strand
ucgaagagcacccacuguu

SEQ ID NO: 277935 - RNA, 19 nt, Homo sapiens
  misc_RNA (1)...(19): siRNA sense strand
gagcuacacgacuggaugu

SEQ ID NO: 277936 - RNA, 19 nt, Homo sapiens
  misc_RNA (1)...(19): siRNA sense strand
aguggaguuugcagacaua

SEQ ID NO: 277937 - RNA, 19 nt, Homo sapiens
  misc_RNA (1)...(19): siRNA sense strand
acccaaaggauaagaaaga

SEQ ID NO: 277938 - RNA, 19 nt, Homo sapiens
  misc_RNA (1)...(19): siRNA sense strand
gauggacuggucugagcua

SEQ ID NO: 277939 - RNA, 19 nt, Homo sapiens
  misc_RNA (1)...(19): siRNA sense strand
ugacccaaaggauaagaaa

SEQ ID NO: 277940 - RNA, 19 nt, Homo sapiens
  misc_RNA (1)...(19): siRNA sense strand
ccgaugugcuggagcuaca

SEQ ID NO: 277941 - RNA, 19 nt, Homo sapiens
  misc_RNA (1)...(19): siRNA sense strand
uguauaccauaaccgaugu

SEQ ID NO: 277942 - RNA, 19 nt, Homo sapiens
  misc_RNA (1)...(19): siRNA sense strand
ugagcuauacccagaguuc

SEQ ID NO: 277943 - RNA, 19 nt, Homo sapiens
  misc_RNA (1)...(19): siRNA sense strand
aagagcacccacuguuuga

SEQ ID NO: 277944 - RNA, 19 nt, Homo sapiens
  misc_RNA (1)...(19): siRNA sense strand
gcuauacccagaguucuuc

SEQ ID NO: 277945 - RNA, 19 nt, Homo sapiens
  misc_RNA (1)...(19): siRNA sense strand
caucagucccacccugcua

SEQ ID NO: 277946 - RNA, 19 nt, Homo sapiens
  misc_RNA (1)...(19): siRNA sense strand
ccacgaugacccaaaggau

SEQ ID NO: 277947 - RNA, 19 nt, Homo sapiens
  misc_RNA (1)...(19): siRNA sense strand
ggaugugcacucauuucga

SEQ ID NO: 277948 - RNA, 19 nt, Homo sapiens
  misc_RNA (1)...(19): siRNA sense strand
cacaaguggcgaaucauca

SEQ ID NO: 277949 - RNA, 19 nt, Homo sapiens
  misc_RNA (1)...(19): siRNA sense strand
ggacaaagguggacuacuu

SEQ ID NO: 277950 - RNA, 19 nt, Homo sapiens
  misc_RNA (1)...(19): siRNA sense strand
gaaaugcuaugggaagaua

SEQ ID NO: 277951 - RNA, 19 nt, Homo sapiens
  misc_RNA (1)...(19): siRNA sense strand
gauaaaggcauccguguua

SEQ ID NO: 277952 - RNA, 19 nt, Homo sapiens
  misc_RNA (1)...(19): siRNA sense strand
gauaauagcuuugagcaau

SEQ ID NO: 277953 - RNA, 19 nt, Homo sapiens
  misc_RNA (1)...(19): siRNA sense strand
gcaagcuggugaugucuua

SEQ ID NO: 277954 - RNA, 19 nt, Homo sapiens
  misc_RNA (1)...(19): siRNA sense strand
caaacuaucugcuugagaa

SEQ ID NO: 277955 - RNA, 19 nt, Homo sapiens
  misc_RNA (1)...(19): siRNA sense strand
acaaggagauuuauaccua

SEQ ID NO: 277956 - RNA, 19 nt, Homo sapiens
  misc_RNA (1)...(19): siRNA sense strand
ggaaggcccgaaagaauua

SEQ ID NO: 277957 - RNA, 19 nt, Homo sapiens
  misc_RNA (1)...(19): siRNA sense strand
agacaaagaucuucauuag

SEQ ID NO: 277958 - RNA, 19 nt, Homo sapiens
  misc_RNA (1)...(19): siRNA sense strand
gaaagaagagcaagaggaa

SEQ ID NO: 277959 - RNA, 19 nt, Homo sapiens
  misc_RNA (1)...(19): siRNA sense strand
gcaaauauuuccggucaga

SEQ ID NO: 277960 - RNA, 19 nt, Homo sapiens
  misc_RNA (1)...(19): siRNA sense strand
caacaauuccucccgauuu

SEQ ID NO: 277961 - RNA, 19 nt, Homo sapiens
  misc_RNA (1)...(19): siRNA sense strand
gauagugaaucgaaucaau

SEQ ID NO: 277962 - RNA, 19 nt, Homo sapiens
  misc_RNA (1)...(19): siRNA sense strand
ggagauuuauaccuacauu

SEQ ID NO: 277963 - RNA, 19 nt, Homo sapiens
  misc_RNA (1)...(19): siRNA sense strand
cagaguucauugccaaaua

SEQ ID NO: 277964 - RNA, 19 nt, Homo sapiens
  misc_RNA (1)...(19): siRNA sense strand
guagagauccugagggaaa

SEQ ID NO: 277965 - RNA, 19 nt, Homo sapiens
  misc_RNA (1)...(19): siRNA sense strand
gggcuugaauucagaagaa

SEQ ID NO: 277966 - RNA, 19 nt, Homo sapiens
  misc_RNA (1)...(19): siRNA sense strand
ucacugcacugaauguuau

SEQ ID NO: 277967 - RNA, 19 nt, Homo sapiens
  misc_RNA (1)...(19): siRNA sense strand
guaaugggaguccuugaua

SEQ ID NO: 277968 - RNA, 19 nt, Homo sapiens
  misc_RNA (1)...(19): siRNA sense strand
gaaggucaaucguggcaau

SEQ ID NO: 277969 - RNA, 19 nt, Homo sapiens
  misc_RNA (1)...(19): siRNA sense strand
ugacauccauggugcuaaa

SEQ ID NO: 277970 - RNA, 19 nt, Homo sapiens
  misc_RNA (1)...(19): siRNA sense strand
cgaaagaauuaucgcaaau

SEQ ID NO: 277971 - RNA, 19 nt, Homo sapiens
  misc_RNA (1)...(19): siRNA sense strand
ugacaagaauaaugaccua

SEQ ID NO: 277972 - RNA, 19 nt, Homo sapiens
  misc_RNA (1)...(19): siRNA sense strand
gaacuuccacaucuucuau

SEQ ID NO: 277973 - RNA, 19 nt, Homo sapiens
  misc_RNA (1)...(19): siRNA sense strand
gcaagaggaauauaagaga

SEQ ID NO: 277974 - RNA, 19 nt, Homo sapiens
  misc_RNA (1)...(19): siRNA sense strand
ggaauguggugaucucagu

SEQ ID NO: 277975 - RNA, 19 nt, Homo sapiens
  misc_RNA (1)...(19): siRNA sense strand
ugaaggcccugaagcuuga

SEQ ID NO: 277976 - RNA, 19 nt, Homo sapiens
  misc_RNA (1)...(19): siRNA sense strand
aagaagagcaagaggaaua

SEQ ID NO: 277977 - RNA, 19 nt, Homo sapiens
  misc_RNA (1)...(19): siRNA sense strand
cagcagguguucauagaga

SEQ ID NO: 277978 - RNA, 19 nt, Homo sapiens
  misc_RNA (1)...(19): siRNA sense strand
gcagcuggccacacucaua

SEQ ID NO: 277979 - RNA, 19 nt, Homo sapiens
  misc_RNA (1)...(19): siRNA sense strand
gagaguggaucagggaaga

SEQ ID NO: 277980 - RNA, 19 nt, Homo sapiens
  misc_RNA (1)...(19): siRNA sense strand
gcaccuggccucacuggaa

SEQ ID NO: 277981 - RNA, 19 nt, Homo sapiens
  misc_RNA (1)...(19): siRNA sense strand
gaggucaguucucuucaga

SEQ ID NO: 277982 - RNA, 19 nt, Homo sapiens
  misc_RNA (1)...(19): siRNA sense strand
caacgugaccagcuuuauu

SEQ ID NO: 277983 - RNA, 19 nt, Homo sapiens
  misc_RNA (1)...(19): siRNA sense strand
gagaugacccugaaagaag

SEQ ID NO: 277984 - RNA, 19 nt, Homo sapiens
  misc_RNA (1)...(19): siRNA sense strand
ccgaaagaauuaucgcaaa

SEQ ID NO: 277985 - RNA, 19 nt, Homo sapiens
  misc_RNA (1)...(19): siRNA sense strand
gagcuggccuuuggcaaga

SEQ ID NO: 277986 - RNA, 19 nt, Homo sapiens
  misc_RNA (1)...(19): siRNA sense strand
gaauaaugaccuacucuuc

SEQ ID NO: 277987 - RNA, 19 nt, Homo sapiens
  misc_RNA (1)...(19): siRNA sense strand
ugaaccagcucuucuccaa

SEQ ID NO: 277988 - RNA, 19 nt, Homo sapiens
  misc_RNA (1)...(19): siRNA sense strand
ccaaauaucaagacuauac

SEQ ID NO: 277989 - RNA, 19 nt, Homo sapiens
  misc_RNA (1)...(19): siRNA sense strand
gaccaagggccaugugauu

SEQ ID NO: 277990 - RNA, 19 nt, Homo sapiens
  misc_RNA (1)...(19): siRNA sense strand
gagcauaaucagcgaggua

SEQ ID NO: 277991 - RNA, 19 nt, Homo sapiens
  misc_RNA (1)...(19): siRNA sense strand
gggacgcccuggcuaagaa

SEQ ID NO: 277992 - RNA, 19 nt, Homo sapiens
  misc_RNA (1)...(19): siRNA sense strand
ugccaaauaucaagacuau

SEQ ID NO: 277993 - RNA, 19 nt, Homo sapiens
  misc_RNA (1)...(19): siRNA sense strand
ccucaaggaugggcucuuu

SEQ ID NO: 277994 - RNA, 19 nt, Homo sapiens
  misc_RNA (1)...(19): siRNA sense strand
guugguggcugaugaguuc

SEQ ID NO: 277995 - RNA, 19 nt, Homo sapiens
  misc_RNA (1)...(19): siRNA sense strand
ggaggagauucgacaagug

SEQ ID NO: 277996 - RNA, 19 nt, Homo sapiens
  misc_RNA (1)...(19): siRNA sense strand
gaagagcaagaggaauaua

SEQ ID NO: 277997 - RNA, 19 nt, Homo sapiens
  misc_RNA (1)...(19): siRNA sense strand
gcaagagguuccgggauca

SEQ ID NO: 277998 - RNA, 19 nt, Homo sapiens
  misc_RNA (1)...(19): siRNA sense strand
gguggucacugcacugaau

SEQ ID NO: 277999 - RNA, 19 nt, Homo sapiens
  misc_RNA (1)...(19): siRNA sense strand
ugauugaacugcugaccaa

SEQ ID NO: 278000 - RNA, 19 nt, Homo sapiens
  misc_RNA (1)...(19): siRNA sense strand
aagguggacuacuuugaua

SEQ ID NO: 278001 - RNA, 19 nt, Homo sapiens
  misc_RNA (1)...(19): siRNA sense strand
uaaugggaguccuugauau

SEQ ID NO: 278002 - RNA, 19 nt, Homo sapiens
  misc_RNA (1)...(19): siRNA sense strand
gggaagguguugagaaggu

SEQ ID NO: 278003 - RNA, 19 nt, Homo sapiens
  misc_RNA (1)...(19): siRNA sense strand
gagguauccuggccauguu

SEQ ID NO: 278004 - RNA, 19 nt, Homo sapiens
  misc_RNA (1)...(19): siRNA sense strand
gugaccagcuuuauugaca

SEQ ID NO: 278005 - RNA, 19 nt, Homo sapiens
  misc_RNA (1)...(19): siRNA sense strand
acaagagcaugguacagaa

SEQ ID NO: 278006 - RNA, 19 nt, Homo sapiens
  misc_RNA (1)...(19): siRNA sense strand
gugaucaacuacugcaaug

SEQ ID NO: 278007 - RNA, 19 nt, Homo sapiens
  misc_RNA (1)...(19): siRNA sense strand
ggucagcgagcaugugauu

SEQ ID NO: 278008 - RNA, 19 nt, Homo sapiens
  misc_RNA (1)...(19): siRNA sense strand
gagcaaagucacccagaau

SEQ ID NO: 278009 - RNA, 19 nt, Homo sapiens
  misc_RNA (1)...(19): siRNA sense strand
gagcaagaggaauauaaga

SEQ ID NO: 278010 - RNA, 19 nt, Homo sapiens
  misc_RNA (1)...(19): siRNA sense strand
ccucaucuccucuugguuu

SEQ ID NO: 278011 - RNA, 19 nt, Homo sapiens
  misc_RNA (1)...(19): siRNA sense strand
agaguucauugccaaauau

SEQ ID NO: 278012 - RNA, 19 nt, Homo sapiens
  misc_RNA (1)...(19): siRNA sense strand
caagaauaaugaccuacuc

SEQ ID NO: 278013 - RNA, 19 nt, Homo sapiens
  misc_RNA (1)...(19): siRNA sense strand
cuaucugaaucaugaagua

SEQ ID NO: 278014 - RNA, 19 nt, Homo sapiens
  misc_RNA (1)...(19): siRNA sense strand
aggagucacugcucaagaa

SEQ ID NO: 278015 - RNA, 19 nt, Homo sapiens
  misc_RNA (1)...(19): siRNA sense strand
ggggaaacaugcaaaagaa

SEQ ID NO: 278016 - RNA, 19 nt, Homo sapiens
  misc_RNA (1)...(19): siRNA sense strand
gaaggcauaccguggacaa

SEQ ID NO: 278017 - RNA, 19 nt, Homo sapiens
  misc_RNA (1)...(19): siRNA sense strand
ggaaaggagagcaggugaa

SEQ ID NO: 278018 - RNA, 19 nt, Homo sapiens
  misc_RNA (1)...(19): siRNA sense strand
gauccaggcuuuugugaga

SEQ ID NO: 278019 - RNA, 19 nt, Homo sapiens
  misc_RNA (1)...(19): siRNA sense strand
ugacuccacuuuccuagca

SEQ ID NO: 278020 - RNA, 19 nt, Homo sapiens
  misc_RNA (1)...(19): siRNA sense strand
cuucagggcuguacagagu

SEQ ID NO: 278021 - RNA, 19 nt, Homo sapiens
  misc_RNA (1)...(19): siRNA sense strand
ccaagaccauucgcaacaa

SEQ ID NO: 278022 - RNA, 19 nt, Homo sapiens
  misc_RNA (1)...(19): siRNA sense strand
ggagagguguucgggagau

SEQ ID NO: 278023 - RNA, 19 nt, Homo sapiens
  misc_RNA (1)...(19): siRNA sense strand
ucacagacaccaagaaguc

SEQ ID NO: 278024 - RNA, 19 nt, Homo sapiens
  misc_RNA (1)...(19): siRNA sense strand
gaaagagucagauccucau

SEQ ID NO: 278025 - RNA, 19 nt, Homo sapiens
  misc_RNA (1)...(19): siRNA sense strand
uaagcaggcaucucucaaa

SEQ ID NO: 278026 - RNA, 19 nt, Homo sapiens
  misc_RNA (1)...(19): siRNA sense strand
gagauggugggcuugaauu

SEQ ID NO: 278027 - RNA, 19 nt, Homo sapiens
  misc_RNA (1)...(19): siRNA sense strand
ucagcgagcaugugauuga

SEQ ID NO: 278028 - RNA, 19 nt, Homo sapiens
  misc_RNA (1)...(19): siRNA sense strand
cucuuuagcuugcaucuga

SEQ ID NO: 278029 - RNA, 19 nt, Homo sapiens
  misc_RNA (1)...(19): siRNA sense strand
caagaagucccaggccaaa

SEQ ID NO: 278030 - RNA, 19 nt, Homo sapiens
  misc_RNA (1)...(19): siRNA sense strand
uggcagaggccgugaagaa

SEQ ID NO: 278031 - RNA, 19 nt, Homo sapiens
  misc_RNA (1)...(19): siRNA sense strand
gcccucaccuuggcagauu

SEQ ID NO: 278032 - RNA, 19 nt, Homo sapiens
  misc_RNA (1)...(19): siRNA sense strand
uaaaggcauccguguuauu

SEQ ID NO: 278033 - RNA, 19 nt, Homo sapiens
  misc_RNA (1)...(19): siRNA sense strand
gacaaagaucuucauuaga

SEQ ID NO: 278034 - RNA, 19 nt, Homo sapiens
  misc_RNA (1)...(19): siRNA sense strand
gcagcgaggucaguucucu

SEQ ID NO: 278035 - RNA, 19 nt, Homo sapiens
  misc_RNA (1)...(19): siRNA sense strand
agaugacccugaaagaaga

SEQ ID NO: 278036 - RNA, 19 nt, Homo sapiens
  misc_RNA (1)...(19): siRNA sense strand
aacaauuccucccgauuug

SEQ ID NO: 278037 - RNA, 19 nt, Homo sapiens
  misc_RNA (1)...(19): siRNA sense strand
ccagcuuuauugacaagaa

SEQ ID NO: 278038 - RNA, 19 nt, Homo sapiens
  misc_RNA (1)...(19): siRNA sense strand
cauacaacgugaccagcuu

SEQ ID NO: 278039 - RNA, 19 nt, Homo sapiens
  misc_RNA (1)...(19): siRNA sense strand
augccuaucugaaucauga

SEQ ID NO: 278040 - RNA, 19 nt, Homo sapiens
  misc_RNA (1)...(19): siRNA sense strand
ggauauugaauuugacuuc

SEQ ID NO: 278041 - RNA, 19 nt, Homo sapiens
  misc_RNA (1)...(19): siRNA sense strand
gagagguguucgggagauu

SEQ ID NO: 278042 - RNA, 19 nt, Homo sapiens
  misc_RNA (1)...(19): siRNA sense strand
aggaugggcucuuuagcuu

SEQ ID NO: 278043 - RNA, 19 nt, Homo sapiens
  misc_RNA (1)...(19): siRNA sense strand
caagagcaugguacagaaa

SEQ ID NO: 278044 - RNA, 19 nt, Homo sapiens
  misc_RNA (1)...(19): siRNA sense strand
gugaaucgaaucaaugaga

SEQ ID NO: 278045 - RNA, 19 nt, Homo sapiens
  misc_RNA (1)...(19): siRNA sense strand
aucaacagcuucccaucua

SEQ ID NO: 278046 - RNA, 19 nt, Homo sapiens
  misc_RNA (1)...(19): siRNA sense strand
gaagaaguagagagagcuu

SEQ ID NO: 278047 - RNA, 19 nt, Homo sapiens
  misc_RNA (1)...(19): siRNA sense strand
gaauucagaagaaguagag

SEQ ID NO: 278048 - RNA, 19 nt, Homo sapiens
  misc_RNA (1)...(19): siRNA sense strand
guaccgggcugugcuggau

SEQ ID NO: 278049 - RNA, 19 nt, Homo sapiens
  misc_RNA (1)...(19): siRNA sense strand
caacaaauaugcuggagaa

SEQ ID NO: 278050 - RNA, 19 nt, Homo sapiens
  misc_RNA (1)...(19): siRNA sense strand
gaggagcacugguauauga

SEQ ID NO: 278051 - RNA, 19 nt, Homo sapiens
  misc_RNA (1)...(19): siRNA sense strand
ggaaagaaguaaagaaaca

SEQ ID NO: 278052 - RNA, 19 nt, Homo sapiens
  misc_RNA (1)...(19): siRNA sense strand
gaagaaauuuggacuagau

SEQ ID NO: 278053 - RNA, 19 nt, Homo sapiens
  misc_RNA (1)...(19): siRNA sense strand
caaauaugcuggagaauca

SEQ ID NO: 278054 - RNA, 19 nt, Homo sapiens
  misc_RNA (1)...(19): siRNA sense strand
caggaaagcuguucuauag

SEQ ID NO: 278055 - RNA, 19 nt, Homo sapiens
  misc_RNA (1)...(19): siRNA sense strand
gaacuaugcucgcacugaa

SEQ ID NO: 278056 - RNA, 19 nt, Homo sapiens
  misc_RNA (1)...(19): siRNA sense strand
caacucggauucaucuaua

SEQ ID NO: 278057 - RNA, 19 nt, Homo sapiens
  misc_RNA (1)...(19): siRNA sense strand
guaaaucacuguaugaaag

SEQ ID NO: 278058 - RNA, 19 nt, Homo sapiens
  misc_RNA (1)...(19): siRNA sense strand
uaugaaagcugguuggaaa

SEQ ID NO: 278059 - RNA, 19 nt, Homo sapiens
  misc_RNA (1)...(19): siRNA sense strand
uauaugagcuuguggauuc

SEQ ID NO: 278060 - RNA, 19 nt, Homo sapiens
  misc_RNA (1)...(19): siRNA sense strand
ggaaagagcauucaucgau

SEQ ID NO: 278061 - RNA, 19 nt, Homo sapiens
  misc_RNA (1)...(19): siRNA sense strand
gaauacacuuucagacuug

SEQ ID NO: 278062 - RNA, 19 nt, Homo sapiens
  misc_RNA (1)...(19): siRNA sense strand
uuacaaagcuuccucaucu

SEQ ID NO: 278063 - RNA, 19 nt, Homo sapiens
  misc_RNA (1)...(19): siRNA sense strand
gagaguaaaucacuguaug

SEQ ID NO: 278064 - RNA, 19 nt, Homo sapiens
  misc_RNA (1)...(19): siRNA sense strand
gaugauggguuugagagua

SEQ ID NO: 278065 - RNA, 19 nt, Homo sapiens
  misc_RNA (1)...(19): siRNA sense strand
caaauauugugccaccaua

SEQ ID NO: 278066 - RNA, 19 nt, Homo sapiens
  misc_RNA (1)...(19): siRNA sense strand
agagggagaucuuguauau

SEQ ID NO: 278067 - RNA, 19 nt, Homo sapiens
  misc_RNA (1)...(19): siRNA sense strand
gagaggaaauguguuaaau

SEQ ID NO: 278068 - RNA, 19 nt, Homo sapiens
  misc_RNA (1)...(19): siRNA sense strand
caaguagccacaacaaaua

SEQ ID NO: 278069 - RNA, 19 nt, Homo sapiens
  misc_RNA (1)...(19): siRNA sense strand
gaacaugaaacugagauuu

SEQ ID NO: 278070 - RNA, 19 nt, Homo sapiens
  misc_RNA (1)...(19): siRNA sense strand
gaagauuguuauugcaaga

SEQ ID NO: 278071 - RNA, 19 nt, Homo sapiens
  misc_RNA (1)...(19): siRNA sense strand
gcagagcccguuacacuaa

SEQ ID NO: 278072 - RNA, 19 nt, Homo sapiens
  misc_RNA (1)...(19): siRNA sense strand
caucgauccucuugguuua

SEQ ID NO: 278073 - RNA, 19 nt, Homo sapiens
  misc_RNA (1)...(19): siRNA sense strand
cuacuuugcuccugaggua

SEQ ID NO: 278074 - RNA, 19 nt, Homo sapiens
  misc_RNA (1)...(19): siRNA sense strand
ccagagaggaaauguguua

SEQ ID NO: 278075 - RNA, 19 nt, Homo sapiens
  misc_RNA (1)...(19): siRNA sense strand
gacaaaugccaacuauaua

SEQ ID NO: 278076 - RNA, 19 nt, Homo sapiens
  misc_RNA (1)...(19): siRNA sense strand
ccauaggaaucaucuugua

SEQ ID NO: 278077 - RNA, 19 nt, Homo sapiens
  misc_RNA (1)...(19): siRNA sense strand
agacaaaugccaacuauau

SEQ ID NO: 278078 - RNA, 19 nt, Homo sapiens
  misc_RNA (1)...(19): siRNA sense strand
ugagacauuugaauuggua

SEQ ID NO: 278079 - RNA, 19 nt, Homo sapiens
  misc_RNA (1)...(19): siRNA sense strand
gaauugcuccaccagauaa

SEQ ID NO: 278080 - RNA, 19 nt, Homo sapiens
  misc_RNA (1)...(19): siRNA sense strand
ggaauugcuccaccagaua

SEQ ID NO: 278081 - RNA, 19 nt, Homo sapiens
  misc_RNA (1)...(19): siRNA sense strand
gcuaugagaauguuacaaa

SEQ ID NO: 278082 - RNA, 19 nt, Homo sapiens
  misc_RNA (1)...(19): siRNA sense strand
cagcugggaugcagaagaa

SEQ ID NO: 278083 - RNA, 19 nt, Homo sapiens
  misc_RNA (1)...(19): siRNA sense strand
auggugggcugguuuauua

SEQ ID NO: 278084 - RNA, 19 nt, Homo sapiens
  misc_RNA (1)...(19): siRNA sense strand
ggaagaaauuuggacuaga

SEQ ID NO: 278085 - RNA, 19 nt, Homo sapiens
  misc_RNA (1)...(19): siRNA sense strand
caacuguacugggaagauu

SEQ ID NO: 278086 - RNA, 19 nt, Homo sapiens
  misc_RNA (1)...(19): siRNA sense strand
gauuguggaugaacaugaa

SEQ ID NO: 278087 - RNA, 19 nt, Homo sapiens
  misc_RNA (1)...(19): siRNA sense strand
ugagacaaaugccaacuau

SEQ ID NO: 278088 - RNA, 19 nt, Homo sapiens
  misc_RNA (1)...(19): siRNA sense strand
gcgcuaucaucaaaguaua

SEQ ID NO: 278089 - RNA, 19 nt, Homo sapiens
  misc_RNA (1)...(19): siRNA sense strand
gcagugagaaugaugaaug

SEQ ID NO: 278090 - RNA, 19 nt, Homo sapiens
  misc_RNA (1)...(19): siRNA sense strand
cagcaaguaucuauaaucu

SEQ ID NO: 278091 - RNA, 19 nt, Homo sapiens
  misc_RNA (1)...(19): siRNA sense strand
gaaggcaauuauacucuca

SEQ ID NO: 278092 - RNA, 19 nt, Homo sapiens
  misc_RNA (1)...(19): siRNA sense strand
aguaaaggcuggagaccua

SEQ ID NO: 278093 - RNA, 19 nt, Homo sapiens
  misc_RNA (1)...(19): siRNA sense strand
aaacugguauccgaaauga

SEQ ID NO: 278094 - RNA, 19 nt, Homo sapiens
  misc_RNA (1)...(19): siRNA sense strand
uauuaagccucucaaagaa

SEQ ID NO: 278095 - RNA, 19 nt, Homo sapiens
  misc_RNA (1)...(19): siRNA sense strand
ccaaguagccacaacaaau

SEQ ID NO: 278096 - RNA, 19 nt, Homo sapiens
  misc_RNA (1)...(19): siRNA sense strand
caacugaugcuccuggaaa

SEQ ID NO: 278097 - RNA, 19 nt, Homo sapiens
  misc_RNA (1)...(19): siRNA sense strand
agaauacacuuucagacuu

SEQ ID NO: 278098 - RNA, 19 nt, Homo sapiens
  misc_RNA (1)...(19): siRNA sense strand
ggaaacugguauccgaaau

SEQ ID NO: 278099 - RNA, 19 nt, Homo sapiens
  misc_RNA (1)...(19): siRNA sense strand
agggagaucuuguauaugu

SEQ ID NO: 278100 - RNA, 19 nt, Homo sapiens
  misc_RNA (1)...(19): siRNA sense strand
gaaauuuggacuagauuca

SEQ ID NO: 278101 - RNA, 19 nt, Homo sapiens
  misc_RNA (1)...(19): siRNA sense strand
cugcugcgcuggcaucuuu

SEQ ID NO: 278102 - RNA, 19 nt, Homo sapiens
  misc_RNA (1)...(19): siRNA sense strand
ccacacaauuuaugagaca

SEQ ID NO: 278103 - RNA, 19 nt, Homo sapiens
  misc_RNA (1)...(19): siRNA sense strand
ccagauggcuaugagaaug

SEQ ID NO: 278104 - RNA, 19 nt, Homo sapiens
  misc_RNA (1)...(19): siRNA sense strand
ccaggaaagcuguucuaua

SEQ ID NO: 278105 - RNA, 19 nt, Homo sapiens
  misc_RNA (1)...(19): siRNA sense strand
ccaacuauauaucgauugu

SEQ ID NO: 278106 - RNA, 19 nt, Homo sapiens
  misc_RNA (1)...(19): siRNA sense strand
caucauauuugcuccaagu

SEQ ID NO: 278107 - RNA, 19 nt, Homo sapiens
  misc_RNA (1)...(19): siRNA sense strand
ccuagaagaacuaucauuu

SEQ ID NO: 278108 - RNA, 19 nt, Homo sapiens
  misc_RNA (1)...(19): siRNA sense strand
uaucggaccuggcuuuaca

SEQ ID NO: 278109 - RNA, 19 nt, Homo sapiens
  misc_RNA (1)...(19): siRNA sense strand
agauccagcugacuacuuu

SEQ ID NO: 278110 - RNA, 19 nt, Homo sapiens
  misc_RNA (1)...(19): siRNA sense strand
cauguuagcaggagccaua

SEQ ID NO: 278111 - RNA, 19 nt, Homo sapiens
  misc_RNA (1)...(19): siRNA sense strand
gaaacugguauccgaaaug

SEQ ID NO: 278112 - RNA, 19 nt, Homo sapiens
  misc_RNA (1)...(19): siRNA sense strand
caggaacucugaaagaagu

SEQ ID NO: 278113 - RNA, 19 nt, Homo sapiens
  misc_RNA (1)...(19): siRNA sense strand
gaccauggaguaucauuug

SEQ ID NO: 278114 - RNA, 19 nt, Homo sapiens
  misc_RNA (1)...(19): siRNA sense strand
ggagaucuuguauauguga

SEQ ID NO: 278115 - RNA, 19 nt, Homo sapiens
  misc_RNA (1)...(19): siRNA sense strand
ugacagguauguuauucug

SEQ ID NO: 278116 - RNA, 19 nt, Homo sapiens
  misc_RNA (1)...(19): siRNA sense strand
ggagugauucuuucaggaa

SEQ ID NO: 278117 - RNA, 19 nt, Homo sapiens
  misc_RNA (1)...(19): siRNA sense strand
auauaucgauuguggauga

SEQ ID NO: 278118 - RNA, 19 nt, Homo sapiens
  misc_RNA (1)...(19): siRNA sense strand
cagugagaaugaugaauga

SEQ ID NO: 278119 - RNA, 19 nt, Homo sapiens
  misc_RNA (1)...(19): siRNA sense strand
guacagccauaucccaaag

SEQ ID NO: 278120 - RNA, 19 nt, Homo sapiens
  misc_RNA (1)...(19): siRNA sense strand
uuauuaagccucucaaaga

SEQ ID NO: 278121 - RNA, 19 nt, Homo sapiens
  misc_RNA (1)...(19): siRNA sense strand
gaaauugcccggaguuuug

SEQ ID NO: 278122 - RNA, 19 nt, Homo sapiens
  misc_RNA (1)...(19): siRNA sense strand
uuacagggagugauucuuu

SEQ ID NO: 278123 - RNA, 19 nt, Homo sapiens
  misc_RNA (1)...(19): siRNA sense strand
augauguccucuuaucuua

SEQ ID NO: 278124 - RNA, 19 nt, Homo sapiens
  misc_RNA (1)...(19): siRNA sense strand
cagacuugauguugaagaa

SEQ ID NO: 278125 - RNA, 19 nt, Homo sapiens
  misc_RNA (1)...(19): siRNA sense strand
cccaaaggauggaaucuuc

SEQ ID NO: 278126 - RNA, 19 nt, Homo sapiens
  misc_RNA (1)...(19): siRNA sense strand
agaaugggcugaggagaau

SEQ ID NO: 278127 - RNA, 19 nt, Homo sapiens
  misc_RNA (1)...(19): siRNA sense strand
ccacuucugugcgcuauca

SEQ ID NO: 278128 - RNA, 19 nt, Homo sapiens
  misc_RNA (1)...(19): siRNA sense strand
ucaaagaaacaaccacuuc

SEQ ID NO: 278129 - RNA, 19 nt, Homo sapiens
  misc_RNA (1)...(19): siRNA sense strand
caaacccaguggaagaaau

SEQ ID NO: 278130 - RNA, 19 nt, Homo sapiens
  misc_RNA (1)...(19): siRNA sense strand
aguaucauuugacuccuua

SEQ ID NO: 278131 - RNA, 19 nt, Homo sapiens
  misc_RNA (1)...(19): siRNA sense strand
ugaggagaaugucaaaaua

SEQ ID NO: 278132 - RNA, 19 nt, Homo sapiens
  misc_RNA (1)...(19): siRNA sense strand
guacugggaagauuguuau

SEQ ID NO: 278133 - RNA, 19 nt, Homo sapiens
  misc_RNA (1)...(19): siRNA sense strand
ucugugcgcuaucaucaaa

SEQ ID NO: 278134 - RNA, 19 nt, Homo sapiens
  misc_RNA (1)...(19): siRNA sense strand
cagaaugggcugaggagaa

SEQ ID NO: 278135 - RNA, 19 nt, Homo sapiens
  misc_RNA (1)...(19): siRNA sense strand
cagcaggaacucugaaaga

SEQ ID NO: 278136 - RNA, 19 nt, Homo sapiens
  misc_RNA (1)...(19): siRNA sense strand
gaugaaugaccaacugaug

SEQ ID NO: 278137 - RNA, 19 nt, Homo sapiens
  misc_RNA (1)...(19): siRNA sense strand
gagacaaaugccaacuaua

SEQ ID NO: 278138 - RNA, 19 nt, Homo sapiens
  misc_RNA (1)...(19): siRNA sense strand
ccaauuaguguauaaacug

SEQ ID NO: 278139 - RNA, 19 nt, Homo sapiens
  misc_RNA (1)...(19): siRNA sense strand
caaaguauacgguggaaac

SEQ ID NO: 278140 - RNA, 19 nt, Homo sapiens
  misc_RNA (1)...(19): siRNA sense strand
caaacuagaaagagagaug

SEQ ID NO: 278141 - RNA, 19 nt, Homo sapiens
  misc_RNA (1)...(19): siRNA sense strand
gcagcaaguaucuauaauc

SEQ ID NO: 278142 - RNA, 19 nt, Homo sapiens
  misc_RNA (1)...(19): siRNA sense strand
cagaggcugcuucagauuu

SEQ ID NO: 278143 - RNA, 19 nt, Homo sapiens
  misc_RNA (1)...(19): siRNA sense strand
gcccuuaaugugaguuaua

SEQ ID NO: 278144 - RNA, 19 nt, Homo sapiens
  misc_RNA (1)...(19): siRNA sense strand
cuaagaaacaugaucaaca

SEQ ID NO: 278145 - RNA, 19 nt, Homo sapiens
  misc_RNA (1)...(19): siRNA sense strand
cauuugaauugguagagaa

SEQ ID NO: 278146 - RNA, 19 nt, Homo sapiens
  misc_RNA (1)...(19): siRNA sense strand
gaguaaaucacuguaugaa

SEQ ID NO: 278147 - RNA, 19 nt, Homo sapiens
  misc_RNA (1)...(19): siRNA sense strand
caagaaauugcccggaguu

SEQ ID NO: 278148 - RNA, 19 nt, Homo sapiens
  misc_RNA (1)...(19): siRNA sense strand
ucuaugaugcuaucuuuga

SEQ ID NO: 278149 - RNA, 19 nt, Homo sapiens
  misc_RNA (1)...(19): siRNA sense strand
caaaucugcuccugaauua

SEQ ID NO: 278150 - RNA, 19 nt, Homo sapiens
  misc_RNA (1)...(19): siRNA sense strand
guaaagggauugcuuauau

SEQ ID NO: 278151 - RNA, 19 nt, Homo sapiens
  misc_RNA (1)...(19): siRNA sense strand
gaaauaaaguuaccuugga

SEQ ID NO: 278152 - RNA, 19 nt, Homo sapiens
  misc_RNA (1)...(19): siRNA sense strand
gaaagaagacgaaguuuga

SEQ ID NO: 278153 - RNA, 19 nt, Homo sapiens
  misc_RNA (1)...(19): siRNA sense strand
ggaagagccugucaaagaa

SEQ ID NO: 278154 - RNA, 19 nt, Homo sapiens
  misc_RNA (1)...(19): siRNA sense strand
uaacaaaucugcuccugaa

SEQ ID NO: 278155 - RNA, 19 nt, Homo sapiens
  misc_RNA (1)...(19): siRNA sense strand
gaacguggcugaggaugaa

SEQ ID NO: 278156 - RNA, 19 nt, Homo sapiens
  misc_RNA (1)...(19): siRNA sense strand
ggaacucacugguuugaaa

SEQ ID NO: 278157 - RNA, 19 nt, Homo sapiens
  misc_RNA (1)...(19): siRNA sense strand
ggaugaagaugaaauugaa

SEQ ID NO: 278158 - RNA, 19 nt, Homo sapiens
  misc_RNA (1)...(19): siRNA sense strand
ggaaauggccaaacagaaa

SEQ ID NO: 278159 - RNA, 19 nt, Homo sapiens
  misc_RNA (1)...(19): siRNA sense strand
caaaggagguagaagaaga

SEQ ID NO: 278160 - RNA, 19 nt, Homo sapiens
  misc_RNA (1)...(19): siRNA sense strand
ugaaagaaguguuugaaga

SEQ ID NO: 278161 - RNA, 19 nt, Homo sapiens
  misc_RNA (1)...(19): siRNA sense strand
caaagaagguggucguuuc

SEQ ID NO: 278162 - RNA, 19 nt, Homo sapiens
  misc_RNA (1)...(19): siRNA sense strand
gaaauuugguuauguggau

SEQ ID NO: 278163 - RNA, 19 nt, Homo sapiens
  misc_RNA (1)...(19): siRNA sense strand
cgacgaagaugaugaagau

SEQ ID NO: 278164 - RNA, 19 nt, Homo sapiens
  misc_RNA (1)...(19): siRNA sense strand
guacuauacuggagagaaa

SEQ ID NO: 278165 - RNA, 19 nt, Homo sapiens
  misc_RNA (1)...(19): siRNA sense strand
ggaagacggugaaauugau

SEQ ID NO: 278166 - RNA, 19 nt, Homo sapiens
  misc_RNA (1)...(19): siRNA sense strand
gaagaugacucugaagaag

SEQ ID NO: 278167 - RNA, 19 nt, Homo sapiens
  misc_RNA (1)...(19): siRNA sense strand
ggaaaugucagaagaugaa

SEQ ID NO: 278168 - RNA, 19 nt, Homo sapiens
  misc_RNA (1)...(19): siRNA sense strand
gggcaaggauaguuacuga

SEQ ID NO: 278169 - RNA, 19 nt, Homo sapiens
  misc_RNA (1)...(19): siRNA sense strand
gaauugguaugacuaggaa

SEQ ID NO: 278170 - RNA, 19 nt, Homo sapiens
  misc_RNA (1)...(19): siRNA sense strand
gaaagaaguguuugaagau

SEQ ID NO: 278171 - RNA, 19 nt, Homo sapiens
  misc_RNA (1)...(19): siRNA sense strand
aaagaaagcugcaaaaguu

SEQ ID NO: 278172 - RNA, 19 nt, Homo sapiens
  misc_RNA (1)...(19): siRNA sense strand
ggaugaggaugaagaugaa

SEQ ID NO: 278173 - RNA, 19 nt, Homo sapiens
  misc_RNA (1)...(19): siRNA sense strand
gaaacuggguccuccaaag

SEQ ID NO: 278174 - RNA, 19 nt, Homo sapiens
  misc_RNA (1)...(19): siRNA sense strand
ggaugaagaugaagaagag

SEQ ID NO: 278175 - RNA, 19 nt, Homo sapiens
  misc_RNA (1)...(19): siRNA sense strand
gaaggaagacagugaugaa

SEQ ID NO: 278176 - RNA, 19 nt, Homo sapiens
  misc_RNA (1)...(19): siRNA sense strand
ggaaagaagacgaaguuug

SEQ ID NO: 278177 - RNA, 19 nt, Homo sapiens
  misc_RNA (1)...(19): siRNA sense strand
caaagucacucaggaugaa

SEQ ID NO: 278178 - RNA, 19 nt, Homo sapiens
  misc_RNA (1)...(19): siRNA sense strand
cgucauaccucagaagaaa

SEQ ID NO: 278179 - RNA, 19 nt, Homo sapiens
  misc_RNA (1)...(19): siRNA sense strand
ggacgaggaugaggaugaa

SEQ ID NO: 278180 - RNA, 19 nt, Homo sapiens
  misc_RNA (1)...(19): siRNA sense strand
gcaagaaugccaagaagga

SEQ ID NO: 278181 - RNA, 19 nt, Homo sapiens
  misc_RNA (1)...(19): siRNA sense strand
gagaaaaccuuugaagaaa

SEQ ID NO: 278182 - RNA, 19 nt, Homo sapiens
  misc_RNA (1)...(19): siRNA sense strand
ggaagacagugaugaagag

SEQ ID NO: 278183 - RNA, 19 nt, Homo sapiens
  misc_RNA (1)...(19): siRNA sense strand
gaaaguggaaggcacagaa

SEQ ID NO: 278184 - RNA, 19 nt, Homo sapiens
  misc_RNA (1)...(19): siRNA sense strand
ugacgaagaugaugaggau

SEQ ID NO: 278185 - RNA, 19 nt, Homo sapiens
  misc_RNA (1)...(19): siRNA sense strand
gaggaaaugucagaagaug

SEQ ID NO: 278186 - RNA, 19 nt, Homo sapiens
  misc_RNA (1)...(19): siRNA sense strand
ggaagaugacucugaagaa

SEQ ID NO: 278187 - RNA, 19 nt, Homo sapiens
  misc_RNA (1)...(19): siRNA sense strand
ggaggaagagccugucaaa

SEQ ID NO: 278188 - RNA, 19 nt, Homo sapiens
  misc_RNA (1)...(19): siRNA sense strand
ugaggaagaugacucugaa

SEQ ID NO: 278189 - RNA, 19 nt, Homo sapiens
  misc_RNA (1)...(19): siRNA sense strand
agaagaagauagugaagau

SEQ ID NO: 278190 - RNA, 19 nt, Homo sapiens
  misc_RNA (1)...(19): siRNA sense strand
gcaaagaauggcaagaaug

SEQ ID NO: 278191 - RNA, 19 nt, Homo sapiens
  misc_RNA (1)...(19): siRNA sense strand
ggaaguauuugagaaagca

SEQ ID NO: 278192 - RNA, 19 nt, Homo sapiens
  misc_RNA (1)...(19): siRNA sense strand
cuauagagguggaaagaau

SEQ ID NO: 278193 - RNA, 19 nt, Homo sapiens
  misc_RNA (1)...(19): siRNA sense strand
gaaaagacaguaagaaaga

SEQ ID NO: 278194 - RNA, 19 nt, Homo sapiens
  misc_RNA (1)...(19): siRNA sense strand
gcaaagaagguggucguuu

SEQ ID NO: 278195 - RNA, 19 nt, Homo sapiens
  misc_RNA (1)...(19): siRNA sense strand
ugaagaugaugaugaugaa

SEQ ID NO: 278196 - RNA, 19 nt, Homo sapiens
  misc_RNA (1)...(19): siRNA sense strand
gaagaugaagaagaugaua

SEQ ID NO: 278197 - RNA, 19 nt, Homo sapiens
  misc_RNA (1)...(19): siRNA sense strand
ggauaccacugaagagaca

SEQ ID NO: 278198 - RNA, 19 nt, Homo sapiens
  misc_RNA (1)...(19): siRNA sense strand
gagaaagcguuggaacuca

SEQ ID NO: 278199 - RNA, 19 nt, Homo sapiens
  misc_RNA (1)...(19): siRNA sense strand
agaaggaaauggccaaaca

SEQ ID NO: 278200 - RNA, 19 nt, Homo sapiens
  misc_RNA (1)...(19): siRNA sense strand
aaaguaaagggauugcuua

SEQ ID NO: 278201 - RNA, 19 nt, Homo sapiens
  misc_RNA (1)...(19): siRNA sense strand
cauggaagacggugaaauu

SEQ ID NO: 278202 - RNA, 19 nt, Homo sapiens
  misc_RNA (1)...(19): siRNA sense strand
gucagaagaugaagaagau

SEQ ID NO: 278203 - RNA, 19 nt, Homo sapiens
  misc_RNA (1)...(19): siRNA sense strand
gguaugcauuuauagaguu

SEQ ID NO: 278204 - RNA, 19 nt, Homo sapiens
  misc_RNA (1)...(19): siRNA sense strand
uggcaaaucuaaaggguau

SEQ ID NO: 278205 - RNA, 19 nt, Homo sapiens
  misc_RNA (1)...(19): siRNA sense strand
gagaagaggucgucauacc

SEQ ID NO: 278206 - RNA, 19 nt, Homo sapiens
  misc_RNA (1)...(19): siRNA sense strand
aggaagagccugucaaaga

SEQ ID NO: 278207 - RNA, 19 nt, Homo sapiens
  misc_RNA (1)...(19): siRNA sense strand
gaagacgaaguuugaauag

SEQ ID NO: 278208 - RNA, 19 nt, Homo sapiens
  misc_RNA (1)...(19): siRNA sense strand
ccaaggaggccauggaaga

SEQ ID NO: 278209 - RNA, 19 nt, Homo sapiens
  misc_RNA (1)...(19): siRNA sense strand
cagcaacaccugccaagaa

SEQ ID NO: 278210 - RNA, 19 nt, Homo sapiens
  misc_RNA (1)...(19): siRNA sense strand
agaagacgaaguuugaaua

SEQ ID NO: 278211 - RNA, 19 nt, Homo sapiens
  misc_RNA (1)...(19): siRNA sense strand
ccacugaagagacauuaaa

SEQ ID NO: 278212 - RNA, 19 nt, Homo sapiens
  misc_RNA (1)...(19): siRNA sense strand
agaguuugcuucauucgaa

SEQ ID NO: 278213 - RNA, 19 nt, Homo sapiens
  misc_RNA (1)...(19): siRNA sense strand
ggcaaagaauggcaagaau

SEQ ID NO: 278214 - RNA, 19 nt, Homo sapiens
  misc_RNA (1)...(19): siRNA sense strand
agaugacucugaagaagaa

SEQ ID NO: 278215 - RNA, 19 nt, Homo sapiens
  misc_RNA (1)...(19): siRNA sense strand
gaaccaaaauggcaaaucu

SEQ ID NO: 278216 - RNA, 19 nt, Homo sapiens
  misc_RNA (1)...(19): siRNA sense strand
ggaaagaauagcacuugga

SEQ ID NO: 278217 - RNA, 19 nt, Homo sapiens
  misc_RNA (1)...(19): siRNA sense strand
cgaagaugaugaagaugau

SEQ ID NO: 278218 - RNA, 19 nt, Homo sapiens
  misc_RNA (1)...(19): siRNA sense strand
cgagaacacuuuuggcuaa

SEQ ID NO: 278219 - RNA, 19 nt, Homo sapiens
  misc_RNA (1)...(19): siRNA sense strand
cguuggaacucacugguuu

SEQ ID NO: 278220 - RNA, 19 nt, Homo sapiens
  misc_RNA (1)...(19): siRNA sense strand
ugaugaagaugaugaugau

SEQ ID NO: 278221 - RNA, 19 nt, Homo sapiens
  misc_RNA (1)...(19): siRNA sense strand
caagaaagcagcugucacu

SEQ ID NO: 278222 - RNA, 19 nt, Homo sapiens
  misc_RNA (1)...(19): siRNA sense strand
cgaagacgcuaaagaagcu

SEQ ID NO: 278223 - RNA, 19 nt, Homo sapiens
  misc_RNA (1)...(19): siRNA sense strand
ggcgaucuauuucccugua

SEQ ID NO: 278224 - RNA, 19 nt, Homo sapiens
  misc_RNA (1)...(19): siRNA sense strand
ugacuaggaaauuugguua

SEQ ID NO: 278225 - RNA, 19 nt, Homo sapiens
  misc_RNA (1)...(19): siRNA sense strand
ggaagaagaggaggaggaa

SEQ ID NO: 278226 - RNA, 19 nt, Homo sapiens
  misc_RNA (1)...(19): siRNA sense strand
caaagaagcaccuggaaaa

SEQ ID NO: 278227 - RNA, 19 nt, Homo sapiens
  misc_RNA (1)...(19): siRNA sense strand
gaaauugagggcagagcaa

SEQ ID NO: 278228 - RNA, 19 nt, Homo sapiens
  misc_RNA (1)...(19): siRNA sense strand
aaagaaguguuugaagaug

SEQ ID NO: 278229 - RNA, 19 nt, Homo sapiens
  misc_RNA (1)...(19): siRNA sense strand
ggagguagaagaagauagu

SEQ ID NO: 278230 - RNA, 19 nt, Homo sapiens
  misc_RNA (1)...(19): siRNA sense strand
gggcaaagaauggcaagaa

SEQ ID NO: 278231 - RNA, 19 nt, Homo sapiens
  misc_RNA (1)...(19): siRNA sense strand
gcggagaucagauuaguca

SEQ ID NO: 278232 - RNA, 19 nt, Homo sapiens
  misc_RNA (1)...(19): siRNA sense strand
gaaauggccaaacagaaag

SEQ ID NO: 278233 - RNA, 19 nt, Homo sapiens
  misc_RNA (1)...(19): siRNA sense strand
ccaagaaggaagacaguga

SEQ ID NO: 278234 - RNA, 19 nt, Homo sapiens
  misc_RNA (1)...(19): siRNA sense strand
gguagcaacuccugguaag

SEQ ID NO: 278235 - RNA, 19 nt, Homo sapiens
  misc_RNA (1)...(19): siRNA sense strand
acaaaucugcuccugaauu

SEQ ID NO: 278236 - RNA, 19 nt, Homo sapiens
  misc_RNA (1)...(19): siRNA sense strand
caagaaacagaaaguggaa

SEQ ID NO: 278237 - RNA, 19 nt, Homo sapiens
  misc_RNA (1)...(19): siRNA sense strand
gguagaagaagauagugaa

SEQ ID NO: 278238 - RNA, 19 nt, Homo sapiens
  misc_RNA (1)...(19): siRNA sense strand
cgaugaggaugacgaagau

SEQ ID NO: 278239 - RNA, 19 nt, Homo sapiens
  misc_RNA (1)...(19): siRNA sense strand
cauuaaaggagucauuuga

SEQ ID NO: 278240 - RNA, 19 nt, Homo sapiens
  misc_RNA (1)...(19): siRNA sense strand
uaagcaaccucuccuacag

SEQ ID NO: 278241 - RNA, 19 nt, Homo sapiens
  misc_RNA (1)...(19): siRNA sense strand
ggagaaagcguuggaacuc

SEQ ID NO: 278242 - RNA, 19 nt, Homo sapiens
  misc_RNA (1)...(19): siRNA sense strand
ggaugacgaugacgaugag

SEQ ID NO: 278243 - RNA, 19 nt, Homo sapiens
  misc_RNA (1)...(19): siRNA sense strand
gacauuaaaggagucauuu

SEQ ID NO: 278244 - RNA, 19 nt, Homo sapiens
  misc_RNA (1)...(19): siRNA sense strand
agggauugcuuauauugaa

SEQ ID NO: 278245 - RNA, 19 nt, Homo sapiens
  misc_RNA (1)...(19): siRNA sense strand
caggaugaauugaaagaag

SEQ ID NO: 278246 - RNA, 19 nt, Homo sapiens
  misc_RNA (1)...(19): siRNA sense strand
uaggaaauuugguuaugug

SEQ ID NO: 278247 - RNA, 19 nt, Homo sapiens
  misc_RNA (1)...(19): siRNA sense strand
ucaaagaagcaccuggaaa

SEQ ID NO: 278248 - RNA, 19 nt, Homo sapiens
  misc_RNA (1)...(19): siRNA sense strand
gaaagaaagcugcaaaagu

SEQ ID NO: 278249 - RNA, 19 nt, Homo sapiens
  misc_RNA (1)...(19): siRNA sense strand
guacgaagccaaugauuac

SEQ ID NO: 278250 - RNA, 19 nt, Homo sapiens
  misc_RNA (1)...(19): siRNA sense strand
agucucagcuggugaagaa

SEQ ID NO: 278251 - RNA, 19 nt, Homo sapiens
  misc_RNA (1)...(19): siRNA sense strand
uguacgaagccaaugauua

SEQ ID NO: 278252 - RNA, 19 nt, Homo sapiens
  misc_RNA (1)...(19): siRNA sense strand
gauugucuuucucauguuc

SEQ ID NO: 278253 - RNA, 19 nt, Homo sapiens
  misc_RNA (1)...(19): siRNA sense strand
gcagaaggagagcguguuc

SEQ ID NO: 278254 - RNA, 19 nt, Homo sapiens
  misc_RNA (1)...(19): siRNA sense strand
gggagcccaugccuacaga

SEQ ID NO: 278255 - RNA, 19 nt, Homo sapiens
  misc_RNA (1)...(19): siRNA sense strand
acucagaccuccagagcau

SEQ ID NO: 278256 - RNA, 19 nt, Homo sapiens
  misc_RNA (1)...(19): siRNA sense strand
acgaggagauugucuuucu

SEQ ID NO: 278257 - RNA, 19 nt, Homo sapiens
  misc_RNA (1)...(19): siRNA sense strand
gcagcugugccuacucaga

SEQ ID NO: 278258 - RNA, 19 nt, Homo sapiens
  misc_RNA (1)...(19): siRNA sense strand
uuacgaggagauugucuuu

SEQ ID NO: 278259 - RNA, 19 nt, Homo sapiens
  misc_RNA (1)...(19): siRNA sense strand
gcccaugccuacagaaucc

SEQ ID NO: 278260 - RNA, 19 nt, Homo sapiens
  misc_RNA (1)...(19): siRNA sense strand
ugacgcggcugugccaagu

SEQ ID NO: 278261 - RNA, 19 nt, Homo sapiens
  misc_RNA (1)...(19): siRNA sense strand
gagcccaugccuacagaau

SEQ ID NO: 278262 - RNA, 19 nt, Homo sapiens
  misc_RNA (1)...(19): siRNA sense strand
ccaaugauuacgaggagau

SEQ ID NO: 278263 - RNA, 19 nt, Homo sapiens
  misc_RNA (1)...(19): siRNA sense strand
gaacccaugccccuuguau

SEQ ID NO: 278264 - RNA, 19 nt, Homo sapiens
  misc_RNA (1)...(19): siRNA sense strand
cagaccagggccaauguga

SEQ ID NO: 278265 - RNA, 19 nt, Homo sapiens
  misc_RNA (1)...(19): siRNA sense strand
gcaagaagcugcggaggaa

SEQ ID NO: 278266 - RNA, 19 nt, Homo sapiens
  misc_RNA (1)...(19): siRNA sense strand
gaucaaagggcuagaguuc

SEQ ID NO: 278267 - RNA, 19 nt, Homo sapiens
  misc_RNA (1)...(19): siRNA sense strand
gugggcagcugcuucagua

SEQ ID NO: 278268 - RNA, 19 nt, Homo sapiens
  misc_RNA (1)...(19): siRNA sense strand
ggaggaaguuacagaugug

SEQ ID NO: 278269 - RNA, 19 nt, Homo sapiens
  misc_RNA (1)...(19): siRNA sense strand
ucaaagggcuagaguucuc

SEQ ID NO: 278270 - RNA, 19 nt, Homo sapiens
  misc_RNA (1)...(19): siRNA sense strand
cggaggaaguuacagaugu

SEQ ID NO: 278271 - RNA, 19 nt, Homo sapiens
  misc_RNA (1)...(19): siRNA sense strand
aagcagcgccuaagcaaga

SEQ ID NO: 278272 - RNA, 19 nt, Homo sapiens
  misc_RNA (1)...(19): siRNA sense strand
acacccagacccuaucuuu

SEQ ID NO: 278273 - RNA, 19 nt, Homo sapiens
  misc_RNA (1)...(19): siRNA sense strand
gcaagaagcagcgccuaag

SEQ ID NO: 278274 - RNA, 19 nt, Homo sapiens
  misc_RNA (1)...(19): siRNA sense strand
ggcaagaagcagcgccuaa

SEQ ID NO: 278275 - RNA, 19 nt, Homo sapiens
  misc_RNA (1)...(19): siRNA sense strand
acccagacccuaucuuuga

SEQ ID NO: 278276 - RNA, 19 nt, Homo sapiens
  misc_RNA (1)...(19): siRNA sense strand
gaacacccagacccuaucu

SEQ ID NO: 278277 - RNA, 19 nt, Homo sapiens
  misc_RNA (1)...(19): siRNA sense strand
gaagcugcggaggaaguua

SEQ ID NO: 278278 - RNA, 19 nt, Homo sapiens
  misc_RNA (1)...(19): siRNA sense strand
ccagcacuaucuccacauc

SEQ ID NO: 278279 - RNA, 19 nt, Homo sapiens
  misc_RNA (1)...(19): siRNA sense strand
agaagcagcgccuaagcaa

SEQ ID NO: 278280 - RNA, 19 nt, Homo sapiens
  misc_RNA (1)...(19): siRNA sense strand
gagaucaaagggcuagagu

SEQ ID NO: 278281 - RNA, 19 nt, Homo sapiens
  misc_RNA (1)...(19): siRNA sense strand
gcggaggaaguuacagaug

SEQ ID NO: 278282 - RNA, 19 nt, Homo sapiens
  misc_RNA (1)...(19): siRNA sense strand
ccgagggcauggugugcaa

SEQ ID NO: 278283 - RNA, 19 nt, Homo sapiens
  misc_RNA (1)...(19): siRNA sense strand
ugguggaccucaucgaaca

SEQ ID NO: 278284 - RNA, 19 nt, Homo sapiens
  misc_RNA (1)...(19): siRNA sense strand
cuacgacccaggcuucaug

SEQ ID NO: 278285 - RNA, 19 nt, Homo sapiens
  misc_RNA (1)...(19): siRNA sense strand
gaagagagcuguugagauc

SEQ ID NO: 278286 - RNA, 19 nt, Homo sapiens
  misc_RNA (1)...(19): siRNA sense strand
caggagagcucaagaaugg

SEQ ID NO: 278287 - RNA, 19 nt, Homo sapiens
  misc_RNA (1)...(19): siRNA sense strand
ggacuucucugcacagcau

SEQ ID NO: 278288 - RNA, 19 nt, Homo sapiens
  misc_RNA (1)...(19): siRNA sense strand
ggagggaggccaugacuug

SEQ ID NO: 278289 - RNA, 19 nt, Homo sapiens
  misc_RNA (1)...(19): siRNA sense strand
guuauuagcaccuuuaaga

SEQ ID NO: 278290 - RNA, 19 nt, Homo sapiens
  misc_RNA (1)...(19): siRNA sense strand
caagagccaugcccaguuc

SEQ ID NO: 278291 - RNA, 19 nt, Homo sapiens
  misc_RNA (1)...(19): siRNA sense strand
cagcagagcacccucauug

SEQ ID NO: 278292 - RNA, 19 nt, Homo sapiens
  misc_RNA (1)...(19): siRNA sense strand
ggagcugugugcagaaguu

SEQ ID NO: 278293 - RNA, 19 nt, Homo sapiens
  misc_RNA (1)...(19): siRNA sense strand
gaauuccucuugucgaagu

SEQ ID NO: 278294 - RNA, 19 nt, Homo sapiens
  misc_RNA (1)...(19): siRNA sense strand
aaagugcguucaaggcuaa

SEQ ID NO: 278295 - RNA, 19 nt, Homo sapiens
  misc_RNA (1)...(19): siRNA sense strand
aggaagagcuggagaagca

SEQ ID NO: 278296 - RNA, 19 nt, Homo sapiens
  misc_RNA (1)...(19): siRNA sense strand
gagcaaagagagugccauu

SEQ ID NO: 278297 - RNA, 19 nt, Homo sapiens
  misc_RNA (1)...(19): siRNA sense strand
ggcaagauccucaccaaga

SEQ ID NO: 278298 - RNA, 19 nt, Homo sapiens
  misc_RNA (1)...(19): siRNA sense strand
gcaaggaugggacuguuau

SEQ ID NO: 278299 - RNA, 19 nt, Homo sapiens
  misc_RNA (1)...(19): siRNA sense strand
gcaagauccucaccaagac

SEQ ID NO: 278300 - RNA, 19 nt, Homo sapiens
  misc_RNA (1)...(19): siRNA sense strand
gaacaaggagaagagcaaa

SEQ ID NO: 278301 - RNA, 19 nt, Homo sapiens
  misc_RNA (1)...(19): siRNA sense strand
gcacccagcaggcguucua

SEQ ID NO: 278302 - RNA, 19 nt, Homo sapiens
  misc_RNA (1)...(19): siRNA sense strand
ggaacaaggagaagagcaa

SEQ ID NO: 278303 - RNA, 19 nt, Homo sapiens
  misc_RNA (1)...(19): siRNA sense strand
ugacaacgggaacuucuuu

SEQ ID NO: 278304 - RNA, 19 nt, Homo sapiens
  misc_RNA (1)...(19): siRNA sense strand
uagagaaagucaucgagau

SEQ ID NO: 278305 - RNA, 19 nt, Homo sapiens
  misc_RNA (1)...(19): siRNA sense strand
gagcccaccaugcuucuuu

SEQ ID NO: 278306 - RNA, 19 nt, Homo sapiens
  misc_RNA (1)...(19): siRNA sense strand
ggacgccucccuccuacaa

SEQ ID NO: 278307 - RNA, 19 nt, Homo sapiens
  misc_RNA (1)...(19): siRNA sense strand
gggaggaggaggaggauug

SEQ ID NO: 278308 - RNA, 19 nt, Homo sapiens
  misc_RNA (1)...(19): siRNA sense strand
ggacuguuauuagcaccuu

SEQ ID NO: 278309 - RNA, 19 nt, Homo sapiens
  misc_RNA (1)...(19): siRNA sense strand
gcaggagagcucaagaaug

SEQ ID NO: 278310 - RNA, 19 nt, Homo sapiens
  misc_RNA (1)...(19): siRNA sense strand
ccucugaacccaacuugaa

SEQ ID NO: 278311 - RNA, 19 nt, Homo sapiens
  misc_RNA (1)...(19): siRNA sense strand
ggaugggacuguuauuagc

SEQ ID NO: 278312 - RNA, 19 nt, Homo sapiens
  misc_RNA (1)...(19): siRNA sense strand
ucgcugaguuccagaaaca

SEQ ID NO: 278313 - RNA, 19 nt, Homo sapiens
  misc_RNA (1)...(19): siRNA sense strand
ggagacguggaguaccuua

SEQ ID NO: 278314 - RNA, 19 nt, Homo sapiens
  misc_RNA (1)...(19): siRNA sense strand
gggcgucguccguguguaa

SEQ ID NO: 278315 - RNA, 19 nt, Homo sapiens
  misc_RNA (1)...(19): siRNA sense strand
gcagaagcagcuccuguuc

SEQ ID NO: 278316 - RNA, 19 nt, Homo sapiens
  misc_RNA (1)...(19): siRNA sense strand
gcaguggccacgcuagaga

SEQ ID NO: 278317 - RNA, 19 nt, Homo sapiens
  misc_RNA (1)...(19): siRNA sense strand
ggacauucaccauggcaau

SEQ ID NO: 278318 - RNA, 19 nt, Homo sapiens
  misc_RNA (1)...(19): siRNA sense strand
ggaaccauccuuggaaauc

SEQ ID NO: 278319 - RNA, 19 nt, Homo sapiens
  misc_RNA (1)...(19): siRNA sense strand
gcaaguucaugagcacauc

SEQ ID NO: 278320 - RNA, 19 nt, Homo sapiens
  misc_RNA (1)...(19): siRNA sense strand
guucaaggcuaaaacagaa

SEQ ID NO: 278321 - RNA, 19 nt, Homo sapiens
  misc_RNA (1)...(19): siRNA sense strand
gccuggugcuggauacaaa

SEQ ID NO: 278322 - RNA, 19 nt, Homo sapiens
  misc_RNA (1)...(19): siRNA sense strand
ggaggaggaggacgaggaa

SEQ ID NO: 278323 - RNA, 19 nt, Homo sapiens
  misc_RNA (1)...(19): siRNA sense strand
cgggaaccauccuuggaaa

SEQ ID NO: 278324 - RNA, 19 nt, Homo sapiens
  misc_RNA (1)...(19): siRNA sense strand
guuugaugcuguugaagga

SEQ ID NO: 278325 - RNA, 19 nt, Homo sapiens
  misc_RNA (1)...(19): siRNA sense strand
aaggaugggacuguuauua

SEQ ID NO: 278326 - RNA, 19 nt, Homo sapiens
  misc_RNA (1)...(19): siRNA sense strand
gaaccauccuuggaaaucc

SEQ ID NO: 278327 - RNA, 19 nt, Homo sapiens
  misc_RNA (1)...(19): siRNA sense strand
ugacuugaccgccaucugu

SEQ ID NO: 278328 - RNA, 19 nt, Homo sapiens
  misc_RNA (1)...(19): siRNA sense strand
ggauucugcuucuucaacu

SEQ ID NO: 278329 - RNA, 19 nt, Homo sapiens
  misc_RNA (1)...(19): siRNA sense strand
auuagcaccuuuaagaaga

SEQ ID NO: 278330 - RNA, 19 nt, Homo sapiens
  misc_RNA (1)...(19): siRNA sense strand
ggagagcucaagaauggau

SEQ ID NO: 278331 - RNA, 19 nt, Homo sapiens
  misc_RNA (1)...(19): siRNA sense strand
gaggaggccgagacuguga

SEQ ID NO: 278332 - RNA, 19 nt, Homo sapiens
  misc_RNA (1)...(19): siRNA sense strand
ucaucgagauccagagcaa

SEQ ID NO: 278333 - RNA, 19 nt, Homo sapiens
  misc_RNA (1)...(19): siRNA sense strand
ucucggcucugcucagugu

SEQ ID NO: 278334 - RNA, 19 nt, Homo sapiens
  misc_RNA (1)...(19): siRNA sense strand
ccaagagccaugcccaguu

SEQ ID NO: 278335 - RNA, 19 nt, Homo sapiens
  misc_RNA (1)...(19): siRNA sense strand
ggagaagagcaaagagagu

SEQ ID NO: 278336 - RNA, 19 nt, Homo sapiens
  misc_RNA (1)...(19): siRNA sense strand
cacgaguucucaccugaug

SEQ ID NO: 278337 - RNA, 19 nt, Homo sapiens
  misc_RNA (1)...(19): siRNA sense strand
ccaagcagcagcaggagau

SEQ ID NO: 278338 - RNA, 19 nt, Homo sapiens
  misc_RNA (1)...(19): siRNA sense strand
caugagcacauccucuauu

SEQ ID NO: 278339 - RNA, 19 nt, Homo sapiens
  misc_RNA (1)...(19): siRNA sense strand
gcccauugcccacgaguuc

SEQ ID NO: 278340 - RNA, 19 nt, Homo sapiens
  misc_RNA (1)...(19): siRNA sense strand
ggacugggacauucaccau

SEQ ID NO: 278341 - RNA, 19 nt, Homo sapiens
  misc_RNA (1)...(19): siRNA sense strand
acaaggagaagagcaaaga

SEQ ID NO: 278342 - RNA, 19 nt, Homo sapiens
  misc_RNA (1)...(19): siRNA sense strand
gccaugggauucugcuucu

SEQ ID NO: 278343 - RNA, 19 nt, Homo sapiens
  misc_RNA (1)...(19): siRNA sense strand
ccacagccaugggauucug

SEQ ID NO: 278344 - RNA, 19 nt, Homo sapiens
  misc_RNA (1)...(19): siRNA sense strand
gagcacauccucuauuccu

SEQ ID NO: 278345 - RNA, 19 nt, Homo sapiens
  misc_RNA (1)...(19): siRNA sense strand
ucaagcagcagcaggagau

SEQ ID NO: 278346 - RNA, 19 nt, Homo sapiens
  misc_RNA (1)...(19): siRNA sense strand
gcagaagcagcagcagcua

SEQ ID NO: 278347 - RNA, 19 nt, Homo sapiens
  misc_RNA (1)...(19): siRNA sense strand
cagcaugaccaccugacaa

SEQ ID NO: 278348 - RNA, 19 nt, Homo sapiens
  misc_RNA (1)...(19): siRNA sense strand
gaugucaggucgggaacca

SEQ ID NO: 278349 - RNA, 19 nt, Homo sapiens
  misc_RNA (1)...(19): siRNA sense strand
cggguuugaugcuguugaa

SEQ ID NO: 278350 - RNA, 19 nt, Homo sapiens
  misc_RNA (1)...(19): siRNA sense strand
uuaagaagagagcuguuga

SEQ ID NO: 278351 - RNA, 19 nt, Homo sapiens
  misc_RNA (1)...(19): siRNA sense strand
cgagucggaugggauguca

SEQ ID NO: 278352 - RNA, 19 nt, Homo sapiens
  misc_RNA (1)...(19): siRNA sense strand
caccugaugugguccuagu

SEQ ID NO: 278353 - RNA, 19 nt, Homo sapiens
  misc_RNA (1)...(19): siRNA sense strand
ccaaccaguucagccucua

SEQ ID NO: 278354 - RNA, 19 nt, Homo sapiens
  misc_RNA (1)...(19): siRNA sense strand
caaaacuccuacagcagaa

SEQ ID NO: 278355 - RNA, 19 nt, Homo sapiens
  misc_RNA (1)...(19): siRNA sense strand
gagggaggccaugacuuga

SEQ ID NO: 278356 - RNA, 19 nt, Homo sapiens
  misc_RNA (1)...(19): siRNA sense strand
gcaggaagagcuggagaag

SEQ ID NO: 278357 - RNA, 19 nt, Homo sapiens
  misc_RNA (1)...(19): siRNA sense strand
caucguggacugggacauu

SEQ ID NO: 278358 - RNA, 19 nt, Homo sapiens
  misc_RNA (1)...(19): siRNA sense strand
ucgcaaggaugggacuguu

SEQ ID NO: 278359 - RNA, 19 nt, Homo sapiens
  misc_RNA (1)...(19): siRNA sense strand
uggccacgcuagagaaagu

SEQ ID NO: 278360 - RNA, 19 nt, Homo sapiens
  misc_RNA (1)...(19): siRNA sense strand
gcagcagagcacccucauu

SEQ ID NO: 278361 - RNA, 19 nt, Homo sapiens
  misc_RNA (1)...(19): siRNA sense strand
caaggaugggacuguuauu

SEQ ID NO: 278362 - RNA, 19 nt, Homo sapiens
  misc_RNA (1)...(19): siRNA sense strand
aagaagagagcuguugaga

SEQ ID NO: 278363 - RNA, 19 nt, Homo sapiens
  misc_RNA (1)...(19): siRNA sense strand
ugggcaagauccucaccaa

SEQ ID NO: 278364 - RNA, 19 nt, Homo sapiens
  misc_RNA (1)...(19): siRNA sense strand
aacaacagcaccagcaguu

SEQ ID NO: 278365 - RNA, 19 nt, Homo sapiens
  misc_RNA (1)...(19): siRNA sense strand
augagcacauccucuauuc

SEQ ID NO: 278366 - RNA, 19 nt, Homo sapiens
  misc_RNA (1)...(19): siRNA sense strand
gaugggacuguuauuagca

SEQ ID NO: 278367 - RNA, 19 nt, Homo sapiens
  misc_RNA (1)...(19): siRNA sense strand
cuggguggcuacucuguca

SEQ ID NO: 278368 - RNA, 19 nt, Homo sapiens
  misc_RNA (1)...(19): siRNA sense strand
ccucugugcucuacaucuc

SEQ ID NO: 278369 - RNA, 19 nt, Homo sapiens
  misc_RNA (1)...(19): siRNA sense strand
gcacgcugaccggcaaguu

SEQ ID NO: 278370 - RNA, 19 nt, Homo sapiens
  misc_RNA (1)...(19): siRNA sense strand
cgcaaggaugggacuguua

SEQ ID NO: 278371 - RNA, 19 nt, Homo sapiens
  misc_RNA (1)...(19): siRNA sense strand
cgaguucucaccugaugug

SEQ ID NO: 278372 - RNA, 19 nt, Homo sapiens
  misc_RNA (1)...(19): siRNA sense strand
gcaucgggguggacaguga

SEQ ID NO: 278373 - RNA, 19 nt, Homo sapiens
  misc_RNA (1)...(19): siRNA sense strand
ggagccuggugcuggauac

SEQ ID NO: 278374 - RNA, 19 nt, Homo sapiens
  misc_RNA (1)...(19): siRNA sense strand
gcugagaauggcuuuacug

SEQ ID NO: 278375 - RNA, 19 nt, Homo sapiens
  misc_RNA (1)...(19): siRNA sense strand
agaaagucaucgagaucca

SEQ ID NO: 278376 - RNA, 19 nt, Homo sapiens
  misc_RNA (1)...(19): siRNA sense strand
agagaaagucaucgagauc

SEQ ID NO: 278377 - RNA, 19 nt, Homo sapiens
  misc_RNA (1)...(19): siRNA sense strand
ggcaggaagagcuggagaa

SEQ ID NO: 278378 - RNA, 19 nt, Homo sapiens
  misc_RNA (1)...(19): siRNA sense strand
gcuaugacaacgggaacuu

SEQ ID NO: 278379 - RNA, 19 nt, Homo sapiens
  misc_RNA (1)...(19): siRNA sense strand
caugggauucugcuucuuc

SEQ ID NO: 278380 - RNA, 19 nt, Homo sapiens
  misc_RNA (1)...(19): siRNA sense strand
ggacaccacgccgaggaau

SEQ ID NO: 278381 - RNA, 19 nt, Homo sapiens
  misc_RNA (1)...(19): siRNA sense strand
ugcuggagcuggccuucaa

SEQ ID NO: 278382 - RNA, 19 nt, Homo sapiens
  misc_RNA (1)...(19): siRNA sense strand
cagaccagcccgucaagca

SEQ ID NO: 278383 - RNA, 19 nt, Homo sapiens
  misc_RNA (1)...(19): siRNA sense strand
aagcugaggcuccaggaau

SEQ ID NO: 278384 - RNA, 19 nt, Homo sapiens
  misc_RNA (1)...(19): siRNA sense strand
agcugaggcuccaggaauu

SEQ ID NO: 278385 - RNA, 19 nt, Homo sapiens
  misc_RNA (1)...(19): siRNA sense strand
gaagagagcuguugagauc

SEQ ID NO: 278386 - RNA, 19 nt, Homo sapiens
  misc_RNA (1)...(19): siRNA sense strand
caggagagcucaagaaugg

SEQ ID NO: 278387 - RNA, 19 nt, Homo sapiens
  misc_RNA (1)...(19): siRNA sense strand
ggacuucucugcacagcau

SEQ ID NO: 278388 - RNA, 19 nt, Homo sapiens
  misc_RNA (1)...(19): siRNA sense strand
ggagggaggccaugacuug

SEQ ID NO: 278389 - RNA, 19 nt, Homo sapiens
  misc_RNA (1)...(19): siRNA sense strand
guuauuagcaccuuuaaga

SEQ ID NO: 278390 - RNA, 19 nt, Homo sapiens
  misc_RNA (1)...(19): siRNA sense strand
caagagccaugcccaguuc

SEQ ID NO: 278391 - RNA, 19 nt, Homo sapiens
  misc_RNA (1)...(19): siRNA sense strand
cagcagagcacccucauug

SEQ ID NO: 278392 - RNA, 19 nt, Homo sapiens
  misc_RNA (1)...(19): siRNA sense strand
ggagcugugugcagaaguu

SEQ ID NO: 278393 - RNA, 19 nt, Homo sapiens
  misc_RNA (1)...(19): siRNA sense strand
gaauuccucuugucgaagu

SEQ ID NO: 278394 - RNA, 19 nt, Homo sapiens
  misc_RNA (1)...(19): siRNA sense strand
aaagugcguucaaggcuaa

SEQ ID NO: 278395 - RNA, 19 nt, Homo sapiens
  misc_RNA (1)...(19): siRNA sense strand
aggaagagcuggagaagca

SEQ ID NO: 278396 - RNA, 19 nt, Homo sapiens
  misc_RNA (1)...(19): siRNA sense strand
gagcaaagagagugccauu

SEQ ID NO: 278397 - RNA, 19 nt, Homo sapiens
  misc_RNA (1)...(19): siRNA sense strand
ggcaagauccucaccaaga

SEQ ID NO: 278398 - RNA, 19 nt, Homo sapiens
  misc_RNA (1)...(19): siRNA sense strand
gcaaggaugggacuguuau

SEQ ID NO: 278399 - RNA, 19 nt, Homo sapiens
  misc_RNA (1)...(19): siRNA sense strand
gcaagauccucaccaagac

SEQ ID NO: 278400 - RNA, 19 nt, Homo sapiens
  misc_RNA (1)...(19): siRNA sense strand
gaacaaggagaagagcaaa

SEQ ID NO: 278401 - RNA, 19 nt, Homo sapiens
  misc_RNA (1)...(19): siRNA sense strand
gcacccagcaggcguucua

SEQ ID NO: 278402 - RNA, 19 nt, Homo sapiens
  misc_RNA (1)...(19): siRNA sense strand
ggaacaaggagaagagcaa

SEQ ID NO: 278403 - RNA, 19 nt, Homo sapiens
  misc_RNA (1)...(19): siRNA sense strand
ugacaacgggaacuucuuu

SEQ ID NO: 278404 - RNA, 19 nt, Homo sapiens
  misc_RNA (1)...(19): siRNA sense strand
uagagaaagucaucgagau

SEQ ID NO: 278405 - RNA, 19 nt, Homo sapiens
  misc_RNA (1)...(19): siRNA sense strand
gagcccaccaugcuucuuu

SEQ ID NO: 278406 - RNA, 19 nt, Homo sapiens
  misc_RNA (1)...(19): siRNA sense strand
ggacgccucccuccuacaa

SEQ ID NO: 278407 - RNA, 19 nt, Homo sapiens
  misc_RNA (1)...(19): siRNA sense strand
gggaggaggaggaggauug

SEQ ID NO: 278408 - RNA, 19 nt, Homo sapiens
  misc_RNA (1)...(19): siRNA sense strand
ggacuguuauuagcaccuu

SEQ ID NO: 278409 - RNA, 19 nt, Homo sapiens
  misc_RNA (1)...(19): siRNA sense strand
gcaggagagcucaagaaug

SEQ ID NO: 278410 - RNA, 19 nt, Homo sapiens
  misc_RNA (1)...(19): siRNA sense strand
ccucugaacccaacuugaa

SEQ ID NO: 278411 - RNA, 19 nt, Homo sapiens
  misc_RNA (1)...(19): siRNA sense strand
ggaugggacuguuauuagc

SEQ ID NO: 278412 - RNA, 19 nt, Homo sapiens
  misc_RNA (1)...(19): siRNA sense strand
ucgcugaguuccagaaaca

SEQ ID NO: 278413 - RNA, 19 nt, Homo sapiens
  misc_RNA (1)...(19): siRNA sense strand
ggagacguggaguaccuua

SEQ ID NO: 278414 - RNA, 19 nt, Homo sapiens
  misc_RNA (1)...(19): siRNA sense strand
gggcgucguccguguguaa

SEQ ID NO: 278415 - RNA, 19 nt, Homo sapiens
  misc_RNA (1)...(19): siRNA sense strand
gcagaagcagcuccuguuc

SEQ ID NO: 278416 - RNA, 19 nt, Homo sapiens
  misc_RNA (1)...(19): siRNA sense strand
gcaguggccacgcuagaga

SEQ ID NO: 278417 - RNA, 19 nt, Homo sapiens
  misc_RNA (1)...(19): siRNA sense strand
ggacauucaccauggcaau

SEQ ID NO: 278418 - RNA, 19 nt, Homo sapiens
  misc_RNA (1)...(19): siRNA sense strand
ggaaccauccuuggaaauc

SEQ ID NO: 278419 - RNA, 19 nt, Homo sapiens
  misc_RNA (1)...(19): siRNA sense strand
gcaaguucaugagcacauc

SEQ ID NO: 278420 - RNA, 19 nt, Homo sapiens
  misc_RNA (1)...(19): siRNA sense strand
guucaaggcuaaaacagaa

SEQ ID NO: 278421 - RNA, 19 nt, Homo sapiens
  misc_RNA (1)...(19): siRNA sense strand
gccuggugcuggauacaaa

SEQ ID NO: 278422 - RNA, 19 nt, Homo sapiens
  misc_RNA (1)...(19): siRNA sense strand
ggaggaggaggacgaggaa

SEQ ID NO: 278423 - RNA, 19 nt, Homo sapiens
  misc_RNA (1)...(19): siRNA sense strand
cgggaaccauccuuggaaa

SEQ ID NO: 278424 - RNA, 19 nt, Homo sapiens
  misc_RNA (1)...(19): siRNA sense strand
guuugaugcuguugaagga

SEQ ID NO: 278425 - RNA, 19 nt, Homo sapiens
  misc_RNA (1)...(19): siRNA sense strand
aaggaugggacuguuauua

SEQ ID NO: 278426 - RNA, 19 nt, Homo sapiens
  misc_RNA (1)...(19): siRNA sense strand
gaaccauccuuggaaaucc

SEQ ID NO: 278427 - RNA, 19 nt, Homo sapiens
  misc_RNA (1)...(19): siRNA sense strand
ugacuugaccgccaucugu

SEQ ID NO: 278428 - RNA, 19 nt, Homo sapiens
  misc_RNA (1)...(19): siRNA sense strand
ggauucugcuucuucaacu

SEQ ID NO: 278429 - RNA, 19 nt, Homo sapiens
  misc_RNA (1)...(19): siRNA sense strand
auuagcaccuuuaagaaga

SEQ ID NO: 278430 - RNA, 19 nt, Homo sapiens
  misc_RNA (1)...(19): siRNA sense strand
ggagagcucaagaauggau

SEQ ID NO: 278431 - RNA, 19 nt, Homo sapiens
  misc_RNA (1)...(19): siRNA sense strand
gaggaggccgagacuguga

SEQ ID NO: 278432 - RNA, 19 nt, Homo sapiens
  misc_RNA (1)...(19): siRNA sense strand
ucaucgagauccagagcaa

SEQ ID NO: 278433 - RNA, 19 nt, Homo sapiens
  misc_RNA (1)...(19): siRNA sense strand
ucucggcucugcucagugu

SEQ ID NO: 278434 - RNA, 19 nt, Homo sapiens
  misc_RNA (1)...(19): siRNA sense strand
ccaagagccaugcccaguu

SEQ ID NO: 278435 - RNA, 19 nt, Homo sapiens
  misc_RNA (1)...(19): siRNA sense strand
ggagaagagcaaagagagu

SEQ ID NO: 278436 - RNA, 19 nt, Homo sapiens
  misc_RNA (1)...(19): siRNA sense strand
cacgaguucucaccugaug

SEQ ID NO: 278437 - RNA, 19 nt, Homo sapiens
  misc_RNA (1)...(19): siRNA sense strand
ccaagcagcagcaggagau

SEQ ID NO: 278438 - RNA, 19 nt, Homo sapiens
  misc_RNA (1)...(19): siRNA sense strand
caugagcacauccucuauu

SEQ ID NO: 278439 - RNA, 19 nt, Homo sapiens
  misc_RNA (1)...(19): siRNA sense strand
gcccauugcccacgaguuc

SEQ ID NO: 278440 - RNA, 19 nt, Homo sapiens
  misc_RNA (1)...(19): siRNA sense strand
ggacugggacauucaccau

SEQ ID NO: 278441 - RNA, 19 nt, Homo sapiens
  misc_RNA (1)...(19): siRNA sense strand
acaaggagaagagcaaaga

SEQ ID NO: 278442 - RNA, 19 nt, Homo sapiens
  misc_RNA (1)...(19): siRNA sense strand
gccaugggauucugcuucu

SEQ ID NO: 278443 - RNA, 19 nt, Homo sapiens
  misc_RNA (1)...(19): siRNA sense strand
ccacagccaugggauucug

SEQ ID NO: 278444 - RNA, 19 nt, Homo sapiens
  misc_RNA (1)...(19): siRNA sense strand
gagcacauccucuauuccu

SEQ ID NO: 278445 - RNA, 19 nt, Homo sapiens
  misc_RNA (1)...(19): siRNA sense strand
ucaagcagcagcaggagau

SEQ ID NO: 278446 - RNA, 19 nt, Homo sapiens
  misc_RNA (1)...(19): siRNA sense strand
gcagaagcagcagcagcua

SEQ ID NO: 278447 - RNA, 19 nt, Homo sapiens
  misc_RNA (1)...(19): siRNA sense strand
cagcaugaccaccugacaa

SEQ ID NO: 278448 - RNA, 19 nt, Homo sapiens
  misc_RNA (1)...(19): siRNA sense strand
gaugucaggucgggaacca

SEQ ID NO: 278449 - RNA, 19 nt, Homo sapiens
  misc_RNA (1)...(19): siRNA sense strand
cggguuugaugcuguugaa

SEQ ID NO: 278450 - RNA, 19 nt, Homo sapiens
  misc_RNA (1)...(19): siRNA sense strand
uuaagaagagagcuguuga

SEQ ID NO: 278451 - RNA, 19 nt, Homo sapiens
  misc_RNA (1)...(19): siRNA sense strand
cgagucggaugggauguca

SEQ ID NO: 278452 - RNA, 19 nt, Homo sapiens
  misc_RNA (1)...(19): siRNA sense strand
caccugaugugguccuagu

SEQ ID NO: 278453 - RNA, 19 nt, Homo sapiens
  misc_RNA (1)...(19): siRNA sense strand
ccaaccaguucagccucua

SEQ ID NO: 278454 - RNA, 19 nt, Homo sapiens
  misc_RNA (1)...(19): siRNA sense strand
caaaacuccuacagcagaa

SEQ ID NO: 278455 - RNA, 19 nt, Homo sapiens
  misc_RNA (1)...(19): siRNA sense strand
gagggaggccaugacuuga

SEQ ID NO: 278456 - RNA, 19 nt, Homo sapiens
  misc_RNA (1)...(19): siRNA sense strand
gcaggaagagcuggagaag

SEQ ID NO: 278457 - RNA, 19 nt, Homo sapiens
  misc_RNA (1)...(19): siRNA sense strand
caucguggacugggacauu

SEQ ID NO: 278458 - RNA, 19 nt, Homo sapiens
  misc_RNA (1)...(19): siRNA sense strand
ucgcaaggaugggacuguu

SEQ ID NO: 278459 - RNA, 19 nt, Homo sapiens
  misc_RNA (1)...(19): siRNA sense strand
uggccacgcuagagaaagu

SEQ ID NO: 278460 - RNA, 19 nt, Homo sapiens
  misc_RNA (1)...(19): siRNA sense strand
gcagcagagcacccucauu

SEQ ID NO: 278461 - RNA, 19 nt, Homo sapiens
  misc_RNA (1)...(19): siRNA sense strand
caaggaugggacuguuauu

SEQ ID NO: 278462 - RNA, 19 nt, Homo sapiens
  misc_RNA (1)...(19): siRNA sense strand
aagaagagagcuguugaga

SEQ ID NO: 278463 - RNA, 19 nt, Homo sapiens
  misc_RNA (1)...(19): siRNA sense strand
ugggcaagauccucaccaa

SEQ ID NO: 278464 - RNA, 19 nt, Homo sapiens
  misc_RNA (1)...(19): siRNA sense strand
aacaacagcaccagcaguu

SEQ ID NO: 278465 - RNA, 19 nt, Homo sapiens
  misc_RNA (1)...(19): siRNA sense strand
augagcacauccucuauuc

SEQ ID NO: 278466 - RNA, 19 nt, Homo sapiens
  misc_RNA (1)...(19): siRNA sense strand
gaugggacuguuauuagca

SEQ ID NO: 278467 - RNA, 19 nt, Homo sapiens
  misc_RNA (1)...(19): siRNA sense strand
cuggguggcuacucuguca

SEQ ID NO: 278468 - RNA, 19 nt, Homo sapiens
  misc_RNA (1)...(19): siRNA sense strand
ccucugugcucuacaucuc

SEQ ID NO: 278469 - RNA, 19 nt, Homo sapiens
  misc_RNA (1)...(19): siRNA sense strand
gcacgcugaccggcaaguu

SEQ ID NO: 278470 - RNA, 19 nt, Homo sapiens
  misc_RNA (1)...(19): siRNA sense strand
cgcaaggaugggacuguua

SEQ ID NO: 278471 - RNA, 19 nt, Homo sapiens
  misc_RNA (1)...(19): siRNA sense strand
cgaguucucaccugaugug

SEQ ID NO: 278472 - RNA, 19 nt, Homo sapiens
  misc_RNA (1)...(19): siRNA sense strand
gcaucgggguggacaguga

SEQ ID NO: 278473 - RNA, 19 nt, Homo sapiens
  misc_RNA (1)...(19): siRNA sense strand
ggagccuggugcuggauac

SEQ ID NO: 278474 - RNA, 19 nt, Homo sapiens
  misc_RNA (1)...(19): siRNA sense strand
gcugagaauggcuuuacug

SEQ ID NO: 278475 - RNA, 19 nt, Homo sapiens
  misc_RNA (1)...(19): siRNA sense strand
agaaagucaucgagaucca

SEQ ID NO: 278476 - RNA, 19 nt, Homo sapiens
  misc_RNA (1)...(19): siRNA sense strand
agagaaagucaucgagauc

SEQ ID NO: 278477 - RNA, 19 nt, Homo sapiens
  misc_RNA (1)...(19): siRNA sense strand
ggcaggaagagcuggagaa

SEQ ID NO: 278478 - RNA, 19 nt, Homo sapiens
  misc_RNA (1)...(19): siRNA sense strand
gcuaugacaacgggaacuu

SEQ ID NO: 278479 - RNA, 19 nt, Homo sapiens
  misc_RNA (1)...(19): siRNA sense strand
caugggauucugcuucuuc

SEQ ID NO: 278480 - RNA, 19 nt, Homo sapiens
  misc_RNA (1)...(19): siRNA sense strand
ggacaccacgccgaggaau

SEQ ID NO: 278481 - RNA, 19 nt, Homo sapiens
  misc_RNA (1)...(19): siRNA sense strand
ugcuggagcuggccuucaa

SEQ ID NO: 278482 - RNA, 19 nt, Homo sapiens
  misc_RNA (1)...(19): siRNA sense strand
cagaccagcccgucaagca

SEQ ID NO: 278483 - RNA, 19 nt, Homo sapiens
  misc_RNA (1)...(19): siRNA sense strand
aagcugaggcuccaggaau

SEQ ID NO: 278484 - RNA, 19 nt, Homo sapiens
  misc_RNA (1)...(19): siRNA sense strand
agcugaggcuccaggaauu

SEQ ID NO: 278485 - RNA, 19 nt, Homo sapiens
  misc_RNA (1)...(19): siRNA sense strand
ggaagaaacuugcuaaaga

SEQ ID NO: 278486 - RNA, 19 nt, Homo sapiens
  misc_RNA (1)...(19): siRNA sense strand
aaacagaucuccaacuaaa

SEQ ID NO: 278487 - RNA, 19 nt, Homo sapiens
  misc_RNA (1)...(19): siRNA sense strand
caugaaagcugguuugaaa

SEQ ID NO: 278488 - RNA, 19 nt, Homo sapiens
  misc_RNA (1)...(19): siRNA sense strand
caaacuacaugaagacuuu

SEQ ID NO: 278489 - RNA, 19 nt, Homo sapiens
  misc_RNA (1)...(19): siRNA sense strand
gagauaauauggagacauu

SEQ ID NO: 278490 - RNA, 19 nt, Homo sapiens
  misc_RNA (1)...(19): siRNA sense strand
gaagaacgacugaaauauu

SEQ ID NO: 278491 - RNA, 19 nt, Homo sapiens
  misc_RNA (1)...(19): siRNA sense strand
gaagcuaaguuccaucuug

SEQ ID NO: 278492 - RNA, 19 nt, Homo sapiens
  misc_RNA (1)...(19): siRNA sense strand
gagcgaaagugauggaauu

SEQ ID NO: 278493 - RNA, 19 nt, Homo sapiens
  misc_RNA (1)...(19): siRNA sense strand
uaagcucucugcugaaaua

SEQ ID NO: 278494 - RNA, 19 nt, Homo sapiens
  misc_RNA (1)...(19): siRNA sense strand
gauaagcucucugcugaaa

SEQ ID NO: 278495 - RNA, 19 nt, Homo sapiens
  misc_RNA (1)...(19): siRNA sense strand
uaaauacagugacucauug

SEQ ID NO: 278496 - RNA, 19 nt, Homo sapiens
  misc_RNA (1)...(19): siRNA sense strand
gagaugagcagcccaauau

SEQ ID NO: 278497 - RNA, 19 nt, Homo sapiens
  misc_RNA (1)...(19): siRNA sense strand
ggacacaguuucucaugau

SEQ ID NO: 278498 - RNA, 19 nt, Homo sapiens
  misc_RNA (1)...(19): siRNA sense strand
cuaaagacauggauucaga

SEQ ID NO: 278499 - RNA, 19 nt, Homo sapiens
  misc_RNA (1)...(19): siRNA sense strand
aaagaugggugccaguuaa

SEQ ID NO: 278500 - RNA, 19 nt, Homo sapiens
  misc_RNA (1)...(19): siRNA sense strand
gaacuggaaagcucuaauu

SEQ ID NO: 278501 - RNA, 19 nt, Homo sapiens
  misc_RNA (1)...(19): siRNA sense strand
gaagaaacuugcuaaagac

SEQ ID NO: 278502 - RNA, 19 nt, Homo sapiens
  misc_RNA (1)...(19): siRNA sense strand
gcggacagcugaagccaaa

SEQ ID NO: 278503 - RNA, 19 nt, Homo sapiens
  misc_RNA (1)...(19): siRNA sense strand
gcuaaagacucggcauaaa

SEQ ID NO: 278504 - RNA, 19 nt, Homo sapiens
  misc_RNA (1)...(19): siRNA sense strand
cgaaagugauggaauugaa

SEQ ID NO: 278505 - RNA, 19 nt, Homo sapiens
  misc_RNA (1)...(19): siRNA sense strand
gaaauugugguuuggguuu

SEQ ID NO: 278506 - RNA, 19 nt, Homo sapiens
  misc_RNA (1)...(19): siRNA sense strand
ucaauucacuucacauuag

SEQ ID NO: 278507 - RNA, 19 nt, Homo sapiens
  misc_RNA (1)...(19): siRNA sense strand
gcucucugcugaaauagaa

SEQ ID NO: 278508 - RNA, 19 nt, Homo sapiens
  misc_RNA (1)...(19): siRNA sense strand
gaacaugaggcuacguuug

SEQ ID NO: 278509 - RNA, 19 nt, Homo sapiens
  misc_RNA (1)...(19): siRNA sense strand
gacauuaguucaucugauc

SEQ ID NO: 278510 - RNA, 19 nt, Homo sapiens
  misc_RNA (1)...(19): siRNA sense strand
agaaggaaauugugguuug

SEQ ID NO: 278511 - RNA, 19 nt, Homo sapiens
  misc_RNA (1)...(19): siRNA sense strand
gaauugaacagcuggaaga

SEQ ID NO: 278512 - RNA, 19 nt, Homo sapiens
  misc_RNA (1)...(19): siRNA sense strand
caaagaugggugccaguua

SEQ ID NO: 278513 - RNA, 19 nt, Homo sapiens
  misc_RNA (1)...(19): siRNA sense strand
ggagaugagcagcccaaua

SEQ ID NO: 278514 - RNA, 19 nt, Homo sapiens
  misc_RNA (1)...(19): siRNA sense strand
cauauuuaaugcccaguuu

SEQ ID NO: 278515 - RNA, 19 nt, Homo sapiens
  misc_RNA (1)...(19): siRNA sense strand
gaagccaaauuagugcaaa

SEQ ID NO: 278516 - RNA, 19 nt, Homo sapiens
  misc_RNA (1)...(19): siRNA sense strand
ggaagaacgacugaaauau

SEQ ID NO: 278517 - RNA, 19 nt, Homo sapiens
  misc_RNA (1)...(19): siRNA sense strand
ggacagcugaagccaaauu

SEQ ID NO: 278518 - RNA, 19 nt, Homo sapiens
  misc_RNA (1)...(19): siRNA sense strand
uagagaguguuaaguguga

SEQ ID NO: 278519 - RNA, 19 nt, Homo sapiens
  misc_RNA (1)...(19): siRNA sense strand
agacauggauucagaagag

SEQ ID NO: 278520 - RNA, 19 nt, Homo sapiens
  misc_RNA (1)...(19): siRNA sense strand
ccagcaaacuacaugaaga

SEQ ID NO: 278521 - RNA, 19 nt, Homo sapiens
  misc_RNA (1)...(19): siRNA sense strand
caacuaaagacauggauuc

SEQ ID NO: 278522 - RNA, 19 nt, Homo sapiens
  misc_RNA (1)...(19): siRNA sense strand
uggaagaacgacugaaaua

SEQ ID NO: 278523 - RNA, 19 nt, Homo sapiens
  misc_RNA (1)...(19): siRNA sense strand
gaaggaaauugugguuugg

SEQ ID NO: 278524 - RNA, 19 nt, Homo sapiens
  misc_RNA (1)...(19): siRNA sense strand
gagauuaaauacagugacu

SEQ ID NO: 278525 - RNA, 19 nt, Homo sapiens
  misc_RNA (1)...(19): siRNA sense strand
aagcuaaguuccaucuuga

SEQ ID NO: 278526 - RNA, 19 nt, Homo sapiens
  misc_RNA (1)...(19): siRNA sense strand
aaucugagguucccaguag

SEQ ID NO: 278527 - RNA, 19 nt, Homo sapiens
  misc_RNA (1)...(19): siRNA sense strand
uaagugugauuuggagaaa

SEQ ID NO: 278528 - RNA, 19 nt, Homo sapiens
  misc_RNA (1)...(19): siRNA sense strand
ugaguggcauccagaaaga

SEQ ID NO: 278529 - RNA, 19 nt, Homo sapiens
  misc_RNA (1)...(19): siRNA sense strand
cuagaauccugaagcuuug

SEQ ID NO: 278530 - RNA, 19 nt, Homo sapiens
  misc_RNA (1)...(19): siRNA sense strand
cagaagagaaggaaauugu

SEQ ID NO: 278531 - RNA, 19 nt, Homo sapiens
  misc_RNA (1)...(19): siRNA sense strand
gcaagucaagagaaugaaa

SEQ ID NO: 278532 - RNA, 19 nt, Homo sapiens
  misc_RNA (1)...(19): siRNA sense strand
gaaacuggcuaaaauuaag

SEQ ID NO: 278533 - RNA, 19 nt, Homo sapiens
  misc_RNA (1)...(19): siRNA sense strand
uaccgaauacucauugaua

SEQ ID NO: 278534 - RNA, 19 nt, Homo sapiens
  misc_RNA (1)...(19): siRNA sense strand
uaacuagaauccugaagcu

SEQ ID NO: 278535 - RNA, 19 nt, Homo sapiens
  misc_RNA (1)...(19): siRNA sense strand
uguucaggaugcauauuua

SEQ ID NO: 278536 - RNA, 19 nt, Homo sapiens
  misc_RNA (1)...(19): siRNA sense strand
gaaagagcuggaucuggaa

SEQ ID NO: 278537 - RNA, 19 nt, Homo sapiens
  misc_RNA (1)...(19): siRNA sense strand
cagcaagucaagagaauga

SEQ ID NO: 278538 - RNA, 19 nt, Homo sapiens
  misc_RNA (1)...(19): siRNA sense strand
gacagcugaagccaaauua

SEQ ID NO: 278539 - RNA, 19 nt, Homo sapiens
  misc_RNA (1)...(19): siRNA sense strand
ggacuccgaaacaacagua

SEQ ID NO: 278540 - RNA, 19 nt, Homo sapiens
  misc_RNA (1)...(19): siRNA sense strand
ccagaaagagauuaaauac

SEQ ID NO: 278541 - RNA, 19 nt, Homo sapiens
  misc_RNA (1)...(19): siRNA sense strand
gaaagcugguuugaaaauu

SEQ ID NO: 278542 - RNA, 19 nt, Homo sapiens
  misc_RNA (1)...(19): siRNA sense strand
gcuggaagaacgacugaaa

SEQ ID NO: 278543 - RNA, 19 nt, Homo sapiens
  misc_RNA (1)...(19): siRNA sense strand
aaucuagacuugcaguaug

SEQ ID NO: 278544 - RNA, 19 nt, Homo sapiens
  misc_RNA (1)...(19): siRNA sense strand
uaaguuccaucuugaucga

SEQ ID NO: 278545 - RNA, 19 nt, Homo sapiens
  misc_RNA (1)...(19): siRNA sense strand
uaggagauguggugcuguu

SEQ ID NO: 278546 - RNA, 19 nt, Homo sapiens
  misc_RNA (1)...(19): siRNA sense strand
gcagcccaauaugcaauuu

SEQ ID NO: 278547 - RNA, 19 nt, Homo sapiens
  misc_RNA (1)...(19): siRNA sense strand
gagauguggugcuguuguc

SEQ ID NO: 278548 - RNA, 19 nt, Homo sapiens
  misc_RNA (1)...(19): siRNA sense strand
gaaacaacaguaggagaug

SEQ ID NO: 278549 - RNA, 19 nt, Homo sapiens
  misc_RNA (1)...(19): siRNA sense strand
gaccugagcgaaagugaug

SEQ ID NO: 278550 - RNA, 19 nt, Homo sapiens
  misc_RNA (1)...(19): siRNA sense strand
acuagaauccugaagcuuu
